United States Patent Application Publication US 2011/0191912 A1 - sequence listing, part 21

SEQ ID NO: 34466 - DNA, 3003 bp, Unknown
  misc_feature (1)..( 3003): 2750-1469P.txt file - cDNA_ID_3078493; gDNA_ID_2684234; Annot_ID_192361
aatatatagataggaagaatacgaagaaatagttggcattgcaagaagaagacatgatgagtcttgtcttggtaaatttgttgcataattggatatatataaaagattttcttgaaatgatgacatgacaactatttctgaatttagccattgtcaaaagctctcttcgttttgaagcggtagaaaattagaaatgtttatgtttagccaaattcaaaagtagaggagattccttgaatttctgttttctctcgctgtcttctcaatattcaaaactcaaattggtgtcttctccaatttagaaaacgttaaaaacaagagaaaataaaactaaactttttagaaccaaaaaaaataaaaataaaacgcatttgggatttctcattgtcatcccaagttcttggaacagccaaatactttttcattattagtttataatcgtctcataaaggcaaaaaggtttatttcggaaataagatgggagcatatagagcagaagacgattatgattacctcttcaaggtggtcttaaccggagattccggcgtcgggaaatctaatttgttatctcgtttcaccagaaatgatttcagccacgactcacgtgcaaccatcggtgtcgaattcgccacacgaagcatccaatgcgatgataagatcgtcaaggctcaaatatgggataccgccggccaagaaaggtacttacactctaaaattactctcaaaagttatttaacgtttgcatgatgaccaaataaaattttaaaaaattaggtaccgagccatcacgagcgcttattaccgaggagctgttggtgcattgcttgtttatgacgtgacgcgccacgtgacattcgagaatgttgagagatggctaaaggagcttagggaccacacggacgcaaacattgtgatcatgctcgttggcaacaaagctgatcttcgtcaccttcgagccatctcaaccgaagaagctaaagcttttgcagagagggagaatacctttttcatggagacttctgcacttgaagctgtgaatgttgataatgctttcactgaagttctcactcagatttacagagttgttagcaagaaggctcttgaagctggagatgatccaaccactgctttgcctaaaggacagatgattaatgttggaggccgagatgatatctcagccgttaaaaaacctggttgctgctctgcatagacacacttctcacttttttcttgtacttttattactaaacactaacatttttcaatattttcctgcaaatttgtatacattcttggaattatcagacaaacaaagttcacactcaaaagtttttttagtttcggttccactctttacaatcgcttgcttcgtgctctctctgcttctaccgatcgatgtacttctgaatgttcatgaagatgttccattgttgacgcgctcctttttccccatctgcaaatagaggttaaaacagcctaatcagtttatatcatatgagcgtgaaatcttaaaaattgtacttcaaaatgtttctttcaactgtgagttttgtctagtaatgaaaaagctaaagccaacatggaagcagaagaagaagaattgcagattttgagtgcaacacaaacttaggaattatccaaacatacttggtacttgagaaatggaccttccatattctgatatttcatgctaatgtactgaaaccaattgcgaaaacagaggactatggaactcatttataatatcactttgtatggattctatatatgtgagtagcaaaatgaacctaaccatgaaccgtcttcgcttttttttctgcataaagttggataatattcagctcaaagaaaactagattctgatcttaatcatctataagtaaacaaaacagagtccatacagatttcgatatcttaggatcaagcaaagagtagttcaataagaaccaaggatctacataaagttataacaatcctaaaatgtcaatggcatactagagcaaattcaacaattttcttaatatcagttacactagaacaaagacgaacttcgttccaattccctaatcctaaactctcataatcaagaacaaatatcaaaccataacaattgagttactcagtttgaaaaaaacgaatctcaccagagaaaaaacgcagatacggaatcatttttcttcatcgcgaggcttagaactcgattgaagagaaggaagaggattagagcccttgatgatccaaccgagtccgaagaaaaaacctccagctagaatcgcagttccccaagcgtgtgagtaccatttactgtattgccgaatcgcgaatttccattgctcccttaacgtcgcctgatccggattcaccgactcaggcgggttataataccttttacccgaacccgatccgatctccggcgtcggttttttcgccgacgaagaagtattgttgttgttatcagggatttggctcttctccgccattgtcgtcgtctagattcttttcttcagatgttgaaaatcattttcagaaaatgtgtatttaactctaaagccactgacacgtgcaagataatgccacgtggcagtttctcgtactaaaacgattccgtttcattgtttcgtctacctctaaccccaccttagggttttagtactctctgtgatttttatctgttcgtcaatggcttccatttctactgcttcttcttcttcttcacttctcttcccttctcgaaatttcaaatcgattccattacttccacaacagagaagctctgtgtctttcgttcgctgtttttctaagaattcttcaacagaggaggacattctccgtttcgtggccgaatctgatgggaaggcacttccatgtgtgcggacgtacgagaataattcagctcggctcagtctcgttggtactgttgcttttgatcaggctttaaccgctgctgctgctgacggtggtgaagccgccgatgaccatcttcgtgagaatgttcctgttatg

SEQ ID NO: 34467 - DNA, 3003 bp, Unknown; identical to SEQ ID NO: 34466
  misc_feature (1)..( 3003): 2750-1469P.txt file - cDNA_ID_3078493; gDNA_ID_1620819; Annot_ID_169416

SEQ ID NO: 34468 - DNA, 3003 bp, Unknown
  misc_feature (1)..( 3003): 2750-1469P.txt file - cDNA_ID_3078500; gDNA_ID_1620819; Annot_ID_169400
ttggattacactaaattaaaagtgattaagacgagagactagcccatttgtatccatgcataaacttaggtgtctttttatacgtggcactaaagtacgacttagccatctaatctaaagtggaagtttctgaagttacttcattgaacactcaatagtcattaataaacctgaccattttcctcaatttactaataggcgttgggataatacataaaatccaataactaatgcctcaaactctgcattagttaaagattctaaaaattgagtaatagagacgacaattctcctatggcttccctcatactatcgcgtgcgtcacatatctccataaccgtttcataattgttctctttctttttcactcattttataatggattagttaaagaatccatttatatgattataataagtaaggaaggccaaatagaaaaaagaaaaagcaacgaaggaatatttcgttattactagtttcacgaattctatcatcgaagaatccaatttcgtgatggagcctccaacttgtctgacgtttctgccgttaacttctttttctcatttctctctttcttactggcataataaatgaaatccaataattgccacatctcttgcattattcaatgatccaaaaagactttaaaaattgagtgacaaagacgaacgaagaccacgactagctcttcccatggcttcttcactgaagaagcttatctcaagctttctacttgtcttatactctaccaccatcattgttgcttcatcagaatctcgatgtcggcgctttacatctatcatcagctttggtgattccatcgcagacaccggaaatattctccatctctccgacgtcaatcatcttcctcaaaccgccttttttccttatggtgaaagcttcttccatcctccctctggtcgtgcctctgatggccgtctcatcatcgacttcatcggtacctaatatttcctctgtttaggcaaaaccacttgtaatcatctatctgctttaggtctatcttgcgtggaaagcaagatagaaaccctacttcacctgagtttttctaatattgtcttactatttgaacagctgaattcttgggactaccgtatgttccaccttactttggatcccaaaacgttagctttgaacaagggatcaatttcgcggtgtatggagcaaccgcattggaccgagcgtattttgtggcaaaaggaattgaatctgatttcaccaacgttagtttaggtgttcagcttgacatcttcaagcagattttgcctaacctttgtgcctcatcttctcgtggttagaaactcagccttttattttgataaacagaaacttagccttgttcttacagggtttctttatttttgtgtttagattgcagagagatgcttggagactcgctgatactcatgggagagattggaggtaacgactttttttacccatcctccgaaggcaaaagtatcaatgaaaccaaactacaggatttgatcatcaaagctatttcttctgcaattgtggtaacaaatctttacacaaatataatcacatatctgttttatactttaacaaattaagcaaccaaactacaggatttgatcgctttagggggcaaaacatttttggtacccggaggcttcccagcaggatgttccgcagcgtgtcttactcaatatcagaacgcgacagaagaagactacgaccccttgacaggttgtatcccacggctcaatgaacttggagagcacgacaacgaacaacttaagacagaactcaaacgactccaaaaactctatcctgatgtcaacatcatttacgctgactaccataactccttataccggttttatcaagaaccagctaaatatggtccgtgccacttaaaactctttcgttgaccctcatggtttaattcattaaccgagatattgttttgtttttttcattagggtttaagaacaaacctttagctgcttgctgtggagtcggaggtaaatacaacttcactattggtaaggagtgtggatacgaaggagttagctattgtcaaaatccttccgagtatgtgaattgggatggttatcatttaaccgaagccgcctaccagaagatggctgagggtatactcaacggtccctatgcaactcctgctttcgactggtcctgccttggctctggtacagtggatacataaaaggagcagttagaattcatttgttgtaaaaaaaaaaaaagaggaagaaaattgtgtgatgatgattaacaaaaagattgcttgtacggcaggatttgactagtgacaaaaatttcgaggatatatgcatcaatcttatcaatgaaaaataccacacgcaaatagaaaatcctatttatacggttcgtagcacgagttgcatgttgagaaaatcctatttataacagttccgtggaagatgttggagaagttttggatgaattaagagggacaaacgacagctaaggattaaataatttcataacatcctttgaactgaaagattaagaacataatacactatttgggaaaacttaaaatactatattacaatggatggatataacagatgagaacatgcatgtgaggttcattgattacacattcatttaaattttgaaaaagttcaagattctatatataaaaaagaaaattatttaaaatttcttatttggattacactaaattaaaagtgattaagacgagagactagcccatttgtatccatgcataaacttaggtgtctttttatacgtggcactaaagtacgacttagccatctaatctaaagtggaagtttctgaagttacttcattgaacactcaacagtcattcataaacctgaccattttcctcaatttactcattggcgttgggataagacataaaatccaataactaatgcctcaaactctgcattagttaaagattctaaaaattgagtaatagagacgatgacgacgactctcctcatg

SEQ ID NO: 34469 - DNA, 3003 bp, Unknown
  misc_feature (1)..( 3003): 2750-1469P.txt file - cDNA_ID_3078507; gDNA_ID_1620819; Annot_ID_169390
tccctaatttggttctcgaatagcctgaaacttggattcgctcgcacgacctaaggctaatattcagagctggctcgccgggaccaacacttttgagcgccgccgcgtaggataacaagagaaagacaataagaggaaggagaaaccagattcgatgaggaagacgaagaaaagaagaagaagtagtcattgccaccaccgcgaagcaaagacggagcaatgataagcgaccttttagggtttaattttaatatatagaagaaatttgacgcagaattcttaattggtgccgttgttttgacgcagaatttaattggttccgttgttttgacgcagtttcggtttagttaaaccagattgaattaatttattttgatgcagtttcggtttagtaaaccatatatatagagattcacggtcgtggcttgtcgaagtttccaacagatgtgagcgtatccattggattattcgttgtccggtttatttgctgactcatgaggcactcgcccaccagttgttcgacgaaattcctaaaccaaaaaatttcgcccacagagatttagattgagtctacctgaaatgtgggataaatttcgtattttgcgtgaggtttcgcggagtttagagaatcagtggcgcactggcgcgtgatgcgttttcttctactcttttgggtacgtattcgctctttactgctatggaagtgtgtgttgcttagttttcgtctctcttagcttccctaggttaaaatctaatacggaaatgtctctgtattctataattttgacttttgagctggtaattaggtcttatccttaaaactaagtgaagggcattctttgaatagaacctaggacctctcgctgccaaaagaagaattatattcatggcttgtcctaaatgctctgttgctgatgtaattgggttcaagcattctgttttggtgtttaaaatgcttttttgaaaaaggaatgagctttttactgtaaatttacacccaaggcttgtcctattgaagggtctcgtgcttgaaggaatctggaaacttatagttggtttaaattcagtctgttttatttctttatcttgaagctgttactgagacctatcagttgagtttatggtggattgtttgtgattctgatgttgtggaagttactttttaggtgaatcaacaatgttcaaatgatgtatgtgatctgttaaaagtccgatagcaaatacagattgtatgcaataagtcttggcaggcatttagagcatatgttttacaaaaagacaatggggcattccgagaatcgaactcgggacctctcgcacccaaagcgagaatcataccactagaccaaatgccctgttttcttatccttttgatcagttctttatcacaattcgtttgctgttttctccagctcattctttttggatctggcttcttacaaaagatgacagtcccccctacatgaagtttactgagaggacgtgacaacggtatgctcttatattccattgcattaagcactaataaaaatttaaggtgcattttgtttgtattttctctagctgaaatgaaagggtaatatgtggttcttacttggatcatgatctacgatagaactagcactgaataaaccaatttgctgcttgaatttagatcatttaacaaaaaagtcaatggggcattccgagaatcgaactcgggacctctcgcacccaaagcgagaatcataccactagaccaaatgccctgttattaagcaatttagtttaaaagttgtagatttggtcagattttgatcctgttgtcttagttgactacaaaatgaatattttagtagtaggatgttcctagttctaatctatgagatctcttaatctctttcaactgaaatcccagtcaatttttctttgcatttttgtttgaatatctggtttgtattgtagtactacgtatggaaatactccagaaatatattggtccagttgtttaaacctctactgctaaaaatcattagaagagttagtcctatgattttgtttgttttaacagttgactgatcattctgccatatcaaatgcttagctattgactgactctctagacaatacccagagttgctgaagttaaaggtaaaaactgatagttgaactcctgaatgtgatctgtgaaaacctggcaccaaatattaatttctatgcaaaaattctgaactggaacttacaatgtatggtttcacaaaaagtcaaaggggcattccgagaatcgaactcgggacctctcgcacccaaagcgagaatcataccactagaccaaatgccctgtttatatgttgttcagttaatgcctcctataagcaatttccattttgtttcagtgatttttttgctccgtttgcttttccagtagatactcaatcgaacatccatttctgcttatgcagctcatttttggtgaagctggctgcgtacaaaacattatggtcccccctttatgaaggttactggttaaaaagatttgttgattgtacgtgaagaccggtatgttcttcttttcctttggcaccttaactaacttactgaaatgagatggtaatatatggttcttacttggatttgattgcgaaagcactaggactaaataaagatcttactcgggacctctagcacccaaagcgaaaatcataccacaaggccaaatgccctgttgtatatgcattatggttcaaacattttctatgctcgtctatacttttaaaacttacagttagcttagattcagtctattatacatctggtgcttgaagatgataattgaaccatctgaaattccatcagttgactttccggtggattgtttgtaaattagtgttggtggagttttaggtagatacacatcgttgaaatgatgaatgtgatctgtggcaaatccagaagcaagtacaaagttgtatgcaaattagtttgagctggcatttagaacgtatgttttacaaaaagtcaatg

SEQ ID NO: 34470 - DNA, 3003 bp, Unknown
  misc_feature (1)..( 3003): 2750-1469P.txt file - cDNA_ID_3078558; gDNA_ID_1620820; Annot_ID_169434
taatctatgtgaattgtttttaaaactgttgtattttaaaattagcatgttttgaaagttgcacaaatattttttttctaaaacaatatacgttaaaaaaaaaccaatatatcacaaatctcatccataatttttttttctgtttgtttattatattcacaaacgtagatatattgttttggaatcaagattgtgttctatattttaaattgctaaaaatctgttttctcttttcttattctctaaattctcattttaattgttttttcgattatgtataaaaaactgttttgttaaaaatcgaaaattcattttcactaccccaaccaacccacgatctctccgtatctactcaaataaaacttgtagtattcccaaaattattgtatataaaatcagaagttccataaaactcttccttaaaaattctccagaaacatcaattttcacataattcttaaaaggatgccaaccatacaactccgatgaatatgagttatacgtgtacttctccaacacaaaatcatattgatccttatatgttcatcttctaaacctttccaagacgacgaagaattgtttttctgttcttatttttattattttgtatttctcattttctcacccatgactctgattttctatttattggttttcatactcagaaaatctccacagtgaagaaacaatgtcaccaaaacaatggaaaagaaaaagcttggacaagaaacaagatgtgtgttcttgaagaaatcatacctagatcttgaactaattaagttcatatcactttcttttttttttttgtatgtgtaaaatctctaatgaatttattaactgcgttaaatttatgtttttgtcttttgtaattgacgttctggtataattatttgtaaaaaaaaaatagaaaagatttagtagatattgaaaacgattttcctatataaaattatttaaaaacgaaacaaaaatatttaagataataattctgttataaattttgtagtttcttttaaccatcgtttattgaaaaatatttaacacaaatattaacatcaattactattaagtgatgtaaataattgaaatcaattctcttaattgacactaatactaacatcacttaaataaatagatgtaaaatttaacattatttttttcaattgacacatattcatatcagttagaataattgatgtaaatattttatatcttaacatcggtcattaattaactgatgtcaattatttgcatcaacaatatataagtcatttatttaagtgatgtaaaattcttttacatcaattataagtaatacaaatattcaaaataaatgatataaaatgacccttttttgtagtgattgcacaatgttttatagaaagatgaatatacatatatcagtttattgtttttggatctagaacttttttttcttcagtctcaaatattatatgtgactccttttagaatggcacacattataaattaagaaaaaggtattggctttaaaaacttgtactaacatatgctaaaacaacagtataaacctctttttgtaaaacaaataacacacaaatatctatatatattaataaatcatcaagcttttcacgacccactcaaagtaatcatgatcactcatactcatctgatctttatcattccaacaccacgccaccgttttaccaaaactaaacaactaaaagagcatctggttccgatttctcataattaagaaggagaaaaaatgctacatgtcaattcccatctttacaataataaattcgtgaaagttaatgtgatggacagacagtttagtgtacgggtacatgtcaattgttgggaatttaacttacaaaatataaaaagagaaaagctagctctaatatatgcgatggggggactcattaaaagagattcgttttagagttagccctaaaacttaattctgcgcttttgacatcacattcaatcccgttgttgttgtttttgtatgtgacacatatcaattgattgataacacgtgtcacgattgtgagccaaatttgatataataatatgaatttataaatttttttccttttttacctttccaacctaattttagtcctaatttttgtaatttttcaaaattttcattcattcaaatcatttattttctattaaaattttgtttttattttttggtatagaaaatgacttttaaagttaaaacaaaaacctcaaaaaaacaaaaaacaaaaaaaaactttgtaaactttcaaatttttcattcatcatatcatttgtttttccactaaaatttctgtttttctttgtctttgtatacgaaaatgacttttaaggttaaattaaaaaaccttaaaaaaaccaaaaaaaaacaaaaaaaaacaaaaaaaaactctttaaaattaggtaaaagttgaaaaaagacaaaacgttatattgccgaaaaaaggaatattaataattaaggccctaagaacatccttattggtaagttcttaaattagttcttatgataagaacatctcattttaactcttatataagagacaaaatgacatttatataaaagacaaaaaaaaatcccaagaactaatctaagaacttaccaataatgatgctttaagcatgcaaatgatatcattttaagcacaaatagtaatttatattgggctgataggcccataaactgcattttattggtaaagttttaggccccaagcatgtgtagcaaaatatcattttaagtcacaaatactcattcatattgggctaatgggcccataaacttcatttttatttgtgaagttaggcccacatattttgtaattcttcgtcttcttccacttttgtctttgagccgtcgaacaaaaacaagtagtctgaagacaaactacacaaaacccttgaggaaataaaactgcaaaattgaaattagggtttatactttaaagcagtcaccaaatccagccaccatctcttgctgaagccatg

SEQ ID NO: 34471 - DNA, 3000 bp, Unknown; identical to SEQ ID NO: 5822
  misc_feature (1)..( 3000): 2750-1469P.txt file - cDNA_ID_3078565; gDNA_ID_1620820; Annot_ID_169427

SEQ ID NO: 34472 - DNA, 3003 bp, Unknown
  misc_feature (1)..( 3003): 2750-1469P.txt file - cDNA_ID_3078585; gDNA_ID_1620821; Annot_ID_169497
agagttcttagatcttcaggttttatgtttcgagacgaatgggctaatgttatctctggttagttgtttttttttcttgaatcaattcttcattttggataagttgggaaatgtaatcattgggaaatgattcaggatctgatgaaggtatatattcttggattactgccaattacgcacttggttcgcttggaactgatccgttggaaacaacggggattgttgaactaggcggtgcttctgcgcaggtttagtcttgtctctctcgttggatgctagagtactagaccatgcatacatttacgctatatatagctggctttctctttttctttgtataaatgtaggtattttccgtccaattttggcagaaaaaaatgatttgactttttttttttgatataattttcatcacaaattttgtaatttaagacgttttttgtcgcttgatgattcaagattgggtttagatttttttaacaaatttgaaacgaacatttttgatgcaaaaattggtttgaaaaacgaacaattccggattaagaaactaacaacaaccgaactatactgcatctagatctgaatcttgatgttgactttagatgtacgtccggattaagaaactaacaacaacagaactatactacatttggatctgaatctagatgttgactttgtaacatatttttagacttcaactgtggtatatggtcgaattgttagtgatgactatttgtgcatatgtttaggtgacatttgtgtcaagtgagcatgtgcctcctgagtactcgcgtacgattgcctacggaaatatttcatacacaatctacagtcacagcttcctcgattatgggaaggtaacttttgagacaagaggatttgtgtctttgattccttgttttttaaaagttgtttggaaacgtattaatcgctgaattttatttcttttctttttctcatcaaaattgtagataataatgctaccaaatttgttaattttcaaaaaagctattaacttttgtctccttccaggatgcagcactaaaaaagttattggaaaaactccaaaactcaggttagttgtttttgataaattgttataattgcacttttgagttcatgtaattgtaataatattatttttctctcaatactcatcttcggtgttacaattcatatagctaactctacagtggatggagtagttgaagacccttgtactcctaaagggtacatctacgacacaaattcaaagaattattcatccggattcttagctgatgaaagcaaacttaaaggctcccttcaagctgctggtaatttctcaaaatgccgatccgctacgtttgcgcttttgaaagaaggaaaaggtaaacaaagagcattattggtacgtatagctgaatgttgttcctcgtatcgatttttcttgatctcttatgggtgtagttttgttcctttgtgaacagagaactgtctatatgagcattgttctattggatcaacattcacacctgatcttcaaggaagttttttggctacagcatctttctactacaccgccaaggtataatcccatgacgtcaagattatatgtatgaatttgtgggggagaaattgtttgaacattaatgtcttatatattttcctgtatgaaattaatctgaatcagttctttgagttggaagaaaagggttggttgtctgaattgattccagctgggaagagatattgtggagaagaatggtcgaaactgatattggaatacccaacaactgatgaagaatatttgcgtggctattgtttctcagcagcatatactatatcaatgcttcatgatagtcttggtattgctcttgatgatgaaaggtaaaatttactgcacaaattcaagaacattgtaagattaatcaaatgtgggtttttttggacaaagatataaacaaaaactatacgtttgtttttgtttgcagtatcacgtatgcaagtaaagcaggagaaaaacacataccactagattgggcattgggggcttttatactagatgttgtaacacccaattctgattacaatggtaaatctagaaaatatcttggcttttaagtaacgtagccaaatacaaaatatgaaatcatagttttgtattttacgttaaactgtgtttgaaagtaactatcatgtcgtcgttccttttcatgaaataagttagctaagttcgtaggtgtgtatcttcccctgcatgggatcgactcttctcgtttgtgggattgtattattgtaataaaactctttgtttggtttcttctctcaataatattgttacaaagttgacgagtacaaaacaaaaagaggaaggaaacaaattaaaaaaaaattactcataagaaaaagagagagaccaaattaaagtagaggtggtacataataacatgaaattcaatattgtttttttgtttttttgttttcattctgattttgattatggacacgaaatctaagattacagagcaattatgaatggtactgtttaagaaatcggcccacagcgagtgatgatatatgatcctttgttcgcatgtccttctgttttgcacacgttttgtaaatgtgcttttactttctttaactattaatttaggtgtacaacaaaataatagattttcaaataccagttaccactagtttcttatccctggaggattggttacgtgaaatatcttttaggtctaaagactagagcttgtagttataggtcttcctctggactcctatttctcagttctcactgattataaaatcagattctagactaattaagaagaacaggcaaaacgaatttgctattggcccgttacgttttttttcctttaaataatttttacgttttttcactacgtttattgctattgctataaatttatcttctcagttttcgttagagagtcttaaatgctgatacaatgtttgtatacgttccaggttggaaaaaaataatcggatatg

SEQ ID NO: 34473 - DNA, 3003 bp, Unknown; identical to SEQ ID NO: 20851
  misc_feature (1)..( 3003): 2750-1469P.txt file - cDNA_ID_3078589; gDNA_ID_1620821; Annot_ID_169496

SEQ ID NO: 34474 - DNA, 3000 bp, Unknown; identical to SEQ ID NO: 5844
  misc_feature (1)..( 3000): 2750-1469P.txt file - cDNA_ID_3078598; gDNA_ID_1620821; Annot_ID_169493

SEQ ID NO: 34475 - DNA, 3003 bp, Unknown
  misc_feature (1)..( 3003): 2750-1469P.txt file - cDNA_ID_3078601; gDNA_ID_1620821; Annot_ID_169492
ccattaaaccaaacaatcccttttaatcagacaaaactctgtctctcaatctcaaaatcaagattgacatgtctcgttttgtgcttctctttatcatttccacattcattaatctgtcacaaggtattaatgtagagtatcttcttgtttgaaacaaatatattatatatgtgcaataaggtttttcattagatgttgtttgatgttttcaggagcgcaaatgccttacatgaccacagatgctaaagaagtttccggcaagtcattcgattacatcgttgtaggtggcggaactgcgggatgctccttagccgcaactctatctgagaaatactctgttcttgtcattgaacgtggtggctcaccttttggtgatcctttagtagaggaaagaaagtactttggatactcattgctaaatacagatgaatactcatctgttgcgcaaagttttacctctgtagatggaatcgaaaactacagaggacgcgttcttggaggatcgagcgctataaatggcggattttacagccgagcaagcgatgagtttgtgaagaaagctggatgggacaagggtctggttcaagaatcttataaatgggttgagtctaaggttgttttcatgccagaactgactcaatggcaatctgttgtgcaattcgggtttcttgaagccgggttttatccatataacggatatagtttggagcacacgcaagggacaaaaatcggtggaagcatatacgatcagtgtgggaaaagacatacatctgcagatcttttgggatttggtaaaccaaattgtataactgttcttttaaacacaacggtaaagagcataatctttgatagtagtaataagactcgtgcggttggagttaggtttatggagagtgatgggaactcaagtaagagctacaaagttcatgttgagcagcatagaggcgaggttatactcgcggctggggctttaggtagtccgcagattcttctcttaagcggtattggacccgagaatcatctaaaggatttcgacattcctgtgattgtcaatctcaaagaagtcggaagaaaaatgtcggataatccagcgatctctcttcttgttgatagattctcgcaaaaccgcacactcgagccacctcaagttgcagcaatagcagaaggttacaaattcatactcgaatccgaggttctcccaactgacattaccacaacaagaatctctatagcagccaaaatcgcattccctaaatccaaaggaaggctcaagcttaacagcactaaccctagggagaatccgtcagtgaaattcaactacttggaaaacaaggcagacctcgacgcatgcctagagatggttctgcatcttcaacatgtagcgaggtctgagactgtcacgttcttcttggggacacaagctcatgataagcttgtggcgggtgacgaagagcttaaaagcttctgcataaagaatgttagaacttattatcattaccatggtggttgcgttgttggatctgttgtggacgaggagtataaagtgaatggtgttaagcgtttaagagttgttgatggttcaacgtttgaagaatcaccaggaacaaaccctatggctactgttttaatgctgggaagatatcaaggaatcaaaatactcaaagaacgagaagagcaagaagatacatttcttagccctcaaggtagcccacaaccacagccataacacattgaaatctttgtttctgttgtagtttgcttcaatgagaaagaatcaagttgctgattaatacttacaacttaagcaaccaattttattgaattcgaaattgatttcagtaaacgaaaacgaaactatacaaaacattctagcaaacctaaacctaaacctagccccatgttgcatcttgagggttcgagtcacttttaacttcttcttcctccgtcttcttagtttcttctgtcgccggcgttaatggagaaaccaatccaaatcccaatcttcttctcttcttcaacttcttcaacaggcatctcatacctacacataggacacgtggcgtgcctccctaaccactcctccacacactttgagtgaaacttatgtttacaaggcatctccgccgccacgtcacctttagaccactcatccaaacaaatcgcgcaagaaccaccatatttctccttatcttctccgatcacgacacgtggcatattctccacttctgacttcaacgccggcgacctcccttgttttccaccgtcgctaaagaaatcgtcgagtcccgatcgcgatccgatcatcacgaaccttggactcaacggatctccccgtctcgttgtttgatcggtagatccttggtcatcatcgtcttctctggcggctaaagctacaatcaccggcaaaaatcgagagagaccatcacctcttccttgtataattctctcgaacatagaagaaaactcaacgaaatcattctcagaagacatcacgctagtacccaaaacaaagagaaaaaaaccgagacttttttgttaagaacagagaaaaggagcgaactttcttggagaaaaatctcttaagaagaagaagaagaaaagtcgaaagataagacaattgaaattggagaagatagtgtttgagattatatatgttagcagaagattacagtagtttcatgaaaagaaagttgcagaagactctagaaccattgacgacgcttaagactttccatttatttttagtttcttttaaaaacaatttagtatttattatttaaaaaccttatcctctttcataaaggacaaaaaggaaatagataattacgctgtgagaaattttgcataaaggtacgaacatttataattttatttacaaagttccagtttttttggagtgttgataaaacccccagagattattcctgcacagaaggtgtttgattaaattccgctgagggtaatgttctgactttcgatgctttacgaatgatacttggcatg

SEQ ID NO: 34476 - DNA, 3000 bp, Unknown; identical to SEQ ID NO: 5860
  misc_feature (1)..( 3000): 2750-1469P.txt file - cDNA_ID_3078611; gDNA_ID_1620821; Annot_ID_169486

SEQ ID NO: 34477 - DNA, 3000 bp, Unknown; identical to SEQ ID NO: 5859
  misc_feature (1)..( 3000): 2750-1469P.txt file - cDNA_ID_3078615; gDNA_ID_1620821; Annot_ID_169484

SEQ ID NO: 34478 - DNA, 3003 bp, Unknown; identical to SEQ ID NO: 20859
  misc_feature (1)..( 3003): 2750-1469P.txt file - cDNA_ID_3078636; gDNA_ID_1620821; Annot_ID_169470

SEQ ID NO: 34479 - DNA, 3003 bp, Unknown; identical to SEQ ID NO: 20860
  misc_feature (1)..( 3003): 2750-1469P.txt file - cDNA_ID_3078643; gDNA_ID_1620821; Annot_ID_169468

SEQ ID NO: 34480 - DNA, 3003 bp, Unknown; identical to SEQ ID NO: 20862
  misc_feature (1)..( 3003): 2750-1469P.txt file - cDNA_ID_3078647; gDNA_ID_1620821; Annot_ID_169466

SEQ ID NO: 34481 - DNA, 3003 bp, Unknown
  misc_feature (1)..( 3003): 2750-1469P.txt file - cDNA_ID_3078706; gDNA_ID_1620822; Annot_ID_169539
tcatgaatatgaatggatttttcagtcctagataaacaaaacaaaaacaagtataaatttatttctaggtcttgtgacttataagaaactaagaaagacaattatagatttgaaaacaccaagagcagaacccaccaaatgtttctttctacacatcatgttgtcgtcagaatggagcaaaacatcggaagacaaaaaccacaaaaagtaaaggtaaagagttaatatataaagatccaatgtatggtttaacagaaattaaaaactgagttaaagaatatacctgcaaaagaacttgcgtcatacaccagcggaaaccagacatgacagcagcaagcatgacaaaaacgaaaccccaaaactcaaattctgtctcctttgcaactgatggtgagaaaataacaagtttaatggctttgatttaggaaaaaaaattcaactaaaaacttctagatagattttgtagcaaacaggtccaggaacaacggagtacaaagcaatataaatgacaaagaaaaacatacctgttaacaacactcctgctgagatcactgaaataatgccaaaaagtttcaggcttggagactccagcctaaccagcgaaatattgtgtcaggataacacatggagtacaaaaaattgtaaagcacaaatcaggataaaataaacaattaatcgttatgtataaagcacctgaaggcaaaagcaaacagaagaagaaatattggggctgcagatttgcactgcaagtggaaaaaacacatgcatatcattagacaagtctcaccttgtttcacccgcaaattccaaagaagttgcatagacctaccatagtatataaaataactaaccattgttgcaaatgtaaccgatatgaagacaagtgactcgttacttaggtttatatccatagcagttccaagcgctgttggtacaactgcgaaaggacaggccatgtgggtaatcagtttatggaaatataatatattcaactttcgaaaaactgaaacagaaaaaacacactaaatcttcccctctcgtcctcactaaatactgtagatgataattgcattgcataaattgcagaaagttctcagtactatgtagtgagaataaagtagaaagtaatggctaaaggaatgccctggttttgttagtttacctctaacgaaatagtctctccatgatatggtaacatcaggctgaaatctccccgaccaataccatgttatcatctttgataaaacagcttgaatagaaaagtgaatggtattcattaataagggagcaggaaatttccctaaatcatctcctaagagagttttgttgtacctagaaaataagcaagtaaattaaatgctagttgtatggaattaaaagaagaaaaagaaaatgttagtcgcaaagacatacttacagagtcagaaatgtgctgaaagtgtaccatacaagtataaagaagagtgttttaagcacgtcagcaggagagatatctacttttgacgctttaggcaatgtttcaagggtatcaccggaactgtaaccaacatcaaaacttctggagccgtttgtctccttcccggtctcattttcaataccaaaagtctctaaaacctgttctctatctacatctccctcattggatatggtttccattgtaccaacacggagctgcactctttgctccatcaataatctgaactcaccagcaaaccttttcggcttccattcacagacaactgtgacaaagcatgcaatctagtaatccagcctttctttactcaacaggtatttaaaaaaacacgagtacccctgtaatggacagctctcttgcctcggaatttcaaggaagaaagttttatatttgacccatacgcatatgttcaaatggtacagtgtccaattctctctggcatatcccagtgggctaattgaattaggaacctaagatgttggtgaatatgcaatgcagttctctggaactacttgacctagaatcacaaacacaagctcaagtaagtcaagtatttctgtgagaaattcctctggagaaagtggaaagcaaagcaaacaatcacacaagagccacatttcaataaaggcaagcttctctaatacgccgatgcaaagattcaaaccgaatgaaaggaagctacatttaatctgataagaaccaaaagagttcaccgacagaagaaattgaatacataaaccattctttaacagggccgcttcaagaagagattaatacgtcactattggaacctagaaaaagcaaacacgtaaaaagaaggaaatctattcgaatgaatctgagtttcacgaaatcagatgtaatccaaatcaggaaaagctcaatgattctgagctcaaaaaaagtaacgcaacaacgaaaagagaactcctcgcaatcaatctggatcgggagtgagctcaaaattcatagattcaaagctaacgaacgcggactatgaaatcagcataatacagatagggaaaatcaaaatttcgccagaatggaagaaagagacctacaaagagagaagaatcggctcgttggatctgatcgaagctgcaggaactttgtgtgtgtgtttgaagatagattgattttggagtcgcaaccgcaggttgttggagtttggtgaatttttacgaaatcattaccgctcggagtctgcaatgcaacttgcatttacctttacacagattatatttgttttcacaagaattaataattttcatttttaatggagttcgcgttttgacaaaaaaaatattgaaccaaaaaagaaaaatgttttccaataaaaacgagtcgttgtcatttcttgtccgtttccggaagaaaatatcttttaatcttcaagcagatattttcgaatccagcgcgcgaagttaaagccactcatttgtttcatcgatcctacttcctcctgtgtcactgcaatcactcgctcgtccttttctctatttcttcaccgatcgaatcaatcagagatg

SEQ ID NO: 34482 - DNA, 3000 bp, Unknown
  misc_feature (1)..( 3000): 2750-1469P.txt file - cDNA_ID_3078710; gDNA_ID_1620822; Annot_ID_169538
ttttgacagatagatgtgcgtctacctgtcacagtcaagctgcagcagaacggtaagtacctttgttacacaatgcatttttactgtgtgagtaatgggaacagattgaaaaaagatgtgtatcagcaggattactttgtgttgtcaacctccactcttatatcattgatactggctcctggtagctctattgccacaacatagctgtgtgtcgattcagcaacattcgatctgggagaccaaacagtacctgcaaaaggaaaaaaacttctttaagtaagttctcatgttcatttgtacggatttgtttgaagtacggatgctagtttctgtagatcaaggctggtgagaaaccacctttagtagttatacctagtaatatttgtgtgtttgtaaactacagaaatcattaagttctctaagaaaagtatcaggttataataggactagaaaagtagtgttattggagtggaatacacctatatttgtattcgtacctaaattggctaacttaggaagatcaagcttaggcctttccttttgcagatttggtgataaagaaggaaaaaagatgtcctcttttgcaggcttagaaaagtgtggtgcagcgtacgcaggtgaagaagaatcgaagccagttgttttggtagcagaaaacttggtagatgcagcagcatcatgtggtatggtcctctgcaaaaaacattttgaatcaattctcttttacagaagtatagatgagaagagaaactttgaaaaataataataagaaattaatggtacctcattagtcgaagcctgtctcataaaaaaaccttgtgcagaagatgcttgccgagcaaaatacagcctgttgtcaccccttctaacgacagtgttcttcaaattcatacctaagttctgaatcatcatcacaagtgacagaagaggttaatggtgtgggcatatttacattacagtacagatatgactttgttaactaagtgtagttagacagtaagtgaccagagaagaaggaggagggacttcaaaacataataaaaaacttatggtacctcaaggacatcatcgggtgaagctggcctcataaaaaagccctgttcagatgatgcttgccgggcaaaagagattttgttgtcacacctttggatgacagtgttcaaactgctgctgcagttctgaggcataacacaaataagagatccattagaccaaaataaaggaatcagtgaaccaacctatttgaggcagagtcaagtataaaaaaacacatccataagcatgatatgactttcaataattgaacagtttgagctttccattgcaacacccttaaacgaaatcaaggtttaagccaaaatgaatcagactaactgttcttgtacttggtcgatctgctccaattttgcaagtaaatccacatcgagattcgagatcggtcaagggatcagaaaaactatctaaccaagttaagaaaccataggagaacgaaatacagaaagtctaattcgaaaaccgtcggatccttggggtctaggcttgcagataaggaaacgagagacaaaaagagaaggggaataccaaggggacgagagatgcggtggaggcggaatcgtaactggttgccgggaagtgagcggcgaaggcagcgagcctgcgtcgagcggtgatagattcatgctccatctctgattgattcgatcggtgaagaaatagagaaaaggacgagcgagtgattgcagtgacacaggaggaagtaggatcgatgaaacaaatgagtggctttaacttcgcgcgctggattcgaaaatatctgcttgaagattaaaagatattttcttccggaaacggacaagaaatgacaacgactcgtttttattggaaaacatttttcttttttggttcaatattttttttgtcaaaacgcgaactccattaaaaatgaaaattattaattcttgtgaaaacaaatataatctgtgtaaaggtaaatgcaagttgcattgcagactccgagcggtaatgatttcgtaaaaattcaccaaactccaacaacctgcggttgcgactccaaaatcaatctatcttcaaacacacacacaaagttcctgcagcttcgatcagatccaacgagccgattcttctctctttgtaggtctctttcttccattctggcgaaattttgattttccctatctgtattatgctgatttcatagtccgcgttcgttagctttgaatctatgaattttgagctcactcccgatccagattgattgcgaggagttctcttttcgttgttgcgttactttttttgagctcagaatcattgagcttttcctgatttggattacatctgatttcgtgaaactcagattcattcgaatagatttccttctttttacgtgtttgctttttctaggttccaatagtgacgtattaatctcttcttgaagcggccctgttaaagaatggtttatgtattcaatttcttctgtcggtgaactcttttggttcttatcagattaaatgtagcttcctttcattcggtttgaatctttgcatcggcgtattagagaagcttgcctttattgaaatgtggctcttgtgtgattgtttgctttgctttccactttctccagaggaatttctcacagaaatacttgacttacttgagcttgtgtttgtgattctaggtcaagtagttccagagaactgcattgcatattcaccaacatcttaggttcctaattcaattagcccactgggatatgccagagagaattggacactgtaccatttgaacatatgcgtatgggtcaaatataaaactttcttccttgaaattccgaggcaagagagctgtccattacaggggtactcgtgtttttttaaatacctgttgagtaaagaaaggctggattactagattgcatgctttgtcacagttgtctgtgaatggaagccgaaaaggtttgctggtgagttcagattattgatg

SEQ ID NO: 34483 - DNA, 3000 bp, Unknown; identical to SEQ ID NO: 5867
  misc_feature (1)..( 3000): 2750-1469P.txt file - cDNA_ID_3078714; gDNA_ID_1620822; Annot_ID_169536

SEQ ID NO: 34484 - DNA, 3003 bp, Unknown
  misc_feature (1)..( 3003): 2750-1469P.txt file - cDNA_ID_3078722; gDNA_ID_1620822; Annot_ID_169533
gccactgatattccacgacgggagattggctttcttgccaacaccattagctacattagccatgttcatatggctccctatcggatttttactcgctgtcttcaggatctcggtaggagtctttcttccttaccatgtagccaatttcttggcttctatgtccggtgttaggatcactttcaagacccataatttgaataacggtcgtccagagaaaggtaatagtggagtcttgtatgtatgcaaccataggaccctcctcgacccagttttcctcaccacttcgctgggcaagcccttgaccgcggttacttacagcctaagcaagttctccgagttcatagcacctctcaagacggttagccttaaaagagataggaagaaagacggtgaggcaatgcagagactattaagcaaaggagatctagtggtttgtccggagggaaccacatgtagagagccttatctactaaggttcagtcctttgttcgctgagttaactgaagacattgttcccgtggctgtagatgctcgagtgagcatgttctatgggacaactgcgagcgggctcaagtgtttagaccctatcttcttcctcatgaaccctaggccggtttattgtcttgagattttaaagaagttgccaaaagagatgacttgtgcaggaggcaagtcaagctttgaagttgcgaatttcatacagggagaacttgctagggttttgggatttgaatgcactaatctcacaaggagggataagtacttggttcttgctggaaatgaaggcattgtcagataaactattccgaattttcattagtttttttgtttgtttgaaaagctaaatattattgttatttcaggacttagatgtttaattctatatggttgattcattggcatcatttctatttcttatcactcgggaccattgatatgtattgaaaatgtttgctttatatgattttgtttctggatttgtatagtccataatctcaacctgtcgctttagtgccattaattttattcctagaacaaatgaaatgatttcagagttagttgaaatcaatattaattgtatacatctaatctaatagtatgttattcacttattatttacttaatgatgctcctaagtattgatatcacattaataatcatgatcccatatcacaacaacattaacgtgaacgaccatattaacttcatatcacatcaaaatttaatgtatcaccttagaagatattaatattcacaccaagaaaatgactatacctgtctaaacagaatgattaaagaaaggaaaattgctagattaacttttcataccaagagtggcttcctttctttagttcactgcgctggtaagtaatgcttgaagcacactaactgatgtttgcctctttgcaaatgatatttgcgattctacacaagcaaaacaaaacttaatggactgagtaattctgcagtgttagaagtaaaacttagtgatgctttgaatgcattacctttccctcacacgacgaatctcttcaagaatttctgcagtctgctgaaccttaagattcttgggtttatcttcatgattaagcaccaaggatgcaacatttacaacagtaactagttcagcttcgattctgctaagtttctggtctaaattttccaagaaagattcataagaagacacttctttcaggatgctacctattgaaacatcttctagtacattattattggtatcaagaagttcttggtaatcctcaacattcctttcaataagttgaattccctcagaatccaagtgagtgtggtcattttcgaccccgtcttcagtagattcgggctttggcgatacaatgtggataccacctgaagtattctctccatcctcttcgagatccaaagatatattgcctatcagctgtgtttccttgacagatattgcctgaaaccaaaccaagctttcaagacatagttagatagatttctggggcaattgaaaacaaacaaacaaccaaaacaataacatttcttaacaagtaagagtattgtttgtttgtacctcgttaagtttggaagaaagcgtatcgagcaactcgatacgagctttagccttgtccaaagcttgcataacttttttcttctgaagaagtagatctctggcatcattctctttccctgttcgaacattgacagctgcttgttcccgtagattctctgcagcctcagataatctcaaaagtctcaacctattactgtttgctggaccaacaacaacaaagaccaaaaataaatcaaattgacatcatcaatcactggattcacaagcagtaaaaccatgctgaaaccagcacctcatctttccaaagtctacgactttgaaatcacacattaaaacgaagattagcgaataaagattccacctttggcacgagtggactctgcctccgcgtgaagccgatcaagctgggagcgaagaaggtcagaatttgcggtggcagagaagcatctcaggctcgttggaatcctccgagactgagcaatcaccaccggaactccgccgatggtcgtcgtcaccatgtttggtcttcttacaaagcgcacacgttctgtgacattgcagtctccgttatccggttagttctacaaaccgattttgaatacctggttcatctaaaccggtaattaagactaaaccggggtgggaaaatgaattgaggatgagattagtatttaccgtgacagagttttccaactttgacgtctccgtcaaaatttgatttctcttctgtatttgacgacgacacttcaatcaaaatctggagtcagatacagttccctagatcgagaatctccaggcgctttgtaatcctgtttagtatatctttgtcaagttctctgtcagagatttaccgggtaaattttgaatcttggatcaggtttttgtcaatttcagatttgtaatctcccgcttcttactgtaggaatcgatcagaagatatg

SEQ ID NO: 34485 - DNA, 3003 bp, Unknown
  misc_feature (1)..( 3003): 2750-1469P.txt file - cDNA_ID_3078730; gDNA_ID_1620822; Annot_ID_169525
aaccgtatcgaaatcaaaagtattgttgctcaagttgcaactactacatgagcgtgccttgcattggtaaggttccctacctcctatgttgaacatgcactcaagttgcaaccaacaaagttgatccattatctgctctctgtgatcacttactatattgtttaagggttatataaattcaaaacagaggcttcctagtgttctggaattgttatatcttaagttggctgttctaactttgttaaatccattagtgggaatttaaaactagctcaacgaatatgtaatgagctaggaggcttggcatcaacagccatgggtgtagacatggagctaaaagtagaagcaagtcttcgtgaagctcggactttgcttgcagcaaaacagtatagccaggtttgtaaaaaagtcttattggccatctgttttttaagcccatgtgatatatttatttcaggccatgtgctatggcaatgttagtgtgtcttcattttgctttggtactacgttctctacaggcagcaaatgtggcacactccctcttctgcacatgtcacaaattcaatttgcaaatcgaaaaggcgtctgttcttcttctgctcgcagagatccataaggtaagacatggctacaagaaattactagcttgagagcacattgattggaatctgatattccattgaaaatatgttccgccttatcaaattgcaatcaaaactttttttttttttctggaaatttgttccgttccatgcatacatagctaacatccatctatatgttctgaatgtgctctttctttgctgattgctcttagactacatagaaaagtgttgtactatggtattatttctaatcttttattggttttctgaccggcggccttcacctttcgctttcccctttttgggttctcagaagtcaggaaatgctgtcctgggtcttccatatgcgctggcaagcatctcgttttgccagtcattcaacttggatcttctcaaagcatcagctactctcactctggccgagctttggcttggtcttggatcaaatcataccaaacgagcattagaccttttgcatggggctttccctatgattcttggccatggaggtttggagttgcgtgctcgagcttacatctttgaagcaaactgctatctatctgatccaagttcttcaggtagcttttgtgtcttgtactgctttgacgaggatgttcagaacataattgaatagagcctgactgttatggataaaggttgatcttgttagttgcgagtttctaatttgtttactgttgttaccagtttccacagattctgacactgtcttggattctctaaggcaagcttcagatgagcttcaagctttggaggtataacttatgtcaataagagtgctatgtagctttttgttcaaaaacaaacctgagcactatattatcgccacatcattgcataagagatgaacaaacaaacctgagcactatataattgccacaacattgcataagagatgctatgttgcttttgattcgaaaataacaccaaactcttataactaggttcagcttcgtttagctcatcataactctcctagtaccgtgatttactgttggttcacttagtagttgtgtttattgtgcagtaccatgaactggcagcggaagcctcgtacttaatggccatggtatatgacaagttgggacggcttgatgagagggaagaagctgcgtctttgtttaagaaacatatcatagctctcgagaaccctcaagatgtggaacaaaacatggcatgagatgttgtgaaccttatttaataagcttattgtgcaaagcttgtaacttaaagttgtaatcatggtccttaccaagactcgttctagtgtccgaatcttgtcgagattgtgtaacttgtaaccttgtataactctaaaatgtaggagactgaggaagtcatcaagataattgtgaagatttcgcaattgacattttacataacgtctctttctttgtgaaacaagattgtgaatacaatcatgattgatattagtttccattacttgttatcgatcgagcaacattatcaagtcgtttagtgtcacgataaagacaattgagcatgtgaaacaacagacaaagataattactctactaatgacaatcaaggaaacccatttgccaaaaacgtcgtcgttttggaatgaaacaacagctcaaaccccaaaaccgtgttgggacggtaaacagacccctccctgctcgccggagcactactcggcgacttcagatcttctttcagggttcttccaggaattagattgtcaacgaatccaatcttctgaaacaaaaatcttcggatgcgaagatcgattgtgattgtgattgcgttaacggcgaaggggtttcttcatcggcatcttctggagaaaggtaatcttgtaactgctctctcattacgcatttgcaattcccgagctttttctggtaggagtgattaccgagagagattgagaagtgggcttcactctattaagtttaacgatgcacttactttgttctgtgacatggctgagtctcatcccctcccttccattgttgatttcagtagattactgattgccattgctaagctgaataagtatgaagctgtgatctctctctttcggcatttggagatgttgggaatttcacatgatctctatagcttcactactttaatagattgtttctgccgatgcgctcgactctctcttgctctgtcatgtctaggaaagatgatgaagcttggttttgagcccagcatagttacctttggatctctggtcaatggattctgtcacgtaaatagattttatgaagccatgtctctggttgatcaaatcgtgggattgggatatgaacctaatgttgtaatctacaacactatcattgatagtctctgcgaaaagggacaagtgaatactgcgctggatgttttgaaacatatgaagaaaatg

SEQ ID NO: 34486 - DNA, 3000 bp, Unknown; identical to SEQ ID NO: 5871
  misc_feature (1)..( 3000): 2750-1469P.txt file - cDNA_ID_3078734; gDNA_ID_1620822; Annot_ID_169522

SEQ ID NO: 34487 - DNA, 3000 bp, Unknown
  misc_feature (1)..( 3000): 2750-1469P.txt file - cDNA_ID_3078738; gDNA_ID_1620822; Annot_ID_169520
atgacgaggttaaacggttgaagagttttcttggggaagaaagtatgatagaagttgtgtttcctgaagtttgattgcaaacgaaaagggacttcctggagtttgagatcaaagtactactacatttcatctagtttattttcatataattctgtgcaacttttaacttattaattgtttcatgtcacgttgctctttgcagaatacaatagtttttgaatttaatctctttaaagactctagtttagataaatcaacccatattaaagttgcaaagtccaaagaatcgagttaaacaaaattttaattttgacctgattctgtttttttttttttttaaatttattttcttaagtttccaacaaaccattgaaccgattcatttctcctaagaccaagtccagcaatagtttttagtgggtttctatgttagatttctaagtaaaatgggctcaacagaaagaaaaacagaacaatccatttaggatcgttcctaaaattgggtttttcgcgacccaatagaaacccatacgtggcttcactttattgggtaaaagttttgactcaaccaaaaaaaatacacacgcgttttaatttttttcttcttctctctcatttcttcgtgttcctacagagactccaaagtcgattggaatcgaaaaacaaactcggttcttttgatttcgagaagtttctgttcccgattcctccgccaatcaaaatcacggtgagtcctcatccttctgattccggtggtgatggttcgaactcgaagtcttcttccgacgacgagtttgttagcttggactcttccacttctggcttatgttcttcttccggcaagtttttcgatcttattaaatttctggttcttaatcttatttcaagaaattgaagctcaagattgtttgattgagtgggaagattttgcataaatgtaggattggataaatttgtaagtgcttttaggttctgaattttgcaatagatcgttgattgagaagctgttaaaaatcattagatgatgtggtcttcaagtttttttttgcttttactgattagtgtttttgtagtgttttttctgcattgtttgcatctgttgttctccagagctgtgattggtttataaaggttatactttcttgattcaaatgtgagcagttatcagatccattttgttgaaaaagatgcaaaaggttgttctgttgtgtgtgtgagtgagttattgattatggttgtctaagtgtctcttttaactctgtttttatgtttagtgtctgtttcaagtgtgtttttatgtttagtgtctgttttaagtctatgttttatgtttaagtgtacgcctatgttaatcaatgagttgtttcagtttatgagtttgagttgtttcagtttggcactttcagttttagtttatgagtttgagttgtttcactttcactttcattttcagtttcagtttatgtgtttgagttatgttgtttctttttcactttcactttcagtttcactttcagtttcagtttcaggaaatggattctcttgtgttgttgttgtttttacgcaagagtgacaaacacttggtcagattgagatttatggccatagtttatttctttactcttcttcttcattagcaatgtcaaggttaaacagcttcacttcagttctgttctatttttgatctagtctccaagattacttggttttttactgatgtagaacatgtgagaaagaagaaaatgaagaggaacaatacagaagcagaagctgatgcttcttcctcagacacatcttcaggttaacttgttgaaataaaatcaaaaggttaacttcaatatggttttagttcagtttgatcaaacatctagttaggtaactgtatgtatatattttctcaactttaactttagtttgggttacattggtgtggtgagactagagaaagtgttttctcacgtttgctatacttatatttagttttgtgttgaaaatgctgaatccttttgttgctatacttaagcttgttaatgttattggccatagcatataattacactgatacggaattaagttcagaatccgatttactttcatgaaaaatcatgttggttatctactctctcaatctaatcttgatttaattccagagtcatataattttctttttttcaaattttttttcttttagaaacccacttaagaattctaccaatggactataaaattttcaaaaactctaaaaaatctctaaactacaaaactatccaaatttattaataaaaaatacataaaaactttatttagaaactaatcactggacttgctctaattaattagaaaatcaatattcgttgtagacagatgtgtcatgtgtgattgccatttgttttagccagattgaatataattttctaaatttctaaagctataggagaaagtaaatctattgctacaacttcagttgtaaatataacaaatatttcatgcagttttgaaatcaagtttctataacaaatatatgttctagactaatttgaggtaatcgatcatttgatatttattgattcaaaatttgtaatttttgaaatttctctttaaataattggtttttgagatacataagaaaattcatgttttgactttcttacccaagatgccatgtttaaagatgcacacgtatacctcatattaaaatgcaaattgtaacctatcgtatcatttgtataataaagatgcttctgatttttgtttttcttcgtaataacttattgtataataagacaagaactgtcacgagccactgttattttcgatcaactttatattttatcaatggttttgctagctagcagttggtcccatcttggaacacaagaaaaacgagtaatatgtcaacattatactttttggtgggttgggtaatgtgtcggtgggtgctttcgttatatatgattgtatcagattgctctatctgtcttacgagagaccaaaacgatg

SEQ ID NO: 34488 - DNA, 3003 bp, Unknown
  misc_feature (1)..( 3003): 2750-1469P.txt file - cDNA_ID_3078742; gDNA_ID_1620822; Annot_ID_169519
ttgcatctaaattatagcgcgacaccaattaaacaacagccatatgatcaactttttccgtcatatttatttgacttttttattcattttgacaagctgagcacctcagtgtttaagaaggccagagtgtgtaccttaaaatcattaacatgaaatcagagtaggagtccctttcatggatttcgtcctacaaagtgatacacgggtcagtgaccaatatagaccaattacaaaatcaatttacagaagaagagcacaaagaagaatacctaagataaacaaacagaaacaagatggcagatataagtgatttttaaaataatgttgttttttcacttaaaattttaatcctgccgcggaaccaggacatgtagtgaatggaaaagtatacttaataaacacatgaaaaacatattatgaatcaaaaacaagaatttgttaccacaataatgtgagttatatcaggaacagagctgttaacgcctttgcctataagcaccctcaatagaatgccattcgtgcagaaaacaactgatgactctcttccaccttcactttgcagccgaacctagacaatgatatattgagagaagattttttctgtagccctgagaacttgtgtgtctatcatataaataagtatgtataagaacaaagaccccttaccttgtagccgacagttctcccaatagtttcacctctttcccaagatattcgatcagaaacttcaaattaggaaaagaaggcattaagtaaggagttagctgcttatacggcatgcatttgaattacaaagctgaaaacttcataagagttgaatcagatagatactaacctgaaatagctgagatacgacgtggttgggtgcaaatgattttgcatgcttctttcttactatgccacatatgatctagaagatattgaggcacctaaaatatcaagaactgaggcacctgagaaacctcacaaatgaaagaaaaaagaaaaaaaaaatcgaaactactatttgaaacagaatacgatttatatataccaagtgatatgatcatatcatgtacaaggacagaaaccttattccacaacacttaaactcgattttttacaatgttttgaaaactgacaagctgaacctagaaaatcataacctgtgatgaataactatacttgactccagcagtaaaaatcaatacagaataaagagcaacagtgaaaaacactgaagcgtttgactctagtgaactacaaacaaaaagaggaaagacgcacctgagtagttttcccacaaccagtttcaccagcaataagaacaacctgcatttcgaataagaatgaataaagactctttcaaaatgaatggaaatccccactaaaagcacaatgacgaaattcacatcctgaatcctaatatagaggaacaaattaaatatctaaagacccatataacctgattggattccactgcagatataatggcatcgcgaaaagatgcgatgggaagctttgatcgtgcttcaaagatctgtaacatcattcaaataaaaggatatttcttttactcaacagtgcatgattccaactttctgaaacagggttctgtaaagaaaatattacaatcttttgaaaatacatataactgctaacctctcgaaaatgtctttcttttttcagtctagaactcagagataccacgttattttcaatatcgtgttttgtcatatgaggtttcttgaagaaatcatctttccaattactgttgacgtttcccgtagtatatatacccagtgatgtccctgtagtatcgccgtcacaaggtggatagcgagtaaataagtcgtgcagaacagctttagcctctggtggaaatgacacacatttgagcttctttggagatattctcgtctttcttataccgcctgctttctgaaatctggtttcatagcgatgcttgctgtatgactttgaaatcccatctccttctttttctttctgatttctggcttcatacatacgcctcttgtctgactttgaaatgccatctcctttgaaaagagaaagacgcctttcttccccactcctacagaaaatccaagaagattagaaactcaagtagtagatgaaacccaaaacttgcataataccccaaacgtcagacaaaattggattaagctgtaactgacccgttactttttgatcggagacccatagttcggcacatctgatgaataatgccacgttcgctatttgtaagttgctgctcaaagacgtaagctacacaatagaaagccaacacactttccaattcaaccaaacagaaaaagacagaacattccgatagatagaaatcaccaaagctaactataactttaaaaccattgcaagtagagagtatcggagctcatctgaagattagcagaagaaacacaattaagaacaaaggaagaaactttttaaattccttgggtcgaagaggtaaactcacaatcgttcccggaggcgcgaaaatcctcaaggaccttggtggcccaagccccagtggcttcgcagagacgagtatgcttcgtatccttcttcttcttcgccatcgctttcaaaggtttcttttctctcaatacttgtgagcagagactatgtggcggtaatgtgagcttccagagagacgctcgttgatgagagtgttccggttttgctctccgcctccctccttgccctactttcccttttttccacaaacatttttttaagaaaagaaaaaaaaaactccttattgaataacttggagtcttttgggctttttgggccttttgggccagaaggaaattaacagaaaacagtgatcgggaagacctgcaccgcacctgattcattccctcgcaccctttcgtttcaaatttcaaaacaacggcattttctctctcattttctgcgtgtttctcgggaaaatcgtcagcctgattgttttcttggtcaatcactgtttcgctcttgaggaaatcaaatgatatg

SEQ ID NO: 34489 - DNA, 3000 bp, Unknown; identical to SEQ ID NO: 5872
  misc_feature (1)..( 3000): 2750-1469P.txt file - cDNA_ID_3078746; gDNA_ID_1620822; Annot_ID_169518

SEQ ID NO: 34490 - DNA, 3000 bp, Unknown; identical to SEQ ID NO: 5877
  misc_feature (1)..( 3000): 2750-1469P.txt file - cDNA_ID_3078784; gDNA_ID_1620823; Annot_ID_169606

SEQ ID NO: 34491 - DNA, 3000 bp, Unknown; identical to SEQ ID NO: 5879
  misc_feature (1)..( 3000): 2750-1469P.txt file - cDNA_ID_3078792; gDNA_ID_1620823; Annot_ID_57845

SEQ ID NO: 34492 - DNA, 3000 bp, Unknown; identical to SEQ ID NO: 5894
  misc_feature (1)..( 3000): 2750-1469P.txt file - cDNA_ID_3078792; gDNA_ID_1620823; Annot_ID_169604

SEQ ID NO: 34493 - DNA, 3003 bp, Unknown; identical to SEQ ID NO: 21632
  misc_feature (1)..( 3003): 2750-1469P.txt file - cDNA_ID_3078796; gDNA_ID_1620823; Annot_ID_169603

SEQ ID NO: 34494 - DNA, 3003 bp, Unknown
  misc_feature (1)..( 3003): 2750-1469P.txt file - cDNA_ID_3078859; gDNA_ID_1620824; Annot_ID_169640
atctactatgattcttagtgatgttttcattttgactttgatgtttatcatttagttgaatctcttggagagctaattttgagttttgggttgggttttagattaagaacagaaacataaggaagaggatacatgtacgtgtggagcatgtgcaacagtcaaggtgtgatgaggagtttaatctctggaagaagcagaacgatgtgcttaaggctgcaacagtcaaggtgtgatgatgagtttagtctcaggaaaaagcaaaacgatgtgtttaaggctgctgctaaagctaaatgtgaaactattagcactaagagacaacctaaaggtcctaaaccttgtttcatggttgaaggtatgaccttggagactgtcactcccattcccaatgttgtcaacgatctcaaaggtggctattgagttgtttccattttcttcattctcttctaagaatttttgcacttgctttgttctttttatgatgtttttgtatcaaacaagactgaattctatattgtacgagttcagattttgttaggaaagatggtttatcccaatcctttacctgttccatttgtatttaaaatcgtttctgcatttttcagaaaactgatactttgggaaaagttgagacatctaatctctttcagtgttagcaatttataccacacaaaaataaacagagagagcaatcgaaacaaaatctctttgtaaagttgggaagtgcagacagaccttttaattgcaaaccttttaattcctttgcagcttcacacaattgcctcctcttcattcattagttaaatgtttgagtttgctatttttgttttaactgagcttatgatttatcacaaaattttattgttataattatatatatttaactaaaaattattactccttaccaaaaaaaaactaaaaactattactagctaaacaaatactttttattgatgtaaatatatttaaattacatttttttatattcagaatataactaaaaaagtaaataaaagaattacatgaaaattatcgtagcggcgtcgaaacgaacaaagaaacctgcggttgcggcagcggctgcggcagcgtctgcggcaacaaaacgaacaacaacctgcggtagtgtttgccgccaccgctaccgcagccgctgccgcaaccgccagcgttaatgaaacgaacatgctaaatatatatatttttttccaaaagttaacggtaaataactcaatatatatagatatatataactcgatcaccttacttatttatctaataaatttataaacattactcaatatcctgaaaaattgagttaaactagtcatgaactagtctttaacagtaacgtaacgtatataagtagaagcactcaattttaattagttctattgaatttgttatcttcgttctatccattttacaccatttatcttactcgttttgttttgtctttttataaaacttactcggtttttttgataaacctaactcctttggttagtagttaatttccttcgttttgcttttccaattctatgcatattgttttaaccattttattactccgtttccgtttgtttcactacaattatttggagctacagtactacagtagtatatagttctatgttcatatcaagattgtcttcttgggaaacacttgccctttgactggatttgttatattaaaaattgtgcaagcacgtgtttgctaaaatttaaaatgagaagctgtgagctaaaagcttcgctgttaggttcatcaactagtctgtctggtgcttcaaaggaatgatgacacaagcaatgatgtaattggcaaaaaggtagttttgtcgtttagtgcttttaaatcgagaggcaggggatagatcagagtgatccggtatgggtcgcagattttgttcggtcccgacatgtttttagttctatttaaatactttataagtaaaaataattctattgtctcgtctctattatttacataaattgtatgtacattaattgtaagggaagtatgtatataactataaatctaaaaatcttagattaataaataatacatcaaaatgcctaacttacatatatgtatttatttatttctataatgaatacagtttttaattaagaagtgaaaatgtctcgtcacacttttcaaataggtcatttggagatatatcacatatcgaacgaatccatgatccctccaggcttcatccagttcactttgacctcactcactcttcttctttctttcagaaaatgatttatataacttttcttcttcttttaaacatatatatttaacaattttttataataatttctatagaattcttttaatatatatatccacaaatccacatagttttgaataatctttagataaactagtcctctccttcgatgaatacttcacgcgtactagttttttttcttcatgaatacttgtcgttgtgatgcagcattttgaaacatgaatatcttaaagccttttgcccaaaaaaaaaaagaatatcttaatgcctaatacttggattacgtatttatgtaccagtatcgcgatcaaaacaatcaccttttattcagtcaaattaaacataatttatgattcatatatcctcaaaaacatattacaaaattaccaggtatctttgtatgctatacaccactattctaaatttaaaaattaatatagagtaatatatactattaagttttaaaaatcgagattcatattaatataaaacatcttactaaaacaatgatcaaagttttattcatatgctcaataacatttttatgattaaattaagcatacgtcgagcatcattagttaggttccaagtacaaaagcccatttagattattttagcccgtttaaggcccaatatgttctgcttcacctcttgcttaggagccgttgccgacttctgggagcgacgccgacgacgaaagggtaaacacgccgccgttgattcagccggagaatcaatg

SEQ ID NO: 34495 - DNA, 3000 bp, Unknown; identical to SEQ ID NO: 5917
  misc_feature (1)..( 3000): 2750-1469P.txt file - cDNA_ID_3078902; gDNA_ID_1620831; Annot_ID_169673

SEQ ID NO: 34496 - DNA, 3003 bp, Unknown
  misc_feature (1)..( 3003): 2750-1469P.txt file - cDNA_ID_3078911; gDNA_ID_1620831; Annot_ID_169665
cactatgttccttagacgagcaattccttgcagcaatcaagaaaagggccaatgcagctagatttgaagagaggacggtgaattcaacggaggaagtggttgagattatccgccaattttacgagtgcgatattttattggtgggaaaatcttccaaaggacctatggtttcaagattaccggttatgaagatagagtgtccagaactgggaccggtcggaaacttgatcgtgtcaaatgagatttctacttcagtgtctgttttggtggttcaacaatacaccgggaaaggtccttctgtggtgggttccgtctctgtcccggtggtggagacgccatgaaaatctggaaacagaggattgtgttttctttaccttgaagcacaaaccatgatggataacacgaaacactcttatgtatcaacatgcatgaatcaaacgactcccctttttatgaatttgtaagataaaacatatttatgaatttgagtcactgattatatcatatccttaaaacatatgatttgatggatagattattcaagttgttaagagttcaaaattttgaccaaagatatttatattttggtaagtcgatccttttttcaaaggaatacttcatatagtaattttagatactacaattatattgactagtggtgttgtagaaatattttttcctactcaatttactatcatcccatgcatgtgtccattataaagctagattgaaatttcagtagtaatcaaaatctgatattgtataacactgtgtttggtttgtcaaacaacacatgacataacaaatcatatactacataattatcaaaccacatatcgaacagaaaacataaaattccaatataagattgttacacaccttttaaacttattaaattatcaaaaagtttcaaaggactcagcctctttctctttctctctgtctctggaaccatttaatggtctcttttagtaacattcatagagtttgatatccatcttgaccctaaaatacttagcaccttcaaaggtatcggtctcaaacgtaacaatccctcgagacatgaaaaaatcacctgtccctccgacaacagacaaatctctactctgcaccatcatgagatctgctcccattatgttcaacgtccctttgtgttgagtcgagttgaacacaagtgtgtacgcgaaccatgcattgtagtcattcttcatgtcgtagaaatagaacccttgagctcttgccacaggttcggactgaaagtttttgtctatggtcataggatcgtcgaagataacgagtttcccgaatttgaaattcccgaggcccggtgggttggtaactgctgcagaagtcgcgttttgcacgtcgtcgacaccgaacattatgtcgtggtagtagaggacaaagtttttgcacggttttggttgcgatttggatggttttctagctgatatgacggtttttgttagaacaaggaaaacgaataagaagagaaacgatttcatttggcctaccatattgaaaatatgtgtgttttaaatgaaaatgtgagagtggataatgagagagtgagattgacaaagaaggagtgatgggtttatatacaacttgggttactagtccgtgttaatattaagtataaacaaagtggactagctcacttcttctctcttgtttcttgtttatatatttatttatattaggttggtgataagttttgttgatgtgtataaagtgagatcatttaccatgaatatctgaaagttttccatgtaggcggctcaatcacctttcaaaactttccacaaaatgttatagtagtggagaaatcgttaaaaataacacgaatgaagtactaaaacaaattagtatatataatacatatttgatttaagactacataagcttaaagcttgtacataccttaagctggagttgcacgaattcatcaataatatctaaaacagcacaaattcaaaagcagaagagatattaaatcggttaaatatgcaattcatggctttaaatcatatatattgaatcaatgaataatctacttgttcgtctaaatttaggacattaataatatatatatgtatagtctttcagaactactaatatatgtaatttggccttttaatgatgggttggtggagcactaataataaaaactaaagagcatgaggagtttttccaataacttataattttacatgaatttatgtcaaactgccactgaccattagcatgatgctaaaaagtatcgttatagattttattttattttattatatataaatcatatcatttttttctataactaaaagtagagtcatctattttattggtaaaagtcacgttgaaaattttaattttagtttgttaagtaccctatggctaatataatttgcataccaaacatgtttttttcttaatgataatctagtccatttgtaaaagtaaccgttttatcatcaatttttttttaattaagctaagctttcgccgacttaatagaacattggcattcggcagccaataaagcaaatcaagttgcagaatttcaaatgtgacataactattcacattttaaaaaataatatcgtgaaacaaaagaaaagcagaacaatagtaaacaaaaagacaaattgttgaatgttgacaaactgtgaagatgataacaaacgaaggaaaagaaaaatactaaaatagtttgtcctaaaaagccttatctgcgaaggcattttaacgaaaacgggcctattgttggcccaatatgatatataggctcgaaactcgtcacgtgtattcaacagttgcttgagtttttcccacacgtgcgctgttactacgtggacgcgcgcgaataactctagttttgtggatttttttcactatcttctcagaacaacacagagccaaaggttttttgctcgcagtaaagaagaatcacactgtgaagaagaagaagaagcgaaatacaaaatcctcaggaaagaaatg

SEQ ID NO: 34497 - DNA, 3000 bp, Unknown; identical to SEQ ID NO: 7443
  misc_feature (1)..( 3000): 2750-1469P.txt file - cDNA_ID_3078948; gDNA_ID_1621146; Annot_ID_173039

SEQ ID NO: 34498 - DNA, 3000 bp, Unknown; identical to SEQ ID NO: 7443
  misc_feature (1)..( 3000): 2750-1469P.txt file - cDNA_ID_3078948; gDNA_ID_1620832; Annot_ID_169725

SEQ ID NO: 34499 - DNA, 3000 bp, Unknown
  misc_feature (1)..( 3000): 2750-1469P.txt file - cDNA_ID_3078963; gDNA_ID_1621146; Annot_ID_173031
tttcaaaacaaaagttgtatttctatgaaacataaaataaggtagagcgaacccgcaatttctcttcatctcttagtagcaatggctcgaactcgaagggagccgggttcgagcaactctccaacgatgcaacggcgatgagaaagcgttttgaggtcgttttcttatcaatagggaatggattggtgtgttattccgtttgggaatctatcaagttagtacaatacgagaaacttccaagttcctagagtaccatgaaatgataccatgtcgcaaacccttcaatgaatgaattcatatgaaaagtttgtgtttagtttgtttaatgctttgaattaacaaagatctatggttgtcatgttaacgtaaacataacgcgaaagatatgtttatggtgttgaagttcctagatcacgttcatattactatactaaattactaattatgcggagttacaccaaaagggatcacatagaaaaaaatgagaaggagcgtaatccgcaaacttatcaaacctttgatctcctctttcctcaggtaggtctctcctatacgtcaatcactcacgagaattgagctgcccacttcattttttagccgtgcgtaaaacttaacgtacatcattctctcaagattatagctaagattctttaaaccatatcatatacaagctctatagctaagattctttaaaccatatcatatacaagctttgtatcatcattttctattgtcgacaattcgtaatttagcttgtggactaatctttcaaataaaaatggtatttactggatttggtggctgggtcagtcaaaacaataaacagcctcgaaaggtcagtttcatttccataaatcagaaaaaatccattaatgtagaaactagattatgattatgtgtgttgttgtaggccaagcccaaaaaaactgaaaatgttgaatctaagtcagagtcagaaatggtggataataataataaccatgataagatgaagaaatattatgacgaagatgagaggaagaaacaagatcaagtttggatagatgcagagaagatgcatccatggaatgatgcccctccaaaggtgaaggtaatgataacaaatcatcaaacatatataatcgcactacttagatttgtttgcctttaaaggaataagaataaatatcttactatttttttaatatatttttgatgtttgtaggtgacaacaaaaaatggtctttgtcatatgaacatagaattgacattgggattttctccagataaagtcttcggattttttactaatccatccaacggaccattttttctctccccacctcttttttcttatcattcattgtattattcagatgtggtattaattgtagcaagacttgagagtgtactctatttttttttatgaaggaaagcaaatcaagaaaggttttaatggaggatggaccgaggcagatcgcgaaggtgaagaaaaccgtggactggaaattccttgggtcgtcttttgctgtccccataagtctaattgtcgatgaaaacagaaaagatcttacagtaagaagtttctctataccccctcacaataatcaaaactttttgttttgtattggtgtgacacttaactccggtttctcttggtgactgtcgacaggcaaaatataagaaaaagaaaatgatcttgatgaaagttttcgaaggtagctatagagtggagccactatatgtagattcagaacgcttgtgcaataacatggagccgaagagtccggcagaatacaaaagatgtagcggtggacaaggaaggattgcatcaaaggtgacaatgaaccaatactttaagccatatcctccttttaatctgccgccactatcttggtacattcgaaaggtcaccatcaagaacaccaaaactgcgctgaaaacacttcaaacttggggtataaaccttcgaaatccaggtgcagtgacttcaacagacaaatatggaaacgtaacaatatcaccaagaaaaaaaagaaaaacaacaaacattgaaaacactaggctaaatgaatatacatagatatagtagcatgttgtaaatttaatatattcttccacatataaatttcctaatttcatatttacaaattatgttctattccctcatttcattttatacacttgctctttattagacttaatctattctatcacgtcatgcgcgccatgcatggtgacattgtgtggctgtgtgcagatccacctaaacattttacacacaaaaattttacttgtacattaaatagtatttctagttataggcctctatctttttcaaaataaacactgtccataatctgctaattggcccattaattacatatcttaagtccatgatacttggatatcaagtcttcgggcaccttttccaattaaagaaaacaataataaaattgttgtattcgtatttgttgtttattcaacaccgacaaaaaaaagttctagttcaacaaagacattagcagattttgactttgcgcatttactttttcataaaaataaactaaaactatacggataatataaactagagaagcttggaagtgggaaaaaataaataaaagatcaattcttggatatgaattgcaaaccagagtcgatatttgattttgtggtagaggagacacaggtcagagtttcacaggttcgattgctacaaatgaaacacaagttgtgtaagcaatgtccggccgattttacgcacatgctttaacgtcgaaagagagaactcacgagaatggaacttgtcccagatttttagttctaggtgcgtaaggtacactcaatctccacctaactgattcttgttattattaccattaagcatcaatttcatttataacctttgattaatcaaacctttctctatgtgtttttccctcaaaccacatcgttgacttggatctctcattgtcatcttgttctgtttttgtgacctaattttacagaaacaaaatg

SEQ ID NO: 34500 - DNA, 3000 bp, Unknown; identical to SEQ ID NO: 34499
  misc_feature (1)..( 3000): 2750-1469P.txt file - cDNA_ID_3078963; gDNA_ID_1620832; Annot_ID_169717

SEQ ID NO: 34501 - DNA, 3003 bp, Unknown
  misc_feature (1)..( 3003): 2750-1469P.txt file - cDNA_ID_3078968; gDNA_ID_1620832; Annot_ID_169711
aatctttgtaattgcagattaatttagcgtatatctttttgtaatttcggttcggttactgaatttcgttgcttcctattgccgatcagtttttcggtttagttcggccaattctgttcggtctggatgccaaggctttgtataaaccggtttcttgtgaagacactgtatcagtgatacttgttgggcaaggagcagaaaaagcattcaatttttgtcttttaagctttgattcaaatgcgaactagggctttgagagagattactttctttatacttttgtattgtaagcttgattcaaagtgtgagagacatgcgaggggctcaagctttatactttcttcgtagaacaacgactttagctcaacatttgtgttctcttacaccgtttattgcgacgcctcgtatggattttagttcgtttcttgaagagaaccctagcgaccttgtttatacccataaccgtagaattgatgaattgattaaatccgggaacttgttatctgcacatgaagcgttcgatgaaatgtctgtacgagatgttgttacttataatcttcttatttctgggaatagtagatatgggtgttctttaagagctatagaactctacgcggagatggtctcttgtggtcttagagaaagtgcttccacgtttccttcggttctgagtgtatgtagtgatgaattgttctgtagagaagggattcaagttcattgtagggtaatttctcttgggtttggatgtaatatgtttgttaggtctgcacttgtgggtctttatgcgtgtttgaggcttgttgatgttgctttgaagttgtttgatgaaatgcttgacagaaatttagctgtttgcaatttgctgttgcgatgtttttgccagactggagagtccaagcgattgtttgaagtgtaccttaggatggaacttgaaggtgtagcaaaaaatgggttaacgtattgttatatgatccgtggttgctctcatgatcggttggtatatgaagggaagcaattgcattccttagtggttaaatctggatggaacatttctaatatatttgtggctaatgtgcttgtggactattactctgcttgtggtgatttatccggttctatgagatcattcaatgctgtcccagaaaaggatgtaatatcgtggaactcgattgtttctgtgtgtgcagattacggatctgtgcttgattctctcgatttgtttagcaagatgcagttctgggggaagagaccttctatacggccattcatgtcatttctgaatttctgtagcagaaacagtgatattcagtccgggaagcagatccattgctatgttctcaaaatgggtttcgatgtttcaagtcttcatgtacagtctgctctcattgacatgtatgggaaatgcaatgggattgagaattctgtctgctttaccagagtttgccttgcctgaatctggagtgttgtaactcgctgatgacttctctgatgcactgtgggatcacgaaagatatcatcgagatgtttggtttgatgattgatgaaggaactggaatcgacgaagttactctttctactgtcctcaaggctttatcactctctttaccagaaagtttacatagctgcacgcttgtacattgctgtgccatcaaatctggttatgcagctgatgttgcagtctcgtgctctcttattgatgcgtatacaaagagtggtcagaatgaagtatctcggaaggtgtttgatgagcttgatacacctaacatcttctgcttgacttcgatcatcaatggctatgctagaaatggcatgggaacagactgtgttaaaatgctgagagagatggatcgaatgaatctcataccagacgaagttacaatattgtctgtactatcagggtgcagtcattctgggcttgttgaagaaggcgagctgatttttgactcattggaatcgaagtacggaatttcgccaggaaggaaactctatgcatgcatggtggatttgctagggcgtgctggtttggtggaaaaagctgaaaggctgcttcttcaggcacgaggagatgcagactgcgttgcatggagctcattactgcagagctgcaggatccatagaaacgaaacaataggaagaagagcagcggaagtcttgatgaatcttgaacctgagaatttcgctgtttacattcaggtttcaaaattttactttgagatcggtgattttgaaatctccagacaaatcagagagatcgctgcttcacgagagctcatgagggagattggttacagttcagtcgttgtgaaaaactaagaaggcaacatttgcaggacagtgtttttgcttcagcttcatgaaaaagaaaagcgaatccaattgcaaagttcacttcttttttctacatatctgaaatgggttctttcgcttgaagccagaccacatgattgacactctacagagacaacacaagaggaatatgagattctttatttgtcaggttggtgcaacaaactcattgacctcttctattttatgtcttttaatatactaatagaatatagaatgtctgttcgtcgttattcaacaccgcatcatgtctaaaattctaaaaatagcatcttgaggtagaaaagctgagagattttctgggacttctttcttttttttttttttttttttttaatttcaaatctcatgggacatcattttgatcatgaacaagttgaccacaaaggttttgtgtagaggttttggagtaaagcaaagaagtgaaaaagcacatgacttgtgctttaagcatagatgtatagaaaaacaaggccttatcttcatgtacttttaagccaagccaataaaccccacaaaccccattaattactctgcatataaattcaacccgaaaccaatcatctctaccaaagaaataaggaatctcattagtaggcactggatttaataatcaacaggaatcttctcttggcgttttgattgaagcatatgatg

SEQ ID NO: 34502 - DNA, 3000 bp, Unknown; identical to SEQ ID NO: 5937
  misc_feature (1)..( 3000): 2750-1469P.txt file - cDNA_ID_3078975; gDNA_ID_1620833; Annot_ID_169766

SEQ ID NO: 34503 - DNA, 3003 bp, Unknown; identical to SEQ ID NO: 21673
  misc_feature (1)..( 3003): 2750-1469P.txt file - cDNA_ID_3078983; gDNA_ID_1620833; Annot_ID_169764

SEQ ID NO: 34504 - DNA, 3003 bp, Unknown; identical to SEQ ID NO: 21643
  misc_feature (1)..( 3003): 2750-1469P.txt file - cDNA_ID_3078992; gDNA_ID_1620833; Annot_ID_169758

SEQ ID NO: 34505 - DNA, 3000 bp, Unknown; identical to SEQ ID NO: 5932
  misc_feature (1)..( 3000): 2750-1469P.txt file - cDNA_ID_3079008; gDNA_ID_1620833; Annot_ID_169745

SEQ ID NO: 34506 - DNA, 3000 bp, Unknown; identical to SEQ ID NO: 5924
  misc_feature (1)..( 3000): 2750-1469P.txt file - cDNA_ID_3079013; gDNA_ID_1620833; Annot_ID_169740

SEQ ID NO: 34507 - DNA, 3003 bp, Unknown; identical to SEQ ID NO: 21651
  misc_feature (1)..( 3003): 2750-1469P.txt file - cDNA_ID_3079064; gDNA_ID_1620834; Annot_ID_169809

SEQ ID NO: 34508 - DNA, 3003 bp, Unknown; identical to SEQ ID NO: 21652
  misc_feature (1)..( 3003): 2750-1469P.txt file - cDNA_ID_3079068; gDNA_ID_1620834; Annot_ID_169808

SEQ ID NO: 34509 - DNA, 3003 bp, Unknown; identical to SEQ ID NO: 21653
  misc_feature (1)..( 3003): 2750-1469P.txt file - cDNA_ID_3079072; gDNA_ID_1620834; Annot_ID_169806

SEQ ID NO: 34510 - DNA, 3000 bp, Unknown; identical to SEQ ID NO: 5949
  misc_feature (1)..( 3000): 2750-1469P.txt file - cDNA_ID_3079076; gDNA_ID_1620834; Annot_ID_57942

SEQ ID NO: 34511 - DNA, 3000 bp, Unknown; identical to SEQ ID NO: 5948
  misc_feature (1)..( 3000): 2750-1469P.txt file - cDNA_ID_3079076; gDNA_ID_1620834; Annot_ID_169805

SEQ ID NO: 34512 - DNA, 3000 bp, Unknown; identical to SEQ ID NO: 5950
  misc_feature (1)..( 3000): 2750-1469P.txt file - cDNA_ID_3079080; gDNA_ID_1620834; Annot_ID_169803

SEQ ID NO: 34513 - DNA, 3000 bp, Unknown; identical to SEQ ID NO: 5952
  misc_feature (1)..( 3000): 2750-1469P.txt file - cDNA_ID_3079084; gDNA_ID_1620834; Annot_ID_169800

SEQ ID NO: 34514 - DNA, 3003 bp, Unknown
  misc_feature (1)..( 3003): 2750-1469P.txt file - cDNA_ID_3079088; gDNA_ID_1620834; Annot_ID_57935
gtcattcgattgggggatgaacctgataacatcgagaagacactaactgtagctctgctggatccaacaaagaatgatacttctaagaaaagcatcacaacatctgatccactggcttcaagcacttgggatgaggtgtgtataactctgctgcgatgtgtttcaacttcagttgattctcgatcttaacagatatgaactcattacttttataggttccatcatcaagaactttgatcacaccggtgcaatgtaaatctatatggagacagttcaagacagaaacagagtatacagtgactcaagccatatccgcacaggcatgattactttcctcataagttagctcttcactctgcttatatgaatacttatataaagtgtttatactaattcaggaggcgaacaggcgtggaaataactggttacctcctccatgggcaattcttgcattgatcgtccttggattcaacgaattcatgactcttttaaggtccatcaaagcttagtattcactgcttcatatccaatgatgatatgtaacattctgatttctttacctttttgatgtaacagaaaccctctctatcttggtgtcatgtttgtcgctttccttctggcaaaagcactgtggacgcaattggatatccctggcgaattccgcaatggtgcagtaagtgtttgccaaccttctcaaatcccattaaagtagtagtagcgtttcaagaatcatggactcgagaaaacttcaagactcaagaattcttgataataatactcatatgatctatactacctgtggtttcttcagcttccagggctcatatcgatatccgcaaagtttgttcccacagtaatgaaccttatcaagaaccttgcagcgcaaggcgaagaccctcctgcagctaatccagagaaccgtcgttcgagcaacaacacttcttcatcagaaaatccaccagatcacaaaagctcctcaaaagaggactaaagaggagagaaacaaagaatcttcttactctccaaaggtttgatctccagttcttgacgtttttttctccttattccctcactcatgagtccaaaacgctgcgtttatagggaccttttgctctgttttattagaacttctcattatacacacgagtgaattagaacttgaaaacgttgtggcatcatttgaatatttttccttcaaataaacaaaaaaaaaaagatgaagatgaaaaccaataataaatatatgtacgttctataataactcgtttcatgaaagtggaagcatgggatgagatgccaatcccatgaaaagtgagcaaaaattaatatttacattaactgctgagtgggtaaagtttaataaccattttctaaaaataacttttattcagaatccaactcatggattggtgtgtgtatttattatcatcatttctatacacatatccacccccaataactctgtcaattatacacctcaaaatcactgtaagttataaaaaaatgaatttctacaattaatcaaagaccgtccaaagccttcgtggctaattggtgttaaactattcacatttttagtcaagtatttttgcatattatatgagattaattttgccacacaagatcgttaataaactcgacatgatgattctgtttatgtggcttctattaactaggaaatgaaacaatgtagttatagttgtgactgatatgaagtcagagaaaatggctacgtaatcttatatgaccagaccaacgtacgtgatgcgatgtgacatttttcattcaacactaaagttaaaaccttgattgtttttgtattacatttggcaactaatccaatatgttttgttagttgttagtactaagtactgactgatgatcacattcacgctcaaccaaataaaacggatgatattgtttttggttaggtgaaagaacaattaaattagttgccaaaaacataacccgtgaagatttatgttagtaaccaacctacagtcataattaataagtttatgactaatagtaattaaatgacttgccaaaaacatggctctgtatagtatagtttttagattttggttaggtgaagatgattaattgatacactatgaatctatgaagacttgatccaacggctaccagatctccgacttcaactgttttcatatcgccattaatgatacagacaagctgtactactatcctttttatctctttattgttttatatgattttacagtaatactattactaagtactaacaaattgtttttctttgcagctggtcccaaaagtcaaaatcatgggacaaaaaaacgagttattattcttattatcatcaccaaggtaaaaaaatgtgaaaggaaatccttttaaggcttagtttcaatataaatacaaagatgttatttgatagtgattgttctttgtaacgaagtacttatcattaatttcaatttgcaacaaacaattctgtaacaataagtctaatgtgaggaaagttactagctggtaaaataaattagtaggtaactattttttatgagtaaatgagggaactattaattgagtaagatgattcatatgtccttttcatttgctatattcgacagaatgggacacacctaaaatcaaatttacgttttagtgtagaccaccccaacatctctttattacacaacttgtgtttttttttactatatgatttttttaccgaatgttgttgtctaaccaaaattcaatgtaccgtataagactataagttatacaactcgtagaaatggttacatatatgtaacaatatatagagacacatgtgggtgtaattaatatagttgctctgttggatcgttagtgttatttataggagaagaaaacacacaaaacaagaccattcatcaaaagccacataagaagttgatgcagaagcaataataacaaaacaaaaaaacattaaaaaaaaaagctcttcagttttggtttctgcagtctccaatg

SEQ ID NO: 34515 - DNA, 3003 bp, Unknown; identical to SEQ ID NO: 34514
  misc_feature (1)..( 3003): 2750-1469P.txt file - cDNA_ID_3079088; gDNA_ID_1620834; Annot_ID_169798

SEQ ID NO: 34516 - DNA, 3003 bp, Unknown; identical to SEQ ID NO: 21680
  misc_feature (1)..( 3003): 2750-1469P.txt file - cDNA_ID_3079094; gDNA_ID_1620834; Annot_ID_169789

SEQ ID NO: 34517 - DNA, 3000 bp, Unknown; identical to SEQ ID NO: 5978
  misc_feature (1)..( 3000): 2750-1469P.txt file - cDNA_ID_3079096; gDNA_ID_1620834; Annot_ID_169784

SEQ ID NO: 34518 - DNA, 3000 bp, Unknown; identical to SEQ ID NO: 5976
  misc_feature (1)..( 3000): 2750-1469P.txt file - cDNA_ID_3079103; gDNA_ID_1620834; Annot_ID_169782

SEQ ID NO: 34519 - DNA, 3003 bp, Unknown; identical to SEQ ID NO: 28009
  misc_feature (1)..( 3003): 2750-1469P.txt file - cDNA_ID_3079122; gDNA_ID_1620835; Annot_ID_169874

SEQ ID NO: 34520 - DNA, 3000 bp, Unknown; identical to SEQ ID NO: 5988
  misc_feature (1)..( 3000): 2750-1469P.txt file - cDNA_ID_3079138; gDNA_ID_1620835; Annot_ID_169869

SEQ ID NO: 34521 - DNA, 3003 bp, Unknown; identical to SEQ ID NO: 21378
  misc_feature (1)..( 3003): 2750-1469P.txt file - cDNA_ID_3079143; gDNA_ID_1620835; Annot_ID_169865

SEQ ID NO: 34522 - DNA, 3000 bp, Unknown; identical to SEQ ID NO: 5994
  misc_feature (1)..( 3000): 2750-1469P.txt file - cDNA_ID_3079158; gDNA_ID_1620835; Annot_ID_169848

SEQ ID NO: 34523 - DNA, 3000 bp, Unknown; identical to SEQ ID NO: 5995
  misc_feature (1)..( 3000): 2750-1469P.txt file - cDNA_ID_3079161; gDNA_ID_1620835; Annot_ID_169843

SEQ ID NO: 34524 - DNA, 3000 bp, Unknown
  misc_feature (1)..( 3000): 2750-1469P.txt file - cDNA_ID_3079164; gDNA_ID_1620835; Annot_ID_57963
ttacaacgtacgtcgtgtatcataattcaaataattaaaagattagataattttatgaacaattcaaataattctacggctgagtcataatgatgggatcggaatcacatgaaacacaactaatcataaaattagtttaatgaataaaattcttaatgtcttcaacagttgctcaaccattccactacaaatagaggctaaagaactaagtagagtattcactcctctctcaaaaccctaactgtttccaagataatggcaaaaactgaagctcctagtttggtggggaagctagagacagaagtggagatcaaagcttcggctggacagtttcatcacatgtttgccgggaagccacaccatgtctccaaagcaagtccaggcaacattcagagctgtgatctgcacgaaggcgactggggcactgtcggctctatcgtcttctggaattacgttcacggtaagtcaaccttatacatattttttttcttttttgcctcaaatgaaagttttttttttatatcttataatatatttttgaacttattttcaaattaaactcaaagtcagacttacaaattataaaataattggtgcagatggggaggcaaaggtggcgaaggagagaatcgaggcggtggagccggagaagaacttgatcacgtttagggttatagaaggtgatctgatgaaagagtacaagagctttttgatcacgatccaggtgacccctaagcatggagggcctggaagtattgtgcattggcaccttgagtatgagaaaatcagcgacgaggtagctcatcccgaaactctcctccaattctgtgttgaggtctcccaagagatcgacgaacatctcttatccgaggaagaagaggtgaagacaacagagacacttgagacagaggtggagatcaaagcttccgctgagaagttccatcacatgttcgccgggaaaccacaccatgtctctaaagcaactccaggaaacattcagagctgtgatctgcacgaaggtgactggggcacagtcggctctatcgtcttctggaactacgttcatggcaagtcaatattttattacacatttttcatgtatatatatatatataactaaccagtttatttttaaaaaagaaaatcaaacaaatgtttattttgaagtgactagatcatatgtgtctaagaaaataatctcaaaatttccattcgtagaccactctagtcacgatatatatgtcaagtctcaaagttaacctataaagatgaaatgttaaataattggtacagatggggaggcaaaggtggcaaaggagaggattgaggcggtggatccagagaaaaacttgatcacgttcagggttatagaaggtgatctgatgaaagagtacaagagcttcgtaatcacaatccaagtgactcctaagcatggaggttcagggagtgtggtgcattggcacttcgagtatgagaaaataaacgaggaggtggctcatcctgagactctcctccagtttgccgtcgaagtctccaaagaaatcgacgaacatctcttggccgaggaatagaggagaatattcctcgtgtgactatctattatcctgtccgtacatgtatgtgtgattgaagcatgccgatttttatcactctttgaatgtggaaaaataaagagttgtgttggatatatgagagtcatgttgtatgtttttaaagtgctatactctaaatttgtatacgtataatgtgttttgtttgtttaataaagtgtaaaatgtttttttaataaaatcttaagcctcgtcttttctttttttttggctaaaaagttttcgtattcaaattgaaaaagaaagaagagatacataagcccttttaaaggcccagtttagaatcaatacattgcaaaaatttgttacaagatcgttaatctaaccaacgttggaatatgagttacatccaaactagagcagaaattggtttgggctgtacaaacctttaattatcttcatcaagaggtttcttcatttttttttaataattaagttgtttaaccttatatgatttaattgctacatttatagatacagttgcatgttacaaaatatttatataccatttttcagttttttttacggattttatacacatataatggaaaagaaaaagagaaataccctaaaatagcatcaaaacaagttttgtggacaatttatacacacactttacacattgccaataataacattaattgttgatacaatgatgaatctagttcataaattgttttaagacatattatttaggaagcttttcaacaattaagtaagacaaccctaaatattttcaacaattaagtaagaatttcctaaggatattttaatcttttaacactaaatttgtgctattttggaacattccaaaatgtgtgttatttgtgaaacaaaacttatttttgtgctatttgtgaaaattgccaaaaaagaaatccatatattgattctaatcatatttatccattaactttttttggttgaagcatgtttatccaataacatagttaatgactgttatatttgttttgcatagaactgtacgtgccttcatgaacgaacgacatgaaccgcgtaacatgcatgttttcttaaagatcaacaacactacatgccaataacaaatatgtcaaaacgagaatttgcagaaggaacgtacaacctaaaccgcgttatactgaatgatctctagatcatttatatgatcaaaacctaattcaaccgttatccattacaaaaattcagtaggtgagacaaaaagatagagtcatgatatcagaagggatacaaaattgcaattaataatgatttgttttcttcttcagccgttacctccctcaatcctctacaaaaagaggctaaagaactcaaaagggactcattttctctcaaaatccttttaattttcaagttaaacaaagagaagaaaaaaatggcgactaaaatg

SEQ ID NO: 34525 - DNA, 3000 bp, Unknown
  misc_feature (1)..( 3000): 2750-1469P.txt file - cDNA_ID_3079164; gDNA_ID_1620835; Annot_ID_169842
ggaaaacgaaagttacaacgtacgtcgtgtatcataattcaaataattaaaagattagataattttatgaacaattcaaataattctacggctgagtcataatgatgggatcggaatcacatgaaacacaactaatcataaaattagtttaatgaataaaattcttaatgtcttcaacagttgctcaaccattccactacaaatagaggctaaagaactaagtagagtattcactcctctctcaaaaccctaactgtttccaagataatggcaaaaactgaagctcctagtttggtggggaagctagagacagaagtggagatcaaagcttcggctggacagtttcatcacatgtttgccgggaagccacaccatgtctccaaagcaagtccaggcaacattcagagctgtgatctgcacgaaggcgactggggcactgtcggctctatcgtcttctggaattacgttcacggtaagtcaaccttatacatattttttttcttttttgcctcaaatgaaagttttttttttatatcttataatatatttttgaacttattttcaaattaaactcaaagtcagacttacaaattataaaataattggtgcagatggggaggcaaaggtggcgaaggagagaatcgaggcggtggagccggagaagaacttgatcacgtttagggttatagaaggtgatctgatgaaagagtacaagagctttttgatcacgatccaggtgacccctaagcatggagggcctggaagtattgtgcattggcaccttgagtatgagaaaatcagcgacgaggtagctcatcccgaaactctcctccaattctgtgttgaggtctcccaagagatcgacgaacatctcttatccgaggaagaagaggtgaagacaacagagacacttgagacagaggtggagatcaaagcttccgctgagaagttccatcacatgttcgccgggaaaccacaccatgtctctaaagcaactccaggaaacattcagagctgtgatctgcacgaaggtgactggggcacagtcggctctatcgtcttctggaactacgttcatggcaagtcaatattttattacacatttttcatgtatatatatatatataactaaccagtttatttttaaaaaagaaaatcaaacaaatgtttattttgaagtgactagatcatatgtgtctaagaaaataatctcaaaatttccattcgtagaccactctagtcacgatatatatgtcaagtctcaaagttaacctataaagatgaaatgttaaataattggtacagatggggaggcaaaggtggcaaaggagaggattgaggcggtggatccagagaaaaacttgatcacgttcagggttatagaaggtgatctgatgaaagagtacaagagcttcgtaatcacaatccaagtgactcctaagcatggaggttcagggagtgtggtgcattggcacttcgagtatgagaaaataaacgaggaggtggctcatcctgagactctcctccagtttgccgtcgaagtctccaaagaaatcgacgaacatctcttggccgaggaatagaggagaatattcctcgtgtgactatctattatcctgtccgtacatgtatgtgtgattgaagcatgccgatttttatcactctttgaatgtggaaaaataaagagttgtgttggatatatgagagtcatgttgtatgtttttaaagtgctatactctaaatttgtatacgtataatgtgttttgtttgtttaataaagtgtaaaatgtttttttaataaaatcttaagcctcgtcttttctttttttttggctaaaaagttttcgtattcaaattgaaaaagaaagaagagatacataagcccttttaaaggcccagtttagaatcaatacattgcaaaaatttgttacaagatcgttaatctaaccaacgttggaatatgagttacatccaaactagagcagaaattggtttgggctgtacaaacctttaattatcttcatcaagaggtttcttcatttttttttaataattaagttgtttaaccttatatgatttaattgctacatttatagatacagttgcatgttacaaaatatttatataccatttttcagttttttttacggattttatacacatataatggaaaagaaaaagagaaataccctaaaatagcatcaaaacaagttttgtggacaatttatacacacactttacacattgccaataataacattaattgttgatacaatgatgaatctagttcataaattgttttaagacatattatttaggaagcttttcaacaattaagtaagacaaccctaaatattttcaacaattaagtaagaatttcctaaggatattttaatcttttaacactaaatttgtgctattttggaacattccaaaatgtgtgttatttgtgaaacaaaacttatttttgtgctatttgtgaaaattgccaaaaaagaaatccatatattgattctaatcatatttatccattaactttttttggttgaagcatgtttatccaataacatagttaatgactgttatatttgttttgcatagaactgtacgtgccttcatgaacgaacgacatgaaccgcgtaacatgcatgttttcttaaagatcaacaacactacatgccaataacaaatatgtcaaaacgagaatttgcagaaggaacgtacaacctaaaccgcgttatactgaatgatctctagatcatttatatgatcaaaacctaattcaaccgttatccattacaaaaattcagtaggtgagacaaaaagatagagtcatgatatcagaagggatacaaaattgcaattaataatgatttgttttcttcttcagccgttacctccctcaatcctctacaaaaagaggctaaagaactcaaaagggactcattttctctcaaaatccttttaattttcaagttaaacaaagagaagaaaaaaatg

SEQ ID NO: 34526 - DNA, 3003 bp, Unknown; identical to SEQ ID NO: 20874
  misc_feature (1)..( 3003): 2750-1469P.txt file - cDNA_ID_3079193; gDNA_ID_1620836; Annot_ID_169901

SEQ ID NO: 34527 - DNA, 3003 bp, Unknown; identical to SEQ ID NO: 20875
  misc_feature (1)..( 3003): 2750-1469P.txt file - cDNA_ID_3079197; gDNA_ID_1620836; Annot_ID_169899

SEQ ID NO: 34528 - DNA, 3000 bp, Unknown; identical to SEQ ID NO: 6010
  misc_feature (1)..( 3000): 2750-1469P.txt file - cDNA_ID_3079201; gDNA_ID_1620836; Annot_ID_169891

SEQ ID NO: 34529 - DNA, 3000 bp, Unknown; identical to SEQ ID NO: 6009
  misc_feature (1)..( 3000): 2750-1469P.txt file - cDNA_ID_3079205; gDNA_ID_1620836; Annot_ID_169890

SEQ ID NO: 34530 - DNA, 3003 bp, Unknown
  misc_feature (1)..( 3003): 2750-1469P.txt file - cDNA_ID_3079216; gDNA_ID_1620837; Annot_ID_169950
tcagcaactttatagagacgacaagggcttcatatgctgcccgaccccatggataagtcttcatggctttgtcgtcgaaaactcttttggcactctcaaatggtatcctagagttagtatgcaagccaaaaagtctaatggatagaagagtcaataacccaaaccatctacgcttttcagtaggccaagctctgcacgttactaagccctgcctaagttcatctagattaggaccttcaccggttggcacatgcaattcactgaagaacgctttgtagtcagctgcaggcacaaacttttctgtaggcagttcatctatatttaaacccgtgatatgatgaaattcgttcaatccaaaccggatgggtttaccagccacgatacaccaaagctccttcttcagtattctcagttgtctgcatagtagataatgtacggtcttaccagaccatagaaaataactatcaacaagcttagcaattaatctaagctctgtctctttcagttctgcccatatttcttttcctattgattctctaattgcagggaactctcccagctttatattatgattaatgcctttaccctccagattagaatccccctcttggtaaagtcttggagggtactcccttgcttggtcttcagacatctgtataaccataaatcagccgtaagcattccataactcagtcataacataaaacaaactcatccacagataccataactcaggcaaaacataaatctaactcagccatagataatataactccgtcataacataaacctatctcagccacacataacataactcagccataagataaatctaactcagccatattttaacagaaactcagacatcgatgtaaggttaaaccataactcagtcacagcataaaacaaactcagacacggatgaattgataaatcataaatcagtcggcaaacaaatagtaactcagccgtcaaatcaaatagatctaagaaatcggccaccatatgtcaatcaacgacgacgttaaaacccagctttaaaaaccatcgttacgcatcggaaaacgatttcagtgacgggaatcacttgagattgaacttagatgtcagagtcttacttaatggaaacatactcactggaacttagatgtcagatgtgacttcgcgcttacagaaatgcgactccggcgtctgaatttcggccggaacagacgagaaaagagcaaaacggcgaaagaaatcgattttgttccgtcgagagagaaagaggaagaaagcgacagtttttttttttttgggagatgatgaacagtaaagccaagaaataaaaaacccaaacgttatgcggtttggagatgattaatgacgtggattatcgtaatgacatggaatgatgacatgtataatcactgttttttaatttaatttttagttaaaaacgaattaaataataataattaattaaaactagttagggttgttaattgtaattacacaagaactgaaaacatctgagtaataaaaaaaaaatgtgttctattctaggaataaacatacaaatgtgttctatcttaggaattatttctatataatatgtatatgttcaattgtgatccaaaaataaatgtttcactacatattatggaaacaaattcgaataagtgttgatgcaaaatcacttaataatcagataactgaataaattttagaacaaaaaaaatggatcttataatgtcattgttttctagcaaaataatatgatctaccggggatcccatcctcggtggtgaactctactgaagtgtggttaactctgttgaagtgtgatgaatagtgggggagtagttaggtgacgactctgcttcaaatgtgatgaagtctggtgacgagtaacatgagctatttcacttatccctacaaacccatctacattaataacatcttgagagaaggtcaatctctactcccccactattcttttcggttaacttagatgccaacgcttaaaataaggtggatagttgagtccaatataactctaatatttttgaaagtgctgttacgagtttttttgaatgcttgtttccgagttcatagattgcatggtataggttattaatagcatacatgttcatcctacagtagtaagaaaataatgacagataaaggaaattacgtcacatattattggttcttatttgacttttcagcattttcccgttgttgttttattttagggtaaattgcaggccacacctgttgaccatgttttatttccatggattgtcaaaatcaaatgtggttttcaccatttatcttttcgcctgcaaaatgacgcttctgcccttgcgcttctctcttagtaactgttgaaatgtacggtttagtttagcaggtttagttacgtacactgttccggttcagttgaagattttttgtttcacgttgacgcgattcggttccgttacaagtgagattatttccattattccgaagtgacatcaacatttaatgcccccaaaaagtttagacgtgactattgtcacaattaatgcaaaatcatcattacatcaaataatattaaaaaaattattgataataattaataaaaaaattgttgagataaagaagatgaacccaggaacaaagaattattgagaacgtacattgctgctgaagaagtgttgatcttgtttttgtaccaagtttggagccaaaacaagcattgttcgtgtaagtaatgaagttcttttaagaagttttttgttatgtcatattaggatcttgattgtgttcgaactccatttttttatcagaaaatttgcaaaatctatatttgtttgtttaaaatagtcaaatgataattggtatttaggtttataaatgtgtagtatcgacattccatttgtttttttatatgtatagtatttttcagttgcatttaatgtgtgtctcctgaatttatgatgcaggtgggttatggatattcccgtatttactatg

SEQ ID NO: 34531 - DNA, 3000 bp, Unknown; identical to SEQ ID NO: 2576
  misc_feature (1)..( 3000): 2750-1469P.txt file - cDNA_ID_3079284; gDNA_ID_1620838; Annot_ID_169984

SEQ ID NO: 34532 - DNA, 3003 bp, Unknown; identical to SEQ ID NO: 33351
  misc_feature (1)..( 3003): 2750-1469P.txt file - cDNA_ID_3079295; gDNA_ID_1620838; Annot_ID_169975

SEQ ID NO: 34533 - DNA, 3000 bp, Unknown; identical to SEQ ID NO: 6048
  misc_feature (1)..( 3000): 2750-1469P.txt file - cDNA_ID_3079329; gDNA_ID_1620839; Annot_ID_170026

SEQ ID NO: 34534 - DNA, 3000 bp, Unknown
  misc_feature (1)..( 3000): 2750-1469P.txt file - cDNA_ID_3079333; gDNA_ID_1620839; Annot_ID_170022
ttaatataggtatggacaaatcaaaatatcttatgagtcaaaatttagaatgaaatcataaaataacatttatatgaaacggatgaagtatgacacaaagagagagaaaatccacacgagtattctagatcacacttaaaagatgaaaaaagttgaagtcatgaatcaaccatggatcaactaattactacgaaactctcgccggtttagtattaactcgcaaaggtcatgttcttcttcttgtccaacatagtatataactttgttttcaaattctaaaattatatgcgtgatgattctaatatcagctagtatgaaaactttttccctagttatagctcctttgtttttcttttctcttacgattcttgcatccaccgagccaccacatctcatattgagacatgacaactacaaccaaaccgacctcatctctgccatgaccgacatgagaaggcaatcttacaacggttttgtcatccttcttcgtttcctcaacgatacaaattacttcaggaacacagatattactttcttgatgcctagcgacaacgatatttctcatgcagacattactccggagagtcttgaaacatttatcctaaaacatacgatccctgcttggcttatgatcaaccacatgcttcattttccaaacagaactcttgttccttgtagcttctctgatagaatgttcaccatcacaaaatctggagggtccgggatatatgtgaacaacgcgaggatcgttactcctaatgtttgtcagaattctcgtatatcttgccatggaatcagcgacgttatctcattcaaccaaaactatgtttcaacgaaaatgttaccatcagttcgtcgaaacatcacttcgtcaaagcattgaagctctttctttgtcccacataagattcggaggatgtgagaatatcttctaatgtttccaaaaataagtgttataggtttctcaaagtcatgtacgagttgaagtgtgccaattttactttagactatgttgttgtaaacttttatttcccaaagataatggtaaaatatttaccctctaagtgatatacgtaaatcatttttagtgttcatttaaaccaattaatgaaaatcgtattagattaacctaaatgatatacaattttcctctttcttattactaagtaggcaaaaaaaactataccaagaaaaacccatacaaattatataattctgtttggttgcaagtttttagaaagtttttttcagttgttaacttaaaaaccataaaacctaagagcatctacatcggtgatcctcatacatgatgtcttaactttaatttattataaaattaatactattttaatctgaagacattcattaactttgtttcagttttctcttcccattggtgagcttaaatgggtgtcttcaactttcatggaagattcagttttcaccattacagaagaatcatcagaccactttttcagtttcaccattaacacaaatccaccacctttctccattcaccagatacattcgccaaaaacaaatcggagaaattggcttaatgtaaaaaccatcggatcgattcgttgtgatagatttaatttagtcttagtaagtatcgaccgattttctgaaatgaagagagaagtttgttagccaaatgaaggaaaaaaaaaatagcaccaaccaatattatggtgacacgttctgtttcttccagtatcagaaaaatgtcttctcacagacatcaaagccacagtgtctctcctgttcagcgcattaattcccatttttctattttttaattttattaaaatttgaagataccctctaaatttgtccgatggggatggtctaatagatttttcgggttttgaattatatttgattaagaagatgtatttatttatttgaagtttcaattcaatcgtctctttatgaagtcatcttttattaaaagatatggacacgccaattttattgtatatagaattttcatttttcttaatttgcgacatcatagtttgcccattctagttgaactaattctcagtaatcatttcaacaacattccctaatattaactcttaattttgcattttattggctctaattagtatattatattagggtaaacaatagaaacaaaagtttttttttgttttgagtccaaaggcgattgcaaattataaaagccgagctaccaacacatagagtagttgaagcttttaacatgaggcccgagattggccgtccgcagcaaagaccgataagccccggatcacatactattcccaagtcatgtgaacacggtttatcggacaattccatgaactatatcactaaatagaatctcacaaaccaaaatatactaaacggtgcaaattcactttattaagaatggctaacactgaaacttagatgccgaagaaatgaagaaactattttctatttttgttttgaagttgaaaaacaaaaaccaaaccgtaaacaagaatgtacacccctctaatagaatattataaaaatgctaaagaatcacaaactgaaaccaaatatagagaataaagccggcgtaactactcctttatcgagatccgtttcaattttggtaacttttgcttgggacaaacaaaacaacaatggcaagtataaaacgtgttcttcatcaaaaccagtaataagattttatttttcagtcaaccaacaataataataagaaaaaaaacagtaataataataataaaatttccatataaaaacagcgatatacccgaatctaataaaataatactaaattaataaaagtcgttaaacacacaattaatttgtgagagccagcgaagattttttctgattggggaaaaacctaagtgaagaagagagacaatacaacaacaacaacaacaacaacaacaacacaaaagcagacctcaatttcttcacaattctgatctgggttttgagaaattcggaatctttctttttctcgtttggttaatg

SEQ ID NO: 34535 - DNA, 3003 bp, Unknown; identical to SEQ ID NO: 20886
  misc_feature (1)..( 3003): 2750-1469P.txt file - cDNA_ID_3079337; gDNA_ID_1620839; Annot_ID_170021

SEQ ID NO: 34536 - DNA, 3003 bp, Unknown; identical to SEQ ID NO: 20887
  misc_feature (1)..( 3003): 2750-1469P.txt file - cDNA_ID_3079341; gDNA_ID_1620839; Annot_ID_170019

SEQ ID NO: 34537 - DNA, 3000 bp, Unknown
  misc_feature (1)..( 3000): 2750-1469P.txt file - cDNA_ID_3079347; gDNA_ID_1620839; Annot_ID_170017
gcctttaaacctaatgagcccatcaggttgttaaggcccatcatatagttaaggcccatgagtcatagtccaaagaaatgttagtggaatcgaaactctcttttaagatgcatcttatatgactatatactttttggagctataaagttataagttgagagagagaatgttcaatgtagcccatataaatgttctgagtttcgttatatgtaagggtatgctattcttttggcattttatttccctaccaatacagtgatgtcttttttgctggagacaaatccattctaagatccgatttggatctgaagccttcaaaaaacatatagttctcatcaaacctgactatgggttgataaagaaattcgaaatcagatttcagcaatccgactctcttaggcgacatgcgttataacgatgcttaccaacactagatttactctcgagactagttatcactgattcttagaaagctttaaaattttcagaagtttttagagtttacttttcaaacaaacttagcacaagttgtaaaaacgtattttttcttttaaatctaatttgatattatattaaaaaaaaaaaaaaaactaactatcgtatcgtgatcttgtttttattatttttaccaaaattataatattttaggtaatgttctccgtaatatctttcactttcattttattatttcaatgatattaacattcataacaaaaaaaagaaaacatatagttggcatcgtaatttgttcttggttttctcatcctaccacggtgtgggatggttcattagttaaaaaagaagaaggtagatattgaaatctaaagagaaagtgtgtacttgattataaatcatgtagatctagcaaacgaaactgtacttgagttgccaaaaaatcattttgattttataaatatgggaggtttcattattcgtgcatgggaatcgaatgggtcaaggagtaaaaaacaaagaacgtaatggtggtgaatggtgtgatacgtgggttttattttatttttaaacgtcaacattattgatatctacaacaaatataatcattgtgtaagtataagaaacggtggtggtacgtgatcatttaaatatagttacgctaaaaaaagacgttcaccgacaggattttgtggagaaacgtacatatattcattacgcaccacggaaaaatacaacgatatgtccttagttaacaccttcatcccaagtttacaattaattccccaaaactttcaactttatgtagcatcctattaatgttccaaacattgcaaggattatatgtatatatatatagaaaatagattgtatataataaacaaacaaaactatcgaaggtagttagctcaattggtaaagatcctacgcgaagcttaaaggtcatcggttcgaataacgtttgagacaaaattaatattacatactgtgattttgggcttgggaagattacgagtttcggttctagaaagattataggtttcgctccaaaacctcttaatattaaaaaaaaaaacaaaaaacaatcaaacaaaactttacattttagataaaatgcgaattgtttttggaaatcacctgttcaatggtaaaatagtagtttactagttttttttttttgaattttaatagtttacttagaagtttaaataaaaacttggatgcatcaaattgaatgaagatgtaaatattaaattattaataaatccagtgattaaaagtacatagtttagtggacgatagatagcaccgtaccggtttgggagtgtttattttgtaagagcgtaacatgtgcatcggatttacaaacagccccaccactctctttcttcttcctctctcagccattagtttcaaaccgataaattatgacaattattttggttagtcaaagagttttggatttattggcctaaacttatcctggacaaggaaacgagaataatcctatattttttcttacaacaattactaattttgaaaagaatgattcaaattaagtaagagatctatattccttgtgcaggatctattggtacagaattccttaaatattttaaattttatttgccactctttgacaaactatatggttgtgtattaatttgacatccttgattactttagactcaatccaaacaatgatagtatgtgttgaaatatcttaaaagaatgttttaaatccaaattacatgattaccacttccgtaattatcgctcatgattttattgcatcctggaaaccattagatagattggtaggtgtcggggataaaaaaatcacagataaataatatatattaatattgtttttgataatgattttttccaatgcgtgatttagaaaatatcataaacatcaataatgaaaaatcataggtagatatcacaatttatatagttacctcttgtgtatgttgatgtgtgtttcaagtatgaaaccaaacaaaaagatggtctccttgttttacgacgaatgctaaattagttataattagtagtttagtagtactactactattttctttaattaaagattagtgtaattgtaacttttaagtataattaattaagacaatcgaggtaatgagattccaaacgtgaatccagccataaaatctcttttttaaaacagtcttcttcacttcacttctctgctctgctcttgcctctgtctctttcttcttcttcttcttcttctcattaaaagctgaacacaaagatctattctttcactaacacattaccagtttctgcatttgtattatatccttttctaaaacttttaaccattctttctccattcccagttcttagaaagagtcaagagcaatgaggaagcttttcttgttagggtttatagttgcaggactggttcttgggaatgaggcaaatgggtatttagagttcaatgtcactgaattagatcgcattgaggatttagagtttggtttctccaaatttagttccaatttcaatccattaatg

SEQ ID NO: 34538 - DNA, 3003 bp, Unknown; identical to SEQ ID NO: 20889
  misc_feature (1)..( 3003): 2750-1469P.txt file - cDNA_ID_3079352; gDNA_ID_1620839; Annot_ID_170015

SEQ ID NO: 34539 - DNA, 3003 bp, Unknown
  misc_feature (1)..( 3003): 2750-1469P.txt file - cDNA_ID_3079376; gDNA_ID_1620839; Annot_ID_170000
tactatgattctagagtggaattaaaaacgagatggatgaacttgaagtttcatcatttcgaggaggagaagtaatgaatctcacatggataataagtgacatatccaaaagattatgttcaatctttgactactaaagatctaaaagttgtataaagcaattcttatacgaatgtgttattagataaaataagttataattagttattactgaaacttcaagacttgaagtctctttgtgaatataactcacattgttaagagaatatctatgatgcagagatggtaaaacagacgcttaaacttttatgcaagtattgttgtcctgtagacacaatattttgaaagaaattttgagaactattataaacttaaatcgagtgtttttcaaaggctaagaaaatatatgacttattgatgataagtaatactcatattctgaagtgaatataagatcttacataactagtcaaattaaatttaatatcgtttatattagaatataaatttcaattattgtctcatttattgctatattaacatatgattgattattaaaatacatggaagtaattttgattataagattccattaagggagtaattcataacgaatgaaaagtaaatcagaagttttcaaaaaaaaaaaaaaaaaaaaaaaaaaaaagctagaagtttcaagagtatatttggcttaaccggattggtcatcctggtttaatgatgatgtgaaagtattgagaattatgtggacattaggtgaaaaaccagaagattctccctaatgatttatcaaatgttacttgctcagaaagcaatatgataatgtgatttttaccagtgtaagtaatttggactttatcttttcgtaagtatatacaaggagatgattatgggttgatcacctactatatgacatttagatacctaatggttataaaagatgcatcgattcaatggacctattgactcgattgttgcatcgacaagaaggtcatatttatccttgttataaacccgcaacatagagtttgcgaggttactttcttgattaaagtataagagtatttcagtgtttatttattataaccattattggatatccgttgggataagtgtttaacattttgaaattcatgttcatacacaaaatggtttagtaatatcgatacgcatcaagccaatgaataattaatagttttccccatcattattggttttgggtcagaaaccaaatagttttcatctaaaatctttgaatgtgaaaagtgctccaccacagcacgctaagatgaaccctcaaaggaggataagaatacatgttggatatgaatgataactaagccatcctagaagtatttatataacgctcgttttgaagactatcatattatatagtcagctattccaacataagggggagaatgtatatagctggtgaaaaaaaaaagataaaaagaaatgaattatcaatgattctcggagtaaagaatgtatattaagagtccaaaagataattcaattacagaatttagcgttgtaattgccagacgcatttgctgacccaaataaagtgatgaagtcacctataccagttgtagattaaatgctccagaatataatgaatgtcttgtaaggaccaatttcaaactgctattgagtcttaagatcgcatgaagcgtaatagactttggttccaaatataaatatcctcgtaaaagtgaaggagcacaaaattaaaaatgaccaaattgaggaaataaatattttgatgatctcttgaagagagtgaatgatctctaaaagagacataaacatgacaaatgaaacattcaagtacttgacaatgaagagatctacctagctatgtcatgtcaaaatataatggaatcaaaagcaaatcgacgtcgtaatatatttgcatgatatgagcagttgatattatggacaaaaaaggaggatcatgaaagaaagtctattgaaaagtgtacacaaagtaatgattaaccaaaaatgaaaaagaagaaatagacatataattataatctctagtagagatatttggactagtagtctatgcacatgatgtgtaaaaccagtggaagataaatgagtctttatgtgaaagaatagtgaaattaatgagattttcacaaagataagaaatgtattatgaagagatatattctcttgtggtggatgtaatatttttaagtatctaaagtctgacaataagacacggaacactggatatgacatttatatgaaattcttgaaagatataatctatgaaggattaattatatgagaattatgttctctagaactctactcgatcgaataaaaagaaatatgtaacatgacatataatcatataaatgtatatttatgttgagtttatcaaaatatattgatcaaactaatatttgttttgaaaatcattaaaactcctacagagttatcataagtaatacgatgacaataatctatgacaaaatatcactagataatgatatttataagtctatatgaaaaccatataattatgatcattaagattatggttattaattccaacgagatattgtatttgattgaaaatcatctcctgaagaagatgtttccgaggggagattgaatgatatgcgtggatgtaccctttttccttatcatagtttttatcccacataatttttctatgacaaggtttttaaagagacattaaagaacacgtaaataatacacttgatgaatattaagaaattctatcaatcatccaaatgaatattatacactaatgatatttagagaaataaataagatggtcaagatgaatcatctaaaatattcatgagcagcagaagaatggcgatgtactttatccaaaaatttgttcaagagaagatttggcggacttattctcaaatactttttaatctttgccacatcttctaatcatgcagagtttttagcaattcatgaagctagtcgcgagtgtgtatg

SEQ ID NO: 34540 - DNA, 3003 bp, Unknown
  misc_feature (1)..( 3003): 2750-1469P.txt file - cDNA_ID_3079402; gDNA_ID_2926131; Annot_ID_196917
atggaggagacgctgcaaaattgctaataagggtttctagtttgcttagtgggggtatatatatatatataggatttgtgaatcatggctcgcaaatttcggagatcgccgctgagtagtggagaaatcgaagaaaggaaagtgaattagggttctaagtctcagaaatgcttatatatgttcgggttagttcggatggggttcgattatcgggtaataaccgattgggtacgggtaaccaaagacatgaaatctataaaccgatcgggttattaatagaatccatacccgtactgaaccccttaattcgggtcgggttcgggttcggggatcgggtatgggtaatgtgcccagtcctattctcaattatagatgtggagaaaccttattggaattatcctcataatatatttttggagtcccagtcaagaatgtcactgaaccagaaatttgaatccggcatgccactttttgatctgtatgccactttatatgtgttattcctattttacccttaatgaataattttttatttaatttcaaaaataaaataaaaataagaaaaacataaatattctatatataaaccctacaaaaacgttggatttaatttagtgactgtatttactcaacatatggaccccactaaaaaatattttatctttttgcggtagaagatactcgtagttataccgttgtaccatcgtattcatagttgaactttccacaattttcataatttacagttgaattagaaggtaaataattaattataagttgaacgcacactttttctctattattttgtatttccaaagttttcataatatgacatcggtgaaaacttggttttttacctattttacttcatataaggtgctcatagactaaatgtttcttatattagaaggggtgttttatatgaaaacaaaattggattttagaaaatattaaattttattgcattgatctaaaattatttatttataatttgggatattcgtatataattttacatgtataataaattatcaattttacaaatttaatcattttaacgttatttagttgaactagttgaactaattatattaaatgttaccacgaaaaccaaagaaagacatttgaactagctcaactaaataaattaaaaagtaccacgaacacaaatacatatatgtttttaatctaatccaataagttgaactagttgaattgttcatacaaatccgagaaatacaaattcaaaatacatgaattaattttttcatgtgcaacaaattgttcaagtgtatcccaggcatagtcttgttcttcctcttacgacgcttttctctggttgatggaaaccagtttttttttttttttaaccattttttggtgtataaattcaattggctctgtcgactcgggaaaaaccatctctggtcggctcatccatttcggcagccgtcgattctcaggtgatgtgtcttcctccatcgatattgttggatcgaaatctagatcgatatctcgatatttactttgtccactctggaaacgttcctcctttagagataccatctccggtcgactcatatatttcatcggtcgctttttcttccgtcgcaacgtcttcttttctttacaagcgctttgtttgttctactctgtctatagatctcgattgaagaaagtgaatgaacgaaacaaaaatggctgtttagatatttgcaatggtagtcagtacaatgtagtaactgaatcgcgttgctccccaaaccaatccattgttgcataataaaatggtataactgaaattggttcaattgatctagttcaaatggttcaactgatctagttcaaatagttcaactgatctagttcatctggttcaatcgaacgagttcaacttatatagttcaaattgttcaattgaataagttccaatcgatttttcgggcgtatgatatgagtaaatttggaaaatgccttttttatgagtttttatttgaaaaatactatatcctactttatatataaaattaataaaataacctcattataatttaatataattaaaactttaaacagaaaaaatccataagttaatatttgatttaactataatttaaaagataattcttatcttaaatattttaaacaaaattttgtccaaaataatatatataaactatatttatttcaaaactatatttatttcaaactatatgtattaagtgataaactttaaaataatatatataaactatatttattaagtgataaactttaaaatatatttagatattaaattgttaaattttaatataaatagataaataaactatatttatttcaaaaataattaaaaatgttatcaacaactaaaacatatttcgaataatacatacatttcgaatttatcaatagagatttttaaaaaaaaatctattacttatatttcaaaatttatttaattttaatttttttcttctaaatatgaatcctgtttttatttattaagaataatgcttttaaatttggataaaactgttactttacatattaaaaatatagtattatttgggccaagttaattattttattgtacttgggtcggattattttagttggatctgtatattttaattttttaaaaagttatttggatatttacatcagttttaattataaaaaaaaataaaattataaagaataagtggcattcgtgattattattttggagaaagtgacattcctgccatttattcaaatttttgtggcaagtgaagcgacaggtaaagtaaaaccgacgccgttttaaaagccagtgcctttacgctatccgttgaaaagggaatacaaagtctcgatttttttttccgatacttgaacggccagattttaaggttcctgtcatgtctgattgcgaaatcgcttttttcttcttcctgagttcctttttttctccgatgaaattttaaccgtgatgatgatgatcataatgaaacagatatg

SEQ ID NO: 34541 - DNA, 3000 bp, Unknown; identical to SEQ ID NO: 6061
  misc_feature (1)..( 3000): 2750-1469P.txt file - cDNA_ID_3079402; gDNA_ID_1620841; Annot_ID_170057

SEQ ID NO: 34542 - DNA, 3003 bp, Unknown
  misc_feature (1)..( 3003): 2750-1469P.txt file - cDNA_ID_3079406; gDNA_ID_1620841; Annot_ID_170055
taaagctgtttaagatcaaatgtgggagtgggagtcaccaattttagtaaattacgcttttaagtaaaagtaaaacttggatttggatggatatgaaatttagtggatcagcgatagtttttgagagtggaaacacatttaagatgttgaaaaatcatttttgaaagaaattaagtattttttgggggtttgaattgaatatttacaagaaactagattttaatccgctgaatatcgcgggactattttggttttttacaaataaaaatttaatttgttaagcctgttaacggctgttaacttatatgtccgattcgaccaataattaaaatacagtgttttatttggcaacaatttattaagtgatgtatttttatttcaatccaaaagtattgagtattaaacttccaaattaaaatttgtttgggattttttaagcatttttgcctttaatgttttgtattttctgaatgtataactcttactatgtttgatttttactgtttaaaaatataggaacaataatgtacagttcattaagttaaaatctagattattattaaataatttaaattttaattatgtttattttattaataatatttattttgttaagtttttaagataatataattatattttgattgttatatctaggatttcacccatggtataacgtctcgtattactatcaactcaaactcgtcctaccatgtaatctcgttcactgaaactaaacatatctaatagatttcactcttggtatatcatctcgtattacaatcgacccaaatctgtcctaccatctaaactcgttcactgaaattaaacattttgtttttgttattttattttaataatactttaatttaaaagatatataattcaaattaatttaaaaatcttctttcaaatggttatttaattgttgtaaaagtcatacattataatattctacatccgtctctccatctaatctagttcggtaaattaaacattatttttttttttttgttctaataatatttttattaaaagatttataattcaattcaatttaaagttttcttttgaaatggttatttaatttaatacatttcatatattatatatattctaaacatttttcggtaaatatcctaaatattttataaattttaaataactatattatttatctttaataaattataatgttaataaaatcctaacatttttcctttttaaaagtaattagaattgatggatatatattagataagtaaatgctaataattaagaatattaattatttgataataataaatgtcaataacatttcttgtaaataagttccaacttgaagatttatttgttaaaatggcagcgaaaatgtatatgtagaagatggagatcatatgttggtggttgctattagatgtaaaacataacgttgtactgtgaactatatgccatgtatttctcctccacaaaatctattctctggaaattaacctaaatttttaaatatctgtattttgcctccttttcattctattttgtttgatacaaacgattgtggtttgtaatgttaaaattaggaatgttattgaatgatatgtatatttcataaaaataataataataaaagtaggatgaatagtaaaattccaaggcatttcataatttacccattacatggtcaaaatttatcaatattttaaaataataataatcatccaatcaagattttgggaatagaatatcttaagaacttagtataattacatatatatatatatattcccttttaaatgtatcaaaaacaaactaagaacatacaaggaatttgatgtagtactatacaatttacatgcaaacagatgtagtactatttgatgacaaaaaaaaaaaaaaagatgtagtactattttatcttttcatcggaataattcggtcatgaagctattaattggttttaatgagaatttattataacagttgttgccacactgtcgaaatactaacgcctaacggctagttaaataattaacacgcggtgagaagtgagtgagttacacgaaccactaagaatctaatataggaagataagataagcatttcacacgtgtggtgtggacaatttaacagtgttaacacgcgcatggcatgtgatctagaaattagaacattaattttagcgttttgactttgacctttgaatcactaggcgtaggtatttacacgtgtaacaatataatttttttcaatatgtgatgatcatgggccaacgtttgtgggtaaaggtgtggtgttcgatcatgatccacttaaatttactgaattttagaattataacagcagaaggatataagtaatataccaaacttaactataatctacctctccttgtctatgtatactaaatgtctaacatgtaacacaaagctgtacaaaatttttaactctcaaattttttgaaataatgcaaagctgtaaaaatagctgtacgagaaaactgtacaataaaactgaaaataaaaaaatttgtaacgtttttgataaaagttttgtaaatgtataaccatcaaaactgtacaacttccagctttgataatgaattaccattcaaagctagagtttcgaattttttcattgtatacaaccatttgaacacaactcttttcaattatgccatacatacatttagttaataaattttaccgattaactagtactgacaaaagaaacaaagagtaattatatttttttgataaattgttttattagaaaaatacttaaaattgataaaaataaataaacccaattgatatatttgatattacaataccagatattgaaacaaataagacatgttttgtctatatacttccaactagaagatatttatttatccatatcctagatattttaatgtgtgaatctaatacattctcttatatacgaccaaatagtaaaacaatatgcctctcctgcaatttttcttcatccaatatttctatg

SEQ ID NO: 34543 - DNA, 3003 bp, Unknown; identical to SEQ ID NO: 20900
  misc_feature (1)..( 3003): 2750-1469P.txt file - cDNA_ID_3079413; gDNA_ID_2926131; Annot_ID_196921

SEQ ID NO: 34544 - DNA, 3000 bp, Unknown; identical to SEQ ID NO: 6055
  misc_feature (1)..( 3000): 2750-1469P.txt file - cDNA_ID_3079413; gDNA_ID_1620841; Annot_ID_170052

SEQ ID NO: 34545 - DNA, 3000 bp, Unknown
  misc_feature (1)..( 3000): 2750-1469P.txt file - cDNA_ID_3079456; gDNA_ID_1620842; Annot_ID_170092
gttaccttaaacatccatcttcgaccatcaatgtcaatttctatcttatgccccctaggattcctgtcatacgtagctcttgggtcattatcattcgcaaacttcgttaccaatgatgatttacaaaccctaacaaaatttagcaaacaattcaattaagatgatatatatgaaaaaattacaatgtctaagaaaagagaatagaaaaaacctacgatgtcaaagaaaaattaatagaaagaggggataaattacccttcatcgccgatgacgaaaaccaatatattcattgtactatattcaggcgtttgaactaggatgagaggatgaagatttatcttgataagatgtttaaggactagaaagatcttaagaaaaactataaactaggaagatcttacaaataaactagaaagaaataaaatctctagatttaaaaagatgaaaaatgtgaggtgacatggggaaccgtgatagagcaaccttcaagacactctattttccttttattattggtgtggtattgtaacactttttcttcttttataattggtgtctcgtgattttcatttcacacagttaataatactttcccacatttatctttaatgtcacacattgtgattaattctctagatgaacaacacaataaatgagctgtagagttatgggcaaaaaaataaataaattttggttggtgagataaacttattttgtaaaaatcacttgtttcctatttattttgaacgtgtgtttgtatatttttctctctctctcttcaacatccatcttcgaccatcaatgtcaatttctctcttatgctccctagaatttctgtcatacgcagcccttgggccattaccatctcgacaaacttcgttatcaatgataatttaccaaccttaacaaaatcaaacaaataattcaattaaggtgacatatattaaaaaactacaatgtctaaaaaaaggagaaaagaaaaaactacgatgtcaaagaaaaaataatagaaagaatggataaattacacttcatcaccgatgacaaaaaccagtaaattgattgtactagaaagatcttacgaaacactataaattaaaaagatcttacaaacaaactagagagaaaaaaaaatctctagatctaaaagcatctccaacagaccctcaaaccctcaaatttgaggggtttttaactctaactccaacaacccttcaaaccctcatggcactattcacaccctcaaaatatttctcttatttcattttagtctttgtactttatattccttacaaataattctattaaagtcaactatttcaaatatattcatataaatttaaataaatgaaaattatttaaatataaaaaacaaatacaacaataatagtacactgagcatttcaacacaaattaaaattaacattacaatgataaataaatacataaacacacaaaataaattaacacttgaaaaaattacattaaaacataactaataaaaaattaaattcgtaatgcaatattaatattcaggtaaatttgatcctgaacctccaagatcaccaaaatattgtccataaacatttgatggaatcggaggttgttgttgttcttgatttcttttttgtatgattcttgcttgttcagatcgtataaattcacatgtattactatcatcaatatcgcttaaacgtgttagcaatattttattttccttccctatttcttttagagctaatttttttgcttgattttgcatacgcaattgagccatctcataatccttgcttctagttgatgcactttctttcaaaaaatcaagagagacatctcataacaagaagcatgccgaaaagatgttgaacgtgcgtttggagtcttacaatcgaagtttgctatcatagcatgatcgtcatgttactggaacaaagaagtattgcatgatataatgacagcttgcattataatgcataacataataattgaggatgaacatgatatcaatgcactgattagagattcaagattgatgccaccgccaacagttgaaacggggttaaatgaacagacaagatttcaacaatttttatcttataatctacagataaaaaataaagagactaatttatcactttgaaatgcattgagtgatcatatatgggagcattttggaaatatttatatagagtaattttgtaattttataaatcattttatgtttttttttatgttttttttttaatttatatataatattatattattatatggagttttttttttaaatcttgtttggcataattgtttctataatatatgtgttatatttatttgtgaaagttttatcactataactgattattgttaaaaattgaggattataatgtaaatacttcaaaaaattaaaataaatttgtgggtataccattggagtaagtgaccctcaaatcttcattttgagggtgtgccccctttaaaatgagggccattgttggagatgttcaaagaagaagaaataaggtgagatggcatggggaaccatgactagagcaaccttcaagacactctattttctttttattattagtgtggtgctttttcttcttttataattggtgtctcgtatttttcatttcacacagttattagggacctcccacacttatctttaattgtcacaaactgtgattaattctttatatgaacaacacaataaatgagcggtgaagttatgaacgaaaaaaataaattttagttggtgaaataaatttattttataaaaatcacttgtttcctttttattttgaacgtgtgtttgtattttttctacttttctctcttattatttgagttacttaatataatataatttatctatttttatataataaattaatatttaatttttcttatattttaagatttatccgttgttttttttaagtaaataattatatataaaataaacgaaatatctaatattaagtaactaaaatg

SEQ ID NO: 34546 - DNA, 3003 bp, Unknown
  misc_feature (1)..( 3003): 2750-1469P.txt file - cDNA_ID_3079456; gDNA_ID_2926194; Annot_ID_201306
ttcgttaccttaaacatccatcttcgaccatcaatgtcaatttctatcttatgccccctaggattcctgtcatacgtagctcttgggtcattatcattcgcaaacttcgttaccaatgatgatttacaaaccctaacaaaatttagcaaacaattcaattaagatgatatatatgaaaaaattacaatgtctaagaaaagagaatagaaaaaacctacgatgtcaaagaaaaattaatagaaagaggggataaattacccttcatcgccgatgacgaaaaccaatatattcattgtactatattcaggcgtttgaactaggatgagaggatgaagatttatcttgataagatgtttaaggactagaaagatcttaagaaaaactataaactaggaagatcttacaaataaactagaaagaaataaaatctctagatttaaaaagatgaaaaatgtgaggtgacatggggaaccgtgatagagcaaccttcaagacactctattttccttttattattggtgtggtattgtaacactttttcttcttttataattggtgtctcgtgattttcatttcacacagttaataatactttcccacatttatctttaatgtcacacattgtgattaattctctagatgaacaacacaataaatgagctgtagagttatgggcaaaaaaataaataaattttggttggtgagataaacttattttgtaaaaatcacttgtttcctatttattttgaacgtgtgtttgtatatttttctctctctctcttcaacatccatcttcgaccatcaatgtcaatttctctcttatgctccctagaatttctgtcatacgcagcccttgggccattaccatctcgacaaacttcgttatcaatgataatttaccaaccttaacaaaatcaaacaaataattcaattaaggtgacatatattaaaaaactacaatgtctaaaaaaaggagaaaagaaaaaactacgatgtcaaagaaaaaataatagaaagaatggataaattacacttcatcaccgatgacaaaaaccagtaaattgattgtactagaaagatcttacgaaacactataaattaaaaagatcttacaaacaaactagagagaaaaaaaaatctctagatctaaaagcatctccaacagaccctcaaaccctcaaatttgaggggtttttaactctaactccaacaacccttcaaaccctcatggcactattcacaccctcaaaatatttctcttatttcattttagtctttgtactttatattccttacaaataattctattaaagtcaactatttcaaatatattcatataaatttaaataaatgaaaattatttaaatataaaaaacaaatacaacaataatagtacactgagcatttcaacacaaattaaaattaacattacaatgataaataaatacataaacacacaaaataaattaacacttgaaaaaattacattaaaacataactaataaaaaattaaattcgtaatgcaatattaatattcaggtaaatttgatcctgaacctccaagatcaccaaaatattgtccataaacatttgatggaatcggaggttgttgttgttcttgatttcttttttgtatgattcttgcttgttcagatcgtataaattcacatgtattactatcatcaatatcgcttaaacgtgttagcaatattttattttccttccctatttcttttagagctaatttttttgcttgattttgcatacgcaattgagccatctcataatccttgcttctagttgatgcactttctttcaaaaaatcaagagagacatctcataacaagaagcatgccgaaaagatgttgaacgtgcgtttggagtcttacaatcgaagtttgctatcatagcatgatcgtcatgttactggaacaaagaagtattgcatgatataatgacagcttgcattataatgcataacataataattgaggatgaacatgatatcaatgcactgattagagattcaagattgatgccaccgccaacagttgaaacggggttaaatgaacagacaagatttcaacaatttttatcttataatctacagataaaaaataaagagactaatttatcactttgaaatgcattgagtgatcatatatgggagcattttggaaatatttatatagagtaattttgtaattttataaatcattttatgtttttttttatgttttttttttaatttatatataatattatattattatatggagttttttttttaaatcttgtttggcataattgtttctataatatatgtgttatatttatttgtgaaagttttatcactataactgattattgttaaaaattgaggattataatgtaaatacttcaaaaaattaaaataaatttgtgggtataccattggagtaagtgaccctcaaatcttcattttgagggtgtgccccctttaaaatgagggccattgttggagatgttcaaagaagaagaaataaggtgagatggcatggggaaccatgactagagcaaccttcaagacactctattttctttttattattagtgtggtgctttttcttcttttataattggtgtctcgtatttttcatttcacacagttattagggacctcccacacttatctttaattgtcacaaactgtgattaattctttatatgaacaacacaataaatgagcggtgaagttatgaacgaaaaaaataaattttagttggtgaaataaatttattttataaaaatcacttgtttcctttttattttgaacgtgtgtttgtattttttctacttttctctcttattatttgagttacttaatataatataatttatctatttttatataataaattaatatttaatttttcttatattttaagatttatccgttgttttttttaagtaaataattatatataaaataaacgaaatatctaatattaagtaactaaaatg

SEQ ID NO: 34547 - DNA, 3000 bp, Unknown; identical to SEQ ID NO: 6077
  misc_feature (1)..( 3000): 2750-1469P.txt file - cDNA_ID_3079460; gDNA_ID_1620842; Annot_ID_170089

SEQ ID NO: 34548 - DNA, 3003 bp, Unknown; identical to SEQ ID NO: 20906
  misc_feature (1)..( 3003): 2750-1469P.txt file - cDNA_ID_3079460; gDNA_ID_2926194; Annot_ID_201308

SEQ ID NO: 34549 - DNA, 3003 bp, Unknown
  misc_feature (1)..( 3003): 2750-1469P.txt file - cDNA_ID_3079472; gDNA_ID_1620842; Annot_ID_170079
ttatatggatttttttggaggtctaagtctttgtgttgtatgaaaatcaatagagtatgtgtgcatgcatgcacatgcacatgtacaataatgtaataaattattgtatttgtatttgtatttgttgatggctccaaataataatagtgtttatggaatattctacacaggttggcgttccacgcaatcaagtgaacccatactttagggtatcaaaataaagaaaatgtacattttataaatttttcaaggctttttatgttttaagaaaaatattatacgcatttttttaataaattcatttttgttgagctttcttttcatgtttcgtgggatttaaacttgatgaaaacttatatttgttgtcaatgaatctaatttggtaacaattgggttttaaaaaatttaaaccttaaattgcttgcaaaatggaagacatcctaagactatattcatcagcgatatctagtacaatatatcaatattaaataaaagaaaaaatagaaaaagaggagagtgggagagagtcgtctctcgtttgagagactacgagaaaaacgtttcttacatgtggttttttataattagtcaagctgaaatacttattaatatgtttacacttaaaatttgtgttcacacataaatgagaaactaaaatcaagagaccatagatggtgatgctctaagatacggtgattttagttgcaaaattataaaaaaaaatctttaattaatcaagtaaatgtgttagctttgctatccattgaaataatttctggttgaaaaactcgattacgtgagtttgataaatgatattgaaggcaaaaatctaaacaatatatttacagaatgtttttttacttacaaactttttatgaaactaaaatatgttctataaaatttagtataaccgatcatatattactacattatttgtgattttataaaaaaaaatattataaggaaaagattttttatttgcgtagcacatttaaatatgccggaccggtcctgattcgaacttacgaaattaaatcggctgcacaactataagtgaattaactttttgtttttcaatttttcataatttatactaataaaaacgttgaaggataacacatacttctttaaataattttttgactagaagtaatctaaactacaaaatacactcattaaacagttattaggtttatgctgtatgacaaacttagagtaagatacttcactaatcatttaatttatatcaacgatacgacgctataagtcaataaaagaattaacttttttttctttttttttggaaatttttttagttgaaagataattcctagaaaataagttatatatttgagttttcatacaacttaaaaacagttaatgattagctatatacctatacttaatgctttctcatatctaattttgacaatctctctttttttttaatttttaatttaattttttcaccaaatactaccgtaccgtgctatatatcttggttgcttaattttgacaacctctctttttatgtatggtaatggaccacacatatccgctttgaaaagtggtccgaaggggaagacgtacggggctctcgacagctagcgaaggaaatgtagtttcttgccgtgattaaccttctttttaaggttttgtcgagaaatcataatcccgttatcgttaataaagttgttaatacccaaagataatttaagattaaaagcatgtctttgacacccaaaaaaaaaaaacacatagaagataaaaagcatgtcccgcaaaaatacaaatagaatattccttctttttaaggttgtcgagaaatcataatcactttatcgttaataaagctggtaatacgattaaaaagcatgtctcacaaaaatacaaatagaatattccttcttcttttttatttttgttgtcgagaaatcataatcactatcgttgtgatcaactaactgttttatatcgatcgacgatcgctcattacaaaaaaaaaaaaaaagtgaatgtttgtaccgaagttgtaacaataaataactaaggagtttggagagaacggagtagcttctttattaatgacgaacagaaaggcagtaattaacataatggaaaaccgtaagtacagaaacttagaaccgaaagtacaggttgaaaaactgatattaatggtcggaaaacctgaaaatacagaacggaaaaccagaaagtaagagataaagagataggcagcaattctctcttaaattctctgagtggtgacttaggttctggatcccccttcttagtagtatctcttcctattggcaaggagctgatctagggttctcttagtctctcttgcgatttctcctttttgcccttctgaatttatcgggctgggccgagccgtgatgggcagagctgtgatgggccgagtagtcattctgatgggccgttgttctgatgggccgttcttctttgttatgagctttcttgacttggtctatttgtgtttaggccgaattgggcatggagggcaaagcccgtatcccacaccgaatctaaataagaggaaacaaagaaaaaggagaaaaagaagaagaagatatgcagccaaatgggcttaaaccattaacataatgggaaagcctaacttaagcccaatacttcagctgtcaaataagaagagaaagcccaatactccaaattcggatcatatcacattatacatctaaatctgtttcacaattcaaaacatacatttggattttgactagtcgaagcctagtaattagtaattaaccatatccatgtctcagccaatcataaactaccacgtgggtgattaaattaattacagagccaaaacaaaattgtcgtttcttcaaatttcaaaaccagattgttctgtctcagaattcagaatcagtctctgatcttctccatgacgattccgtttcattgatcgatcaatcaaaatctcgccggagtttcttcccgccggcctgaatcatg

SEQ ID NO: 34550 - DNA, 3000 bp, Unknown
  misc_feature (1)..( 3000): 2750-1469P.txt file - cDNA_ID_3079472; gDNA_ID_2926194; Annot_ID_201319
tatggatttttttggaggtctaagtctttgtgttgtatgaaaatcaatagagtatgtgtgcatgcatgcacatgcacatgtacaataatgtaataaattattgtatttgtatttgtatttgttgatggctccaaataataatagtgtttatggaatattctacacaggttggcgttccacgcaatcaagtgaacccatactttagggtatcaaaataaagaaaatgtacattttataaatttttcaaggctttttatgttttaagaaaaatattatacgcatttttttaataaattcatttttgttgagctttcttttcatgtttcgtgggatttaaacttgatgaaaacttatatttgttgtcaatgaatctaatttggtaacaattgggttttaaaaaatttaaaccttaaattgcttgcaaaatggaagacatcctaagactatattcatcagcgatatctagtacaatatatcaatattaaataaaagaaaaaatagaaaaagaggagagtgggagagagtcgtctctcgtttgagagactacgagaaaaacgtttcttacatgtggttttttataattagtcaagctgaaatacttattaatatgtttacacttaaaatttgtgttcacacataaatgagaaactaaaatcaagagaccatagatggtgatgctctaagatacggtgattttagttgcaaaattataaaaaaaaatctttaattaatcaagtaaatgtgttagctttgctatccattgaaataatttctggttgaaaaactcgattacgtgagtttgataaatgatattgaaggcaaaaatctaaacaatatatttacagaatgtttttttacttacaaactttttatgaaactaaaatatgttctataaaatttagtataaccgatcatatattactacattatttgtgattttataaaaaaaaatattataaggaaaagattttttatttgcgtagcacatttaaatatgccggaccggtcctgattcgaacttacgaaattaaatcggctgcacaactataagtgaattaactttttgtttttcaatttttcataatttatactaataaaaacgttgaaggataacacatacttctttaaataattttttgactagaagtaatctaaactacaaaatacactcattaaacagttattaggtttatgctgtatgacaaacttagagtaagatacttcactaatcatttaatttatatcaacgatacgacgctataagtcaataaaagaattaacttttttttctttttttttggaaatttttttagttgaaagataattcctagaaaataagttatatatttgagttttcatacaacttaaaaacagttaatgattagctatatacctatacttaatgctttctcatatctaattttgacaatctctctttttttttaatttttaatttaattttttcaccaaatactaccgtaccgtgctatatatcttggttgcttaattttgacaacctctctttttatgtatggtaatggaccacacatatccgctttgaaaagtggtccgaaggggaagacgtacggggctctcgacagctagcgaaggaaatgtagtttcttgccgtgattaaccttctttttaaggttttgtcgagaaatcataatcccgttatcgttaataaagttgttaatacccaaagataatttaagattaaaagcatgtctttgacacccaaaaaaaaaaaacacatagaagataaaaagcatgtcccgcaaaaatacaaatagaatattccttctttttaaggttgtcgagaaatcataatcactttatcgttaataaagctggtaatacgattaaaaagcatgtctcacaaaaatacaaatagaatattccttcttcttttttatttttgttgtcgagaaatcataatcactatcgttgtgatcaactaactgttttatatcgatcgacgatcgctcattacaaaaaaaaaaaaaaagtgaatgtttgtaccgaagttgtaacaataaataactaaggagtttggagagaacggagtagcttctttattaatgacgaacagaaaggcagtaattaacataatggaaaaccgtaagtacagaaacttagaaccgaaagtacaggttgaaaaactgatattaatggtcggaaaacctgaaaatacagaacggaaaaccagaaagtaagagataaagagataggcagcaattctctcttaaattctctgagtggtgacttaggttctggatcccccttcttagtagtatctcttcctattggcaaggagctgatctagggttctcttagtctctcttgcgatttctcctttttgcccttctgaatttatcgggctgggccgagccgtgatgggcagagctgtgatgggccgagtagtcattctgatgggccgttgttctgatgggccgttcttctttgttatgagctttcttgacttggtctatttgtgtttaggccgaattgggcatggagggcaaagcccgtatcccacaccgaatctaaataagaggaaacaaagaaaaaggagaaaaagaagaagaagatatgcagccaaatgggcttaaaccattaacataatgggaaagcctaacttaagcccaatacttcagctgtcaaataagaagagaaagcccaatactccaaattcggatcatatcacattatacatctaaatctgtttcacaattcaaaacatacatttggattttgactagtcgaagcctagtaattagtaattaaccatatccatgtctcagccaatcataaactaccacgtgggtgattaaattaattacagagccaaaacaaaattgtcgtttcttcaaatttcaaaaccagattgttctgtctcagaattcagaatcagtctctgatcttctccatgacgattccgtttcattgatcgatcaatcaaaatctcgccggagtttcttcccgccggcctgaatcatg

SEQ ID NO: 34551 - DNA, 3003 bp, Unknown; identical to SEQ ID NO: 20913
  misc_feature (1)..( 3003): 2750-1469P.txt file - cDNA_ID_3079483; gDNA_ID_1620842; Annot_ID_170073

SEQ ID NO: 34552 - DNA, 3003 bp, Unknown
  misc_feature (1)..( 3003): 2750-1469P.txt file - cDNA_ID_3079496; gDNA_ID_1620843; Annot_ID_170120
ctatcacgagcgtgaattaatttgttgttgaacttgttgtctagggatagcttctgtgaagttttgtcaaccgcctgaatagattaagaagaccacactgttcgattaccctatccttaggaatcatttatccatttgattgcctgttatcatttctgctttgtcattcacttgcctgctattgccatttctgcttttagtttcatttcatttctgttattgcatactaggactgttagaaccaaccaactttctacttggcttgacttagagctttctgatcatatctcatctgtttgcatcacattggattgacatcctaaaatactacaacgacaagatagtgttttaggattaattgagtaaaatcctactatcatatagataaaagcatttttatttggatcaagagcgatctagacgggaatgcgaaacttagattcaaccatgattttgattgctaaaaaaatgttagagatttaggtttgaattagtgttcttatactatatatgtaaatatttttaatgtattttttttgttattattgattctcttttgttagagatttaggtttgaactagcaatgatgatttacaaatatttaccaaattaataatttatgatttctgtgtactgagttgattaagactagaaaatgcaattatgctttcatataatagattaacaattttatccaaaaaaaagctagctagtttttttttttttttttttttggtcgtagctaactagattaactaaaaaaaactatagttcataactttgaaagagaaaaaaattctcttttatgattctaataaattttcaaaaaaaagaagttaaaaagtgcatttaaagtaacatatgaatatgactatataactcaaaagagttcgtgggaaacatctcttcacatgcagttgtattatattaattaattttgtaacaaaagagtggcatatgaccccatggaattgttcgtaacgtatctttacaaaatcaaactatattgtttgtagcgaaaccatgttttttctgtaaaccctaccaacattttatattttaaatttttatgattatgtgttgcttgcttgcatgcttctctctctcgatgttaggtactagactacgagagaacaagaagtataataatatgtatgcaagcaaatgcaacacatacagatagaaaaagacgtatgacgtagaaaagcagctttaggatgattccaaaacttgtttcttcaagttgacatttttgcagataagtgttaagttaaccctatcacgtctggtcgtgctggtgcgtggtcctcacgctccctcaatctcctgtgttttctgaaaatgtaggcccattttgctttgacttgggcccatttaaccctctcctcatctttcaatcttccaataaacaagtttttttaattaaggaagcaatgacttttgatgtctttaattagtattttattctgttttttgaagtttattattataattggtttcgtttctatcatggatgtggatcttctttgtttcttctcttcacgtcgtctttcctttaatagttacatattattttaagttatataagaaatatgaacccctttaaacatggagaccaaatagaaattatttgattattattacctcaacaaataattttgtcaatttttttggttgagaacgacgtttttataacaaaaagacaaaaaaaaaaaattgttcatattacactcttcttatcatctttattcttcgtattttccatacagttttattttattttattacatatatatttttaaaatgaaaaataatttatatgattttcttaaaaattgttttaatatgtgtattgtttgattatgtatgctaaaaaatggtacgtttctatatcatcttaggcgtattagttagtgtttagaagaattttcttacaagaatcgtgatcgtttaacgcttaacgagttcttgaaattactattactaattttgataatatgagtgctatttatcaattaatcttatgtttccttaaactccctttttaacttttttcacgtagttacaaaaagaaataaatatatattagtataaattaaaacatatcattccgcgataactagcaacggtgccgtttcaataacctctctcatgtcctttcgtaactcaacgaaacccaaaatcaacggctcagatcattccgacttctgtttcgcctttgctacgccacttcttcttcttcttctccggttttaaattaaaacctctcacaaaattattcggaatattatttcttcttcttcttcttcttcttcttcatcatcgcatctctctcacttcacgttttcttcggtgaagagatagccgccggaaaaagttatcatctccggaaatttcgctctttctttacggtaattacgagaaaaacaaaatccaaaaatcgtttttttctatttgatgattttgccttcgtattcaatattgtaaagttttgttttttccgttgtttaattacgtaaattcgataaaagtttcttcctttagattgaatttttctgtttctatggcttgagaactagtttcgtgtggttgtttcttctgattcttgaatttgattgagaaagtttatatctttggttaagagtttttttgtttgtgtacgttttaaaatccatggagaagcttgaatcacggagaagactagtcgtattaatggaaactccgtgtaaatcgaatgagcttcttcttttggatggttcttcttctctttagctttcctcttttctctctttttggtttctttaacaatctctgacttatagcttttgaagcctctgtttgtttatggttatatcctctctgttcttctcatttctaaagactgaattttgaatggtaaaagatcgtgtgtgtgtgtctgtatccttaggctttgatgcagttttctgaaaatttgaactttgtttatatgttgcagtgtttgagggtgtgttttatgtatg

SEQ ID NO: 34553 - DNA, 3003 bp, Unknown
  misc_feature (1)..( 3003): 2750-1469P.txt file - cDNA_ID_3079516; gDNA_ID_1620843; Annot_ID_170109
tctaaatatagatttctttataaatagagaagatctttgctccaataattgttgttttgttcctctaaacaaaatgttccaaataaattttattttaatttctaacataatcctcctttatttttaaagtttataaattctatccacttaggttatttttaaacaaaacaaaataaattttcattataacacataaatagacaatcgaatgattaagacattatttttaagcatcatcattagtactatttttatattttaaaatttcaattaatttagtaaatatatctaatacaaatttatatttttaggtattaaatgataacttattaaaattggaagagttttttgtaaataaaaaaattatgctttaaaaatagagaaatgattagtattgctccaaatttggagcaatactatctttatttttggcgcaagatattgagtaccattgatgatgattttatatcaaatatagagcttgtagcaagaagaagggtgacttacattatccttgtggtaaggtttgtagtacgaaactatttttaaccattatccttcaaacaaacaatgttaataattctatgtcaagtttctagatcttaatctccgataacaaactaataattaacaattgttagaacatccaacaataaagcataaagagtgaaaaaaaaaaaaaaatccaattaaaacctgcaatttttctcgttctcaaataaaacttctaactaattaattttcttaaaaaatcttcaagtcgtcaaaattcaaacttttcctatttaaaacttatcttgaaaacctccaaattgaaatattttcccaattaaaacctcaaactttttttcgtttctaaataaaatttctaacataactaattaatttttcctaaagaaacgtttaagtcatcaaattttgagtctgatcaatgatttactaacgataaacggcttttaacaacatattttccatttatttagtttttgaaattcacatgttttagttacagtagaaaatataaaatcaaaattgaggattgaataaatttatacttgaatgattgttaaaatttatactttaatgattatggttaaaattttaaatcaatcgaagtaaataacccaattggtaagtaactaagtattaaaagattccaaaataggaaatatacaataatgttttgcttgtgcatcggtggtcattaagtaaagggcaccattcaattcttagagtggtaggaagcgagaaaccaagccaatatggtatcccatatggctaagcttatgagagagttagagacaagtgtcgcattaggtgtcgtatgaaagatgcatacgatgtatatacagtttttttaacaacgtgtctatttgtaattatcactcattgtcttacttgatagcttttgtttgcttcttcttaataggatgcattttattgcatgtgtatgcatttctccaaatgaaatcttgtgaaacacttgtctctaagagtctaactctcacacaagctaaaaacacgtcagcttgaggtccacttagcttattgatgagtagttttaaagtttgtgtgtttccaactaatcagtaactagtaatcacccaacacataaataaatatattacgagtgagagaattgtttcaaagttagaaatggaaatcataatcatctctctctgcctagcaacaatcctagcctttcttctcctaaaaccacttctgaatcgaaccgttgccaaagacaacctaccaccgtctccgtggcgagttccggtaatcggaaacctccaccagctaagcctccaccctcaccgctcccttcgttccctcagccaccgctacgggccactcatgctccttcattttggccgtgtcccgatcctcgtagtctcttcctctgacgtagctcatgacctcatgaaaacacacgaccttaaggttgcgaaccgcccgcgattaaaagtgattgaaacaatcctcaacggtgggagagaagtggttttttccccttacggagactattggaggcagattaaggtgtttttgctaagtcattaatttatatatacagttaacaattagttgtggttagctctctggatttgctatctgtggcctattatataatttccaaagtctatatttgattaagttttaccagttagattgatagttacatgttgtagtgaatacatgcaccgtgcgtttgattaattttgatcccccttccgttttattttaatttgagtatcgtcttgtaaacaaaaaatgtcgtttaaaaaaaaattcaattttattttatagttttaatttcttgaccaataaaaaatttacataacatattaataaaaggtaaaaatagtattgtttcgttaatttgtgagtaaaaaactaaaagacatataatacgaaatgaattgtatactatttacttcttgaagtacgtttgttttaaaagtcagaaggtatttacttgttgaaatacatatacagttctataatgtttaatcttccaattgaaaaatacaatacatttaaataaaaccattaaatatttttatacaaactttcttattagatatttgattttcgtaagtttagttaataagaataacttgtatatgaaattaacattgtttggcaagaataatagcagaaataaataaataaataaaaaatgagaagaattgtggacttcatacataagaattagtgtttcttttctaatatatagaggatgtaataaaggcatgagttgagctttaaaagaaaaaaaaacatttgctttgtgcgtagagaaagaacagaacacatttttttgcaaaagataaacaacggaagtttgagagaaagtagtatttttgtttgttaaaaactttgatatattaatgctcttgatacttagatatattaattttctcattaagaaactgatgaaagtattacgtctgttttgtgaggaagactgtatgcgtcgtccatctactcaataagaaaatg

SEQ ID NO: 34554 - DNA, 3000 bp, Unknown; identical to SEQ ID NO: 20918
  misc_feature (1)..( 3000): 2750-1469P.txt file - cDNA_ID_3079530; gDNA_ID_1620844; Annot_ID_170159

SEQ ID NO: 34555 - DNA, 3003 bp, Unknown
  misc_feature (1)..( 3003): 2750-1469P.txt file - cDNA_ID_3079534; gDNA_ID_1620844; Annot_ID_170155
tcttaatatacaatacttctttttcatgcattaagccccttacaatgtcgagtaaacaaagcatgtgtccgctaatattgtcttcgagcttggtatttttgtattctgatacggtatttggggacgacatcttttgttgactcgatataagaagggggtttgtggaagaaattgtagtattatatatcaagaatggctctccaaaccatgttgctggccacttagctattatcgaagcgtttgttgcaacatcaatatcatatcttcagctattctgttttagagaggttgagactgaatctatatgatctgaaggacggagatactgctatgcatttggccttgacaggtcgccatgtggagatagctgcatgtctggtaaatgtgaaccaatgtgcttcatttcttgcgagtaaagttggaatatctcccttgtatttggcagtggaagctggcaatgtcccactcgtggtatcaaagttgagaactacaagcaatgaaggaagaaagacgaactttgattttgtacacgtggctttgaaggccaagagtagaagtttgttttgcttcttaccaattagtagctctgtttagtttgtttgactagtttgggacagaagactaaatatttgcatgtgggctaatttatacagatccaagtcttggggatgagtgatgtgaagaagggataaattctctttcaattggagcatccatagggttttataaaggagtatgtaacctgttagtacgattaacgaagagtgtttacgtgtgaaacaatgatggaccctttccactcatttggcagcaacgaatggccatatcagaattgtcaaagagactctaaaacattgtccagattcaaaacacctgcttaacaagcttggttagaacgttctttgcattgcaacaaatagtgggaaatgtaagtgtttgattccgttgttgttatatatgcaattctgtttcattttatttccgcactttgggttgaattgtcctgtttctctatttaaagaaaaaagtgcttcattttgatgctttgtcgatcaaactgaggtttgattcccaagagacacatacagattgtatcataattagctaggtccagtttgatcactgtgattgtagttgacagatagtcaaaatgacctcttgttgttttgctggtgatcattatttcagtacctaagttttttttacccaaccctcacttcaacacatcttttgctgccaccatttcctttcgctttcggccgctggtcacaactcacaacagcaacaatgactaaaagaatctgcactaagtcaatttccagcttcttgttttattaaggaaaatctcgtgccatgtaaattgtcagacttttggtttgtttccagctcatacctggttttgaggtagtctatgttcttggcttgccatttctttttaatcttgagctatgttcttagaggcggctaagcagttcaggacttggttgttggttaacttattgtagcaatacttgttcttatttgggctttgctgggtgatccagaactcggccacaaagcctttcagtttgcctttccatttctgtctttggctctaaactccatgtaggtcgcattctattttggcgtgctcgctacaacaagtgatatactagttattttttttcgttcttcactaaatactagattttaacccgcggtacaccgcggaaacaatttattttttaaagttagtatacataaaagtttgcaaattgtatctatctataaatatttttattttatagtttacaattgttattaagtaacgtcctgccaaacccgtcccgccaacccgtcccataaaaaaaacatttattttattaatgttaatcttatttatgatatgtttatgaattattgtctaaatattttgtaattttgtaataattaaatgctatcaaatatctctgcgatttgacgattataattaaattgttatagtcatggagaaaaacaatatcaaaaatgataattttgtagtaaataaatgatattaaatattttgaaagttttattttagtaactaatcgtgtagttaatgtggagagatttagggaagattgttaaatgtcaaatatttaatttgaagattttttttctaattatcaaaaacaaacattaaaatccagtggcagctattgtaaataagtcccaactataagatttatttcacaaaattgctgcaaaaatgtatatatagatattcagcgcgtattttattttgtgctctattttcttcttgcctattacactgtcccatatattcctggctttggtcgttgtcactgggcaacggatatcctctccgaatgctattatggtttgttgatgaagaagatgctgaaacatatcacacctctggctctggtccgtgtgattgaaacaaaaaagacgaaaggatgtcttcttatctatttgattcagttgttgttttcataactagtaatttattacgttggtttggaaagagtcagtaagcggggatagctcagttgggagagcgtcagactgaagatctcgatccacgctcaccgcattacgttgtcttttcgtttttattttctttctatatatcttttactcattgattgtgttacatgaagcggggatagctcagttgggagagcgtcagactgaagatctgaaggtcgcgtgttcgatccacgctcaccgcaatatttagtcatttaatttttttcccaaagccatgcaaacgacgtcgtttaaaaccaaaacacacagagatagtcatatacggtgtcgctttatgaaaagctcgaattatactaacggtggttttacaatatgaagttcaaaaagcccattaaaaagcccactacatatcccaccgcctttacctctgaaccgactattttttttccaccctttatattcgttgtaacagcagagatttttatagtttggtttctttgaccggagaatctcgattaggttacgatg

SEQ ID NO: 34556 - DNA, 3000 bp, Unknown
  misc_feature (1)..( 3000): 2750-1469P.txt file - cDNA_ID_3079534; gDNA_ID_2926205; Annot_ID_202163
taatatacaatacttctttttcatgcattaagccccttacaatgtcgagtaaacaaagcatgtgtccgctaatattgtcttcgagcttggtatttttgtattctgatacggtatttggggacgacatcttttgttgactcgatataagaagggggtttgtggaagaaattgtagtattatatatcaagaatggctctccaaaccatgttgctggccacttagctattatcgaagcgtttgttgcaacatcaatatcatatcttcagctattctgttttagagaggttgagactgaatctatatgatctgaaggacggagatactgctatgcatttggccttgacaggtcgccatgtggagatagctgcatgtctggtaaatgtgaaccaatgtgcttcatttcttgcgagtaaagttggaatatctcccttgtatttggcagtggaagctggcaatgtcccactcgtggtatcaaagttgagaactacaagcaatgaaggaagaaagacgaactttgattttgtacacgtggctttgaaggccaagagtagaagtttgttttgcttcttaccaattagtagctctgtttagtttgtttgactagtttgggacagaagactaaatatttgcatgtgggctaatttatacagatccaagtcttggggatgagtgatgtgaagaagggataaattctctttcaattggagcatccatagggttttataaaggagtatgtaacctgttagtacgattaacgaagagtgtttacgtgtgaaacaatgatggaccctttccactcatttggcagcaacgaatggccatatcagaattgtcaaagagactctaaaacattgtccagattcaaaacacctgcttaacaagcttggttagaacgttctttgcattgcaacaaatagtgggaaatgtaagtgtttgattccgttgttgttatatatgcaattctgtttcattttatttccgcactttgggttgaattgtcctgtttctctatttaaagaaaaaagtgcttcattttgatgctttgtcgatcaaactgaggtttgattcccaagagacacatacagattgtatcataattagctaggtccagtttgatcactgtgattgtagttgacagatagtcaaaatgacctcttgttgttttgctggtgatcattatttcagtacctaagttttttttacccaaccctcacttcaacacatcttttgctgccaccatttcctttcgctttcggccgctggtcacaactcacaacagcaacaatgactaaaagaatctgcactaagtcaatttccagcttcttgttttattaaggaaaatctcgtgccatgtaaattgtcagacttttggtttgtttccagctcatacctggttttgaggtagtctatgttcttggcttgccatttctttttaatcttgagctatgttcttagaggcggctaagcagttcaggacttggttgttggttaacttattgtagcaatacttgttcttatttgggctttgctgggtgatccagaactcggccacaaagcctttcagtttgcctttccatttctgtctttggctctaaactccatgtaggtcgcattctattttggcgtgctcgctacaacaagtgatatactagttattttttttcgttcttcactaaatactagattttaacccgcggtacaccgcggaaacaatttattttttaaagttagtatacataaaagtttgcaaattgtatctatctataaatatttttattttatagtttacaattgttattaagtaacgtcctgccaaacccgtcccgccaacccgtcccataaaaaaaacatttattttattaatgttaatcttatttatgatatgtttatgaattattgtctaaatattttgtaattttgtaataattaaatgctatcaaatatctctgcgatttgacgattataattaaattgttatagtcatggagaaaaacaatatcaaaaatgataattttgtagtaaataaatgatattaaatattttgaaagttttattttagtaactaatcgtgtagttaatgtggagagatttagggaagattgttaaatgtcaaatatttaatttgaagattttttttctaattatcaaaaacaaacattaaaatccagtggcagctattgtaaataagtcccaactataagatttatttcacaaaattgctgcaaaaatgtatatatagatattcagcgcgtattttattttgtgctctattttcttcttgcctattacactgtcccatatattcctggctttggtcgttgtcactgggcaacggatatcctctccgaatgctattatggtttgttgatgaagaagatgctgaaacatatcacacctctggctctggtccgtgtgattgaaacaaaaaagacgaaaggatgtcttcttatctatttgattcagttgttgttttcataactagtaatttattacgttggtttggaaagagtcagtaagcggggatagctcagttgggagagcgtcagactgaagatctcgatccacgctcaccgcattacgttgtcttttcgtttttattttctttctatatatcttttactcattgattgtgttacatgaagcggggatagctcagttgggagagcgtcagactgaagatctgaaggtcgcgtgttcgatccacgctcaccgcaatatttagtcatttaatttttttcccaaagccatgcaaacgacgtcgtttaaaaccaaaacacacagagatagtcatatacggtgtcgctttatgaaaagctcgaattatactaacggtggttttacaatatgaagttcaaaaagcccattaaaaagcccactacatatcccaccgcctttacctctgaaccgactattttttttccaccctttatattcgttgtaacagcagagatttttatagtttggtttctttgaccggagaatctcgattaggttacgatg

SEQ ID NO: 34557 - DNA, 3000 bp, Unknown; identical to SEQ ID NO: 6089
  misc_feature (1)..( 3000): 2750-1469P.txt file - cDNA_ID_3079550; gDNA_ID_1620844; Annot_ID_170135

SEQ ID NO: 34558 - DNA, 3003 bp, Unknown
  misc_feature (1)..( 3003): 2750-1469P.txt file - cDNA_ID_3079569; gDNA_ID_1620845; Annot_ID_170193
ttcttcctattgaaaccctaaattctcttcttgaaatccaaatcttgtttcaagagtaaaccatgcggagcgagagaattgattcagatgaagcagaaacaaaatcgagaacaaatctctcgcaagaagtcgaagaatatatcaaagatacaattgatcattctttaggtcttccgatctccatggaatctcttcagaagaagctttatacggctgaagaatctcaacgccgtcttcgcgaacagtatcagggtctgatttcgcgattaaaggagaaagatcatgtaatcgatcgtgttagggttagtaatttctttctgggtatctttcgttttctgggatttgattgatttgaatctgaatctttttttttttttttttttttataagtctgaagcgagtatgaatgcgcaagcgttgaagaagtttgttgaagagaatcagaaattggctagtgagtgtgggaatttgttgagtcagtgtaagaaattggagaaagagtgtttgctttatcatcaagatcgtgatgcgttgatggagtttgggaatgaatctgatgagagagctagagaagcagaagctagggttcgtgaattggaggatgaaattggaagaatgtctgaggaaatgcagagatttaagcgtcaaatcggagatggtgaagtaagagtttcttcatattaaccctaaattttctttaattgggttaagttgggtttagaattgcattgccctcgagtaaattagtttgctttttgcacttgctggtttatagtttggttagcttgttcttgatgaaatggttactcaagtgctattgtcttctctctactctttaattagcacatggggtaccatcatttggttttctttgttaagttgacaacttgatttatctaagttctcatgaagtttgacttctcattgagtctctttgcagaaaagtcatagaatggtagatatgatgcacttgagagagagactatgctagtccacattaagtttctcttagtactatgaaatataaaatgtccttccatatcgcttttctcgctgaaggtgataacttgaggtggatatcaaatgggtttgtcatatatcctctattgttagttgttttcaatagcctgaggtggataaaggtagttgataagtttttggttgtctatgtgcttcagagattgcttgttccatccaatgtttaatggtactaatacgaggtgcatatttatcaaacaaatagaaattagaaagatctgttagagtcaacattagtaagaaaatgtatctattagctgctacttataatcatttcaatatagtttctttgtggtctgacagaactctgtattatcatttcataagtatccatgttgtgttcctttgcagaaagtcttacaattgttgatattatccagtagatgcacttaatagagagactctaatggtagtccacattatgtttctggtttttataattgtcagtccatatcgttttgctttctgagggtaataaaactttggattcttctgatatatcaaatgggtttttcatattattcatatatacagtattgttaggcgtttttgatagcttgaggtggataaaggctgttgataagtgtttgattgtctatgatgcttgagagattgcttgttccatccatgatttatctttctgtatccttgagatgtagcatattttatcaaacaaatgaagattagaaagatctgttagtgtcaacattagtcagaagatgtatctattagttgctacttttcatcatttcagctggaaacatagtatctttgtgttctgacagaagtctgtattttcatttctctctaaaggttgaaaactgtactacaccgttagaagaagatttgcttgattcagttttgggatcactcataagcaaagatgaaactataatggggcgtctcttcttggaggcaaacatccacgaccaatcgtgccaagccttgctgagcaagtgggatcacttaaagccttcaacgcaaaaggttctttctttagtttcaaaggcaaagaaattcgaaaaggaaaaagaatgcatcatcatgaatctcgctaaagctgagcaagaggtaataatcataaacgataacactctattgttcttaaatgattccacttgactcacaaactttttacaggtggaacttgtgagcacgctaaaccgaaagctggataaagaaaatcgtaagttgctaaggcaacaacaaagccctctttgctccgcagacaagaaccgaaacagcgcatctgcaaaggtaaaagtaccacaaaaagaaagaagtaaacactgcgaaggaaaaagcagctatgtggactctctctttgattctaacttaggagtgttgttctgtttgcagtcaaacaagagaaagagtccgaagacgatgagtagcccggtcgagaagaggcttgagtttagcagtccagaaattagcaggaagcctctatcacctgtatggaataactcaccagattctaagatgaacaacaattgatgataaacaaaatcaaacaactatctgtatcattcatatgtgaaaccggattatattgttgcttctctgaagctactaacaacatgtatcagtattgctatgaacaaatttgaccagaaaatcatgttttcaaactggtaaataactagcttattatatacaacagcagtgtaaaactgacatagcttactaaacactggtgtttaacatttcttacaaaaacgcaaccgttttcggtaacctacaacgacgtcgttgcgtctacaagaacagtgaaatttatacaaacgttgtcgttttcaagtacattttctaaacgacgtcattgcttctacaacaaacagtgagaatcatgaaacacgtcgttttaaaactaagaacgacgtcgttagtctattccaacacaataaatgtgaaattgcgttgcttttcgatttcttcttcttatccaaaactctctcagtcatg

SEQ ID NO: 34559 - DNA, 3000 bp, Unknown
  misc_feature (1)..( 3000): 2750-1469P.txt file - cDNA_ID_3079631; gDNA_ID_1620848; Annot_ID_170261
tatatataacacgctttcaaagaaatacagacgaacataaataataacataaagaatcaaatcacatgcgtacccaagatgacgtggacagaacagagaaatcacacttctatgtctcaatcaattctcaaaaatatctcaacattataccaaaaaaagaaattctcaaaaatatttcaacctttgactatatttaccaaaccccactttctggaacctcctaacttttaacttatgtattgtaatgatacacctttatacttttgcaagtagactaatctcatggcatctattgcttgctaatggtcggtctaagggaaatgatatatacagcattatacttctgtaattagacaatattaggagttcagaaagaagttgttaccctcgtttacgaaaaaaatgtttatattcaattatgaaaccaactcttctgaaattctgtgatagttttattgttcctcaatggtccacttattccccaccttgatatttttgcaaatgaggcttttgtcttactcataatgaagatccattcgaagacatatttttgtttctttccgttttttcaaaaacaataaaaaagtttttgttcacattttagaagagaagcaattcaccaattaatttcgtaaggtaacatgaaccaaagaagcaaaacaaaacatcattataaatatatttatactgacaccactgaaaggtaacttgaaccaaagaagaaaacacaacataaatatgattctgtgacattatcaaaaggtttaacgaacccaaccaagaagtaaacaaagcataattatgataggataataaaatagttaaataacgaaggccagtgtaattccctactggctattattttccttactagtagtatagatttttcttatctatcactattcagtaataaactttttttggagatccacgtagcaatggaaaaccttgaaatcgcagttcggagctgctatagtgtctaaaatcatcttcgccgtgcgctcttgactcaccctcgcgttattcttttccacaagcaccgcttctacgatcttattgaaccctttccctcggctacgagccacgaaatcaaccagagcagcttgtaccggtcccaaacttgggctatacgccactgattcaatgtaccatccacggtaccacttcccttcgtcatcctgcagcgccactcccgacggagactcagtgtacggagagaacgaattgtttgccgcggctagagccttgcacttcaaatgggaacaatctgatgagcatatctcttcggtagaacccgaaagggtgaggcagttatcgcgcttctcgagaaggagaggggaaccctttgggaggacgtcgtcaggggtgaatctgtacggaaggaggagcttaaggctcgagaatgatccttctgcttcatgctttgatttgagcaggattttgatgtcaagctcgttgctggtctccataagaaactggcggcagtttccgcacggcgcgccgaattcgatgcagtcactagagatggcgactgctaactgacggagacctttctcggagtttagtgcgaggttggtgacgaggaattgctcggggtggatggagtggtgaagaggaagacctgggaattcgacattgacgcctaaatagacccgacccgatgatgcgcgtccaacggctccgactttgtatttggagattggaccccgagccagagacatcgcctttctgatcagctttggaagtctgatgggttcggtgacaccttccgatgctgcttctttggcagtgaaaacgaacttgtacttatcttgtgccgccattgccctgttttgagattctacgacgagattttggaaatgagttaacaagttaggacgttgggccatttaggatcgtgtttcgagtttttttttggttgagagatatgaaatgagatgagaagtggtattgagtctttgcctatttatataggtgtgtcgtgtctgtttgcatattgtgaaaggactttttaaaatcgtgtttaggtcattcgtatactcaaaacaatagttagtgtgtgaacttcaagattaaaaaaaggtgattgtgacgatcaacattcatgaactagcttttaaagcaaagtagtaattagggttaattttctagttagtataaagtaatgtactgtaatgaagagtatttattcgaggaagactaagtagttcttaattaacttttactgagtagtaacatttaatggtttgaatagtactaattaatataggttaagaattacatggacaggcaagaatataaacgagattatgactgtatctccgtcatcaagactcatgctgactcatgaaccatttctcaaaacaaaattgcttttaaaagtaagtaaggttagtttttttttttttttttaaattctatactaaagaatggttaaaaaaataaaattcaatagtcttgattagtcataaattcatggtatgaaaattgggaatcttattcttaaaaagttataattaaattcattgagtttgtgtgagattgtgacaatataaaaatatcaaataatactctaagtccatgctatatatatattttctctttgtgtttaaaattgaatcttgttcagaaatgagcactttgggtagatcattttgaacttaaatgtatgatatatatttgttcgaaaaatatggattccagttaattttttgagtgaatatggattgaaacgttttaagaaggataattgtgttactctaatttttgtaacaataaacgttattatatttttacagttactccccataactttgtaaaaagtaaagaaaagccccaaacagagagaaacgaccacgtaagagtggtttggatcactaaactcgaatcgtcatcttcatcgatcgatatgcgacacatcatcttcatcgtcatgttctgtcttgcaaagttcaaacctttttacaaatcagacaaaacccaacaattaatgaaacaatg

SEQ ID NO: 34560 - DNA, 3000 bp, Unknown
  misc_feature (1)..( 3000): 2750-1469P.txt file - cDNA_ID_3079647; gDNA_ID_2214645; Annot_ID_188486
aaacttttaatttgtactatttggctttccaggacacgatgaatcatacaatccttctttggaatatattccaacagaggaggagaaagcctcatatgagttgatgtttgaggaagatcgtccaaaattcattcctacaaggtatgtaacagtttcgcttattctactctaatgtagtttctttggtatttgtccgctgagcgtttcagtaaatatatctgcgcataggtttacatctttgagaagcatccctgcgtatgagaatgcactgaaggagtcttttgagcgttgtttggatctatacctatgtccaagagttcgaaagaagagagtgagtacttatcatctcagtttttggtttcttctttgtttttcccgtattttttcttacattatgtttcttttctccagataaacatcgaccctgaatctttgaagcctaagctacctagtaggaaggatcttagaccttatcctaactcctgttatcttgaatataaaggccatacaggggctgttacttcaatatccactgatagttctggcgagtggatagcctcaggtatttcattattttttttttttttcaatgaggtctcttttgttttcaagatgctaatcttgtattcttttttccttcaaaggttcaactgatggatctgtccgtatgtgggaagtggagactggtagatgccttaaggtctggcagtttgacgaagctatcatgtgtgtggcttggaatcctctttccaggcttccagttttagccgttgccatgtgagtgaggatcttgtgaatatgcttttgaatttattataattgtctgttgtgaaaccttctcatctcacattgcaggggacgagatttgttttttctgaacactgaacttgggactgatgaggaacaggaaattactaaagagaggcttcactcaggaaacatcccagaaccagacgcatctggtaagtggcttggaataactgccatcatctcgtatgtaattgtgatgaaattccaaatgattaaatctttttggttggtatgttttgcacgacttcatagttgcagcaattgtaacctggctacctgatgagttatatggagggattaagataagacattttaaggtacacttttgcaaaagattctccttttaacagttattacataaggaaaatcttaaactggtttgtttactttcagagcatatcgtctattgactggcatcgtaaaggagactatctctcaacagtgatggcatccggggaaacacggggagtggtattgcaccaactgtcaaaacagaaaacacaaaggctcccatttaagattcgtggacttccagtctgtacactttttcatcccagcctttcttacttcttcgttgcgacaagaaaggacgtgcgtgtttacaatcttttgaagccaggcgaggccaccaaaaagcttgagacaggattgagagaaatctcatcaatggcgattcatcctggtggtgataatctgatagtaggaagcaaagaagggaagatgtgttggtttgacatggatctatcttcgaaaccatacaagactctcaagaatcatcctaaagacattacaaatgtggcagttcatcgatcatatccgttatttgcttcgtgctcggaggattcaacagcttatgttttccatggaatggtgtataatgatctgaaccagaatcctctgattgtgccattggagattctaagaggtcattcttcaaaaggaggtcagtttttacagtgtatttgattcttacaagaatacactatcgcatattaacttgtaagatcgtttatattaatgtgttttgattattttttatgactgcaggagtcttggactgcaagtttcatccgagacaaccatggctattcactgcaggcgctgactctattatcaaactctattgccactagattggtcgcaaaccatattttgacaattttcatctcttttcttctttgttgtattcaccacctttactcaaatattgtatcgtacaattttgttatactggatttattattgagatttctaacttgtagcacttccaaaatggtaaagtccaaaatcttattgtatcgatttatttggcagcgttggttaagttgtggcaagtccttaaacccaaatgttgatttgatagttttttaacgttcactcacaagcgccacgtcatcaccgaaatatctgaaatatctaataaaggcttcttctttcacaaatcccaaacctttttttttctctgctaacgaaaaaagccatcttctttgctactactaatctactattacactgaatcgtttgggttcttcttcttcttcagctgctactttgttcgagtgattgctgacatgccgtcagcgtcggagattgttgacaggtttgtttgtccgttttttttgtttttgttttcccgcttgtgtatgtgtgctaattgttcattgttaaagattttgtttttacaggattgttgttgtttttgagtggtatcaagttccttaaagtaacttcttttgtttgtttagtagttgaaagctagaaggttttcactttagggtttttggggtttttcgtagacagaaatttgttaattttgggcacaatttgtctcttttggattacgttctgtgcgatttgtggcttcgagttcgtgtggggttaagagacttggaaattagaggatctttagctggaataaacgttaaatgtggtacctttcctgagtttgctctgttctaattgtggtcgtgatggggtttctttttattcgctgtgatgctgcagattgtgaaaaattcttgtagctacttcggtgttggtagattctgtgatgcttaaaaattgtttctttgaaggtgctttgatcccaagtatagttgaacatgttgctttaaatcttgttaagagaaaaaatgggacttgcttctgtgcccaatagttcacgagcatgttgctaatcttgcttctatg

SEQ ID NO: 34561 - DNA, 3000 bp, Unknown; identical to SEQ ID NO: 6150
  misc_feature (1)..( 3000): 2750-1469P.txt file - cDNA_ID_3079659; gDNA_ID_2214645; Annot_ID_188481

SEQ ID NO: 34562 - DNA, 3000 bp, Unknown; identical to SEQ ID NO: 6150
  misc_feature (1)..( 3000): 2750-1469P.txt file - cDNA_ID_3079659; gDNA_ID_1620849; Annot_ID_170293

SEQ ID NO: 34563 - DNA, 3000 bp, Unknown; identical to SEQ ID NO: 6143
  misc_feature (1)..( 3000): 2750-1469P.txt file - cDNA_ID_3079662; gDNA_ID_1620849; Annot_ID_170292

SEQ ID NO: 34564 - DNA, 3000 bp, Unknown; identical to SEQ ID NO: 28158
  misc_feature (1)..( 3000): 2750-1469P.txt file - cDNA_ID_3079667; gDNA_ID_1620849; Annot_ID_170289

SEQ ID NO: 34565 - DNA, 3000 bp, Unknown; identical to SEQ ID NO: 6149
  misc_feature (1)..( 3000): 2750-1469P.txt file - cDNA_ID_3079672; gDNA_ID_2214699; Annot_ID_189611

SEQ ID NO: 34566 - DNA, 3000 bp, Unknown; identical to SEQ ID NO: 6149
  misc_feature (1)..( 3000): 2750-1469P.txt file - cDNA_ID_3079672; gDNA_ID_1620849; Annot_ID_170281

SEQ ID NO: 34567 - DNA, 3000 bp, Unknown; identical to SEQ ID NO: 6158
  misc_feature (1)..( 3000): 2750-1469P.txt file - cDNA_ID_3079731; gDNA_ID_1620852; Annot_ID_50999

SEQ ID NO: 34568 - DNA, 3000 bp, Unknown; identical to SEQ ID NO: 6170
  misc_feature (1)..( 3000): 2750-1469P.txt file - cDNA_ID_3079737; gDNA_ID_1620852; Annot_ID_170353

SEQ ID NO: 34569 - DNA, 3003 bp, Unknown
  misc_feature (1)..( 3003): 2750-1469P.txt file - cDNA_ID_3079737; gDNA_ID_1620520; Annot_ID_159442
tactatacattcaaacttatatatcaacacacatatatgatcatttgataacacctaccatttgtgttatacatatattttatagagaagttatagaaaattatactgagtatacatctatgtgtcatcgaaataagctgataataacgaatacacgttttctttttatgtctggagtagaatacagcattcatgcccttacgttgcaggttcccatcattttacaaatattctcttctcttttctactttctcttttttgatgtaatacgatctatttatttattctatatttcactatatatatctcagatgtccaacgtttcagtattgcattgccactcgaattacctaagataaaaacgaattatcactttgatttttcgcacttatagttaaatctattctcaaaatttaaacaaacatgcagaggcaagtggcactcatcaagcagtccctctttgatcaggttttggtcgtttgtttcttcgtattttcgtaatataacttcgtacgtcgtaccacttatatatgaatttcttcatataatttagaaaatgactaatataggaaaatgcatgcagggatatctcgacgaacaattcatggagttagaagagctccaagatgatgcaaaccctaattttgttgaagaagtttccgcattatacttcaaagattcagctcggttaatcaataacattgaccaagctttgtgagtattattttgttttctattatatatatattttttttttttcagttttctaatcatttttacaatgcagggaaagaggatcatttgatttcaatcggctggatagttacatgcatcagtttaagggaagcagcacgaggtaatttccccccttagtttttgactattctaattacgccttcaagaaataattttacttaaagaaatgcgaatacttaaatgtttataagataaaagaatgtaacgcaaaagtacattaaaattacttccattctcattcaggattcaatgacagaatctactttaaccagaaataattagattttatgatcgttagttatactgacaaatgttgcatttcttttttttgtagcattggggcaagtaaagtgaaagctgaatgcactacgtttagggaatactgcagagctggaaatgcggaagggtactttcgtctttatacttatataccttcatgcttctcgtttttaacagaaaactaagtaacggggtcaaaatgaaaataagtatagtttagatggctaaaattgctgcaattaatccgctgaaccttgaacttttactttacttcattttcgaccccctaattagttttcttcgctttttcttacttgcagatgcttgaggactttccagcaactgaagaaagaacactcaacgttgagaaagaagcttgaacattatttccaggcgagccaataatcaattatgcttaataatttacataattagaatgtgattagaagttatcatcaatcacttttgatatagtatttgctgaagtgaaattttttgtaatgaacagttggcaaggcaggcggggcctaaggagacagcacgtaggcccaagtaagagagaaagagagagagacagagataaatgaggaatcgtcgtcgaattttgtagcaaaactatataataaatagttcctctttatttttatatatttcgatgtacgttataaagaaggttttggacttttatattatgtccgttaataaacggtccaaatgtctctatgtttttccccttatatcgccaaattttcccttgggagttttatagctacgattacctcgtaacatatggcttcctctaataacggaatacagaaaagagtggaccaaaaaaatgcattttttcgattctatgatgaatgcattaccttgtttacaaaaggaaaaaaaaaagaaactaagctttacattattcggtttgtttccaggaaccgtgtccaaatcctaaatattcttacctatttttatatcattatgttaatatttgtctctactagtactgattaataaatatttaaaaaagaaaaaaaaaaccaaaatattcttaggtaaaagtctaaaataacattatcattatgttactatttgtctctactaaaactaattattaaaaaaaaaagaatgccatggcttagatgcaaactattcttagctaaaagtctaaaataataacattatcataaacaattaatattacacttttccatctaatttctcttacatgccctatttttcaaacgatgtcgtttaagaatatcacatagaccttctatttcatgaaaaaactaactcaccaatgcaaataaataaatcaaatgtttgtttgtggataaagtaaaacgttttctttcaatggcccagcatttactaaaatttatttcaagttcttccacgtaaagtctacactacatacactcatacaggcagtgtaacgctgattcgtagagctggagagtatcacaacaataaatttctcttccgaaagaaaacagcctaatattagggagatatttacatactctataagatgttctttaatctcttatatatattacatatgaaagaattaattgtttaattattatccaaagcgacgtgaaaccactctcatttattagccctagctatatctcacaacctccatcttccttactttaaaaacacagaccagatcctatttatagcatccatgtgcgccattgaaaggtaaatttatttaataaagtttacctataatatcaaattatgcaaaacacaggctggttcagttttttccacgaatcaaaaatggttggagaaatattgaataagagagagagagagagagagagagatagagtttcagagttgacacaacattgaagtaaactaaactcctaacctctttatctatgtgtatatataaaactcaaaagtacatataatcttcaccattcacacatagtcacataccaaagcaaaaacatg

SEQ ID NO: 34570 - DNA, 3000 bp, Unknown; identical to SEQ ID NO: 6158
  misc_feature (1)..( 3000): 2750-1469P.txt file - cDNA_ID_3079746; gDNA_ID_1620852; Annot_ID_170344

SEQ ID NO: 34571 - DNA, 3003 bp, Unknown
  misc_feature (1)..( 3003): 2750-1469P.txt file - cDNA_ID_3079746; gDNA_ID_1620607; Annot_ID_161812
ccaaaccaaatttgactaccatccgtttgcaattagaattcaattttcctttcatgttactatttcaaacagaaacatgccaaaaatggaacttacctcattatgtccgataactaaccgttatgctactccttaagaaacgtgtgctactatcatatcattaatacacaaattcaactcatttgcttcatattcacaacaatttaatagtttcacgtatcgtggatatatcgcgagattatacaatatcttctattaattaattgctggcatgattgtaaaaaaaaaaaaaaaactgctggcatgtattcaaaaaaatcaatatatacccccatgcagttcttcgtagatggatcactcgactctttctatctatctcttatcaggtcaaatcttattctctcatatctgatagtatttttgtaaatattggttattaaaaaattgtgttcgtaattacaggtaattcgaaagacatcaaaagcaagcaaaagatggctcaaaaggtggaagcacaaggaggtattggaggagatgtatgggatgatggtgctcacgacggcgttagaaaggtgcatgtagggcaaggccttgatggtgtttcgtttatcaatgtcgtgtacgagaatggttcacaggaagttgtaggaggtgaacatggaaagaagtcactaattggaatcgaaacggtacgtaaaaatgttttgcttcgaatccactaatcttgtctttattttgcttaagtttatattatatgttcttaaaactactaaactctcaatactagggatataacgttatgataggataatagctcgcggaccatccaattagccatgtttagaatttaggtcgtatcagttctaatgattaattatagttctaaagccaaacctaaatattaaaaataagaaccaataattaccagaccaattgacgccttatacgtataattatggttctaacaagccaaacctaaaccttaaactattactcaatatatctttctatttttgcagtttgaggttgatgcagacgactacatcgtagcagtgcaggtgacctatgacaaaatatttggctatgactccgacatcatcacatccataaccttctctacattcaagggaaaaacctcgccaccctacggattagataccgaaaataagtttgtactcaaggaaaagaacggtggcaaacttgttgggttccatggacgcgctggcgaaattctatatgctcttggagcgtattttactacaaccacaactcctttgactcctgccaagaaactaccggctgttggtggtgacgaaggaactgcctgggatgatggtgctttcgatggtgttaagaaagtgtatatagggcaagcccaagatggtatatcggccgtgaagtttgtgtacgataagggcgccgaggatattgtaggagatgaacatggaaatgatactctactcggatttgaagaggtataatacttcttgctttcttctcttgtggttgaatgtgaaatgtttttacaaaatgatatgaatatcttacacaaaaatatgcttgggtaagggaatccacataaactttcgtggataaaatcatgcatattttatattagctagtgttgaatatctccatttttgatataaaatattttaactaactcaattgttttatttggtttccatcaattgcagttccaacttgactatccaagtgaatatattactgcagttgaaggcacatatgacaaaatatttggttttgagactgaagtcataaatatgcttaggttcaaaactaataagaaaacgtctcctccctttggaattgaagctggcacagccttcgaactcaaagaagaaggttgcaagatcgtcgggtttcatggaaaagtaagtgcggtgcttcatcagtttggagtccatatccttcctgtcaccaactgatcatcacatatatatatatatatatatgtctcttctataccaccaagtttgtcacgtgtgatatcttcattaagttttaagttttctaatttttcttgttctgtttatctatgttttaagtgtctttaagtatggtgttttgtgaagttgttatgcctgtaatattatatgtgattggctttaataaaagtgggtgattattatacatatcagttgcacattaggagaaaagcttatattcatactcagtatctcggcatctagtgtatgatggaaacaattatctttaagactttagcattatttaaagtgagaaacaagaaaacttcgccataattggagaattggtcattttgatcaaaatccaacaccagactacgcgcagtccgtttcgaaggaggtacactccacttagtatctagatttaatttattatacagtatgtttaattttttttttttttcaaacacatatttttcttcttaagaatatatatggaaatataatatgttaattatgtaatgatcaaataatattaaaacacacatatatatatatatataaaccatatgagcaattggataacgggtaaaatctaaccaggtttcaaaaattgtaactattgttgatttttttttttttttgatcaacaactattgttgagaaaaacatgtattatgtgagcaaaggaaaaaaagggaaaaaaaactacagatcagtaatatcaactactccaattcaacttatttgcttcatattcacaacattctaatattttaatgactcgtggatcacgagattatattaacatttctatagattaattagtggcctacattcaatgatatcaataattacacattttatccagaaataaaaataatcaataaatacgcatgaaggtcattgtaatgcatatcaataactcgttccctctctcctcaggtaaattctcagtctctcgtctgataatagttttgtagagtttggttaataaaactaatcgtgtacgctactaatacgtacaggtaactaattaatattcaaaaagatg

SEQ ID NO: 34572 - DNA, 3003 bp, Unknown
  misc_feature (1)..( 3003): 2750-1469P.txt file - cDNA_ID_3079748; gDNA_ID_1620852; Annot_ID_170343
aatcacacaaacagttaaattccattataaagtcaccctcatggcttaagaaaaagaggtggaacttttaagtgacctacccgagattccagattcatcagaatcgcagattttgttgctgctttggcgcgatcaagatgtttctgattaactgccaaagcatgtacaccagagtaaataatatgtctgtatgagttgataaatggttctaaaaaagaatggatgaaatatatagaaaaccttttccatcagcaacagcgttcatttcactagctactaattcaattccctgtgaagcaaattcaggactctgcaacgccaaaagaatgtaagcaaacccacattgcaaagtgctaaaaaccgttaataagcaacaactagaaatcggtgcaaactcaccgtgcaaccatagattccaaacaatccggtattgttaaagacgctagtgaatgcagtgcatgattgaaactgctgatgttggttcaaaaggcgaagatctgcatccagacaataaagaaaccaatctcatcatcatcatgaccaacaaataactaacttacattaaaacatgagtgttgaaaaaccgcaagtagaaagagaacacattcagagacttacagagccaagagtgcattccttttccagggcctcccgcagaaaatgagccacctcctcccataagcatctgataagaattggattttacacaattaagtctttgcgtttgaaagatcaagtaatgtatttgagtcaggcacctgaagaacagttgcaatgatagcttccttctcgttattccatcctggcacttcaaaagcaagcgcaaaatgtgtagcctgagaatggtgaaacaaaaaaagaaagatattaggaataataaaccttcttttactcaaagaagcccattgaaacgtcatatttgtacctctccacccgtatgttgacggaaatctccaccgacatattgagactttggctccgcaggtcggggtacattagggaggtcagatagtaatggctcaaccacttttagaagttcttcatgatcaactccactagctgctaggaccattcgtgaagcagtgtaattctcctgaaatttcagaacaaaatgagaaaaaagacacatctacgaaataacaaaccaaaagccagtgatactagttccagcgaatgcaataatctcttgtgttaacggtcttacaaaaacaaaattctccaagacctccccagtcaatccagtaattgcagattcaggtgcatacaatggatttgccaatgcgccagagtaaccagcagaatgaactgcctccaaaagaaaacccattggattcgttgcgaattctcctatctctactttcacctttcggagctgccaggagaaaaatgatgaaaacagtgtaaaaaaattgcttagctttaatgtttgtgagatacatgcaacatgacatgaagtacctcttcattcacttcccaatccaaaaaagcagggttcctcacactatcaataagcacttcaaccatttcgggaacataggttttgagagcatcaattgtgtaacccatctgctctcgggatgcagaagctgaagtattacctccaatagcctctatttcccttacaaggcgaaaatggcttctgttcaatgtactcttgaatgccatcctttcaagcaagtgcgtcgctccacggaattgaggagtctcataaatagaaccacagtcaacgtataaaccaatggaagctgctggattctgaacaaaatttcactcaaaatcactttccagtagtttttaacaggaagttgatgttgggattactaaaagaagctctcaccggagacatctcagtggctatagtcagaccatttggaagagtagtggtcttaagtttgctaggctcaacatggtcagagagtggtggtggaagagagacaccagccaagggaatgttcatagaaggaagtgaactagagtagcctccacttagccagctggaggaagaagagctcgttgcaacagcactagaacttgcataacgagaagctcgaaaattgtggtttagaatgccctataaacacacacacacacacacacatcctaagcatcattaatctcttgattcaattaacattgtaaaaataagaactttcgaaacagagacatttcataaacctgcaaaaagcatgaataatggcaccagctactataaagcgataaaattgaatcaagatctataagaatctaagagaccctttaatccaaatccaaaaacaatgaatcatacaaattgttcaatactaagcattctcctaaaaaaaccagaatctcaatggaaacaagtgaagtaggacattgaccttaagggccttggctcgagaagctgccgtacggtacatgatgatgactgcgaaaccctagcttggtcagatgagtaccggtgaatgtggctgacgacgggagagagatagaggccgagtcagagctgaaaagaaacgagagaagggaacgattttttttcctaattaaggttattggatcgggcaattgcttctaattacattgataggcccatatgatataatagtcttggcccaaattataacatatagaaaagatgaatttaaagcccatgtattgtagtggtgtgatcctattatattttctctcaattatattttttttcttttctttttcacgtaccattgtgtaaaaattcaagtaaggtaacgacatttacatgcagtcacaaatgaaacaagaatttttttgaggtgtgtgtaaagtgaaacgaaaaaagtactaagaaagtttatcttctctaagttaatagaattattttgaaacgtagtatccacatatatagaagactcgtgtgtggtgcatatatatactgcataacttcaattgaactgtattatataactatgactatccatccatgggaagataagaatgagagccgaatgctaaaaagcaagggacccgaattaaacaaaaatg

SEQ ID NO: 34573 - DNA, 3000 bp, Unknown; identical to SEQ ID NO: 6189
  misc_feature (1)..( 3000): 2750-1469P.txt file - cDNA_ID_3079760; gDNA_ID_1620863; Annot_ID_170395

SEQ ID NO: 34574 - DNA, 3000 bp, Unknown
  misc_feature (1)..( 3000): 2750-1469P.txt file - cDNA_ID_3079768; gDNA_ID_1620422; Annot_ID_156627
gcagcaggagtgtttttcccggttctgcgggtgcaattaccgccttgggcagccggagcatgtatggcactctcttcggttagtgttgtttgctcttctttgcttcttagaagatacaagaagccaagacttaccactgttttgaaaatcaccacggagtaaaaagtcctttgttttcttacattggagtgactcgactacttttgttctgaaaataatttgtatttacttttcttttgtgctgttgttgttgtaatcatgtaacaacgatattggtcttggagaggtttctttttttctgtaagaaatgtgtcctctcggcctttgttgtaaaaaaatggtttcgatgctttgtgctcgattattaatgtaaaatggtgaaagtagtgaattcctctaatgtgactataaaatgatatttttatctgataatcgaatacagatttaacacgacatattgaatttagaattgttctgaattttgcgacatcaattattattattatgtaagaagtaagcaactatagcttttgccaatctttagcgagatttccggtttaatatacctaaggtttttgcttcacgagtccattgaagtccaagattaattatccattcaccatcttagtgactgtttattgggagttgattttcgtatcagaccgcactgaacagcagttgtagatcatttttgatctttcgtttcttgttcctcacattccatttgtttcttctttttcatcttgtgtaggagtggttagcttacgtgaagtgggataccttctgtcttaattttcaagtcaaagatcttaccaactttttcttcctttgtacttgacgactcatacatattcttcttcgttctttcaatttgagacttcttctccttctttggtcttcttgtcaattggatgattgagtagagaatcaacttccaacagtaatcaaatgcctcaaagtttacaaagttgcattgtgcttccgatgattgttggactgtcaagatagtgtctccttcgaccatgttcatagtagagcacatgcatagatcaaattcgtgaaagctgatttggcatctgcaaagatcaaagtgatacctatacctataagtattaaccaccagtcaccagatttaacattgttagagaaaaacttgtatatattcatgatgtatatctaaatctaatcatcaagaaagtattttgatcaagtcaaaattacagaattgttttgttatttgaatacaccaaaatttataatatactagattaggacttgcatatctattaacatgttgaatattgataagtacctcatttaaaacaaaatttcagttatacgtggttaatttcgcaatacaacattaagaaaaaaaatcacatttcaatatcataaacttaatatcaatcaataaaagccaaaacatttcatatcagaatagtataagtatcatatcaaatttacgtacatacatagttagtattacacaaataataataataataataataataataataataataataaataataataataataataataataaaaataccatgagtacagaaaatacaatttgacatatcgacacgaaaattagaaaacaaacatcatcttaaattaatttttgtcggcacctcataatctcatgactaataagtaataatgataccacgtgtcacatcagtaagaggcttataaatatattaatcttttcatgaaccagtagaaaatttattcccatgatctcattttgtttattttttagtttcctttttgtacaaatcaaaaacactatggtacaatgctaaacattctaattttagatatatataacttaaattgttattttatattgttacactcattgtttttattgcatattcatgtgtaagtgcatggaaatattaaaaatttgaaaaccttattacataaaattgagtactcaatctagtctctcttataagtagacaatgagttcaaaataattaaatcaaatatagtaaaaaataaattcaattccaagatttattaatatagttttcattcgcatgacaatttgtttcgctgtttagcctacgaaaataatcaaactttaaaattagtaatgtaaagtttgcaaatttgcatgcctagtcttatcaactcttcgaaaacatgtttgaatttgtcatctctagtgagaagtgtcaagtatggtgttttgaggcttgcgacattcacatcctttcatatagatttttctagtatttttcgaaattcgaccatacatcgatgagaaacttttctctgacactcatgtcacacttcagaaaaacatattattgtattatttgattgatatttttggttcaaaattttaaaaaattatgaatgtaaaaactaaaactaaataatcatatttgaccaactgaatgtggaaattatatttgaccaactgaatgtgaaaattaaattttatgaatgtaaaaagtgaaacaaaaaatttattaaagtcaaaatctcgtccgagctcagctgaatgtggaaattgaatttaataattagagttgcatcaattgcagttataggtatttcacatttcataaaaagcatattataatatcaattggcttatctttttagttcaaaattacatgtttatgagggtaaaaaataaaatacaagtctcggctaagtttgatatactacaaaatcaactaaaatttcgtcataaaaaaaaaatcattgtggtcgtatctttaggttaactgtgtataagtgaataattaaggataaacgtcagattctaggccttttggaataacggcccaataattattatttgggcctgttaatcacttgtttccccttaaacctttggcgcccaaacaaattagggctttatcttatcttcgcgattctctcatttcctccctctaaaattccccggcgacacagttcaccggaaatcgtagaataaatcagattctttctctttagtatgaaacaatg

SEQ ID NO: 34575 - DNA, 3003 bp, Unknown; identical to SEQ ID NO: 20985
  misc_feature (1)..( 3003): 2750-1469P.txt file - cDNA_ID_3079768; gDNA_ID_1620863; Annot_ID_170391

SEQ ID NO: 34576 - DNA, 3000 bp, Unknown; identical to SEQ ID NO: 6185
  misc_feature (1)..( 3000): 2750-1469P.txt file - cDNA_ID_3079771; gDNA_ID_1620863; Annot_ID_51283

SEQ ID NO: 34577 - DNA, 3000 bp, Unknown; identical to SEQ ID NO: 6192
  misc_feature (1)..( 3000): 2750-1469P.txt file - cDNA_ID_3079771; gDNA_ID_1620863; Annot_ID_170386

SEQ ID NO: 34578 - DNA, 3000 bp, Unknown; identical to SEQ ID NO: 6205
  misc_feature (1)..( 3000): 2750-1469P.txt file - cDNA_ID_3079790; gDNA_ID_1620864; Annot_ID_170432

SEQ ID NO: 34579 - DNA, 3000 bp, Unknown; identical to SEQ ID NO: 6200
  misc_feature (1)..( 3000): 2750-1469P.txt file - cDNA_ID_3079801; gDNA_ID_1620864; Annot_ID_170409

SEQ ID NO: 34580 - DNA, 3000 bp, Unknown
  misc_feature (1)..( 3000): 2750-1469P.txt file - cDNA_ID_3079817; gDNA_ID_2684600; Annot_ID_193191
tccgaactgcaacaccgataaacttagtacgctttatttctatgggattctgtaatataatagttctgctaaaactttggtttctctgtttaatgaacagagatttatcaaataatgatttatcaggagatattccaacattttttgctgagatgaagtcgttgaaactcatgtgagtttcttttcacatactctctcagtctttcactgcacttattgttttgctttgaaagatttagtcttttcattcacagaaacttaagtggaaacccgaaccttaatctcacagcaattccagactctcttcagcaaagggtaaacagcaaatctttaacactaatgtaagatgaccacactcctctgaacagtccttataagttatatgtagtgctacaataactctattctaatctctttttttgttttcttttctgttttccatcatttttaatgattacagtttgggtgaaaacctgactctgactcccaaaaaagagagtaaaaaggttcccatggttgctatcgcagcgtcagtggctggcgtgttcgctctgctcgttatcttagccatattttttgtcattaaaaggaaaaatgtgaaagctcataagtgtatgaatctccaccaggtcttgatattagtgaaaaatgaaaacttttgctctttcatttcacatgtttttatcttattttacagctccaggaccacccccattagtcactcccggtatagttaaaagtgagacaagatcatccaatccatcaatcataacaagggaacgcaagatcacgtatccagaggtactgaagatgactaataacttcgagagagttcttggcaaaggaggctttggaacagtgtatcatggaaacttggatggtgctgaagtggcagtgaaaatgctttctcattcatcagctcaaggttataaagagttcaaagcagaggtacttcaagaaaaaatggttttgttaatccttttttttaaaatattactttctcagttatgaagttgtcatgggacactttgatatctttcgtaggttgaacttcttttaagagttcaccatagacatttggtgggacttgtgggttactgtgatgatggagacaacttggctctgatttatgaatatatggcaaatggagacctgagggagaatatgtcaggtaacatttttaatttagagactgatctgagtttttttgccaaaaaaaagagactctgatatagtcgaatcttccgtggtttaaaaataaaataggaaaacgtggaggcaatgtccttacctgggaaaacaggatgcaaatagctgtagaggctgcacaaggtgaacaaagttttgacttattctctctacctttgtttgactcattaccaaaaaatattgtttcttgatgttcattttatgatgtatgaaagcaaactctacataagcaaacacattttgtgacagggctggagtatctgcacaatggatgtaggcctcctatggtacatagagatgttaaaactactaacattttattgaatgagcggtgtggagcaaaactagccgactttgggctctcgagatctttcccaatcgatggcgaatgtcatgtttcgacagtggttgcgggtacacctggttacctagacccggagtgagtgagctcaatcaaattttaagagttgtgttgttgaagccaaatacttatatgaaatttatattattcatcttatattattttcaggtactacagaacaaactggctaagcgagaagagtgacgtgtacagcttcggtgtagtgctattagagatagtcacaaaccagcctgtgatagataaaacccgggagagacctcacatcaatgactgggttgggttcatgctcactaaaggagacatcaagagcatcgttgacccgaaactgatgggggactatgatacaaacggtgcatggaagattgtggagctagctctggcctgtgtgaacccatcttcgaaccggagaccaacaatggcacacgttgtgatggagctaaacgactgtgtggccttagaaaatgcaaggcggcaaggtagtgaagagatgtactcaatgggttctgttgactatagtctctcttctacttctgactttgctcctggagccagataaatttgagaaattcttttatgtgattttatgggaaagcaatcttgttgttattttgtttctttgtgtatttcccaatgtatgttttgaagaaacaatgtacattctatcttcgtgggtgcaggtgttttgattactctgttttgaaactttttgtgtgttactatataaatatttttcttaaaaggattaattatgtaatactctttattttaatttttacgtattaatgcatcaagctagttaacaactagtgacagctcaattttcggaatcatacacatttagaagtcaagggctgactaaaatcattggaggttgcattggcatgcacaaacattacaggccacgcccacattgatataggagacttctcaaacatgatcgttgacttttgacgttggattcatccaggacgccaaagacacaaacaaagagacaaatcaaccaacgaattgccatacaaaagtcaaagtcaacaaattcatgagaacatttgtggattaatagtaataatacaccgaaattacattatgtggattgataatacaccgttgttttgagtttacttatagtcaacggtgttttttgttctaaagaacataacaataataactcttgtcattgttgacgaaaaacaaatactacttcttatatcattttcactcaacttgctctatcgaatcattttgcatcgtgaaaacatattctcaatcaattaatttattcaatttcaattatgttataagcagttgacttggacttttgagtagtatagctcatatagtcatattctcatatgcataacttgctatcttaaaaaaaagctctcctgtggacagtaaggagaacaatg

SEQ ID NO: 34581 - DNA, 70 bp, Unknown; identical to SEQ ID NO: 56
  misc_feature (1)..( 70): 2750-1469P.txt file - cDNA_ID_3079817; gDNA_ID_1860; Annot_ID_145390

SEQ ID NO: 34582 - DNA, 3003 bp, Unknown
  misc_feature (1)..( 3003): 2750-1469P.txt file - cDNA_ID_3079825; gDNA_ID_2684600; Annot_ID_193189
atagtgacgaagaataaaaaatttacgtatgcggaggttttaaccatgacaaacaatttccaaaaaatccttggaaaaggaggatttggaattgtatattatggttcagtaaacggtacagagcaggttgctgtgaaaatgctttcccattcatcagctcaaggatataagcaatttaaagctgaggtattcataccacaactcataatggaattttgtgtgaaacattccagagtttctttcaaagctaatttggtgtatcattatggtacgttaggttgaacttcttcttagagtacatcacaagaatttggtaggccttgtcgggtattgcgaagaaggagataaattggctctcatctacgaatacatggccaatggagacttagatgagcatatgtcaggtaaacataatatttgtttttactagaaaggcaacatatttggttttcataacaatacatcatggtgaaactataacataccaaatggtaactctttaagaaaaagaaaaacaaataataactcagaataatatatttttttgtcatttacaattcactcattagttatttttttgaatataattttgaatatttgtctattgaatgtaagaatctaacacacattagttatttttttaacaatacataggaaaacgaggtggttctatattaaattggggaacaaggctaaagatagctctcgaggctgcacaaggttcgtattgatttctcaaatacctaacctcatcatattctttctttgtttcttttgctttgactgactgaaactttgtgaaaataatatttttcataggattagagtacttgcataatggatgcaaacccttaatggttcatagagatgttaaaaccacaaatatattgttgaatgaacatttcgataccaaacttgctgattttgggctttcgagatcattcccgatagaaggggaaactcatgtatcaactgttgttgctggaactattggttacctcgatcccgagtaagtattacttcttcaataagaaaatatattttgtagatattttgtctccaatgattacgtaatattcttgcactttgaactattttatagatattaccgaacaaattggttgacggagaaaagtgatgtgtatagttttggagttgtattattggtgatgattacaaaccaacccgtgatagaccaaaaccgcgaaaagagacatatagcagaatgggtgggaggaatgcttacgaaaggagacatcaaaagtattactgatccaaatctccttggagattataattctggttctgtttggaaagctgttgaactagcaatgtcatgtatgaatccttcttcgatgacaagaccgacaatgtctcaagttgtttttgaactgaaagagtgtttggcctctgaaagctccagggaagtgagcatgaccttcggaactgaagtggcccctatggctcggtagaggtcctgattatatttcctattgtatcgcgtggatcattattttaccctatatatcctttacaactatcctaaattttgtgcatcaattttattttttgtaagcaatgaacttctaattacaatagaagttcaaagtcttttttcccccatgtttcagtttattccaactaaccatgaattaaataatgggtggtggtgcatgtttcttttaccaaaaataaccatgaattaataactatagcatttgcttatgacccttcaacttctaacatgcagagtgacctttgtatataagcagcgtcacctaagagatccagtcaccagtacggaaacagaagaaattcctgacaataaaagaagcaaactcacctcctagcttttcaaattacaaaattgatgaaatttggtttatagattctcttcattggggcaaatcatagaaatagtttggtcgacattggggcaaaacatggaatagaacgggacaattttggaaataacagattgagagcatcagcaacggcaacttctcaacttccgattctcaatatatgtgtgaacataaatataagtgtgaacacaaatattattaatatttaattggaaagtattttaattaaaccaatgattgaatgacaactgtgagaaacgttgtcgatgagtttttcttggtttctctaaagaaaactttcccttacctctctcctccttttgacatttttttcttattttattggtgagagattttatgagaaactcccgttggagttggtctgagtgtccttcaaacatttttaaaataaatatcacacattcacactataactgcttattctacttttaaaaccataaaatgattgctccaagccattgggaatataatcaaatatatatacttaatccaaaaggtacataaaatttggtgacaaaaatttactttttgttggaaaaagaaagtatctgagcagaatattggacggagcaaagaaacaagagaaggatatcaagtagcacaacttgacaaattgacaaaggatcaaacaagattcatatgttgtaataatctatagtcaactaaggcaacacattgcttacaaactacaaagtgaagtcattgtcattaatggttatcagatgattacttatgtccacataatatagaaaaaagcatatccttgacaatattgaagataagaaaattcaaggagaatctaaagactgattgttctttcgagttgacttagtcaacggttttgtggttccaacttgtaagctgtaattacggctgggcaaggtaacggaccactcttgtcattttctctcaaccaaatcattttacaccatcgaaataatatcctcattaaatgtgttccctcaattatttgattcattaatgtgacacttataagaatttgacttaggactttgagaaatacctcatatacataatcataaacttatatgcatagctttgctaactcaaaaaaaaaaacagatcccttctttgcatagtaaggaagatattaatg

SEQ ID NO: 34583 - DNA, 3003 bp, Unknown
  misc_feature (1)..( 3003): 2750-1469P.txt file - cDNA_ID_3079838; gDNA_ID_2684600; Annot_ID_193184
tttaataaaattaatattttttcaaatttcttaaatatacaagcgataaaattgagaaaaagtaaacttgtaatttttccaccaaaaaacataaacccgtgattttcccgccaaaacgtaaacccgtgattttcccgccaaaaatgtaaacccgtgattttcccgccaaaaacgtaaacccgtgattttcccaccaaaaacgtaaatccgtgatttttctgccaaaaacgtaaacccgtgattttcccgccaaaaacgtaaactcgtgattttcccgccaaaaacgtaaagccgtgattttcccggcaaaaacgtaaacccgtggttttcccgccaaaaacgtaaatctgtaattttcccgccaaaaacgtaaacccgtaattttcccgccaaaaacgtaaacctataattttcccgccaaaaacgtaaacccgtgattttcccgcaaaaaccgtaaacccataaaaagtggaatccgtaaatatcttaagtttgatgataatgaattaataataataattatttattattgttttttatttataattaattaaattattacttaaatgggttaactcatttaataactcaacccatcaaatgagttgggtcaacccataactcatttaaccctaaactcatttgattatgagttgagttgagttgggttacccattttgacatctctagtcattggtgatcagaattaatacttgactttctttgattcaatgtaaattaaaatgttacaatataacaacttgaaaaaaatattaacacatgaatacatatcattgtataagctccacgctcattataggctctataccacgtcatccatgtcatttctatcgaactgtagtcttggtttagtctggttagtgtctacttgcttcaatataaaataagtaagtcattaaacatatgaagcataataagcaaaaaatgacgtaaaatcatcctaatgtcaattatgaacacttgccttgggtttagaagacaaattactttatctaaattcatcagttgaattacttttggtcttttttgtgagatctaagaaaaaaagagaatacttttgaagactaacatgcatgcatattagcaacttaactaagaacttcatcaaacatcgctcaagatctaaacaacatctacaaactttaaaaacattaaaaagaagcagaaactgaaaggaaagaatagaataatataccttgtgtcttatgttttagatcttctcaatcaatcataattacctttcacatgtccacctatagcactcaccaagttttttattatttttggtcacatttttcagttggcatgagttaaatatagaacatagtaaaaatatatattttaaatagaaggaagagaaaagtaaatatttaccttttggaggacaactacaacataaatgttttgatgaaggctagaaaaataatagcggctcctgcacttcagcttgttattaccttaacagcttgttattaccttaagatgatctgataactaaactctaaacatgaatgatatattacctttgcgattgttaatgtttgtgtgaagtcgtgatggccttggtagcttgttattaccttgagataaattgtctttcattgatatttattcttgcttccatcatattgtgtgtcattagctagaaaaaacgtcactatttataacctatgtgaattaagtagtagggtttaaaaggatcatgaattttccaattaatccatacgttgtaatttatttattgaaactatacgttagcttagcaaaactatacgttacaaaagttgtgtatttattgtttttgactatattaaatatttctatttgtatgtttgatagtagtattatgttttgtagcagttgagaattgagatttttgtaaccttgaatatttctgtgtcatttttgtgttatcaatttaattttccctaatcccaacgtctatttgttgtgacataaatgttaataattgtagaagaacatttgcaacataaacgttacatgcatggtgttgtgtttatttctgacataaatgtttatttgagtttagtcatttggatcttttatactaaaatattataaatactattttttctgttttcactaaaaatataaagatgttatgatatttaataaatatttaaaaattaaaaataataattaaaagacaatcccaaagtaggtatgataatatttatttaaaaattcaaaaaataattaaaagacaatcccaaagtaagataggtatattaaatcatatttttagtatatatttttctaagaatattatactaaatcatatttttctaacaatgattaatatttttttttgttttaaagtaaacattatatactatagagattacaaatataatagagtgaaatagaaaaaatttagaatatcaaattaaaacttaatgaagaggacacatgtcactaaaatagagcgccaaatgtcgcattgttaggcaaagatagaaaaaaaccttgtcatattatataagatttcttacacaatatttcgtattctaataaaatttctttgggtcgtcaagaatgtttaaaaaaaaaaaatttttttttttttttttactttatgtgaataataaaagttttgatcctataaactgccaaaacagaaagagaaacattgtatttatgttttcatttataaatttccaatgaacagaaagctactacaaaactattggcttacagtaaaacatattttttctctcttgaaaaataccaaaatttacatgtcaatagtttttgcttttgaaacgatagccatatgtcagattagtaatgcgatctaatacaaaaattatgacagttttttttataaacgattgtgtcaggttcccggatgatgtgtatgaccgaaaatggtacccgatcttccagaactcatggacgcaagtaactacgaatctcaatgtaaatattagcactatttatgaactaccacaaagcgtaatg

SEQ ID NO: 34584 - DNA, 3003 bp, Unknown
  misc_feature (1)..( 3003): 2750-1469P.txt file - cDNA_ID_3079841; gDNA_ID_2684600; Annot_ID_193183
  misc_feature (1371)..(1420): n is a, c, g, or t
tttggattaatcatgtgaaaacacatgcttgcatcccaagagaaccctaacgacgtcgtttagtttgaaacccttggtcaaaacttttaattgatgccaaatagagtttatagtcatcactgagaaatcattatctgcgcacacaaaaatttacaaaaatatcaaggagatattggtttgaaacacaagataatttggttgaattaaaaataagaatatgatgatacgatctgaatgtggtttattgggcctatgctgggccaagattacttactacgttaagccttttatgcttttagattttgtattatataagctaaaaccagagttagtatgggaatcgaaaaagattacaacagtgaccttctatctctaagtcttcatagattctcagaccttcacactttctcttacaaagtattgattatgtccaaaaattatatggttctgtgtcatgcatcatcatcaatctattgtaatttgtaagattataaagtgatgttttgtttgtaagattgcaacatatcttaagcatataaactcatacatctcttcatttgattctccaaaagaataatcatatagagatttgtctctgtaactatctacttagttagactgcgaacgatcttttggtttagacaaactaagcttcttctaggcaatggcgacattcataaattgaaaataaagaaagggttctaagtttttattgtttttatcttccttggactagaccactaaagacttggctgtttccagcaagagtggcttcccattcaatggaagacaggagtatctgcgagagcgatataaccacttgcttcatgtttggtcttagaatcggatcatcatccacacattgctttgccaacgtagcaatctgtccacaaaattcatttacaatgaaataaatcatatggttactacatttttccaactactaattaagcatttgtttcttagtttaccttgaacaaacagtcatgcgggtataaatccatcatgttggggtcaacaaactccttcaaactcgacatgttcatagagtctggtgagttctttagcactgctaacatctgcaagaacaacaaaaaagggctttgcgaatgaatgttgcatcaaagaaagaagtgtaatggttcaatctttataaacaaactccaagaacttacaatagatgccaatggacgtctttctggattcttagttccaatcgcctccgttcttataacagcttctcttccggatataatttcgaaaagaacaacaccaaaggcgtaaatatcacttttcgaggtggcaagaccgtcgcttagatatctgcaaaagaaaagacagaaaagtcacagattgagcacagcattacgnnnnnnnnnnnnnnnnnnnnnnnnnnnnnnnnnnnnnnnnnnnnnnnnnnctatattatcagtgatcacaatgatatataataattataattaaaatttacaatttatcaattaaaactaataagtattgcattgaaaacctaaaaaattaatctttttaaaacaattttattttctaaaaaatcaaacaacaaaaaacagaggaagtatataaaaggtcacaagctatttaaagtctcaaacaatccatagtttgagattatgtcattttgatgaatgttaagttctcagatttattgatgggaaggtgtaattaagctgcaattatctaaattttttataaattgtattcatcaagcacaactagtgaaggctacagtttcgatctggtcaacggccgacttaaaccagttgcgaaatttcatgtatctaatagactagtacatataaggttgcctagacgttttgtccacttaatttttaatttgaaattaattcattttccagtctgatcattttaaacttgtattttcagtgactatctactgttttaaatagtaaacatctacattacatttttaaaaaccaagcgaacttttatactcttaatcaacgttaaatgtttttcttttatattgaatatatatagtatactgcttttcttttgacttataaaatgttatttattattctattgtttataaatcatgttatttaatgtagtttacttgctattatatatacaatatactaatttatgttaaaacacctaaaatattctaaaatgctcaaattctagctgctaggtggaggtgataccctgataggtctcctatttgaaaacgatatattttgtctaaaaacgttgaatgtaatatatgaactacttgtatgaagtattaaattcatcaagcacacaactagtgaaggctcactttttggtcatacaaattagaaacaaatacgaattttgactaaaataaaataatatcagcgaatatgtcggctacaccaaaatttcagcgtgtaatttttgagttgaaacaaaaatttatgtggaaggttggatcgtcaacggacggttctaaatatacgacaatttcgtgatggacaagctttcatcgtaacactcaagaccactaccaatgattttgcatgcggcattctgaatctttggttagttttgcacttcaagaatttgtgttttctaggagttgaaccccaaacctagagtaacaatattaatccttgaatcttgatcaactactggaccatggggatttccatgtttcctctgatatcttatacaacttcttattattattcttggttttagtcttttagatattcatttttaccttaccatcatattatcatatgtaatattatgaagacaagtactctcttcattgttgttaacagataagattttgttttttaaaacacttgttaatttctcgcaactctctctatcaaatgattttgtaccggtaaggaaatattctcaattatttctttattcaattctttaatcttataatgagttgactatgaattttgatcatatagttgtatgcatagtttggtatcgtaaaaacaaaaagctctcatgtggacagtcaggagaaccatg

SEQ ID NO: 34585 - DNA, 3000 bp, Unknown
  misc_feature (1)..( 3000): 2750-1469P.txt file - cDNA_ID_3079857; gDNA_ID_2684600; Annot_ID_193177
  misc_feature (1304)..(1353): n is a, c, g, or t
taataattttttaataaaaatgaaataatataataatatattgtgtgaatatttatttattacaataaaaaatagattaaagaaaatatatatacttttactcaaaacttaaatctagaatgagatgttatttctggtaatacatgaattttcatcataaaaattatttagtaatattacaattaatatagtaatatttttttattatatagttgttatcatattttgaaaattttaaaaagtttctttactccatgtttataggaaagaacaatgtcgatatatgtggtaaacattaaaataaaaccaataatatttaaacagaaatgaaaactgacaaccatctataattttctttatgagaatataagttatttagtagaaaataatctaaaaatacgtggaattagataataaaccaaaacctatatatgtgaactaaacactgtattaaacttttttttttatgataaaacatttttaaaaattgtattcaatgaaactaaaatccttagcaaaaattatccctgaaagaagaagaaaagatgtgaaaatttagaatacatttggaatacaaaattaccaaatatgaaatttagctagataaaaataaactcaattgaaaaaaaaagactgaaaataatttcttaaagactgaaaaataataataataataataattaagtgaaagacatttttttgttaaagatgagaaaacatatacacatatacctatacttgtagcactcacaaaaatgcaatgctaattttccaacgaatcccccaacaaaaattacattggctctgatttaccaatttgtttatcaactcatcaactttaatttcttttatttttagttagtgtcattccttcataatccatctaaaaaggagaaattcattatagttgttaaacgtatacaaccatccttggctaaaaatattaaagatatcctcctctactaaaaacttgttttatcacatagtatggaaagcatatgatgagaaagaaaaaaagagattataaagtataagaaaaaaaaactaacatgtgaaacacattgaatcatgacaaattatggttttctcggttgcaattgtatcaacgtcacccgcaaacacaacaacctcaagaatatctaaaacatagttcccgtatatttagctatgaaacattctaaataaaaataattcatatgtttctattgcaataatatcaatcccaccaacaaacttcgacaacttcaaaaaatatagaacatagctcaagaaaccctatttgagtcggtaatcagccccgtctnnnnnnnnnnnnnnnnnnnnnnnnnnnnnnnnnnnnnnnnnnnnnnnnnncgggtttggtgatcactcttaattaagggattttagtttttccttcaattacaaagcaacccacataaaatttgttttctatattattttccagatactacagaacaaattggttgactgaaaagagtgatgtttatagtttcggagtcgtattgttagagatcatcacaaaccaacccgtgatagacccaagacgtgaaaagccacatatagcagaatgggttggggaagtgcttacaaaaggagacataaaaaatataatggatccaagtctaaatggagattatgattccacttctgtttggaaagctgttgagctagcgatgtgttgtcttaatccttcatcagctagaagaccgaacatgtctcaagttgttattgaattaaacgagtgtttgacatctgaaaattcaaggggaggagcgattcgagacatggactcagaaggttctatagaagtaagcttgacctttggtaccgaagtgaccccattggctcggtagtttacatgaagaattcagcttctttttgaatttttgaatggtttcttctaaacaccatgtgagaataagtcatccacatataaccatacaatgtttttctaagttttcttactctcaaaattttgtgttcagcttgaggttaatcgaggtatcctagtggttaatcgaagtatacttcttcagtgattttttcaattaaaactaataattttacatagttaatgcaaactccttttcaatccgaacggtatcatgttttgagattgccgttttttttttttccattttcgtccgtcttgctcttgtaaatgagtaaatccatttttggctcccactttttccttttcttatggtttttcgggtgaacacgcataattttaattgatcatcctgacttattcatccatagcaagtatccacattcttcttccatatcataaggaattttttcaaccaaaaatccaacaaattatacatataaaatcattggagattgaattgagatgcaaaaacactatatatttttattttttttgttcaaagcaaaaacactatatatgatgtataaattcgaaagaattcgagtttcacatatacaagccttttgaccaaaaacacacactacaagctggatgatggttgacttctgacggtggagattcaattacgaaaacgccatatccatctagaacgaaagacacagaaagacagatcaaacaatgacgtgccatataaaagtcaaattcaacaaatctgtaagattattaactagaacttagaaggttatggtttaatgcacgtttcctttctagatattattcctagtttttcgacgtcgacaacatcaaaataaagcgtgttattttgcgttgacggtttagtggtctaaaattagtaaagtacatgagagtgttttcgacctcttgtcatggttgaccaaaaaactaaagagtttgtcattttctcacaacttgttctatcgaaatcgaattattttccatcctgaaaaaaaaggtctcaattatctatttatgtagctgacttgagacttttaaaagtggctcataaaaatcatatatccttatatgcatagcttgatatctaaagaaaaggctctttcttttggacagtaagaagaataatg

SEQ ID NO: 34586 - DNA, 3000 bp, Unknown
  misc_feature (1)..( 3000): 2750-1469P.txt file - cDNA_ID_3079869; gDNA_ID_2684600; Annot_ID_193174
  misc_feature (1541)..(1590): n is a, c, g, or t
atcaaacgctttcacatggaaagttttgaaacagcttcaatctcgccttatgctactcaagtcccagaagtacgcaaaatctagacacctacgtgctgatattgttgacttcatccgaagcaacgactccaagagtgcactcttccgaaccgaacagctcttgctcgtcgaaaacgcgattacaatctacggttttttgctcaagttcactgatttcatcctcctccgcttctcccccagtaaaaaacacagttgtttattggttaatgatgatacttccgaagcagtttcgagtctgatttttgcatcggtcaagtgtagagaaatacctgaactgctaattattagcgagctggttggtcaacgttatggtcaacgttatgtaacaactgctattcaggtccctcccgggaatcttgtaaacactgagatcaaagagaaattgaagtcaacttcagtagtatccgaaactgataagtgtagagtaatggaggagatagccaaggagtcgggttaccgtttagaaattctagggctgggatataaatctgagattgacaacgaggtgattgttttgttattataaatcaagatcagtacatatatatttttgtttttcttggtttcatatgtaatattttggacttttggtgtttaggtttttgacttggaagaaaagaacgtaatggatgagtcactacacgaggtgtataaattttgcctcaccgatgttgatgagagaagcaagaaagagacatcaatgaaagatgattacatagaacataagaagtctactagattgttggctgaaaatgcgaagaagtccggtcacagtttagaaatattaaggccggaatctaaacctgagactgaaaaagaggtgattttattttcttgttatataaagattcgtagacatatatttggtttttctttggtttcataatattttggacttatgtgtgtttaggtcaatgaagaggaagagaagagagtaatggatccggatgtggatattagttgttatgaagagtcaccacacgaggtgtataaatttagcctcaccgatttcgaagaagagataatggaagatgattacagagaagatatgaagtgtagaatgttggatgatatagtgaagaattccggtcaccgtgtagaaatatcaaggccggaatattataaacctgagattgaaaaacaggttttatttttttggttattttgtgattaagatcagttttttttttttttttttttggtttaataatatttgatcttgtgtgtgtttaggtatatgaaaaggaagagaagaaagtaatggatccggatatctatattagatcttatgaagagtcaccaaacgaggtgtataaatttagcctcactgatttggaagaagagataatggaaaatgactccatagaaggtgtgaagtgtagaatgttggatgaaataatgaagaagtccggtcaccatttaaaaatatcaaggccggaatataaacctgagattgaaaaacaggtgtgactcatgagtcnnnnnnnnnnnnnnnnnnnnnnnnnnnnnnnnnnnnnnnnnnnnnnnnnnaactaacaatccatacaacacaagataaattataaaacatcacttagcatcaatttgacactaaaataatttatgcaaagcagacataaagtgtaacatactattttattttttgttgtaactttggagtatataagcaaaaataaaaataaaatcactatcaaaagttccaaaatgtgatctgagaggtgtggtgggacagaaccaaactgtcttttgtcagtaacagctcattgtaactcagtaacaactataaaactcatcacatgctaaatcataattaatcaacctaaactgtcgttttctcaaatctttttgggtattattattactttgaaacgataaagcacaaaatcttctaaacttttgcttaattaatccatttctaaatgttgaccatatttcctaatccatatcttcttttttttttgttttgtttgtggagatatgtcattttcttctactttgtagccttttccagtttccccccatgttctgtttttttcaacacaacaatagatttcttcttagctctagattttactgtgtgcagttaatgctattcaatgcagtatctaatatatatcgattattatattaaaaagccagtaaaaaaataattctccctttcatttacacaaaaacttaatttaaatataagaatgaaattaataatttttttgtgaatctttaaaatatttagcttccaatacaattttaattaaacaaaaaacaagttcctaaattaaaaacgaagttcttaaactttcaaccaaaaaaaaaactacattctataacattactatttaacagataaaagagtaaattctcactaataaacaatttattagatttactaaaccaaccactgaacaccagtttttagaaagtagaaacacaaatatatttattcttctttgaccttgaaggcttgagaacagagatactgatcaacctcaagtctagacaatataatagtcacacataagtattaggtattaaaccaaacacataacctaattgactcctaaatgtctaattaattcacaaaaattccttcatataataatattaattttggattattatgattttcaatttttgacaaagaacatggtcttttggatattaaaaatatatattttggacatttcctcttatcaattaagattttattttagattttttcagtccgacaagagagtgtgcgcttcactccttcctcccatggctgatttcatctcttctctacttcttcctcttctccattaaccaaatcaaccaatacccatttctcaattcaccatatcttcatcaaatcaagattctttcttccttaatccctaaaaaaaaccttctttcaattctgattttcacttaggtttttctcaatttctacttcacacaatg

SEQ ID NO: 34587 - DNA, 3000 bp, Unknown
  misc_feature (1)..( 3000): 2750-1469P.txt file - cDNA_ID_3079882; gDNA_ID_2684602; Annot_ID_193201
gttacagttgacctcactgggtgtggatttaatatgactgacacaaatactgtctctaccttggaggaatattcaaaaccgttgatcgatctcctcgaaaatctccccgaagaagagaaggttagagcctgctctctttgtttattcagaaccatttgattggaggaatgaggcaatgagatacaagtttgttgtttaatgtaggttattctagtgggtcacagtactggaggtgcttccatttcatatgcgttagagaggtttccagagaaaatctctaaagctatattcgtatgtgcaacaatggtttctgatggccaaagaccttttgatgttttctctgaagaggtaattaattaacactctttgagttcatatctgtaatgtagtctttgtttctgtttcttcttgttgtgctaacatttgtgccaaactgtctacactgctgcagcttggttccgcagagcggttcatgaaagagtcgcagttcttgatttatgggaacggtaaagacaagcctcctacggggttcatgtttgagaagccacatatgaaaggcttgtatttcaatcaatcacccaacaaggtacactccaacatgctaattcttaactctgcatttgcacttggtaatcacttactgtaacttttttaaacgatatggtttatggttttgcaggatatagcattggcgatgatctcaatgagacctgtaccactcggaccaatgatggagaaagtatctctaaccgcagaaagatatgggaaagggagaagattctacgtccagacgctagatgaccgtgcactttcaccagatgttcaagagaagttagtgagagagaacagccctgaaggagtcttcaagatcaaaggaagtgatcattgccctttcttctcaaagcctcaatctctccacaaaatccttctggagattgcacagattccttaacaaagctctgagattattatacttttgaaaacgagaatacactttccatttaatcctcaaaacatcttttgtatgcaattctagaatcaatgatacaagatcgtatttataccatttgaagataaaagtgattgaatacacaaatggccctgtattatatagatacatatacaggaagaagaagaagaaacaacaagaagaggaatcgaagagaagagagaaaaggatctgtctatatataacaacaacactcttattattccaagtctagaatgccgaaatttgagagaaggatcttaacttgatcaacaaggtctgatcctgttgcatactctgtgagcataccaactgcgaaaccaaacatagcccacctacaaacaaaacacacagagttatctcttgtctaggcagtaccaactgacaagtgtgaaactttaggctatatatgtctgaatttgaagaaacatcaatgactagtaacttgtttattcaataccagagctacctcaaatgcaattcaaacaaatctctctatatctattaactttttgagttattagcatccatcaatcaaatacaagaattgagatcatagcttaagtaccttccattggagatctcatttttgggttggaaaccaaaaaagggaccttgaccagcagcttcaagctttttctgtttaaagtactcttgaagctctttagccttttgtctctgaaactccactgtagttacactcttcccatcaacagctacagctttctgcggcggcggagaaggaggaggagaggaagatggctgtgatggaggaacaggtttttgaggctcccggagagtaggaggagccgatggtcttcttaaaggaccttctgtctgagagcatctgatgatgaagacacatggcttagtcgttgttgagaatctaaaagacgacgaagctgtcgaagaagaagatgaagatgatggatttagaatcctgatacattgaatcggtgaagctactgacatttttttgttagttgaattgtctgattttcgaagctttggttctgtcttttggtaatgtctttgtggatgtgatatggccaagtctcatggttatgtgcaaatggtactttcgtaatcatcccacgcgcgttgaaagcgcgtgtaatagttttaactgttgtttgacttgaaagctaaaaccaagtaatgatgattgggtagatttttttttaagagctgaaactttggttaaccaaaccggaaagagccggtttatttggttgtcggttaaccaaagtatttgtaaagtgttgttgaaaagaaattcggtttggttcttgggtaaattcgatttgttttttgtttttttctttaaaatttgattaaaattggctattttgtataaaccggtcttatttttgtattaaccgatgtaaattagagtattggtgataactgatctaattttggaataaaccggtctcattttagtatagtccagttattaagaaaaacaattacatgggaactggactgaaattcttaagtaaccaaacacaaattgtaataatgccgattgttgttaccaaaataaccgaaaccgaaccaaaaacaaaatctcggttcagttcaaaattccagcatttttttaattggattttcttttccaaaagttgtggtgtggattttatcattacaggacagagtagcatagagatgtaatacaaagaataatctaaaatacagcacaaaattgacaaatcaagtggctacaaaagtacacatccaaaagttcctcttcttcttatccaatcttttgcaaatccttctccctctctctttctatatataataacaaaggtgcacatgataagagagcagctacatcaactatatgaaaagccctttgtctgcaaacaatttttaacttccaatgggtcacatgattgtgcacatacagctttttccacttccatgatgaaactcatcttctgattcatcaacttcactgcaaaatttcaatcagagcacactgttttcaacatttgttccccaaaatg

SEQ ID NO: 34588 - DNA, 3003 bp, Unknown
  misc_feature (1)..( 3003): 2750-1469P.txt file - cDNA_ID_3079917; gDNA_ID_2684602; Annot_ID_193226
gaagaaacgcgttttgaacatctaattgatgtaccgacgagtcgcgttccaccgcaaagtttagaaccgcacggattgttgcaggctttacaaccggactgaacgtctcataaaaatctactccgtgttcttgtgattttccattagcaacgagtctcgatttgtatcttgacaaagaaccatcagcattgtacttgtgtttataaagccaaatcgaattgataatgtttgtacctgcaggtttaggcactaaactccaagtcttagtcttaatcaaagcatcatactcttctgtcattgaaggattctaatttggatccattaacgcttgcttataactttttggaagttgggaaagtgtttaagcattaagtgaaagaatttgctttggtttatgtatgccttgttgtgatctaattaccatctgttgtggaggttgtagtatcgaagcaggtgctgcaggttgaacaggaggcgttgccgtcactgttggaattgatggagtgagaaggagacatttttgaatttgtgtaagctgtgtttctgcttcgagaaattcataagcagaatcgattttagtgtgagttgcttgtaaaggcaagatatcctcttgaaatgtgacatgtcttgaaatcataatttttcgtgttttcatatcaaaacacctatagccagggtgaagaagaggatagcctaagaaagctgatggtgcagacctcggctctaacttattttgggtgtttgtgtgaggataacatagtgagccaaagacacgaagatgattatatgatggtgttttgttgaacaagactgagaacggaatccgattgttgattaaggtggatggatgaagattgaggatgtggacaacattatttagagcttctacccaaaatgtgtttggaagatgagcttgaaggagcatagtgcgaaccgcattgtttatggttcgtatcatgcgttctgatctgccattttgctgagaagtgtatgggcaagaaaaacaaaaacgaatcccgtgtttagcaaagaagtcatgaaactgagagttgttatactctacaacattatcacattgcagtgattgaatgtgtttcccgaattgtgtatttacataagtatgacattgaagaaattttgagaacacatcaattttattgcgcagaggataaacccataagaaatgagaaaactgatcaaggaatagaacataatatcgtattccagataaacttgagacaggagaagtccacaaatcagaatgtattatttcaaaaggagaattgactttggaagtggaagaataaaacagatgtttaacatgttttccaatttgacaagcattacaagaaacatggagattcttttaattcgaatttaaatatgaaagtgaaagaagcgtcttcaagacatcgttgctagggttgttggtcggtaattgagttttcagataacggttgcaagtttgtgctgtttcacttaagagacacaagtagaaagagacagaagtatgaagagacacaactaattgggttgttgtgtctatttgttttctatataaaccccttgtatcgtcatgtaaatatcaacaagtttcagttcaataaagagttctttttgttcttgtcttctttacaagagaagagacaaatgtctcttactctgtttttcttctttctctcgataatccaacatggtatcagagccaatggttgtctttggttgtctctacaaaaataagatgagttccgctgcgaaaagaaaaagagagatttagacaacaaatctatggtgagaagaagaggaagaagaagaagaactaagaggtggtgacaagagagagtaccatcaactttcacaaacatattcacaagaagaaggctccaacaacgatgaagaagataggaaatcttctctagaggcaatggagaaaacggatgtggatttggagctgtggaaggagaattctgaaactttgttcaacaacgtcttggtgaagcgtaagacgggaaagcggcctgttgtaacaaacagagcaaggcttattatcaaaacgttgagttgagttgtgaagaagactacaacacaaaggcgtggagaaaagtttgtttcaaaaggaagaaacaaagggggcaacaaaagtcaaaagaaggccgagaaatggtgtgacttttgtacgtgtgacgattactttgagagtgattgttggaaaaagcaacacagggatgttagcttgcctacgggtgtaaggtgctttgtgcgtaacaagccatggcacgtggtgaagaactacaaggttaggaaggccgagagagcgaacctaagcctagaagaaacaaacgaagagagtgacaatgaaggtcacgttgaagaaagatcatcatcaaacgtgaatgatgagactgttagagtttaattgagtttggtcgttgttttatacaattaactatatgtgtttagtttatacattaagagatgtgtcttgccttaaaggtagttatgttgataggcataagtgaagagttacaacacttatagatgtgtcatttcagtcaaggtctatctcacgtctataaaaggacgatgtctttgtttgtaacacacaattcagattttcaataataacaagtttcagttccattaaacgttttctgttttgttcttgtcttctttataagagaagagacaaatgtctcttactctgtttttcttctttctcttgataatccaacatggtatcagagcttatttggttttggagcctatccaagcaaaacaaaaataagaagaagtccgctgcaagaaaaagagagatggcgacaacaaatatatggagagaagaagagaaagaagaacaagacatagaaaaggaagaaaagagatggtgacaagagagagcatcatcaaccttcacaaacattcataaacagaatcttcaagatgaagacttcaaagggatgaaggagataggaaatcttctcaaaaagcaatatggagacaatg

SEQ ID NO: 34589 - DNA, 3000 bp, Unknown
  misc_feature (1)..( 3000): 2750-1469P.txt file - cDNA_ID_3079930; gDNA_ID_2684602; Annot_ID_193222
  misc_feature (1182)..(1231): n is a, c, g, or t
ataatattttcattttccatatggttatattaattaaataaatataaagtaacatatataaaatcaaaaatattaattttcaataaattatttagtttttttttttttgtcaacctgtaatatggatatttgattaagagtaatatagaactatgactattttaatactcaatacaaatttattttttcttagtatataaggactttcaactcaaaaccaattgacaataaataaagaaacctatgtattttatatattgctccacaaatatctcatctctagatgtaagataccatatattttagcatatttcattataaaatttagtgttcctatatgtatacgtactacctccattttattggaatcaacaacatttaataaaatctttcatatgcataaaattcagtctaatgatatttaatcttactgtaaatctttctaacttcagatagctaataacgatatatccatggaatgagagtgatctctcaaagtcacaaatgaggttaactagagctgcgatattcaaaaatataattaaatggttttgaatacttataaaaaacatcatagttttttttttcgttaacttagaatatagtttatctaacaatatgccaaacatgacttcttgtgatgcattactatatatatatatatatatatatatatatatgtgtgtgtgtgtgtgtgtgtacttgtaaattatggtgtaatggtattttttctattgtaacaaagctggaaataaaacattaacgttcgcaatttgtagtttatgttcacttggtgatccattattgtattttttttctattaacgtttatatgaactaggttttttttttctacattggttgagtaatcgttcatgaactctattttaattttgaagggtagagtactacaaaacctagtctccattatttagcacgacgaaatgataacaaaagatcccaattatcttggttattaataaattaagagtatgaataaagaacacacacaagtgattagaggcagcatggcctaggagacggtgaaagttaaaaacttaaaagtaattttggagggaagcaccctcttttgttcgtgtcgtgaatttcttctttgattaatctaaactaataagatggcttatttttttatataaatgtcgtaaaatgagtttagttgatnnnnnnnnnnnnnnnnnnnnnnnnnnnnnnnnnnnnnnnnnnnnnnnnnngcccgctgtttggcgactcattagagaatgatataatttgcaaaacttttatctataaaaaaataattcttaaattttaaaacttactactttaaaaagaaaatcacaggacgggtaaagaaattatagaacgggttttattttggaattgagttatatggtggatgtatttgaatcaatatttataaaattttaaaatattattaatatactgttttaataggggttacaacttcagttttttaacaattgtctcatagattcgtggtatagtcttacttaataacaattataaactgtaaaatataaatattttataaaaataaaatttgcaaattttaatatatattacttttaaaaaataaatcgtcccgcgatatactgcgggttaaaatctagtttggattatataagactcaagtatatttgaagatggacctcatcttaggtatttttcacacttagaaaactattagctaactcattgtacttattatatactcatattttgagttaagacttcaaaaaattagcaaagaaaactcaaacaaatttttttaaaaaaaaccaaaaaattaattgaaataaggagtatataataataaagtaaaattagcattggaaaaattaaatatagataataataaatataccattaatattagaatattaatgatacttataatataagatataaaatttacattaattatgaatgcgagtagtagatattcatatagagaaagttgaccaactttagtaaatatgtcatatatatgattatttttcggctccttgattaatgaattaaatatttttaaaaacaataatataaaaacaattttgggactgcagataataagtttaaatacaataaattttgtaactaaaatgttatagtcatttactaattttatttaattatattatatactcatttacttaataatcatctcatgcacatggtgcagatagatgacatagtttcgttcgtagatgactagagtactaaagtgataagtatacatgaattctatcaaacatgtatatttcatttcaaaattttggatttttgaaccaattttaatttttacatatcatcctaaactttctttacgattttggctcgcattatatacgatctcacgactaaaattatcttttaatatttacaaatttatcttttaaaaaactgtatattggaaatatgaaaattgagaaataaaaaacttaaaatagtaacaattaacgattttgctttaaacatacactctcttgtcactccacgagccctacgcttcccaaccgcctgcctttttcagattacctccggtttctaccactctcgccgtcgccgtcaccggtactccgatcacctccgcacgattcatttcctatttgcatttttcacctctctaggtaataactccacgccgtctcatcaatttgcttcctctcctcagatttgatttcaatcagtgaattgctctgtcgaaattattgatctacgatcttagatcttacggaaatttcgttccgatttcaatctccggtgactgatccgatctgatcgaatcgtgttacattcaaatttactgttgcttagcgatcgcgatcgaattcatatgtttttcgattctgtgatatcttcatgactcttgattcgtgactcgattctttagcggaaagtgagtcttctcgagaatgggagattgaagaagtaagagattcactgattgaggaagagagaaagttagttcagaaaaatg

SEQ ID NO: 34590 - DNA, 3003 bp, Unknown
  misc_feature (1)..( 3003): 2750-1469P.txt file - cDNA_ID_3079934; gDNA_ID_2684602; Annot_ID_193221
cgaccctgcaatgagtagcttgttatgtatcatctttactttacctacaaaaacactttaagattgtaacttagtggcaaaaaaatggagggttcattgatagctgaattattgtacgactattgaaaaagttgacatgtgacaatgaggggagaacaagaaattagtttaaaaccactacgtatttgaataagattacatgtttgtatcaatagcacttacctaatttcttaaacaactacatattatttgtttttttatgcatatttctgatgagatttggtctactccgaaagacaaaaaaaaaaaaatgttctcattcttttgttgcttgaaaatttaatctcacgttgaccatgtagtatgtaatttagggcgtgggcattcgggtacccgttcgggttcggttcttttttttcgggtatcgggtctattcgagtaggaggttgagaaccattcgggtattctaaaaattcggttcggtttcggttcggattcgggtcgattcggttattttagtaaaaatgtaaaaataaccaaaaatacccaaaatatttttgggttcgggttggattcgggtattttactcatatatactcaaatctacccgaaatacccaattacccgtaaatatattgtttactttttatacaaatataaccaaatgtaaccaaaatacttaaattacctaaaagaaaactataacatttgttacttttatcccaaatatatccaaatttatatgaattactaaaaaaatctagtataatcggatttataattttaattttgggtgtttgaggtattacaaatatatatataactaatatatttaggttacatttgtattcgggtacccacgggtattagattcggttcggattcggttcgggtagtgaggtcaaggacccattagggtaattctaaaaatcggattcgtgttcggttcggttatttttcgagttttttggttcggatattcggttccgggtattatgcccaggactatgtatgaacctctacgtatgtatggaccgttttattccaacaaatatactctaaaatattccggataacaataagataagcggtacactagttatttaaattatcaattgtccacactatgggtattaaaccaatctagattactaagagcacctccattattttttttacaaaatgtctaatataataaaaatatagttgataagtttaaaatataaaaagatgtaaaatttaatataattttttatattaaactattaatattatgtggatgagatactcataggttaatcagaaggttgtttgaacttaaaaaatcaatgttgggtggcttaccaagaagtactttagagcatttctagtggatcgagcctttcaatggattctttcggttttttaagtataaatttctgaaaaatgttggatgagagtttcaggttttttttttttaatttttcataatccaagggtagtctcttttagtaagaatttcagaaaaaacttattcttttaaaattattttatttcataaaacttaacaaatattgcaaattataaaataaaacacataagttattttcaaacattttataatagatgtgcaaaaaaaaactgaaataacgaagttctaaaaatatggttgcgaatttttttcatgctcaaccaaatggtttttaattataaatgcatatctcgatcacgaactcgattttaaatgctcatcaaaaactaagataacacacgaaaacggcaacgactccaaagagagccagcttttttctttttagttagttttgatttatttttttcaatttaatcaagagaacttcataaaaaagtttccatttatcaccaccgaaaatgctcttatatgataaagtacaaaacacggaaaatgatctcgtgatgatatgtagggttagtaatcaatttttttaaatctctcggagcaatatatcacctgttgggcaagggtgggatccatcgcggaaagcggacgaggtagcttgctagcgatgatgatggcggaacgttacgagtggctcacaacgtcaagtgtgatggttcatggtttgcaaaagaacattacattttgtgagtgagatactgaaggtgattgttaaatagtggtatttgaagagttttttaattaaagtaactactttttttggctacttatgtaacgtaaccaaacattaatatattttctataactctcctgacaaatttcatcgttaagcttacgtgagtaacgtgatgtaatagtttcattatgcattacctactaaaaagtaactttcagatatgtatgagtgaagactacttatagagaaagatctcgtgatgctttgcatgatgatataagtaaacaagtatttccagcttcctaaaattatataacaaaaccgtcagacagaactaaataccatgcgtcgagatgggaagtgaagaccacaaacggttgcagtggacgcgttattctatactgtatagtgtataacatatgtaagaatccaaaccctcctttgcgtcatatgtgctccaaatctagttcaaagatcgatgaatcacttgatagtagtataactcatttgattgaacaaatatatcttgattcactcttttgttttgttacctgaaacacgcttacgaagaggattcatgtcatcgttttatctatcattgatttgaagcgtctttattagaccatacattttatctttctagattgttaatcaaatgtcctgtgtccatgttcaagtgataatgtgatatccctaagtgtatcggtttaattggacaagaatgggcttaaaccaaataagggtataatagtcttttcagaaaatcagtaatttcgatagccaaaatgagctatataagccgaacaaaaaaaaaccctagctcacgctgttgaatcactgaagagagaaagcttgaagacggcgagagctccatcttttctcaggcatctcttatcttcaaatcacaatg

SEQ ID NO: 34591 - DNA, 3000 bp, Unknown
  misc_feature (1)..( 3000): 2750-1469P.txt file - cDNA_ID_3079950; gDNA_ID_2684602; Annot_ID_193216
  misc_feature (571)..(620): n is a, c, g, or t
acttttatggttaacggttaaggttttttaaccgcttgatacgtttacaaactagttattatttaaagacagttcggttacaaaccgaaatacggttataatcatgcctaagcaaactcttgtaatcgtgaatttgtggaatttctgtgattatgaagttgtaaagtgtatttttgcaattttcttgtacttttgtatttccttttacgtgatcgtgaatttgtggagtttctattatcgtgattttgtggaacttatgtgatcatgaagttgtggaatttatttttgcatttttctcgtattttttgtgtttacttgttgtgtgtgttttaaagataatgtatttttgtttgtttatgattaatttctgtgatcgtgaagatgtggagtttattttagtattttattgtatttttgcctgtgtttaaattaatatttttttgtttatgatttaatttacttgtttgtgaatttgtggaatttatgtttattttttattgtatttttgtatttacttgttgcgtgtgttttaaaaataatgtttttttgtttgtttatgatttatttatgnnnnnnnnnnnnnnnnnnnnnnnnnnnnnnnnnnnnnnnnnnnnnnnnnngatgctttagcattcaagagtatcaatgatcctatcaagaaccagatcaatagttgtgctgcaatctgtgttaagcaagatgatccatgccatttcttgcgtgtcctttatggtatggttgcaaacagattttcatgtgcttttgttattgaaagatccgatctttgtttttaaagttcattagatgttgttttgcagagtctctgataacaggagggttagctggtgttgtggtggaagctgctttgtatccaattgatacaatcaaaactcgaatacaggtagtttctcctcaaaccaatttgtgtgttatcatccaacataagctcttttttattattattgtaatgagagtcagactatgaccaatgcttgacttacaatggctaactatagtggtttgacatggttaggtagctcgggatggtggaaagataatatggaaggattatactctggtcttggtggaaatcttgtcggtgtcttaccgtaagtatgtagtcagaatgaaagaaggaaaaatatatgcaatcaacttgaaaacctgtgactctttgcttcaaatgaacaatgtttttcttcatgtgtagtgcttcggctctattttttggtgtatatgaaccaaccaaacagaagctgctaaaggttttaccagataatcttagtgcggttgcacatttggtatgtattatcttaaaactatcctgaatctaatttaagtgttagtttatctgctggagaaagatgaatgtcttcttgacctgcttgacctgtatatattagtcttgctaccattttgttttaagacttactcatttgagacagaggcccttagaatctagttatgctctgttagaaagtatatatgtcttagcgagttatataagctcaattaggctgcaggtgcgttaggaggtgctgtttcatctattgttcgggtaccaacagaagtaagtctcttccttcttgtttctttgtttattcttgtgtgttggctataaacttgtgtaggctaatggaaacttcaacaggttgtgaaacagcggatgcagactggtcaatttgtttcggcccctgacgctgttcgccttattatagccaaggagggctttggaggcatgtatgcggtatacctgttacttcttgatttatggttttagtgttttactattttatttgtagcaggcacaccttgaggttaagatgaacagacaacaaaagctccatgtaatgtaatatgttcctaaacatgcagggttatggatccttcttattgcgagatttgccttttgacgcgctccagttttgtgtttatgagcaattacgaattggatacaagttggctgtaagtttttgttgctacaatgataagtaacagaacatccgattttgcaggcaaatgacagtgtgatatccatttgtttagaacaggcaagaagagatctaaatgatccagagaatgcgatgattggtgcttttgctggtgctgtcactggagttttgaccactcctcttgatgttatcaaaaccagattaatggttcaggtatgtcaaaacgataaatacacaaaatactgaaagagaattgttattcttggattcatttcataggagaatagaagctccagtaatatattaccgacttttcattttgaaatttggcagggctcaggaactcagtataaaggagtttcggattgcattaagacgataataagagaagaaggttcatcagctttgtggaaggtgaaccaaatttctgctcttacaattctcttttaggaatacacagtttctcatgtttgtgcaaagttgttgacaaacttgagacactgtattacagggaatgggtccaagggtattgtggataggtattggaggttcaattttctttggtgttttggaaaagacaaagcagattctttcagagagaagccaaaagagtcacaatgcttaaacagttagattctatcttaaacagttagattctatctgtgttgtctacatcattcttgtctcttgatgttttgttgaagatgaagtatttagattctttacgtatcttttgcttgattctctttctttttctcctagaaaaaatgtcattctcttttgttaatcaacttctacatttaaattgttttttaagttgaatctatcactggatagttactgaaacttaaactttatgtggacgttataaggttgcgtaataaactatgtcatcgtcactatcaaagtcttaatctctcaatttcttgaatatatatatttgaatcatttaacaattgttttgattcctttgtaattgatccccaccttttatacaaacaaaaagttgaagctgaattttttttgcaggttttaagtaaagatgatg

SEQ ID NO: 34592 - DNA, 3003 bp, Unknown
  misc_feature (1)..( 3003): 2750-1469P.txt file - cDNA_ID_3079971; gDNA_ID_2684602; Annot_ID_193210
attttttgtagtttttccatcacttaagttgaaacctatttgcattggttttttcgtctacttttaaaacaagttctgtaatttaatcttggtttgatcaagctcaaagtaaacatgaatgttgaaaagtagagacacaagaaacataaaccgtattcaaaccaacgagaatatcgtaaatgaaaacctaacatgacttaacttaataaaagaagactatcaatccaaccagttcgcttttggaagcataatgttaattcctaaaagctactaaaatctacggtatgggttccatagatttggttgcagtagtggctgtggcaaactaccgtagaggccgacaagcggagcaggtggatatagtgttggacgaaatggttgtggcaccatgaaattagggatagagattggagggcaactgtttggcattcttgatccgcacatagaatatggttggaagttgtatcctcttaatggagtttgttgagataacattgttgccggagcgaccacttgactgaagataggttgttggtgaggacttggtggtgggttattaaattgagtttgtaaatgaagcttatgttgctctttgcattgtgccaaagaaacatagataggtttatttcccaccattttcccattcatcttgagcatctgtgtaaggataaaaaattaattagtgtgagttccttgattaagaaggcaacactaaaagaccattacttggtttacaaacttaccgctttcgaagcttcttcgctcgttgagaactcaacaaacccaacacctttgctaataccattggaatggaccatgaccttcaaaattcattagttaaatttattattcgtcgtagtcacaaatcaatcttttgctattgcatgcgtacttgcaagaagtgatggtcccaaactctgagaataattcttcaagctttgtgttatcaacagaatcatcaagattcttcacataaagattcatccctttacgtgttttcatatcccgtattatcttttctagttcaaatttagctttcaaatcctcagttctattagttttcctctgagctcttccaacatgcaactccttttcatcaactactaccccgttcatcttctctatcgcagtaaccgcggcctcagccttctcgaagttcacaaacccgaaccttctagacttaccttctccatctttcatcaccaccgcgctagttatctccccaaactccccaaagagcctcttcaaatcagcatccgtcgcagtctccaccaagtttttaacataaacattagtgaaaacccgagatttatcccattgaccacggctaacgaatggacaaacatgaatatgttgattgcggatgagcgtgccattgtgaaaattgcatgcggtgtagactgaaaggtctgagtaaaactggacgaacccatatcctttggaaactccagaagcatcacgagccactttgcaagagagaactttgccaaatgcagagaacatatcgcaaagttgcttgttgtcgatagattcgtctagattcttgacaaacacgttacctcgtccactcattctgttgctaggatcacgttctgaaaacattatcctcataggttttccctttaacttacaataattcagcacctccattgcagtcttcgctgtttttccccacgaaaaaataaataaatcaaaccaattaacattcaaattcgttaaagaaaaatcgacataatttaaatcgaaacaaatacacgtgtgcctaaataatactaacaaaaaaaaactaaaaagtgttttagattagggaacaatcattgaaagtaaactatttcctcaacgtaacgactaaaccctagaaacaagcaacatgatgaaacaattaatatagacgaacatatagaatattacgacttaccttgagaactatggttgaaattaacatatccataaccaagagacaagccagtgtttcggtcgcaacaaactttcactgaagaaatatcatgagtgaactcactgaatttggtgtataagtcaccctcttcgacactcgaatcaagatctcctatatataatgtatgcttctcaaatttgttctctgaggttcttatagttgaaacacgtctttgttctctgataattttttttaagtatatatctggttctaaagtcatatatattaaaaaaaagaaaaaaaaaaagtcaattccttactaggattagctttttatttttctactaagataatattaataatttctaatatcaaataaaaaaattaaagataagctttaactatttcgataagcttaaagaaataagaaaagttaacctcctctcacagtgagtgccggtttaagtacaacgatgaataatgcgatcattctatatatgagaaattgttttttttctgtataaaaagagcacaaattgttttctttttgtatatataaaagagacacacaaaaaaaattatacatacaaaaagagaataaaatattttcttttcaaaatttgtcttagggcacatgaaatatatgagctggtactgctcacacttggcaacagattcgtaccgttagatcataaatataaatttgaaacatatgtagatcgtcaacttatttggttaaacattaattttaactacaaagtataatcgtaaacttgttttgtattttattcaattcagaaattaataaatagatcgtcaaaaacattattatctttaagaaaaaaaaaacaataacataagagggttttcagagaaatatgaataactatagtgactaatatgtaaatagagaaacatatgtagactcttgactaatcccaacacagtttctcttcgacgccgcgttttgtccccgtcgttgaactcttttcaaccggcgtcgaatctcgtttcgtcgccgtctcgttggctcttttcaccggcgtcgaatctcgtttcgtcgccgtcattcgtgtatccatcttaaaattcgaggctgattcatg

SEQ ID NO: 34593 - DNA, 3003 bp, Unknown
  misc_feature (1)..( 3003): 2750-1469P.txt file - cDNA_ID_3079979; gDNA_ID_2684602; Annot_ID_193208
  misc_feature (326)..(375): n is a, c, g, or t
aaagatctccttggcgcatggctgcaagcatttcatcaatacatttcatccatcaccaagaaattctagggatatatactgcatagagcttcaaagacttggtgcagtgtcactcacgagttttgctgtgtttaatgtggcaccggggtttgcttgtaaatctatacctccagctttaatagcagaggtagtgactatggctggtaaactttggcattatgtgacttctttctccgatgtgacatcttcaggtgtccaaacaaaaatctctgctcataagacaatataagttcatcgacaatactagctactgttttgttgaattnnnnnnnnnnnnnnnnnnnnnnnnnnnnnnnnnnnnnnnnnnnnnnnnnnatttccgaatgccttagcttaaaacgcaattttcaaccttccgagttccgtgatttatccccaaccctccgctctcttgatttccctggttaacctggccacaaccatgtgtgcctttgattgtatatggttcctccaatatgggagttgcccggtctcgggtttaattggagccagattctcttggtgcttaagttaggtcccataccctagtaggtccctggattgttcttttgtggtatactagaacatttgcagttacaggtaatgctgtaacaagagttccttcatctgacttggatattgagggatggctagacactcttgaacctgctgacattaaggttctagaaaatgatatccatccttctgaatcttttgtaactacctcgaagaatgagttctgtattcagtgtttatgattcatttcgtttcagtcttcaggaaatcgttcccttaaatgctggaaacatttttggtatggaggatgaccagcctgctttggaatgggagaacttgatacgtgatgccttaaaccgagttcaacctagaaagctgaagattaaaagtcacagtgatcccccttctccatcaaagtttaagcaacccgaagaggttccttatagtgtagaagatatgtttgttgaaaccagtcatgatgcttgcgatggaattagttcaatggataacaaactcaactctgttgaaagcacggacgtaccaatcgtaagcgaagattcacttactaatatagacgttttgggttctaccaatgacaatgcgtcttgcttaccaatacaagaatatctacagagacaattttcaacaccaaatacgccagaccgctctctgtcgatgcagattaatagtgattccaaaagggaagaaagatttagttacactgaaagggtaggtttgagctggccagagcctccattaaggctcctaaatcaatatgtttccgaaagacgtggttccttcaagtcagtgaatctgactatcacgaatctgagaaaaccatcgtatgttcggattgtgagcaaacagatggttggagtgtttctcaccatttgggttcggaggaacttgcgcaagcacataagcaacctttgtgtgtctactgttggtgttggtattatgggctacattggtaacaaggtcttgatttctcttactagttgctttaaatagttatttgtagcctagcttataacttacggtttcttgcggtcttacaggggtctgtatctgtgagcatgtcaatctatcaaacaccattttgtttcttgtgcacgcatctgtcatctggagaaaaggatacagatcaagagaaaagaaacgatgatgtacgtgaaatccacagaagaacgcagtttcttcctcattctttaaatgccaatgagcttccaagaagcatctgtaatcatgagtacgttttatttctcagttgatccattcaactacatctcttaatttttttaacataacaagataaccttgtgtagaagaataatctggctgggagatctgaactatcggattaacttgtcgtatgagaagacacatgaacttattgcaagaaaggaatggcaaaggttggtagagtacgaccaggtacctttactgcagcattgttttggtttaatactaaattgtgaagttctaatgtttatgttttttaagttacatatgaatctatcaagattgaaattagatgtttattctctgatagctttcaagagaaatgacaaaagggaacctattcgagggatggtcagagggaactttagattttgcaccaacatataaatacgaaatcgattcagaaaattacatcggagatgacccggaatccgggaaacgtagaccggcctggtattgtcttcatacactgtgatacaacatttttacttgatatgataaaaaggcaaaaacgatgagtttggagtgactatgattgatcaggtgtgaccgcatcatttggaacggaaagggaatgaagctcttcaattacagaagaaacgagattaaactatcggatcaccggcctgtcacagccacgttcttggccgaggttgaggttttgtctccacggaaacttcaacatgcgcttacacttacatatgctgagattcaaggccttgacgcctaaacaaccacttccgtcagatcccatttgtgtatagtaatttaacgatttgtatgcccttcatgtataatagtgttcacgtacacagaaatattgtagatagaaatactgactgaaaacaaagaccgtatctttgatgatataaacattggcaattgagttgagatgtaaactatagtgttagtgtatgcacaaatataagaattagctcagacttacataaaagttaattaatgggctttgttatactccaataatgggctcaataaagcccaaacaacctgccactcacttcacttcccagttcccactgactttgatcactgatttttttttcctgtctcattttccattttcccccaaaataaaaaaatatcacaaatcccatgaaaaatcacagagcttagaactctccacactctcaaactccgacgacttgactttaagatcatccctgaggagatcggtacttagcaatg

SEQ ID NO: 34594 - DNA, 3003 bp, Unknown
  misc_feature (1)..( 3003): 2750-1469P.txt file - cDNA_ID_3079983; gDNA_ID_2684602; Annot_ID_193207
taattctgctagagagttcttgccaaacggtcagcaatacaacaggccctcaagttttgactcattagagaccgctgaggtcacctcagctcctctggtgtttgagaaggaagatttcattgaaatggatgatcttcttctgatccctgaattcggagcttcttcaactgagaaagccgcacagttctcgaaccatggtgaattcgacgattttaatgagtttgaccaattgttccatgacgtttccatgtctttggatatggaacctattgatcagggaacttctgcaaatctgtcttctctgagtgattctgctaactacacatcagaccaaaaacagcaactcctttatcaacagttccaggaccagactcccgagaaccagctgaacaacatcatggatcctagtacaactctcaatcaaatcactagcgatatttggttcgaggatgatcaggccattctatttgatcaacaacaatccttttctggagcatttgcttcaccctcatcaggtacttagactcatgcttgtcttggagcattcaccttttgatgtctgctaagctatttccactatgcacgattttcttttctgcgtttgtctttgacttaaaccaagacatgtatatatatgatactggggctgttgttattcctcgattatcaaacccccttgttaatctcttaaaacgtaagaatttaagcctaagcctttccactgatacattgtgaataatcctcatttgcttaggtgtgatgcctgattccaccaatcctactatgagtgtgaatgcccaaggccatgaaatccaaaatggtggtggaacaacaagccagttctcatcggctttgtgggcattaatggactcaataccttcaacgccagcctctgcgtgtgagggtccccttaaccgaacctttgtacgtatgtctagcttcagccgtatgaggttcaatggaaaggctaatggaacgccagtgagtactaccatagcaaagaagggtattagaaacagaggttttcttctattatcaatcgtgggtgctttgtgtgccatcttctgggtgttggtagccacagttcgagtctcaggtagaagtcttctcttgaaagactagtggtggttctcttgaactcttaactactggtaagttagaagaagaaaccatgatccacattagtgttcatgggattattgacctatctataatatatgaaactttgaatatgtacagagtttgaaagagtaaagtacaataattcgtgataaaggagtttcttttccttctcgattgtccttgtttttttttctgcatatcttctgggtttcaatattcacaaagtagactgtctggttttggtttcatcaaagcatgatcttgaagaggtactgtgaatcgtgaagcaaactcgtgtattcatctctgttgaagttgtagatactttaggctgagctccggtgatctgtgtcgtgttgacggtgattgttatcccgatttgtggaactgttgccactgaggaaagagagtatgatccgtaggaatctgcaagcttgagaaactagagagcagataccgacgacgcaaccaaccgaagtttcctctgttctactcatggcagcttccaagagaaagcttaaacctttatctatcacccgtcctctgttattgatcgctgaggcggttgcgccgccattctttaatgaagttactagttgccgactacaatataagtcgtatggctgggcaaaatattagtttgattcgatcggatccgttatttggttcgattcaattcgaaaaatcgggatatctatagttttacaaagcaaattaaaaaataaaaaatttgttaaaagtgaaacaaataactaatactaaaatttaaataagtggatatctgtttcgatctattatacacaaaacatatatatatatatatatatagataattacatacatatatattaataatttaacactttttatgtaagttttatcagttttttttttgttttttttaacttcaaactttaggctttattatagtgatgaagtgtaatcctcatggatgaattatacaataaaaaatggaaccaaagagaaaagagaaaaagaagtattatttgggaatggagtcttcactaaacaatcagcaactttattacacgttctaggcacccatgtgacttcggcttcgaaaaatttcttctgccagtattgaatctcccttatcaagttgtgtaactcaaaacttcgggctttgccattgacacactctgccacacttctattgtcaccttcgaatatatcacactcagtttatgttcattaaattaattatttaaatatttttttagtgaatcattatttatttgggattaaatttttgatttttataatttttattaatttttataattattttttaatatatacataacaaattgaatatttgacaaatagttcagattttaaagaatatccaaaaattcggttactttcgaaacaaatataaatcagaacactaattattcggataaaacaaatcggataacaaataatattacaattttgaatattccgttggtgtcgacccctaaaattaaattatgtgaaatttttagcatcggataatgtttagcgagttaaaaaaatgaattattaggtgtttgttacggatctgattgttttctattttatataagtaaggaaaaaaatctgttttttcttcttttttacattaatataaattgaaacaacttgttattgcgctctctttgaaaattccaagaacactaaatgtggtcaataatggcagatttagtaacaaacatatttcaacaattaactatacaaattattcccaaaacagaaggcttaatatcaacatcttaaaatttactaaaaattgaaaacactaaagaggaaattaagtgaccaagtcttcttcttctttactctctcctttctgttaccgtcgaaaaaatcgagctaatg

SEQ ID NO: 34595 - DNA, 623 bp, Unknown; identical to SEQ ID NO: 189
  misc_feature (1)..( 623): 2750-1469P.txt file - cDNA_ID_3079983; gDNA_ID_26053; Annot_ID_146542

SEQ ID NO: 34596 - DNA, 3003 bp, Unknown
  misc_feature (1)..( 3003): 2750-1469P.txt file - cDNA_ID_3079987; gDNA_ID_2684602; Annot_ID_193206
  misc_feature (396)..(445): n is a, c, g, or t
  misc_feature (810)..(810): n is a, c, g, or t
ttctgtggttaggtttgattcttctggctctgttttgttctgtttttggtgtttaattcttcttagcaagcaagtaatattcgatcgtcactgtttttgctttgattttgtgatttctctatcaaagattagaactttacgtgaccctttaagcgatcaacaattatctcactgttttttcagataagggtatatgagtttgttggacatgggtggagatatgatggaagatgattgggaatttgcgtcatcatcaaaccctaaaagaaccctagttcttgtgggccgtactggaaacggaaagagtgcgacaggtaacagtatccttgggaggaaagcttttaggtcaagagctagaactgtaggagtgacaagcacgtgcgagtcacagagagnnnnnnnnnnnnnnnnnnnnnnnnnnnnnnnnnnnnnnnnnnnnnnnnnnggcagactgtttgctgactcaggtgaatgtaacaggtctatcgatgttgaagacgggagatagacagtggttctttttcactccaaggaataggaagtatcctaacgcagctaggtcaagtagaggtactgcaactggttattggaaggcgacaggaaaggatcgagtcattgagtacaattcaagatctgttggactcaagaagactcttgttttctatagaggtcgtgctcctaatggtgagagaactgactgggtgatgcatgagtacactatggatgaagaagagctagggagatgtaagaacgctaaggttagtattatagccaaaactcatctgtttctctttttgatttatttgtagnttaactaatctgtcttaccttcaggagtattatgctctttataagctttataagaagagtggggctggtcctaagaatggtgaacagtatggtgctccgttccaagaagaagaatgggttgatagtgatagtgaagatgcagatagtgtcgctgtaccggattatcccgtggtccgttatgagaatggtccttgtgtggatgatactaaattttgcaatcctgtcaaacttcagttagaggatattgagaagcttctcaatgaaatcccagatgcacccggggttaaccaaagacagtttgatgagtttgttggtgttccacaggttagtttcttctctaataacatattggcttatgctttctttcttttttgggtcctttggttattctgttgtgcttccttcactaaatagatacttgtatttgcagggtaatagtgcagaagtgatacagagcacattgctgaataattcttctggagagtatattgaccctcggacgaatggaatgttcttgccaaatggccagctatacaacagggactcgagttttcagtcccatttgaattcatttgaggctacctctggtatggcacctcttctagataatgagaaggaggagtacattgaaatgaatgatcttctgatccctgagctcggtgcttcttcaacagagaaatccacagagttcttgaaccatggtgaatttggtgatgttaatgaatacgaccaattgttcaatgacatatctgtttttcagggaacttctacagatctgtcttgtctgagtaattttactaataacacatcaggccaaagacagcaattactttatgaacagttccagtaccagacacctgagaaccagcttaataactacatgcatcctagtaccactcttaatcagttcactgacaatatgtggtttaaagatgatcaggctgctctctatgttcaaccaccacaatcttcttctggagcattcacttcacagtcaacaggtacttaaaaagtctttaaactcaccctcatctcagagcattcccttatgttgtctgccaagttatatttcccacgaagcattagtttttgaatttaaccaagacatgtatatattatactctgttttctttttgttgatatcaaaccctcttgttaagatcttgaaacataataacctagggccttttttactgatactttgtgaataccaacttacttaggtgtgatgcctgagtctatgaatcccactatgagtgtaaatccccaatacaaggaaggacaaaatggtggtggaacaaggagccagttctcatcagctctgtgggaattattggaatcaataccatcaacaccagcctctgcctgtgagggtcctcttaaccagacctttgtgcgtatgtctagcttcagccgcatcaggttcaatggaacgtcagtgactagtagaaaagtcactgtagcaaagaagcgtatcagtaacagaggttttcttctgttatcaattatgggtgctttgtgtgctatcttctgggtgttcaaagccaccgttggagttatgggaagacctctcttgtcgtgacctagactcttgaatcttgattcagcataagttagcctgatccacatctttgattatgtatagagtttgaaagagtttaattcttaacaaaagatttcttttttcctggattctctgatggctttgaaattttgcttgcacttatcatattaagcagaatttttgaacctctgtcgtgtcagacaagaatgttggaaaaaaataacaataatgggcctgtcgaattaatgggcctgagctagtatatttcgagcccagtaggttctcacaaactaagtagcagaaaaagctgagaccatcaaatagccaaccaaaaaatcacctcaatctacacaaagtctcatttctcgttaatttccattttcgttatctctctctctcgccgatcaaaccctaggtgtatcaattcgttcagattcccggcggttggtctcactgtcatgtaggtttgattcatcttctcttctggatcttgagtgacgaagagagaagagatctgagtttttctgagagagagatttttctccctcgatgacccgatcagttttttttcgtcgctggggattttcaaattttttttgagggatcggttttgatttgttacgtagatg

SEQ ID NO: 34597 - DNA, 3003 bp, Unknown
  misc_feature (1)..( 3003): 2750-1469P.txt file - cDNA_ID_3079991; gDNA_ID_2684602; Annot_ID_193205
tggaggagaaacacaaccatgaaaatgaaactaattatttattggtcaacaacagaaacagaacctgctgaagatagtggttgatcctcactaccatcacgacgaggagcccacataacacgatcaggtctatccttgtttcttgtacgcctctcttgcttctcactgatggtaccagaagtatgataatctttccctgcacatggaccatctattttgaattatcagcccaacttgggaagcaaacattttcacttaaattgtattcctttataacctgctcgagtgttggctggtcgagaaggtcgtttgtagttttctgcttctgagggttccactctttgctcagactgcacaaaagtggaagactggctcggtcgagagtcatttctcagaagtattcccttgatcaacctcccaccaacatcactcttctggttttgtcttgaatccgtggagtttctagaaagattagtgtctatatgctgttccggttgtggtggagggttctaaaaataccattaacaaataagaaatttacatggcttataattctgtttacaatcaaacagcctgcacaactttcataaagaacaaaaaagcttacatcaggattgtctcggtcttttgatctcaggagcaaaatctttttcttcccagaatccatagtcaatgctatcccagggggagagctatcaatgatagcggctgcaattgagtagcaaaaagacaaagagttaaacgtggccttttaaaaatatgtaattagctagttaggaataacaacagctgttgattttttaccagtttcatttcctggtagttcctttccacttgaatttgactgacgataatctggcttagagctgctgacgtctgctgtagtcttccggggcacattctttgaactttctttttccacatactagaatgaaaaatataatggcaacagatgagtataatggcagacgacactgactattgactcctaaaaagtgagagacaaacctttttcttttcagagttacgtttcgagggccttggactcggcttgtttgcagagactactctggttcttctacctcctcttcgaatatcagataaaccctgttgcttgaacagaaaccagagatcaacaatagaagttccattttgaaataaataaaatagagagacatccgtcccaggaaagttctgatattcaactaggtagaataagtgaaaaccccgtaaaactgtgagcataatgtacctggggtcccatcacagtggcacgtttttgacgtatgaattccataagaggtgtaacaatgggagccgcttttgaagcacctaagaaaaataattgttgtgttagtaatttcgattaattcactagagaataaccaacctcttcagacaaaagaagcatcaaaatgattgcaaatacgaaacacgaaccagactgctcagcttctcttctttccaactggatttcagcactaggaagattctcaacaggttgtgcaatcaccttaagaaactcaagataatcaggatctttactaatagacccttcacgaggatctttcttatcactcggtttcggaacacgctgagaaggtgcatattcaactatagccttaaactgagcacctaaaccaaaagaaaccacaaaaatcacatcttcaaatacacacactactaaaaccacatgcaaccatcagacaaagacagattaaaaagtcaaatacccttttcattaacaaacacatgcccgttgaaaaatgcagcgaactcataaacatcttctggtgccttgaaacttacataggcccgtgaatacttctgatttttatagctgaagacaccacaaaaacacaaacacacacacacatcactaaaaaaaacccaatactactaagtataatttctctacaatcaactaagtaacaaaaatctatacaataatcttcaatttccaacataatcaaatacaatcttctttaatttccatcatcttcttaaattacaaaaattcgtaaccctaaaattcatagaaaccaaaattccaaattcaagacccaacgagaaaataaaaccctaacctggacttcccaggacgaaacgaaacccaattgtaacgatcagcgaaacgaggatcaatttgagataagagatcggactgtgaaagagaaggcggcaagtgacgaacaaccaccttcttcttctgcaaaggttccttcatcgaaaaccctaaattttccttggagaaagtcgcaaatcaaacacgaacacgatgaagaagaagaagaagaaaagtgaaacacatcaatacgctaattttgccctaatttttgtttcctctcttccctttcctctgggaaaagaaaaaattaaaatacccgtagacaaatcaatcttcggtctacgtggactttttaacctatatgggcctctaatgggccttaattatatgtttcaaccgtcggattaagttttaaggcatcggacggcagataattactctgatagtttgtgaaatgggcttgttattgggcttaccgtaggatgaagattataataatacatcgtacggtgtataatcaatctaataggtgatccgcgtcgcaggtgataaagtacgagtttgtttcgcagagacttctggtcttgtcaggttttactgattctgtataaagtccaaaaaagatatttttctctaagattgtcgctttagcttctccggtttttaagcaagtaatcttctttcgtctctatcttctttacttgattgcttattcatctgttgattctgtggttaggtttgattcttctggctctgttttgttctgtttttggtgtttaattcttcttagcaagcaagtaatattcgatcgtcactgtttttgctttgattttgtgatttctctatcaaagattagaactttacgtgaccctttaagcgatcaacaattatctcactgttttttcagataagggtatatgagtttgttggacatg

SEQ ID NO: 34598 - DNA, 3000 bp, Unknown
  misc_feature (1)..( 3000): 2750-1469P.txt file - cDNA_ID_3079995; gDNA_ID_2684602; Annot_ID_193204
  misc_feature (1623)..(1623): n is a, c, g, or t
  misc_feature (1988)..(2037): n is a, c, g, or t
tcaggctaacttatgctgaatcaagattcaagagtctaggtcacgacaagagaggtcttcccataactccaacggtggctttgaacacccagaagatagcacacaaagcacccataattgataacagaagaaaacctctgttactgatacgcttctttgctacagtgacttttctactagtcactgacgttccattgaacctgatgcggctgaagctagacatacgcacaaaggtctggttaagaggaccctcacaggcagaggctggtgttgatggtattgattccaataattcccacagagctgatgagaactggctccttgttccaccaccattttgtccttccttgtattggggatttacactcatagtgggattcatagactcaggcatcacacctaagtaagttggtattcacaaagtatcagtaaaaaaggccctaggttattatgtttcaagatcttaacaagagggtttgatatcaacaaaaagaaaacagagtataatatatacatgtcttggttaaattcaaaaactaatgcttcgtgggaaatataacttggcagacaacataagggaatgctctgagatgagggtgagtttaaagactttttaagtacctgttgactgtgaagtgaatgctccagaagaagattgtggtggttgaacatagagagcagcctgatcatctttaaaccacatattgtcagtgaactgattaagagtggtactaggatgcatgtagttattaagctggttctcaggtgtctggtactggaactgttcataaagtaattgctgtctttggcctgatgtgttattagtaaaattactcagacaagacagatctgtagaagttccctgaaaaacagatatgtcattgaacaattggtcgtattcattaacatcaccaaattcaccatggttcaagaactctgtggatttctctgttgaagaagcaccgagctcagggatcagaagatcattcatttcaatgtactcctccttctcattatctagaagaggtgccataccagaggtagcctcaaatgaattcaaatgggactgaaaactcgagtccctgttgtatagctggccatttggcaagaacattccattcgtccgagggtcaatatactctccagaagaattattcagcaatgtgctctgtatcacttctgcactattaccctgcaaatacaagtatctatttagtgaaggaagcacaacagaataaccaaaggacccaaaaaagaaagaaagcataagccaatatgttattagagaagaaactaacctgtggaacaccaacaaactcatcaaactgtctttggttaaccccgggtgcatctgggatttcattgagaagcttctcaatatcctctaactgaagtttgacaggattgcaaaatttagtatcatccacacaaggaccattctcataacggaccacgggataatccggtacagcgacactatctgcatcttcactatcactatcaacccattcttcttcttggaacggagcaccatactgttcaccattcttaggaccagccccactcttcttataaagcttataaagagcataatactcctgaaggtaagacagattagttaanctacaaataaatcaaaaagagaaacagatgagttttggctataatactaaccttagcgttcttacatctccctagctcttcttcatccatagtgtactcatgcatcacccagtcagttctctcaccattaggagcacgacctctatagaaaacaagagtcttcttgagtccaacagatcttgaattgtactcaatgactcgatcctttcctgtcgccttccaataaccagttgcagtacctctacttgacctagctgcgttaggatacttcctattccttggagtgaaaaagaaccactgtctatctcccgtcttcaacatcgatagacctgttacattcacctgagtcagcaaacagtctgccnnnnnnnnnnnnnnnnnnnnnnnnnnnnnnnnnnnnnnnnnnnnnnnnnnctctctgtgactcgcacgtgcttgtcactcctacagttctagctcttgacctaaaagctttcctcccaaggatactgttacctgtcgcactctttccgtttccagtacggcccacaagaactagggttcttttagggtttgatgatgacgcaaattcccaatcatcttccatcatatctccacccatgtccaacaaactcatatacccttatctgaaaaaacagtgagataattgttgatcgcttaaagggtcacgtaaagttctaatctttgatagagaaatcacaaaatcaaagcaaaaacagtgacgatcgaatattacttgcttgctaagaagaattaaacaccaaaaacagaacaaaacagagccagaagaatcaaacctaaccacagaatcaacagatgaataagcaatcaagtaaagaagatagagacgaaagaagattacttgcttaaaaaccggagaagctaaagcgacaatcttagagaaaaatatcttttttggactttatacagaatcagtaaaacctgacaagaccagaagtctctgcgaaacaaactcgtactttatcacctgcgacgcggatcacctattagattgattatacaccgtacgatgtattattataatcttcatcctacggtaagcccaataacaagcccatttcacaaactatcagagtaattatctgccgtccgatgccttaaaacttaatccgacggttgaaacatataattaaggcccattagaggcccatataggttaaaaagtccacgtagaccgaagattgatttgtctacgggtattttaattttttcttttcccagaggaaagggaagagaggaaacaaaaattagggcaaaattagcgtattgatgtgtttcacttttcttcttcttcttcttcatcgtgttcgtgtttgatttgcgactttctccaaggaaaatttagggttttcgatg

SEQ ID NO: 34599 - DNA, 3000 bp, Unknown
  misc_feature (1)..( 3000): 2750-1469P.txt file - cDNA_ID_3079999; gDNA_ID_2684602; Annot_ID_193203
cgaaacgtaactctgaaaagaaaaaggtttgtctctcactttttaggagtcaatagtcagtgtcgtctgccattatactcatctgttgccattatatttttcattctagtatgtggaaaaagaaagttcaaagaatgtgccccggaagactacagcagacgtcagcagctctaagccagattatcgtcagtcaaattcaagtggaaaggaactaccaggaaatgaaactggtaaaaaatcaacagctgttgttattcctaactagctaattacatatttttaaaaggccacgtttaactctttgtctttttgctactcaattgcagccgctatcattgatagctctccccctgggatagcattgactatggattctgggaagaaaaagattttgctcctgagatcaaaagaccgagacaatcctgatgtaagcttttttgttctttatgaaagttgtgcaggctgtttgattgtaaacagaattataagccatgtaaatttcttatttgttaatggtatttttagaaccctccaccacaaccggaacagcatatagacactaatctttctagaaactccacggattcaagacaaaaccagaagagtgatgttggtgggaggttgatcaagggaatacttctgagaaatgactctcgaccgagccagtcttccacttttgtgcagtctgagcaaagagtggaaccctcagaagcagaaaactacaaacgaccttctcgaccagccaacactcgagcaggttataaaggaatacaatttaagtgaaaatgtttgcttcccaagttgggctgataattcaaaatagatggtccatgtgcagggaaagattatcatacttctggtaccatcagtgagaagcaagagaggcgtacaagaaacaaggatagacctgatcgtgttatgtgggctcctcgtcgtgatggtagtgaggatcaaccactatcttcagcaggttctgtttctgttgttgaccaataaataattagtttcattttcatggttgtgtttctcctccatgacatttgataggttcttacaggaaacaatggagaagtgaaagacaggatgttctctcaaagatcgggagaagtggtgaactcctctggtggtcacactcttgagaatggttagttcatctgaagttggagaatgcataatgtgtcttgtgtcattattatatgaataaataaaagtgacgttggttctgccaaaaacttttgactctatccaggttctgccagacattctagtcgccgtgttggaggtcgcaatagaaaagaagaggtggtgattggcgagggtaaaacctcccggagaggaagtggtggtggtcccagttcacatgaggcaagccaaaccaaagtcttttcttactacttttcctctgtcctcttttaaccatgtatagaagattcatttttactgtgttgcagaagcaaatgtggatccaaaaaccatcatccggtacttgatatattctcttaacatatggtaagcttcagtcgcactactaccctctcttacttgaaatttgtcaacacagttttatgattgttgtgacctttcaggctaaatatatgagccattccactggattttgtccttcaatgggaatctatagatctcaatcgaaatggggaagtaacattatcaacatcacttgggttttggagacttttggtccaacgttgtaagtcgtagtattgcacataaaagaggccgttctcaaagttaggaatcagctcaagatttatgagaagtgagataagaaaaactcgtttgctactgccttttgaaggccctagcggttcacggtacctgcatccccccttttggcttgtgcggtgtcacagacaagtgagtgagaagtgagaacttactctcgagtctgagtaatgaaaataaagtcaaaagtgtatagggagcgggaagcacagtgtgtcgggttttattttgggttcctgagaggccttagaacttgattgcacgcttttaaccatataagagtttgattactttgaagttaatttcttgctaagtaatattttcttgtggaagttagtttattttttatatgattagtctatttgtacttatttttgatttcaccaacataaaagttatgctgaaagtgatttcacgtttagaaagaccatattcttgcgattaggattaaagagggttacataaattaatcaaatggtcaaaaattaggaaatgagaactcacttgtggaagagaagtcataaggataagagaccaatatatatttccccttggggtcgagttttttgggcctggcttgttagttgttacaatcgagtgtgatgcgtcccatttcggcggagactttgaatgtgtattattgacctttgattcctttgtccatcatttgttttgtgtttgcttaaaattaatttttggtcttccccagtcgactatatactctcttggtcacttgtaacgaagtaacaaaatgaaatacatgtcacatgtgatatatttatacacagactacaatgaaatcaagtatgttgactaagaagagaagaaaatgaagtttgttgactaaagaaaggtcaaaatttttagaaattatcatcaaatcataaagatagtaaaataatgttaacagtatgaagtgtgaactcatatcttcgaagagattgagacagagtttagaaaatctcttacaaatctagtttctacaacctcaactaacattgtccaaatctgtctctatcctctgttttatttttttcttccggtggtacaaaaattcacaatgaactgtatttatcacaattaatgaccgattgcttcttcacctactctctctctctctctctctctctttggaagtaaccaaacaagcctatatgctgctgatcccatctaggggccaagcctctcttctttaaaaacttttgacttccattttcttgagaattcccctttctgggttcttgatttggaaagatg

SEQ ID NO: 34600 - DNA, 3003 bp, Unknown
  misc_feature (1)..( 3003): 2750-1469P.txt file - cDNA_ID_3080011; gDNA_ID_2684602; Annot_ID_193198
  misc_feature (818)..(867): n is a, c, g, or t
agactgttgttggaatgtgcaaatgagacaatattggaaatgttatttgcagcagaaggaggaggattcttctcttcatcagcttctggttatagcaatggtttagctcttcttctattaggtcaaaagactgaacaaaaaccaatcaaagtttcatcacaatggaaccattatcatttagttcttgaagattctgataccgggtttcggttagattcgtctaagaattggctctcttctgcttgcacttctctcatatgttttggtcgaaaatccgaaagactggaaagcgaggggaagaaagatgaggcaccgagtgtggaggactataataactgtgaagtcactaataggtttgcacttaaaagcagcttgaagaaaagatcgtttagtgatgttgtgattggtgatgatgatgtgagtagagatggtgtggtggatcatatagatagaaggaaagtgcagtggcctgatacatgtggtattgagattgctgaggtcagagaatttgagcctaggtatggatgctttctcttatgaagttagattctgtttgattattctttatatgtgtagccactagatgtaagttctggtctatgttagagtagggaataacctgttttcataggaaagaactgacttattccctctctgtctgcttaaaatggtttagggcacatcttttatcatgatcttaccggattcttccatgtaaacttaagcttatagtccgagattttatagtagtaactctcaagatcatgaataagcaacagtgtaatagatccagcaagatctctatatccctttcatgnnnnnnnnnnnnnnnnnnnnnnnnnnnnnnnnnnnnnnnnnnnnnnnnnnataatcattctctcatcattttgcactatattcatgtatatatatcttatgttgttatatgggtaaaacacaataaatttaaaagatagaagttgtccttggggtttaaaaaaaaaaacttttatattaaaattcatatgattttataagaaaacaaattagtttgtcacttacaaaataaaatgaattggaactattatgtatgagtttatatcaacaaattattttgtaatttactttatcatacatttattttgtaaaaataagatatgatatgtttattaatatatacatgcataaataacatagaaaaagaaaaactgttaaaatatgagcaaaagtaagatatcaaattttaacatatttttaattttttaatcatataatattgatacaaaattattttaattaattaaggttttaaaaaaaaaaaactaaagatggaaaattttcttataaaattggaggataatttatagtagtgaactattaatgtgcagtcttattggttcctaatttacaaggaattttgatgacttcaattaaatccttgaaaataaagaaatgaaagattttaaacgattgttagagagttttttataatcttgttgattagtttttcataatcttgtaaagtttctcaaacaatctctttattttgataatactttccatgacttttcatgacttcattttgtgaagaaaaatgtaggaaatcataaccaataacacaataatttaaatcattaacaatcattaacaatcaaagatttttttgttttaattgaataacacaaaacttttaatgactttataaaagtatgaatctaataacccaaaatttatgaagaggttagattactttttacaaatcttaaatgaataacacaaaaatttaacatacttttaaaaaatcttgattgaataacaacagattttacatgacaatttaaatcactaaaactcttttgaaatcatacacgaataacaccccctaaaacataatatcatgtcaaaattttaaagatttgattttgtaattagttaagggagttgcaattatgctagaagaaaattcatttcaaaattgtagtttaatatgaagtaatttcaaagtttaatgactatttttctaaatatttaatatatctattaataaattattttagtcaaactacaattaatgataagtacatgtgtcatcaaagtatagtgccaaatgtcgcattagtaggcaaagttaggaaaaaccttctcttattatataagattttgaattacaggaagtgatgaggatgtctagtaaccgaaaggttgtgatcgataacaagactcatgatgaaggcaaaaaagcagagcaagtccataagcttctctccctagtagatgatatcagaaggagcaagtgtggagaagcatataccgatgatacatatcatatgataaaggtgaaaaaatctcttgcatatattctcctcagatatttttgaaactttaaaatgatcaaatctcgtggtatcttaggaagagtcagagaaactaaggaagcatcatgaggagctggaatcaaagaactattcagaagaatgtgcagctgaaatgaagaatcagtcacttatattgtataaggagaatttgaaacaaatgtcagagcaggtaaaagatatgatcataaatcttatatgactacttccggttttccaatattaacaagctctgagtatattttgttaagttggagaagaagctcaaagatgctgcggaggcgcaagaaaaagcgctaagcaagatgacacaagaaaacaacgagctgaacctggcgcttaagattcacatcccgttgccgccaattactccatgcaacattctttgaaaaatgtcttctttctaacaaaggggtttctcaagaaatatcagtaactattatcgtccaaagggattttgggttgccataagaagatacaatcaaggaggttttgtttgtcaaaatttcaaatgttttaccaaacctttctgttttttttcccattttgtatttcagattacatgttctgtccaaaactatattgtggtttcttttgttgtgtgtggacttttgtataactatgttttcttccatgtttgaataagtgtatg

SEQ ID NO: 34601 - DNA, 3000 bp, Unknown; identical to SEQ ID NO: 7243
  misc_feature (1)..( 3000): 2750-1469P.txt file - cDNA_ID_3080035; gDNA_ID_2684605; Annot_ID_193256

SEQ ID NO: 34602 - DNA, 3000 bp, Unknown
  misc_feature (1)..( 3000): 2750-1469P.txt file - cDNA_ID_3080037; gDNA_ID_2684605; Annot_ID_193255
ttcacaataagagtgaaattacaaaagaagatacaacgcctatagctgttgttattccagggttaactagtgattcttcatctgcagtaagtttagttttaaatcacttatctgttctttaatggctaattgactttatattggtgattttttgttgtagtatttaaagcatcttgcttacgacactgcaaaaacaggttggaatgttgttattagcaaccatagaggattgggaggagtttctgttactgtgagttcgctagttttatgaatctacgaaaagttgtgattacttatatacatatattcttttatgtaagtgttgttttgtggcaaatgtatgtagtcagattgcttctataatgctggatggacagatgatataagggtagttcttgattatcttcaacacaaatacccgagggctcctctctttgctattggcactagcattggagcaaatgttctggtactaaatcaggaaccgcagtgttttacttagctttgaatgatgtttaagtgtgaagatttgctttgtttttcatggactttttgttacatattgctcagttggctgcaccatatgctacattcaaaaaaacgatttcaagctaaaagagtagattgattatatatgtttttcaaataccattgatatgcgtgaggaggttcctgaatttatcttatgcttcaggtaaaataccttggggaagagggtgaaaagactcctctgagaggtgctgttgctatctgctctccatgggacctcttggtgagctatttttcataactgtcttgttctttgtatattgattcgtgtctgaagttgtctctaataacttgacgagaaattatgacttccttaattttcttcattgggttctgatttcagacctttgaacttgtaaatagtactaagggttttgtttgatacaagtggatgcttgatacgttatgctttttcttttccttttctcctcccaacaagattggtgacaggtttatctgtcggactttgaaacaaaagctctatgacaaagctctcaccatcggactccaaggttatgcccaattgtatgtccaccaagaactgcctagattttgagtttgtaagatgggctgagaggagatatttccgttttactgctttgagaagatcaggtttcagttataacttttggtttcattgcaggcatgaacctcagtttttacggcttgctaattgggaaggcatcaaaaaggttagtaggttaattaaccacaggcccataagttatacagtctacttggtagatgcattgaaacaagcagagttcttaagcaaataacttacatatttctttccctatcgacgttgtctgttgttgtccgttgtttttacttcatcagtcacgttccatccgagattttgacaaccatgctacctgtctagttggaaaattcgaggtattagttctcctccatattatcttaacttctgatgttagttttccaccgcaattggctttgtaattcatatattcatctttgcaatgctcttcataatcaccattaagttctctgttgatttaatataagtacaacgggttgcacctttatgcagactgtggatacgtattaccgaaaatcgagcagcactcaatacgtaggaaatgtggcggtgccactactctgtataagtgctctagatgatccattatgcacaaaggaagctattccctgggacgaatgcaggtaagacgctatctatctctttttaaatcttaaatcctgttacagcgattaacatgaagtttctattgaaaagggccaacaaaaacattgtcttggctacaacaaatcacgggggacatctagcgttcttcgaaggattaactggatctagcttatggttggtatatttcagattgtaactaagtaataatagtacttcctattttgactgcctatatatgttgttgtgtataggtgggttcgagccaccaacgagtttcttggcgtccttagctgcagtccttatatgcatatacagaaagtaagtttccgtttattagaattgcagtttagataatttaactcttctctctatttctttcttcctaagattatcaatttttttgcagattgtagataaaagaagctcagggtcagggaaacaagagccatcgataaaccaaggcccgtacctaaacattgcagaagacgggttggtggcagcagtcaaatatgagcaagacaccaataagaccacactgaagcagagagggcgaaagcctgaggaagatgtaacaaagaaaagctttaaagagctgtgtaggcagacaaaacagtcggtatggtggcttggttacataggcatggttacaagtttccctttacttgggatgctcctaaactacatcttccgtaagaagcaacgacccacaacaacatccacatcctgaagttgctttctttctcaacatctccattcactcattcttctatctgttaacctattatcgattattgagaatgttaataatcatctaatttttttttatcataagcatagtaattatgtagagttttcatgaaggaaaggagtggaatcgctcaaactcattttttgtcttattatttcggagaatcctttcattaaaactgacttcgatcgaagatcaaatcatttggtttgagtataagtttagatgttcctggaaaatcatattactctgaataatccaaaatattagtatgttatctcagtggcattaccgttaaaatatgaaactataagggtattctgggaagttggtgattacatttttttcttttcctggcaacttcgagagcttttaagcgcagaagaaactcgttaaaaatcttggcgagaaaagttgagaactggaatcgaagaagcgatagggttttggttacttggagtgtgagtattttagttaccaccgcttgcaatttcaaattggtttcttttttccggtgacatttagtaagacaatg

SEQ ID NO: 34603 - DNA, 3000 bp, Unknown
  misc_feature (1)..( 3000): 2750-1469P.txt file - cDNA_ID_3080041; gDNA_ID_2684605; Annot_ID_193254
actaagtaataatagtacttcctattttgactgcctatatatgttgttgtgtataggtgggttcgagccaccaacgagtttcttggcgtccttagctgcagtccttatatgcatatacagaaagtaagtttccgtttattagaattgcagtttagataatttaactcttctctctatttctttcttcctaagattatcaatttttttgcagattgtagataaaagaagctcagggtcagggaaacaagagccatcgataaaccaaggcccgtacctaaacattgcagaagacgggttggtggcagcagtcaaatatgagcaagacaccaataagaccacactgaagcagagagggcgaaagcctgaggaagatgtaacaaagaaaagctttaaagagctgtgtaggcagacaaaacagtcggtatggtggcttggttacataggcatggttacaagtttccctttacttgggatgctcctaaactacatcttccgtaagaagcaacgacccacaacaacatccacatcctgaagttgctttctttctcaacatctccattcactcattcttctatctgttaacctattatcgattattgagaatgttaataatcatctaatttttttttatcataagcatagtaattatgtagagttttcatgaaggaaaggagtggaatcgctcaaactcattttttgtcttattatttcggagaatcctttcattaaaactgacttcgatcgaagatcaaatcatttggtttgagtataagtttagatgttcctggaaaatcatattactctgaataatccaaaatattagtatgttatctcagtggcattaccgttaaaatatgaaactataagggtattctgggaagttggtgattacatttttttcttttcctggcaacttcgagagcttttaagcgcagaagaaactcgttaaaaatcttggcgagaaaagttgagaactggaatcgaagaagcgatagggttttggttacttggagtgtgagtattttagttaccaccgcttgcaatttcaaattggtttcttttttccggtgacatttagtaagacaatggaagaaataagatcggcgatggagaagcaagtggatctcgtagcggatctggttgagaaactctccggagagctccgaacggggtttcaacctgcttacgataatttcttggggtttttccacgccattgattggaaggtaatgagaatctttcttcgtattgcatcatttggtcttgaggaatttagaatcacaagtctagataaattctcggtatttgtagaatttcatttgaattctgtgagaatttgagattccataaactatactcatatacattggttttttctcatctggcattttttggttacaggaaccttggattatgggtttaatggcgtttcatgctttgttgttactagtgactcttctttctagaaggcatctcaacttccatatgttcctcttcttattggcttgtaagttccctttgaaactgtctatatatatattgtacaagaaatctcttcgatctaatgatctcactagtctaggttgtggcattcatagtggatcaagtgtttgagaagctagtactgacatgttttacttcactctagcttatgattgaatgcactaggctttgttttctttgtttagtacaataggattatcggatcatcgatgtttggtaaaacgaaaatatgatattcatttgtctactcaatagctgtgttagtttagattatgaacttagtgattggcatatttctttgcgatattttgtgagtcgtcactgcatcaattagagttttttcttttcttagtacacgttattgagactgatgatgtgacaaaaaatttgcagtggctggggtatactttgcagagaatctcaaccgggagttgaggaaaaactggaagagcttctcaactcaaaactactttgactcgaacggagtcttcctatcgactctctggtctggaccacttttggtcattgcaatgataatcctggtaatgtgttcagcaatctttccctttcttctctgcattaatatattagaatctacttgctagctcttaataaattgttcccaagtaaaacatactttgattgagcagtcatattaactgagaaatcgaggatatgtttcgtgtttgatttggttttaactcttaagagtatttgtagtccttaactcaaaccatagtaccatactgatccatgtcttgtttaggattttaacgaactatgtgtagtgaatgtggaaaatctgatggaggtgttgtgtttttgacagataaacacactcttttcgctttgctacttaatcgtaaagtggaaaagagctgagctcaggcatcgcgcaaggcttgctcataccaaggaggaatgatcccactttttttaatctcacatttatgtatactctcacacaatgcatcaaaactgttttgagttttttagtagaagctgctcttttatgtatttcgttttcaattgaatcgaattgtatcaaaccgaaccaaaccaaattattctacttcggtctgttatggttaaagttttgaaaccccgaattgaatgatttggcatcaatttctaggcatgaaaaaattgtagaaaagcacatacataaataatcgatgaccatgtccataccaaacaaaaaatgaaatgaaaaattcatgtgtttagtgtttaaccgacctaaatttgaattaattaagggtttaatttggttattaaaatttgaaattgtcgtaataagagatgatgccacaattagccgttacgagtaaatagagagagagaggtcgtcggattcaacaacggactctttttcaaaatcagaaggagatagagagagaaagagagaaacactctctaaatcttcttcttcttcatctctttcgttttccattttcgaaaatctctcaatcgttcgttcttacagacttattcatg

SEQ ID NO: 34604 - DNA, 890 bp, Unknown
  misc_feature (1)..( 890): 2750-1469P.txt file - cDNA_ID_3080041; gDNA_ID_1563689; Annot_ID_148128
  misc_feature (108)..(109): n is a, c, g, or t
cttaataaattgttcccaagtaaaacatactttgattgagcagtcatattaactgagaaatcgaggatatgtttcgtgtttgatttggttttaactcttaagagtatnngtagtccttaactcaaaccatagtaccatactgatccatgtcttgtttaggattttaacgaactatgtgtagtgaatgtggaaaatctgatggaggtgttgtgtttttgacagataaacacactcttttcgctttgctacttaatcgtaaagtggaaaagagctgagctcaggcatcgcgcaaggcttgctcataccaaggaggaatgatcccactttttttaatctcacatttatgtatactctcacacaatgcatcaaaactgttttgagttttttagtagaagctgctcttttatgtatttcgttttcaattgaatcgaattgtatcaaaccgaaccaaaccaaattattctacttcggtctgttatggttaaagttttgaaaccccgaattgaatgatttggcatcaatttctaggcatgaaaaaattgtagaaaagcacatacataaataatcgatgaccatgtccataccaaacaaaaaatgaaatgaaaaattcatgtgtttagtgtttaaccgacctaaatttgaattaattaagggtttaatttggttattaaaatttgaaattgtcgtaataagagatgatgccacaattagccgttacgagtaaatagagagagagaggtcgtcggattcaacaacggactctttttcaaaatcagaaggagatagagagagaaagagagaaacactctctaaatcttcttcttcttcatctctttcgttttccattttcgaaaatctctcaatcgttcgttcttacagacttattcatg

SEQ ID NO: 34605 - DNA, 3003 bp, Unknown
  misc_feature (1)..( 3003): 2750-1469P.txt file - cDNA_ID_3080064; gDNA_ID_2684605; Annot_ID_193248
aacatagtgaaagaaggtaaggaatcttagacttcgagtctaaggattctaggatgcgatatagtattcaggatccttgaaaggatcgactagtgggctgggtagaatcgggtcatgtgcaacctacacaagactcggtccgggcaaggatcggcttaggcggggacgcggctcggcggaggaccggcgggtcttaattgacctactgggaattggccggactgatgcgtgatcttcccctctccgaatcctgtccacggatccgagtagtgtatggactatagagcattacatggacttgcatatgactaagtaaacgagattacttatggctctatgactttcaggaactaatggagatcgtgggaagaacttggcttaggcgcgagagactcaaggccggtatgatggatggttatagttcggatagcctagggatcgattatatgacttgcaatagcttatatgcaaactcataagttttattgaatcctttgcttaattaataaagatcagattgtttgtttactctattcgttccatacattgaatcatagaatcgtatgaaatagatttcactagggaatgaacctcataatcggttagggtcaagtcacttagtgatttgggtcgggagatctcgcccggacttaggcaggacggatcggggcctttcaaggtctctacaaactgaaagaaaactcaacaaacaattttttggtgtccataataacaagttcatttagatatatccatccggaaacctttttactgatctatatccattctatatatcatttccataataacaagagattcgattaaccagaatctcgatgctacgtagatgaaatgagttttacccatgagagagagagcaaacctcaaatcaaaccgccattgttgaagaagaagaattttcttagagaactgaatctcaaatttattttaaaacaaaaatttaaattgcaaaataaatcttaatcttaaagaaaccaatggctcatactctccaattaagataaatttttatttggcttgagattgaaattgaaaaccaaaaattatattactagagacaaaaagagcttccttgttcactttgttcatagttttacaaaagctttgaaaatatcttctcatttcaagttcaagttcgattcttctatagagtaacctcgatccctcaacatctgaagcaccgtgcgacgcaccttgaaaagcctcgtgatttcatcatccatgtccgccattccttccaaagttttgattttttgttcttttgccggcgaggaagaatgagattagtgaggttttagggtttatggcactcataaataatggtgatatagcatgttattatatttaatggtttggatcttcagttatatgagatgaatttcttaaatacgatacgatgaatttctttaggtaatatagactgagactgagatacttgtccatgatcatatatatctcagaccttgagccataaaattgccttaaaaatcaaaagagacgagaaataaagtgtaaataatctcactaaaaaaacatgggaaagggtttttcgctatttatcacaaaaggaacaaaactgagaggaaaagagataacaaacaatgtctactactgtctatagcctatcttttcctcatttgttactattactttacgccatatacaacaacatgtggattacatatatgtataagattatagtccttattcatatcttgtagattgtctttgcttcagttatgcgttgtgtccatttctttcttgtctctttttgccgccattgttgaagaaaaagaagtttcttagagaactgaatctcaaagtttatgtcaaaacaaagatttaaattgcaaaacaaatcacaatcttaaagaaaccaagggctcgtactctccaattaagataatttcttctttggcttgagtttgaaactaaaaaccaaaaatcaaattacttgagccacctgtgagacccagtcccggacgtctcggcgtccggcgaccgtgtactcaagttcgcgcctcttctcggccgaacctcttaatttttcgcgattcaacatagaattgcctttacgaggtttaattctataatcgctctcttattacacaacgaaagtctttctaaccttggtttagttctaaccaactcttgtaccggtttcatcgtctttgtcccttagacttagatcgatcctttactcggtcaagacatgcatatgttcgctaaccattctaagccaaacaatcgcatattcctttatcctactttcacggtcaattaccaaacgtctatcttaactaataagctagatcgttacataccttggccaatatgcggatttgattccttagcccgtttgtcgccttactccattcgttcaacgactcgtatccgatcgtgaattgatgaaccaatccctatcgttacttagccatacaaccaaccaaccccactggtctaagtacaacgatagagattggggatcgtacgattcccttggttcacgatggccgaatcaagctcttggcttattggtccattcgttcaccaaacgtacgcccctccggctacatggtggacgattgagccctcggcttataaaaccatccatgtttccgtttcggtcgtttaacactacgaccgcccacggtttactaaccgtttacccgtccggtccatggtggtcgataaagctttcggcttaatgatccatccatgcggtccgaacgatatccttatcacacccaagggtccgtggattcaaccaccggatcatcgtaggctagcccatgaaatctttcctccgtcggccttaggtttgctcgtgggtccaacatccgttttgtccatcggttcccaccgtggactttcccgttggttatccgtcgagtcaccctttggtcttaccgatcttcgatcggtttcatcatggctgaggagatagatacatgaaggcagccgcgatattgatcccatatg

SEQ ID NO: 34606 - DNA, 3003 bp, Unknown
  misc_feature (1)..( 3003): 2750-1469P.txt file - cDNA_ID_3080084; gDNA_ID_2936562; Annot_ID_194493
accggaatctcgatgctacatagatgaaacgagtttgacacatgagagagagagcaaaaatcaaatcaagccgccattgttgaagaagaagaagtttcttagataactgaatctcaaatttaagtcaaaacaaatatttaaatttcaaaataaatcacaatcttataagaaaccaagacctcgtattctccaattagtctagagagaagagaaagccatcgcgtagtgtggatttggagattaattgcagatttggaattgaagatattctggaaaaggtttttttcttcgataaagtgagaaaaaagaaaaaaaaagagaagagatgggaaaaggagagagaagagatggccgatggaaaaaatgtagttaaagggtaaataagtaaaataatttatctaaattaccttctccatttaaagtgcctaattaggaactaactttaaaaaaagtctctaattacgtaatattctcaataataattgaaatcataatttagatataaaaataaaattagcaatacttacccatataagattgggttcttgaaaatcattgctcaagagatctgttcaaacaaaaaaaatcatagattggaatttcaatcgaaacatttggaaaaactaaagtctaaatctgaatcaataataaccttacctctttgtaaaattccagcttagctgctagaaacaggaatatcactctcatcctcaagctaatttttccagcctcattgtacttcatttggcgggagaggaaccaacgtcttcactccgctacttcacgtcctactacttctatcattaaggaaatcaagatgatagttaggacaaggcttgatcctctttctagggctcagagatccacccctcctgccttgaccctcctcgccacttggttctccttatcccaatgacattttcagttgttgtttcttttgtaggcttggtttcattgggttcactttgtgtttggaccttcctcttgctgcgggggctgcgtcctcttgtttcgggcctcggccttgtttgtttctgtttcaggtttgcgtaccccttctcggcatttatcatatatgttatgtttttctagtaaaaatttaaaaaaaaaaaaaaaaaaaatttcagattagcgattaacagatgataaacggtgtcatagtgtattgattatcaaaacaaattgcaagtgattcatactacgaacaaccgtttgattttattttggtgtgtgtttgtttagagaagaagaaaagacaaggtttcttctagaattatctattcaggtaaataaacatttatcttttcaataaaatacaaaaatcaatcaatatgtgaaatgatctgaagaaagttttgtgggtttcggcccaaaacaaaattgtcatgttattcattaatggactcctaaattattcgttgaagcaaacaatttttggcattttattagatattcgataaataatcataaataatagacttatttgtctaaaaaaccacaaaaacaaataaaaattgtatgacttttttgtgttgtcgtcgtcgtcgttatcaaccctcatcatcatcatcaccaacgtaaccaccgacgccatcatcatcgccattaacaactggatctgtctccgtttccatcaaatctctttctctctctgcagatcaattgattttttacaacgtgattgaagcggggctagctccggtgacgatagttgattggttttgtcccttaagatgagctccttcaatggtaacgaacggcgtcggcggccgtgaatcatgagagagatggctcagtttctttttcttttctctgatcttcctctttatcatcagattctatctcagaaacttatcaatgtgcgtttgattttttttgcttgggttccctttacaataatcattagggtttagtttttgaatggaattctcttccaataaacaaaatatcattaatggtgaatagtgaggacgcaaatgattattgaaaagctttgatttcgaatactcgattgcagatctgccacaaatctgaaactctgtttttactattcaccttcttcttcatttgcaagatgatttcatttcgttcgtttaattttttgctttggtttcataaatactatcatctttagggtttaattattgtgaatcaatgaatgtttttagttagaatagattttaagaatatgagatttggaaaaaaaattggatttaaaagaagaggagcgtgcaagaagatgatgagagaagatgatgagattattcaggggtaaaatgatcaaatcgccctatcaaaactactctttttcaaagatcatacacaaaagcctcaaaatcaaaatttttatcaaaaaacatcctcttttgacaataacccctaaataatattataagtattatacactaatattctgcaactgtccagattatttatcatttaccaaagaaatatattaaaaattatatttatctttaaattcaatatttataatggatcaaacatcaaacaaatttgtataccgaaatttttttaaaacacaaaatataagtttctccttaattttcttttatgaaattttcttctaaaaatagaataacatataaaataatacataagagagaaatcatgctttattttacagagaaaaatagagatttacattggagataatcttatatgaaaactgtaaaaaactataaaatcagggcgaaaaatgtgtatggtaaaaaaacttaacatgtggttaaaggttttaaaaagattacagaatagttctctattgggccttcgaaaaaagcccaatacccaacaacaaaaacgcgcgtgtatcacaccttcaatacactagtaagagtcacacagtgatcgtcaccggtaaattagttggcaaactccgcctgctcttcgataattccgaggagcttcttcactcttcttatatctcatttctctctatctctctctctctctcgcattgcgattaacgaaattcgaaaaatg

SEQ ID NO: 34607 - DNA, 3003 bp, Unknown; identical to SEQ ID NO: 34606
  misc_feature (1)..( 3003): 2750-1469P.txt file - cDNA_ID_3080084; gDNA_ID_2684605; Annot_ID_193243

SEQ ID NO: 34608 - DNA, 3000 bp, Unknown
  misc_feature (1)..( 3000): 2750-1469P.txt file - cDNA_ID_3080090; gDNA_ID_2684605; Annot_ID_193241
ataaagcgcctcaaacggaaaaacattcttttaaaagtgcctaatagtggaacattcccattattattatcaacaaatcccaaatcgtgagaggttattttaagattggttagttttaaaaccaatctcttattagaaatctacagtgaaccgagttaatacataggaaaaaatataatcagctacaccaagtatagtggaatacatagctacaccaagtatagtggaatacatagccacacatgccaagtttagaaatgtacaatcaactacacgaactagatgtatttcatccccacatataccaactacatgacggcatgtgatcaatgaacatctttttccggtatacaaattgttgaaatccagtattgaccaatgttgatcagcattgaccaacaaaaatattcgaaaaatgattttttttttattttaatattcttaagaagttattctattgaatagtttatggtattatagaataaataaacacaatctatatttaacagaaaatatattttgtatgattcttattattacttattttttcaatttcaacactaaattaaaagggaaatgaaaataaatattattaatttattaatttcattagaaattattgaagtagatgactctttaatctaaaatttacatggtaaaaaaatagaaagtttttttgcgaaaattaaatcagaattcatagtgaaaaagtatagaaaattttacatactctttagtctaaacaaaaaaatgtcctaatgtttttttaatatatagaaaattgacgataacgattttagcaaaagcacttgtacaataatacgttagttttttattgacaatgtaaaaagaatcaatttgcttaattatttttattcactttattttactattgaaattaaaaaaaaactatctaagtataataatcaatgtattaaatagatatataaaatatattatgttaaatatagaatatgttttcttttaaattataaaacactataaacttttgattcaacacatctttactttgtttctcatcttatttagttcgtgggctttgttttaaacataacttgggcttaagtactttttattttttatttatctttttagaccatccccatcggacaaatttagagggtatcttcaaattttaacagaataaaaaaatagaaaaatgagaattaatgcgcttaacaggagagacaaggtggctttgatgtctgtgggaagatattttttgatactggaagacacgaatatgtcatcatgttattggttggtgctattgttttttatttttttcttttatttggccaacaaatttatttctcttcattttgccaacaaatttctctctcttcatttggccaataaattatagttaagacatgtaaatgctcttagggtttattccttcttgtaattccttgtttaaacacttcttgtagtagttcttaggaacacagtttattattgagtaaaaaacagagttttttttttgtctcaagtgaaatttactaaaccacaaaagggtaaataagcagggtaacagtgatacccaacaatggcccattacattaacatctatggcaaaagactgtttgatattggactctatctaaagacaagtgttgacctaatattacaacagcaacacgttctgatgagtcaacagaagtttaccgacatcagcctctgccatcgagaagcaccgaatccggtgagtaaaacatcgtcgaaacttcgcacgaaatttccttgtttaccaccgaaatatatctgaacggagctctaaaagagacacaacatgagagaatcatcatatgcatcagaatattctgcaatcctttaaaccaagatgaaattgcttgaatgatttcctgcaaattgaggtttctaaagacaagccggagacattagttttaagtaataagtacttaaaaactaattatcaactcaaatctatagaaattattgaaagaaaacatgaaaaaacttgaaaagtaatcggttataaaaccgatcgacggcagaaaagatagaagccggccaaaaccactcatagaagctggatttgccggacgataaccggctatctccactaacagaactggaagatatcgggcaacagtccaaaacacttgggacagcgattcaccggaaaatttccggtctgtaaacatcaaaaactttctctctctgaaagttatgtgagagagaacagagttttatttgaaattgcggtttacaaaaacaaatcggaaaccacactacacaacacggtattgagaaatcatatattagcccatgtgattcgaaatgtatttttgaattttgtggagtgttttaagtttaacggacacaaaatatccagatcagggggaaaattctcattttcaattttgaatccaaattgtttaacggaataaacaagggcatttcgtaattacatataccaagctttttccttttctctccgcaaactattcatttcatttctctccaagattttaattttgtttttgattcatcgatcatttcattcacttcaaaattctcttccgattattccagaacagaagcgtgtgattgaatctgggtctgttgcttcgatcgttgaacacaaacgcacaaatctctcaggtataaaccctattcttagcgatctagaagaatcagtgtgatgatgatcttcgtatcatctctgttaatcttgtttattgctagtttttgaaagattaaatagatatatgatcaacgttttatggttttgaataacatcagttacatgtgttttgatttgatcgttgtttctttgattatgaaaatcacaactatttgagatgatttgtctctgtttgtttcaactatcatcatgtgccacagccgatgcaattataaacgtttcgtggttcagttttgtctctctatctcataatcacttttgctaattcaaaactttgaaaactgttttgtgcgttttgagcgatcatg

SEQ ID NO: 34609 - DNA, 3003 bp, Unknown
  misc_feature (1)..( 3003): 2750-1469P.txt file - cDNA_ID_3080123; gDNA_ID_2685553; Annot_ID_193289
ctgaaccttttttttttctttcttgtttgcagtaaagtctttagactcttagttatcctattataaaagaaattaagaaagaaaaatttaattttacattcaaaaaggagaaacaaattcaaatattaaagaggctagattttcttctataagatgtacctgtaaataagctaacatagcgtcacccacataaggattctcaaatctaatgaaaacttttaaaaaacgttcaacaggaagtataaggaaagtagggtctattggcatcgttctatctataagtagcgaagtcttaagacaccgtacctcatctcttatccttcgatagagatggaaaacatcacgaataactccgagcgatccctcgaccgtccaaagaggcaaagacctgtctccatggagaatgttggaggaacggcgagtggaagtgaggtggcacgatcagcaacactgttggagcttgatcttctggactgtcccatctgctaccacaaacttggggctcctatctatcaggtctctctcttcctttcctggtttataactttcttttgatggaaattaaaaacaattagtggcactgacgagtccttaaaagatgatttttgttgatatgagacttttagaataacatcatcaatttgcttgaaattcatgtatttcaaatgttactttgatgaatttacgaatttctcgatttctcaaatgtaatcttgactgccacattgagttgataagatgttattctttttcatttttttgattagatatttttataagttacactagactagttcataaaactttgataattaactaagtctgagttttgaatttcagtgtgacaatggacatatagcatgttcttcttgctgtaaaaaggtgaagtacaaatgcccttactgtagtttgcggattggtttttttcgatctagaatactggaaaaaattgtagaagcagtcgttgtctcatgcccaaacgccaaatatggctgcaccgagaagattccatatgacaatgaatcagaatcagcccatgagagggtatgcgagttcactctttgctactgccctgaaccagagtgcaagtacaccggcgtgtacacagatctctaccgtcattaccatgctgaacacaagactgatcactcatggttcaagtgtggcgagtacaataacgcgtggttacacgtcaccggtgaaaaattaagctttttagtccttcaagaatatgaagatggtccattggttgttgttcaatgttcgatggagtctcatggaatatgtgtgactgtgaactgtatagcaccttgtgctccaggagttggagaattctcttgccatctcatctaccggaacggaagtgaaaagattacgtttgaatccaagaagatgaataagattcaaaaagtgagccctgaaaatcatgtggcgaattacaagccgattccttactatttacgtggtgaagcctctaatttcatgtcgattccttactatttacttgatgaagcctctatattgaagatgcaaatttgcattcgccgatcaggagaagaagtataagaagctgatgatgatgatgaagaggatcataattatcatatcatatctcttgtagtaggttattaggttcatacatcagtggcctagctagtaatgtattaaatgatgtttgtcttttgttgttgttgttgttgtagctgctttcatctatgaaagctaaactcatattttaaatattgcttatcgtttacttaatgttgtttctttctctctttttcttttttttccgatgacaatgttgtttctttctctaaccattgattacacttatacgtctttgaatttagtcctccaaaatgtaattttaatttctatatattgttgatagaactaccatgtatagtcggattctttggctaaattagaacttctttcctttgtttggctatgtccttaacggttttaggaataaattataatttgttgaccaacaacaaaaaaaaagtaattgttttttataagagcaaagaattcttgtatttttgcaaactatgcacagattagtggtagatgttgttatctcttgtttgttttttttcgtcaactagtttcttggtttattaaactttatgatttgaaattgtcaaaataattacccgaaatgccttcaattcactcactcccgaattaataaatacatccattatgtacataacgaagcaaatgtaaaagacttgacacttccaaatgacaaaaattaacagagggatcaactagaaaattaggaaatatcttctatagcacaatatatcaatctagctaggattcgatattggaagctacctaaacatggttgggagaaatgtaattatgactagagcttcatcaaggattcaatagcaccaacaataggattggatttggcaagatttcatcaagagtcttcctaagtgctagggtttattgttgggtttgtgtgtttcctagttctaatttttaatttttgcgcaaaacttgtttgattaaatatctcacactaatcaaaaaaaattatatcttttaacaaaaaaaaaaacaatattctaactaatttcatagttttctatgtttattttaacaaaagcaaactttatttgtttattcttagtatgatttttatttatttatttattaaagtaataaacattttactataattttataatttttgaatacatgtttggaactttattcatagttcttaattatcaatcatgtttttgactaatttttgatagattttatcataataatataattatggtgttttaataccattatataataatatattatatttattttagttatttttatttaattgctatgacacccacagagattctgaaacctttctgaaaaaccattccggcgggaaaatagaaaaaggcgattagggtatatactcatctattgacattgtagcgaagctaatcccatcgaaatccgatagccatg

SEQ ID NO: 34610 - DNA, 3003 bp, Unknown
  misc_feature (1)..( 3003): 2750-1469P.txt file - cDNA_ID_3080151; gDNA_ID_2685553; Annot_ID_193321
taagtcaccttcaaagaaacatcaaaatcacaaatccatgcttagagatggaacaaaactacatcaaaagagacaatcaaacgattcaatcaacaacgaagtaacaattcaccacacgaatcacctgaatcagagatcgaatctagcaaaaccagagattagaccaaatccaaagcgtatcaaagaatcagactcaaatattttctgaatctgaagctgatcgcagacgaaatcggaaaaaatgagatccgttatggttttaacaacgatcaagagagatttaaaagaagaagatgagattgagactaaccatctccatctttgtcgaagaggctaaaagcttccttaaactcagagatctgttcatcagttagctgatccgccatagcttcttcttctcgtttctttggtttttcgtttcagagaagaaatgatttttttttttcctgaagtctccgaagctgtgaaaatatcttagcgaccgacaaaaacaattatacgacaatgaggaaaaagttaaaacgaaattaaatgtttacggaagataataataataatttactagttgggtttttagctaatcatgtgattagtggatgtgggacttgagaggaagcccaaagggcccttggatacacattaaggcttaaaaatgttttaataaaacaatttacatatttaaaaagtaatgatttttcaattttgaatgataaataagacaatcctcaataatacaatagtacttaagttttaagctgtaagttttccaaaattaccattgttttattattcagatcatcattttatttgacatccctgaaaagcaaatatttacttttgagtttaaaataaaattgtgtttacttaaaaacagttttatcctaaagagtaaagacctaatcttatagtaaaagttgacattacttactgtataataaaaaaaggattgaactagtagtttctaaagataggaacaaaacaactgttcaattttcttcagatgaagattaaaatctgttattattttaaatctcggggactacaaaatttacctccaaatctatgatttactaaaaacaaaattagttaagccaacattttaactaacctaatactatcatttgaacacttataggtatgttaactgatttcaaaattatctatatacatcttttgtaatggcatgttttccatcaatgtgtgtgaacattgaaaacataaactgttgaatatctaaggtcatctccattggtaagaaaccttcaaagtttctcaaaaaaaaaaattactaatattttattatgacttaattttgtaattaatatattcttttctttttttcagttgtctaattacttcaaaatttctctgcacagaaacgtttctgtaattatgttattctctctcctcctttatgaattgtttatattatattagtgaaaagcaactctcaaaattgtaaccgatggagatgatctaacctatttaccaaaaacaattcagacaaaatttattttcggtttagtcgttttttttcgttttcttaatttcaaaataatttactgggaaaagaaaaaatcatcattacgctcatgtgaaaaaagatcgttcattgtatgggttttggaagttagaaaagtaagcaagcaacttataccctattggccattatatctaccgagaaacaacaagctctttaatttataaattcgtgtagttgccttaaacaaaccccaagctttcattacacaccacaaccaaaatcgtagtttgaagattctgatatgtcaaagaagcatctcaagccgttggagacatgttttgaagatgaagaagatgatgttatttatcttcctccaggtcttgtgaccggtgcaacttccaagaagaatgaggagttttgtggcggctccggcaaggtacaaccgtctgagatgaagcgtcggagtgaagggacctcaacggacatgacttcgaagagagccaagaaggtttcagcagaagatgagaagaaagttggagaatggacaaaaaacccatattttcaaagactgtggagtgaggaagatgagattgttatgctacaaggaattattaaatttgaagatgttacagggaaaagtccgtttgaggatagacacgggtttatagaattcgtcaagaactccattagcttcgaggctagtgtgcaacaatacattggcaagattagccaattgaagaggaaatatacgaggaaaaggaagmacggtttttctgaaggtcatgaacagaaatgtttcaaactggccatgtctatttggggaactaaagaaacgtctaagaagacggacttgtgctcttcacctaaaggtaaaaaagttaaagaagaagatggagatgtgacaaactctgattggtttgagaattcgtttctacttccatcaattgagagtcttggtgtggattcggttaaacgtaaatggaatgttgtgcctatggagtttaagaagaaaattgaagagaggttggagttgttggaggctgatgaaagtgaatgcaagaaaatggaagagatgttgaaggttaaaaatagcgaatgcgtgaaacaaaagactaaccttttgaatgaggtgatcgatgtgatgacttgagattttagatatgaagtttaatgttttctagtggtttatcttatgactcttttatgttggattatttctttatatatcttagcataaaaaaagttcattttggtagaaaacagagaaaaaaggattaattagtaattacgcaatctaatcaaattttaaaacttgtgattatgttaatagcgctataattaaaaactctgatccgtttaaaatgaaaatgacttttcagatttcctttggttgctccgctacttctcactgtcgctctctcagcttcctctctcacaatcataaaataaaaaacaaaaagtagcttctccaagacgcggttcccaatatctgcgtttcccgtttgcgttttccggcmatg

SEQ ID NO: 34611 - DNA, 3003 bp, Unknown
  misc_feature (1)..( 3003): 2750-1469P.txt file - cDNA_ID_3080176; gDNA_ID_2685553; Annot_ID_193312
tggatgtatgtattattaatggaaatgtaaagtgttatatcactagattcacttctatatgttcaataaaatgatcattcacttttaagatgtctctatatcgatgattaatggagaactttgcctctaatcggttaatctcttacttcatggggttcttatttggcaaaactatctcacgtggcttcaaagacagtatcacggaagcacctcaaccttgaacaaccgccacatcccaggcataacatctatttaaaataattgatcgcggaataaacacacttatcttgccacttgcgaggcggcaaattctacgattcacggttgcgttatggttcagcgaaactcgtagcttacagcatcgtcacgccatctaagatcattgtccagattccagagcacacaagtcttaatgtctcattatttacgcagacttttacaacaattttagtctttcggggatctgaatacaatacatagaaactaaaatctaacaaacattcaacactaacacataactagatgcatatcctctctgtgcacataacattgaaaagtccattcatgatcttgaaagctgatagctaggttcaatggcctttgtcaaagagtatattgatatcgacaacattatcttggtaatatggaccggccgtagtgttttgttgtcgaaagcgaaaaaaaataaatctctaatcttacaattaaacccaaaaacaaaacaaaatcaatctcactaacaaaaacatattaaataaacaattaatgttttaaaaggattggaacccagcacttaaatttataaacgcttgtctcatcagttttagcctttaggtcaggttagggcctgttggtaatgttaccactacaatcatcaaatttaaactgagctcatcgtccattcatatgaaaaagtaaaagtaatttgacccagtcaatttagtatttacatatacagagaggagacgtgtgtctcggaaatttttatagtaggctcggcccaacccaaaatttttaaattcattacaacattaaaaaaaattgttttgtgctaaaaaaaattgttctaatcgtctattttacaactttataacgcccaatcctaaacattaaatcccatattcatgttcaatttgtaactacagagtgtatattttctttttaatttaaatattattaaattctaaaaaccaaatttacttattagtaaaaaattaaccggattagaaaaaaaaagacccatattcaaaaatacaaaacaaaacaagatctacagtacaccagaaaacacgatcttcgtcttctagatccaatgctaatatgattcctctgcacacaagacctcgatattaagatttttcccggagatattaaattccattgcaacctagcaccgaaaaacgaactgaacccaaaactttctttttggaaaaaaaaaattcacaaccaagacccatgacctcttctacttgacctaaaaagaagagagatatcaaacctttaataatatcaacaacatgcattatcttatgttggatttgaatccaagtggtgagaagacaaaataatactagcacaaactaatagctaggctacatgtccaaataatatgttaaagtcttttaaaaccatttttgtttttaatttataaacaaaaagtttaagtttatatatatatatatatatatatatatatatatagtttttttatataaaaaattaaaatttatataacgtaaaattacaactataaatcatggtcatgcaatatttagagagtggaaggaaagaagacgaagcatcctttatagtttatatagtcagatgcatttgattacgagagtgacatgtatatatatatatatatatgattgtcagattataatatgtgtcaacatttaaaaaaaatcctaaactgttttgaattagttgaataaccaaaaatgatctgtcagattacagttgactagacgattaattaagacaaaaagattgcgatctttttaaaataaatatattaagacctcgcggcatgcatggttctttttttcgtttttttttctactaaaattattgacgtactgtatagtatttaacgcatggcaacaaactaatactatcctgaaaaatctttagatgtgaatcacatcatgtgatccgtatatcctggaattttttgaatatagggatattgatctactctgtttacaaaaaaacmcaraaaaaaaacacaaaagatttctgaggaaagaaactctatttaatatcacagtgagaaaataaaagtaataaaaatttattacataatattatgtatatatgtaacctacggatggaagcggacatctagcttttctaaaatttgtatttgtgaattgttttgtttttgaaaaatacatgttctaaatcattatagatactcgaattattttgaataaaatcaaagcggataatttgtttctaccgatggcatggttcgtagtcaatcaagccatggatcatagttatagtagaagcttaatgtgctcattccaaaaatgtcaaagtgattttttaatccaaaaccagtcaaacgtattggcatctttgcaagaagtgtattttcttctatgttacattggtgtttctactcgctataccttagaaacttgcagaaaaattttctagataaaacaattcttctaactacgtcttcgataacacatgagtaaaatttgtttattaaatatttcataatttctctatttctccaatttattcatataaaagattacacacagtccacaactatgtccaagttgagagtattatactgaagtacaacaattccacgttgaaaaagtgttaatcaccattaattttcgttagccagccaacataattttttaaacaccgttaccatttatttttttaccatttaaatttttgtataaaactgagggtatagtcgttgctcaatatcattacttaagccaacctaccaataataataaaagagaaatg

SEQ ID NO: 34612 - DNA, 3000 bp, Unknown
  misc_feature (1)..( 3000): 2750-1469P.txt file - cDNA_ID_3080192; gDNA_ID_2685553; Annot_ID_193307
  misc_feature (830)..(879): n is a, c, g, or t
aaaacaccacaatgtttccgcaattgacagttgtattccttttctctctcgttgtaatccaccctcttcatgtctcggccaaaacatggtgtgtggcaaatgtatcggcggcaagtacacaattacaagctaatattgattgggcatgtagtgaaggaaaagttgattgtgcaacaatcaatcctggtggatcttgctttgatccggatactcttgttagtcatgcatcatttgtgatgaatgatttctaccagaatcacggaagcactgaagaggcgtgtaattttactggtactggtcaagtcgttactgctgatccaagttatggtagttgtgtgtatacatagattacatagtttaatgaatggttttgctattacaaagtttgtttacgaataatacaattatgtggaatcaaaaatatttataaaaattatgtaaggtttataaaaagtaatgttatcattcattcatctttattcctattaagtgtttttatcttgattaatttgacattatattcaccattttatgtgattctctcatacaactaataagtcatttmtattttattgcaaacaccatcatttagtgatttgtttttataaaattatcctaaaggaamtttggtaagaaaaatcaatactaacgtaagcttttaatttcttaaggttttgtcaaacaatctcaatttctaattccaaaaattataatttaagatatcagaaattacactttctatggaacaataactaaatttccaagatcaagaaatatttatatgttgtaaattctaggtaatacaaatatgaaaataaaatattattgannnnnnnnnnnnnnnnnnnnnnnnnnnnnnnnnnnnnnnnnnnnnnnnnntaaactattatttatcaaaaaaaagtaattaactatttacccatttaaagttttaaatatgtactaaatgaccaacatttcagaagtaatttgctaaacaacaaaagtaattaagggaaagggaaaaacaaaaacaattggagtaatgtggctgcaagttgcagagtttggacataatcccataaccatatatttaacaatcatagtttaaatccgtataatgtatattgtaaaagaaaaagaaaaaagaagcaagtaaccatgtatttaacgaatagagcgtatataaatattaatcagcagaatattatccatgatatacttttcaacattttctccacatatttttcttttactgtaacagaaaatcagatatatacattataaaatgatattcaatttttatgtacttcaaatatctaataattaatagtggctaaaatatttcaaatatgtaataagaaaattattatactattcctatgaaatagaataagtgaagaacacagttgatgataaggaattagtaagggcttttttttgtgtagaaatagagaaagaaacgtgcatggtcatcgtccacgaacaattttccaaatgagacacaatctcataaaagcggtaagagtcgagtcatcttcatatacaagttcattttttcacactttggattcatcccaagaaggtaatcatacacaatcattgtttattctttcaaaatgatagaaatcatatcttttgtattctttcaaaatgatagaacttgattatactttaatggacttttcccgacatttctatgatatatctagagagatttcaaaacagaacattataatgccagcaatgttttttagagccagaataattaatttttatgaagtaagcatcaacttttgtttgagttggaagtttattgttgtagggtttgcttgaagaattctaaactgcaaatttgacattaaaagattagtaggatagcaaaaatattaaaatattattagctattaattgatcattaaaagattttctaaattacttataattttaaaatatgctagatacataagaaaggtacgtgttatctttaacgtttcattagtccatgcaaatgtaaccataaagttattataaataatatatatatatatatatatatatatatatatatatatattcggctaaattaagttttgaaatgtggaataaaacatgaaaaactgcatattaatttaagcccatattcacatcaataatcttgtcttgaaaaaatgacttaatgaatgtgcatttgttattctttagtggtaaagtaaagatttgtatatatatttgggaagactgaaaatatatctactgtattttcttaagatatacatgcgaaatatgactggcaggttcgttatagctcttaaacttgaatggtagattagtgtgcgtggaccgttgtcctcttctcttcgagttaaaactgttttaggtacttaattcattaatcaaacttagttaattgccatttacgtatgagtcttgctacttatggttttaagaagaagaaattgtagtgattactaaaccaagaagggtaaattctttgcggaataaatcatccactttaaatcaaagatacaatcttttttttctttcaaaggcatatatatttatttatttttacgtttttacaatttacatatacgacattgaacatgttggaattggtagattcaatcgtaacacgtctacgtgtctaacctttcaataccaagtcctttcatgttctcgggttggcccatattagcaaaattcatgacgtctgccggtacacacgtatacgaaattgtattattgtacacgaacatacttacaaaactctaatcaaatttctaataattttaattaaataataaaatttcaacggttacggttaaaacaacttggcaagtcgagccaaaaagatgtagacgtttccgtaagctatttctatattgcttcattgatacacgaatacacgtatgctacggagttaaattgatacatgacaacattgagggtccaaaacttacaataaggacaagattcttttaagaggagcgatgaacatagaatatagatacaaaaatg

SEQ ID NO: 34613 - DNA, 3003 bp, Unknown
  misc_feature (1)..( 3003): 2750-1469P.txt file - cDNA_ID_3080195; gDNA_ID_2685553; Annot_ID_193306
cgatataagacagctaagtgctcatctcttacacaagataaagtcacatgttctgaaaacaaaccgcaagagtgaaacggcagaggaaggcgcggtccaaatctctcagcagtaaaatcaaaacacactaaaaaatctttgacatttggagcttttgctatttctttagcaaaaaagtaagtttttcctttcaaagacacgccacattttatatcacaatcgggattgacatcaagaaccttccatgcactagagttaagatcgtagatatcataaaatccaaaaaagtctgagtactcaaaagcatcgaagaaacctcaagattttgtagttacggttcttgttctcgtatccgaaagcaaacttgtctgatacttgatatttgtggaaatcgcttatgggttgaatccaccctgttccccccagataagggttccacactacaggccatcggttacctctgaagacgcataacaacaagccttcgcaatgaaagactttaaatatatcgagttggtcaagtatacttactcgctttatagatggttcaacgaagtcgctttcgtaattgagtccttggagatcgaactttattgaataaagcccaaaatctatcatcatgaaccctagaaactgctgcctcgttttgccaaaaatctgagtttttgataaagcgttccacgttttacaagtagatcgcacggcactcagagatgttaatggaaccctagagagtatctcttctaccaaagccaccggaagatcagagattgtcctcatgtttatagattgtgaatgtgttatctcattagaatgataatgtccatacatatatatagatacacaaaggaattagggaaaaagctaattgcacattcatgggacgattaggtttcaaggtttccttatttcggtttagtggtatagagagtctggtttatgtaaacaggtaatcaagtgtgatttccctggttaaaccgaaacactctactttaaatagagtgtttcattgtatttgtcatttgagactttatgtgaaataacagaattatcattgttcttcgtttgtttttcgatttctcatcaactattagggttgaaaaaggattttgaaaagctttataacgtttattagcaaaacaagtttgtgagaattactctgtcttcttctcgaagtaagaaaccctaaggagaatcaaaagaagacgagcttcacgtttgtctctgttattaagtgtaaactaaagcatttcgttaatcttttctgattaatatagttacaacttttttgatgatttttcaacactaaacgacgattaaaacagagatatagaagcatgaatattcattaaatgacacataagagtaaagaggcgataagagtaaaataggagattcaattgatagaactgtatttgtgttacaacttgttcaagtaaagtacattacttaaaaaaacgaatgactaaaacagagatcttaaaaatctcaatcagcaggctatagctttcgcaaccgatggaactgtaacagacattaccctcgaaggctctctcaaatccttagcaggtcggggttcaggcatacacttaacatgaactatacgaccattcttggttaagtagactgcatctttatacatccaatcatcatcttcatggctaaagaactcttcaaacggctctacgcataatgcgcaattcttctgatcttcatccgcaggcaccatgagttgttttggttcttcgtcctttcctttcttcttctgcatttctcctccaaaagatgctacttctaccgtctctcctcccgtcgctgcacaaagccataaagatgcacttgctaaccatcccctcgatttcttcggttgctgacccagtcttgtagtggttttcaccgacctgttcttccttacatgccaatccatgtgtttactatgctcttcttgacacttgaatctcaacccacacgatgaacattgtctcggcatatcagaatacagagacttaatcacagattcatgtcgaacattaagtgacgatggattatcaaagcttaatccaacaggcaaagaatcactattacttgcttctaaagttttcttctctttctcattgttaagaagactaagcaaatcagtcaattctttgctcaaaacaattggttgatgcatagattgagacacaactgaaaccatgttcgaatgattcatcggattttgaacattcgtaaaaacaggagtgtttggtacaaaattcgatgacctaacaggataattcggagttagggttcttgaattcggaacccaatcaggtaacgaatctaaagagagattgtcatcaagcttacgataaggtaatggaagaggaacaatttggggattagggtttccataaccagcaacaaagggtttctgataattgttggtgttagaatcattgttacgtaatgcaaaacttgaattagaagcaatcacatcaacaccgcaattgttatatgattgagaagaaaccctagacacgttattattattactaccatgatgatgatacagaggattatgaccagatcggaattgctgttgcgcttgtgatctgaaacgtttttgcggcggcgcgtaacggttcgtctcctcttgataacctccgattccgccaccgtaaccgcgattgtcgcttcttctcttcatcgttgttctagcgtttgcgtttctctgagcagagaaagatccgtttgatgccatcttcacgattaaacaacagttatgagttttcagagatcgatcgcagaaagagaaaagaaaccctaaatttggatttggtgattgcgttgagagaggagaattttagaaattgaaacgattgaaaaataaaacgaatctgaagagacgcgaagataggtttctctataaataaacgtttatgtcggttgataaagtaaaccgcgtgaatcgcgcgttgtcacgtgttttgggccacggtttataggcccagtttgttaatg

SEQ ID NO: 34614 - DNA, 3000 bp, Unknown
  misc_feature (1)..( 3000): 2750-1469P.txt file - cDNA_ID_3080221; gDNA_ID_2685553; Annot_ID_193298
  misc_feature (1879)..(1928): n is a, c, g, or t
gcaaaatcatcgccgtatcttccgctaatctacacgtctttttgattcccatatatatgatcgattctaatatatatcaattctttcgatgattcattttcattgtttattttgtttcgatgattcatttttcctaagaacctgcttcttactttcatttctttagccgacacgtcgacttataagtaatatactccataatatagttgttttaggctaacttgttttatttattttatcttcgttaatatctttgtatataatcttttttttttgttgaagttttggacattcggcccattctttgggtttagagaccaaaacatgctaaaacctttttttttttggtagaaataaaattcaaactagttcgatactaatttatgttttgtacaatccgtctttattgaaataacgttcttttttattccttttttaaatcattttgaggatttttttcgacaaaaaaaagttaggattttttttgctttcaaataaaacattcacaccttatcaaaccagttaacatttactcatttttgatgggccgagcgagtaaagtgggagcaaagcccacgcccaacattattgtgaaataaattattgatgaaactgtgaaaataatataatcatataagttagtaagataaaaatctagaatttagagaatcgaaatcatttaatgaaattatctaacaaaaaatattatatattgtattatccatcatcgaaattgttagtaacagataatattgtttacaaacacactaactttaaatatggaccaagaccatgatccaagtaaatagccatacgattatatatgttaaccatctagagagaatgatccctcattactttataagaaacacatccgacagctaatttaaccagtttgtgaacgacgacacatatatactaagaaacattaccgggaaaaaaacaaagagatataatacttggacactctagtcaacacaatgtgtagataactaaagcagctggtctttctaatccatttttagataaattattctttacttcaaaaagtaaaatatcttaactctacttatataagccttttggtatatctttcactatcgattcctctaaatatctatagatattactatggtgtataatagctatgaaaatcatttacttctcacataaatagagaaatatagaaccatcagatggaaacatacatcaacatctccaatttctttcacacaaaataaacttattttgtggtcatgggctttggtcttgtccctctttgagcatttaacaacaactttaccaactaatcttcttatattaaatatgaattaatcgctctaacaatatttcaaataattaattataattatatcctccaactgttatcctaacaataattcaaaaataattaattaattcacaattatttcccccctcctctgttttctttttcttgctcaacaatacattgacggttttagttcatgttctttgagttttaaaatacacttttccaaaattgaaagagaattgttgttgtcactttccctcttacctttctttttctttagatatcttcagagaagaaagaatggggttatatgttcatcaacgaaacccaaatacaaatcctcaggacaacaatctagaaataaaaactcatttgaaaaaaatgattcttgatttgggttttccttgttttgttcctcctcgaaccagctctcgtgaggacaacaaagcttggcttctggctgaaacagagccgaagcttattgactcagaacaacattcgctgcagccttcgtttaggttcagtccttgctcacagttggagctggagaagattaaaaaggagaaaccttcgccgccttatcgnnnnnnnnnnnnnnnnnnnnnnnnnnnnnnnnnnnnnnnnnnnnnnnnnngtatgtggctcattccaaatgtgccacacagagtaatgtttgggatggtgaagatcttgagggaaaaccagaagctattgatgaaataggagttaatccatttgtgaggataagtcttggaatcatacaacatttcagccatcaacaacattatctgagacttgatgataacacgggcagagactacgacgagagtaagctgtgtcaagcatgcatcacgccaatctattttggtaaattctactcttgtatggaatgcaatttcattctccacgaagaatgtgcaaatttttctcgcaaaatacaacacccgatacatccacatctgctcactttagtgacttccgcgaccgataaagccaacactcatgatttatgttcagcttgcccatggttgttcaccaccggtttcttctatgagtgccacagagaaggatgtcgttttaatctacatgtgcggtgcgggacaatttctgaaccattagttcatggaagtcataggcatcctttattcctaacatctaaaccaggagattggagaacatgtagtgtttgcaaagagtcaagccgttatgtcacacatgaaacatttaattgcgttcaatgtgtctttgctttgtgtttcaagtgtgctgctatacctcagaaggtgaggtataagcatgataatcatgtgctcattctttcttatgggaaggagatcgagacaagtaccatggcgtattggtgtgaagcttgcgagagaaaaataaatmcgaaagggcagttttataattgtgatgagtatggttgtgtcaccctacacattgaatgtttgattgggaaggacttatatatgaagcccggttcatcttggttattcaaaggtagaaaggtacgtgttcttcgcaacaaccatcgtatgactagacctatttgtagggaatgtaaagatcgttgtccacacaaaatagtgttccgacgttctacattaaacttttgttccaccggttgtatgaggtcgaaggtttttagtctggagctttatcgttagctcttattgaatttgtatgttcaagaatcaccgatgatg

SEQ ID NO: 34615 - DNA, 3000 bp, Unknown
  misc_feature (1)..( 3000): 2750-1469P.txt file - cDNA_ID_3080231; gDNA_ID_2685553; Annot_ID_193295
gataatgtccataatcgttgatgcatacaaagaattctattgcaataaggaagcgtcacgtgaacgtaacaacggggttaataaagtacccggtctattacatcggtttaactacgccaagacacatatttttttacttttaagtcactgaaagggacaaatctcttataggaatagcctaccttatagagtattaattatttataagctataagagactagagactttgaaatcagaaatttcaaacttcttatgagatacatatgtaagaacattcttaaaaaatgattcttttgagttctagttattatcggttgttaaaaaaaaatactttttatgtgttaaactctcaaaatgagaaactttcagactttcagtcttttcaatttttaaatatttcaaaactatcacaataattacatttttttactatagagactttctaaaatagatatatgttttctacctaaatcatctagtttgactgttaaactgcgactcagacacttcctcggtttgggtttatgctaatatttgataatttcaaaaccagaaaactcgacaaaaacccaccatgaacctacgacccgatgattttaacataaaatttaggatttcaaacttttagtgtattcaatattcagttaatttagaaaaatatttggttattcatatcactattctattatggttttagttagatttaagtttttaatctttctattattattgttattttgttaaacatagtacaattatttttatttttatatttataaatttgtataaatatcaaatatattaaacaaattttaatctattgacttatggtcaaacccggttaacctgatgatctgatctgatggcctaaaaaatatttaggttcactgtccaaatatataacattcatgatctggaatgatcgagcaaacaagaaagaaagaaaatatatatattaaacacaacatcaacatcaacttccctcccaacactatatataatatctattttaaagttgaataacgatggctttatatgttgccattcacatcaatcgcatgtatatgagtaacaagtggttctgcttttttgtattaacaaaataataatctgaaccattaaagtatatatgggatgatttgtacggtagaaacgtttatgaattcatcccattatatgtgttccacctatagttaatgtttttttccttttatattaaaacatctttttttacatttttaagttatgattaaaaatgccttctaattctgaaaatattgcatacacttataaaagtttttacataaatacaaaataacatattttgtaaatacagaattttttttgtagttattaaccttttatattctaatatattaatgggtgattgacacaaatagcacaaaaaaactttattattccaaaaatatcaccattttttgaaacttccaaaaatagcatttaaagtttttaatcctcgataattaaataaataataaagtgtttttattaccatttctatcaatcctccaaataaaaatgagagcaaacactaatctaatattaaattgaatcaaaaaacttttaaatagtgaaaatatatatcctaaattggaaataaaaaacccaaatataatactaaaaactaattttaaaataaaaaatctcttttaaatggtgaaaatatatattctaaattggaaataggaaacccaaatataataccataaattaatattaaaatgaatcaaaatttcttttaaatagttgaaatatatactctaaattgaaatagaaaacccaaatataatattttaaatttatttctaatttattttggttgaatagattttagataaaattatggtattattattgtccataaaacttgttttagtgttactaatttctcaaataatgaattgagtgctatttatgtctaaaaaactttttaatgctatttttgtccaaaaaacttaatagtgtgctatttatgggaatttatctattctttaagatattttatttaaattatatattttctatttgattcacattatttgatcgacttttactattcaaacatatatttagaccgtcaaaaaattattttgatctacacttgttacgcttgatccattgaatacatttgatccgctatgcttgatccactttctctattcaatcaatagtttcaaaaagagtatgttaataacaatatttctttttgcatttaacactgttaactcacaaaagtagttttcagacatgaaatagtaaactttagttaataaaaactttgaaaaatactagaaacgtattattcaccgaataaatagttaactaattatatataattttttagttggactatttcaaacaatcggccttcgccgaatctctcgccatcacaaacacatcagcgcttctcaatttgaagttgtgaactatttcatctcgcctgttacattgacatatctccaagattctaattcttaaaacctttttccggttctaaattaattttcgagtatatatcactaaattaataattctataaattaataaaaatatcatagtttagtttattaatttattaaaaatttactgaaacatttcatacttcaccttatacttcagtttcatacttaatcttatacttcattttccaaactatatttaatgttttaactttaaagatctatgtggtcatataattattttaaattacacctgtcgcaatgccgtcacttataatttgtcatataagcaacgtttgttgaccgcattcagcttcatatagtaagaagctgcctttttttaattggacgacgttccatatatttaatttattctcattacagtaaattgttttttaagaacacggaatattactatatataagcatcgagaggtccatggattatcactactctcatcataaaccaaagtatcaaacaataaaagatttttgagaaaaaagagagagagatatcatg

SEQ ID NO: 34616 - DNA, 3000 bp, Unknown
  misc_feature (1)..( 3000): 2750-1469P.txt file - cDNA_ID_3080235; gDNA_ID_2685553; Annot_ID_193294
aagggtgtcaccgagcaagagaaggtggacactttcagaacctcaatttactttgcagaacaaggtgagataaggcaaatcattgaggagaatgggaagttcacaatcgaggcttttgaagatatcattcacgctaaaaacgagtttccttttgaccccaagacattggccatctctttcaaggccttctatggtgctttcatttccgcacattttggagtcgaagtcatgaggaaagcctttgagcttgttgaggtcaaggcacgcgaacagatttctcgcctccataactccaaacccggaatgcagtacctcatcgtgcttcgcaagaactaaaccgtgatccaaatatattgttatatgtgatttcctccattgttgcttctcttctttcgtctatcttatggtgctttgtcgtctcttcttcttgttgttttgtcttaacgtctttgtattctcccctatcctacaaatgaataaaacttcactttacgcttatatgtataacgagtattgttgttgaatcatatgtatatggtttgataacaaacaagcttccatagtatcatcaataatactatatatagaaacacttctgttttcttgcgaaacatattttctttgacaaacattgattttctttgagcatatcagatcagagtccacaatctacactaaaagtctaaaagcataagacatacaatttggatacttcatttattgggtaattggaaagaataataacttttactagtatagtttttaatgatttatctagtacagttttcattatacaattctatatttgaatatagttatccagattataaaatacaattactaataatttgtcagatatccattggaatccattgaaaagagcctgattgcatatgagatatatatatatatattgatgttggttaaaattccattgtttagttagaaaataacaaataattacatcaaaaaattgagagcatgatttttgttkgttttacgattagttctttgkgttagtatattttagtaatataaaattgacttttaaaaatactagtcatctgtttaaatgttcttttagactagaaattttcttttattctagcgtcattttgtgtattttcttatagtatttagattagatttatagctctttctctattattgtaagagttaattgtgtataagccaccgaaaattaaaaaacttctacaaaaaacaaactttttctatgtatacacataactcaccgttgctattgatagaaattcgatccgtacataggtgtccaaactctgtttttttcttgagattgtcaaacacaaaaccaaatatataatatttatttaaatttgaatagctataattccaaaaatatttgttagttaagtttatcgtccaactttcaaattagaagcaaatgtttattatagtattataattgttgtgtatagtaactgacaaaaacagttttcagatgggatactaaacttataataattattcaactaactatatactccattattaattaaaaaaaagggctatcttcatgtataacacaaattatatatgcatatatagtaccttacatcgcaaccaccgatcgaatttctcatcttgttcaaacaatataaaattatccaatgttgaacattcttctttgacggctaagattttgctagttacttggacaaatctactaatacagtgtaacttgcataaattaatatttgataaattaataatctctgtaaatttataaatttttccgatccgagttggggctagtgtaaataatgacagaaatcgataaattaataagataataacttttttgaaagttctatgtaaatatatggtcccatcaatatcataaattaataactacataaatgtatcaattatatatatatatatatatatatatatatatattatataagaaattgttttgaaatatatttataatttttttttgcttaaatttgtatttattcttatttgaaatttagttataatatgtaacggtctcaaaaaaatttagtgttgttttctagacacattattttttatttgtaattgattctagaaagacattttgtatagtgaaaaaagtcttatggaattttttaaaaattaccaaattaggagaatctctctataaattaataaatattaatttatcgataaattaaaacctctttaaattaaaaaattttgcagtcccaacattattaatttatagaggttttactgtacttcactttctatgtagatcataacccgtgttacatcacgtgtaatctttgtttttattcaataaaattgtaaattttgttttttgaagtaaacaaatattttggtgtgtacttatatgggtactggactactggtccttattaataatacaactttgagaaaaaaaaaagaagtaaacaaatattataaaaatttggactctttcttctcaaacaattggccatccatggcttctttgaaggctatgatctacattgacaaatctgctagaagtacatgattacagataattttacaaactaatgttatttaattgcgataaatcaaaacatttcttttggttctaaattaagttttcgacaatttatatatcactaaaataccataatcctgaatttattaaattgttaaaattctactgaaacatttcttacttcaatttctaaaccttatttgtgtttcaatttccatataactatttaacacatatcatagtctaattgattatgtcatatatggaacgttatgttgaacgcattcaagttcctataataaataagctgttgttttcttttgacgagtttcccatgcacatgtttaattagttctcagtatattgcctttcaagcactatatatataagcatagagagaggtctatggactcactactctcatcataaactaaagttaaacaagaaaagaagtttgagataaaacagagagatatataatg

SEQ ID NO: 34617 - DNA, 3000 bp, Unknown
  misc_feature (1)..( 3000): 2750-1469P.txt file - cDNA_ID_3080239; gDNA_ID_2685553; Annot_ID_193292
ttctgctacaatgggggagaattgtatagagttatggattagattgagaaattggggatcttagggttttatgttgatgttctaaaatacgttaggcgcttgttaaagtcgaatctatcgagtaattgatgaattggattggtgtgtatagttctgataaggaagagccagatgctgatggaggaggtcaatcaatgcttggtcttcaaagctattgggatgcagcgtattccgatgagcttactaatttcagagagcatggtcatgctggtgaagtttggtaactttcttcagatctcactatggaacttaagagagaagatcctagctattgatttatttttttcttttcgcaattttaggtttggagatgatgtgatggagattgttacttcttggactaaagacttatgcgttgagatttctcaaagaaacatgtctgtttctgaaaacgatgttacgacagaggtgaatgatcaggctgataagtatttgtctagttggaatgtgcttgatcttggtactggaaatggcttactccttcatcaacttgctaaggaagggtgagttttctaaacattttctcatgctctggctttaaatgcttaactttgttgtttcaatcgaagaagctctatggactatggataatgctatttgttaattttcactagcctgattaccactcggttagtatgagaagtttagaatcatgtagcatttatagtaaacaagctatcataatgtactggtttttgtctgcttcctagaacttctattgaatttcttgtttatagaggatccctagatggtggccgtgtatcactagccttttgggaatataacggccacagtgaactttgatgattataggttctgaaccattgtttgtcacgataaagaaaaattccatagaaaataatgtagaaattcagaagtcagcctctctctgaggcgtaagtcccctatgcagtgatacaaaaatgttactatatctttatacctaaggcatttcgtgcttgtttcgtcagtgttatgaaagccaaactgtcctgaatgtggtattgctattaaactttatcactgataattgttagttatgtagaacaattacacaccaacacatttctaaccagaatcttatgtttagactctactcttgttttgacattactaatctcatcatccttgcacttttctggcttaggttctctgatttaaccggaactgattacagtgacggggctgtagaactcgctcaacatctttcccaacgtgatggctttccaaatatccgtttcatggtatgaatttgttagcttcaatataaaaaagagttacagaacccaactacaaaaagtctgcctccacaaaagtctaaatgctgtctcttctttcttgaaaatggttacttaccttgatcaagcaatgggatacgtacgttacatgaaattaacatctagtagtacaggacacagaaatcttctctatgaactagtaatccttactgtaatgagcatcagtagcaaattgttttttgggaaatatagatctaaggtgctctacgttgtggaactaacggttggctctcataggttgatgatatccttgacacaaaattggaacagcagttcaagctggtaatggacaaaggaactttagatgctattggtttgcatcctgatggccctgtcaaaaggtacctcctccttagattgctatcctttatagtaaattaccgcactttctttctgttacctagcacacaattaggtttggttaccaataacaatcccatttgtctgtttcagagtcatgtactgggattcagtgtccaagctggttgctcctggtggaatattggtaagagcatctcgactcctgaataagatttaggttataagcagctaaagcacataagtttaagctgttagaaagaaaccaaaggctcttgtttcccgttttgcttgctatagaacaccttaaacaactgcatctatgtctaatctcaatttctttctgcttctgttaaaggtgatcacatcgtgtaaccacacaaaggacgaactggtggaagaagtagagaatttcaacatcagaaaatccaacttatgtagaggagatggaaatgacgcaaacaatgtactttcctctggctctgaagctgcaagcagaattgatcaacctccgtttgagtatctcagccatgttaggacatacccgacgttcatgttcagtgggtctgtaggatcgcgtgtggcaacggttgcttttctgcggaagtgagaacaaacctgttggatttgttttaacataatgcccagaccttttctcttctttttatgttggtgtcaagcaagactgttgatgtgcttttgggagttcttaataacctctaaagttcttttaagagaaaactgatttggtcatatgtcagtgttttttttctttcttttttgatgttaaagtatgtgtcatagactaattcaaaaatcaaagaaattagtaatttgaaaacaaaatgagtggattcacttgttccttgaaaaaagaataaaaccgacaaaaagaaagattactattagaaccgaaccacatttaatctgcagtctactccatattagattagattattcgattttgtttcggataaactcggatttttttggattgaaacactcttacattttcttagttattagataacgaattaaacaagttgaagcataaaatccaaaattgttagaattggaagttagtacttgagtttgatgtttaagattgaaacttgtaatgtgtaaatcttataaaagagtagaaaaatcatacacgttagacacaaaattgtacatttccatggacgaaaaaacgacagcgttttgaatctaaggaaaaaaaaacatccagaaacagtcccatcagttgcttttcttcatcctctttagcaaaaaatctcagaactcaaaaaaaaaacatccaacaccaaagacaatggagatg

SEQ ID NO: 34618 - DNA, 3000 bp, Unknown
  misc_feature (1)..( 3000): 2750-1469P.txt file - cDNA_ID_3080243; gDNA_ID_2685553; Annot_ID_193291
  misc_feature (1299)..(1348): n is a, c, g, or t
aaatgtaacgttcagtaatattattactactcttccaatcctatgtggctatgtcacgtgtgtgcaaatgtaacgttcagtaatattttactacgttgagattgttagcctattttacaacacgcaattattgaattgatagacgaaactatgaggtggacagcgaaatattttgtgagaatttcttcaaattttgtcaacagcggaattctgactatgaggtgttatgatttgggattgtatcaacaacgtttaccatttgtcaatttcttgtacatcaatgctaccattggtcaaaatggattaagaccaaagaaatctacgatcgaaaagagactatccgctatcgagagcaattcaggaaccggatatttttagtatccctatcataatgttaattcataattattatttaatatatgtagttgcatctctagatccttttcaatggtgtctttattttttactctaaatttagagttttttataaaatataaatagaacatagctttcctccattaatagttgattcaattttttttgctttaaaatatatattcctaatatattctgttttaatattttattttaatttatcacatagttatttacttaaattttccaaattctatcaacttagtttaacttatgcaagaattctacatttttatttatatatttaataggtaatgaattttaaaacattattttgcatagttataacttttatataggtgatgaattctaacacagttttatatattttaggtgatgaattcgattttattaagaaagaagataaataaacataatttgttaagtaaagctctttcttgtttgatttgatcattgtaaattatgttttgtttaagtcattttaaactaaaaatgtgactttttcaaataaacattccttacattgtattgcatagagggtttgagggatagtaagccaatgagaagatttaaactaacttaaaataaaactttaattgaatacataaaaaacaagttttgtacatgaaaaaagttatactgtggatattttgtggaagcccctatttagacatggttatttttgtttttaatatttcattcaatcggtcgtaagtaagtgtattatatctcatgcaaatagtaagctctatgatgaagcttgtttctcatgaaacaaccttaataaagtgagatctcaaacggtgagagggacaatcttggtaaaaaattgcatcaaattcttttgtcgctaactacacttatattcttacaaaagcatatgttatgaattcgagctcggtnnnnnnnnnnnnnnnnnnnnnnnnnnnnnnnnnnnnnnnnnnnnnnnnnnaatatgttatcaatttgttctcttataaacaatgatgaatgatcttttgtaaactctgtgtgactgtgtaacaatagtaacaaggacattcatatctaaaactgaaaaccatcttcagagtccacatttggctaagcaatcacacataagttaaaaaccattttgaaacaaaaacaaaagccaacataagctccattctatcaacaatggagcttatgtcttgcttccatcttggacattatttagtcgagaataaaaactttcagaaacttagtacaagcgagcttgcaagcttcagttttcttatttgatttgtattaaaagagaaatggaatctgtatttgacttagatggatattcaccatcattctttgttggtctgcaaaatatcaagcaaaaaactataagmaccacrttcaaaaatcagatcatggcctccaaattttgaagtttaggggacagatcataatccttattagacaatacaagatcacatatgcacgagactaaaagaatgggatcagawcaagcaaaaatcacaattgtctcaaatgattcaaaacagatatactcaaaatggttttaaacacacaatctcctgtcaaatataacctttcataattgactgatgatcataagttgattataattagttagtttcctttgtttaggcccatataagaaaatatacgctgcccattttggactaatttgtcgtgatagcatcatcatcactgtatatggatttaaataatatttttttggatttaataaatataatattatttacaaactgaattaaagtttttatttaataaaacgaatacgatattcatttaaaaacataaaacacttgttagtgctacaaaattttagtgtaaaagtatttacttatctttatattatagtcatgttaatttttgtcattagatattcttttctttagtgcaaagagcaaaacaattgtgaaaaaatagagagagaaagaaagttcacaggcttctttacgtgatgtacaatacaaatgtggaaattttgataacgtacagccaagacatttgattttgctatatttgggatatagccggtagcttttgtaatactgtctaaagcaacactggatgagtcttaatgttgtagacatattttgggctgtggaaagactttacagcaacaaccaatcatcccttttggttttttagatctcctgttattcaactaataatttctaattaaatatctttctatatcctatgttattaaacatgaaatacatataaaatcattcaaaaccatttataatctcttgttattcagttaatcatttataaaagtcatactacagaaacaagaaattgaaaaatctgtcacaatctcaaaataaatgatataaagataagatgataaactgattacggttttattaacgttagtcttgtcattattacaacaatcctataaggatatatgcgttatagcattactataaaagatttacttttccaaactattgaaacacagaatcaaaaaatctatagaaatataagtctcatttctcttctccaccttgtctttaagagacaagcccactttctttcatctcctcagcgccaacaacaaacacaacctctaagacaagggtgaagaagatg

SEQ ID NO: 34619 - DNA, 3003 bp, Unknown
  misc_feature (1)..( 3003): 2750-1469P.txt file - cDNA_ID_3080247; gDNA_ID_2685553; Annot_ID_193290
  misc_feature (1856)..(1905): n is a, c, g, or t
  misc_feature (1958)..(1958): n is a, c, g, or t
  misc_feature (1961)..(1961): n is a, c, g, or t
  misc_feature (1963)..(1963): n is a, c, g, or t
  misc_feature (1969)..(1969): n is a, c, g, or t
  misc_feature (1974)..(1975): n is a, c, g, or t
  misc_feature (1977)..(1977): n is a, c, g, or t
  misc_feature (1983)..(1983): n is a, c, g, or t
taatctgaataactgagtattgtgagtttttgtgtgtatcagtgtgacaatggacatatagcttgttcttcttgttgtactaaactgaggaacaaatgcccttcttgcgctttgccgattggtaactttcgatctaggataatggagagagttgttgaagcagtcatggtcacatgcccaaatgtgaaacatggttgcactgagaagttttcttatgggaaagagttgatccatgagaaggattgcaggttcgctttgtgctactgtcctgcaccaaactgcaactattcgggggtgtataaggatctctacagtcacttctacgttaaccactatgacacatggaatcaaatcgggtgtggcaatttcgctggtgcatggctacgtatcagtgagaagattttggtccttcaatatggacagggtcccttgattgcggttcagtgtttcaaggagacacaaggaatgtatgtgactgtgaactgtatagcaccttgtgctccaggagttggggagttatcctttgagctctcgtacaagatgccgatgggaggtaacagcactatgatgtttaagtcagaggagatgaataggattcagaaagtgagtttccaaactccggagaaggacttcatgttagttccttattatttcttgggtgatttctctacattgaagatggaaatttgcatacgcaagttaaaaaaagatgaagaagaagctgatgaagatgaagaatctgaagaagaagaagatgatgatgatgatgatgatgatgatgatgaagaagaagatgctgatgaagaagagtaataatcatcatatcatatccattgtaggtcgttctgttcataacttcatctaccctttaaatacatttctgatgtttttctgcagctactttagtttgtcatctatgcactctaaacgaataagtttcattgctctgagaattttacagggctttatttgattctgcaagaataatttctcagcttttaaaaccttaactctgtttttggagtttcattagataatttagatgctatactttgcacaatgtgtttttctgatgatccatgattttgaggatctctgcattgataatagagatttggttacattactcattgctaataaagttaggaaccaactattgtcctctgctaatgaggttatcaatatgttccaagatatctattttttttctacttgtatatttttagtgtataagacagtctagcattttcatgcatattcaagttctttcagctatgtttatttttacatagtgacaatgagctaaacttgaagcagaataggtaacgtataagaatctaaattacaaacatggacctgaaaagaaggagcataaaaagctttatagatcaaaagtacttgctgtcaaaaagcatcgttcatatcaaattcttcgttcatgttaaggtctgtgttgtttgtcctccatggtaagtgcttgttggtcaattgttgcgacttgcgagatgaggcataaacgattcagacacagtttggtctaattgaatcatttttggaaccgtttgtgtcatcaattcatcaccaactgcaaaagctgcaggtttacatgtatgtattagatggcctgaagtaacgtataaaaagatatcgtgctacttcacacttgatttttgagttagaaactcatgaactttgtttattacatatggaacgagtcaatgagagtttagctttttgctagtaactcacttctttgatgatctcaggacctggcatgttttgacaagaaggctcatggttttttggaggactaggagaattaacaaaagatagagcaagtgagaacgaatcagcannnnnnnnnnnnnnnnnnnnnnnnnnnnnnnnnnnnnnnnnnnnnnnnnntttgtttcccttcatcttttatttagacttgaatccataaactaatcaacacnttngntgatantgganngnaggganccataactcatttaattctaaactcatttgattatgagttgagttgagttgggttacccattttaacactcctaactgtactactgcaaatattcttactgaacctatttatattttatcataataatatttagattcttctttatttgaacaatcaattttccattttgtttcgggattttccctaaacaagaatgttaatttgttaccttaaattgcagaatttactttggattcgacaggatataagaaaacaaagtttgagattttgtgaattttatatgaatagaatataatatggttaatgggtaagaggaagagtttgaagacgtgtgatcatatacaatattaacgtaaaacaggtgatatagaaatgtaaaagtacatttttgaaagagacatagatagtttagttgacatcacatcctttatatccaatttcatggggatttcaatattccaactcattagggaaaaaacaaaagaagaatattaaatttaattaatgaacccaccaaaccttgaagttaagtatattatatacacagtaaaccagttatgaaccaaaacaagttaaataagatatcaaatacacagtaagcatgttcactcatatcgtcgatcataattgtcaaaaatgattgccaccacagcatctatataatacatacttaatatacaaatatatcttagattttaggctgctttctttttcttgattattttagaaaaccttagtcttactaatcaaaatacatccaaaatcaaatccaactgttaacactttctaagaaattttttcttctttctttcgtctaagataaaaaatgataataatgtaaaaaacgagaaatacattagtttaaatatttatcttattaaatacggaagtttcttcagtcaaaagaatatatatagtgcctataaaaaggccttcaaattattcaccgtctctcattctttcaaagccttcaatatctcttattaatcaaactaaccaacttcaaacacaaaaaaatg

SEQ ID NO: 34620 - DNA, 3003 bp, Unknown
  misc_feature (1)..( 3003): 2750-1469P.txt file - cDNA_ID_3080287; gDNA_ID_2685553; Annot_ID_193276
  misc_feature (688)..(737): n is a, c, g, or t
  misc_feature (2876)..(2925): n is a, c, g, or t
gacatcttcgtcgttttcatttccaccgtcggaggcaccgtcttctccttcagtgatcaccatcttcataatcttttcttgattacaaaaactataatgcggaagctttaattatgatccacaaagatcgactgctctgataccatgtaaaataaggtattgaactgacttgattctattgattcacaaactatggtatttatatacaatgatttctatcaagaaataaacataaatccctaaaatataggttaaaaactctatcatcaaagatattgtactaatcctaatcggataacatatatccccggttcaaaatgtttttgataggttagttttgattggttgaaaaatcaaaagaattttgaacaaaactttaatgttgacaaaagaaatagattagttagttcatgcatgcgtcgttcactagtttcgaaattttggtcgtcggtcaaaagaggaaattgatagtattatcattatataatactaataattggattctcgaacatggtgtagtagaatcttatgcaaatgaaactgtagttttggtggctttaaattcactgagaaattttgagcgaaccaattaactttcgaagggtatatggaattaaacaacagatgatcgatgggattggaactttcataatgtggaatgtgacacaaagataattgagacgttctnnnnnnnnnnnnnnnnnnnnnnnnnnnnnnnnnnnnnnnnnnnnnnnnnnaagacaattgtttcaacatgtgtttcttacttttaaaattccatcatccagtttctcctttagattcactgcttatttctcagtaagtatctcgaatcggactctttaattggactttgagtttggcttcggccacagtattttggaaaggaaagttggtcaaacgtgaataatgaatgtttcggacttccctatctcttaaatttcatcgaaacatacacaatccaaacaaaatcaaaaaagaaaaatctccggacctaatcctattcctaattcagtccgtctttatcattttgcaaagatcatcggatcactctttgttataaccgtggatcaattgtcaaccacaaaactgtttttccttcacgtttcccaattagttagcaactctctaagtttaattaagagagatttggcctcattaaccatagatattagaatggatccagtaagtacatgaaactcgaaggtatgggccattatgggcctgaaccaaacatgaaagagctgggataactgacctttctttttgacatttgagcatcgagcctcacagtgcaagagttctattatagaactcctatactaacaccgatcaagaggcaaatctcccaactcttccaacttccaaggctcgatatgagtacaggtgcgttttcttctcttctcattatgatttcttttcttttttttctattccgatttctctggaattgaagatgtgatgatgattgaaattggattgaaatcaccttaaataccagatttatgagatagcttttggaactaatcactgctaattgatcatcatcatctgcaattgtgtatgtactgattagtcctggaattaatctttagagccagtaaattctctctgttgttggagacaagataactgtgcttgagtttggtttattagtaaaacccaaaaccctagatcaacaaaggttcatactttatagatttcccactaatgttgtatcttgttttgtatttaatcaaatacactacaacctatattgatttagttagaagagaggaaaaacaggttttaatgatgatcactataaagttcgatctgaatcgttactcgtgttcatggggggcaggtggagcatttggaggaaacagaggattaagaccaataccaccagagaagggcattttccctttggatcacttgcacgagtgtgatgcggtattcttcaacaaacgatttttcttatgacctttgtttggttatatttcagtttattcacttttagctttcattttttgttttcaggagaagaaagaatatcttggttgtcttaagtcttcagctcacaaatctgaacaatgtagacatctctctaagaaatatctccagtgtcgaatggctaagtacgtcttttttcttacttttgtcaccatcatagtttctctctagttcatgtttacttgggtcgtactcgtatcgaggaatgttggatgggtttagatcatgatagtgatattattatgcaggaacttgatggcaaagcaggatatggctgaacttggattcagtggtgttaaagaacttgattccactgaagataagaatacagagagtatcgaacattgaaaggttgacaaaagaaaactttgagcctcattttgtaaaattttggattaacattgggatagcatttgagattttaggtcctaaaacccaactactatgaaagtatatgcttcagattcaccaatttttatacgtatgtattcctgtgtgaaataaagcattatacaaagcctgaaacagaagcaaagtattgtcttcggtccatattcgtttgtagactttttgggctaaagaatatttgtttgtggatattagtccatattgatttctcttatctagtttagtcgtagtgaaacttaacaaacaaaatattagtataattatgttttagttttggttaataacagtatgaaaatattccactttataattactctattagacccatttctttatatatcattttctccagacaaaggtcttagatttaaacaaacaagataaagtaaaaccattgcaagtgttgaatgttattatgtaaagtatgtgtcatattaatcgaccgttttttcacaagttttgaaaattagccnnnnnnnnnnnnnnnnnnnnnnnnnnnnnnnnnnnnnnnnnnnnnnnnnnattgctgctaggcttgagtttttccaaagattggttgatgagaaacgtgtggcaaaggagaagaaggagaacacgatg

SEQ ID NO: 34621 - DNA, 3003 bp, Unknown
  misc_feature (1)..( 3003): 2750-1469P.txt file - cDNA_ID_3080291; gDNA_ID_2685553; Annot_ID_193275
  misc_feature (1897)..(1946): n is a, c, g, or t
ttttgagagaataaattattttagaatgtaaaaaacgaggaaattgttgctcaattaaaataaatttcaatgaaaacgagatttagtagttaatgtaaagaaaaaacaaacaaaaatttcataaaaattaatgatatgagttttgttacaaaaaaaagaggtcctaaaacactgtataaacatattattttttgcctaatttagcaaatattgtggccttttatttgtatattttttggtggctaggcaaatgactttttcttcttctatatgaagcacggcagtgactaacaattagcgaccaaatcttatttgtttcataatcgttgattcatcgacaaaataaaaacaattagttctttgtcgttggcaactgcaaacagaaaataaaacgtagtactagttaacaatgttaatcattatgattatatatccactgcgagacgaactcatgaacatgtcaacatcaatatatttcaaggttcaaacttctttggtttgcaacatgcacggtgtagaataaggtattgaactgaattgattttattgattcacaaactatggtatttatatacaatgatctctatcaggataaacataaatccctaaaatataggttagaaactctatcatcaaagatattgtactaatcctaatcggataacatatatccccaatactcccccgcacgacaaacgtgttacgcaaaacgcaaactttgcaatcacaaagcggaacacgtatgtcgtggacaatawgtcgaggacggmcaaatcatgtaaataaacatcttagggtataaacttcattcttggggtggaacttcatcatgtcttcggtcttggtaaaagagaatacatcccatgtacgcaaattatgctgctccacaaacaatcatctttatcttggacggtgtataactcgggactaaacatgacctaaaaacatgaatgttccacaaactctactaatggctaaaccataaccaaactcccccgtaatggtaaaactattaccaaactctcttactaagaacacaaaaactctgaaaatttcttaactcaagaataattccagtaacataaaaagaaaaagaaaaaccaaaaccaatcctattaaaaacatagaaaaccaacgacttaaagttttggaaaaataatacccatgtgattaagaaacaatcacgtaacctccatcccttaacatgccgacatcttcgtcgttttcatttccaccgtcggaggcaccgtcttctccttcagtgatcaccatcttcataatcttttcttgattacaaaaactataatgcggaagctttaattatgatccacaaagatcgactgctctgataccatgtaaaataaggtattgaactgacttgattctattgattcacaaactatggtatttatatacaatgatttctatcaagaaataaacataaatccctaaaatataggttaaaaactctatcatcaaagatattgtactaatcctaatcggataacatatatccccggttcaaaatgtttttgataggttagttttgattggttgaaaaatcaaaagaattttgaacaaaactttaatgttgacaaaagaaatagattagttagttcatgcatgcgtcgttcactagtttcgaaattttggtcgtcggtcaaaagaggaaattgatagtattatcattatataatactaataattggattctcgaacatggtgtagtagaatcttatgcaaatgaaactgtagttttggtggctttaaattcactgagaaattttgagcgaaccaattaactttcgaagggtatatggaattaaacaacagatgatcgatgggattggaactttcataatgtggaatgtgacacaaagataattgagacgttctnnnnnnnnnnnnnnnnnnnnnnnnnnnnnnnnnnnnnnnnnnnnnnnnnnaagacaattgtttcaacatgtgtttcttacttttaaaattccatcatccagtttctcctttagattcactgcttatttctcagtaagtatctcgaatcggactctttaattggactttgagtttggcttcggccacagtattttggaaaggaaagttggtcaaacgtgaataatgaatgtttcggacttccctatctcttaaatttcatcgaaacatacacaatccaaacaaaatcaaaaaagaaaaatctccggacctaatcctattcctaattcagtccgtctttatcattttgcaaagatcatcggatcactctttgttataaccgtggatcaattgtcaaccacaaaactgtttttccttcacgtttcccaattagttagcaactctctaagtttaattaagagagatttggcctcattaaccatagatattagaatggatccagtaagtacatgaaactcgaaggtatgggccattatgggcctgaaccaaacatgaaagagctgggataactgacctttctttttgacatttgagcatcgagcctcacagtgcaagagttctattatagaactcctatactaacaccgatcaagaggcaaatctcccaactcttccaacttccaaggctcgatatgagtacaggtgcgttttcttctcttctcattatgatttcttttcttttttttctattccgatttctctggaattgaagatgtgatgatgattgaaattggattgaaatcaccttaaataccagatttatgagatagcttttggaactaatcactgctaattgatcatcatcatctgcaattgtgtatgtactgattagtcctggaattaatctttagagccagtaaattctctctgttgttggagacaagataactgtgcttgagtttggtttattagtaaaacccaaaaccctagatcaacaaaggttcatactttatagatttcccactaatgttgtatcttgttttgtatttaatcaaatacactacaacctatattgatttagttagaagagaggaaaaacaggttttaatg

SEQ ID NO: 34622 - DNA, 3000 bp, Unknown
  misc_feature (1)..( 3000): 2750-1469P.txt file - cDNA_ID_3080310; gDNA_ID_2685553; Annot_ID_193268
aagtatttaactcaattataagtgaagatttctaaattagtgattatggcctaaataaatatacatatcctagttgtacaaattatcctaaattggtaatttagcctaattacaaatgaagtattctaaattagtgattaaggcctaaccttatcctatactaatgatgattatggcctaactttttatcctaaattaatgattaaggactaaatttatcctaaattaatgattaagtccctaaatttatatcctaaattagtaattaagctcacttacgagtgaagcgtttggagaccgagagagacgagcgataagtcgccggatctcgtcgcggcggatagtgtaaaagctattaagccgatgattggagaaaatctcgacggcgccaatacgtcggagattcctccaatgctcactatacggagctgataccatagatgcgtaattgtacgagatatgttaagaagcaattgactttggacggttcgcgagaacgacgtcgtttttcgtgaagcattcttcgacgattgagtgtgaagagactacgaaaacgagtttgtttcctagacgaagggagaagatcggagaatcgtttagtgatttagagatggtgaggaaaagacggtggagcggtggtttgagaaggcggaggtggccgatgattggaagtgagaacggtggagatggtgggaggtttggttttggtttgagttttttgatgaggaatgtgagagtgatgagggttaggattaggattgtgatgagaattagggtttgagtttcgtcttccattgttgttgatttgattttcttcttcactttgaattttgggatttttatagatgtggttcagaatttgcttgcactattttgtaaacgtggattttgaaaacatcacaaaaatttgaaaacttaattatagaaagagtttagctcaagtcatcaaacaaagtcacatactcacatgggaataaattacaagcgttagatgaatagactaccacattggttgtcttgacaataaaagatcgaaactattaaatgactcaatcaataacatcgaactctcaagccttctagagccagacgaatgaccaaactttccgacatcaagaggtatgacacatagctgaaaccttcaattattatagcttttgatatgtttaaaaattagttcaaaagtaactacggtttattcataaaatcatgttttgtttgttttgacatatgtacaaaattacaatggagttttctaacagcgtttacaaaggtattcaatattataaagcaaaagttcaattttgtttttaatgcattctattataattttctgtgattgcaataaattaaaataattgaatacaattatcgtaataaactaataatatgtagacaaaattataaaaaaaaaaaaaaaaactaccctgtatggaactcaaaacacctaggcagctttcctagcatcaattaccaaataagtcaatactaaaattaacttaattgtacccatatattcatatttaattttctataaattataactatagggtacgtacaatgttgacgtagattataaagatgaaaaaatatcattgtcataaacattatttagttttattccaaaaatgttggaacactggtggtggattttgatttcttgtaaggtaaattccagcttttctggcaatccactgacgtgaagcaccacatcgacgaacattggccattctgtatccaataaattctgaataatatcgcatgtataagtcgtgtttcaaaacacaagtccatcttgtcctttttcctatcttatctgcgaaacgaattttttttatttcattgaactgtaaatttttgacatttaaattgttgtctcttgagtgacaatgctattgtagaaccaaaccgggaccaagctcgttcgtaattagaatatagtttgacggacatggaaacatttcaaattctacattcaatccgaaatacgtcgcaactacaaacatgaaaattatattcatttttcgagtaatttgaaactgatggacatcaatagtacaatatatatagttttttgtgtggttagtattttcttatggccataactaaaattagttaaattgaaacacagacatgaattaataatagatagtgtcgaaaagtatcgttgaccaataaaattaaactaaatgaattcaaccttacaaattataggtgatccacaaacacctaacaaaaactaaaaagtttaagctataacaaaaatcttgcaagtgttatgaataatcatatatgttaaatcgatgcccattgggtgcaaacaaaaaaaatttaaaatattgtttgatatgaaattgttattacttatggtgaagtgtataaaattaaaatcaagtttattatgatgaaataaatagttaaactgtattgcagaattgaatgtataagatagaaatttgttttttttcttttcttctaaatactaaattaaatatagaaaaagtgtttgagttactatttagaaattcaaatatcatcaataagattgagtgtgtataattaaaatgtagaatagatataaaatagaatgcataaatttgtttaaaacaaaattatttaattaaatattaaaaatgtatagattacttatttactattcaaaattcaaaaaatatcaataaaattttatatttatatcttacatgggccttatatagttcaaaaataaaacatagatttagattcaacaaaactgattttagaaacaaacatcgagatattgaataaattaaggactgctacacataaattttgaaactagtcatgtgttttgtgacaaatgaataatgggcctctcgttaaagcccgattaaaataaaagtgaattggaaatttgacttttgtcaaacacggtaaaaaattgtccaaccctaaacaattattcgtcggatccgttttggcttcctctgctctcaccagtcttctgcttcaatttcgatg

SEQ ID NO: 34623 - DNA, 3000 bp, Unknown; identical to SEQ ID NO: 15053
  misc_feature (1)..( 3000): 2750-1469P.txt file - cDNA_ID_3080347; gDNA_ID_2685554; Annot_ID_193353

SEQ ID NO: 34624 - DNA, 3003 bp, Unknown; identical to SEQ ID NO: 27359
  misc_feature (1)..( 3003): 2750-1469P.txt file - cDNA_ID_3080351; gDNA_ID_2685554; Annot_ID_193351

SEQ ID NO: 34625 - DNA, 3003 bp, Unknown
  misc_feature (1)..( 3003): 2750-1469P.txt file - cDNA_ID_3080419; gDNA_ID_2685558; Annot_ID_193405
aaatctagtatttataaaagtgggatggagagtagagaggattcattcatatcaaaagagaagaaatcaactatgaaaaaagaaaaacaagcgattgcatcacaaagaaatagaagaagagtaattaaaaatagaggaaacgggaagcgattgattgcatcattatcacaacgaaagagaagaagaatacctagaggaagaggaaacgagaaggcagtgtttgcaccatcatcactaccaaacgatgttgtagaggaaatcttcttacgacttccggtgaaagcaataatccaactaaagtctctctcaaaacaatggagatcgacgatcgagtctcgcagttttgaagagagacacttgaagatcgtcgagcgatcacgcgtggattttccacaggtcatggtcatgtctgaagaatattccttgaaaggaagtaaaggtaatcagcctcgtccagatacagacattggttttagtacaatctgtttggaatcggcttctattctgtcctccactcttatcactttccctcaaggatttcaacaccggatctatgcttctgaaagctgtgacggacttttctgcatccattccctaaaaacacaagccatatatgtagttaacccggccactcggtggtttcgacaacttcctccggctaggtttcagattttgatgcaaaagttataccccactcaagacacttggattgacataaaaccagtagtctgttatacagcattcgtgaaggccaatgattacaaattagtgtggttgtataattctgatgcctcgaatccaaacctgggagttacaaagtgcgaggtttttgattttagggcaaacgcttggaggtacttgacttgcactccaagctatcggatattccctgaccaagtaccagcagctacaaacgggtctatttattggttcacggaaccatataatggcgaaataaaagtggtagctctcgatattcacactgaaacgtttcgtgtgctacctaagattaatccggccattgctagttcagatcctgaccatatcgacatgtgcactttggataatggtttgtgcatgtcgaaaagagaatcggatacgttggtccaagagatatggaggttaaaatcatcagaagactcatgggagaaggtttataccatagatttgctttcttgttcttcttcttctttatctgagttccgcgatggatttaattggacacgaaaagatttggttgagccatccacaccagtggcgatatgcaaggacaagaagattctgctctcacatcgctatgcccgcaatatgatcaaatacgatccccaaataaaatctatcagtttaatttaccaacctcctttgtgtagaagatatgcttcttattttcagagtttgatctctcatatataaaatgctttgatgtatttggaagcatgtaatgtaagaaacaaagcattaattgtttggattgttatattatccgatagcatgctgttattcataaatcataataaaccatacttatttcgccaaatgacactatacttaccaaaaatcatactactttatgaaatgatacagatttttcaaaaaaatgaggacgagtattttcgttaatccacacaaaaatcagtttcattctgtgtgtggatgtaaaaggaagatgaaatatagattttatcttaaagggaccattgcctcgttgttaaaaaaaagggaccattgcatccgacatcttttatccgtattaatcttgaaatgtttattcaatatactttgttgcaagatttttttttattcaatatacttttgttattcatgtcaaaaaaaatttgattaatagccaatctatgtaacaatctaaacacaagtttgccgctacaattaatatgagtctatgacacacatcacaaagttttgagagattaaaattctttagtcccaaatacttcaaatatagaaaaaaactacaatttttcttttcaaaatttgtttattttacggtgacaatttttatgattgccaaccaaatcccacattattaagtttttcaaccaaactgaactgtatacttattttgattattaacggtcggatttagctttaactaaatcatcttcctaagctctatcactgaaataattctgcagacaaaaaaaaatgagagagaggtggcaaagatgaagtggaggtgagagacggaaagcaaaaacaatagtcacgagaatcaacaccaactcttaaaccaagatagaccaagaaaccaaacagagtaaataaatggtggccttgacaacattgaaatccccaaaaatctcaactttttagggttttcgagctctgaaatctctctatctttcttcttcagatttctcacttttttcttcttcataagatcctcgtgattccactttataacgtacgcctcctttcaagaaaaatctctctctatattatctacgtttctctcgccttgtctccttttgaggttccatttctacttctctccaaaattcgaaacttttcccactctctctctctctctactagtttgacatgaacagcgacggtgtttggcttgacggctccggtgaatctccggaagttaataacggtgaagctgcgtcttgggtcagaaacccagatgaagactggttcaataacccaccaccaccacaacacactaatcaaaacgacttcagattcaatggtggctttcctttaaacccctcagagaatctgcttcttcttcttcagcaatcgattgattcttcttcttcttcttctccgttattacatcctttcacactcgacgctgcttcacagcaacaacaacaacaacaacaacaacaggaacagtctttcttagctacgaaagcttgtatagtttctcttctcaacgtcccaaccatcaataacaacactttcgatgacttcggctttgactctggtttcttaggacaacaattccatggaaatcatcaatctccgaactcgatg

SEQ ID NO: 34626 - DNA, 3003 bp, Unknown
  misc_feature (1)..( 3003): 2750-1469P.txt file - cDNA_ID_3080438; gDNA_ID_2685558; Annot_ID_193415
tctccatttacatgatcccacaaatctttgcctacgctatcaacttcccaacggcgaagtttttgcaatcacaaagcaagatcatggtcatggctggaatatccggtgtggttcttgtgatccatagtttcttcacgtggctagtcatgtctaggttacactggggacttcctggtttagctttagtgcttaacacgtcgtggtgggtcatcgttgttgcacaacttgtgtatatctttaattgtacgtgtggagaggcttggtctggatttacgtgggaggcttttcacaatttgtgggggtttgttaaattgtctttggcttctgctgccatgctctggtgagtgcaaaccttttttctcttccaattattttggtccgatttgatccaaccccattaatgaattcatattttaaatacaatttatttacttttgtagtttggagatttggtattttatggcactcgtattatttgctggatatttgaagaatgctgaagtctccgtagctgcactctccatatggtaaaatttgttatatctcttaaactaattaacatctttacaacatttaaggtttacatgatttgttatttgattcatttatttattatcagagagattctctgaataaagactagacccaacgtgcgtagtagtctcttgttttgtttaataatcaatgtccttaatgtattaagaattcaaaattttgaatacttccactgcaaagaaatttctaatgatttgttttccttaattaatggtgtgtggaatatgaagcatgaacattttgggatgggcagctatggttgcgtttgggacaaacgcagcagtaaggtaaattctagcgtgtgaaataaaactaactctttacaaattctacacatctaacaagtgccaagctaataatacatttttgttggcagtgtgagagtgtcaaatgagctaggagctagccacccaagaacggccaagttttctctagttgtggctgtgatattgtcgacagcaattgggatgtttatagcagccggcctactcttcttccgcaatgagtacccggttttgtttgtggaagatgaagaagttagaaatgtggttagagaactcacgccaatgcttgccttttgcattgtcatcaacaatgttcaacctgtattgtctggtaatatttgtttagtggactccaatagtccaatataatatggttgtacataacgtaaaccgaatgtatatgagattatgataaatttgataacgcaggagtggctgtgggagcgggatggcaagcagttgtagcgtatgtgaacatagcatgctactacttgttcggagtcccatttggtctattattgggatttaagcttgaatatggagtaatggtaatgaaattcacatccttttatctaaaagtaaaacctttatcaaggaaagacgaaagaccggggtttttgatgttttggaaacctattttgatcagggaatttggtgggggatggtgacgggaacttttgttcaatcgatagtcctgacttggatgatctgcaaaaccaattgggagaaagaggtaagaaaccaaaacactttaagaccgaatagtcacgacctcgctcaccgagtttattgttctaatcttttgaatgatatatatatttgtaggcttcaatggcagaggaaaggataaaagaatggggaggagtacctgcagagaaagagactcttttgaactagaaagagttattacttcaagacatattgatgagtctttcagatcacatttttgtatacgaaccttaaaagcaaaatttggttctctctttctaaaaaatctgtaacttgttatgtcatcaaacgctgacaagatatgttataacgctgataattatctataaacaatttgacttttgagaattggggtcttaatgaaaagttaccaaatcatttagaataatactactcgcttgtcagaagttgcttagtatagtagaaacgtgaggacaacagcactaccagcttccttaatcttcttttcatctgtattcgacacaagcttagccttgacaacaacaggtttattctccggcaagaaacctttccctaaaaccttaaaatatccaaattgagtaacatcaatcatagacacatagtgtttcgttgcttagtccataacgtcctgaggaaccatcgaccaaagcttgtcaagattgacgatctggcagtaaaacttgttcctgagcttgtggaaatacctcataccaactttaacaaaatatccaggatgatacttgtcgaagaggatacggtgtgatgcataccaccggcgttaccacgacttccgggaagcttacggtgctttccaaaacgaccatgtccaacagatacgtgttctctaagatttcttgtcttcttcctgctagtcgtcatttctcaccgattgaaattagggtttcacaagaaaaaatgggtattaaggtttatatgtttttacgcggcaagtaataatgggcttatcattgggccttaagagcgagaagagccagaagaatccggttccgattttttagtcaaaccaaataaagccgaaattaaattctgctggatttggtttgaaaattcgttattttaacaggaaataaaaacggtctaataagaataaaaatctattcgaaaaataagaacaatttttataaaataaaataaaaaaatatatttagaaagtgttatcttaggaaaactattcgaaaaaaatatttaatcaatcattatctctgcctgattttatatgattttcacttttctataaatatttgacatttcattgtaattatccaattgttcatcacattaattgtttacaaaatatttcttaccctttttatagataatgagaatgatctagttttgttgtaatttcgtttctttccttcttcactcgttaaattttcgtttaatcagacatcgatctcaaaagctctcatcttcaatctcattgagaatg

SEQ ID NO: 34627 - DNA, 3003 bp, Unknown
  misc_feature (1)..( 3003): 2750-1469P.txt file - cDNA_ID_3080443; gDNA_ID_2685558; Annot_ID_193413
actttcgtctcgactcagttctggatgagctccatgttctctggacccgtcgtgggttcggctaacggaatcgccgccgggtggggtaacctcggaggaggcgcgacgcagctgatcatgcccatcgtgttctcgttgattcgtaatatgggagccaccaagttcaccgcgtggaggatcgcttttttcatccccggtctctttcagactctctctgctttcgccgttctcttgttcggtcaggtaacaaaccaatcacactcaccggttcagttattttggttttttcaactaatccggttttgagaatttatcaccaagttattttttgttttggttaaatttactttctttgtatagtcagtttatcctgttctatataaatgattaaaccgattcgtttaggtgcaaacccggtttattgataccggtttgggtcgtctagtagagtctttagtcggttaatcatggtcgagtttcagtggatatggacaataactgtttaatcatctaagttgtgtctattacaaggaatagtaaaaggatacatttgttttgtcttatgtttgctatatgtttttggaaatgagtaggatcttcctgatggagattattgggcgatgcataaatctggagagagggagaaagatgatgtggggaaagtgatatctaatggaatcaaaaactataggggatggataacagcattagcatatggctattgttttggagtagagcttaccattgacaacatcatcgcagaatatttcttcgatagattccatttaaagctccagacagcagggattatagcagcgagttttggactagccaattttttcgctagacctggaggaggaattttctctgattttatgtcgagacggtttgggatgagaggaaggttgtgggcttggtggattgtgcaaacatcaggaggtgtattatgcgcatgtcttggccagatttcttccttgacagtgtctataattgttatgcttgtcttctctgtattcgtccaagccgcttgtggacttacctttggcgttgttccctttatttctagaaggtaacatacattttggtattgagttgcttgattggttattcaacatttttgcttacaaaagtttgtttatgcagatctcttggggtggtatcgggaatgactggtgcgggaggcaatgtaggcgcggtcttaacacagttgatattcttcaaaggatcgacatacacgagagagacgggtataactctaatgggggtaatgtcaatcgcatgttcattaccaatatgcttgatttactttccgcaatggggaggtatgttttgtggaccctcttccaaaaaagtaactgaagaagactattatctcgccgaatggaacgatgaagagaaagaaaagaacttacatatcggaagccaaaaatttgcggaaaccagcattagcgaaagaggtcgagccacaacgactcatccccaaacttgataaattcatggtgttttttttgtttatatgtatcgactgttgactatgtttttgtcttcttctcttttgtttttcttaagagttttcaagaactcaatttcttgattttatttataattgtgtgataagttgtgtatgttatgtaaaacctactactggttactgctttctttgtaatggaaggcttttgtaaatgtttgttcatcatggaatgaacaaacgtattttcatttagtatacatattttgttttttagttatcttttgttgatcgtgataataatgatttgaccacaagaatacaaaccagtagattcataatttattatacactgttagtctgttaaccttgtaaaccaaaaacgtttcgatattcatatgctcttttacatcaaacactcggttatttgttttatccaaataactatgacaattacatagttactaattggtactttatttcattatcagatattaactgagttgaaaacaaaattagatagcagttgaattaaactttctattagtattacatcattaagtgtttttaggtgaccaaaaaaaacaacaattacattcttcccactttacaaatacttttaaaacaaaacagcttgtcttttatgtcaaagttcattgaaagatgaacttactttggtatattacagataccatgaaaccttaaaatcttcaatagatcacatctttttagcccaacatctttattttatttacttttgggcatatttagcccaacatctttggcagggaagaaaaactttgtaatcttctcgctatgccattgggctagaaaggccattatgggcctattcttatttcattatgtctctagtgggcctactactgtctttactatcttggccaattagaataaaatctttattgtatgtttcccaatctaccacattgtcacaaacactcacaataattgctccgcacgtagcaagaagtaggccatatggagtccacgacacaaagatttgaatggtcaaagatatataacaaaacaaaagaaataaaagagttgtcgcatgttcttatataaacgatttatatattataactgcattttacattattgtattgtttagccgagtcgtgcgaatggaatatcaaatcgtcatccttttgattttgaatgacaattatacagtaatggagacacacacacaaacatataaactattaaattctactgtgaaacgctaagtcaataagattaactggtgtaaagctgtctgattaacaaaaacttaagtgtgaaagctgtcttttaccactcttccaaacactcgtaagtcgtaccaaatctagttctttatttattttttaatcgttctctatattatataaaagagaaaataaaactattaacttctatataattcataaaccattgattcctaaagattacaaaatcattgatctccttcttcttctttaactttaagcactctctttctctctttctctttctcttgtcgtcggagaatg

SEQ ID NO: 34628 - DNA, 3000 bp, Unknown; identical to SEQ ID NO: 15073
  misc_feature (1)..( 3000): 2750-1469P.txt file - cDNA_ID_3080459; gDNA_ID_2685558; Annot_ID_193408

SEQ ID NO: 34629 - DNA, 3000 bp, Unknown
  misc_feature (1)..( 3000): 2750-1469P.txt file - cDNA_ID_3080475; gDNA_ID_2685558; Annot_ID_193403
gaaatctgaagaagaaagatagagagatttcagagctcgaaaaccctaaaaagttgagatttttggggatttcaatgttgtcaaggccaccatttatttactctgtttggtttcttggtctatcttggtttaagagttggtgttgattctcgtgactattgtttttgctttccgtctctcacctccacttcatctttgccacctctctctcatttttttttgtctgcagaattatttcagtgatagagcttaggaagatgatttagttaaagctaaatccgaccgttaataatcaaaataagtatacagttcagtttggttgaaaaacttaataatgtgggatttggttggcaatcataaaaattgtcaccgtaaaataaacaaattttgaaaagaaaaattgtagtttttttctatatttgaagtatttgggactaaagaattttaatctctcaaaactttgtgatgtgtgtcatagactcatattaattgtagcggcaaacttgtgtttagattgttacatagattggctattaatcaaattttttttgacatgaataacaaaagtatattgaataaaaaaaaatcttgcaacaaagtatattgaataaacatttcaagattaatacggataaaagatgtcggatgcaatggtcccttttttttaacaacgaggcaatggtccctttaagataaaatctatatttcatcttccttttacatccacacacagaatgaaactgatttttgtgtggattaacgaaaatactcgtcctcatttttttgaaaaatctgtatcatttcataaagtagtatgatttttggtaagtatagtgtcatttggcgaaataagtatggtttattatgatttatgaataacagcatgctatcggataatataacaatccaaacaattaatgctttgtttcttacattacatgcttccaaatacatcaaagcattttatatatgagagatcaaactctgaaaataagaagcatatcttctacacaaaggaggttggtaaattaaactgatagattttatttggggatcgtatttgatcatattgcgggcatagcgatgtgagagcagaatcttcttgtccttgcatatcgccactggtgtggatggctcaaccaaatcttttcgtgtccaattaaatccatcgcggaactcagataaagaagaagaagaacaagaaagcaaatctatggtataaaccttctcccatgagtcttctgatgattttaacctccatatctcttggaccaacgtatccgattctcttttcgacatgcacaaaccattatccaaagtgcacatgtcgatatggtcaggatctgaactagcaatggccggattaatcttaggtagcacacgaaacgtttcagtgtgaatatcgagagctaccacttttatttcgccattatatggttccgtgaaccaataaatagacccgtttgtagctgctggtacttggtcagggaatatccgatagcttggagtgcaagtcaagtacctccaagcgtttgccctaaaatcaaaaacctcgcactttgtaactcccaggtttggattcgaggcatcagaattatacaaccacactaatttgtaatcattggccttcacgaatgctgtataacagactactggttttatgtcaatccaagtgtcttgagtggggtataacttttgcatcaaaatctgaaacctagccggaggaagttgtcgaaaccaccgagtggccgggttaactacatatatggcttgtgtttttagggaatggatgcagaaaagtccgtcacagctttcagaagcatagatccggtgttgaaatccttgagggaaagtgataagagtggaggacagaatagaagccgattccaaacagattgtactaaaaccaatgtctgtatctggacgaggctgattacctttacttcctttcaaggaatattcttcagacatgaccatgacctgtggaaaatccacgcgtgatcgctcgacgatcttcaagtgtctctcttcaaaactgcgagactcgatcgtcgatctccattgttttgagagagactttagttggattattgctttcaccggaagtcgtaagaagatttcctctacaacatcgtttggtagtgatgatggtgcaaacactgccttctcgtttcctcttcctctaggtattcttcttctctttcgttgtgataatgatgcaatcaatcgcttcccgtttcctctatttttaattactcttcttctatttctttgtgatgcaatcgcttgtttttcttttttcatagttgatttcttctcttttgatatgaatgaatcctctctactctccatcccacttttataaatactagatttttttattaggagatttaggggattacgagatcgacttgaaagtaaaattcatattgtaaaatatattcttgttattaaataggtagatttagtattatcataaatctaaagaacttgcttgctatgcaagtaacattcttgtataaataagcttattggctaattaatataattgagagaaactatttcacatatctgcactatgtgtgaaataaaaaaatattaagtaatttttatatataatcaatattgaaggtattcaattttatattattaattagataatcagtttgtattaatgactatcaagattagtaaatatatatttatgtttatcgtgatttatgatatatatattttgtatattaatagatacaaaatattagatacttcattttgaatagatttgtatttcttagttgcatacattttaattgaattttcgttttaataattaagtagtaaaaaacataaattatggtttgggccgggtcgttaagattctgaaccctctaactgacctggaggtttcacacccatcatcagatctgaaaaatttctaactaagtctttcgcgttaagctccgacactgcattttccgagtactcaagagaaaggcgatg

SEQ ID NO: 34630 - DNA, 3003 bp, Unknown
  misc_feature (1)..( 3003): 2750-1469P.txt file - cDNA_ID_3080482; gDNA_ID_2685558; Annot_ID_193401
ctaattattggtcaagtacttactatcacatactatcaactaataatctttcataatcctctaaacatttccctaattgctactcgtatgtagaaacaagtttaagtcctttgttgtatcttcatactctctggaaaatcaacacttgtcttggtaaaagtaaattattttttaatccaaaaaagttatatagtgatgatttcacctctctcttgacccatcatatgctacaatggctgccatgtgaatgccaccttttagtaatcatctccattttcaccatcgatagccccaaatatttcaccattatcttggtttcagttgactcggataatgcctgaattattggattttactgtgcaaccaacccccatctctcaccttagttaaattatctggtaaagtaagtccaagatttgattatttacttaaaaatacatattcaagcatttctctcctttccaaataaaaattttgggttaccttttaagacaaagtgagaaacctaacagtaagaaaataaaatattcaggggtatcaaagcttagaatatcgaaaatgataatcatctggtctctatcatcggtaaaagtttttgtaattttcttctagaactcttatcttcttctattttctttttccagcttttggttggttcatgagattctttttccttttatcctatgaatccaaaggcccaaaaagcagagagagagagactcataatgacgcatgtctctcttattcaataatctcccacatacaaacaccagtagttacacaataccaaccacacacatccatatcatatcaataacatcatatacacatatcgatctgtcgacatacattacacattttaagtatgtatgtatttgtatctcccaatatgagattcggaaaggaaccctttttcagttctcattgtcactccctggtggtccagtttttttttcattaagaacataagagttatgatgatattctcctgacaaaattctgtaactcctataattgaactatacgaatctatgtgtagaatataaaatggtgctatatactactacaggttatacgataaaaaccatgtggggagattcacttcaacatacactgctgagacaagaagatctaaatgttttcagcaacccctttagataaaaggggtcactactcacaatactctcacaagccacatagaatcactcaaagaacgagctcattaaacataacaatcgaacgactatgctaccagcatttcatcctaagagttgtatttctctcctaactaccagttgaagacagaacattgaggatgagaactaaaagtttcgacctttactcatccgcagcatgaaaagcaaagaacatagcgagtagattctagtgtactcatacaatctctttaactggtttaggttaacccaagcccatctcattaaccttcaaggacttgccaaaggaacacaagaacatgaactagtttttccaaagacttactataagctgcatcattatctctaaagctcacacagaatgaccaatccactaccagttttttctaaatgtaaagtcacaagcaacgatctttaaagctcacacagaatggaagttacgcatcaagcgactaaagatcagaaagcataagaggcacaatggattgaattgcaagaacatcatagatatatataaagcccactttggtccaagcgtttgaaacatcaatagatataactaataatcactgaacagtgacaaactctcttttagaatcaaaggaactaattctcagttatcttaatcactaacctcttacaagctaaggtctttaagcatcactatcactgctttcatcatcctcgtcgttgacatggcggttactgaattcattggggatgaaaactccaggctggctcgatcttctcctagtcctcgacggaaggatattatccaaatcaacctcagccaaaggatcatcggagaaatcgctttcgtcgtcttcatcaaaaccttcgtcatcttcatcatcatcactgtcgtcttcatcatcactttcttccacttcgatcatttttccctttcccttatcctctcgcgaaatccctttacctttcctatcaacaacttcttcttcttcttcttcttcctcgtcgtcttcctcttcatcttcttcatcctcttgctcctcttcagctccaacatcgccgattacgccactctcaacctcttcagctgctttctccgataaaaccgatgattctgctccaatcgtttcctcggtggaagaattcagattctcgatttggccacttccattagtttctccgtctttggactcagaatcagcagaattcaatgaaggattaagcttctgagccttgtttgtcacattatcctggtcttgacaaaacagatccgattttcgcttcacaggaaacgaagaatcctgttgattctcaacatccgccatagatgaatcaatcttcttacttcagagactcgcgattttggtttgaggacgacgattcagagttagggctttgaagctgaatcaaaacactcgagccaatttagtttgtaaccctagaagtttttgtagggttttaccgtctctgttttttattatttggatctctgaacacatttggcccagtattagcccatttacctatcttctcaaaatatttggttcttaacaaattcaagcctaaccattagtacaattttaattttgatctgtacattttcaaaaaccggactcgaaccaagatcaaattcaacaattgtggcaattttaatggtcgagtctccagtgtgtatgtggcagtaggagaacgtgccgggggatattaaaccggctcaatgctacagtcgtaccggtttgtttttttactcgttggtatataattaaaaccggttatccaatttgacaggcagagagaagaagatttgattgaagtacagatccatcggagaagaagacagagagattgaagatcaatg

SEQ ID NO: 34631 - DNA, 3000 bp, Unknown; identical to SEQ ID NO: 15068
  misc_feature (1)..( 3000): 2750-1469P.txt file - cDNA_ID_3080487; gDNA_ID_2685558; Annot_ID_193399

SEQ ID NO: 34632 - DNA, 3003 bp, Unknown
  misc_feature (1)..( 3003): 2750-1469P.txt file - cDNA_ID_3080491; gDNA_ID_2685558; Annot_ID_193398
aatatgttccaccttcctgttctccttcctccatagttaaatcatcagaaagaggcttgtcttcctcttctgcaactacgctcactggttccggttttctcaacaatgtcatatcactaaacctctcattttccctctcatttctcattttcaatgtcagattcggtttcaaccgcaacttagactcctcatcatcaccattactagtataaaacgaactcggctttctcaatataacattaggcaatctctgcacctttggagcagcaacagcctccaccaatggcttcttcaaaacagggcttggcttcttcatcactggcctttcgaacttgactccatctttcagaacaggctttaccaatttcaatccatccagtgaactagtagatttcttcttgttatcctttgaccaatccaatggaatctcttcaacttcaggaattttacctttgttcttgtagaaagatttctcaatgtcaataaaagaagcttctggatccacttttctagctactatctgtataaatttcaccattaacatcatcagcacaacagagagaaatcgaaatacataaaattcaaagaaccgttttttacgaaatctctcaccttagccaaagtcaatttcgggtcttcgccgagtaaacggccaaagttgagctccatttgatcccattcgttgagcttaggctcttctcttttcgaagcagaaactaaaaacttcttctgtttagctaacaaattctctcggtttcttctcactctaaccctagaaggaaacgacaggaattttccggcgagagaagcggagggtgcggcggcggaagcggaagaggataaggcgagaacgtccattttccgattaagccgaaagatgataatttatacgaatgagaatcatgggtccaatcaaaatcacgactttattttatctcgagtgagactgttgcttgagctctgtctcttactctccccctatgtgaactacagagaggaagaaatggctatggcggaggaaggagctttatcagtttagctcaatatttcgcttcctggttgaaccagtaaggtgaagacacgtggttgatgaaggagcaactacaaaaaaaagattgcattttaacgtcttgccgttgtttcgttttagagatgaactacacgtcgttttttgaaatttgctttaacgtcaaatcttttcatacacgcgtaagattgggctatcatgggcctaaaattggcccaatagaaggatgggaaagaaactcaaagaagaaaactctaccaaataatccatgtttttttatgtatgcagaagtttattatatctgtatatatagataaacactgatatatctaaatatctaatgcactgaggctatttcattgtttcagtttacttaacattgttatttattttgatatcgattagggtttggattttgtgggttcgtcataaaagggactagagtttttttttattgaaaaaggaaacggactagctagagttatagttttgcatatcggctctacctaaagttttaaataagttgaattcacgcatgcatcaaataactcgtgcactttaacgaacattaattggttaatccactgattgtcaaatatcgactatgaattagtccattttattcttctcgttccatacaataaatcgatgttagtacagtggcaaaagtgtagtttagcaaggacgaacacatgtgagacgagaaaagggacaaagagctgaaagtataaataggcgttacgttctatagcggttttcatgctgagaacatcatacaattgtcgttcgatataatctgtggcttgcatagtttacggctcctcgtttggatttttgaggaatttatataattataaataatgactatttgtattttcacatacttcagtagatagattctcgaatctcgagattaccaatatcatgcacatcatcatatgatgcatacacgtgatgtaataaagttattttaatatgtattcagccaaaagttgcaccaaaaagagaatccatcgaatccacgaaaactaggttctactaattagttatctattaaattatttcacaaaactaataaccatatagcattcaacacgagtacacatctataacggggggaaaaaaacttttatggaaaacatttaaaataaatatgtataagttagttaatatatgtgccaaaacatggaacctaacgcccacagtttttccccatctataaaatatatgtactttcagcctttcacttcaattccctagctcaacaaacaacaaactatgaatcaaaacatatatctctttatttcataatcatttccataaattacaccctcaaaggttttccacttcttaaatccctttttatcaaatggatgtctttatatcggaagagtatatcaaccgccggagattggagaaaaaagctgccaccgttgccggaaaaagcatgaggtttggctcagcttcaagcaagacaccagagaagagaaatagttaccctcggatatcggaatctccgccagataatgagttccgggtcactggcgggggtgtttatgatagctttgcctttgtgttccactgcttctcgccgtaaaaaaaacaaagcgtttgtgtttagcgatcaaaatgcatgcgcaatagtatatgcatgggaactttattagttgtagctctcgtttttctaacatttacttgaaaaaataattcttcttaacactgtttttctgaatgatggatagaatttcatgtttaccaaataagtggataggcccaatagcaaacaaacgaataaataaaaattattatcggcccaaatccaataagaacgtgagcaacatgattttagtgacacgtgaatttacttaaatgaaaagaaaagcctggcacttaaaatatatttatattttccaataatctcaaaaaaaaactctctgattcgaaaagtgaaatttgattttgacaaaaaaaaaatg

SEQ ID NO: 34633 - DNA, 3000 bp, Unknown; identical to SEQ ID NO: 15069
  misc_feature (1)..( 3000): 2750-1469P.txt file - cDNA_ID_3080498; gDNA_ID_2685558; Annot_ID_193396

SEQ ID NO: 34634 - DNA, 16 bp, Unknown
  misc_feature (1)..( 16): 2750-1469P.txt file - cDNA_ID_3080506; gDNA_ID_2685558; Annot_ID_193393
gaattcagctgagatg

SEQ ID NO: 34635 - DNA, 3000 bp, Unknown; identical to SEQ ID NO: 31554
  misc_feature (1)..( 3000): 2750-1469P.txt file - cDNA_ID_3080530; gDNA_ID_2685559; Annot_ID_193429

SEQ ID NO: 34636 - DNA, 3003 bp, Unknown; identical to SEQ ID NO: 27373
  misc_feature (1)..( 3003): 2750-1469P.txt file - cDNA_ID_3080566; gDNA_ID_2685560; Annot_ID_193474

SEQ ID NO: 34637 - DNA, 3003 bp, Unknown; identical to SEQ ID NO: 27366
  misc_feature (1)..( 3003): 2750-1469P.txt file - cDNA_ID_3080583; gDNA_ID_2685560; Annot_ID_193461

SEQ ID NO: 34638 - DNA, 3003 bp, Unknown
  misc_feature (1)..( 3003): 2750-1469P.txt file - cDNA_ID_3080607; gDNA_ID_2910749; Annot_ID_193791
tacatcacatgattattataaaaatataatagcgcattttattctatatataggctgttcacgacatattcaaattgcatgacaggaaaatatcacctttaaattctaagaatacattatcttgtatttaagtattgaaagttgacattcttttcctatttttattttgtataacatatcccatacgaagacatatatattgatcaccatatatcttatcctataacgtacatattttctttgtttccgtataatctatatacttcccactatacaagaacccttttaacaatatttgtgtgcaactaatgattttggtccctctaaacttaattcatcaatggccagtataaaccaaaattttaggacttcattggacaatagttttcttaaaataattttatgtaatagtactacaacgcgatatataaattaaatcacatcatttttgttatatctatgtgtgatatactgatatatattttgtaaagtttgacgaaaataaaaaagatctatattatatttagcaaactaagaataacatattgtaggcatttccaccatgcatgcatgaaccaaattttggccattggtcttctagcaggccaaactttgaggtccaagagtcgtacatgcaaccatcatcgaatctgtagttatcgttttatgatatatgtaagcaagtctataaaggagcatctgcagtttggaaaaagaaaggttcttttatgtattggataaatgttcttttcgcgtgcttgtagccatcaacacatcccaaccaaggattcggtggaattattaactaaaaggccaattactttgaagaggttataaataaatcctactaaatcaaggatgacaattgttctatattataaatatataatcgtcagaatgtcaatgaaataatagcatcacgtttgcttcttgaaacaagctttgcagtcacatataccctatttataaacagatttagttatttggaaaattatcacataccagttatatatgtcttcttctgttataaagctgttgagtcgaaccattaattaatatttatatgtacatgtgattaatctcaaaatgtttggcatgttgcaatggaccgtacgtctaggtcacgcatcttatccgacatcatgggaccagatcacgacatggtctagtgagaatatatatgcatatctaaaatgatcttggtctgattgctgatgcattgttttcccacatcttaaagatcatgcatgggccgggtctaacccatcgtcggctaccaattgatcttggggtgattttgaaggggaggggtaatgaccatttcttgggttcgagttctaccaacagataattaacattagtaatttctggtccaaagagactataactcctcggttgccgaaaagaacaaaaaatcatgggcacaatgcatgcttttgatgtttgtgtgcatttaaaaacaaaatacacattgtttaagctaaccaataaaacatgattagcgaaatggaattttaaatagatctcgtgtttgcctgaaaaagttatttaaaggggacctcaagggcatatatacatacaagtctgtatgtgtttttactttcatacgtattctcgattcgttgtccttaaaattcgttagtcaccatgaaagcaaatgaaatgcttagctcatacgtagaatctttctctcttcctctcacttataattattacttctttttttttgatgagttacaaaatgtggaagtggcgagtcgagaatagaatcctcacgttggagaaggggacgtggcctaaagaaaaaaagagccctcgttttggataactatttctccaactcataagatgccttctgataggctttacatattccgtttttagagagaaagaaagagagagactcaaatctaacaaaatgcatatgcaagaaatccaacttaattagctctaaaccttatagttagtaattatggtaggaaacattcggaaacttataatgtttttcgttggtcgtgaaacttaaaaacgattagaggatcctaattagatattaacttaattcgaatttaaagtgcagaatcaaatctcatgaacactttttgatgctaatcctcaaaggactaggtgggagctaggtatcctaattgtacataaaaataattatcgacattagattgagtagaatgctagatttacaggattactattttaaaaaaactcaactgtcgaaaattacttataaatgcgcatgcatgatccagtgacttatcaacgggatgtctatctagttactttttcaaaaaaatccgtgattttatctgatttttcaatatattgtagctacgaaatctagtaaatttttgttgagtcacaatgagttatagccgagaacaatataaaccttattaacaatacaaaccttattaaaaacaatataaaccaacccttctcctttattaatcaatcatttaggtatttatttaatattacttgagattgactattgtctattgatcgactatagatcgctttatggaaccgtacaaaggacattctcaccttttagagatgactatatacataggtctaattctaaatgccaaatggacaataaaaatgaaaagtaaagataagttcgaaaatcattagattctcaatcacttacattttgtgatccaaaataaaattgaacttgttgtcgctttcggacacgatatccttagaaacaaaatcccaacatatttccccatctaatccaataatatcatcgtcttctctgcctctatataaactaacacttactcacctatttcatatatccacacaacatttacacaatacccttattctccacgtagaatcaagagtacttcttttccttaaatctctacaaaaaaaaaatcgatctatatactaagagatcataaatatagattcatagacctatttaagaaacgacttaagaagctgttggatcatataccatataaaatagcaatg

SEQ ID NO: 34639 - DNA, 3003 bp, Unknown
  misc_feature (1)..( 3003): 2750-1469P.txt file - cDNA_ID_3080615; gDNA_ID_2910749; Annot_ID_193789
gtaagttgtttcagagggattgatagttacctgctgcaagtaggatcttcaccagtgttgtcacaaactttctccaaaccaaaaagaacaaaattcgaaaaactgaaatctttcacccacacctgcatcccggaacacaccattactgctttcttcgttttttcagaaagttaataaaccaagcggagaaatttgtctgatcactactgagtattccagatttttgcaaaattaaaactgctattctgataaacatccagtgcactgagaaagtgatgttacctctgttgggaagtggtggtatgttttttgagggaaatggtaatagtaaggaggcagatgaggaaccatatcacggtcatgcgtgatccggaaggtattgggcacaagcaaactgtaataagatgcaaaagcggcattcccaacacgaggttgcccaaatgtcataacctgtacgttttcttcaccttcatttacctgcgatttgtatccaatataagccattaacaactcaaaggacaaaacaataagataaaaaaaaaattcaatgcaaggatgattacaactaggtctagaccacaaaaggaagccatggctcctcccattgaatgaccggtcactatgatgttgatgttcgccccgtagacttttttcactcgtgttattgcatccaaaaccgcaggccgtaaagttgtattgtgataagcactgtaaaagccatggtgcacctgccaatgtggataactattacaaattccaccgtactacaagaccaactcaatgacaaatacttgttgttaaagtgtaccattgcatctggcatgtcagggtaattcagatcgagctgtttccagaacaagtctgagacccaattttgtatgctgcacaagttttggattgattaagcattaaccaagtttatgcgaaggagtagcttttagattacaatgactagaataaaacctgtgttcttgagttccccgaaatgcaataatgatagcattcaaatccttagccaccccaacatacgcctgttgttacaagttacatgtactgatattaataattgttcaatgaagaaacatcatgagttcatgaccagctgtagcttatgatatcagagcagacctgtaagcagtgttcaacgtcaaatatgacctctattacttcgaaatcctgcaccatcctaacaaacgttagagctcaactcaataattgcggcttcaaagttcaaacagtgatctgcttcaacatgtgttttttacctttgtcaaaccattgcatctttcgcacgtccaagtgaagagttttgtcaaatcagactcatagacctgcatacatcttacaaacttgattcactcatcttatgtacgttatcagcatcatctcttttctctagtagtgcaaataatgataaatgaaaatatgaagaggacaagtgtaatttcttctcacttgcagaacactagatataaatgacattcgttctacagggtattacgttttgaagctaaatcattatcaaaggtcttttactacttcactaatctgccattaacttaccgcagaggcatactccacaagcgtgacggcaagcgtatggttgtaaacaggtcgatcatcatcgctcttcaacttgagaactgcagttagaagaaagaagctaacataaatccacttgcttcagtcttaactccttcgtagcctcacaactcataccaagaacatgaaattgtcgaaaacataaagctttgaaatcaatattttgaccttcatggttccttatgtatatgatgatgctacaaggattatgaattgatttgttccaaacatgatagaacatgtaattaggccttaatgaaaaatcactgtagccagattaaatttccaatttcccaagcacttcacattacacagaaagtttaaaatcttaattaagctcagagagactcaggagaataaaaaaactggaagtcccaataaaggaaacagacatagaatcattatagaagttgcattaccacctctaccatatgaagatgaaacaagaaaagtaaaaactgccagcaagaacaacaatctcttttgtcccatgttctgcaagaagacaataaacacatccacatcatcctctgttcatcaaccaatgttaagggcaaaattgagctaaaacaaagcagaattcggaagcaaattagccaaaaatataccttataaaacgagactcacgaaacccaaactaatgaggattaggacaaaacccgaaagagatttcagcaaccaaaagtcccagataaattaaactgaggatccaaagcctaaattggacttcttttacaacaattcggaaatttccgacgatgatcggagattattcccggcaagaaaattatacggcgagcttatatattattatatagaagtcgtgatcttgcgaaacagaagctaatagaagaaaagaaacggcgattaaaatacgaatattcggttttttttttcttaacttccactttcatcctctatacgcaaaggtgcatgagacaagcgtgtaggctctttcaaagggtattattggaattttaggtgtgtagcgtgtcgcaacttcaagtgctgaggtgtcagatacgtgattcgggcggataaatggataaggccgttccgttataagaacgagaagttgacctttttgactttcgctttcttctaagtttaacttcgagcccatgggcctttaaagcccgaattccaaggcgggaatttccgaaactcttacttctcaagtggcgggagaatctttataagtcaagccaacgtggcacatctcagccgtagatttgatttctcgaaatcaacggggtaaaatagaagctacggtcgtttcaaacgtcgggtttgttgcttttaatttcacttttgtttatttactaaccaaagcaaaaaaaactcaggaaccctcgattcgatctctcagacgaaatcaggattcgtagaggcgcgtcgatg

SEQ ID NO: 34640 - DNA, 3000 bp, Unknown; identical to SEQ ID NO: 15111
  misc_feature (1)..( 3000): 2750-1469P.txt file - cDNA_ID_3080619; gDNA_ID_2910749; Annot_ID_193788

SEQ ID NO: 34641 - DNA, 3000 bp, Unknown; identical to SEQ ID NO: 15108
  misc_feature (1)..( 3000): 2750-1469P.txt file - cDNA_ID_3080627; gDNA_ID_2910749; Annot_ID_193786

SEQ ID NO: 34642 - DNA, 3000 bp, Unknown; identical to SEQ ID NO: 15112
  misc_feature (1)..( 3000): 2750-1469P.txt file - cDNA_ID_3080634; gDNA_ID_2910749; Annot_ID_193784

SEQ ID NO: 34643 - DNA, 3003 bp, Unknown
  misc_feature (1)..( 3003): 2750-1469P.txt file - cDNA_ID_3080654; gDNA_ID_2910750; Annot_ID_193803
aaagttacaggtcttacatcttaaaccaaagaacaaactttttgacaaaatgcaccaaaagctaacaataaggaatccatctctacccttccctcactttcctccctttgctcaatggtcttaatacctgacgtttctcatcttaatctaaaccaccataagtacctctcttaaccagaaaaaaaaacaaaaaaaagggaactaatcttcctctcccttaccgttgatccactgtctttgtttcagcttcagagtcatagaatcaagttcactggtaatgcctcaatattaggttcatagacttcttgcaaagctccatgtatctcttttgttactttcgaagttggaacttgatgcgagaatctgagtagttcggatttcgggattgtgaatcttacatccttgccatcaatccagtgctcagtagcagctaaatacaccgaaccaaaacctgcacgatctgctaatttaaagccaccatcaggtgccaacaacagaaccttgtagtcctgtttatcatccagaatttccacaagatcataagtttgggattgaagatcaaccacatcaatgtcattactccagtttctgtaaatagcccaaatattaccagtctttggcatgatactgtaattatttccatcctctgagctaatctgacgtgaaaatacatcaagatcagtgaatatttcaagagctttagttgcccggaaactcccacagccagtgggcattctcttgtcaatccactggatgacgcctttgattactgtagcctttagccgacctacatgcaatttaactactggatcctgctcaaatgcctgaacaaatgtgattttctgaatcttgccatagtaccggggcaagtaatcgtcaccactgcaaaatgaccagacttggcctgtttcataagtccttcccttgcaagcaaagtgcacgcattgcgaatacgtattattctcggagtttgactctttaggctctgctagtagatgcaaagggacgtctatctctttgatatttgttggtaatgcagtaggatccagctcataagcacctcgaggcacaccttctgcttctttccagtcgtcttaaatgatggaacacaatgagagaattgataaacatcggaattacgaacataagatgtaacaatttcctcattaaagcgacaaaacaagcttaagaagccttttgctttatgcaagaaaccagcagataaagggtcacttgatccagcatcttctgacacgatttcgacaaatgcgtactgatatttccagggagaaccgggatcagctaaccagttgatgtcaaagctcgtcatgagagatttgtagcgacccttgaagatagcccatgtctctcctattcttgggtatatacagaatttacccgcgctacttcctttattgcaatgaaccaagtgagaaaaccttgtgtgatctttaatagtctcatcttttccaagtttaaacctaccaacagaaacaggcaagtctttttcatacctctgtattggttcctcgtcatatggatcaggctcaagccacgtgacagtaacattaaaaccagaaacaaaaacttctttgatctgagcatacaatctaggcatcccatccactgtatcataaagagcccaggtctggccaacttcaaagtgtacttcttccctcagcttatcaaagtcattgaaagctaaaacctactttgctctttctggttcttctcctgcttcttccttgcccaaagacccttcaccatttctgttgctctgtgcaacgaaagcttgccgcttgctatacacagacttctgagactgctctcctccatcaaaacataaatcttctatagctttagtgtcaccaacaataataacttcttcattctcgctgctgtttccagcttctctttctcttctcaccaatccttctctctttctcttctcaccagatttctgattgagatgaagtggagcctgttcgagaccagatgaaggaagctcttgagcaccatcagggttagtcttttccatcacagctttagccttgagcggctcctccaatatgatctcaacttgatcagggttagtcctattcattaacaacaatgaacaaataaagtaatcaaaacccaagctaacgtcaaaacagtatgcacgagattaagtaatctaagcatttattcctcagtaaaactttgaaaaaggcaagacaagatgaagtaaacaaccgaaaattctaaaattccaaagtgtcctactaaaagaacccacatttgagaaaaccctacaacatcaaaaccctagctatgaattgtgatagagagaacactacccgaacagtaagagaatcaaacacagcaggagaatccagaaatgcaaagtagaccgacaaaacgattcaatcaaggatttatgcaacaccggaaaataaatttaaaaatatcggcagcgagtttcgccggataacgaaaaaaaaaaaaaaaaagacgaagaataaagcagattaagaagtttactctgtctaagcggccgacgtcggagataaatgtggtccggcgaatgttacgtcgtcgctgaaggagaaggaaaatctaagctctttcactttttctctgccaagtttacccctcttctcatttcacggcggtaaaaaaaccctgttggcagtatagttatggcgggaaaaacgtttcacccgagaagaggataaatgggccaacgatcattatgagcccaagaagcccatctaactatttttaatttcataagtatatgactgcatatcttatctccttcaaaacaaaatggattcaaaatataataattattctaaattagtccagttttgaattttgaaattgttcatttccttctctctaccattccccctctctctttccaaatcccaaactcattcaacaacggccattgattctctctagagctgacaaatccagaatcggatctcaggagacttgaagctcgctcccacgatg

SEQ ID NO: 34644 - DNA, 3000 bp, Unknown
  misc_feature (1)..( 3000): 2750-1469P.txt file - cDNA_ID_3080797; gDNA_ID_2910716; Annot_ID_193495
gtgtctttactagcagctcttctactgtagaaaagggttgtttcgtggtttacacggcggataaaatccgctttgcttttccaataagttatctgagcaactctgttgtccaggagctattgaaaatatctgaagaagatttcggtctcccaacggaaggaccaatcacattaccattcgattcggcctttttagagtatctcgtcaaactgatccaaagacgaatggatgaagatacagaaaaggctttgttattgtcaatctcaagtgctagatgctcttttcaaccacaagaacaacaatgtagtactacgcaacagttgcttgtattttagagtttagcaaatttctgtaaagtttatagtggattagatagacagatcatttcagaaatacaaactattcttattttgtctctcatttaagttgtttcacaaaaattcaaaattcactaacttcatatattccattattgagagtaattgaaaactcttatatatatcttgaactttatacatttactatttactacatgtatggtttcagcatgtaagaaatagaaagaagaaaaatttgttactgattctttccaaaattgaagaatctggtaagcagcttccggctgtggatgaataactggagtcttaacaaaagtcatgcttaagaaaaaattgaacaatctgatcaacatctctagtgaacagcttgacttgaaatccaaagaaatgggaaaagtccaaaacctgattgatgaacagaggaaagtactttgtgacatgtataagcagcagacagctaatgcatgtatcaacgatacttctagcatctttgtaacatgtaagttgtaagtcgttacaaaatttaatgacactgaacccttacgttacgtacgcaccaaaattatttgatcaacaaaatattaactagtggactatagagataacttcaacatcagttaatgtgacggtttcttccaactgtttttctctgaaaccaaaaaatttcattcaccgcatttcataaattttccctataaaacagaagtatggttaaatcgatgatttttcttctggccagaaaatctaaggacctacatgctcttcatcttggcttcaccagctcatgtctttccttgtctgatgcaaattgtatccatctatatcagtgaccattaattctaaccactttttttggtccttgacttcacaaaaaagatttgatgtcccctgaatatatatttgatctattatttttgtgactcacatttgatttagatgtccaggactactaaccaagtatcaacagcctcttgcattcttcaataatgtctcagtacctaaatcttgtcatataaatgtccatataggaaatttatacccacatgatcatgtcttctaaccacaagttatctatagtccactagttgaatgcagacataattgattaccaacttgggaccatagattagaaacataatcatgtgttgtgtctggttggattgctcaggagcttgtcttaacctaatagtttctccttctatataatgaaacaaagcttattggtattcctcatcaaccagaacttttattcaaagagatctatacaaacagaactcaccaatcttatctctttccttctccaccttgctttccaatctcaagctttaactctccctgaaaatgatgataaacgcaaagaagctcatgaagttggccaagaaatggcaacaaagagcagccctcaagagaaaaagaatttcatttcagagatcaagtattactactagcagccaaacagctgtagaaaagggttgtttcgtggtttacacggctgataagatccgtttttcatttcccttaagttacctaagcaacactattgtccaagagctcttgaaaatatctgaagaagagttcggtctcccgacggaaggaccaatcacattgccattcgattcggcctttttagagtatctcatcaatctgatccaaagacgaatggatgaagatacagaaaaggctctgttattgtcaatctcaagtgctagaagctcttttcaaccacaacaacattgtagtgctactcaacagttgcttgtgttttagagtttcgcaaatttctgtattttgtagagtttatagattagacagcttaattgtttcagaatacaaactattcttatttggtctctcatttaagttgtctcataaaaattcaaaaatgaccttccatataaatggaaactttatcccaacttcaaaaatcacttgttctgacagtttcatataaatctctgaatactcaagccatattaatgaaatatactgtacttcactatgaatcatcgtatgtccatatgaatctctgttaaggcacagaagattgcacaagaacaagagatgttcttataatttgaacttacttaatctgtcacagtgagaagagaaaagagaacacttgcttgtatgttcaaagaaggttccaattattctacaaaatattaacttgatgaaactttttcactcatctagagagctattaacaaccattgaattttctgtaagtttagggttctaacttctctgtaaacgtcaaagggtctacaagttctgcatctttcattcacttgcacatgtctgtgtctaaatttaatagtaatactattgtataagtgactcatacctaaatccacatggtcaagtattttcaggagaggtttctaatccacatgttgtgagtagacaagattggttacaacttagggaccccttatgatcatcacatataaaacaaagacaaagacagacgcatgtcttatgtctggtgtggtttctcttaagtgaatctaaactctaatagtttctccttatatatatcatgcaacaagcctattggattcttcatcaaccacaacttgcattcaaagagttacgttatacaacacaatttgcacatctcttcctctttccaatcttaaacagcttttccctaaatataatg

SEQ ID NO: 34645 - DNA, 3000 bp, Unknown
  misc_feature (1)..( 3000): 2750-1469P.txt file - cDNA_ID_3080801; gDNA_ID_2910716; Annot_ID_193494
tagaaagtagaaactgtagattaattactttaaaaaaaaaaaaaaaaaaaagtctatgatcttaatccaagtgagcctatgatgttaacaccttaattttttctttttgtattgtgtactatattatagctctaacgtgaagaaataaaactagcaataaagaataaataaaataattagagggtccagttatatgatgaagtgtggtatttcttaacttctttgcaaattttaattatctattgtttacttctataataaactactcatgctgactcggtctagtcattatttcattgtttcgtacagaaattcactagtaattttgtatgttatatttttaattttataaacgaatatagaatgttttatttctctttaacatttctaaaagtcatggatcattcaaatccgtatatattagtattaagcaactaattcgttttaatttatagatcctcaagtatagatacatataaggctgcattattttccttgtgtggacgatgacttgacatctcaattaattgttatgggaagataggtatttttgaatatgaaacattatccaggacacttttgataaatcttttcttcgacttttccgacctcccggcaaataatttgtcatgtatgtacgctcgatactatgaaataaaagatgaatttatttcaatcattgatatgagatagatggggggaaaataataaactaaatacatacaatagagtatttttgaaataaattcatattaccaactaacatcttaaagatgttgcattattctttggtcaaatattggtctacttgatgattccgtatggcgtaagatcagtgccgcgtaatttgattaactaagattgttttaaatttctgtaagagattacaattaaactaaactttttatatggggttgagtcgttgactatatgtgcctgaccatccattattcgacaacaacgtattcacttcatttggatgatactcagtcaattaagcaacatattggctccgtttttatccaatttgattaagtaaaaaaaaaaaatgtttcagatagtgtaagaagctacgaagaatttatgggtwtgactgaaagttgaaactttctaaagccatcacaattgtatactttacaaaatattaagatacattgctgtcaaattttatagttttttctcgtttggaaaatatcaaaatatatacctaaaaccataaactatatgctgtctttgttagtcaacattattaatttgaaagatattaaaatatctcattcataaatacaaatatataattttaaatatcttttcatattatttattaaataaatttgattttctttttatttaatatattttttcgtaaaccaaatttttttcttacatcattttttcataaaaatttgcttttgacgtaacatattttctgctcgcatagcgcagaaaattacccaattatttttaaaatatctcattcataaatacaatagtattttaactatcgacattattatgctaacaataacaaacagaagacattactaaaaatcaactctatattaccaatagtgtgcctaacgatattaccatgtgtttgctcaaaacaaaaagctcacggttttccttactctctttttccaattatttcctaatcttatggataaactcttttgaaaattcatctaaattcatttttctttttaaaatatgtaaaatgcgaacaaagattacaattccgtatggatacattgtacctctcaaaagaatctgaatatttttagttggtatatccactatcccatgcattagatgacactagctgataataaatgtgtatgtcaaaaaatgcatagtaattagtaaagatactcttgactcaaataaacttttgatttcataaaatcttaacatattaatgggatagttacaactgtagatgatgatataacagagataaacacggaagtgtcaaaatcataggtttaaaaaaataaaataaaaagtgtcgaaatcgtcggactcaaaaatgtatttaaatacagttaagaaaaaacctctttagccacatcaatcattctcatcctttcttgtcttctctgatatttttttttctccaccattattgtttcttctctctctctattaaaccctcaaaattaaaaaataaagagacaagttcaatttttcttccttcttctcttttttttttcttctcaattttaattttattttggttggtagagattctctcttttgctcttcgtgctttgtatcgtgatcatcgtcggtgttggtaactgcacatttcaggtatttactcttacctcctcactttcgcaacaaattttgatttctgggtttttcatgtttttcttcttcaattgattgggttttctactgaaaattttcaactttttttctgggtttttgtctaaagtctaaaaccccttcttaaagggtttcttctcttttgttatgtcggcgatttcgatcaatagtgtctctgaaagttttcagctttttgatgatcggagattataagaagtaaattgggttagtttctttttacctagtaacctagttctgtgttggtttgatcttcttaatgagtttaatcatgttatttgttcaacgatcttcttaattttgatgttaattgagttaaagcttcatcatttgactattgtgttagtcaaatgctcaacttttagactttcgaaaaaaaaagattactttcacgacttttgtttgatcaaaacttgtggttttgtattgatcaagcttttttgttggttttaggttatggtttcttgcttgcatgttaatttttcagcacatgacttgagatttcaaatgtgttgtctactcttgtatctcgattctcaaagtttatctgacctgtgaagattttacatgtgattattataaatgtgagctaatgcgtttattctcttttaattttgcaaagcagatcaaaagaaagaagttgctagaatg

SEQ ID NO: 34646 - DNA, 3000 bp, Unknown
  misc_feature (1)..( 3000): 2750-1469P.txt file - cDNA_ID_3080805; gDNA_ID_2910716; Annot_ID_193493
aacatccatattaagttctgttttcctcatgaaaaacagataagagaaacaccacataagaggcatcacaaattcgtcgagttttatgatgtccgcggtgctgaagcagcattgaaggcattaaacaggtgtgagattgcaggaaaacgtataaaggttgaacctagtcgccctggaggagctcgtcgaaggtttctttctttcttagatctgctacatgaataatgaatgccattacatttcttacatctgaccatttatttgatctgctagcctgatgttgcaacttaaccaagatcttgagaacgatgatttgcactacctaccgatgattggttcacccatggcaaactctcccccaagtgagtctatttcttgatgctcttcttcaaacaaatttgtttataatatcctcaaagactgaaactgtttgatttagtgcaaggtaactggccgctgaacagtcccgtggaaggtagtccgcttcaaagtgtacttagcaggtcacctgtttttggcttaagtcctacaaggaacggccacttgtctggtttggcttctgctctaaattcacaaggaccaagctcgaagcttgcacccattggcaggggtcaaattggtagcaacggcttccaacagtcatcacatttattccaagagcctaagatggataataagtacacaggaaatctctctccttcaggtcctttgatctcaaatggaggtggaattgagacgttgtcgggttcagagtttctctggggaagtcctaacgcacgctctgaaccttcaagttcctcggtttggtcaacatcatccactgggaatccactcttctcaactcgagtagaccgatctgttccatttccacatcagcatcaaaatcaaagtcgtagccatcatcacttccatgttgggtctgcaccatctggtgttcctctagaaaagcattttggattcgtcccagagtcttcaaaggacgctttgttcatgaacactgttggtcttcaaggaatgagtggaatgggtctcaacggtggaagtttctcttccaaaatggcaaataatgggatcattaactctggaagcatggccgaaaacggtttttcaagttacagaatgatgtcttcaccgagattcagccccatgttcttaagcagcggtctaaacccagggcggttcgcctctggctttgacagtttgtatgaaaatggtaggcctcgtagagttgagaacaattcgaaccaggttgagagcaggaaacagtttcaacttgatttggagaaaattcttaatggagaggattctcggactaccttgatgattaaaaacattccaaacaagtaagcttttcctttctttatctttacttctcttgaaatatacttggaatatgatgcagccagattactgaatgagtttcttttatatcaacagatacacctcgaagatgttgttagctgcaatcgatgaaaagaaccaaggaacttacaactttctctatttgcccattgatttcaaggtaaaaattgattagagattcaaagttccaaaatcactaactgatacaacgagcggttaataaatctttggttttgcagaacaaatgcaatgtgggctatgcattcatcaacatgctcaatccagaactcatcattccattttatgaggtttccttccctctccgctttctttcttatacttttagctaagatcactcgaaaggtgaactaacaaacatccaatatttgcaggcttttaatgggaagaagtgggagaagttcaacagtgagaaagtagcttcattggcatatgctcggatacaaggaaaatctgcccttatagcccattttcagaactcaagcttgatgaatgaagatatgcgttgtcgtccaattatcttcgacactcccaacaatccagagtctgttgaacaggtaaagttactctttggtctgaaagttaatgctaaaccttatggaagttaatactgcataatatagttagcgatgatctttagacttattactcggattaagtagctatggtattcttgttcttcataggttgttgatgaggaatctaagaatatggacctcctcgactctcagctcagtgatgatgatggcagagagagaagctgacacaggagttgagagacgactcaatgttgtgataatggctgttttttttctttctaagtactaatttttaaccgtacatattggtgaaaggcagagttaactgatgcatgcaggaccctgcggaagtgtgttttcgaattgcaggttttaaatgctgcatgcagaagctgtgcgagtatttactctgttttttttttttttttttctttcttcatgttttttggttccatggagtatatgtaaaaaaaaaaaccatgaatactcggttttatgtgggtattatgttgtaactctcacaactcttgttaaagcttttggcaatttgtacagtaagaaaaaaagaattgtctctcaagtcttttttgtcttattttttggacagaagtctgtcttgcaaaaaaaaaaaaaaaacagaggcacaacatttgaaaagatgaagatatacatctgaaactgaaattagttatgtcggtaccaatgaaattttgcgttaagctttacaattattttatgataagacttgcaatatatataaataaaaaaactagtgaaattatctatgatcgacatgaaattttgtcatgttccaatgaattagatatggtaaagctgacgtggtatcctaagtggggtggatttgaattggagttgattccaacggtggagattcaaagattctttgattgatagtgagcgactctcgttttccaatcacgtgtaactcggctccactctaaagcacgaaatcaacacgtccacgtaacgatcatatattcatgcagtgatatagtcgtttaacagaaagatcactccgtcaatctttccaccactgtgactaaatctaaacaatttcatg

SEQ ID NO: 34647 - DNA, 3000 bp, Unknown
  misc_feature (1)..( 3000): 2750-1469P.txt file - cDNA_ID_3080808; gDNA_ID_2910716; Annot_ID_193492
ttttatgaggtttccttccctctccgctttctttcttatacttttagctaagatcactcgaaaggtgaactaacaaacatccaatatttgcaggcttttaatgggaagaagtgggagaagttcaacagtgagaaagtagcttcattggcatatgctcggatacaaggaaaatctgcccttatagcccattttcagaactcaagcttgatgaatgaagatatgcgttgtcgtccaattatcttcgacactcccaacaatccagagtctgttgaacaggtaaagttactctttggtctgaaagttaatgctaaaccttatggaagttaatactgcataatatagttagcgatgatctttagacttattactcggattaagtagctatggtattcttgttcttcataggttgttgatgaggaatctaagaatatggacctcctcgactctcagctcagtgatgatgatggcagagagagaagctgacacaggagttgagagacgactcaatgttgtgataatggctgttttttttctttctaagtactaatttttaaccgtacatattggtgaaaggcagagttaactgatgcatgcaggaccctgcggaagtgtgttttcgaattgcaggttttaaatgctgcatgcagaagctgtgcgagtatttactctgttttttttttttttttttctttcttcatgttttttggttccatggagtatatgtaaaaaaaaaaaccatgaatactcggttttatgtgggtattatgttgtaactctcacaactcttgttaaagcttttggcaatttgtacagtaagaaaaaaagaattgtctctcaagtcttttttgtcttattttttggacagaagtctgtcttgcaaaaaaaaaaaaaaaacagaggcacaacatttgaaaagatgaagatatacatctgaaactgaaattagttatgtcggtaccaatgaaattttgcgttaagctttacaattattttatgataagacttgcaatatatataaataaaaaaactagtgaaattatctatgatcgacatgaaattttgtcatgttccaatgaattagatatggtaaagctgacgtggtatcctaagtggggtggatttgaattggagttgattccaacggtggagattcaaagattctttgattgatagtgagcgactctcgttttccaatcacgtgtaactcggctccactctaaagcacgaaatcaacacgtccacgtaacgatcatatattcatgcagtgatatagtcgtttaacagaaagatcactccgtcaatctttccaccactgtgactaaatctaaacaatttcatggcgagtctctgtctctcatcgtcccggatcgtttctcttcaccaccagaaaccattcctctctcttaaactccggtctcgtccttcagatctctccggtctaggtcgccacacgagtcctgtttgcttcaatccgcttaggtaccgtatagtgaaaacaatggatttgggattctttcgagtcatgcattttgtgtaactctttttgtttgtaatgtttctaggttatcgggtgatcgtcagcgaaccgctacggtatcaacgagggtggagaagcggcgaaagagaggatcgagtgtggtctgttatgctgctccgatttctgccaatagtctacaatggatctccaccatttcttgcctgtatgatctctctcatttactgtgattttcttaacacataatgctggtgaaattatgctaatgatgattgtgtaatttcctctgttttcatcataacgtcaataacataagttaattgctatactgaatggtgtttcatttctagtgcattgatgcttgcaaggggtactggtatacataagtcagttgttgttccactattcgctctccacgcaccatcgagcatcgtcgcctggattaagtaagcttttaacatggagatatattcattaacatggtgatatatatgggtctctcttcttctttttgcatgcttgagcagcctattgaagtcattaaacttaaacttgtgtatctttatttttgtaggggagagtatggtgtatgggcagcattcttggcgcttattgctcgacttttcttcacttttccaggttcgtaatcatcttcaatatgtaggttgattacaagttattaattaattaaagttatacattaataggtgaacttgagcttccattcatcgcattactcttggtgattgtggcgccatatcaagtcatgaacataaggttagaatcttaaagaatgtaatgttttaatatatatcaaggttttcttttctttagtcgccgagactcattgacttcattataaacttgcagagggaagcaagaaggggcaatcatagcaatagcaatatctggttttctggctttccaacatttctcacgagcagggagcttggagaaagcatatgagaagggttcagttcttgccactgtagccattattggtgtcacagttgtatcgctccttttgttgctataactatatgctcctgaccaaaaatgttaatcagtgtaagaatgtgtgtgaaggaaaaaaaagaaagatgtgcttgcatttatccgctctttaagaaatgctggtacatttttggcaactattcgctggcaataaaaatgatctttcatgtacaaacgtaaaaacaatacacatttaaaatctttggtcgacatgggattgggatatttaaaagctgacgtggaatcctacgtggttagatttgcagtcgtattgatgccaacaacggtggagattcaagattctttgattgattgtgaactaaacgactgtcgttttccaaacacgtatttatgggccccactttaaaagcattcccgctaaatctacaccgtccacgtagcgatcatgatattgatgcaaatgattcaattttaacggaaagatgacggagtgatctttccaccaccgtaactaatcttaacaattcatg

SEQ ID NO: 34648 - DNA, 3000 bp, Unknown
  misc_feature (1)..( 3000): 2750-1469P.txt file - cDNA_ID_3080815; gDNA_ID_2910716; Annot_ID_193490
tttctgktatatctttctaatagttaataatgtctgacattgcttttgtatttcttaaccgttccctaagtattttattttctaaaactgtaaagagatacattatgcttaatgtgtctacaagaatgtatatatcctaagccctttgattttgtagtatctcctactaaataaatatactttcagtgataaactatagcaatagaacagatggtgagaattaggtcatggattaaaatcttcttgcaaatcacagctgctttcttgagctccatagatcgcatcatagttatggaaaacgcgcttcataatttgcagagaatgattgaaaccctgaaactattgtctgtttaaagataattttccctgagcagtggcattagtatcccaactgctgtaaatattgagagaaggctatgtgatacagaggttgctgaattcggaagccctgttggctctgctacgccgaagggtggtccagagccagttatgcctgtagttggagttgttattggcggtgggtatgtagatgatggtggggaactaaaatctggtggactcatttgacttggggggcttgtgctgcaattggcagatattaatcacaattatttttctcacttttttgacaggttaagaagttgatttgtggaaaaagaaacacatacctgactgttcctgatgatgatgagaagtgacagcttcctttacctggagcagtataagagcagatttgaataccagtctcagatttatctttagcgttgaaaggtataaactctagttattatcagattctttgacccactggaatcatatggtgggctagtattactaggttcaggaactatttctagacactcaacatctatcagttgtggaggtctcaagtagcttatgccgctcatggagacagcaaagataaaagctggaaatatggaagctagtatgcgggtaacttaattctactttcccggttcttatggtcaaatctgtgtggactagtacataaaaagttaagatgtcttacttggatctgtgctagtaagttgtgctgcccctccaaaattgcagctgtctgaaccaggatgcttctggtaataactattgaaagcaaaggaagcatggtcacgaattgtgttaggctcgtaacatgctgcaccttgttgtatctggccacaatcagctcctccatacccacaagcgtaatctaaagccacctgtaatgatgttggcgaagcatttgctttcgctatacaccactggccactaccaacacctccacctgcaccagtgtcaccaccaccaccataacccccacctccagcacctgcaccagtgtcaccacctccacctccacctccaccaggtgtaccaccaccatatccgcctcctccaccacctacatcacctccacctggcggtgtagtaccataaagtggtgggtaaccaccggttggcgtggtaccgtcaagaggtggataaccaccagttggtgtagttggacctgggaatgtcaaggaaggcggtgacggttgtgttatggttggtgttgtggtactaccacctggagctgtaggattaacaactggtatatcaccttgtcctccctgaccctgagctataacatctagagctgaaatcaatcatcacaaaaatcaagttagtttgttgcatccttaaattttcagaatgcgaagaaaaaaaacaaagcttattcatatgtatcagacgcagagagattacgtgaagtatatagaagacatagaagcatgatggtggagaaacatcgaggagctatacggtgagtcatttcgttccgtaagcttttgagagagaatagtcttcaggtagttgttggggtttggtagaggaaataaagaatgtttgcgaagaagttccctatcaggtatagatatatgttgttataaagatgaagagaaaagagaagaatcatagaatcaaagatttcttgggatgggagagagaagggatgcgaagacatgtaggagagaatataagaaaacttgagaaaggagaaactagctaagaagctagaagaatcggcaagcaaagagaaaacgccataaagaggaaaaggtatttacagataaactttatagtacatgaagaatatataagaagctcgttccttgtttcttggtgggaaagttcaaatctcttctcctatgtagtattaagagatttattgaactagttatgtttctactttataatgacatatggagatcatattatatatcacaagatacttatttaatcaaggctaatatttggagcattcgaagattgtttttgttttaaagattggagatgtacaacttttgtaaactgttgtcgtactaaatcgaacaagacaaagttgaaagacttgtaggtaactgaaaacaacggaaacatgaggaatctgcgtattaagcccagttgcgattctctctttatttgtttcttctcttctcttgtaaataagtgtatcttattggttcattcgtctctaaccttttttgtaatacattcttcttttacctagaaagttcatgtgcttaactctgtccaaagttgtaatccaaactagtagtaatctttcatcggaagcgatataaacccaaatcaatcgtcctttattatcatgtgtgtatgtcttctttttttaaccttgggcaatgtggttttggttcggtttaatttagcactgctggtttaaacgagagaaccggttcagtaattttacaaatttaaaaaggcaaagaggaaaaaaaaaggaaaagaaaagttgttttttttctataaggtgaagaaaaaatctggagagggtttcgttttctacagagagagatatatcttcccttgagcttccttggtgttcttcgtattgtcgtcgcgactgagagaaggccacaaaagcttcgtttatttccttcagatccgatatagtgagagagagagagagagagaggcagcttacggcggataaatatg

SEQ ID NO: 34649 - DNA, 3000 bp, Unknown
  misc_feature (1)..( 3000): 2750-1469P.txt file - cDNA_ID_3080821; gDNA_ID_2910716; Annot_ID_193488
gtctcattgagacgatggtcaaaagtaccagagacaaaaaaatctttgactaggcgaaaagatcatctccgacaatatcccagaatctctgataaaaagcggctgttaaaccatctggtccaggtgttttatcaggatttagagagaaaagagctcttcggatttcttcgaaagaaacatccttaacaatcatctccttcatcccttctgtaattatctcaggaatttctcggagcgccgatgaaaaatcaatcgggtttgttgtagagaaaagattttgaaaataatccactactaatgcttcaatgcctgattctttgtctatccaagtcccattttgatctagcagaccaatttattctataccgcgcacgacgttgcattgtcgtagcatggaaaaacttggtgttcaaatctccttctttgtaccacaatactctgcttttctgtttccagaatatatcttcttctctataagccccacatagttgcaatttaagattcaaaagttcatcaattgatacattctcattattttgagcttcgtcaatttttgattgtaggctcaaaatcagcttctcagagtttgttattgtagattttttccaacaagagatgatttgaccacaattttgaccacaagtggaaaacttcaccacttggaccgtttgctgaacgtcttgactgcctcatgttaggtgagaaacccccatgaaggttaaacaattttttagacgccgcaccttgaatacaagtctgtccagattgggctttaggagttaaggccttttactttttttcctttttgcctagagtggcccaagcccaaatctggaaaaggagaaacacgattcttcttcctctcgtcgctctctttcacgttattctgcttaaggtcttcaagttcttcacctaagagatcatcattctccaagttctctcctgcgtctagaagggaattttcgatttcacgataatctcttcatcttctatcgctcagtcaagatcaagatgatcctcctcaggattattctcctcccaatccatgtcgccatcatccgtcactccttgctatgtgtcgttgacatcttcctgcataaactcctcttcctcctcccaggtttcttcactcttaatctccatttctgatgcgttaatttctgtattttcaggattagcactcggtaattctccaatatgaattgcattggagaatcttgcttctaaaggagcttcttgagcatgattttcctcttcttccacagtttgatcataccaactcttctccttgtccagctgcttcgatataaccaagaggtcagatttattacgaggaccaaacgcttcatcatcttgtgtcatagtatcaaagtttaggcttttctttgcagagcttccccaatagtaagtttctcagaggcgatcacgtgcttcaattgaatgtagtcgcctctctttttcagattcaagcgaaaaggtctttctctgttaagagcttgagaagaaactccttgttttactcgtagtgaagagatcaaaggatcagagaccgtcaattgcgagtccgagacatgggataaaccagcagattttgatgctgcagctggagatttgttctggttcatcctgcgggtcacagctctttcttttgatgaggatggcttgtgattatggttctccagagtgtcatcataacgtcttttgcgacctgaatccttaaagggagggatctcgcggactgaagaagggttcttaatctctgaaggtctcataagtttctcccgtgttcggggaattgaagctgtgctccattcaattcgtcgatcatagccctgagagtcatccctagtcgtatgatgatttgagtagcgagcatttgcaggtgggttccagttctgagatcgagaattgtcaatacgacgccaagcatgtttagaattagcatttacaacttgtttgccttctgtttttctcctgcggtagtcagaggttgttgggtcttctttagcttgtgttggcttgaccaagtcaggtctccaccacgaagggtgaatccttccatttgtgctgagctggagagttgcagtaggagtagaaagagttaacttcttccctgaagtcagctttcccaagcttttgtcattatctttttcaaacggtaacgtctccttctgagccacaaggtttaaaggacaagattcttgttcgttgtagatcctatgacaaagcttacaccacctaaagagtctcttggagccgagagatacccaaacaagctcacccgaagggatttaagtctttttgcggaatctcaagggttcatctgccttactagtgactgtgttattttaaagattggagatgtacaacttttgtaaactgttgtcgtactaaatcgaacaagacaaagttgaaagacttgtaggtaactgaaaacaacggaaacatgaggaatctgcttattaagcccagttgcgattctctctttatttgtttcttctcttctcttgtaaacaagtgtatctttttggttcatttgtctctaaccttttttgtaatacattcttcttttacttagaaagttcatgtgcttaactctgtccaaagttgcaatccaaactagtagtaatctttcatcggaagcgatataaacccaaatcaatcgttctttattatccttgggcaatgtggttttggttcggtttaatttagcactgctggtttaaacgagagaaccggttcagtaatttttcaaatttaaaaaggcaaagaggaaaaaaaaaggaaaagaaaagttgtttttttttctataaggtgaagaaaaaatctggagagggtttcgttttctacagagagagatatatcttcccttgagcttccttggtgttcttcgtattgtcgtcgcgactgagagaaggccacaaaagcttcgtttatttccttcagatccgatatagtgagagagagagagagagaggcagcttacggcggataaatatg

SEQ ID NO: 34650 - DNA, 3000 bp, Unknown
  misc_feature (1)..( 3000): 2750-1469P.txt file - cDNA_ID_3080829; gDNA_ID_2910716; Annot_ID_193486
tattatttgtatgtataattcattgccccttatttaggtttgtttgaccaaccggtgattcacttactatttaggtcggcaaaacgttacatgaaataaaaacagcatttaattctgtttttttttgggtataattctcttattagagtcgttaattaatattgcgacaaaagaaaattcgtgagttgattaatagtagaaagtgtagaaaacgagtcaaggatttaaaggtcaatggcctcagccatttgattggtttagagcttggctatctctgaatttgaactatatcttacccacatataataaaattaggccggccacatagacaaacataaatactaacaaaacaagttcaaaaatctcaagatcaccaacgatttatgtagtttgacaagtattcacgaaatatttttgctactaacgtctcgatcaccactggttgtggattttaaatcttctctcagtctctatgttcgttattatgggaggctttaaagatttacaaaatacaagaattcactttccaatagatcactcatttataaattgcttcaaatcaaacacatttaattataaaattgtttaaaaagtttgacctaaaaaaaaagtgtattttagtgacatgatcaaatcaattattttaaacttttcttatccaccaccacatttctagattttggaatgattaaaaaatgcatacatgatgtttttataagatttttacggtgttggttctattttgtttttcttattgccattttttcgattattagtgttttgtatgttaaacttgccgattgttccaattactataatataacaaaaacaagttttagctatcgatttttccaaagttttacaacgaagtttttataagttaacatgaagtaataatagtatatgttttaaaattatacgtttttttgtatgaaattaaatgttacattacactattaaagattccaataattaaaacacatgttacaatgagtaaattttattatcagacaataaacatctctttgctctaagaagaaacctatgctagtgaagcgttgactctggaaagatgcaagtgcaacgtgtcgctgaaacattgaaggcgcgtgtagaaaaatgttaagctaaagggaagttcactttctttaaccaagttttgcgttttgcaaattacaactaaagaatccactaaagctaacccaactaaattcaaacatttttctatgtgatcagtttaccatcaaactatttcatatttttgcaatgtgtagtaaaaactttctttgttacattatatgcttcttttataagcaaaaataccatattacattacatgttcatttcatttttgtttggtatttgcgcttacaatttacaaaatgattttgtttgatactatttacatttacatgtgaaattattgtgttcatcgtaaaacgttcaaaatttctaaaaattgtaagaaattattgtaaatgtaaacaaagtcggtttcctataaaaccacacgtctgaaccaccttaatcatcatcacaacatgaaattacaaaagcagcgactttgtcgattgccgtagtttcattgtagcatagataatcccgtcacgtgatgttatctatttttaactgtttcaatgtagtcagaaaagctatttgtttgatttcagaactgtttgattagtggccattgaaaaattctataatctatagtcaatagtctatacacaattgaaaatggtatagttgattttttaaaatacgccattaaataaaattatatatagaacttctctataatcgataaagtcgaacactccaggcaacaagcggaccgaccacggagtctaacgtaagagtattattagtgatactgtaggttttctttgactaacgataaagaaaaaacaaacatgtttaatttctcgtgtcctctatattcatgagtcatgacgttcatacaatttattcttgttttaaatgacgttcatacatcattttcatggttgtctattagttcactagaaaaacgaagtcttgaacgttgaagcgaagcattgaatatcattttataattttatggactaaactatacatttcaatcatctttgcaaaaaagaaaaaaaaaaatgagttagatcataaggagtcaggacaacagctagcacaaaaatctcaaaatcctatactgtttaacccaaaacaaccgtagaacaaatattattatacacccaaaaaaaaaaacatatttgcaatcacattagtttgtaaacacttctatttcgttccataaccaaaaaaaaaaaaaaaaaaaaatcaacattcaattttttattttaaaacatgtttgcatatgttcatggtatgacattgggtattaatctatcacagagagctaaagcccatataaataataacagaaggcccatatctattaataaccaactcttaaccggtccattctaactgtttttctcaaatacaaaacacgtggataacacgaggaattaaaattgaagttaaacaccacaccatgtcgcgtacgaagctgccacatcactgttctattaacacgtggcttaatatgatgcaatatagacccaccgatagctggcgctttctagtttaccaaggtgcgacgtaccagataacaccacctctccacttttgaaaattaaaacgctctcttttggtaattatttagggaaacttcgataattaatcgaataatgaaggactaatttgcagttttaaggaaataagtaagcacacacgttagagaagaaagaccgttccagattgccacgtcatcgtctcctctcaacgagtttctgcaaaacctgaaacgtgctgcaccttgcctctctttctctctcttccttcgtttctctctcgatttgaagagagaaaattcgttcgatttcgttttctcttcttcttttggattttcccggaaaattttggaatcggtgagtctctatcgattactggtcaaccatg

SEQ ID NO: 34651 - DNA, 3000 bp, Unknown
  misc_feature (1)..( 3000): 2750-1469P.txt file - cDNA_ID_3080845; gDNA_ID_2910716; Annot_ID_193521
aaaaagaaggttttactaattaaaaaggggttgcactaaccaaagaaacaaggaaaagatcagtttgtagagtaaattttactataagtccattatagtattgcctttatttacatttctttaaattaatcgcttaaggagaagacgctttcacaatgttttttttttggtgaatacgctttcacaatttttttttttttttggtgaatacgctttcacaatgttattaagaaactagaatggaaacattccaaaccataaataagttacaaatctaaccaaatccacacttgaaagtaacgttttcaaaaatagaagagcgataattaaaaacaataatatataaaaccaaaaaaaatgatactatatcaaccgcaatttttcaaagggaatattatcattgcaattctgaaaaggtcactaattattcgttaatcatgaaagaaatacagcctaacatgcaacttaaaagttaaaacctgaactgattagatatcgtattttcttaatttttctaaaattagtttttggaaagagggattcttgtctctgaagtttcgattatatgcttcatttcttcaatttccctgattcactgcccgaacttgtttttatgctagcagggatggttcgggttgaattcagaagaagcaaagccgtcagattcaggttgtctaagatgaaacaaaccattttttgcctggcgcagtgataacttgtgatacaagtctaactcaatttgctctatcgtattgaagagtagatttgctgaaaatattgatcccaaagtaattctcgaaaagtattcaatagaacccaaccaatatgtgaacttgagattcatgtctttggtttcttcccccaatgccttgaagatcgaaccttccatgtaatcaagctccacggtatcattcttttggatgaaatccctgttttttttcaaacacctctaaggcctcgatgtatggagcatgtagaattaaaatgcagtttatcattatcaaataaatagttaaagtgtatagcaatatttgaaacaaaattactaaattaaatattaagaaaaatatagaatactatttagaatataaagattatcgatacaaaattatatttatttctcacaccctccgaattgggccggccttatctagtttataacgtaaaatatgttgttttaaaatcagtttgtgccttttatcataaacaattttttaaattgagcatttggaccttaggcaaatgcatatgctgccattggtcatagacaagcctgttccaaatacgcaccatccaacattttattagttttgacaaagtttgaattttgttctgttatctataatgctttcatgtaatccgatttgtcgaaccaacaatcatttgcatcttttaaacaagaagaatactctatattcagagatcgctgtttttcgtggcctatacaatactgggttttggatgttgggcgaaacgatgatgagtctatttattcattttaagtaagtagagaataagtaacaaataatgtcaaaaaaaaatcttcttgttcaaaaaaagaagaaagtctaagaaacaaatttcagaaatcaaattcaatatgtcatgttaagtctggtcatggtaaacttttttttaagtcattcaaaaaagaaatttaattctttttttacggcatgtttaaatttatttcatgaaaaaggttattatacatgaaacttttaaaaagtatgagcagaaatcaaacaagaaaaaataaatcatgttaagtctagttatatttaaaaaaaaaaaaaaaatctatagaatgaaaaaagttactgtacataaaactttataaaagtatgaaattaaacaagaaaaattaagtcaagttatagtcatgtttaaaataaatttaaaataatctataaaatataaatcgtcaaaaccaacaaaaactgatcagttttatattaaaagttgaaaaacatcctctaatttgaagcatatgtttctcctaaacatcaactattaaaatatggtgggagtatacttttaatattctaatactttttttttatcaaataaaacattctgaaattcattaagataaaagtattatttgtttattgagtatacgtagatattagtaattttgtactcaaatttatccaatcccataaataaatttactatacatctatttaatataaagattatactttattttgagatttaattttacttttaaatattatatatttatagtattatacactgttaccaattggaaccatttactctagttctatggtagagaaacacacactatttactctagttctatggcagagagcaaactaaacttcaacacaacttttttcaataaagaagatgcataacacacaacatgtataatgtggtaagattatagaaaaaatgagtaacaaagtgttttggaaacactaaagaaaaaaagtagtctaaaatatggtcgaaaaaaggactacaagtctacaacatacgaaaatatacacatacgtttgtataagaaatatttgaaatcatgatagaaactgttgtatattccttaaaaaaagaaagcatatgctcaaattcaagaacaaagacatgatgatattggcaaccctagaaaaaagggaaattaaaaacacaaagtcaaactatttgtctgtctggaaatgaagaaaggatctatgtaattagtaaccaaaagaaaataaagaccagtcaacctaagaatcttcttgatatcactcagaaagaaaaaaaacaataaaaacaataaaatctcaaacgcggtttctacgatttttgtagagtcaaaaccagcaatggtgttggtgagagtctaaaaaaaatcgatcgaaagctcaaaaactccatcttctttcccccaggaactcacaaaccctagatgaattgttaatcatcaatcatcgatttcaagatttagtctcgaaaggttttattttttttgtgcttgcgtcttaaatg

SEQ ID NO: 34652 - DNA, 3003 bp, Unknown
  misc_feature (1)..( 3003): 2750-1469P.txt file - cDNA_ID_3080853; gDNA_ID_2910716; Annot_ID_193519
aagtttttctgtttaattcgatggaaaactatggggtaatttgggagtcctctgttttttttgtatccttgattctcattttgggatgatctattttatgatatgatctttagcagtaattttaagtttattttcaattgaacgttacttatttcacaatctttcttattttgcgtgtgtatgaaggcactgtacaactatggagctagaaagtttgcattggtaggaattggagccattggatgtagtccgaatgcgctcgcacagggcagccaagacggaacaacttgtgtggagcgtatcaactcggccaaccgaatcttcaacaacaggctcatatctatggtccaacaactaaacaacgctcattccgatgctagtttcacttacatcaatgcttatggcgcttttcaggatataatcgccaatccctctgcttatggtataatagagatatcttcatgaaacttaagcctatgattaaataaatattctcttctactttatggtaaaaagaatctaatctatatattgggttctctgaatgaatgtttttagggtttacgaatacgaacactgcgtgttgcggaattggaaggaacggaggtcagctaacatgtttaccgggagaacccccgtgcttgaaccgagatgagtacgtgttttgggatgcatttcatccttcggctgctgcaaacacggccattgcaaaaagatcttacaatgcacaaagatcttccgacgtttatccgattgatatctcgcaattagcacagctttgaaaggacagagaataggagagttttacaacaattgtatgcttttcaggttataaattgaattattggaaatgattctgatgttatgtgtgtacccaaagtgttcaactttataaaaaaaaatagggattgcattatctgagttacttccacaatgttttttttttttttttttttttcttttctgtaatcgtgtattttcattcagtttcaaaatgtgtagtctaggatttattgtctaaaacttttgtttggttgaacacggcttcgctgaaactggatctagtatatagataggaattgtgttaaattgttttgatcatttgatttttattaaccgtcattaatcaactatgagtacaacaaatgtaagaaagaagacagaaacattaaataatttgaacgcatctctattcattacttccattatgcactttgaaaaatctcttgatcctctcaggaaagcacgtaacgtaattctttcatacgtaatattacattctccaccgggctaaataaaccaagcccaaaagttatcaatgaagcccaatagttgtcaatcattttttcatatcgaactaaaaatgtgtttttttttttttttgttttggtttttaaaaataacatagagtgcaccagccgggaacatgtagttaatacaattaactaaaaaaacatgtagttaaatataatttttttttttttttttcttgtcgtctactcaaaatttaattcaccttgttttgtttcgttaattaatttaggttgttgttctaatatatgcttttatgattgatacaatgactaggactggacacaggacacaggtcatctattttcaattttagaattgccattagatttttaagagtattctactggaaaagagtttttttgttagttagcgatatttaaatctaagtttaaattgtatgataacttgaaacatacaatttgttagttagcgatatttaaatctaagttcatatatatatggataattcctactaaaaactttttttttgtaatgattcttttatgaccaaagcctaacatcagcaagtattcaaaacatattaacgacgaaattatctgtcaatcgatgactagaatgatttagtgaccaattggctttacttattttttctttcttcagagaacatgcaatagtttaacaataaatgtagcattaccctaagttaagagttttgacctacgatcttaaatggaaagagttgggagggaacatggaagcagcaccggccttgttcaattatgatacaaacaagtcgttgatttattcacaaaatatccactatacctttcatttattgcccaaacctaattcttcacctgttttcttttcacccaattttcttccatttcaaataattggtatctttcaattttagatatatatacacaacaagtgacaccgataatacacaatctatcacgattttcttttcatttcgtatttatttataaaatgatttttaattggctcatttatccaattatgacaaaagttaggattttgtacgcggaaaaaactctacagctggtcaacgttcagagagaaggacaagtggctttgtcaaacctacgactttgtcttctctcatactattataatgcaaaatatctttttcttactttaaccagctgcaaatgacctttctaaatgctttaaacaatatatatatcgaaacaatgatcagaaattagggtttagtgagggtatatgtacattactaactgtaaataatattttattggtataagtcatgactaaaaataagcccttgtcgataagtcataaatcctactctccgcgcgatatgtttaattttggtaattacctatccatttactgtagttctttttttgttcaatgttccttctccaactcctctttaagttccttatataagttaatgttaatttagttgtcggcacatataccttttaaattatcgaatataaagccattgataaatcttgattctgatgttgaatgagaaaaaactggtcacattatattggacccaccaatcttaaagtgactaggcctacaaaaattaaatctatcaaaaacacaaatgtctctctatatatagttacacaacttctttggacttcttcacattcactcatatcactacactttccattaattaccaatatatttttactacttaaaaaagatattggtcttgaaatg

SEQ ID NO: 34653 - DNA, 3003 bp, Unknown
  misc_feature (1)..( 3003): 2750-1469P.txt file - cDNA_ID_3080856; gDNA_ID_2910716; Annot_ID_193518
tgtaaacacaaaataaacaatagcactaatgaagaaccaattaatgtaagtgtttttttctttctttttggtatccatgttaagtgaccaattactataattttcttggttaaggttaacgtacaaaggatatttaagttatagattttactggttgatataaaaaaaagaagttatagaattgacttttctagactgaataaatgacgaataagtttcgtttggaatcaagtttgtggatcaatcaaaaccccttactaggtgcatcatgcttgtccacacaaaaatgtttatcgatcttgtttcaacgattaattacaaatctctgtgaaggctgaactatttcatcaatgcaaagttcataaattgataaacgtaattttatcttcgtgacgactaagtgatgagacacctctcacacgtattatgcttttgtctaccatagctagccaaatcttttcatcactttttaatcgtttttcattataagttatttctttacagtttaccatttttttttaaaaaatagctgtagatattccaagcaatgagcgaaatgttttgggatatcataatattgaatattattatactgttttcgcatacttaacatataagcattttaaaacacgttatcattatacattaagttataaaccaacttatttttcttttgaatataatttaacattaaattaaaaagcagattatcatcataagatatttgatcaaaatactaatctatctaaacattaacaatatatactaattaatatctttatgttttgttcaaaatgtacattctacaaaacttttgtgggtttagttaacttttgttgatatatatatatatatatatatatatcagcttgtagaagaggggaacctttaatcgtgctaacacggacccgatccagttaaagtgcttgtatagcaaaaaattgatctgactatttattgcattaattggtatggtcacgttaataaatcttattacattgcgattgacgttaacgtatgatgttactgctaacaagaattcaaatcaaatttacaagagaaaggttcaattcaagccaccatttttgcttttctttttttcgcttcacaaaaagttggattagtgaagcatactacaacactctctttagggatcggacccctctatgcactgttatgtcggctagtgtccgcacaccctacgcagtattatttattgatacttacacatagaatattttttgccaacatttttagtaccttggaatatagtatataccgttgctcaaatagtttcactaataatgtggttaaaaacagacgatatttgatacaatgtactttctctgtttcatttaactcttatattcacattgtttttctctttcaaaataagtgatgtatgcaaaattacctcattgtcccaatttatccttattgtttttcatactatatctgtatttttttaaaactttttttttgaagaaactatttgtaattattgcattgcttgtaacatagagataattatttgttttgcatgttttcctaataattgtgcatttatccaaaatatatttattttggaaaagtagagtaatattctctccgtttaacaaaaaaaaaaaaaagacttatttaaacgtaagaatgataaagaaaaatagtttttatttccatttcaagcgtataaggttatagcaaaatgaaacagccagttcatagacaaatttgaagatagtttttcgtacatcggtacatatgataatgaagaagtctagacccagacacccagctaacggatcttaatctttctagagtatgcgacttagtaaaagatcaattcatagatcaattcactgacgttattatatcgaaagctttcatgcccacataatgtcaaatatctaccattttctcgaacttacatttgaaccatcgatctcaaatgtaacatgtatgatcgatgtataatatcatatttgtatgatgaatgtgtataattgtctatgtgtaacaagacttaaggcgcacgtatcagccaccagggcggctcgttttgattattacatgtcgaaaaagttttcacaaagagtccgcgtgaatttaatgccccaacctaactctcctcacttatttcccactccttccatttttaaagtttaatctttgaaatgaaatatgtctctgtatgcgatcgaccatacaactattgttacagtttttttgaccgaaacgtaaatatctttttaggcattattcattagcattagacaataatcaattattctagacactgttagaaaacacagctgcctagctgccaagacgactatctaggcaatcaacggttttcttccgtcaaaaatagtcccaaatcgactacactaattaatcttatgacacaaccgaatcttacatatctaagactaagttcagaatcactatgtccaaatttacaagaaccattaaacaataatatacgacccgatgatagtttttcgagaaaaaatctccaccaatcaaacgataggatcgatcgtgtttgacatattatatcaaaaccatcgtgatcaatatcttataacgcagttatttgtgagccgacaaatccttttaccacgaacatacatttacagcgtagttattattatttcaatcccataagatgtcattaactacagttctcttcgttttttttggtgcaaccaattatagttctcaaaacgagacaccaaaacaaatacaatttataattggacccatcgattttaaagtaaagtatgccacaaactttaaaaaggctaaaaaaagaaaagaaaatataaatacacttacgtttctcagactccatatataggactcaaaacttctctggattcttcacatttcaccacaacgaccaccactcctacactaacacttatatcaccaacacattgtgttctactatacataaaattcagttcctaagtatttttgttttgttttgtgagatcgatg

SEQ ID NO: 34654 - DNA, 3000 bp, Unknown
  misc_feature (1)..( 3000): 2750-1469P.txt file - cDNA_ID_3080911; gDNA_ID_2910716; Annot_ID_193500
ggaatccgtctggttgtgttgacatatacggtttcttttaactcaccatgtaagaaagctgtcttaacatcgagatagtgattttcccaattgtttgacccttcaaggtttaaaagaatccttattgtctcaactcgagccactggagcaaaaacttcatcgaaatcgattctgtatcactggacatatccttttgcgataagtcgggtcttgtacttgttaatgcttccgtctgagtttctttttagtttgaagacccattttaagccaatggcttttgcaccaaccggaagttcaacaaactcccatgtctgatttttctttgtagactaaatctcatcctcacaagcaagcatccattctcgtgattctctagcttcataaaaatctcttggctcattattcagacacaacaacagcctttctccttcctcttctgcaagtaacacgtagtcctcaagatacttaggtcttgaagttggtctctctgatcttctcaacacgttttcaacttgaaccggattgttgttcacattctccatctcttcttctcgagtaccttcatcattctgattttcttgctttgtattaatcgcatcattgtctatctcggtttgatctccgcttatttgaacttcagaacacacaagttaaaaaattcctctctttattagctttagaaaatcaactcaaaactaaagctctcttttggttctctcaaatctctctcacaaaactcataaggactatcacatctcgataactccttatataagaaacttaaaaccaaaacctaattgtttagataactcataactcctaaacaaaaattttcttagataactcctaaatatcctatcttttatctcttttttcaataataatttattccttaagttattttcttcaaacttaatccaacatacttagagcacgtccaacgtacagtagaaactctataaattaataatgttgggaccatgcaattttattaatttatagtgatattaatttatcctataaattaataaatttatcgtataagttaataaatattaatttatagatatatttacgtaaatacaatactatattcttttaaaaatgttattaatttaattttctatatgttttgttgtttgcatatatacttatgttagatttttatttttctttgacttttttaatttatttttcggcaagatattgtgtctgtatatctacgacattaacgtgaacgtaaacatgaagcttaatccaatttctctttacacaaatcttagcaatgctttctcaaataaaagattttacaaaatcaactatgacggatcaaatatgcaaatagttatgtgagtacaacaaagatcatactagttgtatttttaaaaagttgtaattgtaacttgaacaaaaatttcatataaaaatgagtcttaaaatataaacttaagatctatgattattaatttataatattattgggactataattttacatagggatttcaaaaaaattattatcttattatcttatcgattttggttaatttttacattggcccgacttgggaccgacaaaatttattaatttatcgtgtttattaatttatcgagtattaatttatagagtttctactatatagggttcatatagtttctggaaaaaaaaaaaattaatattttacttttatatccaaaaaacaaaaaaactaacgtatagaaattgtataaacgatcctaaaattaggaattttagagattctctcatatctatcttaatttttaaatatttttatttttttaattgtatgagtttctactaaaaatctaccgccttggtgttaaagccacttagactacatgggttttgacccaaatagttaattaatctgatatgggttttgcgataaactcctcactctagaaagtagtctcacaattttatttatttaatgttgttaaatttgataggaaaaatgggcctaatgggcttttatatcttttttcaataataatttattccttaagttatcttcttcaagtttaatccaacatacttaagccacttagactatatgggttttgacccaaatagttaattaatctgatatgggctttgcgataaacttagtctcacaattttatttatttgtgttgttaaatttgacaggaaaagtaggcctaatggaccttatcgagttttcttcatgagcttagctgttttgctccataaaaaacgacgccgtttcctgtgcgaactgagaaatatttcttcctcaagtcgctttatgtcggtgaccgacggcgggttaagtttagtgaataaacaaacaatcttcgtaaaccaaaattgataatttttaaattttggtgtgaaatcagatccaaattctggtattttaacaccgtaactatgctgagtaactagtacgattgctgctcactcaccacttgctcctgcgatataaaaactttgcaatctagtaggatcattgtatcttactctctctggttctttctactagatccggatctggaactttctctactctctgctcataaagtttcattctttggggagatctgaggcaaccctttttctctggtgagtatctctctctctttcttttgatgttcttgcttctgggtatctctacaaatgcaagattcggatatgtacatgagcttttcttgttccttttacttcttaaactctctttgctcttaattttgttttaaactactgtgattttagttttcctaatgttcgatttgttcgttaaacgtgtaaatcaagtgtgattgtggtatatgatcttgcggacttggtttagtttctgtttttctagatctgcaattatttgcttaaacttagacattggacttaatccgtcaaaaccatacctttttgattgatactcttactggtcactaatgccattgtactttgttgttgcaggtgcatgtgactagggattgtgccgtgggtttaggatcatg

SEQ ID NO: 34655 - DNA, 3003 bp, Unknown
  misc_feature (1)..( 3003): 2750-1469P.txt file - cDNA_ID_3080915; gDNA_ID_2910718; Annot_ID_193527
aaagaacgtggactccaacgtcaaagggcgaaaaaccgtctatcagggcgatggcccactacgtgaaccatcaccctaatcaagttttttggggtcgaggtgccgtaaagcactaaatcggaaccctaaagggagcccccgatttagagcttgacggggaaagccggcgaacgtggcgagaaaggaagggaagaaagcgaaaggagcgggcgctagggcgctggcaagtgtagcggtcacgctgcgcgtaaccaccacacccgccgcgcttaatgcgccgctacagggcgcgtccattcgccattcaggctgcgcaactgttgggaagggcgatcggtgcgggcctcttcgctattacgccagctggcgaaagggggatgtgctgcaaggcgattaagttgggtaacgccagggttttcccagtcacgacgttgtaaaacgacggccagtgaattgtaatacgactcactatagggcgaattcattcgacattatatggtacaaggctgaaacaatttgcaattctttttgtttcgattatgtctctcggtcgtttagttacttgttgataatctatttctaagggaatttttttacaatgaaataacaattttctttaaggttttatcatttaaatggctttttagaaaaatggcgttgtggacaataatctcaaaatataaagaaaagtgaactcttaacggtcactggtgagcaacggctataggaggagccactgcagtagcaacgtcgggtccacacgtgtgtcgaactgtcgatatatgtgcggccaattggttttgaattttaaatagttatcttttgatgttgttgtattcatgtaccaacaataatcgtgacaacattaacttatcttcttacaaatattgaaatgtatataaatacgtcaggtcatattattttattgtcagatgaaaaccaccggccataccagatgttatcaactactcttattaaagcttagatgatacttggttgatttcgtataaaatatagtaataatgtaagatcatctctaatagttaagaaccaattacttcttaaccttgaatattaacgttattttaaattaaaatttcactgttttgaaggtaagaaaaattagagaagattttaacaaattactattccaatgattaagaatcccttcttaagaagataaaaatcaaattattgcaaaacattgttttggttaacaaattactattccaatgacacatgtgtcattcttaccttaagaaaaacatcttagttaaaatacatatcttaattggtttgattaattataattgcttttaatgctaagatgtttgctaagattaggctaagatatacgctggggatgctctaagatttttaccatattttaattctggttaagctaatttttggtgatgcatatcgatcagagtctaattttgaacacaactcgtttcatcaaataatttataattctatttaatcatatattgacaacaacatcaaaaagatattgtattacttaaaaaaggatcagaaatttagctacggatggtagatgcatgaactggtcaagaaatcttgtcgaaagaaacgtttgttgtatctttaatgttatgttatgttatgactcacttttcctttgaaccttctttcgtggtacaactcccttgaaacgttcgcattattgaaagttcataaaacaatttcaaaattctttgtcatcaatggtgaaatgaaaattatatatataattatcatgagattatgtaatatattagtattatgttaatggtgtattaaataattcaaagctagaaatgtaaagatttcgtgaatggtacttgttgaatgggggtaatcgtaatataggaggaggattctacgaacctacatgattcattagtactcataatgcatttagatatttttcaaatcatacaatattataaagatatactaatgtataatgatgatttaggcttttgagatatgaatttttgtagaaagaggacccatccatgtgcaacggcaataatctcggttttcagaccagttcaagtttcctaaatgttagtattttaagtctctgattaatccctccaatctcttttaaagaaaatgattaatcactttaattaatggttagtttttgttccctttacaaagaatcacacgtggcaagatatcattgcaagaatgactcacaataccgtcgttagcctgcaagccaaaagccacgttaacattcccgttagattaatgacggcaacatcaccacgttacatagtctcccttattccgtttatcagataagatcataagaatgggtaaatcaaaacaattaatttttctaaatggagaaattataaatggtacttatcaatccataaattttaaacttttaggagatattaaaataaatgaaattcaatttaaagtataaaaataaagggaatattcgatgacttattttataaaacaaatttgatggataaaaaataaaatgaatgcaaagaaacggtcgtagatgtgaaaagtaacggcgttaagaatatacaaaatccggaaaaggctaagaagcgcgtctatttaaagaaagagctctctccttcttccaaaaaaaaaaatctagactttgcctttcttttagcgattttttttcaattcattcctcaggaaaaaaaaaatcatcgatccgaaaaatctacaacgatctttccagaaatctgtggttttgagatctaaagatcttcaatttcatcaccatttcctcgatcttcgtttgattgttgttgcttaagaggagattcatgaatttataggtgtacttatttgggttcgtctctgttaggttcgtgagggaggggttgatctagttgttgttgttaggatttggatcgattcttttcatggaagggtgtctcttattgatacccgtacgagaagattattgtttagatttggattagagctaggttttttttgtttcaataggaaatg

SEQ ID NO: 34656 - DNA, 1953 bp, Unknown
  misc_feature (1)..( 1953): 2750-1469P.txt file - cDNA_ID_3080943; gDNA_ID_2910719; Annot_ID_193552
agccctgggccaacttttggcgaaaatgagacgttgatcggcacgtaagaggttccaactttcaccataatgaaataagatcactaccgggcgtattttttgagttatcgagattttcaggagctaaggaagctaaaatggagaaaaaaatcactggatataccaccgttgatatatcccaatggcatcgtaaagaacattttgaggcatttcagtcagttgctcaatgtacctataaccagaccgttcagctggatattacggcctttttaaagaccgtaaagaaaaataagcacaagttttatccggcctttattcacattcttgcccgcctgatgaatgctcatccggaatttcgacctgcaggggggggggggcgctgaggtctgcctcgtgaagaaggtgttgctgactcataccaggcctgaatcgccccatcatccagccagaaagtgagggagccacggttgatgagagctttgttgtaggtggaccagttggtgattttgaacttttgctttgccacggaacggtctgcgttgtcgggaagatgcgtgatctgatccttcaactcagcaaaagttcgatttattcaacaaagccgccgtcccgtcaagtcagcgtaatgctctgccagtgttacaaccaattaaccaattctgattagaaaaactcatcgagcatcaaatgaaactgcaatttattcatatcaggattatcaataccatatttttgaaaaagccgtttctgtaatgaaggagaaaactcaccgaggcagttccataggatggcaagatcctggtatcggtctgcgattccgactcgtccaacatcaatacaacctattaatttcccctcgtcaaaaataaggttatcaagtgagaaatcaccatgagtgacgactgaatccggtgagaatggcaaaagcttatgcatttctttccagacttgttcaacaggccagccattacgctcgtcatcaaaatcactcgcatcaaccaaaccgttattcattcgtgattgcgcctgagcgagacgaaatacgcgatcgctgttaaaaggacaattacaaacaggaatcgaatgcaaccggcgcaggaacactgccagcgcatcaacaatattttcacctgaatcaggatattcttctaatacctggaatgctgttttcccggggatcgcagtggtgagtaaccatgcatcatcaggagtacggataaaatgcttgatggtcggaagaggcataaattccgtcagccagtttagtctgaccatctcatctgtaacatcattggcaacgctacctttgccatgtttcagaaacaactctggcgcatcgggcttcccatacaatcgatagattgtcgcacctgattgcccgacattatcgcgagcccatttatacccatataaatcagcatccatgttggaatttaatcgcggcctcgagcaagacgtttcccgttgaatatggctcataacaccccttgtattactgtttatgtaagcagacagttttattgttcatgatgatatatttttatcttgtgcaatgtaacatcagagattttgagacacaacgtggctttccccccccccccctgcaggtcgaaattccgtatggcaatgaaagacggtgagctggtgatatgggatagtgttcacccttgttacaccgttttccatgagcaaactgaaacgttttcatcgctctggagtgaataccacgacgatttccggcagtttctacacatatattcgcaagatgtggcgtgttacggtgaaaacctggcctatttccctaaagggtttattgagaatatgtttttcgtctcagccaatccctgggtgagtttcaccagttttgatttaaacgtggccaatatggacaacttcttcgcccccgttttcaccatgggcaaatattatacgcaaggcgacaaggtgctgatg

SEQ ID NO: 34657 - DNA, 3000 bp, Unknown
  misc_feature (1)..( 3000): 2750-1469P.txt file - cDNA_ID_3080947; gDNA_ID_2910719; Annot_ID_193551
ggtgctgatggcgtatactatgaaggatccattcttaaaaagatcacaattatgcgaaagactgccttaagcagattgttggataggctttatcaattgtttggattagataagcagaaatcagagttcaaaatcttcggtaagtaccctgtagatgtttcaccggatctctttacgtatgtacattttcccgtgttgaacgactctagtttggagactatgcttgaggttccaaggaatcatccttctgtaaacaatttggaattctatttggaagctcaaccaacttctgatgctgtcgttgttcctgttacttgttcatcgccactggaaagtcctgatagttcctcaaaaagacagaggatcacacaacaagaaatagtggataataattcaggctcagctggcatcttggttaaagttgtcaattctggtgctttaaaaccctgtcttctgcctagactgtggattgatgacgatcatgacatgcatttaggactgtgttttaaagatagagatgagttaaagaaggcagtggattggtggtgcattagaaggcggcgaaattgtatagtaagagagaccgagaaggaaatgtacacgtttgagtgcgtaagatggaaatgcaagtggtcactacgggcagcaagaatggaagaacacggacttgttgagataaccaaatatactggcccacatacttgtagtcatgagtatccaaatgattttgagtcagagtttgcagcagatgagattgaacgtgttgtcaggatacagcccacactctcaattgcagagttgaagaaatggtggaaagaaaaaactggctatgagcttcaaacttccaagatgcgggatgggaaactggaagtaatcaaaagagtatttggagatgaggatcaaagtttcagagtcatgcccaagttaatatctgcatttcactcatctaatgggcttctcgtggactggcaatatgatctttttcctaatcctgattttgcatccttccgtggcgtgttttggtcattttcacagtctatcgaagggtttcaacactgtagacctttgatcgtcgtggacactaaaagtttgaacggtaagtaccaattgaaactgatgattgcctcaggagtagatgcagccaacaaattttttccccttgcctttgcggttactaaagaagtgtctactgatagttggcgttggtttttcactaaaatcagagagaaggttacgcaaaggaaagacctttgcctcatctccagtcctctccgggacatagtcgctgttgttaatgaaccagggtctctgtggcaagaaccatgggctcatcacaagttctgtctgaatcatttgcgctctcaattccttggcgtttttcgagactacaacctggagagtcttgtggagcaggctggatccacgaatcagaaggaagaatttgattcctacatgaatgacatcaaagagaagaacccagaagcttggaaatggttagatcaaatcccaagacataagtgggcattggctcatgacagtggtctgagatatggaatcatagagatagatagagaagctctatttgcagtttgtagaggctttccttattgtacagttgcaatgacagggggtgtgatgcttatgtttgatgagttgagatcctcttttgataagtctcttagttctatttatagctctcttaaccgcggtgttgtgtacacagaacctttcatggacaagcttgaagagttcatgacagattccattccttacgttataacgcagttagagagagattcatttaaggtctcagagtcctcagaaaaggaggaatggattgtccagttaaatgtctcaacctgcacgtgtaggaagttccaaagttacaagttcccatgtctgcacgctctagcagtctttgagaagctcaaaatcaaccctttgcagtatgtagacgagtgttacactgttgaacaatattgcaaaacttacgctgctacattttctcctgttccggacgttgcagcttggccggaagattgcagagttccaacactgtttcctcctagtcagcagcttagtcctaacacataactagtaagaagaagagctggaagttagatggatttgtgtcaaaccaaaccgagcattttggttgattatactagtgactatgtagtatcttttgactttaggaaagtaggataagtcaggttccggttatataacggagacgttatgtttatgcttgttcataagcactttttggtgatcccctaaaaaccgatatgaaaactaagctaaactggattagaaatgtgacgtcttcttcttcttcttctttacgatctctttcccaatcttattgtagctttcttttactcttactctcgcatccatgcctctctcgtaatatacaaatagtatgtgtatgtgtgtttttagcttgtttaatcaagtttcttatctgcaaaggcttaatgtggacaaaaatcatcctgcaaaaactagttcttttctacaactcgtacttaccaattttctaattctaatgcatatattgattcttaaaaacaaaatattaaatcattgggacattgaaagttaatttttggcgggaatgaaattgaatgttttgctagtttataaacgggctcaaaacgggctttcttctttcggcccaattgtactttattttatttttgttcgaataggtgtgacatttatggcatatgaaaaagttaggtggtgtcttcgtcatcggtgacaagtggcttcgtcaccggagaagtcctcagcgacaggcgaaattagttgaagttcttgcaaaatccaagcttctctgccacacccgatctgaaattctccagttttgagttacgtagacctttacaagtcttagtattgagtatcactgtttattgtttagagtttatgtgttttgaatggatttatctgcttctgtcgccaaaaagctttagcctttattttttagacatg

SEQ ID NO: 34658 - DNA, 3003 bp, Unknown
  misc_feature (1)..( 3003): 2750-1469P.txt file - cDNA_ID_3080951; gDNA_ID_2910719; Annot_ID_193550
ctcctgaataaagagtgcaacaagagaagctacgagtcatggtttgtcaatcttaatctccttagaaccaatcgtatttcgggatacttcatacaacactacatagtaaaaggacacgaacttcgaaccagttttgtccatgagaggagtgatttacaaaacaatggagtctccatcgactttctgccacccggaatgataaagatcgaagcttgtgatgcaagtcatgggatattgctttgtgttaagtatacaaaaccatcacgtggatacatagtcttcaaaccaaccactaaacagtatcaggtcataccaaagccagaagtgaagggttgggatatgtcattgggtttagcggtaatcggattgaaccctttccggtataaaatacaaaggctttcgcagtctcggcgtatgtgtatgtctcggggtatctaccatttgaatcacagaacttttatgtgcgaagttttcgattctgattcgtttacctggaagagattagaaaatttgcgtctaccaaaaacagacagattaattttttccaacccgatacaagtttcggggttcttgcattggatatcacggaacaacaatgtgatccggttttgtctcaaaaccgaaacttggtccttcttccatactccgaactctgatgttttctcaggattagtcagatacgaagggaagctaggtgctattcgtcagtggacaaacaaagatcaagaagatgttcacgagttatgggttttaaagagcagttttgaaaagtcgtgggttaaagtgaaagatattaaaagcattggagtagatttgattacgtggactccaagcaacgacgttgtattgtttcgtagtagtgatcgtggttgcctctacaacataaacgcagagaagttgaatttagtttatgcaaaaaaagagggatctgattgttctttcgtttgttttccgttttgttctgattacgagagggttgatctgaacggaagaagcaacgggccgacactttaaaaaaaaaataaaaaaaatgggccgacaaatgcaaacgtagttgacaaggatctcaagtctcaagtctcaattggctcgctcattgtggggcataaatatatctagtgatgtttaattgttttttataaggtaaaaaggaatattgaattttgtttcttaggtttatgtaataataccaaacattgttttatgaatatttaatctgattttttggctagttattttattatatcaagggttcctgtttatagttgaaaacagttactgtatagaaaatagtgtcccaattttctctcttaaataatatattagttaataaaagatattttaatatattagatatacaataatatctaaagcaacacatatttagacacaacacgtaatatcttactattgtttacatatatttatagcttaccaatataacccgtatctatgttttataagcttttatacaatatatgtacggtatgctgtccacgtatatatattctccaaaaaaaacgcatggtacacaaaatttattaaatatttggcaattgggtgtttatctaaagtttatcacaatatttatcaactataatagatggtagaagataaaaaaattatatcagattgattcaattaaattttataatatatcattttaaaaaattaattaaaagaaaactatttcataaaattgttcaaaagataattagtaaaattaattaaatatgtgatgctattgagttatagagagttattgtaaatttacttaaaatcatacaaatcttatcctaatttaacttatcatttaagaaatacaaaagtaaaaaacgcggaaagcaataatttatttaccttattataactcctatataaagtactctgtttattcaacataatcttacgttgttgtattcataggcatctttaacctatcttttcattttctgatctcgatcgttttcgatccaacaaaatgagtctaccggtgaggaaccaagaggtgattatgcagattccttcttcttctcagtttccagcaacatcgagtccggaaaacaccaatcaagtgaaggatgagccaaatttgtttagacgtgttatgaatttgcttttacgtcgtagttattgaaaaagctgatttatcgcatgattcagaacgagaagttgaaggcaaataactaaagaagtcttttatatgtatacaataattgtttttaaatcaaatcctaattaaaaaaatatattcattatgactttcatgtttttaatgtaatttattcctatatctataatgattttgttgtgaagagcgttttcatttgctatagaacaaggagaatagttccaggaaatattcgacttgatttaattatagtgtaaacatgctgaacactgaaaattactttttcaataaacgaaaaatataatatacattacaaaacttatgtgaataaagcatgaaacttaatatacgttccctttatcattttacttcaaagaaaataaacagaaatgtaactttcacatgtaaatctaattcttaaatttaaaaaataatatttatatatttatatgaaaataacgaaccggatgaaaaataaattttatatatttatatcatctccaaatctagtttggttcaggggcttaccgaaccggattgaacttctcatatacaaaaattagcaacacaaaatgtctccggtataaatactaacatttataacccgaaccggtttagcttcctgttatatctttttaaaaaagatctctgacaaagattcctttcctggaaatttaccggttttggtgaaatgtaaaccgtgggacgaggatgcttcttcatatctcaccaccactctcgttgacttgacttggctctgctcgtcaatggttatcttcgatctttaaccaaatccagttgataaggtctcttcgttgattagcagagatctctttaatttgtgaatttcaattcatcggaacctgttgatg

SEQ ID NO: 34659 - DNA, 3000 bp, Unknown
  misc_feature (1)..( 3000): 2750-1469P.txt file - cDNA_ID_3080975; gDNA_ID_2910719; Annot_ID_193543
gagagtaccaatcttgataagatgaagaataggaaagtatgggactgcgaaagcacactctacgactcgttcgagctcaactctttcaatcgccaactcaactcagccatctcttcctcagctagatccatgtccatgcctcacctctcttctcctcctccaccgtcagaaacaacatcttcttcaaccaagaagcaacaatcccctaccaagaagatctcacgttctctcgggaaactcattaaatcaatgttcaaacagaaacaatcaaacgctctgtttaagacaggtcatagcggtgtagacatggacaaatactacgttgtttttgacaagacgggctcactcaccacgatccccgagtctggagagtcaacagagatggttggctcagagatcaactcgcttgttaggaaaacaacgtccgagcgaatcccgcagagtcggctcgttggtatatcatcttcttaattattttcatttgattataatactataccgcagttaagtcactaaacattagtatgatgattaaaatagcctttaaataaataactattatggcttccaaaaacatactattactagaatatgactcgcaagataaatatatatactttttgttataaacttttgatattgttgtatttttatattttataggtataaacttatgtttgaatttgataaaccgtggatcaatttttaataactaaagttttcaatgttaagtaatttttgttttctttagcgtttaaaattataattgtattttgattgttaattctaaaatttgacttgtatataccgtctcgtattaagatcgatccaaacttgtcctatcatataactccctctcttaaaattaaacatcaatttgtttatttttttaataatacgtttatttaaaagacatataattcaatatacattgcaagattaataatttattctgttttttataaatcgatgaatttagactatatctaatacttttgtttttgttgttttttggttagaaaataatgattaattatgtatggtttgtaataaggtgtaagtttttgatatttaagtctattattattttgttttttatatggtttttgatattatttggatatacaaacaatattattttttacattattttattcttagttaaacctacaccaaacgataaatcgtctaaaatcgaggaacaaaattgatggaataatttaaaataaataaatatccaaattagtacttattttgtgttagtaaaattcaagtttatattagcacgtgggtcaatttattttattaaaattaaaaaaaaaattaataatttattatttggttatattttagattgtacacatacttttttcttcattacttgagtaatatatgtccatttatgaaaaacattaatcacatcatatcagaaaaaactaaaattttgttaagcatatatattttataatacttcaaataaaataatgtaaaatcaaataaaaatgaaatgaaaatcatatatttatgtttaaattaggtagagagatttttaaaaattggcacaattttttatattaacattaaatcatcatatttgattttcttatatgtaatagtagttaaggatatgccgtaataaaaattttaggcataataattagttaagaaatatacattttaccgattttatgaattaatttatttttgggttttgtcacaaaaaaaatatctgattgaagattttttggtcaaaattaaaaacaaatccgacttgaataaagagtaaatatgtatttcaaaaatattagtacatatattttaataatataaaataatcaaataaaagtgaaatgagaatcaagaaattgggccaattttttatattagcattaaaacatcatatttgattttttttatatgtaaaaatcgtagtgaaattttttgtaataaagtgggcaagtaagattggttctgctcccaatcgtctacaagttttaaactttcctctatgcgcgaatgtgtgatgagtcttggtttcagtttcgggataaccggagaagatgttgatggggcttgagcaactggcaggatggctcttacattgttggaggcagctctgcgaacaacagtgacccaactatcaccaccgacgtctagagacataaagccaaggaatccatcctcgacgacatgacaacagttatctctcacctccatccagaagcagctcaagaacgcctcttggatgcctacactaattcaacttcagtttggctaaagaacttgaagcggatctgcaatccctcttggatgctttcattgaaatccaaggccaagtattaaccatcatgttgtagaatctgtatcattaaaattagtagctgatacttgttgagactagatgttatttgtagagtggttcaaatatttatagaaattttattgtatatatatttatataatgacacttctaatcaattttgaagttgaatcaagatattattatttttgaaattgtacagatatttcaccatataaagcaacaccttatgttttgtgtgaggtagcatagaaaacatatcttatatggctacataatttgggttgaacaaaggaaccgacaatcttactatttattaaaataaccgttaatattttaacgaaaagttgtgataataaaacacaatagttcaaaagtgtaaaaacaatatttattaagatttttatcattaataaaatcttaataattttaaactttacaattattttttattaatgtataagattaaaaaaagttaagaaaatatttaataaaaaattacgttttgtatcggctaacggtccaataggaaattatggaagagtcaatttcaacaaatgcgattagtcgattgcataaataggccagttaaatgcataacaggcccaatattttggcccaagtcttgataattcgaattaaacgaaaaaaatcgctgaagctcatcggaggcgaaaatg

SEQ ID NO: 34660 - DNA, 3000 bp, Unknown
  misc_feature (1)..( 3000): 2750-1469P.txt file - cDNA_ID_3080979; gDNA_ID_2910719; Annot_ID_193542
gactttaaagactagtctacaagttgatgtgattttagacgtgtggaaacgaaacactgtagcttagacccaaaagcataaacgaaatcatgtagtctttgttaatttggtttggtgtcaatttggtgaaagatgaagaagaacaaaagcataagcgcctataaatttagacaactcagtgggatcgtttgcaatcacagatatcaaaaaccacaacaaacagagatcgtgatactgatattgagaatggttttggagaatgtgttagagatgttggagagtggtaccgttcatcacagaaacatatattttattatcgatccttgagttaataatggtgattcccttgtctgcgatacggatcatggtagcacgtggaacccataaggccttaacttgagcccaacgtctctaatttaagatttggcctccaccaaatctccaattcgccactgattttcgttggccacatgattaccctaaaccccaaaacatgtttctttaacttcatattgttatactcattatatggacaagtcaggtatattcatgtttttgacttttaaattaaaattctattctaaatttaaatattttgtaattgtgatgtttaaacttaattaataatataactaaaaaaaattaacttacatatgaaaatcaatttataagttaaattaccaatattcatacacataaattaaatgttaggttaaagctagataacatatcactcaatatcggttaaagcatatcctccactcgtcttcgaatcgggttgaaatatagttttcgtcgtcatcgttctttcaacaattgtataaatattgttattttcatacctttctctatagttgtttctactacatgttcttttacttaatcaatataccatcaaccacaacatttttattatggtcatcttctgactatgatcccaatttacctttgtaaatctaccaccgtttagccactgtgatatcggtttctattcaagttggctaccaatttagcctctgttttttgtcgttatgatgaaaaaacaatttaattttttaaagcttgtggccacaaaaaaatcaatcatgaatttgtggctgattagccacaacttaactaccaatattatcaatagctaatcagccaccgattagccaccaatatgtcaaaaatattttagtagctaatcggtggctatttctagcaattgacaaaatttggtggctagacattggccgatttgctgttttgttacaagatttttgtcgctccgtctctatgacatcgagatcaaagcgacaactcctctcttaaaaaatttgtacaaatgttgaactactcacattttggatgtacaagtccaaacatgtattattttctcgtttccacgtaatcaaaacaaatatttgaagggtctaaataataagaaaataaaaacaaaactcaattttgtttgtatcttttgtaaaaaaagtgtctcttatttaatattgtaatgcaatggtcatattaccaattttatctcatctatttctcgttcaaattacattttcctcttgagtttgagtaaaaatccctcaagtcttatttgcgcttgcaatttgaaattcataaactcaaattggaacagatcagcttttgaataaactcaaattggaacagatcagcttttgaacagaccttaaggatgagggatgcactatagcttttgaatatgagcctcatgtgaccaaggaggacttctcccaagcgttgacaacttacttgcggttgcaagacgaagagaacatttcagctcttgtggaagagttgaagagctcggaaaatcaaagtaaagaaaggtgtaaaaagagaagacaaagcttataaagaaagtgtctatgagacttgctcctgagttctttatagatgccaatagatttacactctgctgacttttatcaacctaaggaaaaggagtatcgtcctatcaatatcaaacataagagcaaagttgaagaaaaagttgaaaaagaagttgaagaagaagttgaaaagtatgttcaagaatctcagtctgcgacgagtgaaggtataaaaccctctttttataatactttagaggaatctatatggaaataagaaaagctctatgctaaactaggtttcttgatgatatgtctctagacgtcttatattggtagattgccatggtctacttgtatcgattgattgctgcatttgtttgctttctaagttgaaaggtggaaaaaggatagctgaacaaactatcatgagtgtgaagaggtggaagatggatacaatttatttatcagatagatattagtttattattatctttaattgttgtgattattagagaacgaaatctaaaaaattatataatgtgattacataattttaaaaattgcagtataaatgttgattattgtatgtgtatcagtaacgtgtaatcacttaaaaaatatattaaagtgaaatggtaaagatttgcgacaaattacaatcaataacaaaataaaacaatacgtttgacctaaactaatgcagtaaataatcataaatattttagttttaaatttacatatagttattttatattttgatatatattcggatagtttaatattcaaaccgctatgatgtcaaatactaaaatattttatcaccactttttatcatatataatttttctttcatttttatataaccactttttcatcaattaaatttcatatattcttaaactgtattggaataaataaacaatatctaaaactgatgtaatttacaaaatataaagttgtaatatatatcactaaacccgcatgggtccacttctagtaaaaaaagttaaacgcaaatccttgattttgtttttttacacagaatcacagatcaaaaaaggcaaaaagttatactctatcttcttttctttctctcctcctcacatccaccaactctttccttctctcaccgcgagagtaaccgagagacatg

SEQ ID NO: 34661 - DNA, 3000 bp, Unknown
  misc_feature (1)..( 3000): 2750-1469P.txt file - cDNA_ID_3080994; gDNA_ID_2910719; Annot_ID_193536
gaatatcgtttctttgacggctagggtggaccatcacagttttagacttttagtttcatgaacatattatctaaagttgacaattttctaaaaatctatatgtgagtgtctaccgcaaaagaagcaattcagcaaaaatattaaaatgtctcgcataaaccattagaagttacttttttctgtcaaattattaaaattttcttgacaaaattttatagttacatgcaacagcattttaatattttatatgcgagacattttacaaatgtttgtatctaagactatgaactggttaaacatatatacttttttttttttaaacatatatactttctttagactatattgagttttcatttacgaagttgagttttttcatgggatgaacttatttatgggttcaaaagtcattctgagtaaaactatattataaataccaatatatacaaggcgaacatgatagtagtgttagtaacttaatattataatacttctttttcaaatgctaagttttatatcatatatatatatatatatatatatgtatctgttcaatcttaatgtacaatccattaaactagtacatggaaattctagaaacttacacgagctggatgtactttctattaattcacacatttctccctaattattgatgtggattacgtaactaattaataagtgatttctcttcaacatatattgatatgctactatagatctgtattaatctacgtgtgctcatagactgtatatatgaggtccccacttatccctaacgtagaccttcaatttttctaaagcatatattttggccatactttttgaggacctaccagtctccttcttaattattttcattttaatcacattatacgtgataacacacagctacgaagtaagaggattcgatgctaaggcaacatatttcatgcaccctatgaccagatcaaatcttcgtatttcacaaatagtcaactactaagtgttatcatctaccgaattaggcatcgatagtttctatttagatgtcacatatataaacaactattctacaacaaaaatcacataacgatttcagattctaaatatatattattttctgtttagtctgggaaaacacatatactagatagtttgaatttgaatctaatactaatccaatagatccattgaaaaagtttaattgagaaaacacatatactagttagtttgaatttgacgaatacttgttttagatgatttttttttaatattgtttccatttcattcttataaggaatatccaatatatctgtataataaaaactctcatctccaaactggcaaaaagaaactggttttaacatttcacacaacatccttatgaaatgtcgacaagatcgtgttttgaatgagaattccaaattccatgtagaaaagtcgtttgcaaaaacaaaactgataaacaaagaatttgattgtttcacttcacatagctgacttggtcttggttctccacagagtataattgattaataatcaaaaacttcaataattaagatagaatggagctggacgtggacctggtcggtttgaccttcttcatttaaattaatatatttgctttcaaattattgaacctgtttttttgttgttgccaaaacattattgaaactttagcgtgactatgcattgtaaagcagtaaagcttatttatttattgtattttctctttttggttgttaattaattatatgcactctatcacattattctaacaattcaataccccagaattaaggtaagttgactttcttcgttgacaagacacgtggcgagttcagtaccgacgccaagtggaggagcttagactttttaactaattaatttgcgtatggttctttttcttcccatgcaggtattagttgtctagcagctggttcatgttggtattcgtttacgtctcaattattattcgtatgatcatactatattactatatgatgtttcaacctccatttttcaaagataagtacgtaagttcgtttactcaattgaaaaatcatataatagacaagatttttatgaaattagttctcatcttagacattttctatatccgtggtccgtggaatggttcgtaaacaagaatcgaagctgttttagataaatacattggttcaagattcattttgctcaccattaattaatgtggtcgaagaatcactttgcgtgttactcgcttatgacatctattaacgtgagtacggctctgcacttcattaacatcgtttacaatctacaaaggtcataaaggtccgtttataagaataagtaagcttgtttgattaattgaagagattaattatagtattgaataaattaatcctattaacacgtcctagtagactataaacacgacttattttttctttcatttctccttagttgatactacggagaatatacagagtctctttgaagatcatttatcatttacatatcatccattcagggaaaagaaaataaaaatggacggagtttggtttatgtgaaagaatattaataaagtgggctttgatagtcaaactttcatactaaaccctaacgacccaatacgatattttttcctttatttcggcccaagtctgctagtttttatcaaaatccaaacggtgtcgtttagaaacactgtgagtctgggacgaagtcaaaaaagatgtacaacgacgactaaagtcaaaacgtgagtctcttctcttctctagtggtgcgtggtgactcacacaagtctcgagccaatccaattctcgagaatcacaaaacggagattcaaaccgatgaacaaaaccattcgaaaatcagaagaatccgagtccaattgttgcgaggtcggttttgatcttcatttctgatgtttgcttcttcacttaataacacaacaacagagctcttgatttgcgaaatttgatgaatttcagatgaaattttgagttactttaagcgtcgtcaaaaatg

SEQ ID NO: 34662 - DNA, 3000 bp, Unknown
  misc_feature (1)..( 3000): 2750-1469P.txt file - cDNA_ID_3080998; gDNA_ID_2910719; Annot_ID_193535
acaatgataaaataaagcaaacaaataaaacaatatttgttgtcattgatgacattccaatgggaactataccctattttttttgggtcaaatatagagtcagagttaaaaaccagacaacggcttttcgttttgggctttttgactgttgatggttgaaggatgtgtcacatgaccccgactaacaatcttaaactacacgtattcatggcactccatcgagagatcgagtggtccttttttttttcttttttttttctttcacccattcagttaaaaaataatacatttttactgttgttagttattctaattggttgggaagtacaaagagtgggacctatgaccaaaaacgatcacctgagtggaaaggtgccgtgaccgtgactcaaccggcgacactcggtctaaaccggagcttttgcctcttcttacgtgtcagtttactttttaattaaaacaattttaaaatagcattagcagatcaaagatactaggttttttttagtaaaataaacttatttattttttgattaaataaactaaaagataagatgattatatatggtcaaaagaaaaaagcaaacctggagaaatttcatttataaaacaaaacaaaagaattgagataaagtgaagaattaggaagaaaaaaagaaggggtaaagttgtaaataaaatgattcggcgggaggccgttgattgcggttgggaataaagccatctgacaaggaggcttgtccgttttgacccccccccatccctttcttcctttgtcttttttcttcttcttgtaatatacctacgtatacgactaattctaaactattttcttatgttaagattaaacgtgattagtttagatttcgatttacttattacttgttctgtttagacaaaatagtaataaaaaaaaaagatcttaatttttgctctaatttgtaggccatctttggttcatttttttttccactggaattgtagattatattgatgaaataaggactgaatacaatagccggcaaggcaataaaccttccaaaaacataagccggcgagtacaagccattttcggttcatttgtaacatcaaaatttgaaatatatatatatatattttttgaagtgtattttattttagatacatgaaaaatcaagtcatttgtaacaatcaaaattttaaaccagttgaatagctaagttgaaatcttttatttcttctacaaggttcagttgtagtttctattttgttaacttgtatcgtcgtaaataataatactaaaggaaagtgaaactggaataataaatagaagaagaagagtgttagttgtcggtttgtcgggttaaccacttagatggttcgcagaaaaccagatgtcaaagccgctcgtcaacgtgttttctgtttttttttttcttttcttcttttttttttactcttaaatgttgtttgcctttgccattgtcatcttggcatgagtttccgtaatttagtatgcacattactctaaagttcatcttactatattgtatgatttcgcaaaatccggactcttgatctataaaagatccctctagtcccctaaccatcgtttctatacatcccatttacttgttataaaccagaaacaatgaagtattttttgttcaatgcgaagaacatatgagcaaaacatcattagaaaaaagagtacagactaatgccattttactctttttctacttttcacgatggtacaaattatatcaaggataatacactatataaaatcaaactattactaatacactttactgatgaaacaaaaaaaaaaaaaatatcacaaaaaaaggacgttaaagttttagatccaacctcttctttttatgacatatcgaaaacaagaaaaattataccaaattactattattatggtgttatacttcaaacatactatttttatttctaaaatgcactagttttcaatattttgaaaagtgctaaaaatttgaaaacaaatggagcgtgttaatcttaaaattatataaggttcgtggcattttaaaattcttaaaaataagacctagcaatgaaatgttacgttcacattaaggggtattaaggagaattgacacaaaggcgaacaaattcagttagtaggaaattacctttttcacctttttttgtgtgtgttgcctcaaaaactcctcagtcttcatacttaccatataacgccttgatgatagtattagattaattttaatcaaaccattaatattacctttactaataacaaaactcgttttagtaatactattactttatgtgaatgtaaacacattcatttaccaccttgccgcccctatgtgaaaagaaagattcatgggaacactcacatgactttgttccttttcattttttcttcataactaataaattattatttcttccaaaatattgttgtaattactctgagttcctacaaaaagcaattaactaacattaataaaaataatagaataattgtttttgtaattaatttatgattaatgcggaagtcacaattttccacctgattaattaacaaaattttctatcaaagaaaaatctttgtcttaaacgtatacatagatgatgtacatttcaaaatttcgaccaacacttaaaacacgaaataaaaaaagtactcacttgataatcatactcaataataataaaatcaaaaggaaatgtgaataataaaacataataatgaatgaaaaggaaattaaattatcattaaatgaaagctaactgtcaaaaatttctgtctcttggtaccttcctgctttctccttcctctcatttccatataaagatcacttaagctcgtctcttcgtcttcacaaatcaccaatccatcttcttcttcttcctctctccttctccggccactttcctcactctctgctctccctatatcagcgctttttagctgatcctctctccggcatttctctctctctcttttttttagccatg

SEQ ID NO: 34663 - DNA, 3003 bp, Unknown
  misc_feature (1)..( 3003): 2750-1469P.txt file - cDNA_ID_3081002; gDNA_ID_2910719; Annot_ID_193534
ttcgacaacagaaaatgtaagttggatttgaagctggatacaggacatacagacgtctgtaacgtaaagtatccaaggccgcctctgacatataagtgaatctaatgggctacaaatgtaacttataagcctaaactaaagccctatttgtgaaatgaaactgacccatacaatgatattacatagaacatcaaactggcccatacaaattgtatcatacaatgatgtaaactggcacagcattaacatattttttgtttttcaggactatacaaattttcaattcaacggttgcactagcatgacaagaagaactaaaaaccaaccttttaaactattgctgaatatagttattttctaatagggttcgaatgtataacacttgaaaaccatgagatacaaatcaagaccacgaagtacaaggtttgggttctttcatatttgttcgtacaaaaaaaaacttccaagattttcaaatccgttagttaacttcttcccttatcttatctataacgacttgttcccttatatgcaacgacttgttgtggttgaactgcatatatagcttcgtaatccaagtcaatatatttatataaaggtaccaagaatcttaaggatgtggtttgaaacattcaaaagatcatacgactttttctttgttataaacaaaacaaatgctcacaagtcttcatttagaagaattcaaagtcaacggtatgaaacttcgccaaaacgacaaataagccgtcgtactagttttggttgcatctatttacattaaggaattggtgacgaaatcaactctgtaattttctataatcagtttttcgtacggactttcgttcttgactattgacatgaatcccacctttatgtttcatttatccttaaactaaatcatgtaacaagaattttaaatttagttcaaatttcatttgctttagaacaaacaaattttgatttgttaataacgttaaatttgaatatttctcattatataactagtctgaactcataacttatgtcagaaaaaaaaatatgcagaggaaatctatggattttagttttcttgattagtcaatactcactaagcttatttataaattaaaaagcaacatagtgaccgtgacaaagcaaggttatcatgaataagaattgatgaatttctatttgtacatatattaattataataaaatggaaatagaatcgcatatatacattagacatggaaattgaagggcgactaagttcataaatatggatcaatgatgtagaataactaattaataagagtggtccgttattgatcaaacttcaattgcctagttaggtacgaactaatccaaatgcgacgtgatggaaaaaatgatagtggcccgtatccataaatttcgtttttaactttatatcctataatgttgtccacgaaaaatgccaagattataaataagttcgtaaactttttttctatttcaactaacacctaatgaacataatggcggtgcgaaaagaaatatattgatctctattcagatgataatgatactagggatctacttacttcataaagttatataactttatcaattttaaaataattatggtagaataaaatatacatcaaagatttaatcttaatcagagtttaagttttgttatcatggaacaaaagtaccattccattttatcttgcatgccttcatcattctcggttacgttggtcctctacgaaaatgtattcttaaacactcttcaatggagtttattccaatcaatctcacacacacaaaaaaaatttgatcgattgacgattctaggtgactcacttgtgctccaataaacctcttagctcgaaccttctgaatgaattggagtgtttgtcgtagctgattataacaaactttgaaatccgtttaaaggaaaacggaaaaaacaaagacaccacaatttaatgaaaatgtagtcaatggataatataaagataattcgtgacacaaaggaaaaaaaaatatagtcggatgaattcatgtttctgtcatatatttgtcttgctcttatcccgaatctcaagtaaaaatcaaaatcagaccaaatgtttcattacttaacttcatgccgcttccagatgttggcaacatatttttagtcaacaagggtttttatggttatggttaaccactatgtatggtatatatttctgataaagtgtttatttgtatattgattatattttaaaatgtcatatactcatatggcctctataatatttggttagcaatatattattactgtttttataagtcaaatctcaatattataagcaacgatcttacacttgtgtgctgtcaatagaaagtggtaatttaataatttgattttttttttttttttaattttcgtatagtacttaattacttagaggtctgggtcattagaaatatgtgactaacatgtacaccagttattagatcccaaaatgttaacatatcctaaaagcagtagaacaatgatacaagacccaatatatattttatgtttccacattaatttacatttaaatcaattgttatatcattcaaaatgttttaacaaatgtggagaaaagtcaaactttataagtttatatcactgtaactagtcgagaatagtcattctgatcataaaatacggaaaggtaataaaatcaaaagtgtattaacactttattatgtcttcttttttattttttgtcaaattatttccattttgttagttgataaatagacaaaatttaattagcttcattgagggaaaaaaaaataatatttaattttcttataaataccacccaatattgaggattggtcagctaccctcgtgtccttgaaatgttttgttcctcaatcatcattataacattcacaccccattttaaatttctctctacttgctccttttacatttcaacgaacaaaacacatgtatacatagaaagaaacgcaaatacgcagatataataaatg

SEQ ID NO: 34664 - DNA, 3000 bp, Unknown
  misc_feature (1)..( 3000): 2750-1469P.txt file - cDNA_ID_3081010; gDNA_ID_2910719; Annot_ID_193531
agaggaacatttatataaaaaaacaggagtaataatatagttatcaatcttgaaattacacatatctgaaactgtttttccaagtaggtgtttgatggttagatcatgcattagattatcaagcttcatcttgaaaatccgacaaatgatgtctggtctatcttcagacttcaagttcctctctttacagaatctaactatttcaggccactttggattgcaagtaaacgttatgaaaagtgatggaaatccaaagtgtttgcaaatagccattgcatccaaatagttgtttgtcatgtaccttggtccgcctgtaaaagaaggtggaattttaacttctttaccttggttttccaaatcattgtttccagagttggatgcattctgaattgattctttgttagaacttctaaattgtggttgattattcttaatatacctcagcctgttagactcaatcatagtgtaagcatcaactatgaactgctgcagcaaacgcttagaacgaaataaaacgtgtttctccgccttcctttcttgtagacgatatgcaaaccactgtctcatgcttacgtctttttgttctttttttgcatcgccacgaccatttgttctagctttctttatgccaagtgtataaccatcttccccgcgtgcgaataacagaggatattttttcgatgagttccttatttaaacttttcttcttttggccgttttcagattcgttctcattgctgaataatagagaaacaaattagtttagtgatgtagtactaaactgtatagttgtaaagattgaaaaataaaatagaagatacctcattatgttatatctgttgttaacctcattttcagtatcaacaatatacagctgttgaaactttgctttagcaactgattttggcttcaaagcacctatgagatggtaattttcaccttgtattgcaaacatgttaggcccacgacccttaggaagacaatgatctactttaccccctatagatgtgaatgagaacagcatgttgtaagctctgatattttctctaaaatgcttagcgagttcatcatcgcttgtaagcaaataccacaaaaattctggcgattccttcagggaaggcaatacgatctgtccttgcatacaacatcctgaatatattggatttcttgaattcctcctcttgtttaaacgttccccataccaaaaaatagcaccacacttgtctgaaattgttggcgagttggagaatcgagtagagctctggatatttattctgtatggatgagttgttgatcgatatagtcctgtcgccttagtcactgaaaattcctcgatgattgtccagtgtcctatcttcacatacctctgtagtttgagtagatgttccttttttattcctgcttgaattttatttccctgaaaatagcataagaaaacgtgaatgcgagagttaaaaacaattaaagacaaccattaagattatagacaaattgtaaagcctaaaatacttacatcctcatctgctaacatcatttcataagacatcccagaacctttggtataatgattccacgcatggagaattttaacttgaatacaccaagaggttttgaacggtttcaagtttttgatagctgtgtatggactcacttcatccattttgtttggttttgcagtgagtaatgaattggtttatgagagaaggcacatagatatcgtgaaggtattcttactcacgtttatttataataagtgctgggtggattagatagatagagattttcgatttagatagagatcttcgatttgataagtgtgtttcgatttgttatatagaatattatttgttaagaggaagatataccaaaagaaataattgcaaacgtatctttgcgagaaatgcgtttaccataaattgttcaaaacaacaaaagatacgttttgcattttctcaaataacaatatattgttttgagtcgtcgagtgttttaattaatattcgtgataatatcctaacctttgcaacttctcaaacaacaatatattgttttgaagtcgacgagtgttttaattaatattcgtgatatctaatatagtatagtaagattatgcagattttgtgcaaaataaatatctctaaatattaattgataagtaaaactcaaaaataacattccttttgtcccaatatataaaatgttttaggctttttcttttgttacatgttgttctttcttttcaatttttatccataaatgcgacagagagaatatttcatttacaaataatttacagcttattaacatttactaaatctttacatatttttatgtgttattatattatttaaattacacaaatattaaatcaaaaatggaaaatagagactaagaaagaaatacgctaatcgattttaatgtcagatcattttctttaatttagtgacattgattttttttttttaaactttaaaactttttatcattattattatgatgtaagaaaaaagagtatgattgttgatttgttatttattatacataacacattatactgatttaaattaaaataaaaatgcaagcttcaatctttgggggtgtagctcatatggtagagcgctcgcttcgcatgcgagaggcacggggttcgattccccgcacctccattccatttaaataataaattttgtgacaatattttatatcagaaagttcaaccgtccgattgttttttttttctgttttcgggtgaaaaatcgaaaacagaaagttcagaaagttcaatattttatatcaaaaacatttactaaatctttacatatttttatgtgttattaaattaaccgaagcaatagatagaaccaaaaaaaatactatcattagagaccgttggtttcttcttccctctttcttagcctctcgtttctcatctccgagaaccaccaccgatgctcctccgtcttcttcgccggtgattttgtcttccgattgttatcaatg

SEQ ID NO: 34665 - DNA, 3000 bp, Unknown
  misc_feature (1)..( 3000): 2750-1469P.txt file - cDNA_ID_3081014; gDNA_ID_2910719; Annot_ID_193530
atatggtagagcgctcgcttcgcatgcgagaggcacggggttcgattccccgcacctccattccatttaaataataaattttgtgacaatattttatatcagaaagttcaaccgtccgattgttttttttttctgttttcgggtgaaaaatcgaaaacagaaagttcagaaagttcaatattttatatcaaaaacatttactaaatctttacatatttttatgtgttattaaattaaccgaagcaatagatagaaccaaaaaaaatactatcattagagaccgttggtttcttcttccctctttcttagcctctcgtttctcatctccgagaaccaccaccgatgctcctccgtcttcttcgccggtgattttgtcttccgattgttatcaatgagtcttcgtgtagtttcctccgttttctccggaatcaatcgaatccctaacctccacgagactcatactcttcttcgctctcatgtcttctctttcttcttcaaaccggcgaatatcggtagtatacggcgactggtcttatccccatcatatggagaccggagcagagatagtgttggctccgccgccgatgtttcgtcatctattctcgacgacgagcttctgagcagcgtatccgccgttagagatgccgatgaagcgctcgcgatgatttctgatcggttcgggtcaaatcgcggtggaatcgttgaacttgaagattgccgttcgattatctccgctgctgtcagtcgcggcaatgtggaccttgcgttgtcgatattctacaccatgcgagcgagtttcgatttaggtactctcatctcaactttactattaacccagagtaggagtttctgtgattgattaagcaaatttaggattgattgtttgttttcacaggtggaagtgacaatgatcgatggagttggtcaaggcctgatgttgaagtgtacacgatgttggttaatggtcttgctgcttccttaagggtttctgattctttaaggattatcagagatatttgccgtgttggtatctcccctgctgaggaggtaacactttgctatgataccttgaaattcgtttgaacttacttaagattcatgtaattagtttgtaagcatgattgctattgattttaggttccctttggtaaaattgtgagatgtccgagctgtttgattgccatagctgttgcacaaccacagcatggagttcaggtaatgatgatccaattcgatcttcaatgaatgctctacaaatcttatatggaataactggatgatttgctgtctatgttactagattgtatcttgcgctaattgccgttaccaatacgagcttttctctggtgacataactagcattgactcagaagagctcgggttagttctcttcagtatttctcttctttgtttcctagctctaggggaaaggtgatacagcttatgttgggtgtgagagcggtttttgtttgttaatttaaccttgaaaacaaattgagacttgtgtgtttgttgatactgggatattcactttctctaaggagctacatctgccgaacgcagcaaggacattcctctctgggaaaaagggctcagacttatccagataaagaagaacaaaatcacatcttcagtgcactctattgtggtaatcgccactgttaacacattctcatttcaaaataataacatttggtaaggcagatatagtaaccattgcattggatttcaggtacagactccttccggtacagcacgaacgcaccggtttgccactgagacagccgaactccctgcgcaagaaggagaaagagtgacaattgcatccgctgctccttctaatgtttacagacaagtgggacctttcaagtttatctccaaagctccaaacttttaccctggagaacctatgagcctcacaaaacacaaggatggacgagaatctatcttgctaaggcctcctagtaaagatggagataagatcttacaaccctcgtttctaataccccttcttgcaattttggctactggagatgctgcttctggtgttattgatcccagtttgcctcagttactctcagttgctactgttacatcactagcgataggagcaaccgtaaattcttttgtccttcctaagctaaatcaggtttatattctctatcacatgaactgcgtcaagtaaacatatgatagtctcttgggtatgaatctcataatcccttgcacggtttcagctccctgagcgaacagtagatgtggttggtatcaagcagcaacttttatctcaatatgatgtgctccagcgtcgcattagagatctaaaagaagcagttgagaaagaggtaccaagtctcatttatccataccttttgaaacccacaatatgtaatcaaaaacacttacaaaacttcgttgtatctatttaggtgtggatgttggctcgaatgtgccagctcgagaacaaaattttagcagtgggagagccagcttaccggtatgagcctctcagatcattggaacctcatcatctaagaaattgttaacagaactatgataacatgtgtatcttactcaaatatagtactcgaagaacaagagtaaagaaggtacgagaaagtctagagaactccataaagggaaagattgatctgatcgatagttatgctagagtaagaaaacgatacaaaaccaatttagatcttcaaaatgtcacttgatcttctgtttttttaacttttcagctcgatttctttaacgtttagatatcttcaatgattgagattgaggtggaaatggacagtgatgttcttgcagccgaggcagtgaacaatactgtaagttatttctaagagtttagttatgaacctgacatgttcgaatctgagagttgtgtgtaaaactccaaatgcttcacaggaaaacattgctcaacagatagagcagatcatggaacttgaaaaccttgaagaggtatagagttcgaaactcatttacatg

SEQ ID NO: 34666 - DNA, 3003 bp, Unknown
  misc_feature (1)..( 3003): 2750-1469P.txt file - cDNA_ID_3081082; gDNA_ID_2936552; Annot_ID_194093
acctaggacaagttatatagttataacaaatatttcaaacaggtatctctccagacatggagatttacaaaaactaaattgaagtacttagcactgatgatgatgattgatgactagtcactttccattgtaataatttgggtgaaacaaattgtcatagtttctactacacatactttgcttatattgttgttcaatgattatgatgaatattcttaattattgtttgagacttcattaatacataattttttttatcattttcagatttaggaaattgagatagcaaattcgaagagggttgttgctaaaatacgctggccttcaaatgacctgacctaaaagtttattttgttcctatagacgctaatggagttcgcgtctgagtagatatagtaaaggtaaatgatgcagcagtttggaggcattcttctaagtttaagtgtatggaagatgcgttcagtttcactatagcatggctaaaggccaaagtagtgctcgtctaagctgatgtaagatgcattttgtactttcttttgtgttgcatggttcaaacttttgttgagacttgatacttgaacgaatgaatcaatggttgttttaaaatacttattgtaatagtcagatgatatgtactgtattttatgtagatgtttctattaaattctttttatatattgaaatttttgcaaaagcatatctacgatcaatagaaacaaaaatcataaatatatagcataaaaataaattttacatagaacatggccaaatatcatagctacataatacaaaaattataatagaaatattgttatactggtagtatattattaatttattatcaattttttcatgagttttagattttttttaactagtccatttggattagatgaaagatgtaaaagaagtaatgtattaatatatatatatatatatatatatatatatatatgtttagctattgcagtttaaaataaatatcttattttaactctatcagactatgtctgatttcagaactcatacatcgactagcgaccagcgacatcatacattgttcgtttgtctgtcgctgtattcagcgacctattacagcgacaatcgctaaaaactgtcgatgtgttgttcgtttgactgtcgctataaatagtcgctatatttttaaaatatttaattatttttcgtgctaatgtatattttaaaatcaaaatgtaaattatatatatcatacaccatgcgaaaaaataaattaatatatttatttattttagtattatcaaatttaatttacgttatttgaatttatttttttttttaataagaattattttaacttaattagaactcaaaccccacgtgatatcgcaaagaaatatattataaatttgtttatataataatttctttacaacaaatctaactcaaaatgatgcatattataaatttttgtagttatttaagagtatatatataactaaccggaaaaaaataaccgtaaatattttgacagaaaattacaatataggaaagttgcaataaatgacacaagcgagaaaaacaaccgtcaatatttttttacggaaaattgcgattaaaagacacaacctttcaaagtacaaaaggcatttatttaagtttaatttaatttaattctgtttaatttaattatttttaatttatattttttgatcgataagttgttcgtttgcatgtcgctggattcagcgaccaaaagcagcgactaatcgctaaaaattttaacgacaaaaaattacggtcgctggtccctggcgactgtcgctacttttgatcgctgaaccagcgacaagcaaacgaacaacttttgatcgctgtcgctggtttcagtcgccagcgacaggcaaaagaacaggaccttaaacatcagtgaccttctttaagtatacggaaggtataaaatttaagtataaaattcgttacttacattaaaatggttcgttacttacattaaaatggtcaaaactcatcctctttacaatgtaagaactaacacatcgaatgaacaaacaataccgaaaaaagtttatgggcccatctaggatcattagttgggcctatattgtacctaaactttaactattcaaattagattaaacaaatcaaaaacaaattcagaaattaaataaaaattttgattattgttctaaggagaggaaaaaaaggctcattgtttcttcatacgtttcgttcccaaaaaattgacacagaagagagaaaaccaaattaacaaaaaacaatttctcgcctctactcgcaaaaaccctaatttcatcatcttcctatctgattccaattatttcttctacaagtttccttcttcttataatccatcgtttcttccttctatcgcgtttcacaaagcttgtcgtttttctctccttgtgggttggttaggccaatttgtttcgattgagcgattgaatctacgagacgcaacaatctctttctgggttagggtttcttcacataaccttttgtggtttcttgttttgggcggagtttggtggtttctggaaccctagatagagaggagccttagggtggttaatattggcactggtgatttagatatagagaaagagatttgagagatatatgtgtaggtgttagggttttcattacttgtgaattgtggctgtggcattgaatagaggtgtttggggttttgtccctttggtaaaggatgagtgttctctagtgtgaagctaaattggtcttctaagccatctgtgtgagggatggaagtgtagaaggtgctgaaacaactcatttggattagggattggaattggattcgtcttgtggcctttaccgtggtagggatttagatggtagagaaagctagggtagattaaattttttgtaagaggagctttctctgttgttgttggtggggggtgaagaaggttagagagagtgtgtgttctttcttgtatctgatgaggtacagctttcctaatg

SEQ ID NO: 34667 - DNA, 1153 bp, Unknown
  misc_feature (1)..( 1153): 2750-1469P.txt file - cDNA_ID_3081082; gDNA_ID_2910729; Annot_ID_193593
tcgctgtcgctggtttcagtcgccagcgacaggcaaaagaacaggaccttaaacatcagtgaccttctttaagtatacggaaggtataaaatttaagtataaaattcgttacttacattaaaatggttcgttacttacattaaaatggtcaaaactcatcctctttacaatgtaagaactaacacatcgaatgaacaaacaataccgaaaaaagtttatgggcccatctaggatcattagttgggcctatattgtacctaaactttaactattcaaattagattaaacaaatcaaaaacaaattcagaaattaaataaaaattttgattattgttctaaggagaggaaaaaaaggctcattgtttcttcatacgtttcgttcccaaaaaattgacacagaagagagaaaaccaaattaacaaaaaacaatttctcgcctctactcgcaaaaaccctaatttcatcatcttcctatctgattccaattatttcttctacaagtttccttcttcttataatccatcgtttcttccttctatcgcgtttcacaaagcttgtcgtttttctctccttgtgggttggttaggccaatttgtttcgattgagcgattgaatctacgagacgcaacaatctctttctgggttagggtttcttcacataaccttttgtggtttcttgttttgggcggagtttggtggtttctggaaccctagatagagaggagccttagggtggttaatattggcactggtgatttagatatagagaaagagatttgagagatatatgtgtaggtgttagggttttcattacttgtgaattgtggctgtggcattgaatagaggtgtttggggttttgtccctttggtaaaggatgagtgttctctagtgtgaagctaaattggtcttctaagccatctgtgtgagggatggaagtgtagaaggtgctgaaacaactcatttggattagggattggaattggattcgtcttgtggcctttaccgtggtagggatttagatggtagagaaagctagggtagattaaattttttgtaagaggagctttctctgttgttgttggtggggggtgaagaaggttagagagagtgtgtgttctttcttgtatctgatgaggtacagctttcctaatg

SEQ ID NO: 34668 - DNA, 2561 bp, Unknown
  misc_feature (1)..( 2561): 2750-1469P.txt file - cDNA_ID_3081107; gDNA_ID_2910737; Annot_ID_193643
acccaaatatcctcaccgtataccatcaacgtgcctagcaacttgtgttggcatatccggctcgtatctatcttctaaaccggacacaaattgatattcatatgaacaaaccggaccaagcgaattaaaccggttctaatctataagccctagattcccaaatcaaattttcacttttgctttcttcaacctgtcgacaacactcccgaatttttctctggtaatgtttttattagcttgatttttcgtcggaattgataattgtggaagtatgtactaataaagtttgatactttaacttgttctggggattgaatccgttatgatatgaatttctggaattttagtttttatatgtgaatctaaagcttattcgtttgttatgtgttgatgttcttatgcacctaaagcttgaattgaaatagtcttgtattgattccatttttgtaggcagtgtgtttaaaaaccaatggcgctagttgtgatttgtgggcaaccttgtagtggtaagtcaatagctgcagtaactttagctgaaacattgaaagagtctgaaacgaaacagagtgttaggatcatcgatgaggcttcgtttcatctagaccgcaaccaaaactatgctaacatgcctgctgagaagaatctgagaggaaagcttaggtcagatgttgatagatcagtttcgacaggcgagattgttattgtagattccttgaatagtatcaaaggttacagatatgagctatggtgtatcgctcgtgctgctgggattaggtattgtgttgtttattgtgatgtagatgaagctcattgtaggcaatggaataaggaacggagtgatagaggtgaagatggatatgacgatggtatattcgaagatctggttagaagatttgagaaacctgagagaagaaaccgatgggattcacctctctttgagctatacccttctcgtgaagttatagacaaatcctctcctgtgattttagaggctgtgacttatctaaccaagactgttgactccaaaacccaagatgtgagaattctccaaccaagtattgccactcaggctgctagattttcagaagcaaattctctttacgagttggacagagcgacacaagaaatcatcaacgcgattgtggaacaacaatcactgggcgcggctataagcagagttactcttggcaatgaactacctccgattgaaatctgcagaccgattgggctaccggagctaaggaggcttcgaagaacgtttgttaaattgatgggtcaatcgagtctaagcggtccaccgttaccaactgatgcagacagtgcaaagagacgttttgtggattacttgaacagagagtttggaggtaataacgcttgaaatttgttgggtgaaaaacatcttatttcttaaaggtttggttatgtattttcttaactcaagacttgttcttcttcatcgaaattcttttttggggctaaattgatgtgttataataggcccgttataataatgcaaacatattttggggctatagtatattttcttgttcttcttttttggttgtcgtattttcttgtttttctaacattgaaatttcaaaagacaacgacacgtttgacatttttggatgtatattaatttataataaatatgtcggcaaataaaaaattattcatttacaacaaatatgctttgatttgaaaataaccactacggtaattaaaagaaaacatacagcaacagttcttatctttgctaatcatattcttaattattttaaacagcttcattaatcgctaatgctttatttttgtcgacattcgttcatttaataattaatgaatgcagcttacttttattcatacaaataatataaaatcataaaacgacgaagtaagagacacagagcagaaaaagcttacactcatatcactgagctgctttggcttcgccaatcgccattgttgtttcgaaatataattactgcttctcaaaacccttttgttggtttttgttttcgttgtcgatcattgcttcaatctctttcctttcgatctgaatcatctgatctctgatcttcttcgagatctcactaataggattttgagattgagttttgtccacagaatcacgaggttcgttcttggctcgattctcttacgataactatacgttgacgtagagaaaagtaattttcctttttgcatttcattgttcaaaatactgaaaagtgtaaaaagttttgatttttgatctgagaaatttggttgcaggttttgttgatttggtgtaccgtaattggcaattacgagttagttatggatttggcgttcagtgactaatggtctttcctgatttggaatattcttgaagttttgggtaatgattcaatgtgaaacaaatgttgcctatacatgagaataaatggcttgattaggtaaatgttagttggagttttaggtaaatgagaagccttttagggacagaaagaggagttggttgttgtatagtgtagagatttgcttacaataaaagctcttgttttgaacctgggaccatg

SEQ ID NO: 34669 - DNA, 3003 bp, Unknown
  misc_feature (1)..( 3003): 2750-1469P.txt file - cDNA_ID_3081113; gDNA_ID_2910737; Annot_ID_193641
agtgtactgcagacagagaagctttagtcggcttaatccccttttccaacatctctttcacaagtttgactgccttaagtacaaatccattcctacaacaaccagctattaacgctgtgtaaggcacaacatcaggctttaccccactttcaatcattcgatcaaagatcatttttgcctctttaagatatcccatcttacagcaacaagctattagtgctgtgtaaggcgcagcatcaggatccaccccactctcgatcatttgatcaaaaattcttttcgcctctccaagatccccaatcttgcactgccaatcaatcaaaaccgtgtagtagaaaacgtctggtttaacatcaaaggctttcatttcccttgaaagattccgttctggtttgtttttgagtaaaactgtgtatgttaccacatcaggtacgatttctctcctcttcatgtctttaaaaagagcatagactttcttcaggtcgtttaaatggcaatatctgttaatcatgattgtgtagtagacgacgtctggaataacatcaaaggcttccatttccctcttcatatccaactctggatcgctattgagtaaaactgagtatgttaccacatcaggtttgacatctctcctcttcatgtcttcaaaaagagcataggcttgcttcggctcgtttaaccggcaataggtgttaatcatgattgtataagtgaacaaatcagggacaatctttttagtaactaaaatttcaaaaaactcccgggcttttctcacattattaactcgacaccaagcaccaattaactttccatacatgctcttctcaggttcgactccaagtttccacattctatccagtaagtcttgagctttgctgatataatctttctcggcgcaaagactagtgaatagagtaaaatacacactcttgggcagaggaaattccagtctaatgaatcgttcaaaggcatgatcaagacagccagcggcacaaaaacccttcaccatacttgcatcgttttcccgagatttatgttccaaactctcatagaaagcttcagccttgtctagttcacctgcatcaatcaggccttcaatgaccatgttgtgtgtaacataagtgggttttacaccccgattttccatcattttcagagtttcgaatgcctcttgtgcaagaccattcgtagccaatccaccagcaagtacgttatatataacaatatcaggtgttttacctgttccgtccatttcaatcatcaaatcaaaggcatcagaacatttaccttgtagacagcaaccccctatcaaagtcgtgtagttgatgacatcaggagctattcctttacccgtcatttctctgaacaactcaatagcttcttctactttgccaagctttcccaaagcatcaaatgcaacattgtagcaaactctatcaagagaaatgttcgtctctctaaactctttaaatagatcataagcttccgagaaatttcccatctgacaatagcattgaaggattgagcttacaatcacacagtttattctttttcttttcttcaacattttgttaaaaacatccacagctttaggtatattcatattcttgcgatgtccctcaattatcgccgagtaaacatagacatccggatcaatcccatgtttctccatgtcaagaacaacactttcagcgtcttctattctcatctcataacataaaccacgcaccactttgcgatatgcaattccaagatcactcttatccaccagaatatttgcatccctcaatggttggagtagaaaataagctatatctgtcatctgattcaaacacagtccttcaataaaattcaaataaaatacgcaagggttcctagtctctgagattaacagtctactaagaagcttctctaattcttccttatcatcattcctccacaatgcttgaaccacaagaacataagtatgtgcatctgcatccaacccgagacgctctatttcccagaaaaaaccaaccaccatatcacttctcccagatgcaatcatacggctgatcaaaaaattcaatgcctttatatccggagcacgtcctagagaatagtaagctcggaagaaaatatcaatagcttcgtcaaacatatcaagattagcataggctttaaccaatgcagtggagactcgaatcaacaacaccaatgactgttccatttctccaatggcctttaacaaatccattacactgaaaccgcgtccctcatctcctcttctaacgagttcaaatagaaaagtatccaatttcttatccaaaccccaaccacaaacgattctgataacagttgcataagcttggacactaggcaaagtcacatttccttcaattcgtttgagaaacgataaagcaagataaggatcatctttcatactattcaacacacgaagaaccccaatgtcatttaactccaatgctttataatcaaaagtaccttcttttacttgctcagagtgtgagattgtaaggtttgtccgggcaagtgcaggaaccacgtagaatcgcgaagagggtccttgtcgaatcaatcctctcacatgtgagagtaatggaatcggaaaaacccgcatgaaatattttccgatcttgtggcagccggaaaaaaaaaaactagcagagactaattgagaagagattttccgaccaagagagaactgaagattcagggttttactttacagagaaggacatagaaatcgacccgaaccaattccaaattagaactcgaaccgaaaataacattgtaattaaattataccgaatctaaccgaaatattcgaaccggataacggaagtaaaatgattttaatggtacggccgtaaaatgtttgggccaatacggcccattcgttatgactttttttattattattacagaatcgtttccattaaacccttaaaagtttcagaatcgaactcgtctattctccgccggtgtgccgtcgccgatatg

SEQ ID NO: 34670 - DNA, 42 bp, Unknown
  misc_feature (1)..( 42): 2750-1469P.txt file - cDNA_ID_3081121; gDNA_ID_2910737; Annot_ID_193639
gaattcgattaatttattgtttgttaatgctattaggtcatg

SEQ ID NO: 34671 - DNA, 3003 bp, Unknown
  misc_feature (1)..( 3003): 2750-1469P.txt file - cDNA_ID_3081128; gDNA_ID_2910738; Annot_ID_193652
atgtgattcttatctgccttttatatatagagagagaaaaagtgggcctgtggtattgtggatcgatgttgtgtgttttagaatccagtgggactcttaaatctttgggtagcaggcagcaagtggtttttgtctgacttttgtgtcgcatttatatctcgcccccaaaaccagctgttccacctggcttaggattcttcttctctgcttaattttggtattaacaaacataaaccataaaatttaatattcaaaatattaattttacttgaaatacgatctacaaagacattaaattttatggagattcatgtattaatttttcgtatgcttattattagaaagcaaaaaccatagtagtaacatattctttcatgcaataaagggtggccaacatagtggttctttgttgaaaatgagataaaataaaaacatcaagaaataccatgggaattaattttaattaggtagtagttgaaatcaaaaccatcaaatcacattaaattgaattacattattgaatataaaccccttttatggctccatgtgtgggcaatgccataaacatacatgttgactttttgtttataaacatacatatttcgggtcaaccaaattaattgtttaagcataaggcctttgattttcacagtccaaattcggcccagttgctactttaaacagcccagtatatctctgaaaaaacccgattcggtcattgacccgtccgtctccaggaatcccacactctaaaccgccatttattatatttgtggttaaaccaaacccgccggtccggttagctgccaaatccgccgcctaggtcggtattttccgatcatgacgtcatggcacgaaggtttgggactctgtggcgtcatccaaaaccaaagtgctgtttgaaaagctatcactgaattatttgacaccgtttctggattccttagaccgtcgaatcctaaggctcgaccggccggtccgtaattgtagttccttatatcccaaaaagtaaaatgacaattagaaaataatataattacgatgtggaatcttgcatggtatagttttatacaaatcgaaaactataaatgatagaattcaaaatatatatttgaatgaagatacggaccactattagtgaaaatgaacctaccacgatagttgaattggacctcttccttgataagtcttgttagggaaacaaggccactgtgtatcagaagaatcacaataagtgctttgtggactcacttcttctttaaagcataatccccaagcgtacggtccgtctggtgccgttgcccatcctccggtcgtctcgtgtgaaatctgagccaaaaatgcagccacttcgagtcgttgtgtcacggggcttcctacgctcccgaactcggaaaccgcctcgtcgcttggacaaatgattcgtaagtgtagaaaccatttgcgggacaagcggtattgtccttgtggatgaaaattttgttgtagaggtctcttggcactaatctctcgattgaggtggcttcggtttgggcggaagatagtaaataagagattgagaggaagaagcataagaggagaaaagagtgttgttgagccatttttagagagggatcgatcttgatggttttggtgtaagaagatgagtttgttatatagatgtgtaaatgatcaacgcgttgacttttgactttaacggtggacttttttttcattggtctgaaggttcgtttatacatgctctcatgtgttttcattcatcaaacgatgcttctttcacgttaagtgaaactttttctatagtttttggtataatttttcatatagtttacaccttaattagattagatatcaagacaacaacaaaaagcgaatacgtgaaggggaaaaaaacaacaaaagcaattattttttattgtagagaaaaaaacaaataacggcttttcactaaaatgacattttttttagctgacattacttaatatgaaaccgagatcatacaaaataaaaacaacttatcaatataatcattgaatgatatagatagtgtgtattacgattaaaatgatagtggatgacgatattcttattcggtcgacgtagcagtattaccgaaaaagactgatttcaatttttaatgcttgaagactcattcttgctatggaaaatctcattattttatcttgatggaagactcattcgtattttttattaatgtggtggaatctacacaaaaaattctcgttcggcggctaactaattggtaaagttgtatatacattttattatatgttcctatttcagagccgaaacaaattacaacactttaagttgtgcaaaagttgacaaaaatgttttttgacaataaactcgtttctttttctgatttctcatccaaaaataaaaactaaatttcggttccttactatcatatcaactaagtcttccgtttttatgtgttttaggtccattccaaatacatgattaaacttttttaaaaaatcacaatctctatgaaactttttaaattcttctttttaataagttgtatcaacaatgtacagaaaaaatcagaaaattagtataaaatttaaccttttaccaaaaaaaaaaaaatcacaatctctatgaaacaaatctcatctttcgaagaagataatgttacaaaagacattcaaacagaaatatttgtaatccttctaaaaaactgacattcattgtaatttcttattactgtggatttattcatattctgtcgattagtgactagtgtttacataattatgaaatacgtgactaaaaataatatagttaagagagactacacaaaagtacactaaagtaaaaaaacgacaccaagtcttatgtactgtaaactgcacgccgttttcagctatcttaaacgacataaagttttgccttaaaccctaccatcgtcactcactctgtcctcgataggtttagagaagaaatagattttgatcgatccttacaacaaaaatg

SEQ ID NO: 34672 - DNA, 396 bp, Unknown
  misc_feature (1)..( 396): 2750-1469P.txt file - cDNA_ID_3081128; gDNA_ID_1591956; Annot_ID_151751
aaaaaaaaatcacaatctctatgaaacaaatctcatctttcgaagaagataatgttacaaaagacattcaaacagaaatatttgtaatccttctaaaaaactgacattcattgtaatttcttattactgtggatttattcatattctgtcgattagtgactagtgtttacataattatgaaatacgtgactaaaaataatatagttaagagagactacacaaaagtacactaaagtaaaaaaacgacaccaagtcttatgtactgtaaactgcacgccgttttcagctatcttaaacgacataaagttttgccttaaaccctaccatcgtcactcactctgtcctcgataggtttagagaagaaatagattttgatcgatccttacaacaaaaatg

SEQ ID NO: 34673 - DNA, 3000 bp, Unknown
  misc_feature (1)..( 3000): 2750-1469P.txt file - cDNA_ID_3081132; gDNA_ID_2910738; Annot_ID_193651
tcatagccaaatccgctttatcgttctccaacagatggatcatcagaagctgtctcgctttggagaaaggacctttagactttttcatggcaccatcaagaatcttctctgcttcttcatacatattccctttcaaatacgtgttaatcgcgatattagccagcctcatatcgtaagcccagcatttcgattcccactctgtgaaaatcttcttaatcccatctaagtcgcctagtttactcatcgcttgtaacatgactagatagctcaagttgttgacctcaggacgagccttcttcagcgattcccaaaccctataaacctcaggacctttcgagattccagcgtacaaactcatgagaaaatggtgggaatcacggttgttaggattcattttctcctccatagatttcagtgcagaatccgccttctcgtaaagaccagctttagtgtagattgcagccagattagagaaagtattccaagtggttttagcttcactgtctttccccatctcatctataatcttctctaatccatctaagtcattcaaacttccacagctctgcatccatatagagtaagtgacaccacaaggagatatacccctctgtttcatcgcatcaaccaacacaggtaccttctccggttgactcaaccgcatgtacatagacatcatgttattaaacggtaacgaattgttaacaaagttaagctcatccattatctcaaaatgagcctttgctttctcttcctcaagttcaacacagtaacagttcatgagcgccccataagtcgactgatgattctttgcagaaggatctaagttgttaaagtagttctcagctgcttctaaacctttagtctttccaattagatccaaacaaattgcatgatcagacacagaaaatgtcattttcctcttctccatccaatcaaagatctgaaatttcatcaacaatggactcaatcaaactctaacaaacttaaaaatgccatttttaatctctatccattcgaaaaaagtgaaatttcattcaacaacgagcatgaccctaattacaccctaaaactagtgaaatcactaaaccctaaatctaaagccagcccctttaagagtaattttccatagataatgaaatatctccaatttcaatgttaaaatcagatacttgcttaagagatatgaagagggacctcaaaagcgtgttgaggtcgacggaatttgcgaagggttttagcacagcgaaagagatcgtcttttctgacagtaataccctccatgatgaactgatttaacgtctctgccactgttcctcccgtcacactaagcatagaaagtttcttgtacaactctcgctgccttgaagccaccgtcggagcagcaacagaggttctgacgccattctccgccgccggagaagaaacagaggcttcgacgacattcgccgccgctggagaagaaacagaggcttcgacgatgccagtcgccgacgccggagcaaataccgttgcacagaacctcttgccgaggcgagaaccggaagcaatcagattacggaaattcatttttgttgtaaggatcgatcaaaatctatttcttctctaaacctatcgaggacagagtgagtgacgatggtagggtttaaggcaaaactttatgtcgtttaagatagctgaaaacggcgtgcagtttacagtacataagacttggtgtcgtttttttactttagtgtacttttgtgtagtctctcttaactatattatttttagtcacgtatttcataattatgtaaacactagtcactaatcgacagaatatgaataaatccacagtaataagaaattacaatgaatgtcagttttttagaaggattacaaatatttctgtttgaatgtcttttgtaacattatcttcttcgaaagatgagatttgtttcatagagattgtgatttttttttttttggtaaaaggttaaattttatactaattttctgattttttctgtacattgttgatacaacttattaaaaagaagaatttaaaaagtttcatagagattgtgattttttaaaaaagtttaatcatgtatttggaatggacctaaaacacataaaaacggaagacttagttgatatgatagtaaggaaccgaaatttagtttttatttttggatgagaaatcagaaaaagaaacgagtttattgtcaaaaaacatttttgtcaacttttgcacaacttaaagtgttgtaatttgtttcggctctgaaataggaacatataataaaatgtatatacaactttaccaattagttagccgccgaacgagaattttttgtgtagattccaccacattaataaaaaatacgaatgagtcttccatcaagataaaataatgagattttccatagcaagaatgagtcttcaagcattaaaaattgaaatcagtctttttcggtaatactgctacgtcgaccgaataagaatatcgtcatccactatcattttaatcgtaatacacactatctatatcattcaatgattatattgataagttgtttttattttgtatgatctcggtttcatattaagtaatgtcagctaaaaaaaatgtcattttagtgaaaagccgttatttgtttttttctctacaataaaaaataattgcttttgttgtttttttccccttcacgtattcgctttttgttgttgtcttgatatctaatctaattaaggtgtaaactatatgaaaaattataccaaaaactatagaaaaagtttcacttaacgtgaaagaagcatcgtttgatgaatgaaaacacatgagagcatgtataaacgaaccttcagaccaatgaaaaaaaagtccaccgttaaagtcaaaagtcaacgcgttgatcatttacacatctatataacaaactcatcttcttacaccaaaaccatcaagatcgatccctctctaaaaatggctcaacaacactcttttctcctcttatg

SEQ ID NO: 34674 - DNA, 3003 bp, Unknown
  misc_feature (1)..( 3003): 2750-1469P.txt file - cDNA_ID_3081137; gDNA_ID_2910739; Annot_ID_193661
ggctccatagtagttataattatttgaaaaattcagattaaacacacacatacgttacaaactaacataataattgaacagacttggtcaattagtggatactgtgcatgaacacagacaatactttgagacgtcgtcaaagaatcaaaattggagacgtcaacgagtaaagatttgacttgttattcctcttcgtcatttttaaaatgacaagttgtaaataaaaagcaggaatcatggggtcctcactttccgaacattcctctgtctcatgtcttttctttttctgttattggtatttatcgtaataataataataatttgaaaatctttcagaaaaaataagaacaacaacccgtctctctgtcaattgttgttgagtgtgttaataaattccacgtgttgtttctcttttattagctcggcgacgaatgattacatacgcacggttagagatttggcatgtgagatcattgatctgacgatcgagaatttatggggacagaagtctagcgaagtgagtgagctgatcagagacgttcgtagcgattcgatcctacggttgaatcactatccaccagcaccgtacgcgttaagtggcgttggtcaaataggtttcggagaacattctgaccctcagatcttgacggtgttaagatccaacgacgtagatggacttgagatttgctcacgtgacggcttgtggatcccaatcccatctgaccctacatgcttcttcgtattggtcggtgactgccttcaggtactaaccacattttgtttcgtaaagacttacaaaatagttttcatcaattaattaattaatgaaataatctttgaaaataggcattgacgaatgggagattcactagcgtgaggcatagggttttagcaaacacagcaaagaagccacgtatgtcggcgatgtactttgcagctccaccgttagaggcgaaaatatcaccgttgccaaaaatggtgtcgccggaaaatccaagacgttataattcattcacatggggtgactacaaaaaagctacatactctctccgtttagatgtccctcgtctcgagtttttcaagactttatagattatattcataccattgaaagctagattttttattttttttttgcttgttgaaaaagaaaatatgattgttggattgttacaaatatataccatgtgaaatgtatagatttagatgaacaaaaagaaaaagaaaattgagttttggtcatttactttgtaatttactaatttcacatgtgaatcagtggatcattgcaatttctaaagaaaagctctaaaacattccagtaagagaaattataccttttttttcttcaactacaagtctacaagtcatgcatcatcagtacatcacaatcataaaaaacgacttatgataaaaataaaaataaacttgagcttctgatcggtagaaactatgatccatgaaacgcgtccgatcacaatggactctttggtccactgcagttgtactctcgatcataattacacgaattaaaacctctttatacaaaatcggctattacttatctaggtatgcttgatttcatttgaaggttttataaaaggttgcaggggacaagtccaaataatatgaaccacatctgaccctaactataaaaattaatccacaatcgattataattattaaaaaaaactgtatctaaagcatacgccaatccgttaaaagtaaacaaaatctttatgcaaaccttatagaagttcgaaaacaacaacataaataatttctgatcataatcaaagaatcagaaaaaccataactccaaacacgaacagcttcatcaccgaaaagctttctactgccacagccgctccatagtaattttcaatagggtacaagtctcccggcggatatgtgaatacgtaattaggtggaggtggaggtggcggtggcggcagaggcgatggtggacaggaagatttcttcgggggtggtggtgacggaggaggaggggagggtgtacaagaaggaggtggcggagacggaggcggaggcggttgattttggagacaaggtatgcagttaacgtcaacttcggctgaagaatcttcggcgttgattatgatcggagatgcgaggatcacgatagccatgaggattgtggccgcaagatccgtcgatcggcgagttttaggcgacatgttgtaacaatgttttgggcttagacttgtgtatataaaaagatgatcaaacttatggaatgtatattagtgaagttatttgtggaagattattacagagagatccatcacaataaatgaaataatttcgtaataacatcggagatatggaaatcttaaatgacagcagatttgtccaaaattagatacatgtaataaacacgttaaatttaagtatgaaatgacaatattccttgtatactctaattttcatttgggctttattgggccaaataatatgggcttacaattaaaaattcgactgaacggatgtgaataatttttttttgaaagaaccgactatctttattcttaccagaccacaaagacaagtcgttgtttgacttgttgactttttttttaatccacaagtttttttttttttgttgcgtcagattttttgtttgttttccagtgacgtctttgatctccctcccgccgacgacacaagcacgccgtctggtttacctgtaagtcttctattctcttcttttcctttcgcgtgcttcctctttgataggttacattctttaatcgatcatggcatcgttcttggcctctgattcgattacgctcgggtgattttttttttttcccccgattattgatctcgccggaggttgcggaagggagaaattgggtttcaaattttcgaaattttcaagtaatgtaatctgggttcgtgtttattgtgcagataagtgtttttgtgtggtgtctgtgtctcactgtgtcgatagattaaaataatttctcttcggccatg

SEQ ID NO: 34675 - DNA, 3003 bp, Unknown
  misc_feature (1)..( 3003): 2750-1469P.txt file - cDNA_ID_3081142; gDNA_ID_2910739; Annot_ID_193659
cctaattattaaccttaaaagacttctcggcttttgtgagacatgacaatatcaatgtacaggtaacattgagccgaaacttgctattgttcttgtctcacttcttaatataactttagcccaaaatatttgtttatgcttgatgataattcttttttttttaagtaggcaaagaaaacgttaacgactaattacttttacaacccatgaaaaagggattttttttttttaaaagctaaaaagagagggataacttttatatttttaatttatacacaagtaaaatgcatttctaatttttttttgttccataagttaatttgccattccatgacttttcccttttagttaactaatttactaacaaaaagaaggaaaaagagactttcgaacagtattattctttagttcaaattcatatataatgatcttattttattctcccccccccccccccccaaaattataacacaaggccgaacacaaagggtggacttgccaacatgcctttttgtatcaaagtttaattaaaaaaacacatataaaaaaaatagggaggaaaaagcgtttcaacgaccaaagaaattccaacggccgttttgctcatcccattcctatgcatgtgccttcccatttgctttgcttttttgtagtttgtgtcgccggttctttgcatgccacagaacttaatagttttatcataaactaaaaatttttgttgaatactctgcacgtaattatatttcatgttccgacattagcccaaattacggtaaaacatacatgcaggttcatcttaagataatgtattgactatgttaatattagaatatacagaatataatatgcgtttaaactcatagatccaaacctccatactagtaatattaatgaaattggtattttatcaatgctgaaattagtatctatgctacgttacattgtctaacaacgctgatacttcaaaattgaataccaagtaaactaaaataaaaacataaataaatgaaaaaaaaaaacagaaacctcagattggatgtcttggagtttggtgaccgactgtctactttagactcataattgatctaaaattgtgtatataagttcaagaagagacgtataaaatcataaattaatatcgaattgtttagcaaatatggtcaccaaaatttaaaatgataagagttaggttttgatataaccgatatgtatgtttcattcatggggataatgtcggctaatatgccagatgacatgttcattgatccatcctgtctccggtcaatttttctcccatacttatttttatattttctatctttaatatttagaggaattcaaatgaattgaaggtatatccattcatcaatttgttgttcaaatgttgtaacaaagaaacaaatgtgttgttcaaaatgtggattatcaattttgagtccactcaaattcaattaactgttatttttcaacaaaacacatttctgtattgatcaatcgaatatgttattgtccaaagtgcttataactagtataaaatataatataatgaatcttgcaaacatgaaaatatgcatcacttcaaaattcaacaattttgaactgaaaatcgactatacttttgaatgttaatttcgtaaaaaagtgggtaggtactaggtattggtagagaaagagttgagagaataataattgaaagaatatgggctatgaaaagagtctttttagttaaatcggacggctaatgggagccgtcaaggttgaccatttccactacgtgccgacatatcagccttacacatgccccatcctcctcacctttcccacttccttgtgactcttttccacgcgcctcttctagcatttgcttcttctttttatttgcctcttcatcagaaaaaatattataaatctaaacagttaaaatatctatctacgaaagacaaatcttgaaatgttttagtactgcattttgttggtcacaattaacaataataattgtgatgcatgttttgttagccagacacctaattagttctctctaacttcaaacagagaaagaagtattgtatttgtcaacgctgatacaaaactgacactttcaagtttaagtttgtcatatttcttttaccaaacttgaaactactgcatttttttttataacttgttcatttgaacaaataatatttttatttttttttgccaaacttgtcaatataatatctaagatcggactcctcctattgtcaatcttaatatatcacaacaataattgatctaacttatattgtatacttaattcattgaaataagaaatcaatattaaatatacgcgagtcttatgactaaccaaacacggtgatttaggcaataagtgctcaatctttcaattattttaagaattgaacatcaacatcatctactactttcctatcaccaaatttcaaactacccgattttaatagtaataactaggttaggcaagaatgttgacaataaaaaaaatgtataacacaatttttaagttttttttttttttaatcgtatcataaaaattcctagtttgaaaatgactagactgatataaacgtaattttaattttaaaataatttgcttgtacaacttaagatccaatttaatggagatagacatgcatgtcaaatttcattattagtagacaagagctttattcatcttggcaataattttggttttaaagaactcgaccgtccccattgatgacatgcccaccttacgcgatttgtaggatgagaagattactttaaattcccccatttgtcaaccgtatggaaaccgtagaatttaaaactaaatttcgaaaaaagtctttgaatttaaaatatttattttatccttccttctcttcccaattcccatacactatatatataagagctcgtcactcttctttcagattcaaaacctcctgatttcattctttactactaataatcattttttgaaaaaaataaaaaagggacatg

SEQ ID NO: 34676 - DNA, 2720 bp, Unknown
  misc_feature (1)..( 2720): 2750-1469P.txt file - cDNA_ID_3081144; gDNA_ID_2910739; Annot_ID_193658
aaaaggttgaaagcagccaagacgtcaccatcatctccatgcattaccattttctccatgataataacggctatattcttcgcctttctagtcttccaaggtacctttttacttattcccttttcaactcttaatgaaaaccaaaaaatgctactttggtcttcatatgaatttgtctctgaagaaagattctatatagttttagattcattgcttttaagatactctgatataacttgaaaactatattattagtctttgtatctcatcaggataaaaagagtttgttgtgttaagaacaaatctttttccgttttgcaggattctccacaggcagttcgagtatgaattcggacaaatcacctgcaccaacagtttcacctaacaaccaaatgatttcagttcagttctacaatgattttgctcccgttgagcaaaccgatcccagcccgaccacctcattaaggtaagaagaggaacaatttatatataactcattctcattgttaaatcaaagaagacactttctaaaaacaagtgctgatatgaacaatttcgttctttgatcgaatctctgtaaattcagatacacgaggaagcgaatttcgggtgcagaagaagaagactcgagagacgttactagatgagttctctgttttggtcttcttgacccaaactgttaactcatttggtcaaagttttgttcatagactaaaatttgtaaaaacgactgcgttttaaacaatgatgatgatatattgatatgtcactaaccgggccagtttttcaattattttgaaaataaaaagattgtgagcatcgtagtaattacggtatttaatgaagggaaaaatgatgtaaaacttgttgttgaccttacaaatataaaaaaacaattgtttttttcaatgcgaatctgaaaatgacttccataccaattggattctgcaacgtttatggtatataacaatatcaaacatttcaaaccctacacaaataaattctacatgtaaaagccacaattgttctactaaatatagaaaatttctttttgataagaaaatgaattgtatggctggtctatctgctaagtgttaccctgcgtgagatagtaatccgctaaatcatttttgtcgtatatgataagtatggaagtgtaatcaacacagtttataatgtcaagattagcaacttttgtttagtatatatctcttcaattgagtttttttcccagctaaactcaaaattgtattatctagcagggtggaaattttgtttctttaatcggttgacttactgataattccatcagcaacgatatgctttcgatcgtttgtagttgatattcttagattagatgttacggtggcaagagtcttgattgtgaggcttttattggatatacgaaatatcaattgagaatttgcatatttgactagagtttctaaataaaaggaaagcaaccaaaatggagaactttcgtcttcaagtttgaaatgattaatgaatttaattttgtcattaagatcgaaactttagtgtgaacatgtatacatacacacctaatcctttatttggtagtgattattttggagagtgcatatataaattaggtatacgtcgcacatcattgaatgttcgaaattttccaagacataacactaattcatttgaataatacattctctacgatttttagacatttcttgtacaatacggcccaaatttctcactttgtttcaaactgatatatgttttatcttttccctactttttcatatataaaattaaaatgtcctcaaacacctatttttattttcttactaatgtatgttcatttttgccttggctataattgtcttaattggtacgtcttaaacttcttcgtttcttaccttagtacgtcctctagcaactgaatggacttcatttattagaatctaatttaatgaaagtatttacaattttgaaataacaacactttgtgtatttcgaaagctagaatacaataacatgtaattttttgtcatcttataagaaaaataaccaatcgaagagaagaattcgcaatattaaacggatctcaggcagtatgatctcttagtcaactttatcttatattttattttttcaaatcgatgaatgacgttaatcaagtggctcgatctctcagcagccgagtaattggaaattgaacgtgctaaaactataagtctactactataaaaagacttgtatttgtatgattgtatattcataatatctggtagttaatttatcccttgtaaaaaacagatttaagttaacttaacaaactcttatttagattatttggtttcgatatctaattcacactaaaccgtaccaaaaaagaagaagccgactttaaattgaattattccttaagtcttctcacattttatctttgctagagacgcaatatttggaatagatcaagccgaactaaatatcgacgcgtacgtgtacttttcagatttaaacattcagatcattaattacaatcatgcaagctgtacgggaagaagtggaaccatcatcaatggcattcctcgtaaatatcaaacacgttcgaagggtatttacgtcatggtctcattatataactgtcagagccccttccgtttctctcgacatgcagagtctagattccagcgacaccatataatatagttattagaaaacgagaggtcaaaaccatg

SEQ ID NO: 34677 - DNA, 3003 bp, Unknown
  misc_feature (1)..( 3003): 2750-1469P.txt file - cDNA_ID_3081180; gDNA_ID_2910741; Annot_ID_193688
cacactcacatgaagaaatagctaactaaagaaaccacaaacaaacacaaaaatcctcttatagatcaaataacctatcgaatcatatacagaaggaaagagtattaattcagatggaaacactcccaagccccaactgatattccttgtaaacaaagaaaccatcaaaaaaccctagaccctcttaattaatcattctttcgagagaaaggcttgaagctccttctctatgtgttcttgagcagtttttttggccgcaagaaacggacgatagtgatcagtgagcatccataccatacatttggtcatcatcgcaaagactccaacgttggtagcttcatcagtgcaatcttcccagtcagtaaatggttccttgcaaccacctcctctcatgaacgctgaaaacacctctcctttctcttcttcttcccttacttcatttggggataccgattcccctggatctcgctaatcagttgacggcaagaatccttcatcatcagttttctcgcatcgagaaagggaagatagtaatcagaagtctctccatacacttctccaacatcgtataacacaaagatataggtccttatcttcttctcagctcctccacacaacctttaaaggccgtataatgtttccttggatgcaccttctttcataaacacttgtaatcgattttgccaaagacttcacgaatctcctactttctctggctagacttgttttttttttgagatttggtatcggaattctccggtttcagatccgtggatgacaattaatcagtgattatcatttcattaggtcagagaattacaatatatgtagggatatgataatttacaattaagtatttgataattgcaattttttaaaatattcgataattacagtttctttacgcatgtagggatgtagtcatgtagggatgcatcatgtctatataacataagacatattgggatgcatcagaatcatataacataaatagtttggaaccaaataaacgttgaacgaggcttttctcacaccatatatcttttcaaaacatactaacaagtcaaaaattgatatccatgtaacttgaaaatcatgcacagacaatgctacctttgaatggtcattaaaaaaagaagctaaacacacttcagatccaaccatatatgtgatcaaagccagtgataaaagtcgagtcattcttggcagctaacgactaaggtaagcaaagaatcatatggtcatgtatggaggctgataacagagatgaagttctgtaatgtttcacatctccctacaaattagaaacacgacatacatacataccaggcaaaactgggatctgtaaaaaaaactatcttcgaggagatatcaaccaaacagaacgtcatcgatcatgaatgaaagtgttaaaaacaaatgctagtgtatcttaagcacaaagtgagtcaacatagaagtaaacttgatctttagacaaactagaaaatgctggaaccagaagctatcactacaaaaggtctgaccttttctgtttcagaagcaacaaatcacattccaatgagaaatagcttagcaaaccacaaagaagacaagatttcttcactgaaccattaatgggtctcaacaaaagtcatgacctttaaagagcaaattctctctcgaatcatataaaaaggagtatgaattcagatgacctcaatcaatcaacttattaattagagaagaaacatgatcatcaatgggatcttataagttatgattctaacaacgaactttcctctgttcctagagaacaatttttatccccaaattccaatcttttgatattcccataaacaagaaaccataacaaaattacccttgagcttgcttcttcgcagctacctcctcttccgagatcttctcttcttcttccttcttcttctcagcttcaagctccttcttaacctctgcttcagcagctttctccgcagcgagaatgggctgatagtaatcggaatgttcatccatacacttcttcaacatcgaagtgacttccatacaattagtaacaatatcttccttgttcttctcagctgcttcaacacactcttcccaagcaacaaacgaatctttgcaaccacctcctttcataaacaagcaaaacccacactctccttcctcttcaccatctgcgtctcctcctcctccttcttctggtttttcatccgattcggaatcttctgggtctctccaaacagttgatgaatctccgagttcctcagatggagctggagtcgacggagacgcatctccgagtttctcagatttagctggaggagcttcttcgttgttttgagatttggggtcggaaaaagtctctgtttttggatctgtggatgatgtaattcccatttttctctcaggagagagtgagatcggatcttatggaaattggaggattcaggaggagaaaaagatgtctctttttaagggttttaaggttctctctcggtgccgccgccgattctctttacaagccagagagaaatgatcaatcgaaacgtctttatgttaaaacccctcaaaaacctttctattgaaccggatattctaaaccggaccaaaccgaacttaaacctttgttaaaccgtaagaatttaaccaaagtgaatatgataaaacaacaacaaaagaatgatctgtccacaagacgattcaagaataatgtattgttaagatttcaacatcaatgtttgttgctaattaaacacaagtctcctatttgctacaaatcgaatatagacaccaacatcattcgttttatagtaataaaaggaagataaatatagggagtaatcattagattaatattacagtcgctttcagatttcgtcaaatttcacaggcagacaagtttctttgacttggtcactataagagttgtaaactctttgataaataattgaatacagcaattatttcaaatctccggtgaagtttttctgggctctaagtatg

SEQ ID NO: 34678 - DNA, 3003 bp, Unknown; identical to SEQ ID NO: 20859
  misc_feature (1)..( 3003): 2750-1469P.txt file - cDNA_ID_3081188; gDNA_ID_2910741; Annot_ID_193686

SEQ ID NO: 34679 - DNA, 3003 bp, Unknown
  misc_feature (1)..( 3003): 2750-1469P.txt file - cDNA_ID_3081192; gDNA_ID_2910741; Annot_ID_193684
atgctgggacgcagacatgaaccagagaccgtcgtttctggacattctcaagagacttgaaaagatcaaggaaactctaccatcagatcaccattggggcttattcacttcataatacacaaaatccatttttaagcgcaaaaacaaccagaaacaagaaagtatcattctctgtttgccttattaatccctgtttcatttcttttgtaaagattgtttctttttcatcttttcatttgctttaaaagagtgtgagatagaaagcttttattgttgttacatggattggattgagtttgcaggttaatgagaagttcatatcatatcagacaggataaaatgtctgtttccgaaaaattcagtaacaaaatgaaaaatgagttcagtagtgtatataaagctatagtcatagggttttcaatacaatctctgccctcaggagatggtaatggttttcagataagcttctttttctggaagaaagtcttcaagtgccaaaactgaagacctgcgaccgataaacaaactgcaagcgacacgaaactcaaccatgccatcttcgaatttgtcgctatgttcagattgtgcatttcttcttccctgtaatataccaaatgaagaagggttttgagttttgattcactctcatcctctgatcaagtgacttcaagggaagacaggttttgttgtcattacctgtcgcggagatagaacatctcatcgtggattccattcacggtttcaaataacttcttaacctcaaactccatcgtctggccaataaataaaacaagatccaaccataacaaggttaacaaaacattccttcaaaaactctgcaatctctttaagaggctatgttacatttcaagctagtcttgctctgtagtatgttaaagcctagtcctatctaccacatttcaagatagtaattttctgcgtctgttaaagcctagtcctatccaccttcatttagcagggaaagaactcctgaatgagctgaagaaatcgatggggttcaaaggtgaaactaatgaagctattttctcatatgcaagactgcagacacaggtcagtaacacacgagccctgtcagcttaattcatggccttgttctaaccaaaccaatgcaccaacataacctataaaccaagactacatagcatttctcacttcagatataactttccactttccagcactatgtcttggtgtaacttaggcagctatcaaattctcacacatccggcgcaatgctctattgttcatgtcattagaagcatcaaaatctatttcctctaaagagattagtttgactaagttaagacttcaagagtaaagaaaaagcgaaaaacttacttcgacttggctcttctttgccacattcgaccaatccttggtatgaatacccgtcctccaatcaaagtcaatgatcagcgtcgtctctggtttgtgatcgacggcggagaagcaacttatgtaatcccctgtttccacagctacaaacgagaattgtcccgattctactccgtccgattcgtgataagccgtcccttgtggcgatgtgaccttaaaaatcaaacacattgcattatactgaaatcgccggaagaagaaattgaagggaaatgcgatccgatcggatgattattaccctgacggtgactttatgggaagaaggaagaggatgatcctcgtgagggtttataatgctgtattttccgatggtcattgcgtttgcgtgaatctcctctgagatgcatttcgtgtgcccagaaagtagctcgtatcgtatagagagtgtcacgggagataaaattgagaggatcaatagtacgatcgagctccgacgatgattcatgacggctccgatatagagagaaatcgatctgacggatttcaaagtttagctatttttcttgttaaacggaaggaaggaaacaaaagaaagtcaacacgtgcattgccacgtgttagtatttcattcgttaaaacacgtggagtactaccctctggaattgggctttaaaattaaggcccattaataatgttggacctatatacttgtagtggatcacactaaagtaagttagaagtaaataaagaaacaaataacacatccagattttataattcaagcataactacatatgacttggtaatgttaattttaaacttaattgggaaattttgttgaaaagacaattgtactcgagtttttagtaaagaataaaatagtaatctttccttggaagggatgttaataatgcaacattgaggtacgtgtcatgatttcgtttcagtttttgttttgttttacaacagcttgaaaatatctgaataaaggagatgaatataaacagtggtttgaatcgtgattagtgcaataaatagatgacagtaataaaaaaagtacgggagaacaattaggtgaatccgttgacgaatgacaacgactatcaaaaaggcaaaatgtgtcatctttctttatatgtttttcaatgttgaatattcttgaaatctttatttatcatatgtttttctgatcaatcattatccttgaaacctatttttttttttttttggttatagaataatctttgacatttaatgatatatataatgaaacaagttaggaaaattgaagctttctgaattaggaaataaattgtgtaagcaatagaatgagtttcttgggaaaacaataaatagaagaagaagaagacactttgacggttaattaacttattttcccatctctcaccgttaccacctcttttttttttttttccgtctcgtgatttttttttcttcttctgaatttcgaaagaaaaaaaaactcctcgagattcaaaccatttgacacaaaggagagaagaagcatttcatttcgcgtttgtcatctaatttcaatttctgacatctcacaagatcggagaaatttaggttatagtaattttattctcatgaagcggcgacgacgatcgtcggaggagggagatg

SEQ ID NO: 34680 - DNA, 3003 bp, Unknown; identical to SEQ ID NO: 20862
  misc_feature (1)..( 3003): 2750-1469P.txt file - cDNA_ID_3081196; gDNA_ID_2910741; Annot_ID_193682

SEQ ID NO: 34681 - DNA, 3003 bp, Unknown
  misc_feature (1)..( 3003): 2750-1469P.txt file - cDNA_ID_3081211; gDNA_ID_2910741; Annot_ID_193670
ttgctatgaaaattgtcaatattaacgcatttgattcaattttttttctcaagcttaaattttccagacaatattccatgagtgtttaatcctaatatattgaattgatccaatctaaatcaaaccgatccaaataaattaatctaatttaccttttgatattcaaaaagcatataaccaaacaaaaatagaaaacatcaaatccatactataattggttacacttatgctttggcataatcaacattccaatgctcgattgattagcctctacaattgttgaatgtatatatactctcatacactacataatgtaattacagcaaaacttcttcaatctgtaattacagcaaattcttcaaaaaaaaacacatgaatcatactatgtaacaagaatcactattattatagtgcacaaaaacttatgttatatatcttcccagctgtagttgtaaagaaacatggttcttaccgtgggaaaaaaaggatactatacaaatcgtgcctctaaataatagactcagttcaacattatgtgattatgtctcctcgttcttgactgggatccaacggtttccagacgaagatttctttccccgggtaaaaaacccgataatgaaccctaaaagcacacccacaaccatcaagcctgctcctttggcataccacaaagcattagattctgattttcccataagtgtagcagaagcaggaacggttttcagatttgggattttagtactctctttgctcccactgattactaccccagatgctaacatctcaacagtatcatgaacttcgccatcgtgattacccacaaaagaaacagtgagcttttctttgtttgcaactaaacgagtgtaaccaaactcacctgtacgatacattgattgttcaggctgagggaatataggaagatctggatggtttggtctaggctgccaaatcggttgccaatcttgaccagccataccgatcacaagatgaaccggatttccttgccactgtgtgccgcaagtgttgttgcttatgggacaaaacctttcgtatctatgaacatgtccccatagagcaagtgtgacattgtttttcacaaacaaaggttctagatgctcaaccatcttttgtcgaatcatagtgtctctaacctcgttgctcgtagtgtacattggtctatgtccttgcacaacaacaaacggtgttttcttcctgtctacagactctagatctcgctttatgaattcatattgactacctcctttaagaaaattcgtctctgtggagatataaacgaaatggaccgttcccatatcataagaataatataaattccttgtcggaggagctttcattcctgtagactctgaagaattcccaggcatgttaaacttcaagctatacggcacaccacattcgccaccaccatcgtttccataaatagaagctgcccaatcaggtttccacggctgagtagagaaatcatactcatggttaccaatgcaaacatggtaaggaactgtcgaggcaataggctcaacctgagcaaagaactcatcccatacccacgagtaaccacgagcataacttatatctccaatgtgtgaaatcatagctggcttatcaccaagagcttcaatgtcacggaggatccacttcactgtagatatgctctcatcttgtgtgcggataaatgtcgtgtatggtgtagcacaacccatatctccaaacatgaaagctacggtttcttctgcagtcacatctcgagcaatgtagctatggatctcactccatcccttagaatcactcccaacctaattcatagaatcataaatttgatcaatcaaaacatatttctcccaaatctatcatgcataagcttcaaaatcgagactttatattacctgataatagtatctaacgccatcattcaaattcttcatgacggtatcaaaaatccaaccaggatctctccaaccaatagtggaattcgccggcgaatcacacatgtgctctctctcgtacctcatcccacgcgccgccgcggaattacctaacaaatccttcgattcaccgtatctaacaaaacgttcttcaccatctccagctacaaacataacacgcatcgtgttaaccatatttgtgaacgacaaatggatctgctccggcataccaacaccggatccgaaagtcagctgctccgattcagctagaagatgtttagttcctggtaaaggattctgatcatgatccttatgtttcggatcaatctcggattcgctccaacggaagatccggaatgtgtaatttgatcggagattggttaaaggaagagaaatcgaaccgaaaccatctttccaagtggacgattcattgaggaatttgtaaccaataaagtgatcattaggagactccggcggcgagtagagtcctaaccaatcgagatctgacggagaatcgacaccggaccattgtatcacaacggaatcgccagatcgattgagagcattaggggaaattgaaatggtcgctttagaatcagcagaggaaacgaagacggagacgaagagaaggaggaagaaagagaaattaacgatcatggcgacggaggaacgtaagaataaatgttgccggaacaccggagatggaagatatataaacagttgtttaaacgacgacgtttctaccgttcgttatgattggttagctatttttaaaaccaatattgatttatgacgtatcaccttcttatatatgggcctatctaagcccaatattatgggccttactcggtctatttaatatattaaaatattgttggaatttgaactgtttttggttagtttagtttccactgagcttgctttcttccatggcgatgataaataattcttcttcttcctcacacacaatttcactttccgattttataaaattgattcttctcttcttcttaaacccatgaagagttcatgatttcttaagctcgcagcataatcgatg

SEQ ID NO: 34682 - DNA, 3000 bp, Unknown; identical to SEQ ID NO: 15113
  misc_feature (1)..( 3000): 2750-1469P.txt file - cDNA_ID_3081248; gDNA_ID_2910742; Annot_ID_193725

SEQ ID NO: 34683 - DNA, 3000 bp, Unknown; identical to SEQ ID NO: 15113
  misc_feature (1)..( 3000): 2750-1469P.txt file - cDNA_ID_3081248; gDNA_ID_2910750; Annot_ID_193799

SEQ ID NO: 34684 - DNA, 3000 bp, Unknown
  misc_feature (1)..( 3000): 2750-1469P.txt file - cDNA_ID_3081260; gDNA_ID_2910742; Annot_ID_193722
aaaaatcatttgcataattcaaagtccaatactttcattttgtttcctctttttcttttgtctatttaattattgttttttacgcaaccccaccactaccagatctttaaaaggcacacgacacgatcaagaaataagactttaggaccaaccggagttaaacgtagtcaaccgcagacgattcagaggagagtttcatttccgccggaatatttcaactccggtaagttaaattttcaccttactctacggccctccggtcactgaaccatgtttgcgtttccacttcatcttttgttgatcatatatatataaagtcaatattttggtgtaaacgatcgagacaaagatctctcaagcatgcttatttcagtcagaggccaatttttgagaaactaacgtttgcaaattgtgaaattcgtttaatctggtcatttgtatttcagtcttgatacaaaaaagctatgcaaggacgagttaggggaagtggggaagacaggataagcatattacctgaaccattgctatgtcatatacttagctttcttaggactaaagattctgttaggacaagtgttctgtcttctagatggagagatctctggctatgggttcctagattagacttggacaaatccgacttctctgatgacaatccatctgccagtttcgtcgataagtttctgaattttcgaggtgaatcttacttgcgtggattcaagttaaacactgaccacgatgtctatgacatttctacactcgacgcctgtctgatgagacttgataagtgtaagattcagcattttgaaatcgagaattgttttggcttttgtatcctcctgatgcctttgataattccaatgtgtcacactttggtaagcttgaaactcagtttcgtaattctgagtaaattcgggtctctttctttaccctgtctcgagataatgcactttgaaaaggttatatttcccagtgacaagtctgcagaggtgctaattgcatgctctccggttcttagagatttgagaataagccagagtggagatgatgctgttgaagttttacgcgtctgctctgcctcactgaagagcttcactctgaaacggacggatcatgattatgttggaaatggtgaatatacagttgtgatcgatactccgagacttgagtatctgaatctcaaagattatcaatgccaaggcttcaagatagtcagtatgagtgaatatgtcagggttcatgttgatgtcgtatttgaagtgataggtggtactgtattgtcgaaaagaaatatcatttgtgattttctatcctgtgtctcaaacgtcagatatatgaccatctcaaggaggagtcttgaggtatatatactaagtactaacacacactgatccgtaaacttttccctgagaatatttacttaatttactttaccttgcagttcatctatcgtcacctggaattgaagccacgattcaaatttcatgacttggctcgtttgcgtgctactatgttctcaaactcctctccggaaatgttgccagtcattcttgagacatgcccgaatctgaaacacctcaccttggtgattcgttgctttgactctacaacttcttacaaagattattttctatgtggtacactcatcttggttttgggatttgcaggaattggttcatgattctctagtgacggaggggacaagtggacttttgactgtgctgcctcgttgtttgatatcatcccttgcatctgtcgatatcgaaagcccaatcacggataaagcaacggaactgaaactggttagctacttgttggagaactcgacaactctgaagaagcttgttctacgtttgaatcagtcttgtagagataaatatgagccaggtctcttgaaacaagtcttacaatctccaaggtgctctagtttgtgtcaattagtcattctctgacagaacgttgttgatgcagtacacatagttgatcttgatttatgatacagcctgagtaatgaatgtctttctttttaagaatgctcaaactgaaacttacaaagtctaaacctcaacttaacttgagaagttatttgattgataaagaagtaactacaactagttgcagagagcttgatctgaggtcttggaatgtaatgagacacagaaaagaatcgagtatccgtcacttcatcttctgctcagtgaagaggacatgacggttgactcgaggatcgtacttacggaactcgagcttctcaagaagtcccttggtactcttcctcttgacatagaagaaaccagttccagcagctgagacaagacggatgaacatgaacgtcttcttcctcttgtcccccattttctcacttgactacaccatagagaggagatcattaacgatcaaatctcagttcaatatgtgcatcaagcgacataaaaacctagacaaactaaagaccaaagtgcaatcacgaaacttttctttttagattttgaaagcagagaactgagaacattaggaacattaccattcgaaagattacagaaaataaacaaaaagatgcaaaaacgtaatcctagatcattcaatccaaaatgggcaaaaaaacttgcgctaataacaaaatgaaacattagaattcaccgaaatgcaacttcaacaagaaaaaatactcacagatgctcaaacacagagctgaaagcatcagaaactaaagaaacttaccgatggcaaaaggcgacaacacggtggtgatacggcggcggagatgaaacgggaatgagaccaaggaagtaggaacactgtcattaaaaagagacaagacactaaattttcattcggcccattaaatctgaataggcccaatattcttttagctactctcacctggttttgttgttctcttttctctctctcttttctctctctcttttctatttccgtcggactcagtggagaagaagaagaagatccaaatcgatccgttgaaaaggtacgacgatg

SEQ ID NO: 34685 - DNA, 3000 bp, Unknown
  misc_feature (1)..( 3000): 2750-1469P.txt file - cDNA_ID_3081267; gDNA_ID_2910742; Annot_ID_193720
cagttttattgttcgatggttcactaatcagcacagaatggaacaattgtttttatctgcttatattctaccatacttgacagtatactagtaattttgtgactaaaaactgttagagaaccatatccaacagctaggatgtcttgctatgatcttgtggttatgcttgtggatattggtgaaacattgaaggtttgttacaaaacagagaatggaacttaagttgggttatctaaaatgaaacaaacaaacaaaacaaaaagagcaaaaatatttatagtaaaacttcagattcctcttatgtttcactaaggaagttgcctacttcaaagccaaaatagtattatagaaagccattccttcttcttatttatcaacgactgcaacaaaacaccattcatcatcagtcatcacagatgttaatagagatagagttggatgtgagtgaatcaaactaaatgtcaatggcgctagctctagtccttgatctagagaggcatttagattaaataacaatgcagctatttatttaccttaaggatcgagaacgggaccttgacagacatcgagacctgattggagtaagcaccctctcctctctaggacttctacagtttctagacttgtattccctctcatttcgaggcaaaggagaacgtgaaatagatcttgaccttcttcgaggagagtacaaatcatcctctcttactttactatgcctgtgcttgtgccagtgaaaaagaagaagattaaaacggcttttacatactgagacaattaattttgttctaaacatacaatacaagaagaatgaaaacgtattactaatgttcttcaaatggcttttgttccttctcacgctataactgagaaaagttgtttctttatctaatgactaccttcaacacattttctggaagatacatttataacttgaaagatctcttctctccaacttttctggagcaaaacgctccaaaatctctcatttctccgagtttatggaacaaaacctatctttaatcttgtgaaatttctctactgtccacaacattgaatggctctatttctccaaataccattctttctttggccactataagtctattcattcattatttgaccggatgacaaaatggcatacgcaaaacaaaacacaagtcaagctcaattcagtacagatagtacctacaaaactctcttgctaaagttatagataacttgttgaccaagtggtattcaagctctagcttaccaaagctggtgaagatgacatttggtgaaataagtcttcaggttcagattttaggaaaaacagacaccctaataaacattttttctacaagacttatcaacctagacgtgtccaatttgtgccttgtcattgtattatccacacacaactgacagacaatctaagtgactaggaaccagtgccgtttgcattcacatgagcgagttccaagaataaataaagagccttatgaaacagagagtcatcatacactattataacaaatgcctaatagatatagatgagaatcaaaccttgactctcgccttggaggcgaacgcgaacgtgaatgagctgatgacaagaaaggacatagttagtaaacatcacagggtacataggtattgttctaaccatacactgcagttgtcctgagacatatcaaaaatgttaaaagcaaaccaaaaagctacttacaacgatatctgcgccttggtgatctgtgtgaagtcctcttgtagtccccgtgtcgaccactatattaaacgaaataggatttggaagtaactaagataattacttacaaaacatttacattcatataaaaatatgatacaaacacaagaaaacggactcttcaccttgtaccgttagtagtacgcatttcttgtggagttttccggttctcctcagcgaaaacaatggctatctcacgcccaccaataactttgtgattcattcgtttcattgcctcagctgcatcttcagcataacgatacttaacaaatccaaaccctctcggctccctaaaccacaaaataatatcacattaaagttaagagttcctactcaacaaacaactacttgaactgacaccaaaagttaccaatcaaattagtcaagaatccatacacattgacaatgtgacattgttaagagaaataaccagtaagctaaagctaagctaggaaatagctaaaagcatctgattataaaagacaaagcttgacatatacccagtataataattcctaggcaggtatatgtccttgagtggaccaaaccgttcaaacgaatccctaagatcgttcggcctgaaaaacaagaaaacattccaaaactcgtgtcaattaatcaacattagagaacttgtgatgtccttgatggaatctgaacagtagagaaggacggagagacctagcatcgagagggagattacggataagcaaaccagaaggaccagaggattcgtgatcacgagaagacggacgttcgcggaggcgattatcgtcgtagcctttccgttcgcgaggtggtgacctgtcacgaggacggggactatagcttctgctccggcttctcgctctagccatcgaagatttctcttccttaggtcttcttctcaaacaaatccaatcttcggagcaattgaatagcaaaaccctaaccctgtcggaaaacgagttagagagtgaattttggagggagagaggaagaaatcgacgactgtgaaagtttttcaaaacacaacacttgccggaagctggctacggtctgactttgtttgttaattcttatgggctttcaaatttgcaaactatgggcttatataaatcaaagctttaaaggctttgtgtcaaagttgttgacaaaaaaaaagaaaaaactcgtaccttgactcgtccggttccaaaaactcggtcacccaaaaataaaaatcaaaacccttcgataaacctcccggaggagaggagacacccgaaatg

SEQ ID NO: 34686 - DNA, 3000 bp, Unknown
  misc_feature (1)..( 3000): 2750-1469P.txt file - cDNA_ID_3081277; gDNA_ID_2910742; Annot_ID_193717
aatacaggcagactgttcaccagatagcggcggaaaagagactgatcctctgttaaacaaagaggttgtcatgaacgtaaatgacataggagactggccaaggaagtcgtgtataaaaacgcactcagctttagcattcaggtcccgtcaaactatgttcttaatcgctacgttcgctgtctgttttgctgtctgtgcggttctctaccatccaaacaaggtcacacagcttgcagtggcaatccgaatgagattggtacacaaaatttgaatataagttcaacggcagagactctcattaacgtgtgtgcatcaaaaagctcgaagagagctgtaagagtgttcaacagagctcagccacaacagcttctcagagagtttcccttcagaaagagacaggatatgatcagatgaggtcttgctctttctgtgtgttcttcttcccaatttctataagaccggtgatgctgcaactgtaataacaagaaatgctcagatcagtgattaattatctctagtcgaatagtgttttatgtatattagggtttacttttgctcactgtaacctgttttttctttgtttcttggtctaagaaatgattcttgaacaaatcctaatcgtaactttatgcaattttctacttcaagcaatgtcttggctcttgagatctctctaaactctgtttggtcacctctattatcaaatgttatctttgacttttcttattattattgtcagtccaatagattaactagtactcaagtagcataataatttgagatggttttattcttttcttctctttttgaagtacaactgtattaagatgcatgttggattgagaaatcggcactgagattgattgcaacatagaaggcaaatgggtagaaaaagacaaagaagatgagatttgaaaacaacgaagagacacacatataaggaaatgcgtcagttctgagtcatatattttggtaaacgacaacattctaacattttatttatttgctttagatgtattcacctttctttaaacgtatcaaacgctagctttaacgtgctaatttaaacatagactaatctattttgcctttaaaagtttgctcaaacttagaagcatttctctttaacaaaagaaaactattagagattacttggacgtatgcaagatacaatctcaattctcaccgaaaaagtttgtacaagttcatttcacttttgcagtcattagttaggttagtatttttctttaaatatatgcatgctacgcgtggttgctgcgtttgttcaacagctaacgtagagaattaaattgcatttttttttcatttttttgtcgtagagaaattgcattttaattacgtctcattacctttgacaaaaaaaaaaaaaaatacgtcttggagatactttttatagattcatttcagtttgtcaattagttattatgttattataaataaaaaaatgtaataacacccttttttcctcaaatgtaataacaccttatatttttcagaagagaaaaatataatgctgaactcatcattatacccgcacaccaaaatgagtgatgtcatgcgttcaaacatatgatttggtacatcaaaataatgtccgaccgtacgtgtacatataatattggaaaatttagaacttgcgccaaacaacacatcacatgattcattgaacaaaatgatatgcacatgactcaaatgagttgtacgatagcctaaaatcactgttttaaaaatacgcaaaacggttatatcgatttcgtttgtaattacagaaggaaaaaaaatcatcttggaaatgtgctttaattaacggaaggtacagtttagttcatgtttattaatttgatgatctagaagtaagataacccgtcggattagaaaagtccatgcatgaaatcctaccaacggcatgaacataacgcatccacaaatatctttaaagacgaattttgatacgattttgcctttgttcagaacaatttagaggttagtagtgacagtagttagatattacagtatacaaaattacgtaataaatcataaaaagaaaccaataaacatgtacaaacaaatctagtatataagtacatgtggacccaaaaaaagcaagcaaatgtggacaaaatattgctgaagctcgtacatgggtacatgatcgcaatcactatggctagtttggaaaatacccacatggtaagatatcaacatgaaatccgaaatcagtttcaaaacaatttttatagatttattgtcagtgccggctgagatggtaaggcaggtgcgacagccgtatagtactttagtgacgagtaaaaattaaagtttgtaacccttccaaaaaggtattaagaaaattgtatgatcaattcgatctttaaaataacatgttttccatttcatgaatatcaagacttataaacttttgttgttttatataagttgatacaattgttttaattttatgtaaaataataatgaattacttaaacgtgaaaaacaacttcatatgttttgttcgatgtatacagttacaaattacattgaatctcacaagaaaggaaagtcgtagtattatgagattacattacttgaaagattagatataaatagtaatagtaatgtaaaagaacaaggaaaaacttattaggtagtaaaaaagaagagaatgaagtggagatgactaactctaggggtaaacatcagagccaagtcagtgagagcttcatcacagtccccacatgagaactatttttgtcagtattaatctcaatcattatcgcatttaatatttcattaatctattttgccgtcgaaggacaaatattgtaaaaatcttcgtcccatgtcgagactttacatacatctattacctataaatacctaattcacgaaccaaagtactcttcacatctatctctttctctctctttccttgcaaattttcagctctcaaagagttaagagttagagagagagaggatg

SEQ ID NO: 34687 - DNA, 3000 bp, Unknown
  misc_feature (1)..( 3000): 2750-1469P.txt file - cDNA_ID_3081281; gDNA_ID_2910742; Annot_ID_193715
tcaagtgggttttgaccaaactgaatcatcaaactccaataaaacccataaaacaaagcacgttaccttttggtgcacgccaatattctttttttatcaagtttgtatcttcgatatgttgatttactattttaattacatcctgaattgatatgtttgcagtagcgaaggtcgataatatgattttcgaatattatccctatttgtagtcgagagtgtgtacatctagttacagaatgtaaccatccgttcttgcagttttaaatatgattccgaaatcagaacagatgtcagatcaagcaagatattaattcaccctttttatttcagctcccacctttagtttctagtgatgcgaagcatgcatagctaatgtggccaactccgcattttctatacatatatatttcagtaataaattatgatgaaagactcaaagagataatgtagggacctccattcgacctagaaactagtatttttcgggcttaattctgcttttttcagcttatttcgatctacatagttacgtagtaagatttaagaataatgcaaatgaaatctttttccgttttaatagattactacatgatatattgtctcaaacgtaatgtggaaatatcggaaattttcgtatgaatgacacaaatatatcgtttgtcctcttatataagggaaaactacctccttttaggacaaactccttcattggcacatctctggcaaattggcaattccaaaagaatcataaagtttagatcttccgagtttgacttctcagcttctcgctttttcttttcttttctttgttgcgacttatcttcttcatttgcttataaaagtcgaatcttcttattcatcattacattgttacacgctatgaatattttatggttttatgctatgcatatttaaatgtatcacgcgatatatgagagtatagtttagtaatagttaatatcatcgatgtattattatccaaattgtatactacatgttgatatatatatatcaataagctaatggttggcatgcctagatttaatttatgtttaagtcttctatttatgtagtccatacatattattaatttgtaatgtgaatccttcaccatttcacattcgaaaaaataaatatcatcacataagacaacgactttcactgctttattattaaaaaagaccgaaaataaaattagaagaaacgggtcacagaaaatcataattttaccgatcgattttattagacaaatgtattaaaaaggacagctaattaatacaacattggacatgtcatccgccatcggtggacttccaacaataaccgatcacgtcacatggtattgtcgtcgtgttttccacgtgattattgaagccaacactctcttcttttggtaaacctgttggagaaaatcaagtcaaacaaaaaatatgtcgtagagaaccttttaaattaaagatacacacacatacacacccataagagcatcttcattagataaaaattgataaatgtctttagtattaataagtaataaaaattaaaaacacttcttttattatgtatctaaaatgtctccagaaaaacacaaatttcagtttaaaaacacttattattttgttattatcatttttattactattatatttagagacactcacaaacaaataatcactaatgtagatggtctaacactttcgtgattacacatttctcgaaacatttcttgttttctctcgttatttaaatctaattaaaaatttgtattaatcacaagttgtgattgtttattactactctctttgatgacggatccgaatctttttctcgtttgacttgggaaataatatttagaagaaaatgtgatcagaagttggaaaatataaactaaaacactacaaatattattttgacagcattcgtcttgttttagttgtaaatgaaatcacggtcgaataagaaatataatacaaacatgtttcccacgtaaaagataagatatctatattcgtgcacacatatgtttcgaactaccttgaaaaacatgctcccattttcttctattatttgctataaaagctaactaaagtgatggacgtattaactaattcattataaaaattagcaaagaaaacactaattcattatagtttagtcgttgaatggttagtttgtaggtacataaattcatgtaattccaactatcttatccataaacaagaattacttagatgatgtcgctaatgacgtgatttaacccaaaaaagaaaagaaaaaacgttatgcacgtattataatgaacaattattgagaagcaaaaagaatatggaccggaatattaaaagaagtagtaagaaaaataaaaacctcactagtcacaataaaaaaaaagtagggaacgttcaagacacattcgaaggaagttgacttcaagtttttccgtatatttcattttatatacctaatttagatgtcattttttcttttttttttattatcgattctggtccctagtcgccaaccatttctcttttttctttttttcgtctctctctgcatctgcacgtctgttttatcttttcttgatctttgttttcctgtaaacttatcacagaactatttatgtaagccaagagatttttaagtttttaagctgctcataacagaaagttctgaagaacaagaagacgttgaaaaaagaaaaagaaatcttatattttgctatattggctttttgtctaatttgtaaggctttgatgtaacagtctctctctctcctttgagctgattcgtcacttgtccataaacaaaggaacccaccttcctcattcttcttacctattccttctctttggtttggacatttgattctagtttatgtaatggtttcttgatctgatttttctgggtctcttgccatttggtgaaacagatcttgggttttgtttcagattcagacaggaaaataatcaccaatctttctgacatcttcttaagatg

SEQ ID NO: 34688 - DNA, 3000 bp, Unknown
  misc_feature (1)..( 3000): 2750-1469P.txt file - cDNA_ID_3081309; gDNA_ID_2910742; Annot_ID_193706
caaggaaaaaaaaaaattgtgaattggtttgtatatggtcattttaccaacacggggcaaaattcagttcgaacgttgttcaaggcggatttaagtcacatcaaatcataaggtctctttttcctcttgtgaaattcatcttgtgttttcttaatctgatgttactttaccaatctgaaaaaaacaaaagaaaaaaggatgaacattttgtagtgcgggcttcaatcctgttcaaataaatatttaatttatacaataatcagaagtaaattctgatcgtttagcatgattgttaataaaatttaaactatagtataatacgtactctttaatcatctacatgcatttatgtaagtgtaacatagctttgcttacaagataagagctacaaaacattaacaagttactaaaaataacaatgattcaaaccgtcaaatatgagaaatactatagtttattagaaaataatccgacgcatatatttctatctaacattttcactatataagaaaaaatgtatgataaaattaagttctctaatttaaatatttataagtagatggagcataaaataaaatgggagtaggggaaaatgagactaatgaggataaattgagtgctactgtatcatgcgcacacaagtttatatccaaaaataattaacgaaagcggcccacttccttcacacacaccatatgttaattcatcactatctcatgttgtcttcctaataatctttctcattatcattttttttgcttataaataactatgttttttttatctaacagaatatagatattgcgaccatatatctttatttcttttcatcagatatcatgaccagccgggatatatatatatattttgatacatggccgctaaaccaaactttgaaattacaccaaaaaaaataaaaaataaatcgctcagacactaatataacttcaatcgattccacctaacttttttttcaaagagtcttcttgcggtaagtacattaatcttcaaggaagatgaagaaagagaagcgcatgtggagaaaaggagacgacgcgtataagattaagatgtgcctcgacctcgagcccaaaaacaaaatctataatcaatatcgacactcgatagtgttattgctatttctatatataataatacgatgagttatattattcttatgaggttgtttggtacatatgaggcaatttattattcgatgcaaatcattccccgtgcctcttatgctgtgtttttctttataataaacatcagaataattattttgaaatttgattatgttgagaattttaaacaataataagaagaagaggaaagaatctgatggacccttgtggtttctccacgcaagaatcataccattgaaagggctaaatacatgcatgcattataactttcgactcctggaccaacatttgcttcattattcaagtccgtaaaattcaaacgattagactttgttttgctaatgaagtttctaggaccaccaattatttgatctgaaatcagtaaaacaaattaaacatataataactacaaccattatataatatgaatatttaaaaaaattctgatccataaaactaccttaagttaggttttttaaaatataaatgcagctatgccgataataattaacaaagtagtcaagtacgtatcgtcatctcttgagcatagtattgtttatctaaagttgaacagtttccacaataatgagacgtgctggcgtaagcatgcgtcatctctttgtcatattgtgcaaatccaacaagacattattatatgtgacacttatgtaatggagagactttcaagagatttggttcagtctatcttatttcctcttctatttaatactttttaataagatagctgatgatgagagaagggtgaggcatggaggccatcatgttccctcttccccaaaccctttgtcctcttcaaaaggtatctgattctctctttaaaaaaaaatgtacaaaactgtacattagattcattttacctcacacactattgcttctatagcttcttcaataatttactttcaaaaactttttcaagtgaatatagttaatttgaaatgggttttgtcaaacaattagcatggtgtgccaaaaagaaaatccactttgaatttcgcattgaggtgtgctctaaacggcaggattatggacatcttggaactcttaaattatgtttatgtatatatatgatgcactaactaataatcagttaattaacaactagtcaattattttttgcttaaaaataatctgaatccgttgccgcatataattagagtataagcctagctatgcatgtatcataattacttattttgtgcaatgttatagaatattcatctaagttttggcttgtgggctcattcatttgcttataaatactgtcccctacttctttatatgttttttctaactaataaatatatagttgatgattatacatcctactacgccctaataacgacaatcaaaaatatcatgtgaatatatggactcaaacttgagtttgaaggaacgctaatagaagtaatcgctaaataaactttttttttgtatatatattaattaacgatctcttacctcatatgagtttttagtttttgatatattatacactattattttacaaggtataaacttcttcatgtttattttctcagatctctgaagactttgggacatataatttgcggatatatttattttattttattttaagagcaataaggaattttcggaagaggtgaaggaggaatttatatgctgatgatgatgttgctggggatatgaggagtttgatagtgaaggggcacattgatatgacagtgtctccaaatcaaaagccctaactcctatgcaataaacacatatgtttgggttttagggtttcactttttaactctctaaggtagacaaatcataaccttatcaactatctaaggtagacacatcaatg

SEQ ID NO: 34689 - DNA, 3000 bp, Unknown
  misc_feature (1)..( 3000): 2750-1469P.txt file - cDNA_ID_3081316; gDNA_ID_2910742; Annot_ID_193703
cataatgacacttttgaaggtgagcgatgaatttgtggtttcatttttcaaatttttcacaaattcatacgttatatcatgttaatggttcatgttcatttgagtaggactcgagcaagaacattcagatatcagccttccatatatttaaggtaacagatcgctttctttttgtagttaatttggtaataattgaggatgaagttgttattatcagagtttgaagccttttttaaaccttatatatttgtgtgcttacagatctttgttgcgaatcctaataagccgcaagaagtgaagatcatattggcaagaaaccatgagaaattactcgaactcctccacgatttgtcccctggtaaaggtatgtttcaaactatttcaatactaaaattctataaatcttaccctttaaactagactcattcctttacttaaaaatcttgcttaggttccgaagatgatcaattcgaagaggaaaaggagctcatcatcgaggagattcaaaaattgtctggcttgaaaaacctcgaacgttaaaaattcttttgcctcctcatctctctgttccacgcagatgaagtttcttgtgaactctgtgtgtccaatgtttcataactgctcgtcttaacatgaaactgctgcttttcctagtgagtgtagtaatgtaacttttgattcactctgtgttgcccctgagttgttcagattcaaatataacttgtcctacatttaaagaccacaaccttttgttaccttttaatatctttatatgaagattctgcttttgtatgtaatctttgaaatggacaagaatcattcaatgaaaccgtttttgttttattaaccaaaaaaaatacagatgctaaaaaaaggaattggcctttttgtggatgatgaatcaacctaatgttatacagttctagagtcagacaagactcccaacaaaaataagtttctttcagacaatctctagatttaaagaagttgcaacagaatcagacatcttcagatttctcactagtgcagcatatgccataccagaaggcttcaaacctaaggccttaagctccttgtatagtttcaagcctttctcaaccttgttttctttgcaaaatccttttatcaaagcgttatacgtgattgcattcggtgtaaccccggtttcagacatattcttgaaaatctcgaaggcctcgtctgattttccatgtgagcagaaaccctttatcatcgtattgcagcttaacattgttcctccatagccatttctcaacatctcattgtagaatgcttcaacaagcgaaatttcgcctcttttaaaatgcccgtgtatcatcacattgtaagcgaactcgtttggtcgcatccctttctttatcatctcaaaccaaagcttcctcgcgctccctaaccatcccttctcacagaatcctcgaatcatcgtagtatacacaactctatcaggtgcatagcctttatctttcagattcttgaatatacaataagcctcaagctgcttcttattcatacacaacccctttataatcttctggtatatatacatactcgggaaatggttccacgctatcatcgtatgaagaacctccgacatacaagcatagttcccaatctcacagaatccagatatcagtttagcatacacatactgtcctggatcaagcccttgtttcaatccctgcttcaaaagctcatagccttctgaaacatccccaccatcacacaaagctcgaatcaaacaccgaatcctctctgaatcaaactcagattctaccatttccttatgaagttcccaaaaccgatcgagtttcctcgctttcaagcaacctaataaaacagaattgcaagtcacaactgaagaactaattcccatatctttcagtacattatacacttcaatagcttcctctaccaacccttcttcactaagacacttcacgtattgctctaataacgtaggctcaggtttaaagccagtggtatcgagaaaactcttcgcagctttcacggcttttccatccaaaagggcaccaaagagaatattcaaagaaacaggaccaggtgtgtaatcataattggaacacaaccaccggaaaaaccacagagaaaacagaacattgttctgagatttcaacagttcgccgaaaaacagaggatcagcgaaatcaaacgaaggaaaatcagataccagagtttgttgccatctctgtctctctctcatgatggtagacacagttttagccatctccgtataactcacagccgatttttgctcatcgggcttggattcacaatcacgagactcgacagttagactccgtatctgggtattagggttctttcgagttcggtttctaaagaagctaatcaaatacgactgacctctactcatggcgtatcactaactcaaaaaactcgtgggcaaactcgaaatcaagctccaaagagagccagaagcaaattgtagaagaaaggaggtgaattttttattccgggaaaagaaagtcgaatacttatcaccggaaccctagatttggatctttctgtgtcatttccaggagatgatgaaaaaggtttggactttggagtaaataagaataattaaacaaagtttattacagcatcaaatataatttgtcaataatgttatgacgacatcaatttttagattggtcttgcttttaaaaaaaaaataaaaaagaggtcaatttgacggataaaaaaagtgcttgctttgctttagcttcttcttcttctctctctgtatctatctatctatctatcgtcttcgctgaaatccctaattaatttggttcctaccaccctcaatttcccgcgcaaagagaatgtggaaggtcatgaaatgaatccttttagtaaattccaatcgacgacatctagctgaaagtttcaagctttctcgcaatctccgtcctttaccgattcgtttggtctttggtggtcgcttcgacgagaatg

SEQ ID NO: 34690 - DNA, 3 bp, Unknown
  misc_feature (1)..( 3): 2750-1469P.txt file - cDNA_ID_3081324; gDNA_ID_2910742; Annot_ID_193701
ttt

SEQ ID NO: 34691 - DNA, 3000 bp, Unknown
  misc_feature (1)..( 3000): 2750-1469P.txt file - cDNA_ID_3081368; gDNA_ID_2910745; Annot_ID_193759
gttctttatcgccaaatttctcactaatagaggggtatccattcccaccattgcttgaagaaacctcgtcgactctaatctctttaatctcttcaggaacactaggaggaatctggcgactaacagggattagattagaagaagatctagaggtttttcttctgaaagtaagccatagcgatatagctaaaactacaacgaatatcgcggagagaacaatcactattatctcccatagctccaaaccattgtagttccgagataatgtgtcatttaaaccagaacccatcttctgacctccgctttattcacctgaaaaggcagagaattttaaactcaaaactcttgtataaaccataacttttgctgcttaaacaagaaaaaaagaagttcgagaagaatcatttcaagacctgaatcaaagtaatcaaaacaaaccagaaacacaaagcttataccaaatattagatttgagctactcaaacatagaaatctaaccaaacccataaagaaaatgcacatagcctctctcttaagaagtcaaaattggaaaggaacaagcaaaaagacaagaaattgaacaaaaaaggactaagaaaaatcagattcaacaaaaccaacattgtatttgtacctaagtcccaagaattgccagctgccagaatattcagttctcagaccaaacgccagctaaacactacgctggaaagaaaactacagctgaagaaaactaaaaaatatctaccgacaatagaaactattcagaacacacaaaaatccgtcgcattgtctgataaacacccaaaaaacagagtctagagaaattcaagaattgaacttacaattagaaactagggttcataagtgagagaagaaccaacctgatgggcccaaaaatttaggggatttcagagcgacattgaagggaaaaagtcagatcttaagcagcattgactagaaagtttccagctttggatctttggaaaggatctctctaaacctaacagacaaagaacctaagcagtgaaaagaaaagcaatcaaagaccagagaaaatgaatgtgagtgggaaagattgaagctttaccctccttgtagctgtgttccaataataaacagtaagaaaagaaaaaaaagatttaatccaattatttattctggcttttattagctagcaaaagtgacgaccgacgaaacaatgtcaagactttttttttttttttggtgcaaaggtgaagacttttttggttttgtgaggaatggataaaaagagtgaagaagaagactaacctaaaaagttttaatcttgttgtaactgacagagtgtgtaactaatgggaatgtcaaactaaatctcgttgactaaatacacaactcttttacttttggtcttaaatgaaattgttgaacatatgtttgttttgggtctgttttattataaataaatgtcaaattaatgccatttgtttcactattctgatgtttggttttctctcaaaactttgtttatgcaagtaaataatctcattgaagtttttcgataaatagatagacaaaaataaataaagaaagacatttatatatatatatatatatatcattatcagcaaatgtttgtaaggaaagaaagacataatttttaatgcatgtgaaagtacgagtgttaatttaattttaagcagctgagacataattttgatatatcccaagtttagctgatataatcaaattcataaagcccaagttcaaaaagaagagaatgtccacagtctagttaggcggcttggttcgttttgaagaattctttaaaataatcatctccatgacaaaccgatgaaaatgactttatgtttcagataacgtaaaattatcaagttgatgctaatttcacttgtttgattaattagcccctggaaagattaacggtctattactagatagtttctctgaaatcaatatcatcattagatttatttatttatttcatgagtactactacctctaataatactattatgaaagtataataaaacttacggaaatttcttttatgttaagttgttaacatgttggaaacggtaaacaacctaatgatgtgttttagactattagtacgtttttaaaaaatggtatagagtaacattgatacaaaaaacacatagggtatgacactatgactaatatactagctaaatccctttgctaaacatgaaaagtagtatacaaaaccttaatcttagagaatagagaattgttttagctattttatgtttaaataagaaatatctggtatttaatatgtctgaaattagtcggagttttcttgcgtatagaaaaacagtagtggaactttccaaaacacattaagacagaaaaaataatatgaaaagtgtgcattaaatacaatccaacccgcactatgataaaacttgtaagcattattcttctttgcggataagcaaacaaacagaagaattacaaaaacttatgtataatcccaaaacgttaaaaacatactacaatttcttattaaaaaattctgaaagacgtgcataaaattctcgtaaactgacattatcaaaaccaatgtttattatttcaagataatttccttttgaaagaaacgagaaattttttgacatttggttttgttggggtgaaatttgaattatttgtaaatacaggggtcttaatagaaaacgttgaaagaaagggacaaaatctgaaaaagggaataaaaagcacagaaaacaaataaaaagggccaaactccaaactccaaaggcacaccaccattgaattgaacttccctcacacgcaagtaccacaccttctctctctctctctctatcatctcttttctttttctctcatcgccttgaagctctgagaagtagagagaagctccgatctgataggaactgtgagtttccttgagtctccggagaaagaagtcgccgatttgctcctgataatcttagtctcgaaatcaaaacgatg

SEQ ID NO: 34692 - DNA, 3000 bp, Unknown
  misc_feature (1)..( 3000): 2750-1469P.txt file - cDNA_ID_3081372; gDNA_ID_2910745; Annot_ID_193758
aactccaaactccaaaggcacaccaccattgaattgaacttccctcacacgcaagtaccacaccttctctctctctctctctatcatctcttttctttttctctcatcgccttgaagctctgagaagtagagagaagctccgatctgataggaactgtgagtttccttgagtctccggagaaagaagtcgccgatttgctcctgataatcttagtctcgaaatcaaaacgatgttttgcgattgcttctactggaataaaggtttctccgagttggaatcggaatcgtccgagtcaaagcccttctcgcttccatctcctcttcctcaatggccacaaggtacagtagtaccatcatcttttcttggaaattgcaattatttacaaatcaacttgcagatttttttgttgtcaaacagttatctatttttatttctaattttggatattttcatgatttctatacattacattaaagatcaaattgatgtttaatgtttccatatcatcatgaattgatattcaatgttatggataataattttactttttgagttttccttttctgaataaaattcgttggaatattcaacattggcacctgttgttgtctgttttactagttcattgttttgacatttgtttcatgatttttgttctgtggtcaaagtttttggactaacaacattttaattgaccttaagaaaaattagttactgacttacacaaggtaggtttttttgagcttcaataatgtgagcaataatgcatgaccttatagaaagagttattaatgtagcacgatgaaaatggatatggtataattactctatcatagttttgattctttaattctttatcgtttcccaacaaccctttggataatgttgagtaatggttgatgatgataacgtgttgattagtctttgtttctaatggttgtttgtctttgtttcaggcagaggttttgctactggaaggataagtcttggagaaatccaagtggtgaaagtcaccgagttcgatagagtttggaaatgtggcacctcgcgtggtaaattaagatgcgcatctttttacaaacctgtggggataccagaaggtttccattgccttggtcattactgccagccaaacaatcagccattgagaggctttgttcttgcagctcgggctaacaagcccggtcatctagcggatgatcatcgccctcctttgaaaaagcctttgaattattctttagtttggagttcagattcagattgctacttctggttacctaatcctcctgttggttatagagccgtgggagttattgtcactgatggatcagaggagcctgaagttgatgaagtgagatgtgtacgagaggatcttacagagagctgtgaaaccggtgagaaggttcttggtgtaggatcttttaatgtttggagcactaaaccttgcgagagaggtatttggtctcgtggagtggaggttgggtcattcgtttgctctactaatgatctgtcttctgataataaagccgccatgaacattgcgtgtttgaaaaatctcgacccgagcctacaaggtatgccaaatcttgatcaggtccatgcacttattcaccattatggaccgatggtctacttccatcccgaagagacttacatgccttcgtctgtgccatggttctttaaaaacggagctttgttgcaccggtttgggaaatctcaaggcgaaccgattaactcagctggctcgaacttgcctgcgggtggagaaaacgatgggagcttctggattgatctccctgaagatgaagaagttagaagtaatctaaagaagggaaatatagaaagctcagagctttacgtccacgtgaaacccgcgcttggcgggattttcacggacgttgtaatgtggatattctgtccatttaatggtccagccactctcaaaatcgggcttctcacggtaccaatgaaccgccttggagagcatgttggtgattgggaacatttcacattccggataagcaacttcaacggcgatcttacacagatgttcttctcacagcatagtggtggaggatgggttgatgtatcggatcttgagtttgtcaaaggaagcaataaaccggttgtgtactcatccaaacacggtcacgctagtttcccacacccgggaatgtatcttcaaggcccgtcgaagctcgggattggagtaagaaacgatgttgcgaaaagcaagtatatggtggattctagtcaaaggtacagaatcgtagcagcagagtatttaggcgaaggagcggtttcagaaccgtactggctgcagtttatgagagaatggggaccaactatagtatatgattcagcagctgagatcaataagatcattgatctacttccactgattctgaggaattcttttgagagtctgtttcctattgagctttacggtgaggaaggtcctacaggaccaaaggagaaggataattgggaaggagatgaaatttgttgaaaacagagctcctctgtttcagtgaagctttttgctaagtgtatgtgtaaataagtgtgtatatatatatatatggaaattgtatacaaattttggattcaatattaatcatttcgatcttacaagcctgttattaactctatatatatattcaaattgcccttaaatccatgtgaggtacagatagatagattcctaagtgatcaaagttggattagtgaacatgtgcctttttacttatcgaaacgaggaaacgacgtagtttaataattaacataaggatctagaatatgttgtggtagacttcgtcgtaggttataaaaactttctcggtttctaaaacgacggcggtgacaaggaacaaaggtgaggtttcagacacagacagaacaaacaacgaagaaaattcaaaatcttatttcaattcaacgtatactttccttaaattaggaatttggttttcgagaaaattgagatccgaataactatg

SEQ ID NO: 34693 - DNA, 3003 bp, Unknown
  misc_feature (1)..( 3003): 2750-1469P.txt file - cDNA_ID_3081379; gDNA_ID_2910745; Annot_ID_193756
tactaacatgtgctagtatgtacatctctttttattgtgcaataaatatatggttattgatgcattatctcccaaaacatgatatagtactttatatctcgaaactcttcaatacttagttaaaatataaatatgatcgctatcacttgaactgcagaactaacatcaaaacgtgttggtcatcgttgtcaacaattggaaagtgaacaagaaaccaatatgtgatttttggcgcagcgtttgctatgctttgaaagtccctcatcatgccatgttgatatccgattatcgggcgaccatttatagttaattatactgtatttatagaaatttaatatatagaaatttctgcctggttaagattgtatataaaaaaacatatatagctatataattgtcacacataaaaagtagatcactgaagttctacgtaacaaaaaggtattattgtagttaagaacatgatactactgtctactgatgacttagtagttgctatataggtaggttcacactaattgcataatgatttaattaatgtaacattataaatacattaattagattcaactagtattacgaatcagacgacgcagaagcatctaaagttggggatttgagcagagtccaaagaaaaaccattataaataatccgttttgttcatcttgaccatcggattaagatatatgtttaccttactctttttcttctaatctaatctaatccaacaacctttctttttgtaatttatatgcaatcttatgataatgtatccaaaaaaatttagaagtacattagtcatatcatataatttcacccacgtgaacattgattgtaaacatgcatgcatatatttttcttttcttttcatttttttttacagccaaaacatgtatgtacatatgcgatccacccatttatttttcagtgactctaacatgtaagcaattcagatttatacacgaaattcaaatgattatttggcacaattgctaactattttgtcggtgtatactgttattcatcacgaattatttgtagtgacactaaacataaacttaagatcttgaaatatttaacaagcttttcaaaacaatatacgattattgtttatcctaagatatatattgttttgagcagactttttttagaatgaaatttccataagttttctctcatgcgaatgatagatatgcatgtaaatcaacgttacagtattatgaacccctcgtccgaaacagctggatcagactccgttttccatcttaaaaagaaatataaaaaaatatacaaattatggggacgattagttgaattgtttataattttcttacatatccatatcccaaaagatcagatcaacttgaatctgataattcttttcgaactaagttcggatcaaactcgagccggatatattgattgacccaattgatagacgtataaattttactagacgatctgtcgtggaccactacaataaaatggtccacagtgactttatatacgcatttgttatttttttaactttgacttgtacatatcatttgattgagtaggaaaaaattaatcttgatcctagattagcatttagatttttttggtcaacgagattaaatattactactatttagttgcacaaaacaaaagggaatataaattttagggaaatgacaaaaatttaattgattataactttgaattcagttggtatgttcataattcatttgttgaaattggttcagccatcgcattcagagtgtgtacttatgtgcatatacgcaaaatatatcttaaatcggtgtgtatgagtacgcaattaaagaacgccacgtgggacaaactaccaaatttagatgatgtaactaaaaaagctggatcgattgagagaccctcaagcaaagatattaaaagtctcccataaagttttactgaaaattcaaaatgattagattattattatactcatgtgactggttttgatctgcctcgtgcatttccactagaaccttaattactagatctttgtaacagaagcaatgtgatgatattatattggacgctaaccagaattcttattgaactcctcctactatgaaaggaaaatgaactcaaccatattaaaacactttctctactttgactctttgctatataatatatagttccaaactaaatttaaaccaagaaaaaattcgttcattttaaaaaggtaaaacaattttggttattgttgtcttgtatagacaagttatacaattcacacgagtcgaattttacgacgtacaagtacaataccaaaaatatgtactcttacatttttggctataaagtattttctaagttggaatttaaattttagaaaaaagagaaaaaagaaaagagtagtgacagatgaaaacattgaaggagtgtcataaaagggaagaaaggtttagttagttgggtaggtctctctattgtatttatagtttttcctttgcttctttttcatttatttcccttaactttattttaatcaattttgctttagtctctctcacacacatgtataaaatgaataatttctcatcttctctcttttttatttataagaaagaaaagacaagaattaaatctatcaactatataaaaatgaagccaatgcagggcaatgatgatgaatcttgatttgatcttcttctcgaaaacctcattgcttctgcttcttctcttccatttccatatttacacttcataatatctcttcacccacttctcttcttccccatttataactcacaaatatatacatactcttacatttatatatcttgggctagctaagtagctatagtaattttctaatatctctttccatttcttgaaatggtcctcctctcaccttaactttataagaatctgaccacctctcaggtttccagtttcttcactttctcgttctctggacactgaatgtgatacatatatagaagaagaaagctataagagattgatcgatg

SEQ ID NO: 34694 - DNA, 3003 bp, Unknown
  misc_feature (1)..( 3003): 2750-1469P.txt file - cDNA_ID_3081387; gDNA_ID_2910745; Annot_ID_193754
atatattttttttttgctattattaaccaaatttcttttaatcattgctatatttacttacctgtttttcattctatgtcattgggtgcaaaatgcaaatactctataagtaaatcaaatcaaaacaagtttatccaattaaaattttaagaaagaacaagttaaattgagactgagttatcttatttcatactcttgtactcggtagtcgatacatatatcttgcgagtgaaataaacaaaaccgagtttcccacttcaacgtgtgtggctcatagggcaagagcagagctaaggttcatggggttcatatacttggtggtaccggtcaagatatgtcggactatcatgcggtttgctttctcagtcggatgaaacgcatcccaaaagacgtataactcacggttcggacacaagtttgatagaaccgtacacaaacccatcccattgtacggcccttgtccgcaacaagcaaccttcgatgttacaaatcctataacataaataaataattgttataaccctttcttctcgacaaaaagtagataattagaaagggaaaactagtggtaattaccatatcttcgtggagtgcttagaaaatcctcttgcatttggttagtgttagcagcaataaacacatttctcccaatttttttgttaagttcatttatcatttgaagtagctgaggatcatatagagatgcagctcgttgtagctcggccgagcatcttccattcgacgtacctgatctcgccagttcggccggtgcacatcctagtggtccagctcctgtcactagaactcgacccactccaagtgaatttaacctctacaaataacacacaattaaattgtttgcaacaatactcaaatagtcaaatcattgcaagagagtgaaagttcttgaaatcatatgagttcaactgcctaagactatatcatcattccaattcaattttggtcttacaataatgaagcaaattataataagactgttaccacttaccaatagtatttttttgtattcagaaattaggagtcggacgtaatccggtagagtgaattggcgtgatctagcggaatatggaaacaagaaatagttgttcacaaaatcgtttccaccgaccgtgattaatacaagcgcttgactcacgagccgctgagtttgcggtttcccaatcaagcgactcacacgttgttggtattgttggaagtaatcgagttgttggtacattcttataatgttgatctgcatgccaaaatttatatctaataaataaccggaaactaatatgaaaattttcatttgatgtcagactcggttatatatatacttacgaattgaaatccggtatcattgagaattccgataccagcggaggcgaaattagcaccgttaagaagactccggccccttagctctggactaaggtaaggtaacggtggctcttcgttaccgattgcctcacctaaccaatatttaaccagtttattattatgtctttttggtaaataaatagcttcttatgactaaatatttgtatactcatctgaatcaagattactctaaaccggtttatgagattagtaaccaaacgtaactgataagatctggaatgttaagaccgttggaaaaccggccggttggtctccgagttggaaaatcgattccatacggtggagagtcggcacgtgcagttgtcaccagatagttgttgttgccactgtcgacgagcgagtcaccgaacacgaaaaaagcacgtccctccaccactatcggaccagacataacaaatactaggaacatggacatgaatgctataaccgttgatatcgtcataaaagcgttttgtttaatgactgtgacaaaaattacaattgaaatggaaaacgaaggaaggctggaaattatatagctaagagttttggtttctcactttttcatatggtttattcaaatgtattcgatcccgtgttatgacatattgacagccaaaaaggtgcttcaattgtttttaggtttttatagtattgctaccaaaaaacaagaacagactactatattacacaatatttattagaattatcaaagtactggtagtccaagggaatgataatattgtacatttatgtattattatcgtacataagttcacatcctttttctgctattgctatctcactgactactcttaacactttacttaaaaagacctgctttggttttatacaattgtttgttgtatgttataaactaaattacgaatcatcaaatactagtgttaaacattttcaagttagaaccatttttttgtttgttttccttgtgagattatttctctttttttttaacataatgatgagatcatttccatccaattgttatttaataccacctatatccacctctcaagtttcacaagaaggaacgaacgtaagcgttgggacacaaatgacaaaaccctttactctttaacaagaactcacatgaggcttgcgtaatgtttatgacagaacaatgatattatactgtcctagcgatatttgggtttgattgagttaccaatataacccaattggcccacaagtatccaacattctggcccatttgacgttcagtatattatcagcgtggaccatcaatctgactccgcgccacgtcttcaagcaaattaaccggtttggttcgcggtttaattatgagaatgagatatacaaaacagagtcttcgatttcagagttgatttaggtttcttgattctttcttctttcgcttcaacacagtcgagtgactcgccatagcttcaacgccgacgaaacccactattcaaggtagccaatttcttctacagagcaacgtatcgatttgatttcgacctctttttgtttcttcttacttgcccattatctcaatttgtcactgaacagagatttaagttttagagttcaaaagcaatcctaaaaccctaaaccctaagctgagcaaaatccttcataatg

SEQ ID NO: 34695 - DNA, 3000 bp, Unknown
  misc_feature (1)..( 3000): 2750-1469P.txt file - cDNA_ID_3081391; gDNA_ID_2910745; Annot_ID_193753
aagtggaatttctcaaattgatcctatatttctattaatgcagagtgtctagaccaaaataaagggtacctgacgacgcatttttgcttcctcatcaaggatgctggctgaaacatttttctttactttctgcaaacaggtaatttagcattcaaaattttcaccaaaggagtgaatttcaacaaattaaagctggtgggagagggagagcgactctaaccttttcaacaaggaatttcgttggataattcttacgtcgagcttcacgccattgctgaacttctcttggtgtatacatcaaagcatatgatcttctcttggagaaaaacaacatcaaaaaaaaatattagagattggctgacatgataacaaaagatgtaatccagattaaatcccattcaatactacgacttataaggatcacactgcttcatgaacgtgaaaatttagggagtcaaaatgccttaggaacgaaaagaaattcagtgacacctaacactaccttttcttctccttagctatgttaccagtatcagatccatcgagccctgttttcatcttattattgttccctgtatatgaagtcatatatggagagatcagaaaaacaccttcaaacattctcaaaaatgttccagaaaattaaaggaaaggaatacagaaatattggcaatacaatgataatacaacaacactactaacttgaaatatatagctatatagctaacaactatagtcaacaatcctctccctaatgacagtagacatatccagggaaaactgaaagagttggaagtttataccattttgaccaaaattcttacaattgcaaaccagagatgtaatccgatgtaaaaagctaacctttgcccctgtgatccttattgaatccagactttctcttgccattatctgcttgatgcaactgaggtctctggaatctacaataaactcagaatacatataaaccaagattatagcaaacaaatcactgaaaggcgagtaagtagtaggaacatacccttgaccagggcctttgaaattttgatgctttggaaacttatttcgaaaatcattcccgttaggacctgaaccattggtattatcgacagactgcccctgtagaagctcaagttaacttagagagcaagaagtactggaaacaacttagacaagtctcccttttgatagagaaaaagcaatgtaaataagaagtttttacctgtggtcttggctctgagaaacccggaggccctgattggtgattttgatggggatttggaaccggaggataaggaagggagttaaaggaattaagctgtggtcgagaagagaaagcatgaggttcaagagaaggctggaaaaagttgggaagagagtgacccataaggttactgttagcaactgcaaactgaagattccccaagagattgggaagtagctggttgatatggttgggcatagcaaactgaggaagttgttgaggcatattgttaaagaactgaggatgtattggcatattgggcattggcatgttgtgacccatcattggattattcatcatctgtggattcatcatccctaattgattagcgttcattgggttctgatacccattatgttgttgttgttgatgattagaaaacccattgatctgcagatggcaaagcaaacacagagacatcaatacgaaaagttttttactttgtggtgaaaaaggagagatttttattgagtggcagagaaatagaaagagaaagacctgttgttgttgttgtagttgatgttgcggtcgataaggacgagcttgaggctggaaggaattgtacggaggtcgcattatgaaggattttgctcagcttagggtttagggttttaggattgcttttgaactctaaaacttaaatctctgttcagtgacaaattgagataatgggcaagtaagaagaaacaaaaagaggtcgaaatcaaatcgatacgttgctctgtagaagaaattggctaccttgaatagtgggtttcgtcggcgttgaagctatggcgagtcactcgactgtgttgaagcgaaagaagaaagaatcaagaaacctaaatcaactctgaaatcgaagactctgttttgtatatctcattctcataattaaaccgcgaaccaaaccggttaatttgcttgaagacgtggcgcggagtcagattgatggtccacgctgataatatactgaacgtcaaatgggccagaatgttggatacttgtgggccaattgggttatattggtaactcaatcaaacccaaatatcgctaggacagtataatatcattgttctgtcataaacattacgcaagcctcatgtgagttcttgttaaagagtaaagggttttgtcatttgtgtcccaacgcttacgttcgttccttcttgtgaaacttgagaggtggatataggtggtattaaataacaattggatggaaatgatctcatcattatgttaaaaaaaaagagaaataatctcacaaggaaaacaaacaaaaaaatggttctaacttgaaaatgtttaacactagtatttgatgattcgtaatttagtttataacatacaacaaacaattgtataaaaccaaagcaggtctttttaagtaaagtgttaagagtagtcagtgagatagcaatagcagaaaaaggatgtgaacttatgtacgataataatacataaatgtacaatattatcattcccttggactaccagtactttgataattctaataaatattgtgtaatatagtagtctgttcttgttttttggtagcaatactataaaaacctaaaaacaattgaagcacctttttggctgtcaatatgtcataacacgggatcgaatacatttgaataaaccatatgaaaaagtgagaaaccaaaactcttagctatataatttccagccttccttcgttttccatttcaattgtaatttttgtcacagtcattaaacaaaacgcttttatg

SEQ ID NO: 34696 - DNA, 3000 bp, Unknown; identical to SEQ ID NO: 15102
  misc_feature (1)..( 3000): 2750-1469P.txt file - cDNA_ID_3081395; gDNA_ID_2910745; Annot_ID_193752

SEQ ID NO: 34697 - DNA, 3000 bp, Unknown; identical to SEQ ID NO: 15104
  misc_feature (1)..( 3000): 2750-1469P.txt file - cDNA_ID_3081421; gDNA_ID_2910745; Annot_ID_193744
  misc_feature (1352)..(1352): n is a, c, g, or t

SEQ ID NO: 34698 - DNA, 3003 bp, Unknown
  misc_feature (1)..( 3003): 2750-1469P.txt file - cDNA_ID_3081476; gDNA_ID_2926221; Annot_ID_142436
taaaccaacaatataatgccaataagatccgacaaaacagacttccttaaaccaaaccaagaccagactgctagattatcagacagaaagtatctaactgggtctaaccaaaaaagtcaatattgtttcagtggcaattcgatcaaagacagatgttcatcattcaagctcttccatttatagaatactactatttgatcaacaactaaagcaccaaagacatgacttagcttcatatcaatttcagagctcttaagacataaatctgagaccctttttcaaaaatcatagaggaaacaagttgaagaaaactattttaccaatagtaggagcaagatcttcaacggagctagaaatgaagctgacaagcaaactgcttttaccaacaccagaatcaccaatcaacaagatcttaaaagacagatcgtatccactttgcccagaagaagatcccattttctaaaacctcagatttgctgtttctcgatctgtaattctagaagatcaaatcaaatcctacttaaccaccaactactacaaaagcaaacttttagataaacaataatatgaatctatgaagcagtaatgatgataatgataatgataatgatgcttcctcgtttgataattacatctatctgcactctctactttataagtagtagcaatctaagaaaaagggagaatttttatttgcctgtgaatgatgcaaacaaatgttttgattaaaataaggaaaagaaatgtgatgaagaaactggaagatttattctttacggagaaagagaggagaactggtaaaatgagagttttttttttttttttcttttgaagaagaagacaagacacagacctgagatagtaacgtttgttctttgctttcttctctccgacactttgcttcactcaaacgtctctgttttggtttccaggttcttttgtcgacgtgtgtgtgtagcgttttggaatcgcggctgcggttgccatatctattaaccactgcggttggagactaaccgttttcgtgggctaccaattgaaacgatttgattttgtcagttagtttgttaaagcgttttaaattagcgattgtaaaaagggaatgagcattatttttggacagactaatttaaacagtctaaaaaattagacgattcattgaaccgcttagaaaaagtggttggaattcattattatttttaaattttaatgtgtctatactttcatgaattttgttttttatatctataaaacaatttatgatatgtcactagcttactatacatatttttttagtcattaacatcatttctcattgctttaggctatattgtattctctacaatataaattgaaataaggaaaaaaaaaacttacaatgactaaattttagtcaccaatggaactaattattttgtaagaaggttgaaaactacttttttttttttctagaagagtcggcgaacagtgatggttaaatgaattatgggagccatgtttggccttcgtctgctgtcagccaagcccctgcgaaaccccacccctggcctgtgcaaaagtttacgcgcgcattctgagaacgtgctttccacgctccgattaagacgtcactaagagtcaaagcactttgattttctcttcttttctcacaaaacactttctttttttatatacagtatgatttttttttttgtcgtcatttttttttatttatttatttaatatgcctcttatggtaaaacatatttcaagaaggtttatgtttctataaactaaaagttatcaacggcagatgaataaatatggaactaattttctctctaaatatccaaaaatatgagaatgttgtccatggttttgggaacagaatgagtgacggaaaagccatgaaaagaaaaggtatcttaggaatatcatcttccttttgctcgcctaacctttttttattgttcttctctttttgaatttaaaatatttttctgctctctagtaaacatttaaaccatcgtaataaattgagaataaagtgtgtgtatgtttgtgtgtgtgaatgttcggtgtgatttcaatttattggaggatagaactgttgtgtcgaaattgacacaccaaggtgccaagttgagtacaaaataaagatcctctagaggctacatcttcgtctaacaatcctcataagtcttcttcttcttcttttttttttagttttcaacacactaatgtcaagtgttttgttcatttctttttagttataatatgtctcttgagaaaatgttgatatttagtttgttgttgagccatttattttctgagacaaatttggtcgttaatggataatattcttagagatagatctacagtactgtgacttttgtgtaaaaacaaatttgtagccgtatttaatgggctatttcgtatttggacaatagccttttattttgtgggccatgatatgtcaacactgctcaatgcttataaatgttgtcgacatttaacgaacgatataacaccaaaaacttcgagtttgtaaagaaaaattatgagaggattacattatggttagcatatctgactataataaattgaaaaattacattactggttgatggaaagacaaatttttattgaagtgtacttatttctttaattttattggaatataatattcgatatgtgttattatggttagcgtctgcatatattaatttacgattacattattggttaatggaaatacaaaattttattgaaccttaattatttctataattctgttataaaaatatttaaaacagaggtcaatatttttaagagaatgttcaacaatctggttaagtaaggggaaagaaaaagcttagctggctttgaaccggctcggcattcctctgtcacccaccaaaccaaaccgagtcatccttcgtcgtctctctttctttttcttcaacttccatttttcgaaaggcgacgagaaaaagtatttctccagttttggaattcgccatg

SEQ ID NO: 34699 - DNA, 3003 bp, Unknown; identical to SEQ ID NO: 34698
  misc_feature (1)..( 3003): 2750-1469P.txt file - cDNA_ID_3081476; gDNA_ID_2926221; Annot_ID_203321

SEQ ID NO: 34700 - DNA, 3003 bp, Unknown
  misc_feature (1)..( 3003): 2750-1469P.txt file - cDNA_ID_3081497; gDNA_ID_2926221; Annot_ID_142429
gtgcgagaaggctcgtgaattatcttgatgagaagaaagaagatactggaatcaaaaacatcatgatcttggaacgcggctttaacggttgggaagcttctggaaaaccggtctgccgctgtgcagaggttccttgcaagggcgattgcgcctaaaccctactaaaccatattgggacctaattgatgttccacattgtcatgtactaaagttgaatgaagattatcataaataatctcttatcagtatgtttggtttacatggagcacaaacaccaaacttgcaacaacaatactaaaagggcttttatggtattgcacgtttgtggagcgtcaaagccacgttgatatcttaacgccgtcaaaataataatggatttttcggtatcttctctggaagaggcacgttactttattaacgccgtcaaaactctctcgctgatacagagtgtttgctttcttttgtagatttttaaagtcataaagcaaaagcaacgacgacttcagagaactacaatcataatttgtgatctctctccaattttcatcttttggtcgaaattcccaattccctgagtcaagaaccctaatttcaacatggtaagatttgttcgatatcgcttgtttttttttttatggatctagcttccgtttgtctatcttgcggcttccatttcagattgtttgaagaaattcctgaattttgtaggtttgcgttatgtgtttggtgcctctgttcctcgtcccgctcatcaatttaatgcctcgaatcatcgattatttcatggtaattgactcgtgctttcttaatattccttgaagttttgatttttccttggaattttgatgggaagaatgatcagatttcatgggaaattaaatgtcaggatccaaatttcgaattttagggttctaaagagtgtggaattcgtttagtctcaaaggagatatctttatttgaaagaaataacaaaattagagattagaaagggaagaagatagtgaagatgataatcaggataagcgagagagcacatgatcataatctttgcttgtaaaagtgaaaaacgaagagctatatagcttttgttatttgcttgaggttggctcttggaaagttgaacatgttagcaatgtttagatcttagttctgttggtgtttcatatcgatttctttagactgtatcttttttaagtgaaaaaaaaaacagtgctttagtgaatcttgcaggtagtatttacttgtgaacatttgttaactcaagtactgtctgttcatgctaaaaaataaactaggctaaattgtacgcgtggctcggatgggagtacaggaagccagcgagagttcctccagcttgtcctttcaagccagttgctaaaaacgacaacgccaccaaagtaagtgaaaggactttactcattttttattcttggttgagtcgtttcttagttgaagcagtttagttgatggaaacatagattctatcctccaattggtgttatatgtttatacttcaattcaacaatatgccatgatcccagtagcttccgagaactgacattcactgtttatctgatttctgagtttttgtcttttgagccttatgtgtaacactttgtctgttttaggtgggtgcggaaactggaactgaaggtacagaaacaatagctaaacctggcgttgtagaggagacgggtggtattaagcaggattgaggccgagtcttttcttcaataaaaccttttgtatttgtggatatgttttggataagagaagaagctggaagttgaaattacctgatgtgatactgataatgaatgatgtacgttgaaaatgctacgtaacagataattttcttatatgtttacttctctctctctctctctttttgtctagaatctttttgcatgtgggagatttcgaatttctcagtaaaactcggatcactctctgctagttcttgagcttaatgcgttatatgttgtctcgtaaagtctaagttgcattattagttttatggtaagtttagttttagaaacacttaaatttagatttaaccacctaaactttttcaagcaaagccaaaatcattgtcttcttgttagttgctataatatcccttcgttttcttcaaaggttgttattatccatagtgaagagtttggaacaagaaatttttaaagattttgtctattgcgactactcgatatttgatttcatcatcaaacattcaaaatctagtgatgaccacttgtcattattttgtattgtcatgttaaatcttaaatggagagttgaaattcatgtcttttaattttattttttaagcataacgtaatgttttataattaaaaaaaaaaacgaagtaagcatctcgttttgcataattatagtcattattattcatatatgaatggaccaaattgttaaagttgcgagcacttcactcacaagccacgtgcactaagccatcacacttacgctagcgtttaggataaaatcataaaaatgttttaccaaaaatcaaaataatttttaaaaacactttaataaatatcttcgtgtctttggttctgatttgaaaagacaataaagagagagattttgaataacagaagaaatttaatatcgttacctttaattttatattttctgtttccattttaatttgaagatccttccctttctttctttctctctctctctcgctcgccgggaaaaatcgctgtccaaatctccggtcatttctccgaggatctcttctatcaatccaacggttttgttttcatcttctcagatctcacagaacaatagtcaaagactgatgcagaagaagcgttagtacaaggtttttgttggaaagcaattgaatctgaattcatctttcattttcacgctttgatccaatttgagttctctcttccactgaatccctcatacgtaaaacctagggtttctaaattagggttctcctgaggtctgtttatagtgcgtaaagccatg

SEQ ID NO: 34701 - DNA, 3003 bp, Unknown; identical to SEQ ID NO: 34700
  misc_feature (1)..( 3003): 2750-1469P.txt file - cDNA_ID_3081497; gDNA_ID_2926221; Annot_ID_203313

SEQ ID NO: 34702 - DNA, 3000 bp, Unknown; identical to SEQ ID NO: 28812
  misc_feature (1)..( 3000): 2750-1469P.txt file - cDNA_ID_3081501; gDNA_ID_2926221; Annot_ID_203310

SEQ ID NO: 34703 - DNA, 3003 bp, Unknown; identical to SEQ ID NO: 28810
  misc_feature (1)..( 3003): 2750-1469P.txt file - cDNA_ID_3081512; gDNA_ID_2926221; Annot_ID_203306

SEQ ID NO: 34704 - DNA, 3003 bp, Unknown; identical to SEQ ID NO: 28809
  misc_feature (1)..( 3003): 2750-1469P.txt file - cDNA_ID_3081516; gDNA_ID_2926221; Annot_ID_203305

SEQ ID NO: 34705 - DNA, 3003 bp, Unknown
  misc_feature (1)..( 3003): 2750-1469P.txt file - cDNA_ID_3081520; gDNA_ID_2926221; Annot_ID_203304
cggctattatcctctcgttatttgtatcatattttcttatctgatcctgtgtgagtctgaaaaatatgtaggccttcagaatctgatatagagaaacaaacacttgcatagctcgggaaatgctcctagctcttcccgtttatttgtgcaaataaactgttttatttccacaaaacgtatgagcataggatcaataagatgtatatttttacattacaaattgtagttgtcaaccttttttagttttcaaaactgtagttgttcttgtagtgaaaaactgtttgcctttgaatatctggttcttattttcctctttgatttgttgccagaactgggagaagaagtatagaacattgtggtgtttgctttggagctgcagccaagtcaagaatctaatataaaaatcaaggtgttgtcttcaggtgtgcagttttaatgactgaagagtagtctctaacattaaccgttgtttgtttcattaacatgaaccttttatttcattgtccttaaaactttttttaaagagattgagttgaaaattggatcgtggaaggtttttttttttttcaatcaagaatcattatattcagggatcttgaatattttttccatcaatatttacaaaacataatttttgattagtgggggaaatggttctctgaaactcatgatgatatggcgagagacaaaacgatggtgcaaaagatatgatccacaactcgtaaacaagatcgagaaaataaaataagaaacgaaagcatacattaaagaagttaacagacaaactcagactcgataattaagaaacttacatagaaactcgataactaagacgagaaaacataaaactccataattaagacaagaaaacataaaactccataattaagaaacttattattagatagttctagaagaacacatgaagtccatctctgaaacacttagtctgatcaacttaagtacccgtacatgatctcccaatacttagcctcggtaacaaagtgaactttacgctcctcccagtaatctgtcttctctttcaaaccccaaaccttaccctcatcagcctcaccctcagcctcagcttctttctcctttgcccaaatttcaatctcttcttctgacatcatctgtgcaatctcaacgtcagaatcttcttcactctgcttcttcatctcccacttcttgaaccagtactcggactcattcttcattgctaccgtcctcttcacgaactcgaggcgtttagcctcctggatcttgtttccagattcaccgcagtgtgtggtgagggcggagacaaataagcattctacatgaaattggaatacattattaacttagtgacatgaagttgttaaaatttacatgaaatgttacataacaaaaacaaaactctcataaatgaaaaaaagtttttgtatcttaatttatatctatgtacaattaattctctattctccatacaagttacaaccaaacacaattagaatattcttacattatcaaataatttaatgaattctctatttctgctaccatgcttcatgtagaatttctgtacaattcttctcaactaatatttatattcttttttttttgaatttctatttgttcagttggtaattttttagagtaatgtagtgaaagtagaaaatagacggaaaaataaaagtgtaaaaatatagataaaggtaaaacctaaactcatcaatgacttgaacaaaaaatttagttttttttttcaaataatattttcagcgaaagatgtaaattagtcaaatttttaggttattagcgtgaccataattaaaacattaatcaaactccataattaaaacacttatcagataaaggtggaacacataaatttcataaataaaacactttaaattgcgattgatagttgctgtgattcgtcgttgcatccaacggcagacaaacgaacaaatttttgataactgtcgatggtcgttgtcgcctaagtatccgtacatgatctcccaatacttagactctgtgacaaagtaaacatgctgctccttccagtaatcaatcttctcttcaatacctcacaccttaccatcatctacctcatccttaacctctttcttcttagcccatatttccatctcctcgtctattatcatcaatgctctctccaactcagaatcttcttcacctcgccgtttcatcttccacttcttgtaaccgtaatctgaatcaatattcatttctattgtattcttcaaaaaatttaggcgttcatcttttctttacgactgagttttccttcccacttcttcacgtatttcatcgcactgtatggtgacaatggagacataagtttcgacggtgatgatgatggcagaatctccgtcaagttgctacgaactctcctccaacactcttaatgacgtcatcaatccgccccctttctttgcttcttacctctgttttgcaactctccagtgatgaagcttaattagtggcttttaaattatgtaacttgggtgttataattagggccgttctaaaggagtgctggaggtgcaaaagtacaaggtccaacaattttttcttaaattttagagtaaaaaaattgtagaaatataatttttaagaaaaaagtttagaataaacggcaaaaattaggtttagaagaaaaaggtgaacacatacataatttacatgagttaaataatattagacttaattaaaactagatgtcatgtctataacaaagtctatctaagtcaaagaaaccattaatatcccaaagtaactgaaattgacgcccaaaccacgactaagagaaaaaatcaaaaccctcagatgaatctagagggtttcgtttttcaccaaaacaatctctattctattcttcttcaacactgcaaaacttgagataaaaatagagtctttcctcttgtttttctctttgttttgctgattgtatctcactaagctgaagaagcaaacaacaatagaaaagagatg

SEQ ID NO: 34706 - DNA, 3003 bp, Unknown
  misc_feature (1)..( 3003): 2750-1469P.txt file - cDNA_ID_3081528; gDNA_ID_2926221; Annot_ID_142418
ttctaaccggccaatcttgccggtttagattaccggactcggaagtttccgtgctttcgtagtataccatttttgtcatagctaacattctcaccctatattgttttagttatttacattttcctccccatttgttttactcacatcacagaacacccatttggattctcatcactaaacaactcaggcgcacgcatgtgaccataaggatctgcgtaaccttgttggttcatatatggtggtggtggagcttcttgtccatacccttgaccgtaaccttggttcatatacgattcttgcacgtatccttggttcgaatacggttcttgtacatacgattgcgatgattgaccttgcatcatgtaatgttgttgaccgtatacttgtccttctgggtagtaatacatcggctgtggaggataaccgtaaccgttatactccgatttcttcacatccatagcaccaccgtctcctccacctccacctcctcctccaccgccgccaacagcaacttctttcttcttctcaccaccaccgtcgactttcttttctccaacatctttaatctctttcttttcaccagcaactttgtccttcttctcaccgccagctggagccgccgctgcagctgccactggtgctccgtcatcctttttggccggaacaacttccaccgtgcgtttaagcttctcgttaagataaggagtgagttgtttcacgtcaatgatccccttaactataaccaaatccttggcactatcaatagcaaccgaattaacccctgtaaaaaaaaatttatacattaattaattaacattaacagaataattaagctggaagattaggctaactacttcttagctaaccatatgatattttctcactaaaataataaataagctaacaataggttgttgagtccaacctaatttaaggaataataaaactttctattgcttccgttatcttcttcaatcaccaaccgtatcaatttgtttaattaaaatgggattaatgatcataaacatacctttaattttgttgactattcttttgattttgtgttcgcaaccttcacaatgtaacttggtcttcaaaaccacagtactctgtatcacatcaaagaaatttcattagaaacaacgattatgatcatagttaaaatcttaattataactaaaggaatcatctttatataaagatagaaaaagtcatccaaatatatttggaattgaacgagtgtaaataccgtaaagtttcgaagtggacacacacacgttatagaccacaaaaacaaatatatattacttttaatatatagtttcgctatctgaatttttaagtttgtttataaaattctttaattagaagagataaatgacagatagagacaattaatgaattaattacctctttaggtggtggtggaggagaagctttcttctctccttcctctttcttcttctcttcttttttctcaccgggtttctcaacggcggctggtttcttctcagccggtttctcctccgctgccggagaaggcttcttctctgcaccgcctgatgaaggaggtgtctctttcttcggcggcgctactgtagagacaagttcgactggtctcttaattttgtcggccactttatcacgaacttccactggatctacgtttccgatcaccgtcaatttgttactcttataatcaatcttcacatcttccacacctaaattacaattaaaattcgggttagggtttcaaattcgatagtaatcaaatccagagagaaatcagttgatttaaatacctttgaaatgtttgaagatgcgtttgatttttttgccgcaaccttcacaatgcatatcaagcttcataacgacggtggtgattccaccatcggtaggtttcttctctccttgaggtttcgtcgccgtttcttcctttttctgcaaaatcgaaagagaaattgaaatcaatcacgtgtttgttagagagatcggacagagaaatcgaagaagaagaagatgaagtgactaacctcacccatcgtagtagtagtagtagagagaatcagattaatttttactttttaaggaagaatttgaatatacgctctggaaaaaaccgagagaatatatttttggtctggtttggagaataaggaaaaagggcaagatgaggaatatatagaccctcttttttttatgtgtgtatgattaatgatgtgtttgatggtgatgatataactttgtaatatatcattatatatatatatataatacgaggtcaggattagtatgcgggttatttttgtatgccgtcgaattggacctcatcattaaatgggcccatttacgacgaggataaacgacgacgtttatttatttattattgcagccaatgaatgacggtctttaaaacttcttccagtttttaaccgggactggtgcaattgacgaaacgattctcggcccattggatttgactttaagggtttgagtcaaacttattttgccttgactttgtactaccatgctttttgttgaactgttgttgacgatttttatttttttttgttactttagattatgttatactttttggaactttctctctaccgctaatgggtagtaataatgttttctagcatttgactgctgttgagttatatgagaacatatagcgctactaaaatgaaagctaatatcacacactacataaacgtgttaaccagttcccttttgttatctttttcttctgtttcttcctaatctaaaccaattcagcttgatttgatttattcggttatgattcccttaatttaccacgtttaaccgaaatcgaatcaaactccctaagtcgagtactgataaagcgagaatgcaaaaatggaaacttagggtaaaagggaaaaaaatggaagttttgggaaagtaaggaagtgaagcaagcaagggttgggttttagggttttggttagccgtctagggttttcattttcaacaatg

SEQ ID NO: 34707 - DNA, 3003 bp, Unknown; identical to SEQ ID NO: 34706
  misc_feature (1)..( 3003): 2750-1469P.txt file - cDNA_ID_3081528; gDNA_ID_2926221; Annot_ID_203302

SEQ ID NO: 34708 - DNA, 3003 bp, Unknown
  misc_feature (1)..( 3003): 2750-1469P.txt file - cDNA_ID_3081542; gDNA_ID_2926221; Annot_ID_203297
catcagtgtttatcaatctgaaacatggaaatttggtagttattatatttcccgatgattgaatgaccaccaaagactcatgtttattgataagaaactgtcgtctagagatgttctaggtcaaacattgatgtttctttaatactttgtgcagctaaggttttctaaaatgcaggacattcaaagggacattttctagtttatatttggtccagttacgattatgggtttcaagagctttaaccagttctgctcctggctaattcaatcagtttatatttgtttcattggctctttagacccactttggttccttctatgtcgcagcctctcccctacctttttgtacattaggttcttgaattggttttgagtttggcttttgctagataaagtgaatatctcctgttaactggtttctttcaaaaaatttgcagggcggtgtttttaccagataattcggatttcatgatattcaatcaccgtggcagactgttcccaccgcagatcgacatgaagttttgaatttttatcacactgcttagtcaaacactgatctgtgtaatgttatgagatgtttccattgaaattctactctaagtaactactctgctttgcatcaatttttgattcttgaaacgagtcttgtgatgtttctgtgtgtcaggtctctacttagaatcttttagaatgaagaatcaacataacaacaagtgcacaggtcctagcaggataggatactgtgtaaatagtcaaatacaaacaattaaaacaacaaaatttgctattttattcattccggttacaactttctgatacattagaaaaagcataaccgaacagaaccggtttagattctcttggcactgttctggaaggtccaactccaaatgtcatgacgttcaacgccacggcccatggcaccagaaaaaccggggtacatattttgaagaaaaaccttagagagatctaaatgggcaacgatcaaaggcttcttaggtttcttaacggtttctggcgcgagagtaactgtaaccttggagtttctatactcaatccaagccttgtacctctctccattactcagcttgaactctttaaacgaccagtgtttcattttcccaattcctgtctgaacccaataaccagctttctcagcaacaacggaagtaacagagttgatattaatcccgacatggttatcattaatgtctccaaaacctttgtcctgaaaaacgtcgaattcgacagcaaagatgtggtttttggggttgccattgttggttttgttgaatatcccgaggtatccagcgggtccaggaccgtcactttcaatggaagggacgacaacaaaagcaaggccgtgaccaggggcgggtttgatgcgagtagagatggagaaagtgaaagaagtttcaaatggataaggagaagaagagtttgaagaaggcttgaaagggactggagtggaccaaagactttggccgtgagagaatgggttctcgtctcgtgtcatggagagagctccggagcggctgacgccatcagaagcaggaccgagctcagcgtctccaaggaagaccaactctgaggttttgaggttgaggttgaggttgacggcggaagtggtgtgagctaagagcagagcaagaaaacagagtttatgaatcttcattgcgttttcgtaactgctgtttactcaagtgagagtttgaaagagtgaaattattaacgtggtgatttataaagagtaaaacataagcccatgtacatgacgtcatattgtatgatgtcaagtaaacgcatcacctacaagatttccttatcctttccataaattgaactcgaccaataaaaaacgtgattgttaataatggaaagaaaaaaaaattaaaacaaaatcatcgaatggtcacatcagcacatgacattttgtcaagtaaacgcgtgaagacactgttgtgaatacactcattcagcagagtatgtgtacagtgtacgcatatctcgtatattagattgtacttgtcttttgcgatgtgaaagcatagtatacggtatcattatgtggatgaatgaatagaaaacactacgtcaaaaggataaggaaaatctagtgggttctttaattctttacccaccacatagacaacactacgtcgtatagaaatttacttagagagtattgaagaggaacatagacaaccttgtgtttcttcggtgtaattggtctagaaaaggaccaatgcaatgcaaagatcgattgctgtttatttttctacgagagatattttcaaagaaaattcactcaggaaaaagtaatttgctttgcatcccaaattctcatcagtttatcacacatatgaaatgttcaacaatcttaccattgatttcttagtaaatcgatctctgatttttcgtttgaacgatttttaaatagtaatcgtaatattgtagtttaacccaaaaatacttgcacaattggttaaaaagttcaaattttttagagagatcaaaggttcatattttctcaacaaataaatattgtgaacttacaataaaaaatagaaaatggagggttcttttgcaaaaaggagcaaaaacggattgagcagtgtagttgaggctttaaatatggcccatgagtcgttgtggcccacaacttaatatagaaaaaggtgcaagttgcataggccaacgccaatgtaaccctcattaacttcattattagtctaagaaaaactcttaggcacgatccgcaagctacggacagcttgagattgtcttgtcacactttatttttttaatctctaaaagttgaccgttgaatttgtattcgaacagcctgtaatatgggatggagagtggatagcctgtatacatgattatacattgtttggttagataaacatataccaatatagagagagcagcaaacataccaaaatcattcaaatctctcgcttaattactcagataaactctctatcggcgaacgctatg

SEQ ID NO: 34709 - DNA, 3003 bp, Unknown; identical to SEQ ID NO: 28804
  misc_feature (1)..( 3003): 2750-1469P.txt file - cDNA_ID_3081552; gDNA_ID_2926221; Annot_ID_203293

SEQ ID NO: 34710 - DNA, 3003 bp, Unknown
  misc_feature (1)..( 3003): 2750-1469P.txt file - cDNA_ID_3081582; gDNA_ID_2926222; Annot_ID_203370
gatttagagatgtatattaacattcttatttccactgggccaatagatgtttccagaactttgatgtggaagattcttataacaacttcattaatttgaatatcccaaaggagaatgaaagaaacagaacaaacttttatttcatcttagaacaaaacaccatatccctcacgcattccgattacattcatcaaatccataaatcaaaacaaaatagataaatccaacacacaatcacaaaacaaactcaagcaacttgaacttgaattgtctttggtttctttggttccggaggaggaagtttctgaacagtaaccttcaacacaccgtcatgacaaacagcagagatcttgtccaaatctgcattttcaggcaactgaaacttcctcatgaacttacccattcttctctccatcctcacatacttcacaccttcgttttctttgttctctctctgcctctctccactcaccacaagcacattgtcgttctcgacctgaaccttgatctcatctcctttgattccaggcatgtccacgacgaatgcatatgcgttagggtgctcgatgacgtcagcaggtgtagcagccattgccttagcgtctcgcatgtaaactcgtgaagggttgttgcgggtcttctcgttgttgtggtcttcggggacttcaagcatgtcttcgaggattgagattattggaaaccttcctaaatccattgttagttgtgttgtgtttgctttcctgattctttgattcttggctttttgttttctttgatgagtttgatgtgagaaatgtggggacttaaataggagtggagatggatatttctagaggattgtcgagagagcgattgtcgcggtctttagaagttcttccgtattgttcgagaaacgtcttggtcgttctggtttttgtgaactctgtaactcaggtttgataaaatatgagccataactttacagaatttttaatatctatatgggcttttaaattaggaatatatcaaggcccattccatatgtgaaaatagttcatgattcataagattagtgttttagcaaattaaagaacaaattttgtgatttaaggaatccgaacaatattgctcattttaaagaatacattcaactggaaagtacatacaattgctgaagacttggattacaagtgtacaacatgcacctcaagatcagaagttcaaagtcttaatgatggaaacaagactaaattagtatatgctctggtttctggtcagaaaaattaatgaaagaccatatttattttagtgaccaaagaaaaatactatatatgtggtagcactaactcactgaataccactaaatcgtgtataacgacattaatataagctattaaagacggttacaaatctgcacaaaacttgatttgtcttaaaactcagttgatgttatttgcattcgcaaatgcaaatttcatttaaaaaataatgtagcagattgagatatcagacttcgtattatactacagatgtagtagctgaagattcagttacgttatccaacatgaaaaaagtacaaagagttgtttggattttaaaatcagaataacaaaattgtttcctttcatctaatacttaaaggataaaattgaatatgtaagagtttttgcagatataataacactgtgttactgatctcatacccataaattacttcaagggacataactccaaaaatatattttgctgactgcagagataagggtgaaatgcaaatgtggatttgatggccaatgtgctaaatagcaccaatgatattaggaaaggatgaacagtaataatttctgcaaaaacagaggaatgaccattcggtgtcttttttgttgtggtcctatttttgcctcataagcatggatggttcaagagagcaaaaacttcattgatttgaagattgaacacaaagacaaatatgaacagagaaaactatttttatttcattttacaacgaacaccaagaggtagttgcttatcgattacattcattaaaacacaaaaacacgatcacaaacaaactcaagcgacttgaacttgtatagtctttggtttctttggctcaggaggaggaagtttcggaatagtcactttcaacacaccgtcattacaagccgcagagatcttctccaaatctgcattatcaggtaactgaaacttcctcataaacttccccatcctcctctccatcctcacaaacttcacaccttcattctccttgttgtccctctgtcttttgccactcaccacaagcacgttctcgttctctatctggacctgaatctcatctcctttgattccaggcatgtccacggcgaaaacgtacgcatccgggtgctcgataacgtcagctggtgtagcagccattgcctttgcgtctcgcatgtaagctcttgaagggttgttacgagtcttctcggtttgttcttcaggggcttcaagcatgtcttcgaggattgaaaatattggaaaccttccaaactccaaatccattcttagctgttgtgttaactttcttgcttcttggctttttctttggtttgattgattttgattttgatgtaagaaagtattaaatagaagttgagttggatagttctagagcaatgtagagagagcgattgtttcggtgttatagaacttaaaagcgcttctctaacgttcgagaaacgtcttgatcgttggagaagtgtagatggatatttctagacgaatgtagagaaaagcgattgattcggtcaggcccaagaccaattcgttttcaggcccatatgtattctgttttggatttagtaaggatgttaaatttatccggtttggtacgatttcattcgaatttagtgtataaaattgattgaaccgcgtcaatacggttgaaacgcaaacgcagaggattcatgagtcatggcttttgtgaggtgaagtatcaatatcatctacctacctatatgatcatcggactaaagtgaaatg

SEQ ID NO: 34711 - DNA, 3000 bp, Unknown; identical to SEQ ID NO: 28824
  misc_feature (1)..( 3000): 2750-1469P.txt file - cDNA_ID_3081586; gDNA_ID_2926222; Annot_ID_203366

SEQ ID NO: 34712 - DNA, 3000 bp, Unknown; identical to SEQ ID NO: 28823
  misc_feature (1)..( 3000): 2750-1469P.txt file - cDNA_ID_3081594; gDNA_ID_2926222; Annot_ID_203364

SEQ ID NO: 34713 - DNA, 3000 bp, Unknown
  misc_feature (1)..( 3000): 2750-1469P.txt file - cDNA_ID_3081598; gDNA_ID_2926222; Annot_ID_203363
aaatataggctcttggtggcaagttacttacggaatatcccaaaatgaactaatgttaatgtgaacaacgtatcaactaacaatgcatatatatatactaaggatccaaaagctttggaataacatatggatcatgtctgtcgaacaaacattggatgatgttataattctcatattaaaacatgtagatatagattaatttaacaattctggaagaaagcataactattagtggaacaaaagattggactgaccaattacaaatcaacagagcctcatcatgaaaaagttcagccacaccctcaatatccaatacggcgctaaactaaagcatcttaaagcatgcatgcttttcgaaaaacattttataaatggtatgatttcttacatcacaaattaaattcgtcttattaccaccacaaattatataatataactacaagaatctttctactaaaacatatatatatccctaataatttatactagtatcatctttttttttttaacatcactagctagtatcatcttatatataaccatccgaaattagaattagtagggtacataatgacaaataaaactataagaatgttccatttggaacaagccacatcattgttaattgatttcaaaagttttcatttgaaataaaataaaattaacggtgatgagatctgtcgagaatgcgaatacatatgtaatgtaatgatgatgacacctggtgcattgcaagctttcagttgcagcattggtggtgcgttcaatcagagtagaataaaattagttattttctgtcagaggaggatagataccaccacaataattaaactataaatttctggctgataattccgaatatggaagtgcgcatacgttgtccttccttgacaactttcctttttaggcaaaacacacacaattgcatcatattttgtttgatttttgtttttctgttattgctctttttttttttaatgcatgcatttttgatatttacttatataacttgcatgtttcaacttaatttacaagtaaatgaaaattacaaaaaataaaaagatatacaaaaggaaggtataatatatacattatagaaattccaaaaattaattgtgtatatatatttatggtatatcatcgaacgataagggaatcaaatgttgagggccatacccactttgacttctaatttggatccattatggattcggtgtggcttgaatttgaagcctcaacaaaaggaaaaagaagaaacaaagttagaagatggttaaattaaaatgcattaattagacctaataatgtatttctacgaaaactaagtaattgtaattttattgcaagtgacttcatcaacttaatcaaaaactatccgtttaccattagttactgaataaataaactagtcatgtaatcattaatgtttcgttgactacaaaaatcaaaacttgtatccaaatccaattctagaagcgaatttcttaattagtgcaatggaagttaatatgtctctttttcattcctcttttctatcatcaaaaagctccaaaccaaagtccataattgtacttcagatcatcgatcataacatggttaggctctctctctctatctgttgtttgtacatgttttaaaatcctaatcaaagagataagtatatcactattgctttagtgttgatgttagagatccataaggcaatgttcgtgagacggatcacagatgacagtactagtgatacagaatcacagatggtgtacttaccattgtttgatcaaatcaaaaagaatatataaagtgaccacagacagaacaagagtttaatattactattaagattctcctctgatactcaaactctgtttctctttccactttcggcgtgggaatcacgtggtcagcccctgaggagacacgtggtgggaacgaatatgccgcccaaccccacatcgtaagtggacgagacgacatcagaaccacgctggtcaagtgggtcatctcatcattttatccttctcttttaagatttcaattcgatttggtttaagtttaattgtcggtatatggcatatccatattcccggttaagtagtcaaccggaaatgttgaggagcctgtgggctactgggcttgggcttagtaaaaggcctaagagaccattcgctgcatccagatgtcttaaaacttgtcaatttgtatgttacacatttacttttttcagttttcggttttggaccttagctatgataaatatttcggtctttttttttataatactatttatcaatttactttctgatacattaattatagaaaactatcaactactttttcatttgggaaaatgatagctcgtggaaaatgaagccattgattaaaagttgtgcagtatataatatggtcttaaatgttagttggtagtcacattcccaggaaaatgtgtgactactgaatacaaacatcacgcctatatttgttgttcaataaagaaaaaagaaaaaaagaacatcacgcctatcaattaatttttggattcgtgaacattatcacacacaacttgcccgttgaccgctaatgcagatcaacggtcaacggtcaattacacacaaaaaaaacaaacttctacttcatatttatttccattattcttaatttgtctgaaatttcacactctagtaaattttcttaattttattatcttctgtttcttaattattaaaattttccaaacgcgttagcgttataataatatctgttacattttttcttatttgctttttcttatctccatttgctttatttgttttctctcttttaaattacagaaaacaaatgaaaataattcatataacgtggagcaacaaattgagaccagctcaaaagacacgtccttttttgcgttactattattctcctcctttctctccaattattctctgagctgtaataacataaacaaaaaaaagattctctcgatcaaacttgccggcgtccatg

SEQ ID NO: 34714 - DNA, 3000 bp, Unknown; identical to SEQ ID NO: 28822
  misc_feature (1)..( 3000): 2750-1469P.txt file - cDNA_ID_3081602; gDNA_ID_2926222; Annot_ID_203362

SEQ ID NO: 34715 - DNA, 3003 bp, Unknown
  misc_feature (1)..( 3003): 2750-1469P.txt file - cDNA_ID_3081606; gDNA_ID_2926222; Annot_ID_203361
ttggactgatggatctcacaaagtcactatcccattatctgtcaggacacaaatgttgatgtacttcgaccagtgagtttgcatttttttcccaattaccatgtctttacttaacccagagcggtggtgtgtaaaaaattcaataattgtgggggaataacatatactatctaaaaaccatcatatactgcaacctattgttttctgccacttaaagaaaaacatggattcaaagttgaaattctaaacaaatagaaacacacaaaaccaaaattttgtgtttggatgttcttgataagcattacattatttttatatatctatatatatattaatatatgcgtttgcaataggtaacaaaatgtatcttataatttgctctcttttttttaatcattttttcattataatttccggttgtccaattttatttgtagggattattagaaattttcgaaattttcgggatatccgtgaagttgggccgaagcccattcgtctctacgtgtcaaaatgaagtgatttggtttttcttaataaataatgaagtgaagtgaatttcgatgaagaaagaaagacatgttataaatgctgactttttttatttcatacatttttaagcctcgatcgagcggaatacaggtacagagaggacaatcaattttaggtaagccatgttggggacatcacttttcaaattgtcttggaaaataaattcaaatattaaaaggttaatgtctttttctatataacagcataatccatatatatatatatatatatatatatatatatatatttttttttttttcgcaatgcattaatgaaataattgcattagaaatgaatcattcatgttacttttatttttatatcataaagaatcccatcgaattttagatatcgtaagtaaaagatacggccgtgaatgatacaaaacagaaaaaataaataaagatatatattggtgcatgcatttgggtgcttgcattggttttgtatacaaaattggcccggtcaatggtaatgaagacatgtatcatataaaattgttgtagatatatctaagattatttatttatgttggcatgtttaaagaatgataaacctacaaactcttggtaagaaataaaattattaactttcgaaaagaagaagaggctggtaactgaatgcattataaaattaaaatttcggccgccagtgactttttagtcttcatcaaaagtgtgaatacttagttctggtcacgcatgactcatagagtgaaaaaacaaatacgtacgggagacctgatactaagtttattttataagaaatgaaaaccaaattctgaaaatttgctacttaacttctctttttcccaacaatgcaaaattgaatatgaatggtgagataacaacactattaatacaatcattaggttatatatgcatgacatttatactattttaatttgtttatgtttatacgattatatattcgatgtttcggaagtgatgtgtcttatatgtttttaatttttctggtttttttcttcatatcgggttattatgggaaagataactggttgctatatcgatgtattgaaaataacctaaaaactaaatttagaataataagtaacgttgttttcgaatgatttccaaaaaatcggaatggaaataagaattaacttctcaacaacatgactctaagatctcaccaaaaataacaacatgactctaagaataagaatatcaatgcatcgttatatatatcagccagcaccaccataccatgaatgcatgatcaactataagtttataacagttcacatatccattaatctaaaagactaaaaccaagaatggatcaaggtagttccgtttaatttattgcctcaaccattaataccctcaagaaagcaaacacgttaaagaatttgatatatagtgatcaaacgagaaaaaaaaatggataccttatattacatagttgacaaaaaaaaagttggatataaaaatacaaaaggagacagattggcgttggacgagggaaggagctgtgggaggctcatgtgggcttcctctgttcgccatataactaatttcgattttagtgtatacgtatgcaattttttgtcacctatggccgttgtccctggatgatgaccatggcctacaagataaacaaagaaaaaaaaagatctgcagtgaataataaaagattcaaagtgttcaggtaatttggttgagtatgtgatgaaaattgtctaatggtttcaagaaaaaaaaatcaagtttttatttgaattttggatttttgaggaaaaaacatgtaaatacgctaaatgcaccaaagtgatgtttttcaacatcttgttaactgttattcggtagattaatttaaagtattttttttatgaaactccgatcgattaaccgccaaaataactttttatttacctccaagataccataatcattatccaccacattttcttaataattattattaagctctataattctgtaaaaaacccatttaaatacaaaagccgatttcttccaatctcaagttagagttttttctccattttgtttgcattctatatagtatcgtcacacaaaggtttcgtcttgtcactttactttgtttgcccccctttggttttttgtgcttcccttctcttttttttttgtttgacgacctgagggaataccttgatttgtagatttttatccattaatggaagataatcagcgaagcagattcagaaaaatctgtgtcttttgcggaagccactctggtcacagagaagttttcagtgatgctgccatcgaactcggcaatgaactcgtttgctctctatctctcttctcttcttcttttgattgcttcttgtttggttttgtgataaaaatatgaacttttcttcaaatcaatacagatatcaccttcgctcggtttttgaatgtcaaaatacgaactttttagtttacttgttcatttcaaacaatg

SEQ ID NO: 34716 - DNA, 3003 bp, Unknown
  misc_feature (1)..( 3003): 2750-1469P.txt file - cDNA_ID_3081617; gDNA_ID_2926222; Annot_ID_142450
aactgtgtttatcaaaccgtttattatcacccccgagaccgtgagacattaagtaactcagcaaagcgatttaaattcgcgatgtaataggaacaactgatctcatggagtcttggttacttgtactgatatcacctgactcatcatctttcttaggatccaatttaaagaatgagagaacgattgaagcaagctgatgctggtgagaagtgaactcatgatcagctccttcaataacatacagcttatgattctttatctgtttagcaaattcggacgcttctgttacatgcacaatcctatcatttgacccatggactgtcaagaccctgaaattttaagagaagcattagttcctctattagaatgaaaccaaaagagaaaaatccttatagagtatgatgatagacctgcagttttcacgaattgagagacatgcttcatgagcattggttgtgagacggtccattagactctcttctgttacccgatattcaaactttcctgcaacgacctcgaacagtaccggtaaatgccaaacaccatgtaacctggttctaacaatcataaaactaaaaagataaaagaattaccctttctgttgctaacatcaatgaatccattatctttgattctcttgaagtagtccttaccaagccgaaattcgattcctctgtcaagaaaaaaccgccctgagatattcacaacagtctgcacatcattgtactttgctgcatacaaaagcaccacatttccacctgcacaaaattcaatgacaacaacagcaaagctccagtcttcagatattctttcttgaattttctgaaacatgagatccacattagttttacgttcatatacctttactatgtccgataatcgcagaaatcacacggttaacaccacgcaagtgttgcaaaacagagcgcaaatcttcaacttcacggcgatagttaccatactgaaatgatccttggctttccctgaagttgagaaacatgagtgtaaaggcaaaaaaacaattcaaccagtttaaaagaaagaagagagatgttacaatttacccgttgccagcaaagtcaaaccggaaagaactgatcattgctctttcaaagaaacttgcaatggtcagcattggaatccgattctagaagtaaatttatgaaaggttacaatgtttagagaaaaccaatacaaattcaaatctcatggaatctaaaatgtgaatcaaaggaagttgaaaatgatgagaatggtacaaaaaaaaagacctttgatgaacgaaatccatggcagatgacaacagtctctgtagaaccagtatcatgcaaaactcctacgagtttctcaccatgactgttctcaattacaactctttggtgctgaatctctgcgcataatccaatcaccaacaatgttaaagcagatataaagcttgttctatgatcaatcaaacattgaaagccgaatacaatcaaattggtggttctaggaacaatttgaacataacctcacacatcaaaatcgcagtacaatccaaatgataagcgaatgtcagaatcagaagtgtatggatcacaattcaatggtacaactttagattttgaggggtcatgaatcgagaaaggagctgaagcctacctgatttttcgatttgttcatcgctagactgattccggcgagtctctgacatcgtcgcgcggaggagatacctcgaaaagcttaaagtgactcggaattttttcatattatataattccaactagtaaataattaatgtatgatatggtcaacgtaatttggattaggaagaaaatcaatattaatgtgtcgaatatagaaagtgactcttgggattttatcacaatttgttttttattttttttcgtttttagtacttgatcattttgatttgaggttataaatgaaatattttgtcaaaaataacactttcactttttgtgtaataaaaaataattattcgacggttcatgttattttgatctgaagttagaaaaggattattttatcaaaaaaaaaaaatgtataagtttcaaaataatactttccctttcagtgtaatgaaaaaattgtgtcaaaacatgacacaaatgatatctctttgttataatcacaaatttgaaggccttaaatgattgcatattgaaaggaaattccttacataaacaaagaccatcgaccaagttgattaaaagcatgactatttgttaatcaaacgcataaagtaaaatagctatgatatcaaatggcaaataatatgatatcaagtaaaaatagctagctatcagacaaaataatatgatactatttgttaaaaacaccctactattattattggtgtaattacttggtactaatcatgaaccccatattgttgttattggtgtgattacttggtgctttcaacgacttaaggattgagccatacgatcgatgccgtctcattctctttaatacaaactttaaagattagattattacaacttgaaagggtcttttcctcaaacaaagaccatccatatacaggtctatcatatactaaagaaaggataagtattttcataaacaatgactaaggaccacattgactaaaatataattaacaccacttgatgaagtttccgcaatgataatagaactcacatttagtgaataatccaaagaccttacctgtaatgtattagactattagtattaacaaagactggcgactgcaaagcttaattaataattataataaaaattcagtagagctaattaacaactatcagtgggtttcttccacgatacttcgagcttaagacaaaataagaagaatttgtcaatgtcaactccaatggcagtataagtacgatgaatttttctgatgactctataatcatttgatcttggcaagatctcgagagcatttataaagaaattaaagcaacacatacacacatcaatttcgtaatcgttgcagagtaagaccgatcatcgatg

SEQ ID NO: 34717 - DNA, 3003 bp, Unknown; identical to SEQ ID NO: 34716
  misc_feature (1)..( 3003): 2750-1469P.txt file - cDNA_ID_3081617; gDNA_ID_2926222; Annot_ID_203357

SEQ ID NO: 34718 - DNA, 3000 bp, Unknown; identical to SEQ ID NO: 28820
  misc_feature (1)..( 3000): 2750-1469P.txt file - cDNA_ID_3081621; gDNA_ID_2926222; Annot_ID_203356

SEQ ID NO: 34719 - DNA, 3003 bp, Unknown; identical to SEQ ID NO: 28819
  misc_feature (1)..( 3003): 2750-1469P.txt file - cDNA_ID_3081625; gDNA_ID_2926222; Annot_ID_203355

SEQ ID NO: 34720 - DNA, 3003 bp, Unknown
  misc_feature (1)..( 3003): 2750-1469P.txt file - cDNA_ID_3081627; gDNA_ID_2926222; Annot_ID_203354
aatcatgagaaccgcagcatctctgaatatatccacctgaaataaacagaacatacgtgaatatgcaaagctcaagactcaagagttaaaatttaagagattgattacattaaaacacaaattaaaaggaactatagtcggagttacctttgtaatggtagaaccaagatgacaatgagctccaacaagcttcagctctttgggatgtgccttcacttcatccagaaaccattgaagcttctcgttcctaataccaaacttcgagttcttgttcccagtagctacatatggatgcacctaaaatggtaacaaacagaaaaagctcattcatatccaagctaaagaatagattctaggacatgctgctaaaagattgaaaatttaaccatacctgaggatcaacatcaggattgatacgcaacaacacattgacctgcttaccagaaattcttgaagcttccacaatgttattcaagtcaaactcactatcaacatttacgaaaacaccttcttgagcagctagaactaaatcttccaaagactttccatttccattgaaaatacacctattcatttcatccacaccgaagacatggtcaaaaactacacatcaacatgagaccaaataaaaaaatattcaaactttattattggggataaagaatcgtactttgtgggatcgaaaccagcaagaagagcaagcctgagctcatttccactaaccaacacagcaccacagcccaaactcctcaaatgctccaaaatcttgagattgttattagctttaatagcgtaaccaataacagatctcactccttccaaagcctctttataagcctcaaggtttctcgtgatctgaggtttgctatataagtaaaagggtcgtttctcgactgtttccatgatatcttgaaccttggttccttcgcaatagagaaacccatctgatgatttcttgaaacagtggtcgaaagaggaagcagattctttcgtgagggttttggtggagttttgggaaacggcggctttgacggagaggcgtttaagtggcttcaatgttgacttgagagacaaaaatgggattcttgagagtgaagtctgattcaattggtactgatttagggttccgcggattgatgaaggttgggagagaaattgagtaactgccgccatggctggaggatttttgttaggtgtgcgactgttacagtaacactgaagggtttagaaaaaaaaagtcaacaagtttaagagtagttcctgtcgggtccggttttagatatccgacaatatcgaaccggtggttatagtcgaaccgatggttaaaagaagaaagaacaaagtcgattttaacttcttttggatatggtttttgtccttgggggatagtttctgctagtgtttgttttgttcggttgtgttagttgtgtgttgtaataatcttgatgcttaaggggtcacctaaagcagtcatggaaatctagccctatctataaaaatttgccatttctcatcacctaccaatacttctatttgttcgtattatgcggatattcagaggataatgtaaaacattttgttgaatgctaacgatgaagtgctctatctagccgtgcacgttgtggagaagttatgttttagaatccacatttgttgaagttatgcttatcatactctcttaattatctatatctattacaaagagcaaggaatgttcttagttaggatttgttttgtttggcaaccattgcttctggttatttgtgctctgcctcctttgtaagttaggatttgttttattcttacaactttgcttctctcgtcatactatataatctctgactatgtatgtaattgcattcatgtcgatggttgtgggatgtatatttaggtgtttgactgtaagacgttaaaaacaaactttaccataagttattgggatgtctagacacttttatggtttggtgaagtaggctcaatgttttgccctttatgtttccattgttgatgtttatgtaccttgctggttggaaccacttgtggatgtttccgacaatgcttctctgtaatgcagttatcttttaatgaaatgtgatcgatcttgagtgttatttatttttatttttttaaagactttatggtgtggacacttgaccgggtgataattggtaactatactacatagttagagagctcttgaattattaatcacgctaaatcttgggaattgagagctcggaagcaaaggttattaacaaaattcaaagcagagcagcattgccgatgaaataattattgacttgggatttactctctgaagtctgaaccaaatcgagattattctaattatatttttaatttcggatccctaatctattaatactccaatatctgcactcatttaattatttcctctttttttaacctgcactgacttaaattcaaacttatttcaattgcgtgcacactttagtgaactactaccactatcactatatgtgtcggtggattattatttccgtcattttgatatttaattacatctttaattgttactcttttttgcccattcttcttcttcatttgattacattatactctattgtgaattactaaattctgaaaacaagaaaaatttgagtacacaggacacatcttagtattactcgttactaaaatactacacgtgtaaataattttttcagaaataaatggggccactttgtaagtaataaatcagcttacattaattattttaccacccaataaaaagattccacagacttggcatggaagtcatgaacattcacaaaaatctaagaaaaactgaaaaccgaaaaaaaaacaaattattaaaaagcaataaataaataaactcagaaaaaaaagctattaagattccacaaaaactctgtattgtctctttctctctcactatctctctctcttttgtgagctcagatctgaccagagagaaagaaacaaccggagaagaagaagatg

SEQ ID NO: 34721 - DNA, 3000 bp, Unknown; identical to SEQ ID NO: 28818
  misc_feature (1)..( 3000): 2750-1469P.txt file - cDNA_ID_3081631; gDNA_ID_2926222; Annot_ID_203353

SEQ ID NO: 34722 - DNA, 3000 bp, Unknown; identical to SEQ ID NO: 28817
  misc_feature (1)..( 3000): 2750-1469P.txt file - cDNA_ID_3081638; gDNA_ID_2926222; Annot_ID_203351

SEQ ID NO: 34723 - DNA, 3000 bp, Unknown; identical to SEQ ID NO: 28816
  misc_feature (1)..( 3000): 2750-1469P.txt file - cDNA_ID_3081642; gDNA_ID_2926222; Annot_ID_203350

SEQ ID NO: 34724 - DNA, 3000 bp, Unknown; identical to SEQ ID NO: 28815
  misc_feature (1)..( 3000): 2750-1469P.txt file - cDNA_ID_3081646; gDNA_ID_2926222; Annot_ID_203349

SEQ ID NO: 34725 - DNA, 3000 bp, Unknown; identical to SEQ ID NO: 28828
  misc_feature (1)..( 3000): 2750-1469P.txt file - cDNA_ID_3081661; gDNA_ID_2926223; Annot_ID_203408

SEQ ID NO: 34726 - DNA, 3003 bp, Unknown
  misc_feature (1)..( 3003): 2750-1469P.txt file - cDNA_ID_3081672; gDNA_ID_2926223; Annot_ID_142475
agccccacccgtttatatttttcgttcataaaaaatttagtggatcggttcaagttgtatccgactcatacattggatattcgatatttaatagtatatatgtttagaagatttgattaagatttaaatttatgattcttctatcattttatttcattttaaaaaaaaaactattttcaataatcatgtgatatataaagtaaacagaaaattaattttttttttactttatattatgatttgaaattttaaaaacaaacatatattactcaattgaaaaaaattgtgtatcaacgtttcacattgactaaaatatttagataataattcaaaatcatgaatcagattaacattagtaaaagaaataggatacacaagtgagttcttcaaggcgtcttggtccattgtagggaatgacttcatagctgcaattcaatcttttttcatcaaagggtttttaccaaagggtttaaacactacaatcttggttcttgtaccaaaaacaaaggacgcaatgatgatggaggattatcgtcctgtttcgtgctgcaatgtcgtatacaatgtcgataattgcggtgggctttttaaattgcatttacattgcatatttttggtgtgtttttgtattttttgacttatagttcggatggtcgttgttgtgatcctaactttaaagcggggacttttcgtgattatgatcccattagtagagtggagactggtccgattgagagttgggacatccggtataacacccgtgcttcatatgctcataagattttacggctcgtgtccacaaaatcattggaccttttttttgtatttatctctttgtcccttttacatagatcccattttgatcttacaaggtgaatatttaatgggaataaaatgaaggaaaattaatttgaataacaatggagcatttattggtatggccgtatgatgtttcaagccgcgtaaaatgtttaaaattttgatagtcacaaaacaaaacactgccgtaacaatttgataaaatcaaacggaccatcgctgattacgtaggagagccacatgggctcctttgaaacttataccacatgcaaaggaataaaagtcctttagtcaaatatacacatgtatcatgcactaattttatttatcaatcatattcataattcaatatgcaaactactattgggcatgagtttttttttgttcttctactgttgtcgcatgttgacccatattatctactatttatagaagaagctaatgtatcgttctctaaatcaattaagaaaattagttttacaatttaataatccttggaataagaaaaattaaacatttgttccttaagaaactgagtttctttcatcatgagttatatggttttaattttataaggtaacgaatatataatctcttaagaaagaaaaaaacctacaaaagtttcatacttactaaatttaataaggagtgcttatattactcttacacttaaatttcttaatcgatcgacttagagaggaaaacttacaaaaattgaaaattttcatacagattaattgtattaataataaaattttattcaaaagaataatcattaattctaaccaccggtattaatgaaaaagatagtaaaatttggtagtactatgttgataataccccatttactaaactcaccattcaatttttgttctttccttttgtattaactatgtatcttttaataaagtaaaatgtattgtatattgttcttagaaactaatattttactttaaatttggggttttgtttaaaattgtacatatagaattacatatatataattttcttccattctaaaactcatttatacatttaacatttgaagcatgatcatttttaatttttatcagttaaaagttgaagtatatttttgtaatattatattattattttaccatctcatttattttacatatttcgtttttaatttagttaaatatttttattaattataaataacataaatatgcactaaatgaatattttaaattttgttttaatttaaattaaatagtgatgtttagaagagtgcttaggtggatgcttaggtggataggctagatggagaaagtattatcctcttatacataaaatatgatgcatagtcggtgattcgtctatgtttaaaagacatggagctgaacaaatagattgtgttgttttcaaacaaattgcccaaaatcttgcaaccagaaaacaaaactgtaccaagtcataatttgtcctcagccggctatcaagaacctttctttacaccttcatagttagctggcatatttatgatgtctgattttatttttgttatatatataatgtacggatttaaatcaagaaaataaaaataatctcgttatgaaacatttaattaactgaaaaacattctcagtgttttcttctttcagattttattcagtttctatgattttttttttttgttcaaccatactttaaattaaaccttacgaagaggttgatactaggactcagcctctgaattagatcccctagggatgaaaacacaagaaaaaaaaccccaagtttttcaatgcacaaaaaaatatctgacaaaacacgatgcagtttcgataaaaaggtcttcgacttgacttgctgaccgggacacaatctgacaatgtttgccacaaagaaaatactataactttaataataccgaatttttaagatcaaatagttaaagaaaacaaaaatcagaaagacatgatttgccgttttgcgttgtcagcacggatcaaaccttgtagaaaattagaggatactggtcttacttattttactaaaattagaattattggaggatattatagactttcctgttcgtactacgtcgtttacaactataaattcccttccacttcttctttgcaacatatactcatttcttctttgttagtgacaaaaaaaaaatcatttcctcagagttagaccaaagtccaaacaatg

SEQ ID NO: 34727 - DNA, 3003 bp, Unknown; identical to SEQ ID NO: 34726
  misc_feature (1)..( 3003): 2750-1469P.txt file - cDNA_ID_3081672; gDNA_ID_2926223; Annot_ID_203404

SEQ ID NO: 34728 - DNA, 3003 bp, Unknown; identical to SEQ ID NO: 28827
  misc_feature (1)..( 3003): 2750-1469P.txt file - cDNA_ID_3081676; gDNA_ID_2926223; Annot_ID_203402

SEQ ID NO: 34729 - DNA, 3003 bp, Unknown
  misc_feature (1)..( 3003): 2750-1469P.txt file - cDNA_ID_3081680; gDNA_ID_2926223; Annot_ID_142473
aattggctctgatcctccagccatgacagctactactcctatgactatagacaatgacaaaccagtctctctggagaatccagcggctttggatataggtgtgtgtgagaaaacgggttctgaggaccgggataaacaagaccagaactcaagagactcgggctcttgaacttctctcgatgttttgtttttgtatatcaagctcagagagctgtgtaaagcttctcagttaggcgttgttaaagattgatagcagagaaaaaggatgagatgtaacagagggatgttgagagtctctcaggttagttatatagtgacccggtttgggttttttttttttgtttttgttagttttcttacttttcaaaattaacaatattttgtatcaatccatttatgtttctctttttgttgtgttttaatcaagttttaccattttagaatataatgtttctaaatataacatatactaaaatccttcttgaaggtcaagcctattctctttttaaggtgaaagaaaaatgtgaccaaggttgattctggaccattattagagatatgtttcgtactcaaatcaatctagcaacattaacaaaacgtttgtgggaggcttcttttgttttatttgagccttcatttcaaacccaaatattgtctcatgagaagcccactacatttttcattaggtgctcttattcagggaacctatgtccgaactccgaattggcttgatatgtccgatgcatttagacaaaaatcaaattgttttgaatatcatcgctggcttcttcatattttgttgttcaaaagaaaagttgtttgttgtacagtgaatatttgtatggccacaatcagatttagtttgatattatcaattattcaaatttatgcagaattttcttcaagttacatacatggcttgtatgcatattcttccgtagcagttctaaccccgacataagggatagggcagcggtgtatggacctcatatttaatattaaaaaattataaaaaaattgttagtggtataaaatactctcgaaaatataaatacatttttttttgtcacaataatacatatttatatttgcaaatatagaattttatttaaataacaagactaaaatcttcttttttttccctaaggctctttttacagttgggccggggctgatcagttcgctattgaagtatacatgtcaaagaaaatgaaggagaataaaccatcgtattaattaaatcgatttgactaatgagacaacttaattcagctttaatatagtttaaatttcgtacatgaccaggtaatcaaattttctaaacaaatggaacaatatcagatagggtaaactgttaccatctgtgtaactttgcaaattagtaagtctaaattataagaaacgatgacttgtacttctaaaactccagcatatcatataaaattttgaggtttgagacatttctataagttcagatttaattcttcctaacgtatgaggttaggtattttctgtcgctttaccaaaaaatttgacgtttcccatacgttttagcttgttatgtcattgttgcataatttatgaccaaccaaacctaagaccaaatcaggtttttagatagtccttttttcctttgaaattataagatgttttggttgtattggcatagattacaaaaattactccccccattttagattagctgtcgttgaagatttttacagaataataaaaaaacattcaatttttctgttttaccctaattaatgtattgttatatttgatatcatcaataaatacgtttaaaaatgttgataaaattggaaactttgtcaaacatctgcattgtaatatataatctaaaaaaaatgatttcttatattctatcaaatatggctaactatacacatataatttgggctgagctgtcatctttcgacatgaaattactccgaattatacataatttgccagagaagttatgttacataacaacactcatattcaaaagaaaactagatgtataatgtattagctattatttaagtaacactaacaactaaataaaatagaatggatgaaactataaaaaattaagaattattattgaatgagtatatttttttctattttggtcaaacgtcgaggtggagtttaagaaaatcgtgattctaaaatagtgcaataatgaaatattaaaaaatcacgttatcatcttgttcttttattttccactattttctcttgaaatttaaatgaaatatgttattttccaaaatgttgttacaaccgatttactatctcataaatatgttcttttgtgattttaatttttgtattattaatgttcccctgctttttgttgactaaacaactcgttactcgttagatatatattcacgttgagaaaaaagcgtttaaccaaaacacttaggtatattgaagagttctaaaattagaacgccaaccttccaaatcaacacacctacgacaattctagtcctacaacatagatccttctagcaaaccacaaggaaacttcttgtggaaaacactaacactatcctcactcagttactctcgtattgctctacctagagtttctaattctgctatgttataaaaattcttacatacttattcttttttttctttctaaacattccattcgttttaaaagctaggcccacgattagtagttaaaatattttaatttttaaaaatatgggttacatattttttattctttttagagctccgagatttcagagcatgttctaattggatatgtgatatttaatcagaagtagttttaatattgttttttttttataaaagaaaatgtaggtaggtttacgtacaagtagtagatatgatggctcaacaaaacgggtcaacatttacgggtctatatatattcgtgcctcatcgccgaaggtgttatggttcaaaacaatctatcgtacttagttattaattggatagatataagtttcttcaatg

SEQ ID NO: 34730 - DNA, 3003 bp, Unknown; identical to SEQ ID NO: 34729
  misc_feature (1)..( 3003): 2750-1469P.txt file - cDNA_ID_3081680; gDNA_ID_2926223; Annot_ID_203400

SEQ ID NO: 34731 - DNA, 3000 bp, Unknown
  misc_feature (1)..( 3000): 2750-1469P.txt file - cDNA_ID_3081688; gDNA_ID_2926223; Annot_ID_142470
tctcaacttggccgatctaccaatctagagactgtggatcgtttatgaaatttcctccgatctttgacctcccatcctccgtgcacaacttctttatctagaacgtgggacgaagcaaatgaatatcacaaaatattgcaaagcggagaggaagagtaggatcaggcccggcccaaggctaaagctcatgaagctgatgctttaggcatcacagatatattgtaaaagttgaggacatcattccaaatttaacttgtggcatagtggtacaactgtactaaaacgtccacgagatgactggttcgtgttctttattttcctttttttggatttttcatttaagttttgtttgttagtgggcttaaaaaaaattttgctttaggcatggaaattgtttgggccggcccttagtaggatgttagccaaaaaaagaaaagaaattaagcttaatgaaaaatatgatacacactagaattggattctcaacccttaggccttggtgcatggctggcttagaataatttcaaacctaaaaaaagaaaaaatatatttaggtttatctacaaagacaatatataattaaattgtataaaagtttttgaatgattttattttaaagtttggcatttttatagtggaaagggtttggagttaactagtattacaccacaactatggtcctaaaagcaatactagtgttctcggttgatagttttaagtcagggcccggatttgcctaagtgaattgccatgagagcaacccaaatggagcactaattttgaacactcgttttacagctttttttttaccgcaccattaattatttacgaaaccgcctaagcaacactaaacaattctgaaccgatgaagactgatgtgaatatctatactaagataactattgatttgagtgaatatgtgttcaattctttaaattgtcctttctttctctggccccctggctttctccttcaaagtagtagtccgaatattccagtgattcttgaaatattctattaaaaagattcataatcgaaccaataagggaaaaccaattatgtttatataaaataaaataatactattcaaccgtttaataattagaataatgattctactaacaattccagctagatctaccttccctccttgtcctaatgcttaacatattcttcttgatcttcttcgtttttcttcttcacaaggtcaacaacaatggaggaacatcttcaaggaagaatcaaacttcacgatggtagatacttggcctacaaggaaagaggtgtccccaaggatgatgcaaagttcacgatcgttcttgttcatggatttggtagctccaaggatatgaacttcaatgtctcacaagtatacactgatcctttatttccttgatcctctcgattcctatattatatatttttctgagtccttgatccaaaatttgtagttttaatcacatatatccaaaagtatgtgcttcaaattctgctttcttttttgtgttcagcatcgttagtttccattccattacaagattcaagaaactgacttctggagatcacatatgattttgtaattgtaatctttaatgtggaatgtttgaaaaattagatgtctgaaaagctaaattatttttcaagtttctaaagattaaacaagcaaaaaaagttagaaaaagagatgttgttagagatatggttgaagactaatgaggcttgttttagttataatctcaggagcttgtgaatgaaattggtatatactttgtgctatatgatcgagctggttacggagagagcgacccgaatcctaaacgttcgttgaagagtgaagcctacgatgttcaggaactggcggatggtttagagatcggatccaggttttatttgattggaatttcaatgggttcctacactgtttggagctgccttaaacatattcctcaaaggtaaagaaatcaaatcgattaaattaattataaattaatttatttataatgcattcaagtcttgcaagccaaagccacatgttgcaaaaaataattgcttgaagattggataaaaattgtcagagcaaacgttcaaattcatattgtaggatcaactgctttttaatctttgttgacataatcttttcttgctctagatttaaatcttcaaaatagcacataattgtttttttacctagctagcaaacataattctgttcaactaagtactaacggtttagaccatctctaatgtaaatctctattttttcttctaaaatagagtaactctaaaatagaacataattctctccgatatatcactatatgttactctaaaatataaatagtgtaaaaaaatagagttactctatatatatagagcaatcatattatttactctattttagagcaggcccgactctaggggtgtgtcagaggtgccaatacagagggtcctcatatttatttcttaatttttgtgttatagtaataggtttagaagaagaatacaataaatatatgtcacataagattattttgtttagatttaagggtttaaagatggtcattttttttgtagcacagggcccaataaaatattgagccggacctgttttagagtaacatatagagtgagattggagaaaatttattctaaaatagagtggatttggagatgctggtagaggaactctattttagaagtcttactagttagaaatattttagtctggttcatactatataatttttactagtacatacaaaaacaaatctcgaatcaatcaggcttgaatagtagactcgtagttagtacattgctttacaccttttgagttatgattagtgtacttttccggattgaaccgattgatttgagccgttaactaaagaacttgttaagaaaaaaaaaacagaaatcttcaagaataatatttatattaaaatcagaattgtaaagtttcataaacatatgaaattgaacaggttagcaggagtggcaatg

SEQ ID NO: 34732 - DNA, 3000 bp, Unknown; identical to SEQ ID NO: 28826
  misc_feature (1)..( 3000): 2750-1469P.txt file - cDNA_ID_3081688; gDNA_ID_2926223; Annot_ID_203398

SEQ ID NO: 34733 - DNA, 3003 bp, Unknown
  misc_feature (1)..( 3003): 2750-1469P.txt file - cDNA_ID_3081698; gDNA_ID_2926223; Annot_ID_142468
ttgtttctgaccaaaggcattcatacagaagatttgaaaagcctcgtcatttgatggatattcgaccttgtaaacatgattgatcccatgagccttcaaaactcctagatcttctgttgtgataataatccgacttccaggaccaaaccatcgagtttctttcgccaaggcatctagttgtcctaattgatccacttcatcgagaacaagaaacactttcttgtctctcaaccgttcttgagccactcctaaatgagaaatcatgatatctttatgattgatcatctgggacaacatttggttttgtagttgcaattgtgcactgtactcatcgaaacaaggtcttggatagcatcctttgatattgaccatgattgcactaagttggaatctgtcggagacttgattaaacagaaatctggcgatagttgtcttaccaatcccaggcggtccccaaatcccgatcatccttacttcatccaaatctaggcgcaacaattgttccagcatatccatatgagctctcatccctactaacccgtcgaaatctcttgatggtgtgaaactatttaacatgtttgaaacatcagtggatattttctcaatcatgtctgcttcattcctcctgacaatagaggatagatatcaaatcaatatacaatcgttgcgataaaatggtcacgaagatctgaaagaatacactttaacaaggaaatattaattaaggagaatataaatcaagaagacaaaccagctgtgagaatgatatccggcgattgttgccacatcctccaaagcttttctccatctctcaacttgctcttttggtttacctctacatgtttttgtgaaggcttttccaaattcaccggtctgtttctttatgtcagttggatcaacttcatagaaaatggtcatgacaatctgacccaccatttgcctgcatttcatgatctcggccaactcatcaagacaccaagacgaagaagcatattttcttgagagcaaaacgattgcgatctttgatcctttgatagcttctttgagctcaggaccgatcgacttactcctctctatattattatcaatgaatgtgtcaattccctttcttctgaacgattccatgatgtgactaagaaaggttcttcggacatctgctccgtggaagctcgggaagacatcgtgtttccagtttcgagacacagaagttgcaggggagggaagagataaagaagaagaattactttcttggttatcttgttggaatctgaaatttgttaaagctacggctgccactgagccaagggaaataagaataattcattagtatggtaaagagtggatcaagatttaagatggcctttatgtgaatggatacagaccactgatgactctgttggcacataaactccatggatgtttccaagatgactcatcctgaatgaatctgcaattctcagcatcgtttgttgagcatatctttcgtcttttacgagattcggaatcaacatcctgatttgttgctttcctcttggaacagcccaagctcattacagaacccatgagaactttgattatcgaagaatcaagaaattaatataaaatcaagaacacataatcaagaaatgagctcaaaacactaatcaaagcatcaatatcagcataatcatcaagagccagtccaatcaattcgattccacagtgataaaaccttaagcaaaacttaaaaatagttggaaaatctcaccgatacatgaaaggatgagaaatctctagagagttgaagaatcacacgggtttagtggaatttttgtagttgaaacgatttgtgtgactgaagatatagatcgttgacgactctaaactccatggatgtttcctggaaaatatagtgagattttgtggaaaatattgcaaacgacaaaattactgtccctatgctccaccattcactgtctcaaacaaagttacgtccacacaatatatatttttttctttctatttctctcctaataataataatgataaaacaaaagagttaatatcattcaatcttgtaaagagttcatatcattcaatcgtgtaaagagttcagtttaacaagatttatatcagcaagtttcaagcttcacatcatttttctgttataatactgtccagcaaagactcacaagcatcttctagcaagtccagtacctatgaaagaaacaggtagacaagtaacagatcaagattcaactttcgaagtgacttttgtcctaacaaaatagatcaaacaggaaatataagcattcccccttgcaaaattctcgaacggaaggcaatttgggagtgacaacaatggtatgctaatgccatagtaaagtcttataaaccaaatcaaccattttgaaaagacaacatagctgaaattttataggtagcatctgcctaaaccaaaaagttactaatccacaactggcttagtctctaatggtaattaccttctcaaaaccttgagctccaccatcatatggatcaggaacaaacttgcattgtgtttcttgcaatacgaacacattagcttaacctgaaaactcaatgaaagtgttctaaaaagagttccaaagtccagcaaacaacaacaaacaacaacggtaccttcttatctgcatcgggtgggattccctctcgctttccacacattataagccttcaatatatcctctgcaaacatcaaacattcatactcacattagctagacctaaaaattcaatgaaaatgctctgaaaaatctcctaaaaagagttccaaagtccagcaaaaaccaaaaaaacactaacggtaccttcttatctgcctctggctttccacacattataagcctttaatatatcctctacaaacattcaaactcatattatcgactaggatgctttaatctctctattgatggtgctttttcttcttgtaatcaaaaatctcccgtttgctaatttctttgcgaatcgggttttgaaatg

SEQ ID NO: 34734 - DNA, 3003 bp, Unknown; identical to SEQ ID NO: 34733
  misc_feature (1)..( 3003): 2750-1469P.txt file - cDNA_ID_3081698; gDNA_ID_2926223; Annot_ID_203395

SEQ ID NO: 34735 - DNA, 3000 bp, Unknown; identical to SEQ ID NO: 28825
  misc_feature (1)..( 3000): 2750-1469P.txt file - cDNA_ID_3081701; gDNA_ID_2926223; Annot_ID_203394

SEQ ID NO: 34736 - DNA, 3003 bp, Unknown; identical to SEQ ID NO: 28831
  misc_feature (1)..( 3003): 2750-1469P.txt file - cDNA_ID_3081744; gDNA_ID_1620310; Annot_ID_152946

SEQ ID NO: 34737 - DNA, 3003 bp, Unknown; identical to SEQ ID NO: 28831
  misc_feature (1)..( 3003): 2750-1469P.txt file - cDNA_ID_3081744; gDNA_ID_2926224; Annot_ID_203429

SEQ ID NO: 34738 - DNA, 3003 bp, Unknown
  misc_feature (1)..( 3003): 2750-1469P.txt file - cDNA_ID_3081752; gDNA_ID_2926224; Annot_ID_142492
taattctaccaaaaaaaacttagttaaacgaaaaaaatattttcataatcaaaaaatagtttacataataaagatattgaaaaaacaataaaaattaatctaaacattacttccatgataagagattgaactaataacatctcttacagacccatcggatgaaactaataacacctctcacggacccatcagcatcggatgaaactaataacacctctcacggatccatcagatgggacggggtgcttagtccggtttatttttaatgcattgaaattcaacatttagattttttgaaaaccaaattattttatataataaaacaaattgttgacaataatcaaaaatataactaaaaagatagtttacataataagaatattttaaaaaaaccataaaattaatcttagtgttaaatttacttgcgtgaaaagcggttgacctaataacacggcttaaggacccgtaggatgggacggcatgcttagtccgatttgttctcaatgcattgaaatttaacacttcgattttttaaaaaccaaaataatttatacactaacaacgtttagttaaaaaaaatatatacattttatataattaaaaagatagtttacataataagaatatttttaaaaaactataaaaattaatcttagtgttaaatttacttgcgtgaaaagcggttgaactaataacacgacttaaggacccgtaggatggcacggcatgcttaatccggtttgttctcaatgcattgaaatttaacacttagttttttttaaaaccaaaatagtttataaaactttagttataataaaacaaaacaaaaaaagcatattcaaaaatataattaaaacatagttatttaataaaaaaataatttgcttaaggagagagaatgataccaatttatgatcgagattgaagcattcttgtgttatcaaacattcagaagaaccctagatttgaagaagaacggaagataaaataccacggaagagaggaaactactttctgcgtttaatgtctcgttacaataatcctgcataaaatagagcccaagtaggaaagttaattgaagatgaacagctgatgataccaattcacaacgaatcagaatcaaatctcaaaaataattttaaataaaaaaatctcttaccataagtttttggatttaaaggatccgggagaatcgtcgtccttgcttttgcttaaagcagaaacctagatgaatcatacctgttgacgtgcaaaaatcagaaaacagagtcacgtaacgataaaaagagaatcgatgaaccctagaagaccccaacatatatgaatcatcaacgacggagtgaaatagagagagagataatgaatttaagttaacctgatcgtagagatggctctctcagactgagatcgctgatcctttagtcaatcagaataagagaattagagagaatgaagacgacgaacaagtgtaagaaattgttgttgcaaaaattgtaatattggggataaatagaagcatagcattagtaaaaaagaaaaaaggaaataacaggagcgtggaaaatcactaacgttaataattggagtcaaatcaaccgactctaccaattaataaatatagcattcagttctctctctctagtcgccgccgcaaaccagaccccttttccaaacgccttttgcctctccggtgatcggcttcggccggcgccgtgagagggcttctcttcctctcttctctttttagtttttcttttttctttgtgtcgttttcttttagtcagcggcggctcctccttctttgtggcttaatcagagacttttaagctgacggcgagcggttgttgttctctcagatggaggttcgttggtggatctacaatggggaacattggctctcgacgactgcagcagatctgatggtttccttcttcagccccttcacggaggtacctctcctccgatgagcctccttggtggtggtggttcagtgttaagaaggtacagagggaggtggatcgtggttttcgagcttggctgtgaagatcttaccgatcctgggcagatttacatgtttcaaggccttctagctatgctgccgccaacgactcctaatggaaaaataatttgaagtgggagagaaaagaaaaccatttggatggttgaagaagaaggaaagctctccaataaagccccggcttcaagaacttttgtctcagcccggtattcggttgagtttcagtcggattagtatatccgttttaggcttaggaccgaaatagtgaaagccaaggagtcaaaacctttctgaagttgcgcttttggcgtagatgctattaggacacgttctacactcggatcttgagggactaatagcttggaattggattggatctcaggataggatttgatgtgctttgtgttagtaattgtttttgtgtcattgggtgaatttaggtggtttaagagatgatttcacttagagtcgtggtgtaatttatctcgttatggttgaaaaaatacagtgaatttcagttgggtaacgttgaatccatcttagtgtttcagggtgatactagactgattcattgtatttggttaaaatatgttgtggtctaatgatttgtacctttgaattggttaatggaaagttgttgttgagccaaaaaaaaataaaaaaaaatcaaccgactctgctaagaaaaggaaaatcagtcgattactaacggctacttatggaaacaaatggaaattaaccgactttaattttaagctaacagtaaaaaaaacactgacgttatatgttgaaaatttgaaataaccgactttggtttattatttgtatcatcactattcaaattacctttacggcccaactaaataatatagggctttgaagaagcccatctagaagttaatataaattaagtttttaagggcacaagaatgacgtcatattagtaaaccccaattacaactctgattctccttcccggcgatatg

SEQ ID NO: 34739 - DNA, 3003 bp, Unknown; identical to SEQ ID NO: 34738
  misc_feature (1)..( 3003): 2750-1469P.txt file - cDNA_ID_3081752; gDNA_ID_2926224; Annot_ID_203425

SEQ ID NO: 34740 - DNA, 3003 bp, Unknown; identical to SEQ ID NO: 28830
  misc_feature (1)..( 3003): 2750-1469P.txt file - cDNA_ID_3081757; gDNA_ID_2926224; Annot_ID_203423

SEQ ID NO: 34741 - DNA, 3000 bp, Unknown; identical to SEQ ID NO: 28829
  misc_feature (1)..( 3000): 2750-1469P.txt file - cDNA_ID_3081767; gDNA_ID_2926224; Annot_ID_203420

SEQ ID NO: 34742 - DNA, 3000 bp, Unknown
  misc_feature (1)..( 3000): 2750-1469P.txt file - cDNA_ID_3081816; gDNA_ID_2926225; Annot_ID_203473
aaaaaatgacataatacttggccattaatacatttaacaccaaaaccaaatcctttatctcatcatttgcacaaaacacacagaatttgaagacgaaactattgtcagctcaagtgaaggtattgctattagcacgcaacaagtgatactagtatttaggggctgaagactgaagacaatctttcataatctcctgaatccttctctgcaacaccttgtccttaactctaccaatcatgtcttcatagaaagcttgaagcctcatcagctgactcttatcagcactctccagcatctctccccactcttttcccatatcgaaatacccagaaacccgtaatgaatatgggatatcttcctcttcattaaaaggttttccgaatatggatccatgaagtatgcttgcatatctttccatcaccattagttttgattctagccgtttaatctcctcagttgatgcgctttttccatcatcgggtacttcttctttctcaggtttcagctcattcggccagaagacgagagtagggacataacagtcgctaacattcccagttccgagcactccatttcttcctcttccccaagaccacagcttgtaaccaccatctaccacaagaactgtatgtgcagccccgcaagaaacctgaaccgggtcacgaaatcttgacgacccacctgaaatctttcttggtacactatcatctcctgcttccacctctgtgaagttgacatcggggcataatcctaatcctctttccattccccacgaccacacgtatccctcagaggacaccacgcttgtgtggaataatccacagtctacagaaactaagtaagcgtgttctgggagatctgaaactggctctggaagcgatgagctcttgttacttctatgcccaagctgaccattttctccaaagccgaacgtccagcaaatgcttggtcctttaggtgtctccttcctgtaggtgagaagagctgtgtgatgagcaccacaagctatgtcgtagactgtaagacccgacttctggttaaatgtctccacagtctgaggccttgcacggctctctccatctccaagtcctaactggccatgatgattatttccccaagaatacagcacggatacatcataactgttgtctttgtggatatccccaggaccaacgagggcaacaacgtgttcatccccacatgctaccttcaaaaccgtccggccatggaagtcgagtataggaaatggaatcgggatgctagtaaaagacaaacgagggtcaggttcactgtcttgtggaggaacattgccccacatccaaagacctccgacattatcaatggcaagagacatcatggagccagcctttacagtacaaacctacaagacataccgaaaatcattatgctacacttttttttacttgtaaaccaacacctaagaatgcatttctaggaccatacctttaaatctgatccaacttctctacctgaatcatttagagaagaactagatgtttctcgttcaaacaaatttttgatcaagcatggtgccaaggagttttccccatcaaaaccaagttggccatctatttaccagtcaaggattgaagcaaccaatggagagttcaggacactagaaaatgtagttatgaaacaatcatatcaagctagaaacactcagataaaggatacaaatgttgtaaccccaacaccaaaccgagccatcatctgccaaaagcttacaaggcaaaagaaacaaaaggcaagagaatggtcaatacagatccatatcataaacatacaaagtaaaacctatagtcacaattcaagcatatttattatttctcaaaaggaagttcatagatgcaaacaaaggaactaatttgatcaaacaaaatctttgatcatcacagtcaccaatttctcaaaataaatcatatggtcaaatcagcaacacaagctaatagaaaagcgaaattagacatatgaatagaagaaaccacctgagacagcgagactgtgataagcaccagcagcaacaccaacgattcgaatccgatctccttccgcttgatttgggaactcgactagaactggaacaagctcgtccgactccttacccgtaccgagacggccaaacattcctcttccccatgagtaaacacatccatcgcctgcaaataaattccaaagaacaaaattaaactcaatatcgcatttctctatctactaaattgaagcagtggaactttttattttaccggtcagagcgattgtatgagcttcaccggcggcaagagagattattttccgggataaatcttcagaaatcagtaacgtcggtgatttgtcctccattgccactgtgacggataaggttcgtcctcagttgctttctaaaataaggcttcaccgatcatcagcactctgtgcttaaaaaagttaaaatatcttcagtctcagtcttagcagcaaactcaagatgtagcctgttttctactttatttacatgggcctataagtttaaataggcccattaataaattatccgacccataattagtctttagtaaacagttttattcaacgaaaaaatagtaaacatgattttgaaaagaaatctgttattgtgtcgttgttctctcaagtctttattcgtaaatgagcctatgaatgttggataaataaataaaattatgattttcgtggagaaagcatatatcttagttcttttctataagattcatgccgcaaacaaacgaaaaaggagaacaaaactttaatttcttattccttataataaaactttaaaaatatttccatggaccttgtttaggttaggtaggatacttacttttgttttcaattagatatcgttaaaatgatttttctgatcgctaatctgatcgcgacatgggaacaacgtcataacataaggcatatattatcaaaaccaccaagagtaaaaaaaccttcaagagaaagagactgaaaatg

SEQ ID NO: 34743 - DNA, 3000 bp, Unknown
  misc_feature (1)..( 3000): 2750-1469P.txt file - cDNA_ID_3081820; gDNA_ID_2926225; Annot_ID_142522
ggaaagacgtatttgactgttagcaacgaactgagctataaattttaacgatacaagatggtataccgtatacctaagcaggaaaccattttttattggatgattttacgatgagaactcatgaggtaaccatatatgcagtactcctagtgtcctatgtacctagtctctcaagcatgaaacatcgccgggtagagatttaagctaagtaaccagattatatggtataatgaagtttcatacgattggttttgagttgaattttataggtttttgattaattgaaaactgattgtcaaggactagattaatttcgatttttgtgtagaattctaatgtctcctcgaagaaagactcttatcatttaatctcgatatctcactcaaacctatattaaacttatttagataaaataattaagcttcatgaatttccaattcagaatcatttcaaaattatttgcaataagttgacttcgacatgcatattatgtttagttccttcaaactcccaaaatgattccgatcatatgtattgtttttttttttttctctttatttggtcaattataatatgtttagaaaaacctcatgtgtttttgcatgttcatggattggtcattttcattaactattggcatgaacatgtgaggtggtctctatctatacttgggaggcatctctacgataccagaacatcgccaggtcaagtcatagcaactctgatgctactatataatatatatgtacatatatatatatattacaagtagtagaaccttatatgaattttactctaattaatgttacaagcctacttaaaaaaatcaataatcacaaaggtagaagcttataacacgaattaatcatacataatctttgctctgactatcaaactggtataaacgagtacgtattgttcaataagaagtgacacctgacatatatataccaacattgtttgaactttgaactagcacacgtttacatacacataatttaaaaatgcatattcaacttaaccaggtgcggtagtgtaaatagcaaaatagtgatataggttttcatcaaaactgtttttaagcataaaagtaaccatgatctactgatctagaagcatgcatgatcagtattaatgaccaaatattactttaaactattgatacaattatatatgaccaacaatagtagtcgatccaaagtccaaaccataatttggtttgcggtaataccggtcaatgaggtattgaggtgctacaatattaccatatgtaacaggcctataacgtttgtctaacacagcatatatataacctccaaatagaacaaaaaagatcgtttaatatatagaatttttatcactccatactagtttggcagaattaggatcactcaacagataagtaaatagcatcgagtagcgagaattaccattaatcagcggatactagttaggaacaaaaaaccaccacatatcataagtatacttctttcttcttacagaaatgaagtactctacgtcaaactctagaacacccaaacgacgtaaagactttttgcattgtctaaatttctaaatatactaaaatggttttatctataattaatgcttgaattaatcttacaccatctatcacaaaaaatgttgtattttgtatgttttatgactggagctggtcaagctctccaaattattgagtcctaaagaaaattaatttcttcaaaattgacataatagtattggtttaaaattttaataatctaaattctaatttgataaaattattttgattatattaatccgatttaatgactgtctacgtttgagaaaagctctaattctaagattttagaccgtcatgatcctttggcttagcggatccgaccgttaaatagggttatatctatatgagtcaggccaactcagtgatcaactttttaaaagaataaaatcggtcctacaaaagctggaccgaattggcatgagggttttgttcccaccagaacatcttttattatacacgtatcggtcattcggttggcgagggggaacaacgactttagagggtttggttgcctgttactccatgataataatggtattgtaccaattttttaagtcgtaaccaactaaaatatagtattggattatctactctataatattctgattctcaaaactttctgaatagtaatcaccaatgtcaaggaattgtaatcataaccctcactcaaatgcttaactatgttagtcctgaaattatataatatctccagtacatatatcgattattttacgtaccggtgttattcacgttatcgctatacgttatcaatatcaattatttttgatgatgtcaactaaaatagatatcatcgattttattcaactgatgttggattacataataacttatagctagtatcaactttcttttcttttcaaattagtataaaccatagttaaactaattataagcatcagtagtctttttacgctttaaaaccaaacactacatgctttcccttgttgtacttttttgtcagatcaattattttgtcaatttccgcctttttctctttaaccccactgtttttcatctattacaccaacatctatacaagtgtatctatacatatattttatgaatgatgatgacatacttagtgggtattatatttcagatcttaaccctacattattttccataatttaggttttgacccagatcttataatacgaatttttaattcctagcctcttaggataaatcaacggcgacaaaaaaggacaagtcacactatacaatatccttaattccttaccaaaaacataagatacatcatatacttaaatataaaaagatccggcaatattgatttccttctaagcaatattttcaatcttcaaacgcatttatacatagttaacataacctccaaaacaaaaatatcacagatccaaaagatcggattaacataatctctccaaataatcatg

SEQ ID NO: 34744 - DNA, 3000 bp, Unknown; identical to SEQ ID NO: 34743
  misc_feature (1)..( 3000): 2750-1469P.txt file - cDNA_ID_3081820; gDNA_ID_2926225; Annot_ID_203471

SEQ ID NO: 34745 - DNA, 3003 bp, Unknown; identical to SEQ ID NO: 28838
  misc_feature (1)..( 3003): 2750-1469P.txt file - cDNA_ID_3081823; gDNA_ID_2926225; Annot_ID_203470

SEQ ID NO: 34746 - DNA, 3003 bp, Unknown
  misc_feature (1)..( 3003): 2750-1469P.txt file - cDNA_ID_3081827; gDNA_ID_2926225; Annot_ID_142519
ttctttgagttagatttatggatttactggaagttgtgtactcacccctatttgagagctgtttttttggcatgtctattgtccactcatgttgtgttggctattttcaaactttgatgtttgttgatatgaataagggtttgttcttccttttttcaaaaacaaactagagttgagtttcatagcatttctattgatcatatgctgctgagcaaatcgtttgcggttcagtaagtttattcataactgggatgtatgagtaaacttatggtaaatcatgtctactctatactcattctttttttgctaatgtcaatctttgatgtgtttagacatgtataggttgtctttatcttctaatttgaatattttatttttcttataaactttaggagcttcacgaccaagctgctaaaagtaattttcatttgatgcaggtttcacgtggataaaatgtcgtcagctcatgtttacttgaggcttcatagaggccaaagttttgatgacattagtgaaggtgtgctggaggactgtgctcagcttgtgaaagctaactccattcaaggtaatctttttttctacctgtcgtgaacttaacatttgcataaccattagtcttagagtaccagtttgttttttagaaggagggcacatataggttttttctgttttcttaccgactggtgtctgggattatgtgccaggcaacaaggtgaacaacgttgatgttgtgtacactccgtggtccaacttgaagaaaactgcctccatggatgttggtcaagttggtttccacaattcaaagatggtaagcttcttcatctctaaagaaattttggttgcgcatacataaactgctcaaagtatggttgtaaagcttcgatgatattgatacctaactcatatttgtttcgttcaggtccggactatcagagtggagaagcgagtcaatgaaatagttaacagactgaacaaaacaaaagttgaaagaacccctgatctgagaggttagtatttgttttgtgagctcttcctcagattctaataggtagaagattgatcatgcatacatctttctcgtttaacaattttcctgctgatgaagtgtcagttaagtgtctgtagtttttccagtcagtataacttcaagatctatgaaaataatttgattgttcataactgtgttgatgaagccgagagagaagcagtgaatgccgcagaaagggcagagaggaaacaacatctgagggagaaggtcagtgtctgtttttggtcgttatcatcttaaacgtctttgattagggttttgactgaaatcctcggttgtttctggattttgcagaagaaacgtgaagagatagataggcttgagaaggagaggcaatcagagatgaggagttacaagggactaatggtaactgataaaatgacatccaacaaagacattgcttcaagcaacaaatcgcttcaagaacttgaagacgatttcatgtaaaagctctgaagaaatgagaaacaaaacaaaccaagtcggtaacattctgccagagatgatctggtaccgtccttcaaagaaggcttatgatgttctactcgccttaactatgatgttgatggttgtccggttctatgttttctttaaaaaaatcttgaatacctaaaaccctaatctggttcttggactccttggtccattgaaatgtttcaaaaggattgaatctgatctgtgggaaaaaggagagcattatattctatatatgacacaggtgaaccagtgatctggtgcaattatggtttactctgcattgctgtgtaacctgaaatttgtttactaccccataaagcttcatgtgttactctgcattgggttgggttttggaatcactttattcttgaccatagttgctattgttaaaacttgcgggttgaatttaaacagtcctgtctcgtgattgcagtgggtctatcgggttattactgtaagttagcggggctagtcactagtgcttagactacttttttttagcgaccatagttggcttgttgatgatatatgatttgaaataattatggtggcccctaaagtgatttgaatcaataatccaactgttggtgtacttggaaatctaagggtattaaataaatctgagtgaaaatttgaaaaaaagggaaaaagaagggaaaataaaggataagaaactaaataattatgtccgttaaatactaaaaaaagataggagacacgtgaccgaaaatatttaaaatggacggctgagattaagactgagagccgctcaaaaaaaaaaaaaaaaaaaaaccaaacgttattgacttgtatagggtttgttgaagaaggagactttaacatttttgaatttccgccagtcttgttttgaaatagctctgccgaccgtttagatttctctcttttatctatcttctctgggaaaattttcaattaatctctctttattaactcagatcgtgaacatttatctccgattggaggagatttctagtttttgattggatttactttgggcattttggtctctccagtttctgggtatcgtcgttgtctctctccgatttatgaaccacttccatttctgaagctcgcataggtttgttttatgactccatggttctatatttgaatctaggttggtttgggtatgatttgattttgaatttattgtctgcttgatctaaatagtttgctctttttaaaaatgactgcgaacaaaagttcacaattagtagtcattgtaattattttcaagcttcgagtatgttttgtcctgattagcgaccgactttttttggagctgaatccttagtgttttttttctttacaatttatcttaggaagattgtgagatggtacaaaggagggaatagtagttttgaaatataatgttttggagttacaacattgcagagaagaaaggcaacgtatgggaattggggtgactatttttgcattttcattgactagttatg

SEQ ID NO: 34747 - DNA, 3003 bp, Unknown; identical to SEQ ID NO: 34746
  misc_feature (1)..( 3003): 2750-1469P.txt file - cDNA_ID_3081827; gDNA_ID_2926225; Annot_ID_203468

SEQ ID NO: 34748 - DNA, 3003 bp, Unknown
  misc_feature (1)..( 3003): 2750-1469P.txt file - cDNA_ID_3081831; gDNA_ID_2926225; Annot_ID_142517
gcgtcgtttttctgtcttttaaaagttttttaaaaatgcggtgagcgtggatcgaacacgcgaccttcagatcttcagtctgacgctctcccaactgagctatccccgcttgatgcttatatgcttaaccttttatctatatttcctatatttgcgaataattttgttgtttttttcgtttgtttgttgatttttacaaaagtttagtagagtccgaatacattacaagttgtaacacaaatacattaaacaaaatctcagcgttgcattaatcaaagacagtgcccaaataattggtacactaactgttagttttgtcgttttacactaactgttatataagtctccttataaaaagataatatggagaagtgttgttttggttctcagtgtttgagccagtagtttcttagctgagccatatgcaacaatatctcgtcccgaccttgattcgtcacactgctggtcataatccatggcggtgttgtctcaaagaacccttggatcaagtcttggaactcctttatgttcgcctccggtttcttccctccatttttcttcttctttctcttgtcgcattttgtgaatatcaaagtcattggaacctgagagatatagatagcaatcattcatttcacagagacattacacaattagtacaagtcttgaccatgattgccaattaatgggttaaagtggggttttcaaggtttaggtactttttatacctggttttgaccaagccagcttgcatactcgagatcgattggctttacaggaatgctggcatcaactagtaaaaacaccgagaccaatgttgatcgatttagaaaatagtctttggtgaatttgttccagtcttgtttgagttcatgcggtgctgatgcatacctggatatataaaatgtatcaactttcattttctatactgaaagtcctcaaattccctggcacagaaactgtaattgtatccaacagacacaaacaaaaaactaggaaagacagagacttgccagagcaattttaaggtgctatggcatgaaaaacaaaataatatcagttaaacttacccgtaaccaggcaaatctaccaagtaccacttgtcgttgatccggaaatgattaatgcattgcgtctttcctacatgaagaataaactaccagaagttataatcaacctatatgtagcataagcacaagcacaagcacggcatggatgcctatcagtttccaattctaatatcacgtctatcaacctttctaagtggttcactaggaaggagtatttgtgaatgagatgttcggtcgacactatagagatactttcatcatatatacatccaaatcccattttcatgaaattattatagcatggtctagcagcaacacatattactcaaagattatatccactgatgccatatcttggttcgtattctctacaacaataccccatcttcaaaagtactagaaaccaacaaatgccgatgctccaaggcaaatctgttcaatctaaccaagtggggatagtctattggttttgtcctattgactattgactattgattgagactagagactgattcccactcaatgcctcacttggccactacagaattcaaatgctaggcgttagcccatgattagtgtggactctagcaaaacccagttatagaagaatcatttcaataaatcaattgacctaagcttccaacaacaacaaaaactgacttctccttactgctttaccaacactctccaatctcctcatgaacattaaaaaactgactacatcactctgtctcaaagatgtgattgcttcagtttcacatgacatttcaacgggaataagccaagttgttctcttaatctatcatctacttaaccagtgcttcaggtccccaaaatggaagcttttgatccataaatataatgacactcaaaataatgtagaaatcacacaccagctaaatgataagcacgatggagcaaaactcagcttaccaggtttcttagaagtcaaggcaaggcgtttcctcctcaccaacgaattgagaagcgatgatttcccaacattggatctcccaacaagcgcaaactccggcaacccatcggccggacaatcctccgtcttgacactactcttcacataatcagcctgaaccacctgtgcgtccctcgcgtacttgctcagcacaatattcgaacccttaagtatcctcgtcgttaaactcgccgagtcttcaccggatatatcggtctccggcggaataaaaagcttgtcgagcgcaatctcgacaggtgcatcatccaaatcggttgaatctgagaccgataatggtatgggttcaacagtggcgagattcgatttagacgcgaatgagaaaagggttcgagatactgttaccgaaggcttagggtttaagaaactgaaatgcgaagaagagagagagaaagaaggtttcgcgaggattgagagatggaatcttggaagatgcgctaaaatcatatctgatcgattctcttctaagtaatagtcttatgagctttttagttctctttagattctgtgagcagccatggatgtaggactgaacttacggatgcggaggaggtcggggaaacaatatccacatcaaaacgctacgttttgatggtggtaatctggacgatgaactttccttatattacaatttgcccgctctattttaacgattgtatcatttcgccactatcttctaattagagagtaaatgggtaaattagaaagaaaacaaaaagtataaggagtatatagcaaaatcgggtcgttggcatctccttccacctctccaagcacggacgagacttcgaccagtgaaccaaaatctctctcaaatttatcaccccgtgcttctgatcacggtgggattctctccgatcggtgacatatcgtggttcatactccggtggatctcacggcgtaataatttatcatatctgaatcgcaatcttattaaccatg

SEQ ID NO: 34749 - DNA, 3003 bp, Unknown; identical to SEQ ID NO: 34748
  misc_feature (1)..( 3003): 2750-1469P.txt file - cDNA_ID_3081831; gDNA_ID_2926225; Annot_ID_203466

SEQ ID NO: 34750 - DNA, 3003 bp, Unknown
  misc_feature (1)..( 3003): 2750-1469P.txt file - cDNA_ID_3081839; gDNA_ID_2926225; Annot_ID_203462
ggctcatcttttttcttcttcttttggttaaggttattgattcctacgttgctgatcagagagttggctacgcagagccagcttcaggagtggagctttacctttgcccaacacgtggggagactctagatttgctaaacaaagtcatctctcaagaacagctcgatgaggtcaagtctttggatattggattggttggagttgttgtgtggagacgagccgtcgttcccaagcccggttccggttcaaaacgtcagcattctttttcttcttctattggttctaaaacctctgttttgcctgtaaacaagaagcagagagtgcatgttacagagaaacctcttgttgttgcatcaatgagaaatcaccatcatggttatgtgaaacatgatactgctgctgatgatgatgtgccgcctggatttggtcctgtggcttcaagagacgaagatgatttaccggaatttaactttaattcctcggttgtgccagtttcttctcctcagccattaccagctcaatctaagtctttggatcaagtaagaaagctcatacacaagtatggaaaatctgcaagcacttatgatgatgatgacgatgaggacgacatacctgaatggcagccacacgtccctagccaccagcttccaccaccgccgcctccacctctcggcttcagacccgaggtatttagaccgcctcaagatggttggtatgataatcaaaacggaggatcagggcaacactatgagcggaaccagtcaagaaacagaggattttaatatctctgttgagtgttctctgtaattgtagttttttggtttcctagtctctctttagtttttcgttttcaaaaaatttgtagccatcgtagaatgcaaatgttcgaagagtcccaacttttcaaataaaacatttcagagtttcctcaagaaaacgaaaatcagtattgctctgcttttaaagacaagtttgattgtggaatcttgctaaaatgtcaaaatcttgtttgaacatcaaatttaatccggaaatcagcaagtaatttcttctatctaggtttcaccatgaatctaaaaggattattgaaaatgaggctaacgagagtaagattttttgatgggccgctcggctcagagttcaagcctgcaggaaaatttgctctaaacggatgaagatttcagtttatttcggtttacaagttaataataaggttataacttataaagattctcctttgtcaaagttactggtactagttttaaaaggatgattacatatacaccataataaacatatcaatatcatattattcataggaaaatccaatccacagatggagctgcaaaataaaaaaaggggtcaaaaaagaccagactaatctaatctgcccaaacaacacaccactcagatttgaacttccaaaactatacattttccaactactcacatatcatcatttctcttagataccatcaacttcattgatacaatacccccattactgtacttattatgggtatgcaaaccaaaacaaaagaaaaagaagaagaagcaaaacttcacaactaaaggattcatgagatcaggccgatacaggtgcattagggataaccgatgatgtggatgcagcgacttcagtagattttgatgttgaaggccctgactcagagatatccccaatatcaagtgtctctggcaggttttcttcagattcagtgctgtatatctatatagaaaaagagtgatcaaaatcatcacttaagatcattacatcaaacaaaaaataaacgtgagtaatgaatatacctcaagctgattcagcatctcaatggttgcttcaagatcaccgccattagcgaggtaaacatcagtgatagactcttgtgagagaccagagaaagtgacaagaaggtattcaatatccatgtctatatccatctccaaatccaaatcatcatccctgatctgcttataagccatttcagaggatttcttcggcattgacacttcaaccgtgggggactttgctgcaaacaccaaaccatcatcaccgccaccataatccactcttttggagattggtacatacgatgctgcatgtggattcaatgcaaatgctcctggcttcattgctttgtcttgctgataaagttactgctaaatttagaagttaattaagagtcagagacagaaaagaaatacaaaacaatgatatattgattagaaccaaacatgtcgtatgcagcaaaatctaacaatctcaaatttggtctaacgaggtatgatgaaacaacctttaatgatttcaacaaaaaaaaataaaaaggatatgaagagacctaactcctaagccaacgtttcgatggcgtaacacagagtatataaggaatctaaaggaaataaattgaagatattaaaataaagaaatgtggttacattagaatctggctcgcgttgttactgcatggaaaaatcgatgtcggaaaatacagaaaacagggcaaaagtaaaagattcttgacaaagaagaaatgatgcgaagaagagtggattatatgcaaaacaaaatgaaaagaaggaataatgtttgttgaccttgtcaacgatcgacgtaaaaggagaagaagaaacgaaacattaggagagaagaaaatgagcttaccaaacaaaaactagcgttgaagatcgctcgaataaattgtagagacagagacctaaatgatgcgattaatgtggcaaacccatgtatttatggaattattatcgtataggttagtgtccgtttacatgaaggacaccaaacatcacgatggggttcgtttggatacccggttatatttatctttaaccgggatactaatatacgtgattgaaattaattcggtttaataaaccgattgataaccaccggtttaaaaagtatcaaaacgaaggagtgaatggatgagagctaaagggaagaagcaaagtgaagaagctccagaacacgccatagctatg

SEQ ID NO: 34751 - DNA, 3003 bp, Unknown
  misc_feature (1)..( 3003): 2750-1469P.txt file - cDNA_ID_3081847; gDNA_ID_2926225; Annot_ID_142511
taatttcaacgcagggatgttaccaaacggcgactttgaactaggaccaaaaccatcggacatgaaaggaacgcaagtaataaacaagaaggcgattcctagctgggagctttcaggcttcgtcgaatacataaagtccggtcaaaaacaaggagacatgcttctcgtagtcccggccggaaagttcgcaatccggctaggcaacgaggcatcgatcaaacaaagacttaacgttacaaaaggaatgtattactcactgacgttcagtgccgcaaggacatgtgcccaagacgaacggctcaacatatcggtggcacctgactcaggcgttattcctatacagacggtgtacagtagcagtggatgggacctttacgcatgggcgttccaagccgagagtaacgtggcagagatcgtgattcataatcctggtgaggaggaagatcctgcttgtggaccactcattgatggtgtggcaatcaaagctctataccctcctcggcccaccaatagtaagtattcatttattatatgaattgagtttgtataatcaaatcttttttcagatatcacgcaatgtgatccatcatgttacaactatatgtagttatgtattaactcgttatcgttaggccttaggggttgacatttgacactccggtttggtttgtcaaaatttcagtttggtttagtccagttttgatattttcaaattaatcattataaatctatttttaatatatgtactagatacttgtaaataaactttttggtttgggttatttggtagacctgtaaagtatttctatttccattatggttttcaaaaaattggcctggttggatttgatttatgtggccacttataagtatagtcattttggtgttagaacatattttaatggatcggttacatgacgtgacatgtgttagccaagattcagaacaataaattaattgatatgattttgctattatataataaaacagagaatatattgaagaacggaggatttgaagaaggtccctacgtactcccaaacgcaacaaccggcgttctggttcctccctttatagaagatgaccactctcctttacccgcgtggatggtcgaatcactcaaagccatcaaatacgttgatgtcgagcatttctcggtcccacaaggccgtcgagccgtggagctagtggcaggcaaagaaagcgcaatcgctcaggtagctaggaccgttgtgggaaaaacttacgtgctttcgtttgcggttggagatgctaacaatgcttgccaaggatcgatggtggtcgaggcatttgcgggaaaagacactctaaaggtaccttatgagtctcgaggcaaaggagggttcaaacgcgcttctctacggtttgtggcggtttcgacccgcacaagagttatgttttacagcacattttactcgatgagaagcgatgatttctcatcactgtgtgggcccgtgatcgatgatgttaagctcctcagtgctcgtaagccgtaagatggccattgttttatttctaaggttcttcgtataagccagtgtggttttttatataaatatgattttcttaatctctaatgcttttgaaatgagatgagtaatactgaaagggtgtttgtggtgtagggttttatataaggcaaaaaggtcttgcttatatatattttcttgtatgagaaggctaaagaaatgttgtctgtttttactaaattgggttctttcaaggagatcgggtgattgtgagaataaaaatgtaatacagatatatatggtagagaggaatgaggataataatttaactttagcttcttgtgtactaccaatccgtgttaggatcaagcttttctaatcagtttcaaactgaactgccttgaaatccatgttagtagctgaagcaatggctcaaaattttaaaactatagtgaacagttaaaacgtagcaaaaaggaccaaagggtgtggaagcaaatggttacagttttgagcattattaaacggtttaaacgatttaaacgattggtatatcgattaacatgcgttttttaacatctggatttattatatattgcaaattatgagaagtatggctaagatgcttttatgagatgcttttgactgtttgatagcgcatatggtaattgttaaatttccggaaaaggatgtttatatgcaatttatcatattaaaaagaaaaaacccaaaacaaaactgtagtctcgttgtaacaccaaaacggtggcgcttgcgcacagttgtagtcttgtagatattaagctgagaagttattaaaaatgtaagtgggccttttcatcatgatccaatatatttttcgcataagcccaatagcccaatatgtgcgatccacgtcgagcacagagtttccttttatcacaaagcaaagagaagagagagcttcagaatcatcacaaacgctaatccgtctcatccggattggttcctctcgtcacctagacctagggtttcttccttttctcctgtcttcccctgaatctctgcatctgcaagctccggccgatacgagggagcttttttttttttgctcaaacttgtattcaggtatgtatctctgtccgcgattagccgcgagatgcgtcaatgtatctgttcttttagggttgaatctttgggtctctggtctttgtttttgatacatctagttgatattctcaatcgtgtgaattcaattatctgttaatttgaatctgtgtttgaattcattgccctttcgattttggtgaattttcatgggatttagctgattcggttgtctaattgagatctcgaaattagtttttggtgatacgagcagagaaattgattctgtaattttgactctttttctgtttgtttacctcgcagctgttaaggtgtatgttcaagtcatcttgagcctttctctctctctctctctctctctctgcggaatccgaattttgtaaagaaacaaactttgatggagatg

SEQ ID NO: 34752 - DNA, 3003 bp, Unknown; identical to SEQ ID NO: 34751
  misc_feature (1)..( 3003): 2750-1469P.txt file - cDNA_ID_3081847; gDNA_ID_2926225; Annot_ID_203460

SEQ ID NO: 34753 - DNA, 3003 bp, Unknown
  misc_feature (1)..( 3003): 2750-1469P.txt file - cDNA_ID_3081851; gDNA_ID_2926225; Annot_ID_142510
ttttgtatctatcaatttcaatttctccgcacacaatcaatttttcacattagctataaaaagcattaaatcagatgatttaagaagtcatctctaattactccttaagcttacatcatttaaacacaaacacgaaaattataatttacatattataatggcctattaattatagtaattttgaaatttatgagatcaaagtggagaagtgtatctagaaaaggataggcatggagggaaagagagtgaaggcattcccatgtgagtcacattcacacgagggtcctaaaaatattgatgagcttatcttccttgtcttctattaatgctttttaagttcccagctaatattgttagtagtttgatagtgatataccacatgtaaatatatatatttttttgaaatatatgagagattgagagttcttgaagatacttcatgagatgatgcaatggataattaatcaagatcctaatttattttcttaggtaacatgcttttgtagttaaattcttaacaacaatagcttaccatcacaattttaatcaatcaaccctttagtttttactttaagtgaaaattccaacccttttgactatatcaacttgtctatgagttaattcgtctatatatatgatgagaacttagccaatatgactgaataacctcattcttcttttctttttggtttcttggaaaactagtagctcattaataaaagagcaaccaaaaaaaatggaggatcattaatttgtcatatgattagttttctgaactttctttcagtcttggattttgttaagaagactgtatcggctccttgtgtgttggcacgtggttcaaaaaaattggacatgatgacgaacctgattttggatgttcatgggaaggccacatgacacgagagccgtttaagccgccgttaaatatggatggaagacaggttttcctccgtcagtgcctgagaagttgacgtcaattgacagagtcaagtgggacgttagccgcaaccggaaataagcagaagactctccacactcacatgcccacactcttaaccttcttaatggattaatgcacacttgcatcttcttatcatatagtatacgataaatgatatttatctataagaatttgtcattgaatgatataatatatgatccataaattgtgtctgctttgttataagtggtgtaagtcgggtcatgggcccgtgagatagtaaaagaagtgttgcatgtaagagaagggtgatgagagacagtggcacgacggtagcttaagcgctctgtttctctaatttctgccgtctccttttcaaaaagaccccacccacgttcctcttcttctctcatttacccttcttgtctctatactcactgctcatgagattattttatatgcattaagaaatattgggcaaatatagtttatattttttgtgtttttgaccaagagtaacagagtattatggtcacctgtaaagaataaactttttctaaagtagacgaaaatgtataatactattttggcgatcatagtaattgagtaggttttccaaaattttgtatgttctgtattaactcacaaaattacctaagttcggcttcgttgcgagaagccgtgaataatgaaaagaagtatatttgacttttgaaaaaaaaatagttaccacaattataatctaataaaattgaaagccctctaagattcaattattccacgattctaaatcaaaacaaggctaaatttttaaataacgatatacaggatctattttaagcatatattagggagatgccgacaaagaaaaaaaacatatagcggaactgtagagtatattatatcaagccgacaaagaaaaacatgtattattttagttatactgttttgagtttaactcaagctaaaagacgaaagagctaattggcaaagcctttcagaaaatataagaacaaaagcaatgctaaggccacgtccagattttagccgaacaatggtaaaaaaacacaaagcctgaacaaagacaataactatcaaatgttgtcaaataaaataaatcgaataaattacacgcaaatctaaaaaagtgagatccaacagcttcgtataactttagtgacaaagaaagctcacacgatcctccccgtagcaactccaccgcatacattatgtatctcgaccaaatgactaaatcaacaaactacccttttcactcattgcaattctactaagaaaatattctcaagactagttccaagtaatgatttacgattaatactagaataattagcagatcaaatagtattgtgtaggtataaagacagataatgagatatgagatcaaatgtctccatgagttggcatttgtgttgatacattgaccatgcatgtggatatatgatcaacacaaacttttgttaatgctcttttaattaacacatataacatgcaaaagttgtctaatgttttattttgtctacgatcatgcaaaagaaatactagcagtataagtttcaaaaataaaaggagattcggcgttaacattaacaagcactaaatgcaaatgtatgcatagtaacaactaacaacgtcgaaatttgtcattaatatatatgttaactattaaagccatatttataaacataatttggtatgtccaaaaggtgttttgtactactggccttataatttgtttttggtttaaggatgataataatcagacggcagacaaaatcattgagaaaagaaaggagtttccaggaataaccctctctgatcgatcttctgaaatcttagctaaaccccaaaagagtgagtcacggccccacgtggatacgtgaatcacatcagtggcataaatccgtaaattgtagtaaaatctagaggtattttccaagttagacttccatataagctattgctggctcctctcccaatttcccataatttactaaatatcactttctagtctcttctctttactttggtcgtccacaatg

SEQ ID NO: 34754 - DNA, 3003 bp, Unknown; identical to SEQ ID NO: 34753
  misc_feature (1)..( 3003): 2750-1469P.txt file - cDNA_ID_3081851; gDNA_ID_2926225; Annot_ID_203459

SEQ ID NO: 34755 - DNA, 3000 bp, Unknown
  misc_feature (1)..( 3000): 2750-1469P.txt file - cDNA_ID_3081858; gDNA_ID_2926225; Annot_ID_203457
ttactatctcacgggcccatgacccgacttacaccacttataacaaagcagacacaatttatggatcatatattatatcattcaatgacaaattcttatagataaatatcatttatcgtatactatatgataagaagatgcaagtgtgcattaatccattaagaaggttaagagtgtgggcatgtgagtgtggagagtcttctgcttatttccggttgcggctaacgtcccacttgactctgtcaattgacgtcaacttctcaggcactgacggaggaaaacctgtcttccatccatatttaacggcggcttaaacggctctcgtgtcatgtggccttcccatgaacatccaaaatcaggttcgtcatcatgtccaatttttttgaaccacgtgccaacacacaaggagccgatacagtcttcttaacaaaatccaagactgaaagaaagttcagaaaactaatcatatgacaaattaatgatcctccattttttttggttgctcttttattaatgagctactagttttccaagaaaccaaaaagaaaagaagaatgaggttattcagtcatattggctaagttctcatcatatatatagacgaattaactcatagacaagttgatatagtcaaaagggttggaattttcacttaaagtaaaaactaaagggttgattgattaaaattgtgatggtaagctattgttgttaagaatttaactacaaaagcatgttacctaagaaaataaattaggatcttgattaattatccattgcatcatctcatgaagtatcttcaagaactctcaatctctcatatatttcaaaaaaatatatatatttacatgtggtatatcactatcaaactactaacaatattagctgggaacttaaaaagcattaatagaagacaaggaagataagctcatcaatatttttaggaccctcgtgtgaatgtgactcacatgggaatgccttcactctctttccctccatgcctatccttttctagatacacttctccactttgatctcataaatttcaaaattactataattaataggccattataatatgtaaattataattttcgtgtttgtgtttaaatgatgtaagcttaaggagtaattagagatgacttcttaaatcatctgatttaatgctttttatagctaatgtgaaaaattgattgtgtgcggagaaattgaaattgatagatacaaaagagactcgttttatagcagtttgagtgaaataaaaagactttgggtatgggcttgggcttggatttcattttgggtccatcaaatttttcatcaactaacctataaaaggaaaagtgagcttaactcttttctataatttccctaaaccctgacacatgatatattagagataagggtaaattttcctctttgttcttcggttgtttctttttgtctctctgttcctgagcgactgagcatatatatttattgtgattttgtttctcacttcacatatacgcactctgcagatatatggtaatgaaattgtttctcgtgcattaaaaacatatctattctctcttacttattatcttcatctctttctaatacgtggaatcctctcttacttattatctttatgtctctgatttgtgttttcttgagttttttttaatgattttgatgattttagagaagttcatatatttttgtaaaatccattcaaatttcaccttaaactatgagatttagatttctgtatttttaactaaggaaatcctctcaaatcttccaaaatcattaaaattcaaatccacaaattatggattttgaaatcattagttcaataacactgaatttcatgaaactttttaaaatcattataatataggatttataaattctacacaaatctcttaaaattccactttcaatacatcccctaaattctctatttaatttccaattttctagtatctaattcctattttttattggacaaagtatgtatgcataatgaagattttcatatctagtacttttctccgattgttggattttctaaatgtatttctaattgttggaactttcttgtcactaattttttttgatacttgtgacagagacgtggctcaacattacgcgaacgaaaacgttgacactagatacactaagatatacgtgggaggtctgccttgggaaacaagaaacgaaggtttgagaagttacttcgaacaatttggagatattatacatgttaatatggtttgcgatagagaaacgggacgatcagagggttatggttttgtcacgtttagagatgctgaatctgcaacgagagcttgccagaatccaaaaccggtcatagacggacgagaggccaagtgcaatcttgcttatattggtggtagggttaacaataaccaaaacgcccaacaacaacaagtactacctatgtacccaactgggaccagtttccaccaccccaatatcatacctacacaccttatggttattggacaccccatggcccttactacgtgaaccaacctggtccttactacttgaaccaacctggcttttgacttatgagccatctctttcgctgttgtctgagacactacttgttgttctattttctgatttcaggctgtttagtctgcatgattctaatctaattatgtttactttcttatatacattgcatctcttctgttccaaacagagaacaagaatctaatttttcaagccctgtttattctagaatgtttctaaattttgccttataagcatttatatagacattggcatagtaaatagtaaatactgtggattcttttggcttttgaatgtgaacttgactttttaaagtgttgaattctgagacagcccaaccttttttgaagcttctttcacacttaaatcattttcaacctcataaaaaaacctacaagatctattaaaatataaaaatcaaaatctacagatttatcatctttatgatcaacaatg

SEQ ID NO: 34756 - DNA, 1723 bp, Unknown; identical to SEQ ID NO: 28847
  misc_feature (1)..( 1723): 2750-1469P.txt file - cDNA_ID_3081885; gDNA_ID_2926226; Annot_ID_203514

SEQ ID NO: 34757 - DNA, 3000 bp, Unknown
  misc_feature (1)..( 3000): 2750-1469P.txt file - cDNA_ID_3081891; gDNA_ID_2926226; Annot_ID_203510
aaaattaattattttggaaatttttttaatgctaatgacattagatcgtaaataagtccaagtacatgatttatttgctaaaatggctgcaaaaatgtatatatagattgttttggaatcaagattgtgttctatattttaaattgctaaaaatctgttttttcttttcttattctctaaattctcatttttaattgtttttcgattatgtataaaaaactgttttgttaaaaatcgaaaattcatttccactaccccaaccaacccacgatctctctgtatctactcaaataaaacttgtagtattcccaaaattattgtatataaaatcagaagttccataaaactcttccttaaaaattctccagaaacatcaattttcacagaattcttaaaaggatgtcaatcatacaactccgatgaatatgagttatacatgtacttctccaacacaaaatcatgttgatccttatatgttcatcttctaaacctttccaagacgacgaagaattgtttttctgttcttatttttattattttgtatttttcattttctcacccatgactctgattttctatttattggttttcatactcagaaaatctccacagtgaagaaacaatgtcaccaaaacaatggaaaggaaaaagcttggacaagaaacaagatgtgtgttcttgaagaaatcatacctagatcttgaattaattaagttcatatcactttttttttgttttttttttgtatgtgtaaaatctctaatgaatttattaactgcgttaaattcatgtttttgtcttttgtaattgacgttctggtataattatttgtaaaaaaaatagaaaagatttagtagatattgaaaacgattttgctatataaaattatttaaaaacaaaacgaaaatatttaagataataattctgttataaattttgtagtttcttttaaccatcgtttattgaaaaatatttaacacaaatattaacatcaattactattaagtgatgtaaataattgaaatcaattctcttaattgacactaatactaacatcacttaaataaatagatgtaaaatttaacatcattttttttcaattgacacatattcatatcagttagaataattgatgtaaatattttatatcttaacatcggtcattaattaactgatgtcaattatttgcatcaacaatatataagtcatttatttaagtgatgtaaaattcttttacatcaattataagtaatacaaatattcaaaataaatgatataaaatggcccttttttgtagtgcatggcgaacgtgaacaatcatatgaggagtttgcaaacagtcttccagctgatgaatgccgatatgccattttggatatcgaattcgtcccaggggagagaaagatttgcttcatcgcgtggtaaaataatttactctattctttttgttaactcatttccgtgatttgttgcttttattatcatcaatgtgtttgtttttgtgctataaggtctccatccactgccaagatgagaaagaagatgatttactcgagcactaaggataggttcaagagagaactagatggaattcaagtggagtttcacgcaactgatctaaccgatataagtcttgatgctatcagacgccgcatcaactaagaaataaaacccttgcaagagacttgaataaacttgttttctcgagtaatatgtttcctttgactattatgaaaacttttaacaccttaaatttaatttattctacagtatttggtattattgtatgtcttgatatgttttaatctatgagaactaaatgttagtgtgcgtcaacaataccgttgagatatctgatctaagattccgttatataatggaagcattagctactgtgatggctcctacacgtatttcatgtcttacatcatctatatttattactacagagtcatgagagctaatagttcaccacacattatctgcgaagagatgtaaatgttttatggtttcttgactttggtcttctttgtgatgaacatgtacgggttcttcttgggatttgtttgtgttttggttatgatccctcttttaagtctttcaaatcaagatcgccttatcctgacttagtcgctaaatgattcagaaagtaattcagccacatgttcgactaaactagagcaaaaatagattaaagaacacattttctttattgatttagaaactactcaaaactaaatctctctctctctctctctctctctctctttaggtcttatggaaaaactctcctaaacctcttattctaatctcttaggtcttagagaacaactttccatagcctcttatttatataaatttagcaaattctattataaaaagaaaaacttataaatcttaactaacttgacattatttgtatttttctattttctatctcttctagcatcttctagaaagagattactttctcctcaaataacttagaactatccaacaatcttgctagagagtaaaaacacatcaagcttagatgaagaagaagaagcaggggtttgatggagatttggattatggtgttgatgtaactagaggtcgatcgttttagtttcgggcaggatttataattagtgatatatatacttgcaattaactaagtttgatttctatttcatatttgttaatttgatgatcgaataccagataaaatgagaaaaagtcacagcattaataatcaataccaaaactaaattaaaatgaagcaaaccactcatgttatagttatacatcatcgtagatgataagatttattagaagctaatctcattaagattatatcatctcaaaagacaaacaacaaagttattaaatcatttaaaagtccgatataaggtaacactacatcactttcccgatttctgatttctcgacaaacatcttattcattcatctccaaaacctcctaatctaccctcttaaaacgatgaagctatcgggatg

SEQ ID NO: 34758 - DNA, 3003 bp, Unknown
  misc_feature (1)..( 3003): 2750-1469P.txt file - cDNA_ID_3081895; gDNA_ID_2926226; Annot_ID_142546
gatctgtatatgggagcggatcttcacgcatggatcgagatttaggatcataataagctgagttaacatcaaggttcaacaagtattttgcaggatcttctctgatacgcaaattccttacagttcctttgcttccaccatcagttgttcgaacacgttttttaacctttgcaaaatccacctgcatgctctcatcaatcttggcttcatcaacccttaagtcttcttcctctccatcaatgttcttctcctctagtttcgcaattagttgttgctcgttcaggtacttctctcgtgcattctcttttgcttcatgacgatctctcacatgacaataagacgaaggatcataaccattccatcggtcccttttgccatcatagtcaaattcaagactctcgattttctcatcaggtgcaatgtttttgtctgtgtattttgcaccaaccttacgaggtctttccatacatgttttcacatcatgcgtcattgcaccacagttttgacacgctcctttccgatacttttcggcttgataagtctttgcacctcggtcataatatgatgttgtggaaacgggtttagttttccaattcttttgatgcttcaagctcggtttttcagacttggcatataatggaggaattgtcaaatacttaggtatgtgaagattgatttcctttccaccctcgtctacctcagccggagcaagcccggctttacgagcttcctctaattccttttgcttcctatgatctttcctagacttaaaagcaactgaagccgtcgccattgttatcgttaaacttcgttactctctgcaggctacaactaaaaaagaaaagagttaggagaatgaagcttgttgagattttgtggtaaaccagggaccatctattcttctcctgtccttatgcggctgggatttggaaagctctagcgcagaacatattcaaagacaggttctccacaatctggtcagacataatcacctcaatcaatagctcatggcagaacagagaaataagtttccttgctcgatatgttttacacgtcactctgcacactatttggcgtgaacgaaacggacgacgacatggtgagaagccgatcccagcggatcatttaacaagctggatagataaacacattcgaaacaagatctcttctatccatatgagcggagacaggcgctatgagaactgcctccaaatttggtttcaagcaagaagctagaaggccgaagctctgtttctgaagtttgtctctgtttttcttgatcttcaattttgattttaatcatgtgttgcacatagttgtaaaaacgatttttctttgagtttttaatttaacattacaaattcaaaaaaaaaaaagagattttgtggcaagaaaaactaggaacccttaataaactctatcaataaattcgttctctcgtgagcttacatattattttaggaaagtttcttaaatggtaagaagaaaaattaaatgtacttgctaaattaactaaaccataattgtaaaatttccttattgcataagaatatcccttttcttctcacatgtcttcttcaattattggtttataatctccttattaatccaatagaatcttgtttgtgtaaaagtgctatttaccgttgaaacaacagtctccatctaaagagataattccaatgagtaggctcaaaacatatactcattaagcaaaacttaaaatgggagaagaataataagcagacgattctaatttcgttttgttatagatgagaccaaaagaatatattattttactttgccgcatgaaggtttcgtggtgtagttggttatcacgtcagtctaacacactaaaggtctccggttcgaacccgggcgaagccaaatgaattattatttttacatcttttctttacagtttctcttttttttcctttaaaacaaaaaatgtgtgaaggtgattttcagaagacatgaatgtttgttttgttttgatatatgcatcaattataaatcagtaattgatatagaatctagacaaatcctaatcttatattttgtatacccccggcaatgaaacaaaagaaaacgatagagagggactagtatgaagatatattcacatgttgtaatcaatgccgtggatatgacagagtcgttctcacatggatcgttcaatggttaccaatctatttaatatttattgaagatttcattagctcaaattaacaatttaacgaacaaacttttttgacatgatgaatgatttagtgataaatcacttgaaatgaggagaggctaatactctctacatctaattattatctgtgtagactttctacactactagtttgttagtggaaatgagttgtcatggactaaacaatagatcttttaaaaagggtaaaacgagaggtcgattttttagtgaacaaaatctgtgtttaggacagaaacgatgcgaaaacgtgtgtatttgttaggttaaaaaaaaacaaatatgtgctgtttcgtttattaataagtttcacaaatacacaaataattcagaagagtagagaagagagcctctcttagagaggaggaccgacaggtaaaaggcaaaagagtcggtacaatgcaacgtcacccacccattagtcatagcatagactcatagttggtaaatatatccaatgactttatgtgatattaaatatgtcatttgaccaattaatgactatgagtcaaacgcgtaattagaaaggttacacacagtcacacactaataatgactaatgactctatgagtcaaacgcgtaattagaaaaggttacacactagcttcttagatattgagacgctgagttggcatcaactctcttcaatcttcatcatcattcatcatactatattatataatccattctttgtcctctcttctctttacatgtaaattcacatatctctctaatttgctcactagatattatttctttcctcttgaaaagtccaaaaatg

SEQ ID NO: 34759 - DNA, 3003 bp, Unknown; identical to SEQ ID NO: 34758
  misc_feature (1)..( 3003): 2750-1469P.txt file - cDNA_ID_3081895; gDNA_ID_2926226; Annot_ID_203508

SEQ ID NO: 34760 - DNA, 3000 bp, Unknown
  misc_feature (1)..( 3000): 2750-1469P.txt file - cDNA_ID_3081899; gDNA_ID_2926226; Annot_ID_203507
tggtactttatcggtcgcccaaacggctccgtggcttctactcatgtaactccattgtgacgaacctactggagcaatgtcgatacctaccacttcggtttgacctccttggtacaatagctttatcgccaagtaatttggctttttgcttgcttcttccactctcacgttcaaattccttttaccgtaattgcaaggaactctgtttttcatttcccaaaccttcttattagtacatcaagtgactataaaaaaaccaataagtcaagtgtttcaagcatcgaacctttggtattcaacgtcgacgatgccttgtttgagaaggtatttgtcaacaccaacaacaggcttagccatagccctaaaagctctactactaaggacaagatcagtttggttgctcgtgttcaagtctgtgaccatcacaatggttcctttactgttacacaacttggggttcttgcatctgacttgaaagcaagctccacagccagcaccatctttgtaaatggaaggtatagcggccgcaatgtggccggcaaagaagctcgtagccatagggccataggcacaagccccggctagaaaatacccataaacaagacatgagaaaaaagaaacaaactagtagttaaacggaagtagttagaagaagatgggaatgtttacaagagagagcagaagcagaggagaaataagatgctttagaacggtgtagacatcgatcacaagcgttaacggatgaagagaagaggaagatgactacgatgaggtagagaaagcttctcatttttggacttttcaagaggaaagaaataatatctagtgagcaaattagagagatatgtgaatttacatgtaaagagaagagaggacaaagaatggattatataatatagtatgatgaatgatgatgaagattgaagagagttgatgccaactcagcgtctcaatatctaagaagctagtgtgtaaccttttctaattacgcgtttgactcatagagtcattagtcattattagtgtgtgactgtgtgtaacctttctaattacgcgtttgactcatagtcattaattggtcaaatgacatatttaatatcacataaagtcattggatatatttaccaactatgagtctatgctatgactaatgggtgggtgacgttgcattgtaccgactcttttgccttttacctgtcggtcctcctctctaagagaggctctcttctctactcttctgaattatttgtgtatttgtgaaacttattaataaacgaaacagcacatatttgtttttttttaacctaacaaatacacacgttttcgcatcgtttctgtcctaaacacagattttgttcactaaaaaatcgacctctcgttttaccctttttaaaagatctattgtttagtccatgacaactcatttccactaacaaactagtagtgtagaaagtctacacagataataattagatgtagagagtattagcctctcctcatttcaagtgatttatcactaaatcattcatcatgtcaaaaaagtttgttcgttaaattgttaatttgagctaatgaaatcttcaataaatattaaatagattggtaaccattgaacgatccatgtgagaacgactctgtcatatccacggcattgattacaacatgtgaatatatcttcatactagtccctctctatcgttttcttttgtttcattgccgggggtatacaaaatataagattaggatttgtctagattctatatcaattactgatttataattgatgcatatatcaaaacaaaacaaacattcatgtcttctgaaaatcaccttcacacattttttgttttaaaggaaaaaaaagagaaactgtaaagaaaagatgtaaaaataataattcatttggcttcgcccgggttcgaaccggagacctttagtgtgttagactgacgtgataaccaactacaccacgaaaccttcatgcggcaaagtaaaataatatattcttttggtctcatctataacaaaacgaaattagaatcgtctgcttattattcttctcccattttaagttttgcttaatgagtatatgttttgagcctactcattggaattatctctttagatggagactgttgtttcaacggtaaatagcacttttacacaaacaagattctattggattaataaggagattataaaccaataattgaagaagacatgtgagaagaaaagggatattcttatgcaataaggaaattttacaattatggtttagttaatttagcaagtacatttaatttttcttcttaccatttaagaaactttcctaaaataatatgtaagctcacgagagaacgaatttattgatagagtttattaagggttcctagtttttcttgccacaaaatctcttttttttttttgaatttgtaatgttaaattaaaaactcaaagaaaaatcgtttttacaactatgtgcaacacatgattaaaatcaaaattgaagatcaagaaaaacagagacaaacttcagaaacagagcttcggccttctagcttcttgcttgaaaccaaatttggaggcagttctcatagcgcctgtctccgctcatatggatagaagagatcttgtttcgaatgtgtttatctatccagcttgttaaatgatccgctgggatcggcttctcaccatgtcgtcgtccgtttcgttcacgccaaatagtgtgcagagtgacgtgtaaaacatatcgagcaaggaaacttatttctctgttctgccatgagctattgattgaggtgattatgtctgaccagattgtggagaacctgtctttgaatatgttctgcgctagagctttccaaatcccagccgcataaggacaggagaagaatagatggtccctggtttaccacaaaatctcaacaagcttcattctcctaactcttttcttttttagttgtagcctgcagagagtaacgaagtttaacgataacaatg

SEQ ID NO: 34761 - DNA, 3000 bp, Unknown
  misc_feature (1)..( 3000): 2750-1469P.txt file - cDNA_ID_3081922; gDNA_ID_2926226; Annot_ID_142536
ctgttggaggctatggtttcgagtattatgcagaatggttttcgcattgaggacatcaaacctgataatgagactctgttaaacattgatgtttatatgcatatatatactgttagaaaataaaatagtcactctctcgtcggcaaaaggttaagaaaacatcggagcacccaagtaattcaagaagccagagtttttgttcaatcatcggattttggtgaagagatgggagattttgtgaatagatgtcctattggtttgtttttatggtccttgtagatcaagggttcagcttcctttgaggtgatcgggatcacagccattgctgctgccgctttcttttctttgtaagatgcccaggtgacactataaagacctgctatgattgcacatccgcctaaaatgctaagagaggaggagaaaaaagcctagttagttaggaaacttcagacacatcccgttgatggctgagaatagctaagagaaaaggagagagatattaaacctccccaagtagatagggcttccaaggaagattctggacaagaaagctgaggctgcgggttgaagaggattatagagagcaaccaaggaaggacccaagatcttatttgaccatgtcaagagaccatagttgagagcagacgcgattactccctgcatagaggaagcaacagagttactcaattggagaaatttaatggatcaacaaacatatggtgtgtgaagaacatactgcgtagacaactgcaaagaactcggatcttgtgagactccagttcgtcgactcattagtcatgaaaaaagcagatgtcaccataaacatggtcccaaagaaatacgagtatgctgtgactgaaagattcgccggatacttctttaagaccggagcctgatcatatatgtttcaaatgcaaggtcagtccaaagacaagaagatatctgaaactgaaagtgtgtggatcatctagaagaaaatgacatgcctgaatagcaagaaaagcagccatgcaagtgcaattcccaatcaaacacaaaactcccaaattccatcgcccaagtccattaaaaaagccagacatgaagtgtccagatgtttcagtgtgtcttgattcaccatgacccaaggactcagcctctgtttccccaaacaaagccagtccacgaaacaaaaccatcagcaccgccccagcgacacaaatcagtgtgcctcctaccttagcttgaccttctagcttgaataaattcagtctctctgttctgcagcaacacacgaaaatggattgttctaggtttggaagagtcagagagaaagtaaaagagaaagactggatcgagtctttaccccataatgagagccaagatgaaagtaaaaaccgggatcgacggctgaatggctgcagcataagttggattggtgtaattcagaccaatgaggaacaaaagctgattaccaaatatcctaatcacaccaaaacatcactgtgatgattgcaatcatgaagataacagaaactggtagaagaaaacttgaattaccctgttaaaccaaggaagaagaaagctaagagaaactgtcgattcaaaggaggtcttgttctcttatcacggatataagcaagaggagcaagaatggagagagcaatgagatcacgaaagacacagaagacaagttggtttacaccaacgttgagagccactttggtaatgacatgatatcctccgttgaacaattgcacaccgatcatcgccacgtgagctttccacgcctctctttccaccgtactctccattggcggttttcttcttttccggcgattcttattcccggagaaagttatgaaagccagggtgagagagtgggtaagagaattaaatcttgaaactgattgtcactttgaatctcttctgtcaaaacgtgttttttgatcgaacgagacaggggaactaacaaatgatgacatcatgcttcggacacaagcatgcattgggattgatcctatttacccgccattccattatcactaatttccttaaattttcatttataaatatatatagaatctaaaaattaattatagtatggtaaaattttataaaagtaaagatacataaattcgaggaacgaatacataaatatagaatgctataattaattttcagatggttcaaattggtcttggcgtaatttatgttaagagttaagcatcatgtttctaatattataatcgatgtaaataattatttgaaacgatgtaaataatttttttcactcaccaattctaaagtcacttatataagtgatgtaaaactcatttgcatcaatatgcaaatataaaaaataagcgattcaaaacgctttttttgttgtactgtcttctacagacattgatgtgttggacatctttaacttttgattgtatgtgtttagatatctctgcatgcattggatttggtttcatcgatatataaagtctcatttctcatactcttttttgaccaccatgtgttatgtcacgtatcaattttctcatactcatttttgaccaccatgtgtatatgtcacgtatcaattttgtctttttttttttaatttcagtatgacaagtcgaaatacgatttcaaacgaacggagatttggttacaagaaaataccaaaaagataaaaattgtgaagtagcaaatgagtctttgtattttgtcttctctttcgtcattgtctttgagagtgtttatcctatcaatgacgatgattctttctgttactacttggtatgaattacttggcaatttctgatcgccaacccgttccttttgtttgtttctaatgtgcatcatcatcttttgcctaggatatttttgttattaaaaaggaaaaaaaaaaacttcgaaccaacctgtacttcacgttaatgtacagtagtcaagaaaaataaatttatttaatgcatgtgtgcttcatgatcttagacacatgcaaatcgaagaaactcaagcatg

SEQ ID NO: 34762 - DNA, 3000 bp, Unknown; identical to SEQ ID NO: 34761
  misc_feature (1)..( 3000): 2750-1469P.txt file - cDNA_ID_3081922; gDNA_ID_2926226; Annot_ID_203499

SEQ ID NO: 34763 - DNA, 3000 bp, Unknown
  misc_feature (1)..( 3000): 2750-1469P.txt file - cDNA_ID_3081926; gDNA_ID_2926226; Annot_ID_142535
ccaattctccatgaaatcagatgtgtatagcttcggggtcttggttctcgaaattataagtgggaaaaagaacagcaatgtctatcaaatggatggtactagtgctggcaatttggttacatatgtgagtatatatagagccattttttatatatcgagccttaattattattttactttatttaatagtgaccaaagttctaaatactaaaatgttcactagacttggagactatggagcaatgggtcaccgttagagctagtggatccatcctttcgtgataactatcgaataaatgaagtttcgagatgcatccatatcgctttactatgtgttcaagaagaagctgaagatcgtccaaccatgtcagctattgtccagatgctcactactagctcaattgctctcgcagttcctcaacgacctggttttttcttccggagtagtaaacatgaacaagtaggattagtggatcgtctatctatcaatacgtccgctctttgttcagtcgatgatgcttccattactaatgtaactcctcgttgaaaacaaaagtcgcgatatatgatttagtctattgaattaagcatcgatcgacaacaaacaaaggtttagttgttaattagctctttcttaggttttatagtctctttatttgttagcattaattatcgcgtttttatgattaaggtaaagcaaataaatggtgtaacatatattgtaaatgaaaatgtgtaatggttgagggagggaatcaaaacctctgaacaatgcatgtgaaaaatttcttcgttttagtgtttttattgagtaactagattatatttaccaaataaagagagttgaagtaagacacaagcatatgaaatacttttgatagagtgtcttgcaagcaatatatataaaatatagatgttaatatacatacatgtgatgtatgcagatacatattagtctatatataataatttttgtagagaaattaattgtgttaccttttaaagtcatagatatgataaatgatgttatctaataacttttttcttttcaagattagatggagctctatagtagtcgtttttgctaaaatctaggatattacataacttagcaaacgataacataattgatgtaatcctagttcaattatatttctgtaaaaaaaaattcatacataactttttccaacaaatatgaactaaactatcgataccataaaaagtaaccccacatgtgtttggtaccaaaagatgctgcgtagatatgagtgcgagactgagcttgacacacaaattttatgaaaaacaaacacacacacacactcattatataaatatgtgtatgtgtgtgttgataatgagagaggagagaaagaaagcaaaagggtttgaaaaagaaaaccacatgtttgaaggatcatatcacatggctccttaaccccacacttttgccttccctctttttcttcaagcttctttattcactccttaatacacacataatctcttatatagaaaccacatgttgccaaacatatatatacacatattttccaatatatatgtatggtttgttcactaataatctatattttttgttactaattccaagaacattaaatgtggtctaacattgacaattggtttatgtaactctaatcctaattaagaagtagtgagttaaaacttaaatctaatgtttttgccttttggagatgtgatagaatagttgaaaaccccacatttgtttgatatgaaacttgggacatgtctatggtatcaaattcattggatgatgaacacatttgacttttgtaaaatttagaaaattacttctaaaattttattcataaatttttcatgatatatcaaatttccgcattatgggtggttgtcttttttttagtagatatatttaggtgagaaattagacagtttttgcattagagttgaaaaaaagttactaactaatatctcaaattcaaatttaaattttaaactttttagttaatgggactgagctacaatttaaaattgattatggaagaaaatctgaaaaggctctaacttttcccctcaaaacgggaagacaaatttttgtcttctaatccaaagttcatcaaaataataacccaaactaaaccgctaaccaatataaatcaaaccagaccaatattcacaattttatttaacttatacgcttttacaaataattaaccaaattagtaatgtgaatgaatgtaactatttttccattatcaggaatttattcattaagaagtggaaaaataaagataattaggataataaatcgtcaaaccggaaccgaaatctcggtttgctccggtcttcttaaaccgtaacgtcgtttacaaaaatttgatctttactttaagttttgtgccttttacttcatctctcatctcttcttctgctttgagaagaaggaacaataaatgcagttgaagtcacactctctctctctctctccaagtcgctctctttcgaatccaccattgctgaaacttgatccttctctgtaagtcttcaaatctccagagtgggttttgcttccgggaaaagtactactcgctgaatcatcttccaagattcttcattttgttactcgatcgtttgatccgatttcctgtcatcggtattaagagaaggatctagatatagcttggtactaaagtagctagatattgaagtagcttcagcaatgtatttacattttgttcactgattttgttttgtttttgctgattcatgaaatggagtcaatttgagtaagaaagttgctaaatttgggtcaaactgcgaaagtcttggattctagattagaacttgtagtttaagtttttgggcttctcaaagatgtgacctttaaatgcttgattggtttgagaatgttggttttggttaccttggatccatttgctcaatgtgaatgatttgtttgtgcagagaatctaaatggtagataattttagcagaatg

SEQ ID NO: 34764 - DNA, 3000 bp, Unknown; identical to SEQ ID NO: 34763
  misc_feature (1)..( 3000): 2750-1469P.txt file - cDNA_ID_3081926; gDNA_ID_2926226; Annot_ID_203498

SEQ ID NO: 34765 - DNA, 3003 bp, Unknown; identical to SEQ ID NO: 28548
  misc_feature (1)..( 3003): 2750-1469P.txt file - cDNA_ID_3081951; gDNA_ID_2926226; Annot_ID_203491

SEQ ID NO: 34766 - DNA, 3000 bp, Unknown
  misc_feature (1)..( 3000): 2750-1469P.txt file - cDNA_ID_3081985; gDNA_ID_2926227; Annot_ID_142569
tccaatccaaggttgtggacgattttataaatagcctcttgtcttttccttgtaaataaagttacctcaagatgtcttctttttttttttcttattagtcacattttgtaactaatttgttgtccataattgttgtaaattaagtcctaaaattcggttggtaaataaataagcgtggtagaaaatacgagttgttttttcttcttaacggaagatgatatcggttgtgaaagatgttgaaattttggtatctttatttatcgttgtagttagtattaacaacgttgccgcggaatcttcaacctgtttgagtatttacaaatatggtggagctccggcagttttccgatctcccaattgccctctctggaatctccagaatcgccgatccttctcctcccccgccagtcgttgccatacggcggcgattcaagggcggaggaaataccaggaggatcgtcttctctgtgcccttgatcttcgcattccctttcccggtatgcatcgttgccttgggatcgccaaagagaatcaactgttttttttttattccccaagataagatgattcgcaggcaagaagactggaacaccaaaggatgttttggttggaatcgcagctgtctttgacggccacagtggttcagaagccagtgagatggcttcacaacttttgttggattattttgctctccacatttactttctcctggacgcaacattttctaaggagctcactggaaagctaccaaattcactcatgcatctatacgacctcgattcccaaaggtagtcctcgtgacatagaatgttgttcttctcacgagatatgattttgcaaccctgtcccactcacttttttacacaggttccaagattcattgccgctcaattttcacttggatattctgaaagaagccttgctcagagctatctacgacattgatgcaacatttactaaggtgtggtgcatggccttctactctatcatttggaccgttgttttttcagtagcgtgattagactctgttgtttaatgcaggaagcatctactcgaaagttggattcaggttcaacggccacaattgcacttatcgcagatggtcaactactggttgctagcatcggtgattctaaggcacttttgtgttctgaaagatatgagactcctgaagaggctaaaggttcccgcagcatccctttttagactataaccaaccttgtgaagccactaagagtataggggaatgaatgaacgttttgttcttttggtgtttgcttattgcagctactttaataaagttgtacagagagcgtaagcgcaatcaagactcttccccatcaaggttctctgatttaaagctggaacatcgcactggactcatgcgttttattgccaaagaattgacaaaggaccatcacccagatagagaggatgaaatgctccgagtgaaagctgcaggaggttatgtcaccaagtgggccggtgtgccaagggtgaatggtcagctggctgtctcccgttcgattggtgaccttacttatagaaggttggcactgctggttgtatcctagaatctctctggaacacgattctagctggtttacactatgagaagttgaaatgtgagttttgatatctctttcagttacggtgtcatctctgcacctgaggtgatggactggcagcctctagtggctaatgacagctacttggtagtgtcatctgatggtatctttgagaagttagaggtgcaagatgcatgcgatcgcctgtgggaagtaaagaatcaaactagctttggagcaggagtgccttcatattgctcaatatctttggcagactgcttggttaatactgcctttgagaagggaagtatggataatatggctgcagtcgtggttcctctaaaatccaatctagattgggagagccaaccaaaagagcaatctgtgggtccttcgggattcaagatgaagaatacatatgcactgccatgtgagtttctctcatcacaacccaacttattccgtatgggatgaagagtgatctttcatttctaaatatatctgtttttcaacagatggaacttttaatccattgcaattgaagcagactcaaccactttcaaccatgtttaacgagttattggtatgttcccaccaagacattaccatacaaatgcccaaggaaagtgtacaagtactttataataaaatgagtcaaccttggtattgtaggttgaagaagaaaacagcagctattataaacttaatggtacctttgcatcatatgggtgacttacttactggtagcctcttccgagtcattattctctggtaagtgaagtgactgactagtatcacctcgttgcaatcttgtttaatgttttatctttttctttctggttctgtatactgcactaacattcaatcacaactcataccttgtaggtgcaactaatttttcaacaaggaccaatttttgtgtattctgttttctaccatctaattcgttagtttttggtctagccataattgttttgtttgtaaattgaaaattggaacaaagtataagaacaattataataattcaaagtacaagtgggtgtgtatatgtggacgaaaaatgtgaagaaagttgttgaaatggtttttaattggcacaatcatttgtggcaaaatccaaccaatgatgtgaaaaataaatcaaatccaatggaaatgggctgtagaaatgagtgcatcattaacgttgtttctcctcttcagaggccggcccactgaataatcttaattccaggtgtcaagatcggagccgtctgattatattatttaattgcgggacgtatcgggaaggttcttctcttggccgcctctctcggagtctattacttcttcttcttcttcaaggaggaatcgggatcgtcctcacatctcattcgcattttgctgaagacttctcaccggcgttgacaaaaaaaaacgaatccggaagatg

SEQ ID NO: 34767 - DNA, 3000 bp, Unknown; identical to SEQ ID NO: 34766
  misc_feature (1)..( 3000): 2750-1469P.txt file - cDNA_ID_3081985; gDNA_ID_2926227; Annot_ID_203549

SEQ ID NO: 34768 - DNA, 3000 bp, Unknown; identical to SEQ ID NO: 34766
  misc_feature (1)..( 3000): 2750-1469P.txt file - cDNA_ID_3081985; gDNA_ID_2926246; Annot_ID_204218

SEQ ID NO: 34769 - DNA, 3003 bp, Unknown; identical to SEQ ID NO: 28861
  misc_feature (1)..( 3003): 2750-1469P.txt file - cDNA_ID_3081989; gDNA_ID_2926227; Annot_ID_203548

SEQ ID NO: 34770 - DNA, 3003 bp, Unknown; identical to SEQ ID NO: 28861
  misc_feature (1)..( 3003): 2750-1469P.txt file - cDNA_ID_3081989; gDNA_ID_2926246; Annot_ID_204217

SEQ ID NO: 34771 - DNA, 3003 bp, Unknown; identical to SEQ ID NO: 28859
  misc_feature (1)..( 3003): 2750-1469P.txt file - cDNA_ID_3081993; gDNA_ID_2926227; Annot_ID_203546

SEQ ID NO: 34772 - DNA, 3000 bp, Unknown; identical to SEQ ID NO: 28858
  misc_feature (1)..( 3000): 2750-1469P.txt file - cDNA_ID_3081997; gDNA_ID_2926227; Annot_ID_203545

SEQ ID NO: 34773 - DNA, 3000 bp, Unknown
  misc_feature (1)..( 3000): 2750-1469P.txt file - cDNA_ID_3082001; gDNA_ID_2926227; Annot_ID_203543
tagtggtagcccgagacatatcggacaaaagcaatgttatgaaacttttcttcaggtatcaacaccagattaacatcatgccagttggacctacaaaaatagattcatccttaagtgtgattaccatactttgtgaactactaatcttttgagaggagtggactatatccccaacggaactgtttgttttggcaatgtaaatgttatttttttaataataattggtgttttcttttagtattgagttgttgggttccattatattcgctctctgcgttgaaaagtttgtgattctacggaaaggaatatgctctggtggatgcgtctcggttttggttctttgtgctcacaagtaacgacggacgaagattcccaacaaattcacatgacaaactataaactatagtctataacaaattacgtaatctgatttatttctttattatgaattacacaattaaatacagtagtcatcttaaagagagattattacagtggaccttttggtttcgatagattgcgtcacaaaccaaaaaggttattcatttctcgatgtacaaatattattaaagtcgaatgtaaatttacaagaaatttgggggaaacgaataaacggcgacggaagggctgccactagaccgagaagaagcaaagacagacgagctctgtttttgcaagagagagttttttataataaaaactggaaaagggcaacaaaacgactctttggccggtgaaactgtcaaaaagacattaagacttggtctctctcccactgcaccgccgatccttctctacttgtcaaactataaaagaaaaagagtatttttttttgtggagaccaccaccaccaccttcgatcgatttctactaacttgttcttcttcttctttctcaactctcttgtcttttgtctctccaccaattttttcttgttctttctctctccaccacataaaaaaaaaaaacctagctttgtcccctcaactcactgattgaactgcttgattttcgattgatcatctgggtggttttgaatcgaagagtattgttgtattagtggctggtggctctccaaaagagtaaggccggagagagaaatcaatggcctctggcggcggagaggcggataaatcacttgaaatcgggtccgggaccgcggatcccaaaataggcggtactgggagcaggagcgccggagaagaacgatacttcagggcagatacactggatttcagtaaatgggatttgcatatgggtcaaacctctactagcagcgtcctcaccaattccgcttccacgagcgctcccgcaccggcgatgcaggaatgggagattgacctctccaaactcgatatgaagcacgtcctcgctcacggtacttacggcactgtctaccgcggtgtctacgccggccaagaagtcgcaggtccgtcttttctcctagactaagatatatatgattcattaggatagacactggtggtcttttttggggatctcccgtctgatggatgttatggtttgctgcagtgaaagtgttagattggggagaagatggttacgccacaccagctgaaactacagctctccgtgcttccttcgagcaagaggtcgccgtctggcagaagctcgatcatcccaacgttaccaaggtattctttttacattcaccgattaaggtagaagaagaaccttttgatcaaaggacttattcatttgacctctctctctctgtggcagtttataggagcatccatgggaacctctgatctgcggatccctcctgctggtgatactggcggacgtggtaacggtgcacatcctgcgagggcctgttgtgttgtggttgaatatgttgccggaggcacgcttaagaagttcctcatcaagaaatatagggccaaactacccatcaaggatgtcattcagctcgctttggatctcgctagagggtaatctctcctttactttatgtttcctgatttgccattcatttctgaaactattcagacaaagatgcttcctttatcaacaaaactcttcctaccttttttctttgtctcaggcttagttacctccactccaaggcgattgtacatagggacgtgaagtcagagaacatgctgttacagcctaacaagacgctgaagatcgctgatttcggggtagctagagttgaagctcagaaccctcaagacatgacgggtgaaactggaacacttggatacatggcaccagaggtatgtaatgttgttcctgtagagtcaaaatccttgtgtttcgtaataggaaagatgagaatgttagcttttgttgcataggttcttgaaggaaagccttacaacaggaaatgcgatgtctatagctttggggtatgcctctgggaaatatactgctgtgacatgccctatgctgactgtagttttgctgagatctctcacgccgttgttcatagggttcctctctctctctctgtctatacatacaatctctcctatgttaaagctaatcaggaaatctaatgaagtcactgtttggtgcatcttgctcagaatctgagaccagagattccgaaatgctgcccgcatgcggtggcaaacatcatgaagagatgctgggacccgaatccagacaggcgtccggagatggaggaggtggtgaagctgcttgaagccatagacacaagcaaaggtggtggaatgatagctccggaccagtttcaggggtgcctctgtttcttcaaacctcgaggcccctgaatctctctccctctctttcctttttgctccgtgtctgatatattcttgagagctgcgtgattctttggattttgtatttactttgagctatgggagttggattggtgtgggttttgtcataagaatctttctgcgctctatgtatttatatacttaacacagtcgtgtataattcgattaagctttattttattttttgatgttgattcgaatttcatatatacacgacgcacacatg

SEQ ID NO: 34774 - DNA, 3000 bp, Unknown; identical to SEQ ID NO: 28852
  misc_feature (1)..( 3000): 2750-1469P.txt file - cDNA_ID_3082013; gDNA_ID_2926227; Annot_ID_203537

SEQ ID NO: 34775 - DNA, 3000 bp, Unknown
  misc_feature (1)..( 3000): 2750-1469P.txt file - cDNA_ID_3082017; gDNA_ID_2926227; Annot_ID_203536
agtgatttgcaggtaaaccaaaccacacaggagttggtttgttgatacgacaaaaaagcgagagagagaattatttgatggttaagtgtggctgactaaactttgatttgattggtaatgacagaaactaattgatgtatacatgaagaagatagaggagctctacaaacagaaagaaaaggtaacagttttgtgtcaatgtttctagtctacttttgtatctgatccatcttgtggattgattagccattaattactacacacatatatgaatccacaggaattgatgaaggtgtgaccataatggttgttaggggaggagacgtaattcaacaatctggtaaaatcccgcaatttccaatgccttcgtttcttttactatttgccctgatgtttccttggggtacaagcatgtcttttgggaattgagagcaactttgtttaaattttcggttgcaaaatttttagaagaagcctctgatattttgtttcttttattaaaggatccctctttgtacagcaaaactcttgttaattttggttcatcaccccaattatcaaatcttatttttggcttattgtgtttggaactgaaaatttaaaagtacgtattacaatattagattaagatattctttgtattataatctgataaaataggttattggagccacttcaaatgcgtttatcttattataatcacacctcgccgcattgagaaatccgtcaaacccaaaatatgtttgtctatgtttgcaaagcatcgaaagttgggatcagtgggttaaaattgattaaaaatacaaatcatcgaattattttaattgtctattaaactgtatagtacacgtttttccctccgtagctggcgaatttgacttctctgaacctacaaaaattttataatgataaaaattctatttttttcatctttaaaacgctattacttcatacaggtttaattttctaaacataaatcgctacttcattcaacttatccttccaaatctttcaaattgagaaaaaaatgtgacaatttcacgttttatctatatagcaaacggatgcggatctcgatttaaaaactaaaaagtcccaaaatgacaattagtttattcgtggttgttacttgtaacttgtaacttgtaagacatgcatgcatcaatattcaatagtggtgtgttatttaatactccatatagatatttagtctctactaatattctaaagtgttgttattattattaattaagtgatcccataaaccgagggttaacccatgatgattattttaattagtaggcttcatgggagagtatattttaatttgtctagtcacaataagaaaacattttatgtcactaattattatactggtaatctttatacaaaaaagcatcgatatactactgactattctagtactatatgacaagtggctgagatgttggattccttacatcggaactccaactaaactttcgttaatttgtgcttcaaagtttcattacaataaggtttttatttatttattgatttgtgtttatataatataggatagggtcaaaaacattataaaagcactttaaaaatagtctatgaagattattgtacttactttggttctcccttcatttaactgcataaaacaccgttcgtcagtcaacacttcaaagataaattaactcatactagttgatatatacatataccatcatgtagctttagtcactagtcgaatattttagttaatcttgatatgtttgtttcattcgcattatcttcgtcaattattttattcattcatattttttataaaatagtttaatcttggtacataatttaagttaaagctcgctttgataggattttaagtcgtttgaacccagtcatacacaaaagtggaatacaaaataagaaaaatggttaagtagttcatgacgttatattggtgtgcccaacggtaatctgatgatgatgagccatgatcccatgagagagcgaatcaccgtggatctgtagcttattcgacacgtggcactatgaatggtgaaaagagtgagcctcgcgagtgtacgtattctctatactcgccgtgtgcccgtggcgcagtgacaagttagtcatccaaatatactaacataatttgtacttttactaaatgatcactcttccaaattttttgtttactagtatttaataacatgttttgacaataatatcgttgtaaatcagctttatttttgtttttatataaatttgagtgcagttgttttcaaattgcatatcagttataaaaagacactgtaaaataagcagtcccaaaattttcagtgacaatggtacgtgggtgtcgttcccacgcatatagaccgcgcgtggttagtagtacaacttgctaacattcatataaaattacaaaaaattgttcttttaaaatgtgcactctttttttatatattagatttgttcatacggtcatggagtgaaataatattaaaaatacagcaatgaacatattatattcatatgtttttgggtgggcacaagaaatcaataattattatatatgatagacttgtattaaaaaaaatgtagtcatagaatatatgaataagataataattatagtatgtgatattaaaaaaagggaaacagataataataatatatgtgactaaacattgagcagtggctttattccataagaaagtgacgtttctgccatgctggcatttcgagatcgcagccgtccaaatcacggtaagatccaacggctaacattaagacattctggtcatttgaagatcttgaaccgtcgtctctcttacatccttttttccaggggtaggttttttctgtgcacaaaacatttgaggagaaggagacgacgagagctctgaaactgaaatacagagaaggaagcttcaaaactttgaaggagtggaatctgattttactcagttgatgggagcttagtctttctagcttgcattaatg

SEQ ID NO: 34776 - DNA, 3003 bp, Unknown
  misc_feature (1)..( 3003): 2750-1469P.txt file - cDNA_ID_3082042; gDNA_ID_2926228; Annot_ID_142594
aattatttcataaacttcgaagcacgtttcgacttcgttcatcaatcatttttacttcgtaatcttttaagttaatatattcaaatcgcaatttaaaggaaataatgttgactaaaaaagtaaatggatctcgatcatttttaaaacgatgataaaatgaaacacatagctggaaaataaggactgctcaacggctgaagttgactcttatacggtcattagttttgggttaaaggaaaaggatccatgtgatccaaacatttcgttgcttctcttggtgatgcatattcgtttggtctaattggattcaaacttgaaagtaactatttataaaattaatttgaattttaacttaattttatgtattgaaagttagttaaataattaactatttttgcggatacttaagccatcactcacattacaacaccttaaacaaacatttcagtttgtaaacttcatacgaatgattcattttctgtcggtccagtaccaaaattttaaaatagtttggaatctttgaaacttagattattttttcgcacttaattgtgataggatatttcctgttttaatcagttattaagtcagtaaattgacaaattaaagtctgtatttagttggcatgtcatgtgagaacacataccgagacaattatccaacataatagacaggatttaatttgttgatcttctagacaaacgtgagttaactattacatatacgagtatttcattaaactcatagcatatattaaaaaagataccaaattaccactcttcactatcattgtttgtttcaaactttcagtttcagattaccattctttaacagaaaataaaattttatatttttcattggctttgatttctttgaatgtgaaacaagtatgtatgatgacacatgagttacgtttgtacctatatattatcatggtaacttaaaccgtaataaaaaaaatgtgtgcagaggtataataatgaaaaaaagagagaataaactaataaataataaataattggagaaaataaaatagcactacatatgttgcatgcagccagcaaagtaacatgcagtaccatgcaagtaaacataatgtataaggaccaaataccacatgggttcttacagttggactttgcttatttcactcacatttgtcactattcttttcttgctttcgtcatttacaataattctgaatcggcaattttatgttcctttctttattaaaccgatcaatagatgaaatggaacaccctaaccaaaaatgaaaagaataaataatgacaggagtacccacggacaaaggcaactagtcgcaacatagactttttagttttaactctttatttactaatcggagcagtttagctttgaacgtacccaagtcataagtatgttataggcccctaccacaggaacaaagttttatttacaaatagaataattcattaccaaaaccaaaaagtttatgcaaatattagtctttcagaaaagagaaaaaatgggcatctttgttactttagctataaaaaatatgaaaacaaaattcaaagaatcaatcaagttttgtagaaaacataattcaggaactaactggtgggatccaatgtccatatacatatcatatataattgatatcctatctactttggcactgaaactcccctagacatttttttttaaggtgttatttcaatctttatttgtcggcatatatatacgcaaacacgtacatttgtgcgtatatattaaattacgtatctatcgaatttttaaaaatgcttttttagtctccctccccttttaaaagctgggaaggggttgttgaaacctctttaattaaatgtttaacaattatatactaagtatgatgttcgatcatctgatcatacaatattgtatatcttatagttctgaaacatttaggaaattttagtgtccatttttattcggcgtgatatacgtatatgttgtataaactataaattgaaattaacggttcattagaaccaaacttaataatttgtctaagcataattgttctacaaatgggtaaacattttataaagtcattaactcattatacagttagggatttaaaaataagaaatactcaacttcggatttggtaaaagtaatatatttaatcggctacgtagtgtgcaaagatacttgccgtccatattgaaatcatgaagaaaaaactattcaacatcaaaggatcaaatcaccataataacatgaaaaataagttcagttatatttttaatttgtgtaccaagttatactaagactacattatatatgagaatttcgagaagctatcattggatatggtctaccttctatgcgaaccaccgagttgatgtatacaatgtggctcgagtggcgaagtagacaccacaccttagtcttcaagaccaagtcttcatcactcttattctcacctacttcaatgtttcattactaattttgctttatatttatatatgtgtaatgggaaagttcctaggtcaagttttttttttttttttttctaattttaaaatatttcacttttagttggagtatcatatattaattacttttgccgcttttgacaaaactatagccatctttgacattatactataaattatttgttcttacgtcaattaatcaaatattttccaacaaacactggtcttcattatatttaaaaatatacataacctgaccagaattgcgttttaacaacggattttttttatggctctaagataaaataaaaagtcgttgcatagctagtcgttattatttcgtatttagaattgatatgtttagccacgtgaaggagaggaactaaaaacaaatataatattaacataaatatgttcattatattagagaatttctcttcaatatcaaaaatgtaactggactacaatttggaacttacaagttagtcgacgagataaatctgaaacgatagataaagctcaccggcaagcaaacatg

SEQ ID NO: 34777 - DNA, 3003 bp, Unknown; identical to SEQ ID NO: 34776
  misc_feature (1)..( 3003): 2750-1469P.txt file - cDNA_ID_3082042; gDNA_ID_2926228; Annot_ID_203587

SEQ ID NO: 34778 - DNA, 3000 bp, Unknown; identical to SEQ ID NO: 669
  misc_feature (1)..( 3000): 2750-1469P.txt file - cDNA_ID_3082046; gDNA_ID_1620305; Annot_ID_152788

SEQ ID NO: 34779 - DNA, 3000 bp, Unknown; identical to SEQ ID NO: 669
  misc_feature (1)..( 3000): 2750-1469P.txt file - cDNA_ID_3082046; gDNA_ID_2926228; Annot_ID_142593

SEQ ID NO: 34780 - DNA, 3000 bp, Unknown; identical to SEQ ID NO: 669
  misc_feature (1)..( 3000): 2750-1469P.txt file - cDNA_ID_3082046; gDNA_ID_2926228; Annot_ID_203586

SEQ ID NO: 34781 - DNA, 3000 bp, Unknown
  misc_feature (1)..( 3000): 2750-1469P.txt file - cDNA_ID_3082054; gDNA_ID_2926228; Annot_ID_142590
cccattcttccaagtatgagacagcgcaaagttcctttccaagacaatctccgtagacagctgaggaaacttctcatgagatagcgttccaatgagaagcttatccgatccaacagtcacgtaaagctggattggttcggttacattgttcttactctctcccaaagcaaccttcaacaaaaataaaccaaacgtcactgtaaaatacattcttataaatcaaattaagcttgcaaattcaaaagtacctgagagatgtgcacgagcctgtctagcccaggatctaggtgaagtggtttgccattcttaacttcaacacctgcaaacgcatagaaagcatacaaatcagtaattctgcaacaaaatccccaaatgaaacctctatcggagttaaaacctagcgagagagaaaacttttcagttttccccaattttctacgaagacgaacagtccataccctagattgtcacatatactcactattcccgtttctcgtttagctaaacagaagattccatagaaaaaacagtagaaaaacatggcaaaacgaaaaaaagcgatgaaaccagaagctaaaaaaaaactaaatgcaggaaatgaagcgcagagaacgaagaagaagaaggagtaagataggagatgttttttaccccagaactccattgttgtgcgaggtagtgtgatcttgaaggcgacgatgcgtcgaaggagaaggagaaggttctagaagaagctgagagcgattcgtctctcgagagcggttttagggcgtgttgatgtgagaaggctaaaatgtccgctggaatttattaatcggaggaagggattttagggatcctctgttacgcggtccactcgaatatctcctttagttgggccatgattttaaaattagcccaacaaaactaacgtttcaagcccatactttattttgacggctttttttaacggtgtcaggacggatcgtaacggacttttaacactttatttgactgacggagttttcgtcaacatgtggggtctatatattcatgtcttcatgacaatatctatctccattcctcaaaataagtcccacggataaattgagcataatgtatcgcaaagttttaatttttttctaatccaaagaaaaaccagttaacaaaatctgtgaagagtttatatgataaaactaagtacggtccccgactacgaataattaaaattattaaatggatagttgcacgagtgagaattaaggaacactattattatattaaacacaattcattttagttagatctattcggggcctctcgtgtttagatttagaagagttctcggcatgaatcatgaacattttccaatgctcttaaatttatagtttaccaatattatactccggttttacatatcacacataatttcgatttttttcaacatatgtgatcataatcaattgttaagttttaatttatgcgcataaaaaaatatatgtttgtatagtagttaaggagaatttttttttgttatgttttagcactttttggattaatactagttttaaaagtatgattttttttttatttttttttgtgcacaaatatgatcaaacccaaaagtttctttacatagtagcaactttatattctcagcagccatggctaaaaaacgtaagttaatgacaaaaatgcgttgagtgcaatgaacctggcagtattcgatgaaccttagcggatcaaatgatataaatatgcaatagaatttaaatatttatttattgtccaagctgcgtggatagcttgatagataaattaatgacagcacattgactacccaagctgcgttgataagtacttgatcaaaatctttacatttttatgaagtactataatccaaagttaacttttaagcaaaagataattttttgtaatggttgtgaaaaattcacttataataacacgaaacataatgaagtattattagttcatttatatataatacacaaaaaacataaaggcaataaaaataaccaaattaaaaaaaaatggagaagtagaaaagaaaacgaaaaaaaaaaaaaaagagagagataagatgcatgcatggtatagaagtcgcaggccgaagaccagaaatacgaatgtgtttgaatagacaaattaaggaatataaagacagaagagcccatccattttcgcatacacgaatacatccccctcgactccaattattttattatagtccattctctcactttctattctaaatattgtggacgttataaaggctttttatttattttatgtcgagttttttagactacgtagagccgaatgaaaatttcatgtttaggtatacgaaacttggatccaatgttacggattcagattggtgtaaaagatcaaatttgatagtatttggatttgataggcaagatggtttagtattttacactgtgtatgttcctcttttagctttgcgttttctactttcactacgatactactttttatcttccaatttcagttgcttatcaccaaaatatgaaataccaaattaattgtttaaacagttttattagcgattaaattagcacaaaacatatgaatagatatcatagtcgaatacaaaaattagacaaataataatacactaaaaaacaaactaaattggagaattgttttgacaaaaaataaaaaaaatgtcaaagttccataaaaaggaggacaaaagaggaatataacgaaattatcaacagaaacgcaccgagtaagtttatttcctatgataacgcaaaaacaaaaaaaaaatccaattccattagagagagagagagagagagagagagagagagacttttttaaaaagtacaaaaaaaaaatgaaaaactagagagagaaacaagtggctagctagctcgccaaacttcttcaacaatggcggtttcctagggtttgatgtttatatgatcgggaaactctctcatctagatcgcgataactctcttttccatg

SEQ ID NO: 34782 - DNA, 3000 bp, Unknown; identical to SEQ ID NO: 34781
  misc_feature (1)..( 3000): 2750-1469P.txt file - cDNA_ID_3082054; gDNA_ID_2926228; Annot_ID_203583

SEQ ID NO: 34783 - DNA, 3003 bp, Unknown
  misc_feature (1)..( 3003): 2750-1469P.txt file - cDNA_ID_3082081; gDNA_ID_2926228; Annot_ID_142582
cctctaaagattcacttgtagaaccacatgagatctgtgctaaagatgaattggcttctgatttctccagctcaagctatgagagctcgcatgagatcagtgctagtgcagagaccaaacttgataagataagaagctctctggatttgatgaattcagagacctctcacgtttctttaacatctgcattccgtaataagaacatcaaagatgtttctgaatacggcaacaatgagatcatggaggaagattctctatctggcaaagaagttgatcagaaagattctgtctttatgtcggaacagagcgtggagattggttctttcagtgagaaatctgttgtgatgaatccagatagtcctccaaacaaactcagtttaggcggagcagccattgaagatgtcaacgaaaactcagaaatcataaacaaaggcgacggatacaacagttcaaccacgagtatcagcgaggaagaagtacaacaacagagtaataatataatgacaaggtctagctttggaaacagacctcatatgtctaaggatgtgagatgggaagctattcagcatataagggcacaacacgggcttggttcattgggtcttaggcatttcaatcttctgaagaagctcggctgcggagatattggaacggtttatctcgctgagctcacgggaacaaactgtttgtttgctataaaagtgatggataatgaattcttggagagaaggaacaagatgtctagggctcaaactgagaaagatattctcaaaatgcttgatcacccgtttcttccaacgttatacgctcacttcacttcggataacttatcttgtttggtcatggaatgttgtccgggaggtgatttacatgtcttaaggcagaagcagcccggaaggtggtttcccgagccagcagctaggtaccttggttcttacgattagtggttaacttttttatgctttatgatttgtgatgttgtagttactaattgtttttgtcttataggttctatgtcgcggaggtgcttcttgcattggagtatttgcatatgctcggggtaatataccgagatttgaagcccgagaacattttggtacgtgatgatggacatatcatggtgacagattttgatctctctttgaggtgtaccgtgagcccaacgcttctaaactcatcatctccactccatgcggatgcaatgagactctcttcgggtagccgcactggatctaactgcatcgagccatcgtgtttccgccctaaactctcccgcggatcagggcccaagaaaaaaggcaaacaacaccgcatgatgatgaaaaaactcaagaaatctgacctaatcgcgcggttcaaatcattgccacagctcgtggcagaaccaacagatgcgagatcaaactcttttgttggaacacacgagtatctcgcgcccgagatcattaaaggagaaggtcacggtgctgcggttgactggtggacatttgggatctttctatatgagcttctttacgggaaaactccattcaaaggagctactaatgaggagactatagctaatgtggtgcttcagagcttgaagtttcctgataaccctaatgtgagtttccaagctaaggatcttataagaggtttgttggtcaaggaacctgagaaccggttagggacagagaaaggagcagcggagataaaacggcatgcgttcttcgaaggcttgaactgggcgttgatccggtgtgcgatcccgcctgagcttccggatttctatgactatggagttcctaatcaagaagggaaaagcaattacttagattgcaaggcagttggggaacatcttgagtttgagttattctagaggaagatgaagaagcttacgtattattacagcctttcatagaactcttgcttgtatcctaagttacagagtcactttttggtttattattatttgtttcatttttttaaagaagtattgttattttattttactttttgtcaactattgttatttggttttaaatatatataattttttccaaatagaaaattacctgacataaatagatattgtggatactttttttttttttttttgatattgtggatattgattgatataaattttgttttttgaaaatgttgtgatccatgtaatgtatagtctcttaaacttgaaaatctgctcagtgctgctcatatatatcttgaaattagagttcataacaaaacttttgccaagaattgttcttcctccaagcgtaatatataattatcaccgaagcatccactttcaatgtacgattaagagataaacaagagatactttgtcaattggttattggttaaaaaaaaaaagtaacgtacgtacgttaaagatctgtttatgtttttgtaacgcttagttgttgccatgtaagttgctgaggatatctcaaaacggtgaaatccaaacaaaaaacataaaaaaaaattcctttcattagattgttatcctacgttaacaatccaagccaactctgaattattttttatattcttaaacagaaaaatcaaaaatggaaataccatagaagagcaaatagacattacaaaaataaatcgtactgttgaatgtacataaaaaatttcttacgcgtaatgctatgatagcttggcgatggtctcgtgacgcaagatttttggtcatataaattttggaccgttaattttaaaaaccatataataaattaataatcatagaagaagaaaaagttaaaatggacgatgggaattgcaactcgggtggaccccactcagacactgatctttaagcaatcgcttcgtttcgatttcgcaatcacaaaagtagcaaaaatcgaaaataaaaaaaacttagtagcgaacgaacgaacccgcccactcatttagtttccagatttttcttccggatctctctgctctccgaatctcccgagttttttttttttaatttttgtttctcaccggcggcgagaggatatg

SEQ ID NO: 34784 - DNA, 3003 bp, Unknown; identical to SEQ ID NO: 34783
  misc_feature (1)..( 3003): 2750-1469P.txt file - cDNA_ID_3082081; gDNA_ID_2926228; Annot_ID_203573

SEQ ID NO: 34785 - DNA, 3000 bp, Unknown; identical to SEQ ID NO: 28864
  misc_feature (1)..( 3000): 2750-1469P.txt file - cDNA_ID_3082089; gDNA_ID_2926228; Annot_ID_203571

SEQ ID NO: 34786 - DNA, 3003 bp, Unknown
  misc_feature (1)..( 3003): 2750-1469P.txt file - cDNA_ID_3082093; gDNA_ID_2926228; Annot_ID_142579
tagctttcatcataacaatttctttgaacacaattttttaaccatttttttttaattatgtaggagaaatcaatggagtggagggttcaaatcaaaatcatcacttgtatccatttaggccaacgaagctctttgtgttcggagattcttatgccgataccggaaacattaaaaaggctttctctagctcttggaaattcccttacggtatcactttccccggaaaacccgctggccgtttctccgatggccgtgtggcaacagattttctaggtatctcttcatcttcgaaagtaaaaaaacttatcatccttaaaacttatattgtatcaatcttgtttttataaatatctcgattcctaatcaaatttgttgataaatttttaaaaggcgtaatcaattttaccaactaaagtctgtaacagtccaattacttgactgacttttagttttaggcttttagcctttgagatagattatgtggaaatgggtgtaaaataaatgaatgatttggttagtgttaggtacctaactaatcgatgttttagcctcgttaaaaattagtataaccgtatctcttaataataggacagtattattattatatacgtatattttacatatatgtagagatgtgaaaaatgatgagacgtaaattgtactaatatttaaataaggttcagaaagcaatgatggaagagtggtctagtgtcaatccagtgcgcgactcacttttgcttttctttcttctcgccatcttcttattattgtactttgcttttataaaagtgaaattttttactttagtttctgtttattaatcttaaaaactatttatattctcctttttattatcctataaacctttttcttgtaacaaaatttttatatgataaccattttgtttgtgtctcgatgagcatattatggagaaaattaggaatcatttcagtttctacttgttgtgttagacagttggtttggttggtaagggaaattagttcgattatttcaccacttgtcagtgttgcgtcaaatccttcttgtcctctatatgtccaattgaccagtgtcctttttcttacgttgtcatcatttagatgttctataatgatacaatacgttttttttttgtttttgaattttaacacgttaataaggtcacacataatatgacaaataacatgtaatttacctcgaatgctataacatgtagtcatgtaccaatataattaatttatatattttggattcattgtattcgtttgctggtctctttttttctttctaaaggtaattttattattatttctgtttaatactctcatcatagcgccactaccactaagcatcaacaaagcaacatacttcagtcttttctttttcatctttttattattattatataaaaagactataaagctacacaccaacatatgcactgtcaaagtacatacattatagtttaataaacattaatctcagaaaaagtcttatgtcaatagcctttctatgtaaatttctaaggattgatgaaattgtattaaatttacattttgtcaacgatgaaatgcattaattctcaaatatatcctttttatgtgtgtttgtagctaaatttgtggggataaaatcaccaatcccatacttttggaaagattacgcgggaaagaaacgattacagtacggaatgaattttgcgtacggaggaacaggagtgttcaacactcaaactccattgcctaacatgacaactcaaatcgacatcttccagaacattctcaccaccggcgacatctactatcctcccgagcttacttcatccgtggctctcgtcagtgtcgctggcaacgactactccaatttcatcgccctaaaccgccctgcctctgtaagatacgaaaccctattttttatttcttagatagtgatgttaaaatgtatagtgattcatttcttaccttcattgcgtcttacaggaattcccagcattcataaagcaagttgtggatcaaacagaggtgaatttgagacggatccacgctttgggagtgaaaaagattgcagtaccatccctgcaaccgcttggttgtctccctcccttcacattcgtaacctcgttccagcgttgcaacgagacacaaaacgctttagttaacctccacaacaacttattgcagcaagttgtggcaaagctcaataacgagactaaacagtcgactttcatcatccttgatctctacaatgctttcttgactgtgttcaagaacaaaggatctaatccaggtaaaagaaaaaaatggcttgattttatcgcatttttgcctcctttttttgcttatgctgattggttttttgggaaatgcagggagtacaaggtttgagagtccattaaagccgtgttgcgtaggtgtgagccgcgagtataactgtggaagtgtggatgagaagggagtgaagaagtatattgtatgtgataatcctaaaactgctttcttttgggatggacttcaccctacagaagaaggatggagatcggtttactctgttttacgcgaaagtcttaccgcgtctttgattaaagcgtgagaaacaaaagaaacacacattttgcttaggttttttcttatgaagctcaatgtttgagcgctctgttcctgttttcagtatctcttcattcatttgtgtttgtgtgtttaaagattgtgtgactaataaaatctcttaactggttcatttctattactcattaaaaccctatttagtttcaaaaaaataattaactaaagctaaatataaataaatcaagtaactaatgaaccggaaaattaggttgaacatgatcctaataacaagccaaaggactctcagacttctaactaatacttagccttacgaaacagttagaaagatagtggttatttaagtattgtccactttgtttattaacactagagtgtagattttcttctcagacaagcaaatctcaaaatccaaaatatg

SEQ ID NO: 34787 - DNA, 3003 bp, Unknown; identical to SEQ ID NO: 34786
  misc_feature (1)..( 3003): 2750-1469P.txt file - cDNA_ID_3082093; gDNA_ID_2926228; Annot_ID_203570

SEQ ID NO: 34788 - DNA, 3003 bp, Unknown; identical to SEQ ID NO: 28863
  misc_feature (1)..( 3003): 2750-1469P.txt file - cDNA_ID_3082097; gDNA_ID_2926228; Annot_ID_203569

SEQ ID NO: 34789 - DNA, 3000 bp, Unknown
  misc_feature (1)..( 3000): 2750-1469P.txt file - cDNA_ID_3082122; gDNA_ID_2926229; Annot_ID_142615
acacgacacatattattcatagaatctatacaacggtattataaatttataactcagtgtactcaaaatttaaaaggaacatggacgaaacatattttctttgtaattgacatgaaagagcgtaaaaacggtggataaataacaggaaaagtgtcatctagagtattttcttaaaattggctagatgaccaaaattttattaattagttttacgaattcatgactctcttctcttggttattttaggttgagcaggtgattcaataatttattacttctttccatgcaaatccaaaggagtgatgaggaattaatggtggcttacatgtgttttttatttgttcacgtgattagccacgatttttttttcttttttctttcttttttctttctaagtatgttgcgtccactctatgatctcaggtttgaataaaatataaagttctaatgaactggccaattaagttatatcatttatacatggaatatttatagtttccattggtaatttttttgttttagtggagtgctaattttaaaatattaaacaaacgataatctggaaacatacaagcaagtcggtgatctcatttctatggttttttccccccaccaaatccacaatttgatatctagctagtctcttaaaatagtattgtaatgccattaggccacatataaaaaaacgtaaccaaacgcagcaacaactgtgtaaaacattttttttaaaaaaaattaacaaagaaattttagactttgttatataacttttttttgttgccaacctttgttatataacttttacattggtcttaatattcaaaactaaacccaaaaacaaactaaaatcaaaatctgttcgacctggcctctgcatgcggcgccatagatacatttatgatttatcatgacaaaaaaagtactgttttttttcactaaatttaatcatatttagttactagtcagtagtcaccaacgaagtccctgcgaagacatcataaaaagaagtcaccaacgaaaagctaaggttgggaaaaaacgacagaaagtagattcgttaaatatggtggaaaaaatagattttgtaaagaagttttatagttcgatttcaatttggatccgacttctgtgggagtcactctcacattgtcagtgaattattataccatgcttacatattatgcgattgaggtcccaaaacaaacatataacgcgaatctgaatttataaaagtatatcctattacatagtgtattgttgctttcgtactttatgccttcattttataaataaatgcgaattgagatgcaaacaagaacatatcgccaaatcatgttaaagaaaaaacatctcgccaatctctaatttattcacaataagattaacggtctataaccacaccattttttaaaaactgactactaaaccacccacattttcatttttttgtataactatacaaactatcatttaaacagttttagttaaataaaagttaactcaattttgagttgatggatattatactccctaagtttcacaaagaatgtaattttcacattttatatttgtttcacaaaaaatgttgttttatatttccaacgcaaaatataattgtgaataaaaaatctattttgactctatttttttaatatattaacaagaaagatcatttttttagtgtattaataaggagtattgtagaatttttactagttttcatttatgtataaaagtgtagaatgacattattgtgaaaactactaaaagttctactaccttgaggagaaaaaaaaaggagtatgaactacctctcataaaatatgaattatcttgtgaacaaagctaattacttaacatatatatatatatatatatattctacaatatatatattattacaatatatatattattacaaaaaaggagtatgaactacctctcataaaattctacaatactcaaggtacatatatatatatatatatatatatatatattcaaatgcaaaataaagcatttaattagtaactaatgcaaatcatttatttattattatttttgtcggacagatatgcaaatcatttatttatatgtacatttttggtaattttataatttattttctcatgtgttataacatttactgtgaaaatttgaccggcggctaaaagacggaacaaaggaaaatgagtcatctctatattttttgcatctcataactagctagttgaacgtaaaagtcttctaattttgtttttgacgtaaaagtgttttaagtacatggacaaccactagataatcacacattcacgcttctactaaaatattaatctattggttaaaaaaaaagatataacaatcaattttttttttgataaaatgtgatacgaatacattattatttatttgtcattgactcatcatgtgttgttgtaacttgtaagagacttgtgctctttgagagtagaagacactgtttatttgtcttttctttttgttttgattgcgagactagacgagtgtcagagtgataagtgaaagtaactgaaatctatagaataatggaactattattagggtaaagagataaatcctccaaaaattatagaaaacatcaaatcaactaataaaataattctgttaagaaaatccaaataaaataatatttccccaatatacataattttgttttgagtcccgttctacagtatccaaatcaataaatttttaaccataaaaaagcagagaagtttgagagtacttcttcgattttcttacgtatttttcattttcagagactaaccaaattcttctttttcttcttcttcttctctctcgattcgacctttcgtttcccgctcttagatatttttcccccatcttccttcttgttttgcatgcccagaaaaattagacgagaaaataggataagtcagtacaaaaatattccctgaaaatttgttttttttttctcagaaatcagaaagaaaaaaaatg

SEQ ID NO: 34790 - DNA, 3000 bp, Unknown; identical to SEQ ID NO: 34789
  misc_feature (1)..( 3000): 2750-1469P.txt file - cDNA_ID_3082122; gDNA_ID_2926229; Annot_ID_203616

SEQ ID NO: 34791 - DNA, 3003 bp, Unknown
  misc_feature (1)..( 3003): 2750-1469P.txt file - cDNA_ID_3082134; gDNA_ID_2926229; Annot_ID_142612
tgcggagaactacaggttgtattcgagaagtcactttgtgaagggactagagctgcttttattgctagttgtttatcaaatctatgggcattcataccggagttcaaacctttatctgtatatcacagtctcgatgtggtttatggttggttcttggttgtttgcaccatttatattcaatccttcggggtttgagtggcaaaagacagttgacgattggactgattggaaacgatggcttggagatcggggtggtataggcatcccggttgaaaaaagctgggaatcgtggtggaacgtagagcaagaacacctcaaacatacaagtattagagggaggattctggaaatcacacttgctctccgctttttcatttatcagtacggaattgtttaccagctcaatatctctcagcgcagcaagagctttttggtataaaaaaatgttccttcacttttcatgcatcaaagagctttttatgatcctttagtctcagtctcttttttacttcctctttgtaggtttatggactctcttgggtggtcttgctcacatcattacttgttctaaaggtttcacaatccttcatcctttatacacacatacatatagtcataaacaatgcttatataagcttaattacttactttgagtgtaaactgtgtcagatggtatctatgggcagacgaagatttggaacagattttcagctaatgttcaggattcttaaagcacttctcttcctcggctttttgtcagtcatgacaatattatttgtggtgttcaaactcacactcaccgatctctctgcttcagttcttgcttttcttccaaccgggtgggcgattcttctggtaaatagccatcaaaacccccttcagaatcatagtatcggaatttgcatcatgttcttagaaaaaactaatggaaatttctctcagattgggcaagtactgaggtcaccgatcaaagctttaggggtttgggactcggtgaaagagctaggaagagcgtatgagaatatcatgggacttgtaatctttgcaccaatcgctgttctgtcttggtttcccattgtctccgagtttcaagctcgtctgcttttcaatcaagcttttagcagaggccttcaaatctctatgattctcgctggtcggaaagacaaagcaacttcttcgcacaagtaaaaccataaatactcagtgttgtttccgggtttcttctgtcttaagcaacaaacctgcttctttagaacggtgtcgttttagcgtagttcaatagatgtctataaggttatagggatattttagtttggttggacttggacacctcacactctcatcacactcatgtgttgtagttatcacaatgattttgacatatggtctttaataatatagctcaattgatttcttttggtttctgattaaaattattatttgcgggaaaactcgatgaagaaaaatattgacttgatactaaaattcttgaatgcacatcatggaaagaaactccatgattcttttctacttgtttttttttggatgattataatattaatacaacttctagtcattgctagatacaccaattacatgtccgaggcattatatgatgaaacttcaatttcattattctttggcattttcttgcatgtgacaaatattgtattgtatcaaagagatacaaacaaaataataatgtggtgttccttagagtttatcttcattcttttactggagtcttaagtatagaaaatcaaacttaaatccaaaaaatatctttgatcataatataaaaatgatcaaataagtttcaatcttgaagtcaaacacaagaaagtcatgctacttcagcatataagaagaagataaggaggacctaaatttccaaaggctgcatctgagaattacctcttttgtaatttcgttaatcctttatccactttttcttctctatttttatttatttcttaccttatagtatataaaaaataattgtaatattgttgtatttaatcatgatccagctataaatgacacagttgtcaaagttcaccatctttgctttcccttcactgctctctctctttctctctctttgttgattttgttttcctcaaattgcaaatcaaagctttctttccagctttagaacacactctcaccaacaatctcacccaactttttttccttcttttaactcctcactaattcctaatcccacaaaccctaaactctatctctttaatcccttccttacatacattattcagtagttgagtaaagtttcaatctttcttctgattccttgttggaattacctaaattttctgggtttattttggtgggctcgtcgagagatacttcaattgcaattcatcgttaagcatatctatgctaattgcgttctcttctttatttcactttctctttggtttgcttcaatatcaaagcaaagagggaccttttcgctttgcgttcttctcttctaatcgaaaagacaagagcttagtcaccacattctaaggtaatttcatggaactaaaaaaaactgcttttttgtttttcaaggattctactttcggtagcagtttatgattcttctgtgtaatgtatatcttgcttcaatcgtaagtgattcttttccaatagtttaagagctgggtttcctcaggttttttgttttagtgacaaatgttggaaagttaatgcacgtaacttgtttgttgaaatgccgcaattaattgctgaatttgcgcgtgcctttttgaatcctgtttctctatgtgtcagcatttttggtcgaagtggtttttcaaacttctgagtcggcagctttacttaccagttttagagattctaccatttgtccaacaatccctgttttgcttgtaagatttgtgaaagtcagagatgtcttagtcttcttgttaataattgatacgtttcttgtttactaggtgggaattgtgaagttgtgagcaaaaggaaccaaaaatg

SEQ ID NO: 34792 - DNA, 3003 bp, Unknown; identical to SEQ ID NO: 34791
  misc_feature (1)..( 3003): 2750-1469P.txt file - cDNA_ID_3082134; gDNA_ID_2926229; Annot_ID_203613

SEQ ID NO: 34793 - DNA, 3003 bp, Unknown; identical to SEQ ID NO: 28873
  misc_feature (1)..( 3003): 2750-1469P.txt file - cDNA_ID_3082142; gDNA_ID_2926229; Annot_ID_203611

SEQ ID NO: 34794 - DNA, 3003 bp, Unknown
  misc_feature (1)..( 3003): 2750-1469P.txt file - cDNA_ID_3082146; gDNA_ID_2926229; Annot_ID_203610
cgatgggcatgagaatcccccagctcaatgcattcactattgcatggatttgttttaccaacaacatgtttctgttaactgattttgtggttgtgacttgtccggaaagcaaatccaaagaagccatggatttgagattatcaccactcattgcgtgcattccaagtctatctccttccttcaacggaccgtcttgccataagtgattaacgacggttgtgttaggaggcaagactaaagttgcaaatatcatcatctctccattagaatactcagcggatacttgtgttacacgaaggctaagaggagactcttgaagcataggagagtagctattaatggaggaagtataagcacgcatgacaccagaagttgagtttcgataagccacgagtgcttgagctcccaccatgcctttgcttgtcgggtttatagcccacgatatccaactagaagactcaagattggagtgatggtatgcaatttcaagaactccggtttcttgagcataattaaagtgtagataagagtttaacaccaaaagatccgtgcaagagcgaaagctttttccgttgttgaagctgtaagattcacatctagatctagcatgaagtccttgttctgttgctgctgtcgtaaaagatggaatcaacatgaacagacaacacaaaacgactaacgtggctctcgaagacaaggacatgataataattatgattgtggcttttctcggagaacactagggtttacgattttggaagaagagatttatgatttctggtgctagaagctgagtagtttcgcatatttatagcgagttatattcacttcctaagacttaggactgtatttccataatttgatattgtttacttttttttgacccttaagtatatcaacaacaaaaaaaaaaatgtgtacatatatctatattaatccaaaaaataatcttttcacatctttactatatctaatacgatctctttcaaatttggaaaaaccttttctttatgactttattgctttttaaaaaaaacttttaagttttgttagtagcaaaattttaaggaaattatcaattacattattcggaatgctagctatttgtatttcttttctaaaacatgtgattaaaatatgtataaaagaaaccgacactctaaatttttaaatttaaatttccataagataatcattaaaaataaaataaaaaatacaacattaatctcttcaaatcaaattacttattcaagttaatctatgaaaatatttatagtttctaaaaattatctaggttacgtgaatgtattatggattatttgaagtgcattaagcgtaggaaagcgatgatgcataatagtgtcgcaatgtataatacataggttagttgatgtaaaatctaatcattttactatttgtttgtttacttggaatagtgtcgcaatggaaaagtataaaccttatcttcccggtcaacttctaacgttatacgttttcgggtgacaaaaaaagccttaaggttttccgggatgttgattagttagatggttataattcagattaaggtttagattttttaaaaaacgttaatttggttggtcatggtcaaacagcttaagagaaaacgtaaggacttgtcccttaccgtcatttatacaaaactcttcttattttaaaattgttctcaaattgaatagtatggttataaccggtcaactttaacgactctgcctttagtaattagttaataatacacactaaggtgttatttattgggtccattttcattatgcgttctttgaatcttatagtaatgtattgtgacgatgtttattttattctagcatgcgtcatttaaaggtgatcgaaagttgtattggttaaagactttttttcaaagatctcattcttggtttggcggtcaaactactatagttttctctcttttattttgtgcaaatatttttctcatatttcttcatcaatactcaatagattaaagcctagataccaccacttaagtgtttgtgtcttagtatccaaatcaaattctgtttttgttaagcagtttaattgatgatgatgaattgtagttgttatattttttttcttttccaatcactttactacgagtgaattttgtttgtcttttagagattaaatgttgacaaagaaagatcaaaacgtttatcgcaaaatgatcacgtttgcttacaatcgcgccaaacagaaaaattcaccaaccacattttgtatctatgtaatctcattgaccgtagcatttatgcctcgataattcaaagttacataatattctcaaaaatataatttcatgaacttgaatattatgaaaaaatttaaaatctacatttcaaatagaagaccataaaagttcaaatatgcattagagagatcttttttcttttatagtttctctgccactactaaattttcaattgatctaagatataaaactatatcgtaattgacttaagtattaactttttaaacatttatgttgttagtgtaattcaacctaattttcatttaaaaagtacttggcagctaactataactgtttatgttcttcttgttctcttaatccctttaaaatatgatgaagaaatcaagttttaggacagaagaaacggtaaaagaaacgaagtagatatgaaaccgcgtgaagaagaagatgactttagtcaacaaatatcagctatttttttatttctctctttttcagtaatctgacttcaccaagatctctactctgttctttcctcttcttcttcttcttcttcttcttccctctctctaagctttcttaattctcctctattccttcagaaatcaaaatcttaacagtcgaaactaattaaatctttccgaagtaaagacaacttctgcttctgattctgtcacttttagttaacttttctttcccggcgactcaaagcttaattgtcgccggcgattttttgttctcaagcattgatcctaatg

SEQ ID NO: 34795 - DNA, 3000 bp, Unknown
  misc_feature (1)..( 3000): 2750-1469P.txt file - cDNA_ID_3082158; gDNA_ID_2926229; Annot_ID_142605
tggatcttttgtcatcgatgccaactaagcaatatcgttttgtgacaggttgcatggtgtctgtaaagagaatcctttggctgcagtaattggtagattaggattacctctttatcgtactagcggtgacaattcggttttgtatgatcacgatcttgagaggtgtgtacaaccgttgtggatattctaaatgtgtatattaagtaatcttctctctttgttggaaactcatggcgcaattatgttttctgcagttatgctctgttcgacaaggctggtaaccaagtttctcaagagttggtgacaaaagttggcgaaaattttgagcacattctggaagaggtgtgtacttggtgtccactttctcttttattatgttttatggatgttgcgcctctttgatttactaaacagttgtttcacaaatgcagatctgtaaagtcagggatgagcaggacgaagacatgtcaatagctcaagccttttctattgtatttaagaggaaccctgaattgaggtatggaaacatattgtctcaactcattccgttgatttgttacttatccgcttttatatttgttgcatgcttaattagattttcacttataggttggagggacttgcccataatgtgcttcagtggtacttgtgccgcatggaaggatggtttgctgctgatgctgaaaccatctcggcaaagtgttgggatcaggttagtaacttaacttctatgtctgtcctcggtttagtggttgaggtatgtccccgtttagtgatttgttaattgaaacattcacaggaagaactgttgcccggtggacatggtcttatggttagagggtatcgccctgtaatcaacactctctcgaaaggtcttgatatacgactaagtcacaggtacgattcatttgtcgaaggagtttccaccatttaacgagtctgcagctaaaaccttattggacttttgttttgtcagaattaccaagatttcaaggcgctacagtggtgtgaaggtgactacagagaaaggagacacgtttgttgcggatgctgcagtcattgctcttcctctaggagtcttaaagtcaggaatgataacattcgaaccaaagcttccacagtggaaacaagaagctatcaacgatctcggtgttggaatcgagaacaagatcatattgaattttgacaacgtcttttggccaaacgtagagtttttaggagtcgttgcagaaacttcctacggatgcagttatttcttgaacctgcataaagccacaagccatcctgtccttgtttacatgccggctggtcagctcgctagagacatcgagaaaaagtccgatgaagcagctgcaaattttgccttttcgcaactacagaaaattcttccagatgcctcttcaccggtactgctccaaactaccttttctttcacctgagttgctatattgttttgccaatgtacaagctctaatggggttttctgttggcagataaattatttggtatcaaggtggggatcagacatcaattcattgggatcatatagctatgacattgtgaacaaacctcacgacctctatgagagactgagagtgccattggataatctattctttgcgggggaagccactagctcaagctacccgggatcagtgcacggtgcttattcaaccggagtgctggcagctgaagactgcaggatgcgtgtgcttgagcgctatggagagctcgaacatgagatggaagaggaagctcctgcttctgtccctcttctgatctcccgtatgtaatttaaacctcaggtgttttatatcacctccatatgggaacattgttagatttgattttatgagatttcactagttggaactcttgtgcctattcaataccactcttttttccttcaaatctgattcagatctttagtcgaagtcaaatgtgcaatgtggagtatgtaatccatctgatataagaactatgtttaagtatcagtgccaaatgcaaacttcaaatgaagctttcttttacacagcatggtcaaagcctatcctttctttggtatcatatccttaaaggaccaatataaatcaaagacaaaagatcatctttctttctgactttacaaatcgatgcaatcattagttcattaccttacacaattcgagactacacgagtcttctttcttcttcacatcagctaaatattgaagcaaatcagcaattgctcttaaacatgtcgtatggccgtgtaaatagcaggtgctcagaggggcatcattgtcaattttccatgaaaccccgcctctaattactgaattaaattttgagttaaaaaagggtttataatgctattgaagacttgaagtagtattaagaaaaaataaaaaattatccactttgaagttttaacttttaaaggataagagaagagtagctttcttcttcttcctctcggctactgcgacagagaagaagctgcgaactttaaatgtcacaggctgtaattttcaagccgtttgtttcagttccatcaagtaatcacaggtttccttttctccttcctttctactttttacttcttaacctttttggaacagctttcattttggactttgcttttgttcttgagttttctttcgttttcaattgacgggttcgataattctatggaaaagggaccgcctttcaaaatttctacaaaaatccgtgttgggtttcgtctaattcaattgattgtgtaagctttttagcagctgtgtccaaatgggtttatcatctgaggcttagctactgctagggtttatgttcttttcgtttaggctattaaaagttttggtttttcatttacaaattcgtccatgtgttttgctttgtgtcagccagaggaaactacagaacaatattatcaatgttggtgttaaaatccaaaaccgattcagagttgtttgtatgggaatgttggctccaaggaaattcctgcaaaagaggaggaaaatg

SEQ ID NO: 34796 - DNA, 3000 bp, Unknown; identical to SEQ ID NO: 28872
  misc_feature (1)..( 3000): 2750-1469P.txt file - cDNA_ID_3082158; gDNA_ID_2926229; Annot_ID_203607

SEQ ID NO: 34797 - DNA, 3000 bp, Unknown; identical to SEQ ID NO: 28869
  misc_feature (1)..( 3000): 2750-1469P.txt file - cDNA_ID_3082162; gDNA_ID_2926229; Annot_ID_203605

SEQ ID NO: 34798 - DNA, 3000 bp, Unknown
  misc_feature (1)..( 3000): 2750-1469P.txt file - cDNA_ID_3082167; gDNA_ID_2926229; Annot_ID_142602
tctataaatatgaacggaatatgttttctttattctcccatgagagttaaaagaagattctatcttctagcattttggtactactacaaatttaaggattataattgatactatagaggtcacctaaaagcaaaacccacccactttgttccgtccattctgcagtacttcaaaattatttattttcctacgaagtattggaattgtttttttttgtttttatcaatttataatatttcatcccctcatgcatgacttaacctacgttattctccctatataaaataaagatatagtagcctttatattgtatcggactacgggggaccaacatttactattatcaaaccataatcttgttcgaatctctacttgtttattgataacatatatcgttgcatgataggattatttactaagcatatgatctaaccctaaaactgtgccttaccatcgaaatgtgcaattccttttggcccacatattcttaaacatatttatggctcatttcttcagctcactttttcattttatttgttatttttgatttttttggacattaacctaatatcattgtaaagtttcatcttacacaatttccatgcgatataagttcaaatattatataaagatactaacagctggctcatatagagtcgagatatcataatgtgatctcttcactctccaacttccattaacatcagattaatggagtaacacaaattttctacgtagatatttctgtagacattaatactgttaaatggacaaaatccgtaaacacatttaatatgaattgaggtttttgacacgaaaaactctaatcatggtagtattatactaaaagtaatacaaattctaatacactaaatgagaatcgacaagttctctttgaataattgaaatttagttgcggcttaaatttgttcccggcgggtccaagtcgttgagtagcatgcagtgacgacgacgagtgacgtgtgtcgcggccattaaatcttataagagctagggtctccgagaaaaagatatctatctcattaattacaaatttacatatccatgtgcgttaggtggaatcatttatccatgcagatatcatgcgctattaattcgtcttaaatttctcaataatactttggtacgtaactaaaaactatctctcgcatccgcatatcgtttaattggtttggaatacttaactttagatcaacaaaaatgtttacaaccttaactacgcattagctgataattagctcaataaaaagagaaccctaaatgtgaattttttttccacggaaatatatatgaaacttcttttggaattgaaactctgattcaaatatcgatataacgttctaaacagttcaagtttgtagatatatcatggtcaatcatgttttgttgatatagtttttgaaaatcctcaccaaggacctaccaaggaccaagtaccaagttctgcttaactttttgtaatcaaatcgaccataaatcagacaatcctataagatttaaaccactaattacagaaaaaagtttttctgaaaaaagttaacacatcatatacatccgcagaatcgtaaagagacgaaaaataggtgctagcatgcacatcaaatactaattactaatttgctacagtctggcaacatctaaagcccaactaaaggtttctgcttttgtctaagggtttgcattaaaatcattacatacatagaacaattaatatcggggtccatttatataatcatttaattaagaaacacttattcaaaagttgttataacatttacatctcatgcaacatttcttcttaacttttaaataaaaacaaaattttctttttgtcgtcgaatcattataaatttatagtttttagaaacaataaaaattcgtaaattgtaatcgaaaaacataaagagataatgtatcactgtaaaccaataaaatgttgagaaacaaaaacaaatcaacctttcaaaaagccatcaattattaccggacaggaagagatggtggctgtcttatatccaaaaaggttcaaaattggattattcttcaataggtttatatataataatttccttattcgttttcctatataattggttgaagcttaagagtcatgaagtaataacaagaaataaaaatggagaagaaaatagtcaaatcatacacctacaagattctattctgcgtagaagtaaaatcgtgaaagaattaattacaaccacggatgtattaagtatgaaactttatttattttggaaccgtcaatctatttgaaaacggaaacacattgatgttgacaaagtatgattgaaaaaaatttagatcagtttttttttttaccatcgaagtaactcacacattattgtcactaatacaaccaattgtttacaaaactcgatcaaatgtaatattctttatatataagaaaatttatttagtttatattgactgattcactaaaacttaaaaccacaagtaagttaaacgctatgttgatatgtcaacagtttcaacatgacaacattacagtaaaactatagttttcaataaaactatatctctttataaatatatagttttcaatcaaaaataagattttaagaaaacggtaagaaatatgctaatcaattcaaataaacttatcatttgagttttcttagaaatgtaataatattgatctaaagatatatgacctttttttcttaagagtatttccactcgtaatttttctaacccgatgtatcataacgggcaataatacattaataaaaagtctcttcccaaccttgtccttcggaactcgaatttatgaatttggtccacctcctcttcaaaaggttcttcgtacacctagttctagtttagttttttttcttaataacctagtagtagtttattacgaaactatatatagattagcaatcacataacacttcttctctactacacacgaatcatcaaagttgcacatatatcacaatg

SEQ ID NO: 34799 - DNA, 3000 bp, Unknown; identical to SEQ ID NO: 34798
  misc_feature (1)..( 3000): 2750-1469P.txt file - cDNA_ID_3082167; gDNA_ID_2926229; Annot_ID_203603

SEQ ID NO: 34800 - DNA, 3000 bp, Unknown; identical to SEQ ID NO: 28868
  misc_feature (1)..( 3000): 2750-1469P.txt file - cDNA_ID_3082177; gDNA_ID_2926229; Annot_ID_203600

SEQ ID NO: 34801 - DNA, 3000 bp, Unknown
  misc_feature (1)..( 3000): 2750-1469P.txt file - cDNA_ID_3082181; gDNA_ID_2926229; Annot_ID_142598
cgatttaagcactcccaactccttgagttgtttaatttgatttgagtggttgattcttaagataggcccaaatagagaagcccagtggtaaatatgtgggcctaactcgtttcatcatactttggtagcccaaggtcaggcgttcctgatttagtttaccgaattaaaccagtcgtatctaaaccggataaaatagaaccaatcactcacactagattcgacattttgatacccccacttaaagtttaaactctcgctctccgtgtcttttctctggagattttgggattaagcgtcgtttgtaacgaggtaaatggtcaagtgtactcatttcttctgcttctactgatgaatttcttctcttttggggggttttgctaaatttctatttgcaatttcgtctcctcctgtttttgcgatactgtagtttaaatctcgtgtacagaaggtggatcttgtcagcaatctacctgaagaggttcggtgccatatcttgtccttccttcccaccaagcacgctgctttgacttcggttctctcaaagagctggctcaatctgtggaaactagtccctaatcttgacatcgatgactctgaatttcttcttccagaagagggtaaaggggaaagggatgaaattcgtcagagctttgtggatttcgtggacagagttttggctttgcagggcgtgtctcccattaagaaatccctgagatattcctcagtaggacactagttgagctgaaaataagaagtgaacgttatgttgattggtggcgtagagatagaggcactgtcttaccaatgcttaagactcttgacattgactcagaatctattcattgtggtacgattgatatgtttctaccttctttccctgtgcttgagtatttacgaatggctaatatggagtggacagagtcggatgaaaccgtgtcaagtgcaaccatcaagctgctaagtattcatggcaccggttgtcaaggcttttgaaatccaaagagcatttcttttgatactccaagtctgctttcctttaactactctgatttagttgccgaggactatccattagttaacatgaaggcattatttgaggctcgaatcaactttatagttactgaaaaacaaatcaagcgagtaagagcaccaaatgaagattggttacaagatgatgaagttgatgttgttctccgattcagcaatgtggtgaagctcatgaatggcatacaaaatgttcagaaactttacttaactgctgatactatcgaggtcagttttctatttttcttctcttttgtctagttgtgaagcattaattgcaaaatgtctagttttcttgttttcaggtgctttctctgtgctgtgaatcggtgccgctgttcaacaacctcaaaacattaggtatcacgagtgaggagggacgaggatggcaagcgatgccagttcttgtaagtaaatgtccatatgtagaatttctactcgttgaggtccagttataaaccatgaaactacttggaaaacatgtgttaaagatgttgttcttactcaacaatcttattgtctcctttatgctttcagggtctcttacactatatgacggataaatgtggggatgcttgtgattgcatttctcgggaagacaaaggtcgttcgcttacatcttgtccagtgaagaagttagagattcgagggtttagaggaacaatgaaagagatgacaatgataaagcatttcttggtctactttccgtgtctgaaggagatgaacatctatgttgaggagtatgatcctacagagctcagattccctcaagtgtctaaagttatcatacagatgatggaagagtacaacaagttatcgagttgcaatgttcagctccttataactgattatttgtctgaaaagtggactgcagcaggaagaattctctgagaaaacaaaacttgctcaaagttttgccaaagtccccttggaatttgtcttcggttattctagtttcttttcaaaccaaaccaaattaatcccaaaaccttagtttcctcttctcttatgtttaactgaatcactctacgttttgtttccaaccaaaatctcttgtttttatgcattgtttcctgtcatttactatggttaaagctcaatataataagttcaatttgcaaaagataactttttcagaaacctaacattagtatatccattgttaccctttaagagcagtttaagatctatgacactgtttgtgactgagtgcttgtccggatatgtgggaagatgattatgatgaggaggaggataagtatgaaacctgtttgtgagtgcttgtccggatattttcctaatgtcgtgtcctgtgaaaatgctagagatcaccgattaccggggaactaaaggagatcaaaacagattcattagattgaccttgagcttgtcaaagttcgtccttatgcaacagagcccatagaaaagcattgtcttagaaacaatctactaaagcttcccagatcactcaattgcaagaccccagtttcagtttgttactacttgctctatttgttaatttaaactgttttatgtacagtgttgcttgtaggttcaactctcaaactcccaaactctcaaatgaattgttttgattttattcttcatcagaaattgcccttgagttcttctcttgttaattatgtttgaataacgataactgggcttatctagttgggcctatagtctttcacgatgcatacgcagcccagagaattgaactcgataaaatagattatacatgttctgtgtgatcgttgggtccgaaccaaaccgattctggccaggaaattaaaaccaaaaccaaaccgcttcagaaaccaaacgataccgtttcaatacatcgatatcgactatagcaatttcgccgtaagaaagttttagttacaaaatcgaaccctattctttttttttccgtcaatcgaaccctattcctcactgaccctgacgtttatg

SEQ ID NO: 34802 - DNA, 3000 bp, Unknown; identical to SEQ ID NO: 34801
  misc_feature (1)..( 3000): 2750-1469P.txt file - cDNA_ID_3082181; gDNA_ID_2926229; Annot_ID_203599

SEQ ID NO: 34803 - DNA, 3000 bp, Unknown
  misc_feature (1)..( 3000): 2750-1469P.txt file - cDNA_ID_3082209; gDNA_ID_2926230; Annot_ID_142643
tcttatcaatgaaattaaaatcatggttttagaggacctcatccatttttgtgtatccaggtggtagtctgggatcactttcttcaatcattatactgagaagcttgtccagatccatgccagtgccttcactgacccatccccattcctttgccaattccagcatttccgtaacataggatgcatcatgaagcggtccgagccacattggtcctgacacaaccagtgaagaagaagcctttgtatcactgcagggacatcccatcaaaccaagttcatcgaatctcaatgtatgagaatggccacatagattacagtgcgtgacaaaaccatagttcctacagttaaaagacacaaaacaactccaattagaaacgcaacataaccaaaactcaattcctttcgagtcaaattctaaatgtagaaacaacctgtcctcatgtagcttcccacggtgaaccctcagcatgactctaaacacaggtccgtgataagaatagtacgagaaaagaggcgtaacatgataaccaagcagagcagcttctctcactgctccacctataagcatccgcagcccaatctcattcccaaacggcattggtcgaataaatgctccataagctgctaaagaactacaccaaaacaaaccaagaaatttttcaactttcaatctcctagtccctaaatcatatcatgattcctaaaataccacaaagactaatggtattgctttcactcacttataaggtctgtgaccaccagaagagtaaccatcagtcgacgtcaagtaaagcaaaccacccaatctcaatgcattaaacgcatctctcaaaaacgaagaatcacttccaaacgaatcaatatcaatcatatcgaagaaatccgcaaccatatatctctcaatcatcgctttattagccaacatatgagtcacaacccatctcctctcatctccagtacctctctctactttactcaaattatccgtaatcactctccgattatcatcatttgcgtcgttcgccatcacgaaatcagcttcagcttccacaagataacgaagcgacctaattccacatccgcacattgcgtcgagtacccgtaagcttccattagatctcttgtatagcgtcgctgacaaaacaccgaggtctcgtcctctagcgctttcatggcggaaaaatgtctctcccgtttcaaattcgagattcctctcaatttgaacctcggatttcactaaaattcgatcaaaactacatttcaagctcttgaatcgacatgaatctggagatttacatttagggttttgcgatttgtgcacagtgaagaaggaagaagaagatagggttttaggagagagagtcaacaacatagcgggaaaaaaaaaatctgattgttttgcttgatttttttttttaatcgtctatctaaattagtccgtccgatattatgccacgtgtacggaagagataaaaacctcgtattagtaggccacgtcgtcaatcttatgattagttgggtcccacttgtgtaatcgtctatactcgagtccacctaaagatacgatacacttttttccctttcatggaattgagtttctactgtttctggaattctgggttttggaatttggagaaattagggtttttgttgaatcattcaaaaacattgaccatgaagatcatagagactaagagtctccaacaagaatgaagaaaatctattttttttcttgggttgaaaattatttgagaggagcaggtgaagttaatttttttctcattgatacaaaaatggcagattgttttagagtctccactattatgaaccttccataattttttattttatttttgcttatattatcccttaattttttgtcttggtgataattctctttctcccctcaattaaaaaaaagtttatagtatcggtttctcttctcctgatcaatgaatacaaatcggtattcgtaaacaatcccttccgtttcattttactgactcatatctgtttttatctgggtttttatttcttttcccctttgtgtttcaaaaaagtttttggtgtaacgtttattatccataagatccaaaaaaaactaaagctggaaattttgtttcgaggtgagataatctttgcttaatctttaggaatccaatgaatacaagcttaatttgcctcttaatcctcgttatcggagaaagcaaaatgatgtttcgtgtgaatctcgttttttgatttttggggttttctcttttgtcttaatccatcttcgtggtccttgtgaagcttaaagatgaaaaccaaaatgtcatattttttttcgtgtgaaaatgtcgattcgttacaaatcttaaaccctgttccaagttttgattttttttgtttgtttgttagcaggaattaaagcttcttgaatattcaaagattagcccaaagaatctctggacaactggtctaaaaccgcaggtacgcctttcactacttaaacctctcaattttgtcaacaaaaaaaaatgattttggaagagacagagctgagacttctgagctaatagtcattttttcctaaggtataatcatcactcacgcaggatagtttagctgttttgttttgttttcctttataaatattcgattttgctctgagaagctaaacattagggtacctacctaacactgaattcactattggcatgctctgtttcatttttttatgtctcttgcttaggatgtaatctcactcactctctggattagcctcgattgttcttaatcaaatttgggagctctagttattagacaatcaacttttaccttgacttcatttttttctttttctctgtctaatgtgatgacaaaaaggccaatttgaaatattttgtaattctgtttgttctgttgtttgtagatatcataattatataaggggctcattgagttgttgaggattcctgtgttatcactctgatgttagtttgaagttatgcgcacatg

SEQ ID NO: 34804 - DNA, 3000 bp, Unknown; identical to SEQ ID NO: 34803
  misc_feature (1)..( 3000): 2750-1469P.txt file - cDNA_ID_3082209; gDNA_ID_2926230; Annot_ID_203652

SEQ ID NO: 34805 - DNA, 3003 bp, Unknown
  misc_feature (1)..( 3003): 2750-1469P.txt file - cDNA_ID_3082224; gDNA_ID_2926230; Annot_ID_142636
ccaagttcttcaggccggctcatcttacaattttctcttgaaaatggttcattctgtttttgcctattttcagacagatgtctgaatggattgagttttataataagtcaaagttaagactctcgcagtatttaattaactagtaaaacacttaaaacttcttataaaagaaagtcggaccaacatgggtccaacatcttgttatcaatagttgaaaaaggtatacatacataaagatattaggtatttagaggaagcatttcttacaacaacacacaaaagcaaaagataaagaagcattgtaaaggtagattagccttccttttcatcgttagtatacttaaacttgtgatggcttagtctcggcttctgcggcttttggttcaacatcagcttttgcatcaaccttagcctcagtcttagtctcagcctcggttttagtctcagtcacggtttcgaccttaggatcagcctcggcttttggctcagcttcagcctccactggccagtaagaagtcttctttccggtctttgaaactgtttggaaaactgcttcaggctcaacattacctttcactgtcaccttttgctccttgatatcaatgtcaaatgactcaacccctgagattatataataaattatagagtcaataaattataaggcttaaaataaagggaaacaatgattagtagaaagtatttgaaagacatgaaaaaaagattagagagaaataccttccattttgcctaaaactctattgacggcaccaacgcagccttggcatgacataccaactttgaggacaacggtctgcattaattagacaatttaatccgaaaatgtaagaaccatatccatatacataggaccaattcggtccaaatatatcaacagctaattttatcacaattattaactgttatcttttgtgctctagcttaataatatttaccttttttgatgaatatttcaaagtggtgctaatcggacattatagtacttacagatagaacctagacctagaccaatcaatctcttttcttccctcttgaaatttgatattaattcattccaaaatatttattatcataaaaactgattaatcggactctcataaccgatatatatagacaattgctagcatcttttttggagatggacacaaaaagacattcctgcttccagatcaatgtctctcaaaaacattattccatcgtttcatggccaagaaatggagaaaaaaagaagaagaatatcaaagtcacaaaattacctgagccatggctagaataagaagaaaggaaacgattaagctttgagcctttgagatcgatggaccgaatcagagaatgagatgcttgtttgttgaatgagaagaaatggtgtcttctgaatatttatagtaacgcaaaagcaaagattcggagaagttagcgtaaaggaaacgagaacattatgaattagtgcatttaccatatttccaataataaagtataaaggtttaggaaggttagttatacctgatgtggaaaaaagcttaccaactttaaaatccactaacagaaagtacaagtacaaagaattctatgaggtctccttgtactacacatgttttgttgcagtaccaattacctaatttttatatatatggggtcaatcaaagtttacttttattagatagtagtatttgactatgaacttagagaaaactatttttatcctaatattttattttcaagctttctaaagaatatcatgaacaataaaacacaaatattatatgtcaatctataaaaatatcatattatacatgtggagtttgaatggtaagccgaactaactcattttatctttaggtgactaggtagtggggtgtattgatacataaataatgttgtccttttcacggattgttttgccaaaaactaaattttttgaatgatggacaaaagtttcacaatttgcggttttacattgttatcattcaaaattgcgaatatcttatctatcactattcatattgaattttataattctaaacagtaagtagctgaattttcagaatcggtcatgagaccaatatattctttgatattttgttgtttaaaaagtggctaaaaatcgatgtgtaccgttttttggaatcctactcgagtgagcataggaatgagagactcaagtataatatggtttcttatatggattcccaaacttttttttgtagttaacattatcaatatttccattgtggctttcctatgcgacgtccatcaaagaaacacatcagcatatatctatcaataatgcgtgtagttttgaaatatggcactcattctctgtccctctcaccgaacctattcgaggaactcgtgtaatgacgatcgcaatttacgtgtttcaacacaactctaaagatctcatcacataactcgaaatgcaagaatctttatattccaatcgttattgaaattacgtatatatcatacaatgctgaatcatactttgtctacttggtggttacaaagatttcagcctcacatcacaatcacctaaagttgcaattcctttattaattggtcaacaactcgcaagtctttgatacataatgctctaatactttgctcccacttctaaaaaacagttcccctctatacaatatatttaatattatccttacaaaaagaaaagcaataattttgttgatcccctacacctcatcaagttctaaaaaggtagtagaatagattatgatatgggcccagtgctgtcaaaacaaaatcatgggcccagttgataaaataaaaaatatgggcccaacgatactttcccaatttgggcttctcttaaatcctcaattattatcgtctcaagctctctcgagccttcttcagaactcttcttcttttcgtgcttttcacattcccgccaacagagagtagaaatcttctcccacaaaacctcagatgaatcatcccaagattccgacgccgggtaaacaaatg

SEQ ID NO: 34806 - DNA, 3003 bp, Unknown; identical to SEQ ID NO: 34805
  misc_feature (1)..( 3003): 2750-1469P.txt file - cDNA_ID_3082224; gDNA_ID_2926230; Annot_ID_203644

SEQ ID NO: 34807 - DNA, 3000 bp, Unknown
  misc_feature (1)..( 3000): 2750-1469P.txt file - cDNA_ID_3082231; gDNA_ID_2926230; Annot_ID_203640
gttcgagcaagacgctgaaggaggcttgtgtagggttcgtggtgcggaacatggacgacgtcgttttctcggataagtacgaacctttctctcagaaaaaccaacatctatgtgtggagatcacaagggcgttcttgatggaaacgagaagcaagagacgtgactaattaaattagtgagattatcaatgaatgtttcttctatagctgttacttgattgatctttaatcttccaagctagaccttttctttgtttgataaaaggaaaatatgttttacgcatggcccatattccggcccactaacagtaacatatataaagcccatcaaaccaacgattgggacatattaagtattaaccgttcataacctagcgaagggtttaagtggcaaaagattatcgttcccttgggcggttttaaaatcgaatcgacagaaaagggaacagagttgaagaagcgaaatggatagagaggatcttctttgcttttgagctggtcaaattcactagagaataggaatagtgtccttttgaatctccaatatgatcaagctatacacgttttcgcatattagtgatgaattaactaacttgctgctaaagaaattaattgacagatttgataatcagagagacatacaattgatttattttccttgatcatatgtctatctaaagatctctttttaggtaaaacaaatgtaaattatatatatagaaaatctaatgaatacttgatcatatatgtctagcctttttgaatcatgcatggctatcactccaggtccttattgcttctgccactgcctgtttcactgcttcagcatctatgcagtctccatcatcattctgtatttaattatttaagtaaaagtaaataaattttcaatataccattagtgattataatgatcatgattaatggactctatataaagtgatggtaaggaagaactgtgtttacatttgatgaaccaatggcatgcaagctaaatgtgtcagtacatgaaaccctagcttcaacaacatcaagtccaagatcttcaaaggtttcaagaacacaaaccaacatgcctgcctcattcttccttgacattacctttatcatgaaccccttctctagggtttccactgtaacctaccaatacaaatcaaaatcccaaagttaatcaatgcttcttagtagaaatgcatcaatgggtaatttatttgtttgtaccataggatttggatcggaagattcacggaaagattgctcagacgtggtcgcattgttgattttttctaccttctgcttaagctttttgatatattttgatgcatccactatgatagatgtttcgctctcctgcaaaacgtgcgcgcagcaaacatattagtgatttagtttaatttaaatactcaaactacaagtttagtcccttttcgcgatcatacttcggcccttataatatgtattttattgtagtatatgttcattatgtctaggagcggatcatcaagtaattgtccgagaagtaaaactatatagacaaaaataaaaactaaaatagcaaccacacatatatagatagtttctaagtttcatatagtttttgacgttttctcattcaaaatttctctctctcttttctcaatgaagaaggcactttaagaaaggaaaaaggctctatcatcgattagtcaaaatttcgaatttattaatgatcagccgccaaaccagagtttcattcatgtatatgaaaataaaattaaagctacgtagatatgtaatttgtacgaagtaaattagtttgatctctctaattaatgtatgtaaagagatatataaatcaagtaatgataaatcggcatgccaaagtatatatatgtgaaaaaagtttatatatatatgtgaatacgaatgttcatatatcaattgaaatcacatatatatagagagatagtaaatatataagtagtagctagactgattttgatttagtatcatagatcaaaataagaaacaaagtaagaaaagagaatggtgtggaataaaattacagcatgagaatcagtgattgaacgaagcaaatgaaacttctcacgcagagaggaacctctcttgtgttctctcgaaaccattcttatatgttttagcttcttcttctcctactttttggttctcttctatatatatagagaatgtgtatatgtgtgtgagagagaaagaggaagtagagatctgagattctttaaagtttataggatcctctcgatcgtctctcacatgtctaccttgtagtctctctttatttctacaaaatgtgatatacggacaaattcgattggtatctcgtgaattacttgattacctctatgcctaattacacgatgttccatattctttgtttttttttaatatatatttacgtgagaacacttacaaacgtaaaaacgtaaagaaattactaaatcgattttttcttctatatacattagcttgttgctatattaatatttaataagttaagcaatgtaaatataatatttgtatgttttgcattactccaacacatcaagaattttgtacccatagttttaccagactattcacaagtgtcgaagattagtgtggacttcggctcaacttaatatttccggttaaatgatggtacatccatcaattttaaggtacaaattacgatccatttgtgaacgtaaatattcaagtgtattatcaggttatgcccttttcaatcttggtgagctgatttgtatgcttataatctacatttattgtgccgtaattggacatgaccaactctcttcgaaggcgtatatgtctgcgtatgagtgattcttgagtatatataatgtttaaactatgaaatgtttatctacattattaaaataggagcatcgaaagaagttgacgaagaggataaaagcaaacagaagaatgttcgttgtgatattggaatgcctccaaacacacctcacggggatctttatgcatg

SEQ ID NO: 34808 - DNA, 3000 bp, Unknown
  misc_feature (1)..( 3000): 2750-1469P.txt file - cDNA_ID_3082235; gDNA_ID_2926230; Annot_ID_142630
tgagaagttcaggagaggaaagaccagcatgaggtgaagcacgtagctgagtctgacaatgtcgttgagaagagaaccaatggaagaaccagagctctggtcaaagttcactagaatatccgacatagttgcatctccaaagagaaggtaaccaaagagtccagttgcgaagtagatagcagcacacaagatgacagagatcttagttgctgggatcacttgtaatggatctttgagctcgaatccaattggatgaactgcacattttgaatcacaacaccaaactcagaaacatgaaaaaacagagaaaacagagaaacagttaccaatatggtgaaagagatgggttcttaccattgaagtgaaacgtgaaggctgtaactataacaggggaagctgtgaagagttgccagaacgatcctccattgctcaactccggaaacagtcttggattcttcgtttgtccattcaccagcgcggaaatcgccagcaccgagcttatgacaacaaatagaaccgcaagaagaaacgatacagcggaactaattgccagtctttctacataaccattaacaaaaagaaaatcatcaacaatctcatagatatccataattttgagaacacaagattatagagagaaacttaccgactcgtctacgcaggaccaatggaagcaagacaaagccgtagacaaataacaaagcgaagattctcgtgttccaccagtaagaaccaaaccattcttgcaaaactccaatatgttcaggaccaccattttcattaccagaaagcacatctcctgagagagtaaacacatacaaatccaaactcagccaatctgttcttaagctcaaatagtagctgagacctctacacttagatgattagatcaaattactttacctataataatcgaaaatataatcatacaaccaaaagtagcaaccatcgtagcaatctgtacagcgatggatcctgttttaccaaacgactctttcataactccggcgtaagtagttgattctccggcgagagttgatttcatcagaaatccaacggaaattgtggaaagccaagctatgatcgtgataatcaaaaacgctggaactattccaagaactttaaacgccgccggcatcgacattattccggctccgattatactcgttgacacgttgaaaacgatgccggaggttgatgatccatggttctcagacgaagaaggttcttgcttcggcaagagatgagttttgatctgtggtgtcatttttctaaccgccggagaaacgtaagaatttgccggcgggaagaagctttccttttttgtagttgttatgaggaatcggcttcatatagccacacggttaatagcgaaaagtacataaataccctttgaagattggggatatatgccttgaccgtttggggcaaaatcgagaaaatgatatttgaccataggtaaacctgacaggctgggcaaatcatgtcagtgagatcaccaaatgatctttcgtcacgtacttaaaaacatcacgaaaataataattttgttcaagagaggaaattacagctaaaatatgatgaacaatcataatcatattatagacagaagtgaattattaacaaaaaaaccccaaagaattatacaaaaaaatccaaaataaaatgggtccgtccaacactaatgaatgtgtgcacttggatttcttcacgaagaatgtatctagacgaaaaagtggccaaatgtgtatcatcgcttctcatctcatataagttgtccaaaaaagaaaaaaactcctaaataatttaaaattttcgtggatataataaaatccaatatataatcatatcattggcggcctcaaagatggctcacgtgtaataaactaactttagagcagacggttcgagacttttcatcaagaaaacgagagggcagcgaatgcggaatgtcgaatgaataattgaaaacgtgataaacgaaacaatataagaataattaaacactgtcttctaaagttatttttatttaatcatttcatatgaatcatattgaagttactcagttaacattatagaatgtgactgatagcaacattaatattgccgcagaaatccctcgttgcaaagttacagtttattttagatcatctctgtgtgtaaaggagaagcttcagtcaacaacaacagagcttgggtcaaactctctgctcagctcagagtctcccaaacagaatgctatgggccaagacactaagcccaataccattcaacatgtcgagaagcccaacaacagaagattacctctgcaactcacaaaagacaaaaaaattaccgattacccatgaaatgatttgctaaaaaattgaacatttcatagatttgtaacggttgttatttagccattgttgttattcatgtgtttgatattaaaaccgatattgttgttactcatgtgtttgatattaaaacatactaggtttttaccagtttgtgcattttggaacataggtttgtttagtggaaactgtcagcaatatttgtcgtgatttgagaactataataatggctaatgaagaatgtagaaggacgagcagatataacaggaaatcgttttacttgataattcatgtaagcttttcttcaatcccaactgataaacctgatcccatattttctaagcttggttaaagcgacccaataacaaagtacggaaaaacttttgattgggctaacttgggcttttcaaaacaaagcccatattttaaatagacaaatttggcccactttagtcggttgaaaaatcttttcccctatcgaagcgtgtctctgatttttcgctctcgatcgattctcgtctctctctctttcatcgcagcgaataatccaaatcgaaagcaatttctctcgacgaagaaaagagaagcaatcggagtctgtggaggtaaagaagtacacgatcaaatttcaagtcagagtttcggggaaaaaaaaggaatg

SEQ ID NO: 34809 - DNA, 3000 bp, Unknown
  misc_feature (1)..( 3000): 2750-1469P.txt file - cDNA_ID_3082235; gDNA_ID_2926230; Annot_ID_203637
caacgactagtttgctgcgaggctgtataaatttgtcgagatagcaataatgctagtggcaacagcaagaacaagcattattgcagctacgatcttctctcttgaggttgatacaccatggatattcctgccatttcagaatcagaaagcagttggtaagatttttataggaagtttgaagcaactgataaagtacatagtaaaggaaacaaagcatatctaccttagaacaatggcggctggaaatatgaatgctatggagactgtgatggttgatcccatgaactgaaagaagtaccaaatgtctggtacagcgattgcagacaagaaacagcaaatcagtagagccagagtgagtccgatgaatctttttgtgtctttttccaaggacggcttcttggggtacaagagttcgtcgagatttgctctcaatgagaagttcaggagaggaaagaccagcatgaggtgaagcacgtagctgagtctgacaatgtcgttgagaagagaaccaatggaagaaccagagctctggtcaaagttcactagaatatccgacatagttgcatctccaaagagaaggtaaccaaagagtccagttgcgaagtagatagcagcacacaagatgacagagatcttagttgctgggatcacttgtaatggatctttgagctcgaatccaattggatgaactgcacattttgaatcacaacaccaaactcagaaacatgaaaaaacagagaaaacagagaaacagttaccaatatggtgaaagagatgggttcttaccattgaagtgaaacgtgaaggctgtaactataacaggggaagctgtgaagagttgccagaacgatcctccattgctcaactccggaaacagtcttggattcttcgtttgtccattcaccagcgcggaaatcgccagcaccgagcttatgacaacaaatagaaccgcaagaagaaacgatacagcggaactaattgccagtctttctacataaccattaacaaaaagaaaatcatcaacaatctcatagatatccataattttgagaacacaagattatagagagaaacttaccgactcgtctacgcaggaccaatggaagcaagacaaagccgtagacaaataacaaagcgaagattctcgtgttccaccagtaagaaccaaaccattcttgcaaaactccaatatgttcaggaccaccattttcattaccagaaagcacatctcctgagagagtaaacacatacaaatccaaactcagccaatctgttcttaagctcaaatagtagctgagacctctacacttagatgattagatcaaattactttacctataataatcgaaaatataatcatacaaccaaaagtagcaaccatcgtagcaatctgtacagcgatggatcctgttttaccaaacgactctttcataactccggcgtaagtagttgattctccggcgagagttgatttcatcagaaatccaacggaaattgtggaaagccaagctatgatcgtgataatcaaaaacgctggaactattccaagaactttaaacgccgccggcatcgacattattccggctccgattatactcgttgacacgttgaaaacgatgccggaggttgatgatccatggttctcagacgaagaaggttcttgcttcggcaagagatgagttttgatctgtggtgtcatttttctaaccgccggagaaacgtaagaatttgccggcgggaagaagctttccttttttgtagttgttatgaggaatcggcttcatatagccacacggttaatagcgaaaagtacataaataccctttgaagattggggatatatgccttgaccgtttggggcaaaatcgagaaaatgatatttgaccataggtaaacctgacaggctgggcaaatcatgtcagtgagatcaccaaatgatctttcgtcacgtacttaaaaacatcacgaaaataataattttgttcaagagaggaaattacagctaaaatatgatgaacaatcataatcatattatagacagaagtgaattattaacaaaaaaaccccaaagaattatacaaaaaaatccaaaataaaatgggtccgtccaacactaatgaatgtgtgcacttggatttcttcacgaagaatgtatctagacgaaaaagtggccaaatgtgtatcatcgcttctcatctcatataagttgtccaaaaaagaaaaaaactcctaaataatttaaaattttcgtggatataataaaatccaatatataatcatatcattggcggcctcaaagatggctcacgtgtaataaactaactttagagcagacggttcgagacttttcatcaagaaaacgagagggcagcgaatgcggaatgtcgaatgaataattgaaaacgtgataaacgaaacaatataagaataattaaacactgtcttctaaagttatttttatttaatcatttcatatgaatcatattgaagttactcagttaacattatagaatgtgactgatagcaacattaatattgccgcagaaatccctcgttgcaaagttacagtttattttagatcatctctgtgtgtaaaggagaagcttcagtcaacaacaacagagcttgggtcaaactctctgctcagctcagagtctcccaaacagaatgctatgggccaagacactaagcccaataccattcaacatgtcgagaagcccaacaacagaagattacctctgcaactcacaaaagacaaaaaaattaccgattacccatgaaatgatttgctaaaaaattgaacatttcatagatttgtaacggttgttatttagccattgttgttattcatgtgtttgatattaaaaccgatattgttgttactcatgtgtttgatattaaaacatactaggtttttaccagtttgtgcattttggaacataggtttgtttagtggaaactgtcagcaatatttgtcgtgatttgagaactataataatg

SEQ ID NO: 34810 - DNA, 3003 bp, Unknown; identical to SEQ ID NO: 28879
  misc_feature (1)..( 3003): 2750-1469P.txt file - cDNA_ID_3082242; gDNA_ID_2926230; Annot_ID_203635

SEQ ID NO: 34811 - DNA, 3000 bp, Unknown
  misc_feature (1)..( 3000): 2750-1469P.txt file - cDNA_ID_3082248; gDNA_ID_2926230; Annot_ID_142626
atattgccaattcagcttgctggtggtaatgctgctcttgctcttgctgtgacagtggcatctaacttattaggaattttaactgtaagccgaacgacttgcatattattgttcctcctttgaaactagttgatcatgcagaatcaggggtatttttagtaagattgtttcctggtctatatttccgaattgcttagcaatttgttctcaaaacaactcatgatcttgtatctatgactatgagtaggattcaaacttcaaagtcttctattaagaatgagtattgcgtcttctgacactgaagttaacgtggtttgacctctaatcagattccattttgggtatcaagatacatagctgggggagtaggggtttcgtttcctactgaccaactattcagaagtcttatagttactctgttaattcctttaatcattggcaaggtgagacaatctttctgtttgtcctgttcttgcaatgatgaatcaatataaattctgatatacggtacaattgtgaaagctaaatttgcagaggtggttgttgccaaaagatatgtgaatactttattggaaattataatagggttgttgcgtggctcatttgaaaatgaagaaagcttactctctattatttgttactttccctgatgtttatatgaacctttcacaaacagtcatttcagcatgaagttctatcacttgccattttgcacacgtttttaaaatcgagctttgacatacttggtttcttctgttataggttattcgagaatcattcaaaggtgagcgccatttgttatattttacttctctggtgaaagtaattgaatacataccattttaaatagttagcagtcactttatcgtgacaatggatcaaaatggttctgtttataataaatatatatgcttatcgctgcctactttctgaccttgttgaaactcttgttgaaatgtgtgatacaggtttcgcaaactttgttgacaataaccgtaaactcttttcgaaaatcaacgcaatctgcctcagtttggtaagatatgaaatgttagtctcccgtaatttctacaccccttgaataactttctgaagtcatatccttggagttttgctttgttgcaggaatcttaaacttggcattttagatgcctgtacttaaaactttctcttttcttgtatgatagcttgggatttcaacattccgtggcattgatgtgccaatccaaagcttttactaaattgcaaaaaccatatttgcagtcacggttatgactttggagatagaaggacttaatacttttttcctttttatagtttaacctctgcttccctggctacttcaactggtctgactttgttattgcatttacctggttattttgggaacttaatagtgtttattccatgattaatattctaggtgccatggatccaagtgagcaggtcaagatcactgctactatccgttcaacctaaggttttccttgcagcagttggcattggaatgtacgcattcttcttttaacatatagaaaagataccaagtgaagaagctcatggaaatatttggcttgtgtgttagaaatgcggattacgtttgacagaagattcttacgtcttcttacagattgctgcatctttctctactagcattcaatgctgtttcaatccgcatcctctccggtcttacaggtggtagcaagagctccaaggaaaacagcactgcagttttgctcgtttcaagccaggtaataatagagtttgccttttagaaccgattttgatctcttaaatttgggagttcttttcttgtggtggcatagaaaacattaccggtaatggtggcggtagtagagcaattaggaggtgcatttggtgagacagggctattggttcttccttgtgtagctgcacacctgaaccaggttacaaattgtattataatcatcatgtacttgtgtgcataattttataaattattgacgtaaatctggaatgttacagatcatgattgattcagttcttgtcaacttatggctccggagaggaaaagatacttcgactaaagtaaagacagcttgagagagagagagagagatagaaagcaatgaaaccaatgctgtggagaaggttacatcctaaacacactgaatgtcagttatatacatagcagcaagactggggattttgatatctttccaatcaccaaagcttagttgatcattgaccatctctctctctctctctctttctgtatgtatatgctctagagattccggtcggtgtttgctgatccaatttgtatgatttatgaaactatgtaaaaaaaaaacttgtatctatatttgaaaacatttagtcatttgacgttaccagcgtacaaagcaattcatatgtaatctgtctgataagcagctaggaaagaggactaagaaccggttcttttctcaatttaattgaactaaccatcactacaatttcatttagtcctggttcgaccaattcggtttgtaaataaaataaaaaccgatcgagagcgttttaattgtcctcggttttcagtttcggtatggaaatagaatcaaatcgaatccggtttagtgagtaaatcacgaaaccctaattctatatattttttcatctcgaccaaaatgcttggacggctacacaccatttttgtttagattcgtaatcctcctcaagcatctccttcgcaaatctccatctccatctccatcttctgaattcaggtaattttgttcctcatcatctagcgtaacaaattttcgattctagtttggtgtagattgattcgaatcgattctaattctttgttgatacgagtctgtatctgtgacacgattgtttcgttcagattatgttcttcgaatggattggtttgttttacttataatttcgttcctctgattcactattcagatttgttacttttggtgtatcaggttcttgttgcttacgcttccagctaaaaagatg

SEQ ID NO: 34812 - DNA, 3000 bp, Unknown; identical to SEQ ID NO: 34811
  misc_feature (1)..( 3000): 2750-1469P.txt file - cDNA_ID_3082248; gDNA_ID_2926230; Annot_ID_203633

SEQ ID NO: 34813 - DNA, 3003 bp, Unknown
  misc_feature (1)..( 3003): 2750-1469P.txt file - cDNA_ID_3082252; gDNA_ID_2926230; Annot_ID_142625
tttctttttgcttttggtattgtttgtttgattccatggcacatagagtcagctactgcataagttgatagaaaatggggacacttaaatttgcttaatagtatttaacagaagctgaagacttttgataaaattaattgatgaaagcatataagagagataagaatatgcctttgttaataatactacattttcagaactaaattacgcctttttgttagtataccggcgcatgttagcaaaggaaagtgacggaccgtagtgtagtagtagatgcggcggacggagttaccaaagaagaaggccgctcaaaataattaaatttgttcaaccgtcatcttcttcaactgatcttagctcaactaacacactctttcttcttggcgtcaattcaatcaaccaaaacctttttctcctatctagctcacgctttcttcttcttccaatggcgtcttctgcagctctcggatctctccatcgtgagtctcttgctctctcactctctgcgttttacttattctgttgatttcatgaggataggaaaactagaaatggaggaccatgagtaaaatttcggaaatgaaaggcatagattggagctatccgttagtgacgttgttgcttcttagagtgtaatttagcgacttaattaagtttcaatctcggatcttgtgtgtctaatttgtatcaagagatgtttcagctagaaaaagtgaattttatttgttccattttacagagactttagggtcagccattaattcacagagtgaggttcactcgctttctggaaactggtctgcctctggtaattcatgtgtgccacggtggagattatccaacaggaacagcaactacaggctcgtgttacgtgctaaggccgctaaatcttcgacaacaaccataagtgatggtgagtttatcttccacaattcttcttcatgttcattttgctggttaatgcctttttttactatcaggcttgtctcatcactttgctaatacgatccattggccaaagatggtattaatctgttttgctcttaaaggaactggaactgaaattcttagtctcgtttgctcttaaaggaactagaaatgtaactgtaagcctcggtcttttaccagctgtcttggaaccaggagatacagtgatgtgatattggaacatttttcttttatttcctatgacttttgcttatttttggctttgcaggttcatctgatgctagtgtgtcagacgggaagaaaacagttcgacggataactttcccgaaagaagtggaggtttcttccttgcctttcatgggtcttagatattaggttctttaatttataagtttggtaggtgatgatatgacgatttcctcaaatatgcactttctagatcgtcaggattttggatgcataacttcaggcaatctactcttataatttttaatcatgacgtatggatgtacctttctttatatgttgttagatgaaatgttgcaggcactggttcacgagatgtgtgatgaaactgaggttgctgtgctgcaacttaaggcaagtctctctgccattagttttaacttcattattattattatttgtaaactttctttgaggctactacaaagacgagtgcattttactcaaccaacaatatggggctaaatatcactgatttgagataatagaatgtaggttccaacaattagactcttctgaagctttcttttgctacaggttggagatttcgagatgaacctaaaacggaagattggagcagccacaaaccccattcccgtggcggatatatctccaactgtagcgcctcctattccttctgaacctatgaataaatctgcttcttcggctcctagcccatctcaagcaaagccttcctctgagaaagtgtctccatttaagaatacatcatatgggaaaccagcaaagttggctgctttggaggcatctggatccaccaactatgtgttagtcacatctcccgcagtatgagatccatttcctaattagtggttgctttcatatcccttaatttctctgcagttttcttgtttgatttgatcttgtttcttctcttaccaaaaggtgggcaagtttcagaggagcagaactgtaaaaggaaagaaacaatctcctagctgcaaagaggtaaacgactctaaattcttttgcatctcttagaacaaaagaacagaaataagatcaaagagctaagtgaaaaaaactccttagggtgatgcaataaaggaaggccaagttattggatacttacatcagttgggaacagaacttccagtgacggtaatatcttaactaatatatccatctcttctttgaaactatctaatcagactcatcgatcttgctatttgtcgagcagtcagatgtagctggagaagtccttaagcttctttcagatgacggaggtaaacatttgagtattcaaaccgtttcatttagtatgaacattcagaaattatataagtgaattgatatgaactcatgcttcgtgtgcaaacagactccgtaggttatggagatcctctggttgcagtcttgccatctttccacgacatcaacatccagtgatgatggtttcttcagcccaattccatagcaaatgaatagtctttcatccggagactgtactattcatcttctcctgtgtttgttcaatgaagatttgtaatctgtttagttgcaaagagtctactttgatcttgctctcatcatttgtcacgtaatgtggattttctgcaccagagaaaaaaaacaattgtggaatttttatagaaatgacgtggctatcttatcttctccgatcatcaaataaaatcaaggctcaaaaattcagaagaaaattgacgaatgtttttaacagtgaaggaaaatattaaaattcttctcttattcgtatcggtcttagcaatgtatgtaatacgctgacgtgtacaaacggagctctcttctcagctctggcctctgagaatg

SEQ ID NO: 34814 - DNA, 3003 bp, Unknown; identical to SEQ ID NO: 34813
  misc_feature (1)..( 3003): 2750-1469P.txt file - cDNA_ID_3082252; gDNA_ID_2926230; Annot_ID_203632

SEQ ID NO: 34815 - DNA, 3003 bp, Unknown
  misc_feature (1)..( 3003): 2750-1469P.txt file - cDNA_ID_3082256; gDNA_ID_2926230; Annot_ID_142624
gtatttttcgaattaccaggacgtttagaagagctagtgtttctgcatgctatcctttatggtctgtttgatacaatcttctcctgagatctttcatctaatgcttgtttagagtctttataaatttgtatgagaaaagttggtcccatttccttgtaactcttgttccttcgtctccgtcgtcaattggtttgtggtaccctggcatttgatagccccattatactggttaataccttaagcgagggaatccaactcataggttattcgtaaattgtcttttaagtgtttttgttttgttctatttaccttgataattgtttatataggtccttattctgtttatgtgatataaatccttctgatactgttctttcctcgcagaccaccttttgaagcagattctaccagatggattggatataccttcctcttttgaaactatagttaagtatttaatttctgtttgcttcgtggattcaacagcctagcatatagaaactctgtttgcatgagcttgcagcttttttgcatgtttgttttttcttgtctgcaaatttgtttaataagttttcaagcatcatgaagattgcctctctcatgagaaccaacatctctttgcttattatgtgcaggtcatattgcccacttaaatctacatgatgagctccttccattcaaagatgttatagcaaaggttatctacgacgtaagttttttaatgttcctttcatgaaagcattttttttataattgcatttcgtgtcctgacaacaaagacatctaacgttctagcgggtctgttatatttgtagaaaaattatccaaggatcaagacaattgttaataaagttgggactatcagtaatgagtttcgagttccaaagtttgaagtgttagctggagaaaatgggatggaaacagaagtaaagcaatatggggctagatttaagctggactatggcttggtttattggaattcaagattggaacatgagcacatgcggctttcatctttgtttaaacctggggaaaccgtatgtgatatgtttgctggtattgggccttttgctattccagctgcacagaaaggatgctttgtgtatgcaaatgatttaaatccagacagtgttcggtacttgaagatcaatgcaaagttcaataaggttgatgatttgatttgtgtgcacaacatggatgctcgtaaatttttctctcacttgatggcggtgtcaacttgcgaggataatttgcaatcagtggctgataatgataaaacaaaggaagcagccgtgagtcgaggaggtagttcttttggtttaaactatttttttgcattatagttggcatatttggttttacgagagacaaaaaataactttaccggtgggtttctgtttactttgcttaatcataggtgagactaattccagtggagaggaaatacgtgaatccaatgcaagcataaatgagcctcttggtgcaaataagaagccatctggtactacaaagacgggtaagaaatgcctcataaagatttctccaagacattgttttagttaatattgcctaatgcctggggatcctcaccagtatgttaattgagtgcagaaaatggggtaggaaaagactgcaagagtatagaaggacacgcaaataagagattgagacaaacgttgcttccaatcgcaaagccgtgggaacatatcgaccatgttattatgaaccttccagcatctgccttgcagtttcttggtatgctatcaatgattctttattatttttgttcaaaatttgggactagagtcttgcatatacttgcaaggcattagagtttcatcaactatcaactacattccgcatcagcaagttaattaggaccaggaccaatagaaataggagatgcatcatgtattaaggcttgtttgaagagttatgtgattggctcttcaatttcagttagaagtaagaaaggaagtcaggatttgtttttgtcacactactaatgcatataagctctgtaattgtttttgcagattcgttcagtaatgttattcaaaagaagtattggaaaggacctcttccattaattcattgctattgtttcatccgtgcaagcgaaaccacagagtttataattgcagtaagtatcaaccgctcccctcctgcttgtcccttctagttttgttgtcttcactatatcatatctttgtaccaaagatctggtagcgtttttctgcgagcctttaaatctgatatacagcttctgttgatatttttaaggaagctgaaactgctttgaagttccatatagaagatccagtcttccacaaggttagagatgttgctccaaacaaggtaagatcccactcgtctgtttttctttttgatatattatcaaaacatagcatctgtagttcctgagctagatttcttttgtactttgcaggctatgttttgcctaagctttagactacctgaagcatgcttgaagcaagaagagtaaaagacatttctaggaaagaaagaagaatcaaaaaacgcatttgaaatcttttctttttgcttttggtattgtttgtttgattccatggcacatagagtcagctactgcataagttgatagaaaatggggacacttaaatttgcttaatagtatttaacagaagctgaagacttttgataaaattaattgatgaaagcatataagagagataagaatatgcctttgttaataatactacattttcagaactaaattacgcctttttgttagtataccggcgcatgttagcaaaggaaagtgacggaccgtagtgtagtagtagatgcggcggacggagttaccaaagaagaaggccgctcaaaataattaaatttgttcaaccgtcatcttcttcaactgatcttagctcaactaacacactctttcttcttggcgtcaattcaatcaaccaaaacctttttctcctatctagctcacgctttcttcttcttccaatg

SEQ ID NO: 34816 - DNA, 3003 bp, Unknown; identical to SEQ ID NO: 34815
  misc_feature (1)..( 3003): 2750-1469P.txt file - cDNA_ID_3082256; gDNA_ID_2926230; Annot_ID_203631

SEQ ID NO: 34817 - DNA, 3003 bp, Unknown
  misc_feature (1)..( 3003): 2750-1469P.txt file - cDNA_ID_3082260; gDNA_ID_2926230; Annot_ID_142623
tgtttgtatgtgaggtcaacattatttaattttattccaaatctaaggaaagagatcaaagtattgttcttccgaataaagtaacaaataaagcagacaacataattttattttattcttgcagaccagcttcgtttaatgcgtcggagctgcctaatggacacgacacacgaacaacaaaccgctccgctccttcacttctcctcctaacggctatatttgtgggacctacaagccattggatcactagatcttgtaaagaagcccaaaggaaatgaacaagccattttatttatggttactgactaaaatgccctcgcaaatggaaagtaaataaagtagtacagtttcagaagaagcagacacacaactttgaaacttgaaagtgaaacttttcctggcttacaattaaacaaagaaaagaagggaagggttgtgccgtacgaggttattatgttgacgctgatctatctttgccctttttaacataaggctggtacacgtgtttaaagtgtttggatactagatgtggaggttttgaacttcaatttttttaaaaattcttgcatatacatttttcacttcaaacacattttctgaacatataccaaacctgaccatttctcttatgaacaagtcatctctataatgaagtctataatgacatatcactcctgtggttgcaagaacaaaattctggagacactcttaccttgaactcaaatggtatgtcatgtattgtaaatactatatcacaagattagtaattctcaagccataaggtttggaggaatcgaaacaagatggtttccgaaggcgaattttatcatgctgatgaagctgttgctaaagcaattagatattagccccgggaaaaataaagtccaaacaatctctcaaagttaaactgtactcaaaccatcaacctcgaaccccaaagcaaagcctaattttgtgaacaataaaccaactaacaatgccctacttttataatcggatcatcctcatgtccaccaaatctgttaataagttttatatttcacaaagtgggaactatgagcaaattagcagattgatactagttaggaaaggcaagacagtcatatatatgactatattccatccataaaagcatgaaagttacttacttcaaatcacaaaccaatgagaaaatataggagataaccacagttgagacttattaacactaaattagattaatatatactaactcgccactagaccatcaatgcaacagctatgaacactaacctaataaacgaaaaagattccatgtgcgttaacattgaaagtaacgtaaatctcaaatacgaagatgacaaaacaagggttaagagagttcaccagttataccccaaatcgatcttctctaagtgattggctactatcctttacaagccacaaataaatggatcatgaaaacaaagaacatgcaccaagaagtacatataaacatttaacagaaatcacctaccaataccatacatcattttgaaactactcaattttctagctaagtgcttccagatgaaactattatgtcactgaatctccattaaactactaaagaacactaaacgtaactagaacttaccatgatcagcccaattgcagtaatatccttattcattttggtgaagaatgctctgaaagtcaatgctactgataaaggaaaaaagagaacaaactgatttgaaggtagatgaaattttaaaagtgaatcccacaataggagaaacgatagagaaagatcaactttgagttttctacatctgaacataaaagtgtcgagccaccaaagagataaaacaacaagaagaagcagatactgcaaccaaaaattcgtagttctaaatctgtagagcttcgttacgaatctacattccatttcaacaacaacaaatcactaaaatcagtacggagttaccaaccacaattgacgagatctgaatcaaatccagctcttagactctccctgagacagctgcagcagctgaggtagcagaacctccaaggaatgagagtaatccagcattcgcaggctcttgctcgtccaagaagagatcatccggaaccacaaacgcaccgtgtacgcaaacgattgcaacaccaatcataagcgcggaggttaagagagatccaacgctcgtcataaacacgacgacgatcgtagacagcacaagagcaagcagagtctctcgatcagagaaagtgcgaccgaagacgaccagtggctgatctgagggacggaagaggtagagaaacatccaaccgcctaggagtccgatgaggacaaggagggagagaggatgagagaaaagcgaaaaggcgagtacgagggagacgatggcgacgtagttaaccttgaagtaagcgagattcttccttatccgggacaaggcatcggtgagagattcaggtctcgccatggaactacgatcgatgagctccgtccatggacgacgctgtgacaagccatcacggatcgaggtggagagacgtgagaagaaagtacgaaaagcaggtgtgttgattggaggctgagattgaacagcttgctgattggtgacaggtagcgtcggtggagttgccattgcggcggcgcgtgaggttagatgcggctgatttggctgagaagtttcgatccgttagtctgaaacgaaaaaaattcaagagctgaagttgctgaatcagagctccgtgtagattagatattctagggcctgagcctgaccataaaggttaaaccggcccaaaacctcaagtcgctggttcgattcctcctcgtgcttttaaacaatgttttatttttgtttttggattttttttttttttaatcaaaccctaaaataccgagagagcacgactaacgtcttcactgacgccacggtctgggtggttcattcttcttcttccgccgatttcttcacattttctctttctggtattcaaacattgtaaaacgacaccgttagcaccatg

SEQ ID NO: 34818 - DNA, 3003 bp, Unknown; identical to SEQ ID NO: 34817
  misc_feature (1)..( 3003): 2750-1469P.txt file - cDNA_ID_3082260; gDNA_ID_2926230; Annot_ID_203630

SEQ ID NO: 34819 - DNA, 3000 bp, Unknown
  misc_feature (1)..( 3000): 2750-1469P.txt file - cDNA_ID_3082271; gDNA_ID_2926230; Annot_ID_142619
aatgcttctcaaagctgcttctactttctctctattgaacattcatggagagaagaaagacatctctcctctcttctcctcctcctcctccatttcgtctccggtttcttctggaaaatccggcaatctctctttccctcttcgtgcttccaagagttcaaccactaccacaagcacgttgagcggcgttgtgttcgagcctttcgaagaggttaagaaagagatggatctagttccatctggtcaacagctttctcttgctcgtcatttgtactcccctgagtgcgaagccgccgtcaatgagcagatcaagtacgtttttccgtcttggattgaaacattttagtgattgttatcatggatttgaaaattgttattgtaaatctgttgattgagtcaatttttgcttgaatcctatatagatgagattggcttttattttgagtctctcatgaatctggattttcgtttgatgcagtgttgagtataacgtgtcgtatgtgtatcacgctttgtatgcatatttcgatcgtgacaacgttgccctcaagggtctcgccaagtgagtttttctctggtattgaaatctctgtgctgatattcgttctgtgtgatgatgaattatctgttgtttggtgttttttgctgaatcaggtttttcaaggaatcgagtgtggaagaacgagagcacgctgagctgttgatggagtatcaggtctttgactaatgatttcattttgttatcattcataagccttatgatcatttgagctaagtttgtaacatcttacatttttggttttcttgatctacagaacaaacgtggtgggagggtcaagttacagcccatggtgttgcctcagtctgagtttgatcatcctgagaaaggagatgctctctatggtaagcttcatttccatttctgagattttagataaagaattccagtacaaagtatctgtagtttcttaagacttcagagttgacatacatgtgatgttattagtgaagaggaggattgttgggtctcagtaggatctaatatagtgattgtgttgagttttaagattggaaagcttaatttcatgttgattgttgtttttgcagctatggagttggctctttcattggagaaactagtcaatgaaaagctcctaaacctgcacagtgtaagaccatctctctcattaggatccagttcttgtttatggtattcaagtcataatctagtttcttaatacaacttggtatttgaataatgtggtcaacaggtggcttccaagaacgatgatgtccagttggcagattttattgagagtgtgtttctgaacgaacaggtaaaacaaaagacctacacgttctatgttagtggcaaagatatggggttcttgatctgtcaaaaatggaatctaatgaagtttaattaacatcactttgcaggtggaagccattaagaaaatctcagaatatgtttctcaacttaggagacttggcaaaggacatggtaaccatttgtttattcaatttaaaactaataaaacacacctcaattcgtccacttcgtgtcttacactttgtttatttgtaatcaggaacatggcatttcgatcaggagcttcttggtgctgctgcttaatctgagttttagctgtaatctcgcagtttggttaacttttgagttattttgagtatgagatgtaacttttaaggtagatttgatcaatatcgattctgttgtgagagaaaacaagctattacgctccttggggttaactttctttgtgttttcagtattatggttttgtccacttcgtaatatcactttcctttagaacatttcaaatcagcagttgttttgaggtgtaatgtaatggtcactgatattttctattacccctgcatgaaagtagtatgttttatcaacaaagtggtaccaaaacattctctatccaagaaaactacaaactgagtgagtgtccatacttacaaagttttgagtcaatttatcattttctcatataccaatcaaaatctcacaattacaactactctttttttcttctttatacgatgatctttttttgacacaatatgatgatcatgaaagacaattgattatttattcacatgtatcaaatattctaaatactttgattttatattgtgcaaaaaacaaatatcaaaattaaaattttagtaaaattgtataaattgagaggtagaaaaaaaaagttatttgatcaacatggcatgctatgggtgaaggccccaattcatttgaaaactatgatcaacctttttgttaaaactcactaattatttgaagtcaccaaaaataaagaccatttacggttttggtaagattatagcttagacttggtgaaatcatacaacaagcccgtctagctcagttggtagagcgcaaggctcttaaccttgtggtcgtgggttcgagccccacggtgggcgatagttagttgttttatttttatacttcttttactttgccttgctttcaccataagtggatatgggcctatgttaagcaatttgttcacatgaagttatactgatccatgagagtaacattcaattttgatagcttttggtttcttcacttacaaagatcatcaattcttgttcatttgaacaattttcttaatctttttcgttctggattgcaacttcaaaaaaaatcactgagacaattgagaagactccaaaagcaaaagatacacttatgttattttccaactccttgtaatattctcatccactaacttggacatcaaactatacaatcataacgtcataaagatatgagattactttccatatctcacatcacgtcagagcaagtaatagcatgacacatgtcatatatattattgcccatcttgttttctatttttggctctttacacataacttcaatatctctctctcaaagatcgatcagagtaatctctctctgttgtgtggaaaaacgaagaaagaatg

SEQ ID NO: 34820 - DNA, 3000 bp, Unknown; identical to SEQ ID NO: 34819
  misc_feature (1)..( 3000): 2750-1469P.txt file - cDNA_ID_3082271; gDNA_ID_2926230; Annot_ID_203625

SEQ ID NO: 34821 - DNA, 3000 bp, Unknown
  misc_feature (1)..( 3000): 2750-1469P.txt file - cDNA_ID_3082280; gDNA_ID_2926231; Annot_ID_142669
ttggaggtgagaagatgtacgagaaggcaagaagaggagaaaccgtagagctttctccaagaagaatttcaattttccagtttgacattgaacgcagtttagatgacaggtttatccattttctgtatagtgcagaagcagtttgaatacaatgttttttggttaggcctcactaaacatctctcgtttctcttttgcagacaaaatctgatattccgggttatatgctctaagggtacatacataagatctctctgtgcagatcttgcgaaagctcttggaaggtgaaacaaagttttatcctttgattactaacagatccaaaaaaaggaatttactaatatatcattccttttgctgcagttgtgctcacctcactgctctccggcgagattcaattggtacgttcattcacaagtcagcttatcaattttgtttttcttcaaaatcattcaaagcttgattcactcttaatattttctttttggggttcaggtgaatattctgctaatgatgcttgggaattcaatgagttagaagcagcaatcactaaaaactacttctagaaggaaacaacttctggtttgctagacgcctccatagatgatagtagaagatccaccaactgtgaattctttgcgacaaacaactcaaaaaggttacacaggattgcatagatcattgattgttccttaaaacacttacattattgccctaagagtctaaggatcaaatctttatttcggttcatctagcgcttctactaaatctcactgtctataacaagctcgggttattggaactggagggtctgtgagcaaaccatttagagtacggtcagccacatgcttgtttgcagcttccgtatagtgaactccatcccagctcacagccattaccgggttgggacaagagccaccgtagatttcggtattgttcactttccctttgtttccacaccagatgtgatcatacttctcatggtagccgcaacataccttcaaggggtttgcaaatcctgcaaaaacaagtaatgagaacgctaaaactttctacagaataggtacttaacaacaaattgaattgcgatggaccagtttgtcgtatacctagtttcttgggattgctcatcatttcatatttcgcagtgtagacatcaacatatgtaatggctgcttgagtgagttcttttctgagattgattactgtttccttgagctttctgttgaactccatcgccatttcattttgagccttcacgcagccagatttgtccaagtagcccggtgcaggagtgcccatgtaaaacatgttcacgggtaaacaaccgaaaggacccgtgttgtgtacccaaaatgttcttcctccttgctgatatatgttctgtgaacaatatatagtgtagcaaaacttgtagtcagaagcaaatcaaaggcggggagaacatttcatgaactgcatcaaatctcacccggacagcagaagctaaatggttgacaatgtcgggtatcgtcgccttaagttgatcgacgctcattgtccgaaacccaacagagagatcattctgtccaatatcaaaagtatacaaagcctttgcaaactcttcctgtcttggaagcttctctctatcatatctactcttaactgtttttgcaaggcagaaaaaccaacagacttgttaaaatcatcatgacacagccaagttaaagatcaactaaaagacgtaactgactttgtgtgaagagtagtgcagatctggctttgaactgatcgaattgagcaatctgcatatcgagagagaatggactaatgccatattgaaagatagtttcgttctgtcttcttatggttgaaccacctgttgcaaagtttgctccatgtctgaagtttgatcctaacgagtttaagtatgcgctcaaatacggtaaccccagacgctcagctgcaaaccacagttcaagaatcaaagttttttttttttttttttggtttaatgttatttgaatcaaagtttttttattgaagctctgtttttctctgcaaatttcttaccaatgaaatcaatggtgagacggccatcggagtctcttccggtgggtctgtggaagaaaccttgaccgtaaggatccctaataggctcaaaagcggcggagatacctccagtgtcggaattagaatctccgaagttgtaaatcgccggaaaagtacacgtaggctgaactgaaacagatgttgtcactgcaaagagacacagaagaagccatgaaaacacagtagaagaaaccataagttttgctctttcaagattatccttcattgcgagtaacgaaacaaagagagtgatggtaatggcaattcacactctctgtctctctccaatgtcttgctcttatataagacttttgtttttagatctttctgaaaatgggtatataacaaaactgtattttcttctttgaaaattacagaaaaaaaaaaaaaaaaggatatcgtgtcttgagagttggaccggaccacagttcaacagtcatgagctgtgttcttattggaacccagaaaaaggcgctaacggttatcattgtcggtacctttcattcattgtaataattcacctaaaaagcatcaatttttctacgagtagataattcataaaaaagttaaccgaattttacaaaataaaacatggtccgtttttcacaaaattttatttctttctattttttctgatgtgctccagtcagttacattacatggtttcccttgagacggaacaaacaagaaatatttttgattgagctgagtgttctgatatcttatctttattgggctgatttatgatcataaaggcccatatattgtcagaactttgacaagccagaaaacttaaacgacgtgcagtttgatctcaattacactaaaacggcaagtcacaatcgtgtaactacttgcagacctccttcagtgaaacaacccaaattgctaagaaatagaacctcaatg

SEQ ID NO: 34822 - DNA, 3000 bp, Unknown; identical to SEQ ID NO: 28742
  misc_feature (1)..( 3000): 2750-1469P.txt file - cDNA_ID_3082312; gDNA_ID_2926253; Annot_ID_204433

SEQ ID NO: 34823 - DNA, 3000 bp, Unknown
  misc_feature (1)..( 3000): 2750-1469P.txt file - cDNA_ID_3082334; gDNA_ID_2926231; Annot_ID_142672
aaaaataaatgaatatcttattaaaaaggaataaaataatcatatccctcggatgttactataagtgggtctggttattgatcctacggtcagaatgcttttttaccttgctgatctgtcaataaacttatttgccaacacattgtgtgaagaaaaataaatttaaagttttataagcagtaagatgattagtgccgtatacaattggtgattaaaggttataagtgggaagaatttcaatcatatccaagtattttattaactttttaaaagattagattatatacaaatgtatatagtcaatatccaaatctatatataattattgaggtgataaagtttggacatttagataaataattaaaaacttttaagttcgagtaaaattatcacgcgtttttcaataacttttaaaaactaacatttgacttccaattatatcatatctttttattttattttattctggtgaaaatatcataacatttttcatactgctttctgataatctaccacgtaaaagtattatatgctactcggatatatcgaaaattttttatcttgatttgatttttattattttctggtgatgtaatatattaatgagattggacattggcatatatcgaaagaaaaaaaaatgtttgaatttggtcttttctattctagcaactagcaagtcaatattacatactcccggcaatgtagaatctttatttttcttaatattagatgaataaagctaagcctctgttctaaatttctaatatattaatttaacagcaatttgatgtccaactatgtcaaacaattataaatagtaattcgaactgggtcttcgtcttcgctattctctagctagtcaagatattacgtgttccaggggaccgagttgtactattatcggaacaaccctaattcttttaatttaattaaaactcagatctatagaagattacgattttcaaaacttgatggtatatatataaaggttaaactattaatctattatatgattaaatttcatcttaaataattaataggtggtgataatttaagtacgcatgagtttaagtgaatgaatatctaggtaacctaaacttgacaaaaaaataaatttagtttttctatgatataacttttgattgctcacagaatgttttgcatgttttaccaatctggcaatgttcaaaaattacgattttatcatgctatttcatcatctaataatataaacttaaaaagtcatcatcattcgattgctttttttttttttttaatttaagcttttttcaaattcttaccatacctttttcagaataattataagtttataacatttccatcttttgattaaataataagcatactcaagttgaaacctacggaaccggtctcactatgtaacccaaagcattggacttaggtttgtgagtttcacgaaacgaccagtatgttaacgcgaactgctttgacctattctttagttctatttattttcaaacacttttttttgttttttaaagaaaatatatgcttaattgaatatccaagtaattcgaatatacattttttttttgttttaatgaagcttgaatgctaaggaggaccatgttcacttttgcaactacttacatgaatggacttttgtatcttatctagctatctctttacattttcttatcctttttaattaccatcgaaattttataaatgtatgctatttatcaactagttagattttgttctttcaacaacacgaataatacgtttagcgagttgtgatatatataagaagaacattaatacaaaatgctctttaatttcttttttgaaaaagggttgttatggtctaactatttgattatataagtattggaaactagatgattatgcattgaaatttgattatatctcctttggttatttgactatattaaatacaacgtgttattgtttgtttcctgtttctttcaacccaaaatttgtcaacccaaataaatgaatatggaggaagaagaataaaaaggaagaaagattacatgaaacttcccagcaaatacggtacttattattaatctattaaatcatggatagaggaaaaatgaattatccaaaaacattgttagctagggttaaaaacaaaaagaactgtggatccaacaaccttggaccctgaactcgaatagagtgtttgttgacccaacaaagttagattaaatttccaacgctcttcatttagttaaatcatacgtatctataaaacacgcgtacacgaggagcaaaacctggttcatcagttttttaatttgttaacgatcacacccaccagttttgtaataacctgttttgtcccttttaaggtttttcaattcttttgtctgttgtgcttgctttttataactctcatatttgagttagagccaattggttgggaaatcatccaacttttgttcttttttctttctaacatgttttgaatcttaagatatagatgtgagaaatacttacttaatatatgtacatactatctctaatctctcaaggtattcaggttattggtttagattggagatttggttaaaagactaattggctattttaacctaatgtgaatagctcagtttgattaaattgaagatatgaagttgtcgatgaatttcggtttagttagttcatttggattattcgtgtccgagttgatgtccagcttttacacagtatttaaatttcgtcataaagacccatatatttgttacaggcccaattatcagtttaggcccaactaaattttgttgttgtttcttttggtcaacgagactctcaaattacagaactaccttaactgtttactgaacagacatcagacctgacgtcacacgaaaaaaacagacaccagacctgacgtgtaaatgtcatccgacgggtctaaagataagtttaaaatcagctataaattggcaaaagagtcttaagaaacattgtaaattcaaaaaaatg

SEQ ID NO: 34824 - DNA, 3000 bp, Unknown; identical to SEQ ID NO: 34823
  misc_feature (1)..( 3000): 2750-1469P.txt file - cDNA_ID_3082334; gDNA_ID_2926231; Annot_ID_203697

SEQ ID NO: 34825 - DNA, 3000 bp, Unknown; identical to SEQ ID NO: 34823
  misc_feature (1)..( 3000): 2750-1469P.txt file - cDNA_ID_3082334; gDNA_ID_2926253; Annot_ID_204427

SEQ ID NO: 34826 - DNA, 3000 bp, Unknown
  misc_feature (1)..( 3000): 2750-1469P.txt file - cDNA_ID_3082347; gDNA_ID_2926231; Annot_ID_142667
attaacgataaattgagtttcaatttcaactggtaatgaaggttccgatccaaacacggtatcaactccgagtgtctcgaatcacatatctgcacaggatcaaaatgagtacaaccactacatgagaaacctaaattcaacgagctaatctacacaaatcttaacttgaacactaaaaatctagacatctctactcaattcgaaacaaatgattcgattcacgaaccggaacacttttaggaacttcgaaacggctcactgcaagcacaatatctcgattcctcaaggatccgattccggtgcgaacgcggttattagatccatcgaactcatcggactttctggatccgggagcgaacgaagagccgtagtagaggcaagtcaagccgagtagagcgatgaaaccgacgagaacgtaggtgaagagcttcggagtcgcacggactcgctcagttctgaagtgtttcattctcagcgtctccggatccggatctagatctgacccgatactgaggacccggaaatctagctgccgatgaagagtggatagtgtgagagctacagtagattccctcgaggtcgaagacgacgaaatagaccagtgtcggattttacgtgcaagggaatatttggttagctgtgatcctctgtggcaaggactagggttgtttctatgctccttaactaaaacacgcggttaaaactaaatgggcctgtaggtagcatacatgtgcttttaaagaataatattgggctttatatagtttcttattgggctttatacttgtgttttcgatttttagtttttgtatcttatagttgtaacttttatatatttttatgaaacggtcaaacactcgaacacattcaattgtagaagataataaatcatcaatagatttctttgatttcaattcagttttaatgttcctatactattatggaaagtatatgaataagttgaccaaacaaaatggagagtacttattaattactaggttcagtgaatcttcttcaggtaacatttgttttaatttttttggtgtaaatgttaagaaaataaatacatttgttattcaaccatgaatatagtggtttgtgttacatttattatttatataatggatattaagaatgtcgtggcgttcactagtcagtattacacttatataatgcatattaacattcgttattctagtttactccagtccattagattcgaaatgcttttatgaactatatagaggaactaatacgattttattctataattatttggtttgaaagtgcagtccacgtatttcttgtttgctccttgaaggaactgtccaagaaagaaaaaaaagagtagcataaatcacgggtacgaagtttcatactttaatgtaagtccatttaagtttcacgtgttgtgtcttgctcaccgaaggaagcaaaaacttttatactgaaattaagacaactttagttaatcaataatttgcacacaagaagaaaaaaaggttaatcaattataagcatgagtgcatcatgagcgagaactctcgagcaaagaaaaaagaagacgaatggatgataatttaaaagtcaaactctcaatatttgtagtctacaaggtgcaatattcaacagtacctatcgagtaaatccgaaaagggaaaaaattgacgtagttaaggaacattgacaatttaaccgcacgacgaaggaaagatattgaagataggataggattgtcacgtggtcggaaacttctgataaccatccatttcatccccaaaggtatttattgcattgttattatactattagtatttgcccaaatcatacagaagaagttttttttgtttggcagtcctatttatatgatacatcatttctaaacttctgagttgcaattttttaaactaattattgattatgttttccttctttaagtattttttattcatataatttacatatgtataatacaatcctctagattaaaaatttggaattaaaaaatgttagtttagttattgactatttgtactttttaagaaatggtcaatttaagaatttcaagtaatcaaaagaaattgtcaattgataccatgttatgactttggatatcgataataatattatagggccaattgttggaagagagaataaaatgtggggtaaaattagaagaagtttccaccattagcgtgcttcacacttttttaaaaacagaaaagtgattagtctcctaatgatttcatagaaacaaaccaaatacaacaaacagaagaaaagtgaaattgctttcgaacaaaaggaggaaactttaaaggcgaactctttagtattcgatccgccattgaagctcctctgactctctctcaaagtacttctctgattcgtcattcctctgcttcgtttagtttaaaggtagacaacttttcctctcaatcgaattgggtcattttctgatgaatgtcgggagattcaatctcgaattaatgttatttttcgattttggggtagtctttggtttgatgaatcagagaatgtttcagttcaattcggcgaaattggaaagctcgtagatttgtcagaaactggtttttgtttgttttacttattgtgggttagagtgttggagtaggttttcgtaataggacttttatcttaatctagaagtcactaaatcgcgtattgttgtggaaaattacgtgacgtgattgaatctcctttctttatataaacatctctaccaaccttcgattttaaagagcggtgagataattcaacatctgtcaaagataaagctttcaccttttcttaacgaattaggtataggtaaattgcatcttctaataatgtcagaatcttaaacaaagtttctgctttttttttctggggtttcatgaatatactctaaaggctaaatctttgttttgcagggtacggaactgacctgagaggtttgatttgaatctaaaaaggtttagttttttgttaagtttgatg

SEQ ID NO: 34827 - DNA, 3000 bp, Unknown; identical to SEQ ID NO: 34826
  misc_feature (1)..( 3000): 2750-1469P.txt file - cDNA_ID_3082347; gDNA_ID_2926231; Annot_ID_203692

SEQ ID NO: 34828 - DNA, 3000 bp, Unknown
  misc_feature (1)..( 3000): 2750-1469P.txt file - cDNA_ID_3082355; gDNA_ID_2926231; Annot_ID_203687
tagaataagaaaaataaaacaaaaataaataaataaaaaatactgctttagcttttggagtatcctccttttaatctcaataaaaaaactattaaaacagaaaaaaaaatggcacgtcaatttgtcgttttggttctattgactttaactatcgccaccgctttcgccgccgacgctccctcagcttctcccaaaaaatctccatcacccactgccgcaccaaccaaggctccgactgccacaaccaaggctccttcagctccaaccaaggctccagccgccgcacctaaatcatcttcggcctcttctccaaaagcatcttctccggctgccgaaggacccgtccccgaggatgactactctgcctctagtcctagcgactctgctgaggcacctaccgtctcctccccaccggctcccacccccgacagcacttccgccgctgatggaccaagcgatggacccactgcagagtcacccaagagtggtgccgtgacaactgctaagttctctgttgtcggcacagtcgccaccgtcggcttcttcttcttttctttctaagttaagtcgtccacgttttggttggatggatcagagatttgtataatcttttgagttgaggccgtaaatttattttatatatacgtttataaatcgagattaattggagtaaatataaacctaaatgtcattttgaaatttggttagaacaaattttcatattttgtttaataaacttattttttttggaaatgcttatgatttgtgtggtctaatggtcttttagttcctattgtcatgtgttgtgaattagatatcatgaatgatataaatggatatttctacatttttattttaaaattttgttggctaatactaaattgtgtactatttataatattcatgataaaggctattacacatttttaatcaagttaataaatttaggatgctttaatgtactaacctcttttggtgccaaagtcagccaatgtgtaaatacaagcttagaaacatatttaaatatttcatagaaaatatttaaattttggaaatatttgtttgtgtgttttttgactgattattaaaaaaagttatgtaaaaatttaaattaatagataagttgtactccatccgtcttaatttagttgtcgttctagcactaaaatattgttttgtaataattgtcttttttttttttaaatgtaaatgtttggtacaaattttaattatatacttattatttaaatattttaactaataaaaaattagaaaatatattaagtagataaaattaaataaatatttttttataattgctgtgcaaaaactttagaggataattattttaaaacagagaatattataaactatttctattattatcttgtttcaaaaataaaaataaaaatttcgtagttaaattaaaacatcttagagagaatgtgaaatcaaataaatcagtatattatcgtatggcatttttacaattaaaaaataaagcaaaaaatattataataaaaaatataaaaagaacaaaaacgttaaaataatataattaatctttgagccgaaacaaaaaataattagtcaatggaggtaggacccgtaagaattgctctttttcccattcgctctgattggttccttctctctcccaaaccttttctttttttttttgtttcctcttcagcttttctttttggccaacgtcaggtttcttaaatgggctcattcgtaactccaaattttgcgtaggttttaagttttacctgtaaaatactagtcaaacctagcaattattaacacgaattcatagacaattgtcatgtccatttcttgttgttctatcaaaaatgtgaaaacccgtaatactagaatattctaatagatcacgtttaaacggcattagaatatcaacattgttttatttactacagaatccactttttgaagggtaaaaaatcgatccccttgtgcatatgaattttctaaagtaggctttttaaatctctcaaatttacacccatcaactttatgagaataaatgacgttgcaggccttgtagagaaaatgtacaagacaaagaaaatgtatagaactttatttttttggtttcacgtgaatgttatcacaaaagaaaatctatttccacgaaaagtgtcatcaaaagacagtaatagttcaggatgctactgtactatataccacttcatttgtcattgctgtcggtggtggtagccaatttacgataaacccaagttcaacagcattatttcccttacgaaattaataaatgaagtgggttcatttttttttgttcttgtcaatttatgaattggattcggattttaaaattttagagttcacaattcccttgcgtttgattacagcgtggaatacaaataatgcaaatgatatcttctcacggaggaatgtcaaaagatatttatatcactttagatataatattggatcaaaaaaatctcatgttaatctgttgatgcctaaagaaaaactgatcatgttaattacctttgcttaatgtcaacctcatgttaatttgaattaaaatatatttaaaatgtcaactttataaaaatgttggttactaatgcacatatcccaaaccttttttaaaaaatgtgaacattataaaaatgttggtatctaaaaagtagaaaaacaaggtgctttatgaaaagttgaaaataagaatggagttacccaatatataattaactaatcagaagtttaagacacagatgtaatgtagtaatctaatccaaccttattatctcctgcacatccaaacagaatccaagattacaatagctttatccaatgactgatagacacgtgtcaaaaggtaccatcactgtcagctttccctctcgctccacctacatacttctgagtgagcgagaaaatgagaacaaaacttagaaagcagagaagagttaaagtgttagagagagagagagacagagatcggagatg

SEQ ID NO: 34829 - DNA, 3000 bp, Unknown; identical to SEQ ID NO: 28896
  misc_feature (1)..( 3000): 2750-1469P.txt file - cDNA_ID_3082363; gDNA_ID_2926231; Annot_ID_203685

SEQ ID NO: 34830 - DNA, 3000 bp, Unknown; identical to SEQ ID NO: 28895
  misc_feature (1)..( 3000): 2750-1469P.txt file - cDNA_ID_3082374; gDNA_ID_2926231; Annot_ID_203681

SEQ ID NO: 34831 - DNA, 3003 bp, Unknown; identical to SEQ ID NO: 28893
  misc_feature (1)..( 3003): 2750-1469P.txt file - cDNA_ID_3082386; gDNA_ID_2926231; Annot_ID_203677

SEQ ID NO: 34832 - DNA, 3003 bp, Unknown; identical to SEQ ID NO: 28892
  misc_feature (1)..( 3003): 2750-1469P.txt file - cDNA_ID_3082390; gDNA_ID_2926231; Annot_ID_203676

SEQ ID NO: 34833 - DNA, 3003 bp, Unknown; identical to SEQ ID NO: 28891
  misc_feature (1)..( 3003): 2750-1469P.txt file - cDNA_ID_3082398; gDNA_ID_2926231; Annot_ID_203674

SEQ ID NO: 34834 - DNA, 3003 bp, Unknown
  misc_feature (1)..( 3003): 2750-1469P.txt file - cDNA_ID_3082401; gDNA_ID_2926231; Annot_ID_142648
ttagtcttgtttctatatatctttttcttaatggtgcttaatatatcgttactggtgtgatttggaatgatcaaccaaatcatgatacatggacaaaacaccaattatctacgaggaggctgacaaatgatatggcttcccaaacaattacgatgtgataggatctaacgtcctaattcccaaaagttgtttttctctatttttctttccgatttcttggttattttgattcgagcgtcaaattttgaccatggtactattcaaggcctccatagctatgcttggagacaaactgagctagaccacgacatgtaagaactaagaagcgatgttaagtttgcctccagtaacaacattcaataaacaaccaaatcctttcgaggtaaaataataattttaaaacgaaatatataaaacttacatctgaaaaattagttccgaccaaaagagttagcacctcttggttttgtacctgcatgctaacatatcaggttgaacaatatgcattaattgaaagtcaatctgaaaaaagaaaagaaatattatataatgggtgtattatcataataactatagaaatagttgtttttttcttttaatgttacaacatgtgagatgttataccttttattaattactaataaaaatacatatattccccatttatgttctactaatatgcagacaaaatggtatttattaccaaaataatgtatcatcaattaacaatatggattattttctatttaagctatgccattgcacccaagccagtgacactgtgacagtgtatcagcataactcacggttaaaaatgggacccacttattctcattaaattcaccaattttaaccattcatggttttttaaccgcggttaaacctgtaaaatcccgtttcaataaattctcacactcttcttcttctttccctggcgctcacttcttttcaagtctctctcttctctctcgagcctcgcgtctgtgtaaagagacaaaacatattctctaaagcggcgacgtttaagaacattcggtcaacgacttacggcggcgttggaatcaaaactccgacaatgacggttttctccggcagacaagtcgttccgatggattacgaaagccgaggtatcacaacggcttctagaagccatcctcgacggagatttcaaaacggcatcggattgcgtctccgatccactcgtcgacgttaatttcgtcggcgccgtcagcttaaaaacaaggaggagcgaagtcgtcctccgtgatgagtctcccagcgaagtccgcgtcgagtacgaagaattcaaaaccgatgtaacggcgttattcctcgccgttaatttcggaaacgcagctctcgtgaaggaattactggtaattatttttcttaatccgagtttagccgtttctttaacgttttttgctttaagattttgaaaccgataaacaaaatttgcattgatttaaatctgtgcaattaattatacaattcgacgttatttattaagcaaatcggtttctaataataatgcttttgatgtgaacaatatttgtaatttaatttttgtgctttgtttgaaacttttgcgttacgttccattaatggaagacgcaatctatggagaattggtttcctcgtgatttccattttgcgtttgtttttgcgcgtttctgcttagtggtgtgattcgtggtacctttttgtctcttgaattaaagaccccaaatatatgttctgtctgaagcttactttactttttcctctttttcgaaattcaaatttcgaacgaacgctgattattacttctctctgccttttctatgaaagaaattattcctgtaaaattttggtaaatttcaataaaattttcgatctaatgataattaatcagaatgagctaattcagtggcgtttactagcacttgtctatacttagctctagtcattttttgttttttaaaaaacgtggatcggattccgtgagagtttttaaaaattcataatctgttgactaactttaatcttaactggtggagtgttaggatccttccaagctgccaaaaatgttatactaataaattacatcttttagcgagtcaaatttgcatgtcaggcggggattattttccaattttgaagtcagtcacacaactttttcttttgcttgcatcgtcacagatttacttttattgagattctcattagcctttgctagaccatatatgctaatgatggatttgcgattagatttgaaatcaacagcgttagttatattaggctaagatctgggaaaaaaacatgtgcatttggattggtcttcgttgagggatattttgagacacaacagtgccaaaatgtcactattggtttgcagtgataattgaatgatttgatttgattctctcttgttttcctgaaaggaacttatgaatatttagtacgacaagaagtgttgatataacaccatgtaacttgtttgtgaaacagaacctgaggccccgccccattaggtgttgtcacttgtcattggctgcatctatagtagacgaatactatatttgcatacttccatctttccttttaagccatgctcctctgtgtcagggttgttccctaatgttcatgtagatccattttcaattattcactttgcattattgtacaactttactattatacacagtttcttttgtcttcttctgcctctggattttcacctcacgtggtgtccttcgcacttagcagtgtagtagcttaagaaaatattttctaattttataacactgatctgacttttcctgtaatatcatctcacagaacattggagctgatgtgaaccagaagctcttcaggggatttgcaacaactgttgctgtaagggaaggtcatttcgatgtctttgagattctactcaaagctggtgcttctcagcccgcttgtgaagaagctctagtaggggcgagctgtcacggacgctcgaggttcgttgagctgcttatg

SEQ ID NO: 34835 - DNA, 3003 bp, Unknown
  misc_feature (1)..( 3003): 2750-1469P.txt file - cDNA_ID_3082401; gDNA_ID_2926231; Annot_ID_203672
gacttgagaactaaaacaacataagtaccatggtgtttgctccttcatcccaaatcaaaccattttgcataacacttctcaacttcccacctactcttccatcagcttcaaacacagtcacattcaaacccctcgatttcaacttgtaagccgccgcaagtccacttaaaaaccatcaaaagaatcgacatatctgtgagcgaattcgtcacaattacacaaaattgacaacaacaacaaaaggatctcgacccaaaaacggaaagttgcagaagagtcataataatgcaggagatgattctctctgtgaaaatttaccttacacctgcacctacgactgcgactctttttcctgaaaccgcttcaatttctaaccaaaaagcaagcaaaaccaaattcaatgcaagatacaaatagtcccaaattctcaatgcgaaatctgaaaagtgaaattcgagataaaaccaaaattttcttacgatgatctgctactgctccagacgccattgctatctgcaacaattcagagtcaaaatctctgaccagtcgaaagcagtgacggaaataagtagaaaaaaacacagcggcaaaattccagcttatcccaaaacgacaataaagggtaccgtttttaatcaggcccattatcatcagtcttttgcctaacgggcctttgttttttcgtcaacggatccaaaccagatttatttgaatgacaaagtttcttgaggagagtgcatggttgacctttttctaccgaattgtttgaactcatgtgaaaactaaacttgttttctctctctctgcatgatgtactaatatatagtatatgttatctaattcgtttttagtttttgggcaactatatggttatctaattctcaaactcaaattagctcgtttaactagtatcttggatttgcgtttatacaattatacgtcttgtttgatagtaccattttttcagtttagtctctagtttgcagtttggcacattaaagttcgaacacaaactacacttgatgacctatttttcaattaggtcaatcaactctggtcaaatactccacagttttctaaagaaatctttaaaaaaaactattaacaatatcaggttcttatctcaatttgtattcccgaccaaaaagcattcgttattcataaggcgatttttattttattttaatgtaggtttgggaaactaaaggaatgcaaagtttgttggtagttatcgtggtagttaatctaatcgattaaatgaaaagtactttttcaagaagaacataattggttttattatgagaaaagtatgtaacattagtgtgaataattgctttttagagcataccatctttgaatattaacttaataaataaattcaaacaggaaaaaacaattataaacaaataattgtgctgagattacgagaacattacgtggcccatttgtacaataagatatttcgaatctacagtttaatagattttagcaatatcgcatggatgtgaaaaggaaaagtcattttgctttaaggtagactaaatttgaagattgaattagttatcatttatcagacatgatatttgcttgcgccatggaactttaaggatgaagcaaactaattaaatatttaatctctgccgccaaatatgaattcgaaatcatatagtatttgatttacacgtataatcatgtatgacttacttctataaagcttttcaaatttcaaaactgaaaaaagtaacaagttgttttccttttgccactttgattatattccatcggcattgtttgcttacactttcttcacgtcttaattaattaatcagaacaaagaaacgattcttaataaatattgtcgaggatttgaattttgaatattctataaactgcttgatctcgactctaggcgaatagtgaatccgactttggttttgagtgtttctagttttctcttttgttaataaaaattaatttagttttggtttgcactaatataaattcaaagaaattagtgattcatttagttgttggattggttgtgattttccaaaaatagacacaacaaaatcgtttgacaaaaacacaagtaatagaaccaaataaccgtttgaaggaaatttcaattatcttttcgatcacttcaactcaaacatccatacgcagtaagcacaagtaacaaaagaagagaataactatacgtttgcctttaagtagttagtaagatttgttgttcataaaatcattagactcataaatgttcagtaagtaagattaattagcagattaaggtagggcaattaggaggtggtccatgctttgtcctaattagtgattagaagggaaatgatcccaaacgcatagttttctaacttttttgggggggcatatatgttttttgggatggctcaagctggtgggcgttaatagctcttatttattttttgtttgttaacactactgttttattaccagaagttcataactaaaatcaataatatgcattcgaacggtttattattatgacacataaacaaaaataaccactaagctatgtactacagtagtagtcagataatttatgctttatcaacaaaaaaaaagtacataactaagtaatatatatgaccgacgacatgttttgtcaacaaaagaagttcgatatttaatcatataattaatattgtacgtattaaatggaatcaaacatgtaattttcatgtcgcaatctggatcacgagatctttccgcaacatgaatgtccaaactaggatccgatgaatcacgttctttgggtcaactcattttcatttaattaaaacaatatcctaagatagcgaattctatatttttgggctcatcatactcatgaagttagaattaattcgagcaaaaatgtatgtacgctcgatacatttttcttggtttttttttcttcctcacaagaagaacaaaacataaatccatgtttgaaaagactttgtatatgctttaaaatcaatg

SEQ ID NO: 34836 - DNA, 3000 bp, Unknown
  misc_feature (1)..( 3000): 2750-1469P.txt file - cDNA_ID_3082405; gDNA_ID_2926231; Annot_ID_142647
aaagtaaccaatagtgaggggtcataaaacatactcagatcttcacaattataactctctgtatttttgtcgtggacgatgtgtttcgagtagaatacagatcatagtgaagaaaaacggtgggcgattaaatggaaggaggaagaagtgatgtaagtgagatctttggatgatacaagaaagatcaaagtgtggtagagagagtatttgaagaagtcggtggaaatatgtacgtgaagaattatagatataaaataggataggaccataacttcgcaatcgtgcgtacggggaagacgaggactcgtcatgaggttgactcttcatcaaccattaacaactcattcgtggaatacgtctatgtagatatgactatttttggtttagatctatatatgtcccatctaattatttctgaattcacgtaaagtcatcaactaaggaaatagtgaaaaaaaatttagaaacaaatccgaattttttagcccaagaaccttcaaccattgattttaaagcatatacaaagtcttttcaaacatggatttatgttttgttcttcttgtgaggaagaaaaaaaaaccaagaaaaatgtatcgagcgtacatacatttttgctcgaattaattctaacttcatgagtatgatgagcccaaaaatatagaattcgctatcttaggatattgttttaattaaatgaaaatgagttgacccaaagaacgtgattcatcggatcctagtttggacattcatgttgcggaaagatctcgtgatccagattgcgacatgaaaattacatgtttgattccatttaatacgtacaatattaattatatgattaaatatcgaacttcttttgttgacaaaacatgtcgtcggtcatatatattacttagttatgtactttttttttgttgataaagcataaattatctgactactactgtagtacatagcttagtggttatttttgtttatgtgtcataataataaaccgttcgaatgcatattattgattttagttatgaacttctggtaataaaacagtagtgttaacaaacaaaaaataaataagagctattaacgcccaccagcttgagccatcccaaaaaacatatatgcccccccaaaaaagttagaaaactatgcgtttgggatcatttcccttctaatcactaattaggacaaagcatggaccacctcctaattgccctaccttaatctgctaattaatcttacttactgaacatttatgagtctaatgattttatgaacaacaaatcttactaactacttaaaggcaaacgtatagttattctcttcttttgttacttgtgcttactgcgtatggatgtttgagttgaagtgatcgaaaagataattgaaatttccttcaaacggttatttggttctattacttgtgtttttgtcaaacgattttgttgtgtctatttttggaaaatcacaaccaatccaacaactaaatgaatcactaatttctttgaatttatattagtgcaaaccaaaactaaattaatttttattaacaaaagagaaaactagaaacactcaaaaccaaagtcggattcactattcgcctagagtcgagatcaagcagtttatagaatattcaaaattcaaatcctcgacaatatttattaagaatcgtttctttgttctgattaattaattaagacgtgaagaaagtgtaagcaaacaatgccgatggaatataatcaaagtggcaaaaggaaaacaacttgttacttttttcagttttgaaatttgaaaagctttatagaagtaagtcatacatgattatacgtgtaaatcaaatactatatgatttcgaattcatatttggcggcagagattaaatatttaattagtttgcttcatccttaaagttccatggcgcaagcaaatatcatgtctgataaatgataactaattcaatcttcaaatttagtctaccttaaagcaaaatgacttttccttttcacatccatgcgatattgctaaaatctattaaactgtagattcgaaatatcttattgtacaaatgggccacgtaatgttctcgtaatctcagcacaattatttgtttataattgttttttcctgtttgaatttatttattaagttaatattcaaagatggtatgctctaaaaagcaattattcacactaatgttacatacttttctcataataaaaccaattatgttcttcttgaaaaagtacttttcatttaatcgattagattaactaccacgataactaccaacaaactttgcattcctttagtttcccaaacctacattaaaataaaataaaaatcgccttatgaataacgaatgctttttggtcgggaatacaaattgagataagaacctgatattgttaatagttttttttaaagatttctttagaaaactgtggagtatttgaccagagttgattgacctaattgaaaaataggtcatcaagtgtagtttgtgttcgaactttaatgtgccaaactgcaaactagagactaaactgaaaaaatggtactatcaaacaagacgtataattgtataaacgcaaatccaagatactagttaaacgagctaatttgagtttgagaattagataaccatatagttgcccaaaaactaaaaacgaattagataacatatactatatattagtacatcatgcagagagagagaaaacaagtttagttttcacatgagttcaaacaattcggtagaaaaaggtcaaccatgcactctcctcaagaaactttgtcattcaaataaatctggtttggatccgttgacgaaaaaacaaaggcccgttaggcaaaagactgatgataatgggcctgattaaaaacggtaccctttattgtcgttttgggataagctggaattttgccgctgtgtttttttctacttatttccgtcactgctttcgactggtcagagattttgactctgaattgttgcagatagcaatg

SEQ ID NO: 34837 - DNA, 3000 bp, Unknown; identical to SEQ ID NO: 34836
  misc_feature (1)..( 3000): 2750-1469P.txt file - cDNA_ID_3082405; gDNA_ID_2926231; Annot_ID_203671

SEQ ID NO: 34838 - DNA, 3003 bp, Unknown; identical to SEQ ID NO: 27465
  misc_feature (1)..( 3003): 2750-1469P.txt file - cDNA_ID_3082453; gDNA_ID_2926232; Annot_ID_203743

SEQ ID NO: 34839 - DNA, 3000 bp, Unknown
  misc_feature (1)..( 3000): 2750-1469P.txt file - cDNA_ID_3082487; gDNA_ID_2926232; Annot_ID_142683
attcaataaattataatgacaacatttattagataaaatatgttgaacaagactatttttttcttttttttagggttcatcgtccattggaaaacaccaaggctctgatttatcacgatttatacgataaatatagccttcaggaccgtaatcgcttaaatcccaaatgcattcttgacaaactggatatcttccggatggtttatcatctctggatactgtaaatatatcaaaccagtaattaaaaaatttcttattgcctgcataccaccaaaaatgacaacgaaattttgtagattttgatatgttaacaagaaatctgaaatcccaagtatgcccatgtttaagatggatatgccccaaattattttcactggatttgcaatgtatattcaactcttctccattttttacagtattgcgaattacaacatgctttttggctaaaggtaagaagccgtctggtgcttctgctgtaacatctgaaaattctagtgctaacgtaaaaataataaaagtagaagagattagaaacaacaatgtaagatgagaattggtaatggaagccatggtcatgtaaattaggctggaatggttaagtagaacttataagctcgctatttataaccccgaagaagagaggtgattagtttaggtaacgttaattagtgcattgaatttagtctgtgtaaataaattatgaataatatatattgacaagaacatacatatgaatatatattataaattatgaaaatatctattttttccttcaaagtatatgaatgaatatactaaatgaagaaagtttgaacaaaaattgtcattgttaaagaagtatgactaaacatacatatataacaagtcataaatttcatattcaaatattctgcaataataaaattcatatgtttggtaagaaatacaattcggagtatatattatatattaatttacagttttggaagtaaatcaatcttttaactgtcactttattagaagatttttaagccttattttgtaagttttgaaatgttgtttgttgaccattcactttgtgcgtatgtggtatgtatatatatatatatatattattggaatatttatttaaacgaaggaaggttgactaaacatatagacttactaatctaaaaaggatattgatataaccgtttacatatagttgaaagaaagactactttataaatagccataaatttaaataaattacgtaaataactatgatttttgttttgtgtgtataaaatatacgcctaataagactacctcaccagtcaccataccaaattaaataatcaaatggatctctaatcaaatggaaagattcgtacggagtatccagaaaacaaagaccaatcggtttatttttgttgttacatgacttatatctcacttctatacgacattgtaaattatactaatttaaaacgatccaaaaatataattttgatagttttttgcttttttagtttctggcaacattcgagtaataaaatgtttagttagaaatattcgatatatgttgtgttggatacaaaccaaaggttccacatcgaaagtttgaaaaaagagtttttgatatataaactaaattcaactccaactagtatgaggccttttggaaggagtccaataacaaatctttgcgggtttgaacatgtgagcccaaaaaggacaatatcatattaaatgagagttggaatggccttagaaaacccgttaaatggtatcagaatatatgtcgaaaaagtagatctatggcttggactatgatcggtgtgggaaaacctctcaagcatgacacgataagaaggtatctcaaaattttcacgaataagaaagtgccaaaattttgttgaagaggaggcattagttcgtggtctttagtttgaaaggaagattgttggatacaaaccaaaggtctctcatcggaagtttagaaaaaaagtttctaatatataactcaaatccaactccaactaatataaagcctattgaaaaaagttcaataacaaatttttgtggacttaaacatgtaaactcaaaaagaaaatatcatactaaatagaaattagaataggcttacaaaactcattatgttcttcttttttttgcaattgttattaactattcaactaaaccttgtttgtttttataattggttggtcaacggtaatttttagcaaaaacggtttacaaattttaatttgtaagagatttaacattataaaatttatattgttgaatcgttatcactacgaactacaaaattaacccgattcacggtaatcaaattgttcgcaactataaaatgaacatattcttaattgtgataatcagtgtggcagaaatttgcgaaacgaacgtgacaataatttatccaaaatggaatatatgcatctatagaccaatcaatgtagttttgtaaatgtgttaacataccgtcaaataataataatatctattcacaacaactcttaagcaaaaaaaccaaagaagttacctcttaaaatatttaaatcagtatcacgataacatactttattcagtagaaaattatctatgcgatcaaaagaagtttaacggaaacatttataaaaaagaataattaatatctcaccaaacaaatgaaatggagaaattccaatggactctcttggttttgagtttttggacttaagactgcgggaagatcacggaacactttttgtccgaaatctgacgtggcagattataacggctactttgatgactcactatttctttttaatattataaaaatcgaagagagacgttaagattcaaattttttgaagacagaacaaaaaacaacacaaacaattaaaacaatcagaatttttctcgaattcatggaccacaataattactattcttcttcttcttctctatgatctctgcttccttttttctgggtatctaaaaaaactcaatctttatttctttttgttagcgaaaatg

SEQ ID NO: 34840 - DNA, 3000 bp, Unknown; identical to SEQ ID NO: 34839
  misc_feature (1)..( 3000): 2750-1469P.txt file - cDNA_ID_3082487; gDNA_ID_2926232; Annot_ID_203730

SEQ ID NO: 34841 - DNA, 3003 bp, Unknown
  misc_feature (1)..( 3003): 2750-1469P.txt file - cDNA_ID_3082495; gDNA_ID_2926232; Annot_ID_203728
caagtagaaccacttcatagcattgatgcattggtcaaatttcatataatgtcatatctaatgtgagaaaaacaaaactgcagctacgtttccattggatctggtgagaagaaggaagcagctggaaggaataggcgggcgagcggtagtgtacaagacaggtttgttaggcacattaaagcgtattgttcaaacggaaggagcgagaggcctgtacagaggaattcttccagagtactacaaagtggtacctggtgtagggatttgcttcatgacctacgagacactcaagctttacttcaaggatctttcttcgaatctataacggtttaaaaggttggtagatttgtttaggtctatttttggtgagaggaaaaaaactgtaaaaaccaaacagcggaaaatgataatgtatacgaaatgtagaattatatatgtagttgttggatgtagcttatacgagattaacatttgtattggtacaatccttttccattgttacatggcttatacgaaatgtagaatcattatgtatatgtagtgttggttaatacgtatatcaattgagggcccaatatacgaagtgaacattgtacagtcctagttaatgacccatataaatggtggagaaatttcggatggtaatgggcttgagtatccgagaaagccttttaacaaggagcttcaacctcaagtatcccacatcggaaagctaagagactttgatagaggaattgatagtataaatacacttcactctgtagggagtttaaaatcacgcagccatgtggtaagcacaaagcgaactattctttcgccttttactaaagaataccgtgtgctctccacgctaagtggcatacgcctatttttggagggctctcactttacagtgggacccaacatctaccctagtgtaaactttttatgtgtggctaacggtctatcaatgggctcaaggcaccaaagctcataaaatgtggctatatatgtttggcaatatcttcttaatttcttaaatgtggctatgtttctctctccaatattttgagaattacccttatgttattatgtattaacgatctatcgaatgatatatccttttcttctttttatgtcgcgttgattccacaacttgcaaatcctttgtttcgttttttggctgttgtttcttttgaatcacaacttgcaagttgcgaagacaacctatagagtcaaccctttgttgttgatgaatattattagttattacatcaatatatggaatctatctttgaccttatcaatcttctggtccttcagatacttatattctccagttgaagtaaagcttataacaacagttacgttatagagatgtaatattcatcaataacggtatatatcgatccgctaattcgtttaagacttccatctaaaacgtttttgtttacatattaaaacgtcatttttggtgtttccttttctttcatgatttcataagctaaaaaagaaatgttgttgttggccatattataagtttctttatttttcatcgaagatcctgatttaattattcatatatctttctgccaatcaacttaaattgtttttcaactaatactagaggccttctataaaaatttatccccattcatataaaacaaaactatactaaaaaaagctattactttgaattataaatcttatctccaaatctaagctaattaatgtacaaggttgattactagtcctacaaactataatattatagaacatttatttgttaagatgaatgaatatattgattcctttgaaacaggacacggttatagaactatatataatgttctagaacgacaaaagttatttacaaatactttggaaagcattttgcatattatttgcctcataaaccttcgttgactttagtgtgggcacgaaattaggtcactcacgggaattgtttcgaggattctacttcatttgatacgatcaccacttttagtagcgtacgtaccgcgtaacgatttcgacaagttttctcctttttcatatataggaaaatatataaaattagtttggctttacaaaagacagaaaatgaaccatatgggcatatgtattcttattttaatatttttttatcgatatgggtattgcttgaagcctgaaactccttgcgagtttttgatgaattgatctttttttttttttccacttgatgatcaatagatcttattttaaaatttgaggatggtcgtctttggttgaaaccaaaactgagtaatgttgttgtcacatttggagccttgtcgattgagaaaaaaatgctatatatattaatttggtactgaccgttacattgctcagcggttcagccgtttatttattcctctaacatttttaaataagctatttataaagaaatttataggatcgggcaaggagacttctgctaaaatcgtcgaagatgttgaagaatttttagtgccatacaaatttagggttaacgaaactacactcaatccgaaaaacaagctatagaaccgatcttagaaaggatctccaactgttttcagattaaaaaacaaaaatgtctctaactatatcatagccaaaataattactttttaatctttccatatttcatatttttcttaaaaacaaaaacaaaacatatatattcatgcacatatgatagataatatcaagaaatttttaataaataaagtcagatataatagatgtgacaaataatctaaaagaccgatcacatgtagtcaaagttttcaactataaatatgcagagatgacagttataagagtcgcacaaaaaactgcaaatcttcacgtgtcttctcttttgtttcatcacatgttctctcctttcttcacctctctctacaaatttaatcctttctcttttcggcatccctaggcccctttggccttttcttaaatacatctctcagaaacaaaaagtttgtatacatacatttccacctacacatctttggcatg

SEQ ID NO: 34842 - DNA, 3003 bp, Unknown; identical to SEQ ID NO: 28598
  misc_feature (1)..( 3003): 2750-1469P.txt file - cDNA_ID_3082500; gDNA_ID_2926232; Annot_ID_203725

SEQ ID NO: 34843 - DNA, 3000 bp, Unknown; identical to SEQ ID NO: 28597
  misc_feature (1)..( 3000): 2750-1469P.txt file - cDNA_ID_3082504; gDNA_ID_2926232; Annot_ID_203723

SEQ ID NO: 34844 - DNA, 3000 bp, Unknown
  misc_feature (1)..( 3000): 2750-1469P.txt file - cDNA_ID_3082519; gDNA_ID_2926266; Annot_ID_143309
aatttccaacttagggtatatattttcaccatttaaaagtgattttttattttaaaattagtttgtgctattatatttgagttctctatttccaatttaggatatatatttccactatttaaaaaagtttttgattcaatttaatattaaaatagtgtttgctctcatttttatttggaggattgacacaaatggtagtaacaaactctattatttaattaatgagaatattacactctaaaacactttttaaaaaacattttcgtggttaggcactttctaaagagaacgcactttgaatggataatttgactcatttaccctctaaccacatatcgctttatctctctccttctcctatcctttctctctctttctctcttatcctttctctctctttctctcactttatcgaaaaataaacaaaaatcaagccaaaaaaatagatttcttactttttcttttcgccctcttcaacaaatcatcagcttttatgagaaagagagattgagattcagctttctaaattttccgcgtctgctttgatctgacttgaaggagaatttttcagaccatcaatttgagaatctggctaatttagttacatgactcgttgaatgcttgaattggatttgtggtttgcttttcgttttatgtttttgctgtttgttgtaaaattaatttgattacttgctctttgattctttgtcttgcttctccaattacatattcgagatttttctcttgaattgggattaaagccttgtagtggacttcgaatcgtttgatagcaatggtcgaatcactaattgatggaactcgttgcttagttcctgttatgtggatttgattcatgattatatttgggttgtatcttttcagaaaatctggttatcttatgtattcatcataaacggtttataagttttttgatggttgattcacttattgaagaaccttgttgctagttctggttctctgaaattgatggaggttttaccttaaatttgagactaattttcattcacagatgttagattgatttctggacacgttcttctttacattttggtgcaaaattgagaaaatcatcttcacagaattaaatgaacagacctctgtggacaacgatttctgtacatgtttttctttactttttttatctcaaaatccaatcgagaagatcatcttaacagagttaaatgaacaatacttatgtggacaaggacttgtggacacgttcttcccttgaatttgtaatcatttatgttatatctgagatgttttgtatataaaatcaaacttggacttgtattttaaaactttaaaatccaatcggaaagatcatcttaacagagttaaatgaacaaacctctatggacagcgatttctcgacacgttcttctttacctttttatctcattttacttgaacttgtctctaagttttttgctgttaaattctatggcttttgaaaagaaatgacattgttctttttgtaatcgctgcgttagtaatcagtcattttgaaaataataaagtttttttaataatatttgtgtcagtcccccaaactattttagattttattttagttttataatattgattcggaaattaatattaacaaaattaaaaatgattttgatttggtttaattcactttccttatcatctttctcatcattgctaagaaattttttatgaagagacattttatttcaactaagaaagaggtgttatttgagaaccacaaaaaaataacgtgaagaccaaaacagctggaagttatgaagatggccatgtggttgcttatctaaatcggtaagagaatggtggcttcattaattacatctatacctaaatttttatatcttcatatagtcacatttgttcactatgcttatgaaggaaaaaaatcatgttctgaaaaatgtagtaatatttcatatctgtcttatcatattcgtatcacatgtggtctctctttaatgcgttcaaacgctttccaacgtatcaactgcctactcaatagtcaatacacacaaaggtcggtaacacatggagatggaaattatatttaggctttaaaatagattttgatttactattttaaaaaatttattttttcgcttgttaaattttaatttctaagttaatgaaaaatgtacagtcaagttaattttagtctttcaaataaaatagaaaatgttaaagtattttatactaaaatctatattggacaatgaaatatttttgtataaagtaaaatccaaatactcatttaaaaattactatcattcatggtataatctacaaattcaactttctaaacatcaaataaatccacttcgaaccaaaatcaaacaaaaccaaaagttcatatatgttaaatattttttcaaaaacatttactctagatatgtttttcttcagagagatgttattttaaaataatttttcttgttatttatagtttttgttttttaattttttgttctactttagcaacaacaccattttgctcacatatataatcatcatatgatttattcccttgcatgtacggtttgttgttcgttactttaatttgatgtaaacataactattttaagagatggtacagattgtgaattctgatggttttcataatactatcacaaaaatcttataattttccaacatataatttcttactcagccaaaggaaaacataacacattatctattcgactgatttgatctcgccaccacagttcatttcatataccgcaacaaattaataagcattttatgtattttacaacttttttattagcttttgttttataataagaaacttttaaatacaggaaaataaaataagagggtaggtggaagttattaacacgcattaatggcaactaactaaaatcctttaatatagctttgtttccgctcacgagattatttatcttcacaattttttttcgtctctcaaaccaacgcaaaagaacaatg

SEQ ID NO: 34845 - DNA, 3000 bp, Unknown; identical to SEQ ID NO: 34844
  misc_feature (1)..( 3000): 2750-1469P.txt file - cDNA_ID_3082519; gDNA_ID_2926266; Annot_ID_204918

SEQ ID NO: 34846 - DNA, 3003 bp, Unknown
  misc_feature (1)..( 3003): 2750-1469P.txt file - cDNA_ID_3082564; gDNA_ID_2926233; Annot_ID_142703
atatactgatgttttattgtaagaagtttaactcatgtagtcataagtgaaaacataattttttttttgggaaatagcttataggatttgacttatcaattccttaatgagaagttagtgcattttgatttatttattttaactcatctagaattagtgtgtatgaggtaaattaacatacgaggttacgccatatagatttgatctgatataaattttattttaatatgaaattgttatcacttaagataatgtgtgtaaaataaaaatcaagtttatcatgatgaaatagaaagttaaactataatgcaaaatcgaatgtgtaagatagaaatttgtttttagttaaatcctaaattgaatatagaaaaagtgtgtaaactacaatttagaattcaaatattatcaatgagattgagtgtgtagaattaaaatgtataaggaataaaatgcataaaactagaatttggtttaaaaaaaaaattattaaattaaatatcctaaaactgtataaattactattttattattcaagattcaaatattatcgataaaaaattatatttatgtcttagacgtacctgaataggcgggctttacctagtatattatatatacgcattactttgatcatgaaaacgttgtaaggcccgtaactacttcagattgaaaggatgtttaatcagatcgtataattgttttagcatcttgcaacaaatcaaacagaatgaaaaaaaaaaaaaaaaactaaaggtgaggtgatcacttttatttcaaattatatagtcaataaaatacatattattaacataaaaaaagaataactacagctgttaatataattgattttgtgactaaaaccaaccttttgttttggtaagtaaacctcacagtttgaaaataataaaatcagtgataagaaggaatcaggtgagagttgtctagtccacattttcttttcccaatatagtaacattataaattatttccattagtcacactattactaaatttgtaagaaaactaaatactcatacagatttctccataaatagaattcatcataggcgtgtgttctccacacttcacatcctaggcgtgtgttcaccacacttcaattctcttctttcattttcactattttttttctcgtttaacaaaagaaaccaaaaccaaaaggtcctaaccatggaatcaaacaacaacaacttgaacctagacatggagaaagatcaagaaacgactttcgactactccaaacgagctcaatggctacgagccgccgtgctaggtgccaacgatggtcttgtctcaacggcttcacttatgatgggtattggtgcggtgaagcaagacgtcagaatcatgctcttaaccggttttgccggtttagtggccggagcttgtagcatggcgatcggagagtttatctccgtttactctcagtacgacatagaggtggctcagatgaagagagagagcggaggggagacaaagaaagagaagcttccaagtccaacgcaagcggctatcgcgtctgcattagcatttactctaggagcgattgtgccgctattggcggctgcgtttgtgaaagagtataaagttaggattggagtgattgtggcggcggttacattggcgttagtgatgtttggatggttaggggcggttttgggaaaagcaccagtggttaagtcgttggttcgggttttgattggaggatggttagctatggccattacgtttggttttacaaaactcgttgggtcacatggtctttgatatgtatgtgtgagtttacttacgtgaccaaacccttcttcatgtttcatgcttcaaaaactggaaaaaaaaatgtaataagtagaattaatttctaatgaattccctttacaatttttaatgatcatgaccatcaaagacagtttataaatttaaaatattagtcaaacaaataaattgatactttaaaaacttatatgagtactagataaggttcgcccaaatagacgggtatataaatgtaaacttttcttaatagtatttgaattttgaatatagtaatttattctttcttcttgatatttaatttaatattttttgttttaaaaatttcagttttatgcattctattttattatacattttaatactatacgctcaatcttattaatgatttttgaattctaaatttaatttagtatttagaaaacaaatttttatattacacattcaattttgtaatatagtataatacatcataatacactcgattgttttgctaaatttagttgactactaatacatgtaaaacaaatttgttatttttccttttggttaagaattttttttactagatacatgataaatctagttgaccaatacacatgtaaattattttggttaataaaaaaatagatataaatgtataaattagtatatataaatttgagtttttttttttataatgttttctaacttttttaagagaaaaaagttaaaaaaattctgatacatatcaacatttgttcgattgagttgatacgtgacacaatcttatgaattgctaactttaaaaaccatactttagataataagatatttaacagatttactttgttagaaaaatctaatattaaacaacattattcaacttgaatagacttttaaccatgtaaacatatattcaagtcacctaacaccaaatttggatatactcgattctttttatttggtcactacaaagttgtttatgtctctttcgatgtacactaataatgttttaaacaacactaaaaaatgtatctatagtccaaaaatactttaaaatttgcaagcaattgattgaagtaataaattaatgtggagaaaatagagtagctagggaccagtgaagatttcttgaagatataaatataatcaataatattagttgttgacaaaaaaaaaacaataatgttacttatcttctgatcttcccaaaaaaagcaactaacaatg

SEQ ID NO: 34847 - DNA, 3003 bp, Unknown; identical to SEQ ID NO: 34846
  misc_feature (1)..( 3003): 2750-1469P.txt file - cDNA_ID_3082564; gDNA_ID_2926233; Annot_ID_203769

SEQ ID NO: 34848 - DNA, 3003 bp, Unknown
  misc_feature (1)..( 3003): 2750-1469P.txt file - cDNA_ID_3082623; gDNA_ID_2926234; Annot_ID_203806
atgtgattggatttcagtttttttaggggacaatcccattaaaaaaaaatctaacaaaaccaacaaatcataattgcaacgaattattaacaaaatattctaactaattcatacatttctcatttaaacgtactcgtacctagtaatattatagtaaaccaataaattaccattgcaactataattagtctgtttgtttcgtcaccgtatgcgacaacggtaaattttaccacagattattgttcgtttcgtcgctgctgacgtataatttatttttgtttgatgatgctgacgccgactctgccgttgccgcagatgtttatgttaagggcaatgcaaatctaaatccaattaactccaatggttatataaagagtagagaacaacatatgatttaaagcaagtaagcattagtgatttagaaccatatagtgaaaaagaccgtaagtattagttccaaacattcagacccattatacagaaacagacatagaatttggaaatttagaataaacccaccaaactaagagtagctaaaaaaacacaaatcaaaaagaaactcaaaattcccaagagatttgaatcagtgaataacaaaagtacctcggaatagatatttaacgtcgtatcagaagtaactaacgacgggagatctaattgagctaaaatcaccgaaaaagcgagattgagacggcggagagagattagtttcaaagaacttgagatcgatgactataagaaagaaatgatgaaagaagaagaaaaaataaggttaggtttgtttgtagtttcccaaacatagtaaggatagtcttgtcatttaccacatataacgcagcttttaatcgtttaacgctgattttaattagcgataataatttttagccgcaacgacttacgtttactgcatcggcatgcatccaccaaacgaacatcaccatttgtgtctgccgctgcaacttacgacgaccaaacgaacacactaaatttatcaagttataaaatacaacacctaagattctctgttctagattgatagttcgtagaggtggcaatgacttgctagctctcttttgttttccaaaattatttaccacctcaaaatcttgaaaacttttaaaccacaagatgtatgtataagaagtgtctctaagtttagcaagtggtatgaatgattaagtatccttttactcaacgcttacattttttttttcgttttttttttccttttttctgtttccaaaacttttaatggtatatcttaaactaagttttttcgtaatttatggtacttttttcgttgattttacattttaaaaaaaaaacagaactttcaatactaaataataatatttgagattttaaaaatgataaatgtatgagttgacctataatgctaaaaacctacaagtctacaaaaacacatgaatcaatatgcataagctataaaacctatatggacttgaccttaaaacctatatatcttgaccctatcctaaaatttaggtttcaatcaccatatgacatatctatcacatttcgagcagaatctaaaaaacatatcctatttatatgattttgatttttggccttaaaacccaaacacatcctaaactttaggtttcaatcaccattgacatatctacaatgttctatcgcatttcgagaagaatctaaaaagaaaaaactgatttgaagctttaatttattatacaattaaataatttgttagacttttaaaggatttagtcacgttgagggatcggccacgtcatttataagaataaaataatatcaaatcattatagttattattagtaacagtggtatagagggacaaggagataagcaggtatcgtttccattaaaacagctggatttgtcggcactcattcccattattgtatttatttcaccatatctgtcttatgaccaaaactacaataaacatataaataaaataatacgcaaataaaacaaataatcctcaacattttctgatttttaacaaaatctgtcttaaattataatttattttaaaatgttgatcacactcaatttaaaagtattacaattttcacaattggaaaattgttattagtgaaagtactacattatataaaataccccaattacgtcttgaataacctaaaagaatacaacaaaaaatagtttgaagaaactcattattgtttttaattaaaaaattgaaaacttgcttacaacagatttgatttgaaaatgtcacataaattttatgttcactttgtttataagcaaatgtattataatcaaattaatatggaaactctttaaactatatctgattagctatcttattatatactaataaataaatttaattagtaataaaaacacgttgcataattactttaacagaattttgtataaagttctcatttatattaatggtacttaaagaggtattttataaaaacaattatagggaaaatctttaaattgattatattgaataaattgaattattaagaaaacacgttgattaattagtttaactacacaaaaacttaaattgacttaaaactactctcctaatctttgttaaaccaaacaacccaaataatttactctgaatctttttttgccgtctagattcgtactctgcaacaagtgaactaaacacagaagaagaagaagaagaagacgagacgacgaatccagaaacagagagagagggagagagctttgaatatcttattgtacacaatcttcttcgcatggaagatttctgtttctcgtcactctgatatccaaaaatgtctggatctgattttgatttcgcggcgtttcgagttcaatgctaaaacatcgaagcggtttcgaatctctgagaatcgaaggaaaacgaagcgtgtaggttagggaacttaagattacgttgaagagaagcaagttctcttaaatcgcaactttggagaagtttcgttgttggtttttggtaaagcgatggagtcacgaatg

SEQ ID NO: 34849 - DNA, 3000 bp, Unknown
  misc_feature (1)..( 3000): 2750-1469P.txt file - cDNA_ID_3082635; gDNA_ID_2926234; Annot_ID_203802
gaggagaaagatgacaaaatttgtaactagggttttgtgattcatcctcattatgtttttttttttccaattattatttgttctacataaattatcttcgatgttacaactttttgggatttattatatataaatatttttttggaaactgtttttctcgttaatacgtttctgttaacttagttggtgcactaaatagagggaaaacagctataacggacggtgctcctttactcatatatatacaatctcttcatttgtttctttcgtctgtttctttcccttcctggttggtactaaagaggtataaacaatctactaaaaatagaaatatggtttatgtacatgtgcttctagaaattatacgtctacttagctatatataaacaccagctactagcagtgagcacggaactctatgaattactttgattcaccggatttcataaaaaataatgcttttacaatcttttgcgggacattcccacatcttttcttctctccctccattcctaattaaggtctctctcttttaatttttttccgttttgacaccatttgggtttacaacccataaccaatcccaacaacgtctctctgtttttattttatttttaatcaaccacacattaattaaaatataatttcatgaccagaatcgttcaaaacattttaagtttcatgtacaaacttaaaaggaaattggccctcaaacttagtcaaattctgttttgaccatcaaatttatacaaatatttatttatggccctcaaatttactcaaattttttattttgggcctcaaatttactcaaatactttttagaccctgcatatttactctagttgcacatcccaaaaactgttcatgctccattattggttgcccaatttgaaagataagagtttacacaagttacttcagaaaataataatttagaaaactgtgttaaacaatccaccttagtattactcaatcgaaaaatagaaaagatcaaaaaaggaaaataagcatagagcaaaccaaactcatctaaaagattagagaaagcaagacattctttaggtgactgcaccatcgaagttagccttgtgcaatcaatttcgaatgtttgagagtcgatccttcttgaaaaaatattcttcataccccaaattaaagctttcagctccaagtaaagaggggaaagacacatgcggagacactttgcaccacgaagtaccgtctctctggctttttacaaactgaattaggttttatttttcctatgtatatttttatagttttccatattgtggctccactagtaacacatgttattaacgttgaatcccactcaatgttgtaatttgatgtgaattatattaaaatatgtggtataaaatgcatattgatgtaatgacggttattgttttccgtttatttcgttttaacgcaatcttcttttaaaatattaacggttatttttgggttgtgtctttttattgtataatttggttaaaatatttacggttattttgtttcgttgtatctttttattgtaactttccgttcatatattgacggttattgttttttttgtgtcattttatcgtaactttttgttgaaatacagacagttatttttttaggttatgtctttttatcaaaatttctgttaaaatattgatggttatttttcccaattgtttcttttcatcgcatcttttcgttgaaatatttaaggttattgttttaacttattttgtttggttatgtattttttattgcaagtttttatttatatattgacggttattttttttcttttactttatcgtaacttttccgtttaaatactaatgattactttttctagttgtacttttgtatcgtaatttttcgtcaaaatattgatgatttattttttccctgttgtatatttttaatcgcatctttttttaaaaatatttacggttatttttccaataattatattgttcaattatagttgtattttttactttatggttgtgtatttatagttgcatctattcatttaatgttacgtctctttactatatttctttcatttttacatcacaatttttgtatattcaaatattgaatatatcatcataataatttaatatataaacacaatcaaatttttgtttttgtaatttaatccataaatacaaaaatttgttgaaaataagttctcccgcgatattgctgggttcattacctagtaactatagtaatatttattaaaagtttatgaattatcttaaataatataagaaagtaatactaacttaaacatatctaaaatttcagcatttttttaaacaaaaaaaaaatcagcattttcatatatgtctacaaataggatttgattttaaccaaaatagaaaacataaattcaaaaattcaaaaatgttacaaatatataagacattataaactattttttatgatatgttattgaataaaattcagataataacaacattttttctcccattattatttttttttttcgtcaacaatttttctcccattattcaaattgatttaagacaaagaaaatattcttcttagaagttgcatgtgtttttttggttaagttttaacttaacaattttacaaaaatataactcaaaaagataagcgaatcataactcatcagacctcaatctcaaacagctaaactcaagttttaaaaaacaaatgatgatgattagtaatatttttcataactcatggtaatgtgtttttgacagttgtagatcaggcccacgtggataaaagcccaaaaaggaataaagacgaaagagataaaacataaacccaaacttgctttcttctctaaaaatatccaaagcatcaaatccttaacctctctgctaattcattcactcctgaagaagaagaaagaagaaataagtaaataaaaattcctcctttttctggtcattgcttgtctaatgccaattcctaaattgggttctcttcatg

SEQ ID NO: 34850 - DNA, 41 bp, Unknown
  misc_feature (1)..( 41): 2750-1469P.txt file - cDNA_ID_3082681; gDNA_ID_2926234; Annot_ID_203785
gaattctcatcttctctcatcacccaaccaaatcaagcatg

SEQ ID NO: 34851 - DNA, 3000 bp, Unknown
  misc_feature (1)..( 3000): 2750-1469P.txt file - cDNA_ID_3082685; gDNA_ID_2926235; Annot_ID_203845
gcaccaggacagaaaacccaaacaacactaattaaggtgatatttagaacactgaattttgctaataatgcgagtgtctgtcgcagccacattcaccggatattgaaactatcttataagcttgcaggtctttgacaagtccattcaagaaactgtatggaattggaacttgaagatcaatacactgactctccggttcgatcctatttagttggctgaacccgtggatggttcttcttttctatagaccacacttttggtcttgtctctctgtagtcatcatgtacacacaaagtccctcgaacccgaaaccgtatttgcatcaatgcttattactgtataatgttatttacaagatagagatagtcatagaaaaattaaaacatcaaaactgatttttaataaagtgtatgttaatagccatgctgtttcttaggaaagccagtttattcacgaatccaccatttttctacttcaaaatttataaatgtatttcactctttttgatatgattctttttgttctatatgcttttttgaatactaaaagctatcagatcgttcgttgtgtaatttttttctataaaaaatatcgttgatttaataaaaaaatatagaaagtaagatataaagatcatgaatatataattttcttgacgaaaaattattttcttgatattcagaaaatctatattgagagagcaatacgtgtccaaaaacgtaattttctcatctgggcttctgaggaaaaaaaatatttgtatcatttgggcttcagtgtctttataaatagtgaaaacacaaaaccctaagagtcgctcttgctctcagccgtctgtcttacctccagaagtcgacgacaacaatggtacgccgcttttacaccattttgcagctttcattgccactttcgtttgtttaggatctgtattagctctttgtttcctcgaatttgagcttctttcgtcaaatctatattggaatctggcttatacttatgtccctgaggattctggctttgtttgatttcgtagtttgtatagtgaatgcatcgatgctatggtgatatgtgactcttgtttctgatgcttatcgccgtttgttgttgattcataggcaccgaagaagggagttaaagtggcttcaaagaagaagccggtatgctctcttagcttttcctttaagcattgtttgtttttctctgagtattattattagtcttggtggagtttctcattagatttgttgttgtgtgtattttaggagaaagttaccaacccattgtttgagagacgcccaaagcaattcggtattggtggcgctttgcctcctaagaaggatctttctcgttacatcaaatggcctaagtcaatccgtcttcaaaggcagaagcgtatccttaagcagaggttgaaggttcctccagctcttaaccagttcaccaagacccttgataagaatctcggttagtctctttttcttatggttattcagaaatctatatgtttgtatgatcagttgcttaatgtgtgtcatgtaattgcagccaccagcctcttcaagattcttctgaagtataggccagaggacaaagccgcaaagaaggaacgccttttgaacaaggctcaagctgaggcagaaggaaagcctgctgaatccaagaagcccattgttgttaagtatggtctcaaccatgtgacttacctcatcgagcagaacaaggcacagcttgtggtcattgcacacgatgttgaccctatcgagttggtggtctggttacctgcactctgcaggaaaatggaagtcccttactgcattgttaagggaaaatctcgtcttggagcggtaaataattcaccactccatggatgtaaacttccattaagagtttttcttactttaatgttttcaccctaatttatgttcatttcctgcttctactctccaggtcgttcaccagaagactgctgctgccttgtgcttgaccactgtcaagaacgaggacaagcttgagttcagcaaaatcctcgaggccatcaaggtaattagctgaatcagcttttgacaatggaatagttttgaaatgatactctcatgtagtcttcaaaccatactcttaacgtgtttttttgttggtgtgaataggctaacttcaacgacaagtacgaggagtacaggaagaagtggggaggtggcataatgggatccaagtctcaagccaagaccaaagctaaggagagggttattgctaaggaggctgcccagagaatgaactaggcatcataccttatgttctctgctatgaaacatatgataatggttttgttgtttagcgatattttgaaaccttgttttattttaatttctatgctctttcggatgttaccaccctcttcagaattttatgcagttttgttatcaatttcacatataaacttttatttgcaaaataaatccttactttattgtggtttttacgttacaaccgatataatctggcctgatgaataatgtgtaaacatcagaggtggatcagctttttgaaatgaacatttagtgatggtattgcccaaacgcggggactattacatgcgtcaaaaatggaatcctgcaaattgagcttttctagagattgatatttgcatatgataggaaattatacagcgaatagaaaatggagagtcgagcataaaaggctggctttaggataatggtagattgggttgtattgtaccaatgaataatgggcttcgaattcacacgcccagtatgacgtcatgtcaaaacgtttttctattttgggatcatttttcaattacgattaaaactccattttattattattccaaataaaatataaaagaaaaataagaaagagagaaaaaataagtgtctcattctacaaatatatataacaacagccttcaatcttccatatctatctctctccctctgctcggcgagaataatcacttaatcagacatcagaagcagcatgatg

SEQ ID NO: 34852 - DNA, 2473 bp, Unknown; identical to SEQ ID NO: 28621
  misc_feature (1)..( 2473): 2750-1469P.txt file - cDNA_ID_3082718; gDNA_ID_2926235; Annot_ID_203849

SEQ ID NO: 34853 - DNA, 3003 bp, Unknown; identical to SEQ ID NO: 28620
  misc_feature (1)..( 3003): 2750-1469P.txt file - cDNA_ID_3082722; gDNA_ID_2926235; Annot_ID_203848

SEQ ID NO: 34854 - DNA, 3000 bp, Unknown
  misc_feature (1)..( 3000): 2750-1469P.txt file - cDNA_ID_3082726; gDNA_ID_2926235; Annot_ID_203847
tctaattatccaagaaacatgtatggattatacagagcaaccaagatgtaacttctggtaccggaatttctatttctcgatcccgtgacagtgacagatagtcccccagtatcaggtcagtaattgatacatcaatttcaatatctttttgtttcaacaagctcttgttttgtctgtgctaacctactttgaatgtgtgtctgcagattctaaactgttctcattcaaaataagccatttagggtattacaaagaaaatatataataatattacaagatttggagttatagtagcttttcctgtagtggtgataggctttctaagttttaggaggtaagaaaaagttgcatctattcttttgcaattttaatttgttgaagttatcttatatttactcaaactcaactctgatgtccttttgttgctctttctcttggcagtgttgtcttttttgtagataagaaagtaaaagttacaaatagagttttgccgtcttgctttgccggaggagctttcttagtcactggtaacttctcgatctgattttcaggtgcagtcttccggcaaagttcttaattaggctttggttcgtgtaagctaaaacaatatgttatgtttttgactggaaattctcgactgagtctatatgtatatatgtatgccgcctctgatttcaagggccttctaaatgtataaactgtgcattgtccatcaaaaatgatggatattatctttaatacaaaaaacatatatgagtgagagaattttactgtcctctgatcagacactatatatatggctattttagttcttttattattttattcttttatttcaaaacctccaaaattcagtaatgtgtttattcaatccaacacaaacattgctgcaattgttatcaccaaaaatctctgcaagagcaagacccgtctctaaaatggtgaaatctattacaatctctcacaacaatttctctactaaaaagcttcgagatcatcttcattacaagatgacaatctccacagattctgaggttcttgatgattctcactggagttccaggccttgtcttcatcaaacagaacgcaatagccagtttctcactgtggtaagacaaagctatctctttatctttctcgttaagatcaagtaaaacctccttagtgtctgtaacatatccagcttctctcagcctctgcattatctcatcgagcatagcatagatcctttcgctctcttgttgagattcgtctcctacaacaaactcgtgaaccactccctctacttcaacatagctacatcccggaactttattaatgccctttacctgtagagagaatctgtatttacttcagaaactgtgcaacagttaagaaaagagttggaaaagagggaaatagttttgcattgcctccatttcgtgtctgatacacttgacttccatccacctccctgttttggcatagacgttagagagaagcacatatgctccactgttcataggatctagctcgatgagtcgcttgagggcaccttcacaagtcttgatatccccaagcattcttgatccgcttaagagagacccccaaataagtacatcaggctccataggcatagatgctataaagctctctgcttctttgatcaaaccagatcttccgtagagatcaaccatacaaccataatgctggattgatggcgtgataccaaattcctcaatcatcattttaaagtaagattttccttcgtttattagacctcgatgtacacaagcaccgagaatgcccacaaatgtcacagagtttgggtttatgttgtcactcgtggtcatctcagagaacagttggaagcactcatctgtgagaccgtacattgctaagcaacatatcatagcactgtaagctttgacatctttcttggatcccaaggcattgaaaacccttttcgccctctcgaggctcccacatttggcgtacatatcaatgagagctgtgcctaagacaatgtcaatctcaacgtggtacttatcgatgtaagcgtgaacccatttcccttgctcgagcgcacccaatcgcccacaagccgagagtacagtcgacattgtaaactcgttgggtctgacgaatgcttcgtttggtttaggtaattgcatctcccggaacaaatcaagcgcttctttgtatttcccacacataacgtagccgttaatcaagcagctccaggaaatcacgtttctttcaggcatttcgtcgaacagtttccgcgcatcatcgatcaacccagctttggcataagcattgaccacagagttccaggccggtaaatccttcgagcccgagtcatcgaaaactcgctgagctgatctcaagtcgccacaggaagaatacatgttgagcagtgaagttcggacaaatgggtctttgtcaagtccaaaaagaagaatctgagcatgagttcgttgcccaagaggaagatgaagcggattgtggaaagaagggagaagaaacggaaaggtatgaaaatcgggagagacgcgatggttgcgcatacggaggtagactgagatcggagaatgtcgttgaggcgacgaaacattgtgaacaatggcacgaatgatgatgttccacaagaaagattcaagctttagatgtcgaatatgaaagatgggatttgcataagctattattgccgcccccttgctcattgtctcaatctaacaagtgtatcagaaatcgattttaaatatcaagtacggttttgacaaaaccgaattgaaccggtatttaaatgaatatttggtttcttaatcaatgtacggacggagaggtaacaaaacaaaagggttttgtcctaattcaattttgcagagatggaggaagaattgctctccgccgtgccgtgctcttccctaaccgtcgagtcagttctccgtgtcgcgacggtaatcactagtatccaattgaaattcatgtttgtgttagtgtgtgtatagatagatg

SEQ ID NO: 34855 - DNA, 3000 bp, Unknown; identical to SEQ ID NO: 28613
  misc_feature (1)..( 3000): 2750-1469P.txt file - cDNA_ID_3082737; gDNA_ID_2926235; Annot_ID_203838

SEQ ID NO: 34856 - DNA, 3003 bp, Unknown; identical to SEQ ID NO: 28612
  misc_feature (1)..( 3003): 2750-1469P.txt file - cDNA_ID_3082745; gDNA_ID_2926235; Annot_ID_203836

SEQ ID NO: 34857 - DNA, 3003 bp, Unknown; identical to SEQ ID NO: 28611
  misc_feature (1)..( 3003): 2750-1469P.txt file - cDNA_ID_3082749; gDNA_ID_2926235; Annot_ID_203835

SEQ ID NO: 34858 - DNA, 3000 bp, Unknown
  misc_feature (1)..( 3000): 2750-1469P.txt file - cDNA_ID_3082761; gDNA_ID_2926235; Annot_ID_142736
cacaaataagatattattttagtgagcctacatatatttgaagagaaaaaatatttttgcaaaccacttaataaataaactattgtgtcatatactcctgtgactcatgtttgattatagataatagtgacaaattatcgtcgtgcattccacaaaggaggcggtgttggagttatacacgtgatttaaatgtaatctccaaaagaaacttcagagtaaaaaaactacgaacgcaataattcaccaaaagaaattatctctgaagtgttttgattcgtttgtctaaaggaaattatcccaattaaaccattgatcactatgtacactccacattacaacgcaacgacgtttcaaacttttcaactaatattctatgcatatgcatatgctataatgttaataagaggaacgtacgtaaaaccaaagagtatagggtgtacaagactaatattctgaaaattacaggtaaaattgtaattgttgaaaaatctttagcacacacaacacaagcatagctaaaggctaaaccaaaagtcacgggaacaaaggtagtaaatatcctaaagttacaaaaactcatatacatgtagtatgtctgtcttaagagagtctacaaggaaatcatatccaaaagtgattgtgatgaatttttatttgttatgctaaagagattatgatgaaataacgtctacaataaatcattaaatactccatacacgactccaccatgaatgggagatcaaaacaattaagtaaactacaaacaaataaaattgaataaaacaaataaacgtgtgtcccctaaacgcaaaattaaaagatacaaaacaatatatcctctcactcactcacgtcgtcgtcgtactaagcttggccgctttgaacggcggatgaagcagcccaaactcgtccttggcatcgagcggcctatccgtctgattgcgcgtgggtttcacgcgccggctcccaagcgatttatgcgtgaaaccatacatttgaaggatctgattgtctccgaaattaaacgctctatccatctgccgtagacaccgttccaccggataatctccaaatttcccgcacggtttacacccgacgaaatgcgtaaccaatggccaccgatggtctccaaaacccggtttatgattctcaatcatctcctcgtaccggtctaccaaaatcccccaataaccgtgcaagtaataaccactctctagataaactttgcctccccatttctctctctccgtcgccagcagataaaccatcgccgattgatcgtcagcttcgaaagcgggtcggtctttaagttcccgggtcaagactttacccgcttcttctcggatcttcccttttgggcccataggagcccaagcgtcaagaagatcaagcgaccactgtgagttcctgagcaagaaacttcccgtgttgagaccaatccaattcttctggtcataaaccatctcgttccaaccatgcatcaccaagttgtaatctttgtacctctcccatggaagctcgaacaccatgtccgtgaacatggcatcactatccatccaccatagaaactcaatctcaggatgtgacaagagtaacttcctaatcaacggaagcttagcccagaatccagccatctcagcatcgagcaacgccatgttgtagaagatctcgattccgtgtattctacagtaatcgattttgttcttaatcgatttcaagaggtaatggtctcctacaggattctcacacggtttaggagctgaacctgtgacaagaagaaccctaggcttgtttggcgccacgaaattagggaagctagggttttgtttgagccaatcacgtctctgctcatcccaatcagagatcttgggaccaagagaataaggtttattagtccggtctcgagatttctcttcgtctccttcatcaacgaatagcttgttgatatcgaaggtctcgtagctgttaccaccatttcctccgtcttcggacgacgtcgttttggaagagacctcgacgaggacacggtgaggctcgccgcgtttacgcgtgtagaagaaatgctcacggatctcctcgatatctttctccggcgtaccaaacttaccggctccgattgtgccacgtaagacgatgacggtgagaacgagacaaagaatcgtcactttcccttgacgcatgaatctctgtaatctccgaaaccgatgcgctcctatacacttctctatcatcttcacgcagatctggtctcgattcgaaatctaaaagagaggatcagagggaaatctaaataaaaatgtcttctttttattgtaatttgtaatgacgacaagattattacgcgttttggaatttctacctcgttaatggaaaggaaggatcaacgaagagatttattagataaagcttcagaaaaagcattcaatgaagatttaaatttggattaaacaagtaaacaaaatatatttatttaataaaaatatttgaatttttggaaatgtcagacagaacatgcctgcctgtctgtctgggacgcgttaaaacttggtgcggcggatcagtgtagtgaaaaaaacactagtggtaaaacactcttcagatataaattgggccttaataatctaagcccatttgtttggttgataacaatctaagcccaattaaaatgtcggcctaaatcacgggtaatttttgttttccgttaacagaaagcggtaagttgttaaacagaaaacgactggcttggagctcacacaactgtccggattaaattagttatgtttccgtttttgtctgttgtaaatttagtgcgccaaccgattatagacgctagatatttttaccgttggagattaattaacggcctttcgtaagtaaaaaaacaaactgtatatgatctgttcttgtttatttttcaattcaggatttagaaagatcattatatctttttaatcaatattctgaattctccctggttaaggaggagggtctccgttaatg

SEQ ID NO: 34859 - DNA, 3000 bp, Unknown; identical to SEQ ID NO: 34858
  misc_feature (1)..( 3000): 2750-1469P.txt file - cDNA_ID_3082761; gDNA_ID_2926235; Annot_ID_203831

SEQ ID NO: 34860 - DNA, 3003 bp, Unknown
  misc_feature (1)..( 3003): 2750-1469P.txt file - cDNA_ID_3082773; gDNA_ID_2926235; Annot_ID_203821
ataaattaaaactgataaaaatcaagagagtcggctttctggagagagttttgagaatttgagagaaccgtcgatgtggcaacatgtgattgggttttcaatttcaacaaaaaaataaatgtgtgcgcgttctgttctatcttctttctcctctctgcccaaacgaaattgaccaaaagatgcaaagcccaatcatcgtttcttctgaaaacttttcgcatttgatatcttttctttgaaactgaaatcaagatacacaaactgaaaccaatttgttcaccaaaagaaaataaaaatgcgtgggtttcgatttcaaagatattcaggaaaagatctccgatagctttcgtctatggcaacactcttttcaattctgggttcgagcttcgtggttttaaaagcttgtaatttcgtgtgatcaagctcctgcgacgccgtttgatgcgattcaactttgaaaatttgatgaaaagcctcttggttatgcttctattgctcaggtattatagattatggtggaaacttaacaattaagtaaacatgattgagttagagtatttaggagcttgtaaagcagaaggtcttggtgatggacccataatgaagctgtatatttatgttgtaattgaggaagataatctggtcataatgctttctagaattagctactcttgccgtagaattattatctcttgacgtggaattgtagcaacattgtcaaactctggttatgtttatactaagacaatatcatttatttgctttcttaggttcacagaggaagtataaagggtaacaagatgaatgttgttgtaaaggtgaacattatcggaagttctagatggggctgaagcctctgctcgagctatgacagaggtcgaccccaaaggaattttcaagtccacgggtctgttttccttttactgatcactctgttttttttcctttaacttatctatggagtaaatgtgaagccatactagtctcatttgagccctctaaaatgcaggctatggtaactatttgtttatgcttgctccgtcaaccaatgaatcattcagacaaatggtcatttccgatgcagtctctgttttgatgccgaggtaactgagattacttatggtaactctatggttcttgatcatggttggattgacactttgaacaagaaatgggatttggttcattgcattgaggttagcttaggtttggcttttaataaagtttctatttgagtggaattgtaaaatagaattgatgtctagtacgtgtttgatgaaattcctctaagagtgaaccttaaatcgtgtgtattaagctttgtttcttgataaacaactaatgatttagagttctcttcacgttattgtgatggaagttttatgttcatacactcaaatgttcttttatgttcgaactctttgctatatatttgttgtaaccaaattttaaccataacacttaaacacataatcacaaattttcaaaactttatctacaagtttaagaagcaaaacactttaaccataagtttaagaaccaaaatacataaccacaagtttaaagaaccaaaaaacacttaaatttttgttcttttttcaaatctattttaaaatgtttgaaaaatgaaaacaatgtatatttaatattttatgatttgcaataattattaagttttagtaaataaaataattttaaaagaatagtttttttcagagaaccccattagagagaatctgtcattggaatatgaaaaactaaaaaaaaaataagcaaaagttctcttgtaatttttgttgaaatttaatcaaaaaaaattgagaaaacctctccatgagctctctccattggagatgctctaaaagcttaataggagccttgccagttgccacaacttatacgactaattcagactctctcgtttcttttaaaaggatgatattgttcctaagcgtagagtagacgttttagtaaatagtaattgaggaagaaacaaaaacacataacgagggtcgctatctttcgcttagaagtacgatttggtccattgtcattgtcacttttgtaatgcctcacgtgatgccatgcacttttgtctctcttatttatttcccctttttttaccgggtgactaaatgatacttcaatacttatttacatagaataaaatcttattaagttcatgggaccgatggaccatttctacgaattaaccgcaaactatcggacgcatttcatatgccgacatggtactatagtagaagaaagaaaaacaattgtaatacaaaattatgtacatcatatacagaactataaaacgcagaaaaaataaataatacaaaattgtttacatcatgtaaatgcagaaaatgtaaagctctctagtacaaacaaattattgatgataatgttaaattcctattggttaactcatgagttagattaatagaaagttagaaacggtaactgtatatatacccaaaataatgaaatatatcaatagaagcagtaatacgattagcggctaacaaaaaaaagaatggtattaatatatatatattttttttgtcggcaatggtattaaaatggaatttattgtactatcattttaaagggcccaaaaatggcctataaaccaaccagacaattgcacacatttgtcggtaagagagcacaataaatcgttttaacaatgggtacgaagaagcctctaggcccaataaaacagacctagtaagataaacaggccatcaatacggcgtcgtttgataatattcaatcggcgttagaccaacttcttctcctctctttcttcccggcggagcgactacgatgtttgcggcggtgagtgtacgagcttctctcaaaactttgttccatggaagacacagctcatcttacagccgatattgtacgttattcgttaatttcttgtatcaatccttgctctttcgagagattttcagatatttgaatatctggaaaatgacacttttcgcaatg

SEQ ID NO: 34861 - DNA, 3003 bp, Unknown
  misc_feature (1)..( 3003): 2750-1469P.txt file - cDNA_ID_3082780; gDNA_ID_2926235; Annot_ID_142726
aagagctactatgaaacgtagtttcgattgattttacaatgagggtagtagaagttcgatacttacttctccatctttcattcctttctcgatatcaactgtcacaaagtatccctcccgttcgtatttgacattagggcatttgtcacagacctgaggggaagaagaggatacgtcgttaaacagtaattaggttggaacaagaccatctgtgacaattgaacatatccgtcctttacctgctctgtcatctgttggaacattccaggaccaatttgtctgtgatagacctcgttcctgcagttacactttctctttccaggagctggttttatcacattcttttccctccatacctgatagttcaatgtggaacattctcactgagaacttaatgcaatttcttttatttgcattaatgtaaaaaaaaaaactgtctactctaaccaaaacatcgcctgaactgaacctaaagaatgtctgaatgacactatgaaatctagtttacaaatttctattgattctagtacatttggatcaaagtaacatttcccagatgagtaacatgtattagtgatgacaataacatcctgacacggagcttaacataccttcatagagcctcccatgtacaaatcttctagagttgcctcaagttccacaattacgtcatcccccttgacaaccttctcttcttcctccatcgaacctccaccaaaaaacctattaaacacatcaataatctctgcaaattagcaatctgcaccctttaaacacaaatgtaaaacattatccaaatttaggaactattcacgctacagagtaaagtcccttctttaaacacaaatgtaaaacgttatccaaatttaggaactattcacgctacagagtaaagtcccttaacattaccaaattcaattgtatccactatcaataaataaaactcacacgaattctatgttaagatgggttcaacaggatagaagatcagacagatcctagtgaccctgtatcttgtacctctagttggatcctaaagagttaccatttgcagaaaacttacgagctgaagatgtcctgcatattcatgccgcctcctcctcctcctcttcctccatttgcagaaaactgtttaagtccctcttcaccatacttgttatatatctccctcttctcctcatccgataacacttcataagctattacatcaaacaccaatacgtcaattctcaaaactaaaaacgggtgagttaacaaagagagcagaatcacacaagttgcaaaacgaaaataccattgttgatctcagcgaatttgcgagtcgcttcctcatttccttgattcttatcgggatgatacttcaaagctagtttcctataagctctcttgatctgttcatcagatgcacctttcgggacttgcaacacatcgtagtaactcttcctaaatccacaacacagattttctaagcattcacattttccacacatttctgaaggaatcgaaagatgttcttacccggcaaggacgcagatggcgtaggaaagagcgaacagtacgatacacagctccgaccaccgaatcgccatggaaacggaaatcggatctctcccaaggattactccaacctgagattcgtttcgattttaacaatgaaacctcacagaatgaacaagaacgaagatcttcttcgctgatttttatgattggaaaactcgaatcactctctctacttgttttcgtggaaacgattccaaaactcgagcctcgtggtcgggttacgtgtacactgcaatgcttaaccaatcaggattaagtctctgacgatcgtaaccaataaatattagccacgtggataaaccaacgtcgaatcgctgactgttcttttcgtcgactttaatgagtacgacgtcgttatactcatataatctatacaaggcgcattaataatgaagcgggcctgtaactcccctacgattgttattcaataaatgtggcctaacccgattaaaaaccctaggttactgggcccatacaaaatcgagattgttttatgtaaaccgatctggggaggccagatccaaactagttttgcatatttatgcattatggattttgtacctaccatattaaacttgttaatataatgacaaaaccgctgctatgagaaaatttatttctttaatctttatataatctagactatcttagtcacacattacgttgtgcattggttaaacactactggagtataaaacaaaaaaaggtggttaagtaataaatacatattttgttgcttattaattacatgcaaagaaacatagactggtttggacaatcatgtcatatgtcaggtctcttgattcttcgcatcttcgacgaaacattatttactagacatacaataataactagacatctcacacgagtggtcccgatcccccactaataccattttactgtccattgaaaaataaagaaacgttgctgacaatagtaaactaaataaaattggtgtttacatattttccacgatacgaagtaaaatattgagaaagtattacgcttatgattttattaattgttagatgattaactgaatccgaattgagcagtatgattagaaacaagtcagaaataataaatgtataactagtatttaaaaaaaaaaaaaatgtataactagtatttaaaaactatagttagcatctaattagagacactaggacgacccagctggacagctggttagtagctctcgacctatgatgagcgcctacgacttttgtttcaacatagacaaacgtggctcgttctatcacctgaatatataacccactcctctctattcttgcatgtcactcctataaatatttaatactaaaccaatcactttttgttgtgtcgtcactttacttctctttaaataatctctttctctagtgattgactttaggaacaagtgaagtgagtgatttttaataatcgccggccgagagaatg

SEQ ID NO: 34862 - DNA, 3003 bp, Unknown; identical to SEQ ID NO: 34861
  misc_feature (1)..( 3003): 2750-1469P.txt file - cDNA_ID_3082780; gDNA_ID_2926235; Annot_ID_203819

SEQ ID NO: 34863 - DNA, 3003 bp, Unknown
  misc_feature (1)..( 3003): 2750-1469P.txt file - cDNA_ID_3082823; gDNA_ID_2926236; Annot_ID_203885
tgttcagcgccgccgtatacttgcggcattggtgaaggttgttgatgatgccgtctcatcgaattacttctcaccgtagatccaaactcggagcgtgtcccgacctcggaaattgattctctatcatcatcttcttcctcttcctccgctgcgtccgaggagctcgtggtgctgtaatgatcgtgatcctcccattcactacactgtacttcctctctctccgtctccgtctcttcctccacctgatttctcattgattcgaactgcttctgcttttgcttcctcgtgtcgaagaaatcatactctgacctcactgtttccgtatcctcgtcgttgaatcgattatcggagttatgtttcttctcttgagccttcctgttgaagaattcggaatcgggaggagaaggagggtagaaattctcccagttccagacggaggaggcatgagaaggagtagcggagtaagtagagttctgataagcactgggatacaaattgggcatgaaattggatctctcacttctcggagaagaagaaggacttgactccgagagaatatgaggcagtctaggttttggttgctgtttccggcgtcgattggaagaggtggacatgactgaaggctgcttagaactggcgacggaaggagacgtcgaaggaggataaacagaagaaggagcaggcgacggcgaaaaacgtggagggacaaatttagccggagattgttcagaaagcggaggagggggagtatggaggaaaacagccggagtttgatcagatacagagagaggctcaccggaggcgaatgaggaaagagcagatccagtgatacgaagcgatcggcagtaatcggcgtgagcggcggcgagatgatgacgagcgtagacagcttctttcatcagacggcggcgatccttacaacgccgtacagcatcttcgttatcgagcttggacgccgcacatcccatggcttatttttctccttcaggtttgttcttcgttacggtggcgcctgagctcacggcggctctgcattattcacaacagaatcatagagaaaagggaaaaagttagatacagctgtttccagactttcccactacactatactacttcactgtactctcaattttctcatatttatcggaaaaacaaaattataaccgacaacaaaaaaaagttaaataatcattttcaaatggtggcattaacctcgattaattttacctttcggtttctttttcagtttgttttttagtaaaaacaaattagaatttaaaaaaaaagagacattttctgacacaattattaacggttaccagaaccaacattacaataatacggttaatcacaatattaaatagttgatcaaaagaaccctagtcattaacgttttaaaaagtcattttttagttactagtagctctttaattaattaaatgaaatattgtgaaataagtaatgcgaagcaaaaaaaaaaaaatgggtcgtggtcctcgtggctcgtggatctgaggcttacgagctaaggtagaagatgaaaaaagcaccgatagagaggaaaacggcaagatggtgaaaagctgaagctgaaaacggtgaaaagttttactttcctctttggaaaaagtctttattagtgaatagaacaaaaggaaaccacatgcattcttccttttttttgagctttctagtttctttaccaatcactttgttccaaaagactcatcatcaccgccctgtcaaaaacaacaccaaaatctagatgctttttattaatcagatattctctggtggagaccctgcttattatataactataagtaccaaagagcatctacgattatgtgtattcatttcacttcactacatgtggcttttttgttttatgagtatattgagttataaagaacaaatgaatagcaatggtttactttgtaagtgcacaaaaatgttgcaatatatattacaactagctaggcaaaacaggaaataaagttattagttggggtcctggtggccgtaaaatgatttgactgagtccaagaagtggaggcctcaccacttaagaaaatgactcattctttgaagtagtcatattttggttgagaaaaatatatcgcatgactcttatatagttttattatatgtacgtaatatatagagtggatcacaacttggttaccagtaccgacagaaataatctccacccatgttttaacttctcttttttttcatgtgtaaagaaattttttgtgtgttttctatctttcatttggcatgttttgtagataaatatagccaaaaagaaagaaagatataagtgttatattgacaatacaagataatctcgtaatgtaatagctccaattgttgaaaagaaaaaacaaaaaatataaagagcagtttgccatatatatcaattggaaactattcagttttaattccattttcatagaattttttataacaatctcaaatccaaaagctggaataaagataagtgaattgggcaagtgaccgtgacgtgacgaccaacatgaacaatttttttttttttcctttacacttccattaaaacgaaaattacaagccttaaaagcccatgacggccacatagcccaataaaaagcaacaaaatacattcatctgaagtatataaacggcttcctgaaaactttgaagtagctaagcaataggacgtgaaacacttatatttgaagattaaactggattgttactttaagtttcaatccaatttcgtaatgaccaagttcgtttttaagtgtagtctcattattcgaacatctcgcagaacatgtttacttgacttgcgcaccagttgttcgtcaaaatgtccacatgaacttctcaaaacaccagtgtttcaatgaacttcatgcttacatcttcaaatgatttttgctgattttagtttcttttatttatttatatactatgagttcgagaaactcttggagtcttagaaagtagagtgaaatg

SEQ ID NO: 34864 - DNA, 3000 bp, Unknown
  misc_feature (1)..( 3000): 2750-1469P.txt file - cDNA_ID_3082827; gDNA_ID_2926236; Annot_ID_203884
gtaattaaaataaggatgaaaaaaaaagatctgagaaaacagatattcctttaccaatgtacatttgaagacgtagaaaattgtagcccctctcagcatctaatggcattagggtagtaagaaatctaaactaaactgcattaggtttcttcttttgactaacattttacctccgtaagaatcctagattaattgtaactcctaatcctagtaatcaggagaagaaaattcacaaaagtcaaaaaacaaatctgactaagttgttaatgtctaaggtcgagctaatcaaagcattgacctctgtttttgtctattgaaaaggttagagggacaaacaaaacaaaaaaaaacaattggcacacgcgtcaaataattcgatcaaaattctcccttaatcgcattatttagcacggtcctattcttagaacgtgaaagaaagaaaactctcagaaaatgtaaaaaatctataataaacaattcaagatagtggtgatccataatgttgggatttttatattttctacgctaatcaggatattccgagattcttgagagcttaacaccgtccattatagcaaaatcaataattaaaaatatgtatgacaagtttatgaccatataaatcttcagaagacaaaagaaccatttagtggacaacaacaatttagccggacgtcttttcgacgacaagtttcttgccttgtttaattctgttttcttattgtttaatgagagcaagatccatgcccgtaccaattacggaagataataaaataagggtgaaatttgtggtaccttgttggatgtgacatcatgcaactggtcaagaagtatccataggcatcaaagtgcatcttcagattgcgaaagcctgtaaaaataaagcttccatggtcctgtagttttctccattgaaatctacagcttctggttttggcattacaactcaaggaaaacataggcatttcactctactttctaagactccaagagtttctcgaactcatagtatataaataaataaaagaaactaaaatcagcaaaaatcatttgaagatgtaagcatgaagttcattgaaacactggtgttttgagaagttcatgtggacattttgacgaacaactggtgcgcaagtcaagtaaacatgttctgcgagatgttcgaataatgagactacacttaaaaacgaacttggtcattacgaaattggattgaaacttaaagtaacaatccagtttaatcttcaaatataagtgtttcacgtcctattgcttagctacttcaaagttttcaggaagccgtttatatacttcagatgaatgtattttgttgctttttattgggctatgtggccgtcatgggcttttaaggcttgtaattttcgttttaatggaagtgtaaaggaaaaaaaaaaaaattgttcatgttggtcgtcacgtcacggtcacttgcccaattcacttatctttattccagcttttggatttgagattgttataaaaaattctatgaaaatggaattaaaactgaatagtttccaattgatatatatggcaaactgctctttatattttttgttttttcttttcaacaattggagctattacattacgagattatcttgtattgtcaatataacacttatatctttctttctttttggctatatttatctacaaaacatgccaaatgaaagatagaaaacacacaaaaaatttctttacacatgaaaaaaaagagaagttaaaacatgggtggagattatttctgtcggtactggtaaccaagttgtgatccactctatatattacgtacatataataaaactatataagagtcatgcgatatatttttctcaaccaaaatatgactacttcaaagaatgagtcattttcttaagtggtgaggcctccacttcttggactcagtcaaatcattttacggccaccaggaccccaactaataactttatttcctgttttgcctagctagttgtaatatatattgcaacatttttgtgcacttacaaagtaaaccattgctattcatttgttctttataactcaatatactcataaaacaaaaaagccacatgtagtgaagtgaaatgaatacacataatcgtagatgctctttggtacttatagttatataataagcagggtctccaccagagaatatctgattaataaaaagcatctagattttggtgttgtttttgacagggcggtgatgatgagtcttttggaacaaagtgattggtaaagaaactagaaagctcaaaaaaaaggaagaatgcatgtggtttccttttgttctattcactaataaagactttttccaaagaggaaagtaaaacttttcaccgttttcagcttcagcttttcaccatcttgccgttttcctctctatcggtgcttttttcatcttctaccttagctcgtaagcctcagatccacgagccacgaggaccacgacccatttttttttttttgcttcgcattacttatttcacaatatttcatttaattaattaaagagctactagtaactaaaaaatgactttttaaaacgttaatgactagggttcttttgatcaactatttaatattgtgattaaccgtattattgtaatgttggttctggtaaccgttaataattgtgtcagaaaatgtctctttttttttaaattctaatttgtttttactaaaaaacaaactgaaaaagaaaccgaaaggtaaaattaatcgaggttaatgccaccatttgaaaatgattatttaacttttttttgttgtcggttataattttgtttttccgataaatatgagaaaattgagagtacagtgaagtagtatagtgtagtgggaaagtctggaaacagctgtatctaactttttcccttttctctatgattctgttgtgaataatgcagagccgccgtgagctcaggcgccaccgtaacgaagaacaaacctgaaggagaaaaataagccatg

SEQ ID NO: 34865 - DNA, 3003 bp, Unknown; identical to SEQ ID NO: 28623
  misc_feature (1)..( 3003): 2750-1469P.txt file - cDNA_ID_3082835; gDNA_ID_2926236; Annot_ID_203882

SEQ ID NO: 34866 - DNA, 3003 bp, Unknown
  misc_feature (1)..( 3003): 2750-1469P.txt file - cDNA_ID_3082848; gDNA_ID_2926236; Annot_ID_203875
ctttgtggtgaccagaatgtacatatgtggatactcgcagtatgaaccgttagtttccaaacccacccacatttacttctttttttctatagagtatcaaaataaacttagaggagtccttaaacttaatctccaagttcaggttttttttcttattttcctgagcttagctaatcacatcacaaattcagcaaatgaggtagatgaaataagagctgagagtgtaaaatataccttaaaccccgtcaaggtgccttgtcaaattccaaggttttgcaaaattgcaaattctgaatttgtactttatgtcttaaatgggctgaagactgacgcccatctctatttgggccgccaacataatgaaatataaatatgtattagaaaaaacaggctttactcttctgtcaaaaaatttaattgcatgcaagacgcgagtctcgactctggcggctttccgttgctgcaaggctgccacgtatcatagtctatgaccttagctggcgcacgagggaatataaccggtcgtgcttgtgccacacgcatagtttgattgtgcgatcggggaagcgaaggtagctgttatgggcccttaagggacaactgaattggagaattgggccttggttttacgtacaggtacaggtacttcttcgttgcttgcgatccaaacaactaaacgaatcggtcatcagaatcaattttctgatctgatttctgaaaatctggagacagctatataaacaaagaacttaccattgggtacaacttttttttcttcgaataaagctttagatatttattttcttatcgatatcttgctccaatatatgcagaggggacatggcattctgtagccaagagtgtaggcaagaacagattgagtctgatgaaacataatccaagaggtggagaaaaacgtcgatttccagatcataatctctccggaaatcgcctgattcgaaatattccgtcgccatcaaaactgtacggacgaagactcttgtcatggcttagtagtttctaaattggatgtggcggttaataaacaaagagagagagacagagaacagagaagccaattgttggttgtgaagtttttgttttctctacctatatttttgattatggtcttttaccacgagaaaatggataaactctgtttgtgtttcttgattcggtttcatgagaagaaaacaatgaaaaatattctgttcttttacaattcaaatggggttcttcttaaatacttgagcccaatatcgccctttgtggcccatttaccaaatcccaaacattgacccgtttgtcgaacgtcccctcggacaacaaatgtccagttcatttgtctgtagctggtgacttaaattagtgacaatcatcggcgagtagcaaccacaattttcagtcgctaaactttttagcgatcagtcgctgaatcaatcgataagtaaacgaataatttaacgatcataaatataaattactaatgattaaaataaaataaaataaattatttaaattaaacttaattaaataaatctgaattaaattcaaataaatcttataaaattaagttaaaataaaataaaatataataaaattaaatgaaatcttatttaattaaatgaaaataattcaaataaatcaaaataagtatagtcaaattaaatttgaaaaaaattaaagtaaataaatgtattaattttcttttgatggtgtataatatatataatttacatttttagtttaaattataaattatcataaaaaataatttaaaatttaaaaaatatagcgatttagagcgacagtcaaacgaacaatacaacaattactagcgacagttgttgttgcaattagttgctgaatccaacgacaaccaaacgaagaatacatattgtcgttggtcgaggatcgttgtcgctggattcaactacatacaaacgaacatgacctaatatttacgagagacatggaaatgtgttgttcaacttctctttttaataggtacaataattaagtaattcagttaatacttcccctccaaaaagtaaaccacctaattgatcacataagagatcacctaactttctactactaagagcaagctttattatatacacaatgaatctagtaattctctcataactaaatacaaaaatcacctaacttttgacaatataatgcgtatatgttcagttcaaaatgtatgattcgacgtatcaacttaaaattgaaatcacacattgtaagtcttttttttttataaaccttataccaatatatttgacaatttttaaaatttttgttactcgtgatgtgatgtctataaatcagtgaagactattttcacactttacattcaataaacaacaaagttttttttgtatccatatttcatgtactaagtctccacaaattatagccaaattcacacgtgttaatattttatcaatgaagttaatttaaatttacatttatttggtttttagtgcggaaaattcagctttttgttattgttttgtcaacgcattatgttttatctcttcaaatgatagtaaaaaataatattttaattaaaattaaaattaaaaatttggcttaaaaaagtttgttgagttttttggggtgaccacctgaaacctctctttgcacattgaccggaaaaaaagttttttgattgagtaacgagataaacttaatgagttgtcgaatttacccctaagacatagcgtaatttactaatcaagtactttaaccagactctttcactaatacaaaatctctatattttttttttctttctttaatttccaatttattttttgattacacatagtttctcttcattcatctctttctctccccgtcttttcttgttcctataatcatgtccgtccaataaaaccctaattttatctttccttgcgtcgtttcactccattacagagttgtagaatttagcttgccaaaaagtgtgaagattagggtttgttctagatg

SEQ ID NO: 34867 - DNA, 3000 bp, Unknown; identical to SEQ ID NO: 14489
  misc_feature (1)..( 3000): 2750-1469P.txt file - cDNA_ID_3082857; gDNA_ID_2684122; Annot_ID_191025

SEQ ID NO: 34868 - DNA, 3000 bp, Unknown; identical to SEQ ID NO: 14489
  misc_feature (1)..( 3000): 2750-1469P.txt file - cDNA_ID_3082857; gDNA_ID_2926236; Annot_ID_203870

SEQ ID NO: 34869 - DNA, 3000 bp, Unknown
  misc_feature (1)..( 3000): 2750-1469P.txt file - cDNA_ID_3082878; gDNA_ID_2926237; Annot_ID_203925
tgattagtagtataaagatagtttgaacgtcaaatattatactacatactgtttagtgctgactcttgtccaccttataaacatctgaagtcaaaaggatgctgaagtcattagagtaaatattgagaggaagaagtcttatcgtcgccccatttcacttatcattgggtgagatcggtcttgaagaaagagagttagagaggaaaaagaagaatcttattagctctataatatctgatattgcttctcatttagtttttcactttttacattaagattggttgtttgtaacattatggagtggttaatagtataaagataatctgaatattataatatataatgtagagtcttgtccacctaataaccatctcttcaaaagcattgttctatgatctgatttttcggaaagactctgcacttctgttgcacttctgttgttggacactttctctttgctaataaaccactaacacaagtccaagcgaccagagaatccatttcttcttgttttattagagcattcataataaggccaagattataaatcatccgaaaagcccaagtgtcctatgtaatttattttccaaagctcatttaattagatctaagcaactaggttcatatatatatagtctcttgtaatgaacatcaaatagttaactttgaaagcaatctcaaaacattgagatttatgttgttaaagagcttattaagatagcaacacgagattgaaattagatagcttattaaagctttaattagctcacacgaaccaatgtgaaatggggtttgttgttgggtccaagtccaacgaaacgattatatttcttggatggtagttttaataatgggcctgaatcatatgggctttttgatgagactgtgacggtaagaaaataaaaaagggcaaaaccgagaaaacagatctctctgtctcaactcaaacaatcaaaagccctagtaaaaccctagcccccaaagcccttgtgccattgagccgttatataaatccttcactcgctccttgagaagacgaatttgagattgcctctgcaaaggtacttcatttcggtgaacccaattcatgttttcgatgatttttgcttctctatttcttcgattttgcgttttatcgcgttaaaagcacatatcgaaggcttgcagataacgtataataaaaaacgcctgcgagctcaatatttgtgcaatatcctaaaaccatccatttgaggtttcgataaatctctgtgttataagaatttatcttttcttatcgacaatttcgatggatgggacatttattaatcggttttatgatttttaacattgtatgagaaaatctgagtcagatctgaataattgaatccttattcgtctgcattgatcggaaaatagtaccacttgggttttatctagtttactttaaggtgctcatagagtggtaatctcacaattgttgttgtttgaacaatttgggacctttgtttgcatgatttagtctcttatataccaattagaatttgggaccatctgctgattcatatctttgtaattgacagagtaaaatggcgaatcctaaagtcttcttcgacatcttgattggtaagatgaaggcagggcgtgttgtaatggagttatttgcagatgtgactccgagaacagctaataatttccgtgctttgtgcactggggagaatggtattgggaaagcagggaaggctttacactacaaaggctcagcctttcaccgtataatcccagggttcatgtgtcaaggtggagatttcactcgtgggaatggaactggaggagaatctatttacgggtctaaatttgaagatgagaacttcaagttgaagcacactggtccagggattttgtctatggctaactctggtcccaacactaatggttctcagttcttcatctgcacagagaagacttcgtggcttgatgggaaacatgttgttttcgggaaagttgttgatggatacaatgtggtcaaggcaatggaggatgttggctctgacatgggaaatccttctgaacgagttgtgattgaagattgtggtgagctcaagaacccaagttcataagttcttaaaacattgggtgggttgatcttgacaggttattctatcatatgctgtgaagcagagacagcatcttagcgttaaggtcaatctagtctgtgatgcactactttggttttgactatatcatatgaaccttaggaagtggtccatccttgtaagttgttttcttaaaactcttgtgtgagaataggatggatgataataatggttagtttctttatgaagacatttggttttgtagctttcttattttggtgtagttaatatgaatgaaccaaactcttcttaggactcatttgcgaatatgtatccaaaattgctgacttttcgaattgggcagatttcacttcatatgcagaacaagataaactttctgatcatgtgatgataaatattgtttagccaacgcatcacacatttctttgagtagtttctacttatggttaagtttcagcatcaatagtcaatagccaacaatatttggacagtcttctttaaatactccaacaactagtttgccttggcaattaatgtaacttaaagtctagccaactctttggtattagcttcgttattttatacatttcttaaaaccattttattcacatttcttgaccacttggattccaacatagtggccagccatgctgcaccacctcgtcaaaattaccacaataatttgatttggtcaaatcatcatttttttggaaaacaacaacaaaaaaacttaaactttgtataataaggaccctggggttaaaagtataattattactatgtaacaaatcaaagtctaagatggaaaatactataatccgttgacttaaatgtgctagaaaaaataaagaggtcgaagccaggttatcatcgaataagacttttgccgcaaccgtgagagatg

SEQ ID NO: 34870 - DNA, 3000 bp, Unknown; identical to SEQ ID NO: 28632
  misc_feature (1)..( 3000): 2750-1469P.txt file - cDNA_ID_3082882; gDNA_ID_2926230; Annot_ID_203621

SEQ ID NO: 34871 - DNA, 3000 bp, Unknown; identical to SEQ ID NO: 28632
  misc_feature (1)..( 3000): 2750-1469P.txt file - cDNA_ID_3082882; gDNA_ID_2926237; Annot_ID_203923

SEQ ID NO: 34872 - DNA, 3003 bp, Unknown
  misc_feature (1)..( 3003): 2750-1469P.txt file - cDNA_ID_3082895; gDNA_ID_2926237; Annot_ID_203918
aatagtgggcgtcttttttggttattcgtatagtagtggtttttgagtcattttcgataactaggtcaagattcaatatccaaactatataaaataagacaatttggttctaatttcctaagtcattgcgtcatgtcggccaacttcgttttattgctttcatgtctcttcttctttcttgacatccatgctctctttttacatcaagagttcacatacgacaaaaaataaggagcaagagctcgaataatttaaaaactagtcgattactgctgcaacaacttaacttgttgtctaatatttggtccttatcaaacagagagttcaattattatttttacaaaaagttagaaggtttggattcgaactcgtcatactgtaaaagaaagtatatgaatttaaccactttattactacaactgttttccctaatatgatgtccctaaatgcttccacagaactttgatgcttaaattctttgctttagaggttttagtccagggccagacctgcttacaagttacacctatgtgtttataactggttatactataccaatcatagttttaggtttcgattagtgtcataaacataatgatgtcgaatgaagtttttggaccatagaaaagatgatagttcataggaattaaaaaaaggaggataaagtaaaattagagaaggaaggccacacctgattacagaacaaatggtacaattctcatcacccaacaaaaatcagagcctagtatgcagatcacgtacgatcagtccaagtacagataaagtggacgcctataaaaacctagggcttcaatcactagcccacaaatctgtggaagaatcttatactgggccttttctttactaaataaaaagtaatttataacgttctggactttatttgagtataggtttctttctgcagttattaaatttactgggttaagagttcatacgtgttatgtgcatttcgctttaaaaagtcttagctcctgagatgatcgacaaatgagttgcggccaatattgggtcattagaaactattgggctataactttgggtccattgggccgaagtagcagctagaagctagtttctgttttctctaaaattaggcctaattcaggttactcaaaaatctagaataaccttatattactgtaaaatttgagaaatctggttgcataattctttatcatagtttctgtagagaacagaagcccacatgttatataaaactaggggttcaatggttacgacttacgatgtacgtggttctcaggcgtgagacccagcaagagcaaaggagatcgaaattattagttattagatgaaatttaaagtaatgagtttcaacttccctttacattgggaggcatttgtctcccgatccattaccaaaaaaaaaaaaaacttccctttacattttatcttaacctccttttgaactgttgtttagttagactcaaaacggtgtaatctatcaattatttttccattataatgactgtactttatccatttaattagtcttttttatttacccaagtggaaataagaaataacctaaaaaattcgattagtgcatggggatacagcaactttgaaaggtccaacaaaactgacctttgttgatcatattgatattccggtcataatattatttggtctttctaaggacatctcaatcatattaattgtgttttttttttggcagtccaaaatttgacttaatgaaaaaactcttgtggaaaaatcatagaggaaaaccccaataattcgaagatttgcattagataaattagaataatgcttttgaccccaagatgcagtatttattgctccaagttttgactcttcaaccaacttatatacgtatgacaatatgaccccaactcccaagttgcccaaagtccatagattctcccccacaaagtaataaagatcgcattaacaaatgaaaagaacaaaagaaaaataacaatcatgttttgtgtgatcgattactattaaaaattaaaaaaagatgaagaaagatttgggttgtataataatggcaaataaagtgaagccaaagagaagacattttttttttttttgtcgcacacccaaagggaacgaagattagagaacgcgtcattcactctctcgtcacgcacctctcacacaacatgactctcctccttggtttagcctaatttgctttgttttatttttcctgattctatttgtattttatttattaaatttgtattttgtaatgtcaaatttttattatgcttctcttttccctttttcacagaagttgatcgtttactgttttatgattttctaaaatttctcacaacatcaatacttttttttaatctcctaatggtatggtatttgcttgataatctttctgcctccattaattttgagtttggctaggatttttgatggaaatagacagcttaattaaaatcatgtaaacaaaataaaaacaggcgaagcaagcaagtggtaaagttgactggtaaaagtctctttcacgtgctcttgaaaagcgcgtgctagttgtgtgtgggtggatcacgcacacgcgtattgaagtgttaccgtcttaatcggtcagaattttgagtcgagaaattaaaagtggtgaattcttcttttaactccccccaactacaaaatttaccatttccacccccaactatttccataatcgaattattagacttcaaacctaataatttaaaacgaacaaacatattttcttaaatgaaaggagaatttaatagcataatcaattgtttgaccaaaaaaagagaagcataatcagctgttttccttgtatacgagtagaagagtcagcacaagagcgacaatggctcacctttgaaagtttggtttcaaccttttgacttttgacctaaaacatatccatattcgtcaagaagaacaaagaaagtattccaaaaaaaatataataaaaaaaaaaagaccaagaaaaataaaatg

SEQ ID NO: 34873 - DNA, 3000 bp, Unknown
  misc_feature (1)..( 3000): 2750-1469P.txt file - cDNA_ID_3082904; gDNA_ID_2926237; Annot_ID_203914
agtagaacctaaaagcccataactatttatcaggccaaaacgtttcaatggtcaggcatttgttattcttttggtcttttgggttggttacaaattaaatagaagtagaaactgggctctagtagggagataaacgaaaagtctatatcaatgaaatgagactaattcgcatccctcatacttattttagagtatatttcttaatattaaaaagtgacagatgatgaaaactcgtaaattttattaagatttaagaggtacatgcaacattagtttgttgaaacatacttgcctctatccataattgtatattgttgaagccgaaccacgcaaatatatctaacacttgaaaattaatgtgagacaaatctaaaggtgagtcggggcatgaattatgttacacttatccgaaatcgttaattgatagtataatattagagataagacaaatatgtcttcttctaatatcacttgatgattgtcgattttgggattagagagagcgacctggccatttaaagttgctagcatgtgctcgtgtgtgtgtggacgtgtgtctcgacttctcctagcaatgagtggttcatattaattaattatgcatttacgatcaaatacaaaacaaaaacattgtgattacgtggatggtttgaatgagtcaagttttcactaattggaatcgtcgagaagattattgcgaaatgatttagagatagactgattaatgattatgaataaagataatcaaaatgagagttgaaccgagtccaatatcaaaccaaaccgagataaagtccggttaaaaaagatgtattttcctattagtcgaaaaggtaaaatgcaaaaatacacgaatgagtaaagaatctgtattttcctattggctctattttccttcttcttcttttttaactcccacactcatgtttctgacgcgtgtgtttcacgtcccattcctgttaacgaatatatattttatatttttgcaaataaaaataaacatataagtgggtttgagactttgagtgacctttgaaactttgagcagcttataaaaaaatgatgaaccaagcttagagtattcattatttactagtatctccaattcatccatatttttttccttaaactctatttttgcctctatttcactctaacacatatctattctcatcactattatagagatttctattttttcctctaaatatagagataaaaaataggggtttatattttttcctctatttttccttctaccaaatagagatctctatttttgaagaaccattgaagtgaaaatagagacaactattaaaaacggtcttatatacactttaattatatatttgctattagtcatggtttttgattaaaaataactaaataattcttgattccgtcttaacatgattcgtcattgatattaggacattacaatgaaattatattatgaaattatgttatcctaattcttatcaatataaaatttttgcataaaatttattttttaattgataatattttatttagtggttggttaacaaagatgttaacgactattgtgagaaattaattccacgaattacgtcctaattttaagtaattaaaggtataaagcaaaaatcaaaatatccatactgatgtacgactttctcacacgacttttacggcgttcgcttacactatatatccagccggtatcttaatcagtgtttatacgggcaagtggcttctcacatcaaagagaaaaagatttgaaaagatgtaactggtaagaatgacgaagaatcagagaatatacgatatgtacactttctcatctataatgtaactcttaacgaatacattcaactaaaaaaactagttataagtctttcagatcatgtaaacacaatctccaaagaaactacataagaagaatcatttgtgaaaggagcaccatccattaatctatgtagtagtggatcttataaactttttttatgttaaatcggttatgtgaaatcaaatagtttttgaaaatattgaatattttgttaaaatgaatatggagaatgagacactagacattggtcttcaaatttttttttttttttttttttttttaaattagaaaagatgtcaacgactttgatatagtttggtcacttttgctatgattaaaaacgttgtccgccagatttaaggaatgatattgtatattacgcccataaataaatcatactaacaaaatcgtcttaaccccacattttcctaattctttttggcatcatctagttggcagcctttgaacattcatttacttttctttacccaaaaataataatatcattccttaaatcttatttcaataacatacaactaaaataaaaatattccaaaatacaacaagtggagcgcgtgaggatcaaaattcataaatgtcattctcaaaaagagacttcatcgaaccatcgccaccatagcttcttcctttcttcacaataacacctctctctctctctctctctctctctctctctctctctctctctctctctctctctctctctctctctctctctctctctctctctctctctctctctaattcattttaaattacaaatttattcatttttgattgctttctttttcttcctcaagtctcttcttcttcttcttcttctaaatctcaccttttttcagattctgaaaattttggtttcattcttctccgagactctcttatggccgagttgactcaggccgatgttgtatactctcctcgttcgtttcaagtgtggaagactttggtgaactggctcgcttttttctatcagatctttcttcagatccttcgtgccgttggttatcatcctcttctctcttcttctgctaaagcctccgctgatggttttaaacctttgccggctattgagttgcttgatagggcttccgaatctcccaccaccgttgaaatcgcagccacgacgacttctgattcctgcagcgatg

SEQ ID NO: 34874 - DNA, 3003 bp, Unknown
  misc_feature (1)..( 3003): 2750-1469P.txt file - cDNA_ID_3082910; gDNA_ID_2926237; Annot_ID_142779
acaatgcaatgagttatgtgcacacctgattgagcttagcatcaagaatcttctcattgacactaggatctgcaacatcagtcaatttgatctacaagaagccaaaattgaacattgaagccacaaacgtaagccatgtagcagacccagatcgagaaactagaaacagaattcaaattaacctgaatgagagcaagtgtgacgaagaggacgacaatccataagagagtcagtgagaccaatctagtcgccgtaattgccattactccttcgtctttgtaatttgggaaatgggtcaatgaatctgcagaaactatcaaagatttaacagagtagcagaaatttagaaaggtaccctcatattatcaaaatctttcaacttaaaacttataaaacaataattttcatgttagacccaaacatttcgacgttaaccaataagcagactacttgcaactttgtcaacgaatcattatttataaattataactttcagaatttgaaatataggtttcgaattttattgtttggtcagagcaagacaaaaacttaatcactcaagaaaagaacttaatgaatagtagtaccagagacattagtaattgagagcaagatcccaatagtgagcaacaccagcatcattgaaaactttcttggcatcggatttggtcaagcactcttgtacatgaaacctatgaaaactcggtttctcaacacttccttgccaaaccaaacaacacttgtttccaccattctcttcttcatcttccttcttctctgcttcttcccagtttatacgcttcagcatcagcttctcgtacctatttattgcttttctcttaccctcaaccacaacaacactcattccatccatcatcacactaaaccctgttaatatgttctgttttgcattcatcctcactttgaatcttgttttcggatccgatagcttcttgttgatcttgtacaccgacacaatcgtctcaacaactgtcgttggatcaccaaaaagcttcctttctttcttctcacgtttctctgcaggagttagcttcctcgctacgttcctatccatgtgagcttgttcacgctcagcagcttctgtgcggatctctttttcaagcttggttgggttttgcgttgcttcagacgcacgaaccttcattaggttgctcattttcacctttgatttttgtggttcaacccttccttgactaatcatctcccgtttctccatttcttttgccacacgccttagagttcgcagtttcttccgttcctcctttgtcattttaagaggttggggaggtggagacgcagcctctgcaggtggctctatgggaaatggatgctcaatatgacaattaaaaactttcatattcagatggttctcagtaatggtgtccatgatgaggatgtttggatcacacgacaactcattaatggtgtcatcggtgaggatctttgcatcccaccactctacaaaatcagggattggctcttcttctcttgtgacacgtttgtattcatatcagcatcctctgccttttttcagatgcgattgcttctccttgaaactcatacgtttaggtggagaggcccatatcttatatataccaagtattaggccggaccgatgtggatcgggttgagtatgtgcggatcggactctgataccatattagactgtgggcttccaacctaaaaccaattggcaataggtggagagacccatatcttatatataccacttaagatcttactcaacttccgatgtgggacattgtccctaatattaaccatcaaagtactatgattgatcggtttagtgacgctaatcacatttccgtgttcatcgatttctcttccaagtgcatccacacgcagaacaaagcccttggtctgtttatgtgccaagtcctgaaatcgcttaacagctacaataatttgaccagaagtagtttccgatgcaatagaacaagtatacggcctattctcaaacctagccacatcttcaaacctagatttcttgtttgttgccctagccgtcccattctcttcttctctatctttcctcttactaccttcgtgagacctctcatgatgatgcttagtcctatctctctcatcacgatcgccccggatgctcttggagtatctctccttcctgttatccatgacgagacaaatttaggggaagtatgaaacgaacgtgagaagaaagaaagaaacacaaaggtattttttttattgatcctatcaatattcctaattcagccaagaataggaaactttataccgttttcctttatcgtaaaacgacacaccacgtttttactcgaaagtcgaaacttattgacagaaaaagatatttcccaaatttaagactttatgtaaacgaatgccctcaaactattcaatgttttattttgaggcttatagttcacaagttagagctcaaaagtcgaatctccgtaccccaatgggcgaacgacgtgaactacactactctgactctcagtgatattttgacgaattattattttctatacaaacaaaatattcagtatatatttattgttatttaacttctttatcatttatttttgtatatcttttttttttttgtcacaatttttatatatcttttccacattaaaatataggcttcgaattaattcctacttttcaaaaagaaaaagaacttatctagttaattaatttaaaagtattaaaaagaagtaaaaaacacttaatgacaaaaaaaaagctgccgacataaagaaaaaatccacgtggataaatgtgtcataacacgtaatgcaaactcatttctgcacatcccaagttttatggaaagtcactattaacaatcaaaccgccaacgagaaaacaaactaaaaaatttcaagtccgatcaaaaagacaaatccctaaacattgcagagatcatttcttcttcttcttcaatcatcaaattacacttgaggaattgttcaaatg

SEQ ID NO: 34875 - DNA, 3003 bp, Unknown; identical to SEQ ID NO: 34874
  misc_feature (1)..( 3003): 2750-1469P.txt file - cDNA_ID_3082910; gDNA_ID_2926237; Annot_ID_203912

SEQ ID NO: 34876 - DNA, 3000 bp, Unknown
  misc_feature (1)..( 3000): 2750-1469P.txt file - cDNA_ID_3082918; gDNA_ID_2926237; Annot_ID_142777
tatttgaagaaagcatcaaggtggagaccattacgatgaagaagagaagaagaagcattgacgatatcttgagcttcttctttcgtggctttgtcttgtttctgaacatcgattaggaatctgaggaggagatcggtagtcatgagacctttgtcggagtaattgtcgaaaagtgttttgatctcagcaggagctacggacacagtgtgtcggtacctccgacggaaacagaaacagactttgtatgtttgcttcgacatttgaacaattcctcaagtgtaatttgatgattgaagaagaagaagaaatgatctctgcaatgtttagggatttgtctttttgatcggacttgaaattttttagtttgttttctcgttggcggtttgattgttaatagtgactttccataaaacttgggatgtgcagaaatgagtttgcattacgtgttatgacacatttatccacgtggattttttctttatgtcggcagctttttttttgtcattaagtgttttttacttctttttaatacttttaaattaattaactagataagttctttttctttttgaaaagtaggaattaattcgaagcctatattttaatgtggaaaagatatataaaaattgtgacaaaaaaaaaaaagatatacaaaaataaatgataaagaagttaaataacaataaatatatactgaatattttgtttgtatagaaaataataattcgtcaaaatatcactgagagtcagagtagtgtagttcacgtcgttcgcccattggggtacggagattcgacttttgagctctaacttgtgaactataagcctcaaaataaaacattgaatagtttgagggcattcgtttacataaagtcttaaatttgggaaatatctttttctgtcaataagtttcgactttcgagtaaaaacgtggtgtgtcgttttacgataaaggaaaacggtataaagtttcctattcttggctgaattaggaatattgataggatcaataaaaaaaatacctttgtgtttctttctttcttctcacgttcgtttcatacttcccctaaatttgtctcgtcatggataacaggaaggagagatactccaagagcatccggggcgatcgtgatgagagagataggactaagcatcatcatgagaggtctcacgaaggtagtaagaggaaagatagagaagaagagaatgggacggctagggcaacaaacaagaaatctaggtttgaagatgtggctaggtttgagaataggccgtatacttgttctattgcatcggaaactacttctggtcaaattattgtagctgttaagcgatttcaggacttggcacataaacagaccaagggctttgttctgcgtgtggatgcacttggaagagaaatcgatgaacacggaaatgtgattagcgtcactaaaccgatcaatcatagtactttgatggttaatattagggacaatgtcccacatcggaagttgagtaagatcttaagtggtatatataagatatgggtctctccacctattgccaattggttttaggttggaagcccacagtctaatatggtatcagagtccgatccgcacatactcaacccgatccacatcggtccggcctaatacttggtatatataagatatgggcctctccacctaaacgtatgagtttcaaggagaagcaatcgcatctgaaaaaaggcagaggatgctgatatgaatacaaacgtgtcacaagagaagaagagccaatccctgattttgtagagtggtgggatgcaaagatcctcaccgatgacaccattaatgagttgtcgtgtgatccaaacatcctcatcatggacaccattactgagaaccatctgaatatgaaagtttttaattgtcatattgagcatccatttcccatagagccacctgcagaggctgcgtctccacctccccaacctcttaaaatgacaaaggaggaacggaagaaactgcgaactctaaggcgtgtggcaaaagaaatggagaaacgggagatgattagtcaaggaagggttgaaccacaaaaatcaaaggtgaaaatgagcaacctaatgaaggttcgtgcgtctgaagcaacgcaaaacccaaccaagcttgaaaaagagatccgcacagaagctgctgagcgtgaacaagctcacatggataggaacgtagcgaggaagctaactcctgcagagaaacgtgagaagaaagaaaggaagctttttggtgatccaacgacagttgttgagacgattgtgtcggtgtacaagatcaacaagaagctatcggatccgaaaacaagattcaaagtgaggatgaatgcaaaacagaacatattaacagggtttagtgtgatgatggatggaatgagtgttgttgtggttgagggtaagagaaaagcaataaataggtacgagaagctgatgctgaagcgtataaactgggaagaagcagagaagaaggaagatgaagaagagaatggtggaaacaagtgttgtttggtttggcaaggaagtgttgagaaaccgagttttcataggtttcatgtacaagagtgcttgaccaaatccgatgccaagaaagttttcaatgatgctggtgttgctcactattgggatcttgctctcaattactaatgtctctggtactactattcattaagttcttttcttgagtgattaagtttttgtcttgctctgaccaaacaataaaattcgaaacctatatttcaaattctgaaagttataatttataaataatgattcgttgacaaagttgcaagtagtctgcttattggttaacgtcgaaatgtttgggtctaacatgaaaattattgttttataagttttaagttgaaagattttgataatatgagggtacctttctaaatttctgctactctgttaaatctttgatagtttctgcagattcattgacccatttcccaaattacaaagacgaaggagtaatg

SEQ ID NO: 34877 - DNA, 3000 bp, Unknown; identical to SEQ ID NO: 34876
  misc_feature (1)..( 3000): 2750-1469P.txt file - cDNA_ID_3082918; gDNA_ID_2926237; Annot_ID_203910

SEQ ID NO: 34878 - DNA, 3000 bp, Unknown; identical to SEQ ID NO: 2978
  misc_feature (1)..( 3000): 2750-1469P.txt file - cDNA_ID_3082954; gDNA_ID_1620619; Annot_ID_162183

SEQ ID NO: 34879 - DNA, 1917 bp, Unknown
  misc_feature (1)..( 1917): 2750-1469P.txt file - cDNA_ID_3082954; gDNA_ID_2926238; Annot_ID_142812
attctccactcgtagctcttcgttctgccagagttgaagttgcttctgagctcatctacaagcaaagctgcttcttttccactaaagtctgatgcttgctcctttaccacagcagatagtgttgcataacaagtactgattcaagacaccaaaaccgcaatgtgagagactttaagactaaaaatcatggataagactaaaaaaacatggataagtatcaactgttctcacgattatttattcataccactgtacttaaacttaaaacccactatactaaatagaaaggtaatcatcaaaaaatcagtatgtaaaaaccacttttgtgaataaaatatgtaaaatgggtgaataaagaaatgtgcttacaatttcaaccgataagggatacaagcattgctgcaatatccaccaccaccacgacgagatatccgaaaaggtgaagttgcaacatttaatctgcaacaaaagaggccattcattaaaatggtactaattagatctaatcatatcatattgaatgaccaaatcattcacagaagcatccattgctccaattaacattctagaccaaattcaacttaaaggtaactcttttatacaggaaaccgagaaaccgaaaacgcaattcacataaaaaggaaggcttgtttggagaagcagaatcgaacaagtcaatctcaaaccctgatgagcaggtttttcaagttacctggcaggagaaaaacccttggcaaaacaaagggtttgaatatgattaatctctagaagcttcgtcatgacttgggttcagttaaaaatctcaaattggagacattattggtgtttatatatttgagagagagagccagagaggagacgttgaattgaatgaagggtgtggtcggaagagaagacgtgtagaagagacgagacaagtaaatttaagcattggccccatttacagccacaagtccgctacaacaaattatttccaagaaactctgagataacgtcgtgatgaaacggctcatgctgctgttgtgattcgtgaattagaggtttatcttttgggtttttgaatgttacttaattggacggtcgatttttcaaactgggtgtgaaatgtgaatgggtcattcataatgggcttttgttttaatgtgaagccattcacacactctttgtccttcttttctattattcataactgtcactctttgttcttcgaaatagtaaagagcaaatcgattctttgttgatctgggccgtaaaatttccatggttgtgggaagtattctcgcagctgatctgggccgtcaatgctacagtttcatgtcagagagaggtcaagaatcaacacgtggccaaccatgattttaaaccaaagcaaacacacgattagaccccacattgtttgttcaccaacccccgtggaccctcctttagccgacgtgtccacgtcaatagtggtttttcttcctttcaaagtacacaaattccattctttctcattttactttttggattacgttgttgttataaactggtaaaatgaattatgaatgcaaataaatttcatttaagttttgttggcttctaatatttttttcacctaaaattctaataaactacacagccatgagccatcgtatgaaaagaagaagaaaaaaaatgtctttttctagaaggatctttcaacgactaaaaaagattttaagcttttgactaattttgtcaataatatacacaaatttacactcaattatagccatcaaatgtgtgctatgcagaaacaccaattatttcatcacacatacgcatacgttacgtttccaactttctctatatatatatatagtaatacacacacataaacagcaaaagcgtgaaagcagcagatcaagataagaaagaagaaagaatcatcaaaaaatg

SEQ ID NO: 34880 - DNA, 3000 bp, Unknown
  misc_feature (1)..( 3000): 2750-1469P.txt file - cDNA_ID_3082954; gDNA_ID_2926207; Annot_ID_141772
cactgttacaagcccatttccctgcaatgatcctcctagcagccaccttcaaccacaacaccacaattagagtatgagacctgaatttaactattttatgctttagaagcagagaaagatcttaacttgtagattaacatctgaatcaacaagagctgggcacttcccaccaagttcgagaaccactggagtaagatttctcgcagccgcagccattataatgcgagcaactcttgctccacctaaagaaatactttaaactatttaaaataatgttttcctgagatcctaatcaacatttcaaagattcttgaaagaaaaggagagaggacaaaccagtgaaaaagatcttgtcccatttttgatccagtagtgccgttgtttcagggactcctccctcgataactctgattgttgtattgtccaagtattcactaaacaactttgctaaaagagaagatgctgctggagcaatttcagaaggttttagcacaaccgcattaccagctgcaatagctccaatgactggctcgacagacaatactaaggaaaaaaacaaagcaccatgaagacatataaactttaatagtttagaaattgagacaaaattgtcaataaataaaattgagcttacagaaagggaaattccaggctgaaataaccaaaacaactccaagcggttctgagactatttgtgcagacgagggaaatgttgtcacagaagttttgacctgaaaggtccaagcatagaaaaagcaagtggttttagaaaggacacatatcaatgaagcagcaaagcttgaacggtctagttaccgtttctggagccatccagttctttaactctttgattgcaagcatacaggatgattttgtattcgaaatctaaaaaacgagaaaaataccaaagagattcaacagtggataagtggaatgcagtgaagaaacgggacattgaaattatataaaaaacctcagctagaaaagcttcaagctcaggcttagaaagatcttgatacaaagcttcggtgatgcatttctccttctcatcaatcatcctagcaatgttttgaagctgagaaattctccactcgtagctcttcgttctgccagagttgaagttgcttctgagctcatctacaagcaaagctgcttcttttccactaaagtctgatgcttgctcctttaccacagcagatagtgttgcataacaagtactgattcaagacaccaaaaccgcaatgtgagagactttaagactaaaaatcatggataagactaaaaaaacatggataagtatcaactgttctcacgattatttattcataccactgtacttaaacttaaaacccactatactaaatagaaaggtaatcatcaaaaaatcagtatgtaaaaaccacttttgtgaataaaatatgtaaaatgggtgaataaagaaatgtgcttacaatttcaaccgataagggatacaagcattgctgcaatatccaccaccaccacgacgagatatccgaaaaggtgaagttgcaacatttaatctgcaacaaaagaggccattcattaaaatggtactaattagatctaatcatatcatattgaatgaccaaatcattcacagaagcatccattgctccaattaacattctagaccaaattcaacttaaaggtaactcttttatacaggaaaccgagaaaccgaaaacgcaattcacataaaaaggaaggcttgtttggagaagcagaatcgaacaagtcaatctcaaaccctgatgagcaggtttttcaagttacctggcaggagaaaaacccttggcaaaacaaagggtttgaatatgattaatctctagaagcttcgtcatgacttgggttcagttaaaaatctcaaattggagacattattggtgtttatatatttgagagagagagccagagaggagacgttgaattgaatgaagggtgtggtcggaagagaagacgtgtagaagagacgagacaagtaaatttaagcattggccccatttacagccacaagtccgctacaacaaattatttccaagaaactctgagataacgtcgtgatgaaacggctcatgctgctgttgtgattcgtgaattagaggtttatcttttgggtttttgaatgttacttaattggacggtcgatttttcaaactgggtgtgaaatgtgaatgggtcattcataatgggcttttgttttaatgtgaagccattcacacactctttgtccttcttttctattattcataactgtcactctttgttcttcgaaatagtaaagagcaaatcgattctttgttgatctgggccgtaaaatttccatggttgtgggaagtattctcgcagctgatctgggccgtcaatgctacagtttcatgtcagagagaggtcaagaatcaacacgtggccaaccatgattttaaaccaaagcaaacacacgattagaccccacattgtttgttcaccaacccccgtggaccctcctttagccgacgtgtccacgtcaatagtggtttttcttcctttcaaagtacacaaattccattctttctcattttactttttggattacgttgttgttataaactggtaaaatgaattatgaatgcaaataaatttcatttaagttttgttggcttctaatatttttttcacctaaaattctaataaactacacagccatgagccatcgtatgaaaagaagaagaaaaaaaatgtctttttctagaaggatctttcaacgactaaaaaagattttaagcttttgactaattttgtcaataatatacacaaatttacactcaattatagccatcaaatgtgtgctatgcagaaacaccaattatttcatcacacatacgcatacgttacgtttccaactttctctatatatatatatagtaatacacacacataaacagcaaaagcgtgaaagcagcagatcaagataagaaagaagaaagaatcatcaaaaaaatg

SEQ ID NO: 34881 - DNA, 3000 bp, Unknown; identical to SEQ ID NO: 34880
  misc_feature (1)..( 3000): 2750-1469P.txt file - cDNA_ID_3082954; gDNA_ID_2926207; Annot_ID_202286

SEQ ID NO: 34882 - DNA, 1917 bp, Unknown; identical to SEQ ID NO: 34879
  misc_feature (1)..( 1917): 2750-1469P.txt file - cDNA_ID_3082954; gDNA_ID_2926238; Annot_ID_203964

SEQ ID NO: 34883 - DNA, 3003 bp, Unknown; identical to SEQ ID NO: 18706
  misc_feature (1)..( 3003): 2750-1469P.txt file - cDNA_ID_3082977; gDNA_ID_1620619; Annot_ID_162184

SEQ ID NO: 34884 - DNA, 3003 bp, Unknown; identical to SEQ ID NO: 18707
  misc_feature (1)..( 3003): 2750-1469P.txt file - cDNA_ID_3082977; gDNA_ID_2926207; Annot_ID_202287

SEQ ID NO: 34885 - DNA, 3003 bp, Unknown; identical to SEQ ID NO: 18706
  misc_feature (1)..( 3003): 2750-1469P.txt file - cDNA_ID_3082977; gDNA_ID_2926238; Annot_ID_203965

SEQ ID NO: 34886 - DNA, 3000 bp, Unknown; identical to SEQ ID NO: 2979
  misc_feature (1)..( 3000): 2750-1469P.txt file - cDNA_ID_3082981; gDNA_ID_2926207; Annot_ID_202285

SEQ ID NO: 34887 - DNA, 3000 bp, Unknown; identical to SEQ ID NO: 2979
  misc_feature (1)..( 3000): 2750-1469P.txt file - cDNA_ID_3082981; gDNA_ID_2926238; Annot_ID_203963

SEQ ID NO: 34888 - DNA, 3003 bp, Unknown
  misc_feature (1)..( 3003): 2750-1469P.txt file - cDNA_ID_3082989; gDNA_ID_2926238; Annot_ID_142805
gttatttcatcatcaatcaaagtcgccattttatttttatttaaagtctcacgtcacggaattatctctctgaattcatcatcttcatcattaccttctttttctcaatctcgattgttttcttccaaattcatgtcgatgatggcgggtatacaaggccagattctcgaggtcactggttcgtacctttctcacatccccaattctattatgttcttcaaccttatctatgatccgttgaaatgttaacttttaaaatttctgggattcttttgatttgtcagttgttgggtgccagaaattgaaagacacggaatggttttcaagacaagatccatacgtcgtccttgagtatggtggcagaagtcaccgtaccagaacctgcacaggttatttttaataccacctcttttattcataatttgttcagatccagaaaaaattgaacaaagttaagatctttcaatgaatttgattgatgggtttgttttttcagatggtggaaagaacgctgttttccaagagaagtttatcttcactttgattgaagggcttagggatcttaaggttgctgtctggaatagcaacactctctccactgatgacttcattggcaatgcaacgtatgtgtcacttcttatcattgccttgttatgctttttaatacccgctttggatttggaattgagtcttttgttgtttggttgttattaggattcaattgcagaaagttctttctcaggaatacgacgactgtacctggactttgcagagtaaaactgggaggtaattacattggctttactagtttttgttccttttccattaagtatcatgtttggtaatctcgattattgcatggttcacatttgtctagctgattttggtgcaactttttgatgtggtttctactatatagtgcttgaatatatagtttcgccagttgctttgctttgctttgctttgttcttgtcatttacttacagtgctgacatggttttgctcactgatcagagtcgttatgtgtgtttttgtgtcctaaattgttaatctgtgtgaactacttgttcgaatgttctgtttctacattgagcacactcacaattgatgtagcattttgattaggtttctctggaacttatgaaagataactagacattttgacataaatggagcttctattgtctgttgttaggttacctcagtaaagagatgtgaagttgcgtttaaacattgtagcatcaaattagaatttcttaaaactggtctcttgaggtattccatttttgtttttgaaaaagagaaagttatgtgttttttaatccatggctatgtgttttgttttcttaaattcctggaaaatcggttacaatgtgccaagattttggtagcttgtcctcagcgattgctccttgtaaaagattacttttttgattaaaagccttgtgaaaaacatcaacctttctgtcttgtagattcgctggagaagtacaactcctactgcattatgcgggagcaaaggtaagtcgagcctcaattagcaacattggttaacatgttccattataaacaaaaggctaaacacacaatccactcttgtatgcagaaacataattacgggtctgcgccatcagcaccgtatgcacctcacgtacctcaatactcagcaccgccttctgcatctccgtattcaacagcaccaccatactctggaccatctctatacccacaagtacaacaataccctcagccatcaggataccctccagcttcagggtatcctcctcagccatctgcctatccacctccctcaacctcgggctaccctccgatcccttcagcttacccacctcctccgccatcctcagcttaccctcctcaaccataccctccgcaaccatcatattacccacaaggtaccttcctttctttcctgttctatgctgcaattgatcgcatttgcttgtctctaactatagtcagtggtggttgatcttttttcttcttgtttccaggtccatatccaggacaatacccacctcctccatactagagcgtttggcgtttagaatttgacgggaagtggtcatgatgtatagattatagttatggtgttttctagaatttggcagacgaatttctttgttttgttttttttatatcatcttccttgtgctattgctagcgtgatggttaatttttgagttggtcagtgaaacttattgagaagtttggatcttttcatgtttaaccagatcgcagattatattgaattattactctaaatccttggttttgtgtgttcatcatcctcttgagttaaaattatgttaaaaacaaaaaaaggttttggttctgtctttaactttaagaaacggaacttatcggcgtataatcatcgcacttgtgatcagatgcaattagaaaaaggttatttggtcaatgtatagcaatatctttaggttctaacaaaaacattattgttgacaaatagcccaaaagtagtagaatttagccgacagattttactgcactttggtttctcgatctctactccaaatgagtaaaaagtgggtaaagcgggaaacagcaaaagaaatcacacatttaataaaaaataaagaaaaagaaattccacattaaataatcacaacaagaaaaacaaataatatattagtaaaagacaaacgtaaaaaccatctctcggccttctctcataaatcaatctctcttcttatcactctccgaaacccacttccagctttttcctctctctttctctctctagtctctcttttgtagctctcccctgctaagctaaccactgcacgtttccatagagaggaaagatgagtctctctccgagagattttctctctatcatcttatcttcttccgtgtaatgctctgagccaaaacccaataactaaatcaacaacaatatagaagagaagagaaagatcttatctttcttctcattcttgagtttagtcccccacaatg

SEQ ID NO: 34889 - DNA, 3003 bp, Unknown; identical to SEQ ID NO: 34888
  misc_feature (1)..( 3003): 2750-1469P.txt file - cDNA_ID_3082989; gDNA_ID_2926206; Annot_ID_141765

SEQ ID NO: 34890 - DNA, 3003 bp, Unknown; identical to SEQ ID NO: 34888
  misc_feature (1)..( 3003): 2750-1469P.txt file - cDNA_ID_3082989; gDNA_ID_2926206; Annot_ID_202245

SEQ ID NO: 34891 - DNA, 3003 bp, Unknown; identical to SEQ ID NO: 34888
  misc_feature (1)..( 3003): 2750-1469P.txt file - cDNA_ID_3082989; gDNA_ID_2926207; Annot_ID_202277

SEQ ID NO: 34892 - DNA, 3003 bp, Unknown; identical to SEQ ID NO: 34888
  misc_feature (1)..( 3003): 2750-1469P.txt file - cDNA_ID_3082989; gDNA_ID_2926238; Annot_ID_203955

SEQ ID NO: 34893 - DNA, 3000 bp, Unknown; identical to SEQ ID NO: 28643
  misc_feature (1)..( 3000): 2750-1469P.txt file - cDNA_ID_3082997; gDNA_ID_2926206; Annot_ID_202242

SEQ ID NO: 34894 - DNA, 3000 bp, Unknown; identical to SEQ ID NO: 28643
  misc_feature (1)..( 3000): 2750-1469P.txt file - cDNA_ID_3082997; gDNA_ID_2926238; Annot_ID_203952

SEQ ID NO: 34895 - DNA, 3000 bp, Unknown
  misc_feature (1)..( 3000): 2750-1469P.txt file - cDNA_ID_3083001; gDNA_ID_2926206; Annot_ID_202241
tatactgtatatataaagcaagcgttatctcccaaacttcactctcttaccttgcctcttgcttcaacctcctaagcacattcttatctctttctgaaacgagttcccaaattagctctacaaaaaccaggatcttgatttctcatcagttaaacatgggaactcctgtcgaagtctctaagctccatttcttgctcttccctttcatggctcatggccatatgataccaactctagacatggctaagctctttgccaccaaaggagctaaatccactatcctcactacacctctcaatgccaagctcttcttcgagaaacccatcaaatcattcaaccaagacaacccgggactcgaagacatcaccatccagatccttaatttcccttgcacagagcttggtttgcctgatggctgtgagaatactgatttcatcttctccacacctgacctaaacgtaggtgacttgagtcaaaagtttttactcgcaatgaaatatttcgaagagccactagaggagctcctcgtgacaatgagaccagactgtcttgtcggtaacatgttcttcccttggtccactaaagttgctgagaagttcggagtaccgagacttgtgttccacggcacaggctacttctctttatgtgcttctcattgcataaggctccctaagaatgtggcaacaagttctgagccctttgtgattcctgatctcccgggagacattttgattacagaggaacaggtcatggagacagaagaagagtctgtaatggggaggtttatgaaggcaataagagactcagagagagatagctttggcgtgttggtgaacagcttctacgagcttgaacaggcttactcagattatttcaagagctttgtggcgaaaagagcgtggcatatcggtccgctttccttaggaaatagaaagttcgaggagaaagcagaaagaggcaaaaaggcaagcattgatgagcatgaatgtttgaaatggctcgactccaagaaatgtgattcagtgatttacatggcctttggaaccatgtctagctttaaaaacgagcagctgatagagattgcagctggtttagatatgtcaggacatgattttgtctgggtggttaacagaaaaggcagccaaggtaccatagacatcactctctttgcagcaaaatcctctgtttttgttttagagaaaaaccaatgatctaattaggattctactgtttcaaactctaacttttgcgtttgcattacatataaatagttgagaaggaagattggttaccagaggggtttgaagagaagaccaagggaaaaggattgataatccgagggtgggcgccacaagtgctgatacttgagcacaaagcaattggcggatttttgacgcattgtggatggaactcgttattagaaggggtggcagcgggcctgccaatggtgacatggcccgtgggagccgagcagttctacaacgagaaattggtgacacaagtgttgaaaacaggagtgagtgtgggagtgaagaagatgatgcaagtagttggagacttcattagcagagagaaagtggagggagcggtgagggaagtgatggttggagaagagaggaggaaacgggccaaggagttagcagaaatggcgaaaaatgcggtgaaagaaggaggatcttcagatctagaggtagataggttgatggaagagcttacgttagttaaactgcaaaaagagaaggtataaagaagttgaatgtattgcaagttatggaacaataatgtttttgtaattctgatggtttgagttacaacagtaaaagattgtatttgttcattcaaatttacaatggatgatcttttagtttgtagtattggtaagtgaatgtgaagttaggttcttgagccatcaggacgcaaacccaacattagttccgtttagatttgttcgttctgttaaaagaaagaacaaaaaccataaaagtctactaagatttggtacacaccaatatcaaatacctaacctttaattctttctaaaaagtaaaataattttaaaagaaatttaaattacaagacattttatttgattagcatcgtcaaactatttctagaagaaacatatctgttgggtgactccatgatattatataacatcacttttatgcttatcgacttcagtttttcttctaacaacttgtcttatttatgtattacaactccattaagagtttttttggtttgttctttcgatcagtcacatcgatatatacggctaaaaattcatctttttaaaagtccaaaaggcgaatggctatatacgttcttctaagtcctgctaaaccggtggaccatataacctcacttttctctattgcaatgacccaaattgatcaagacaagtaacccaatgcattgaccaagtcaagtaacccattgctttgtattgatgttatcggtgtgtatgtgtatgtgttgtgtcatgattaaaaaagtcaggaaaacaaaataattgttataattaatacaataatattaatccggccgtgatttttttttatattggtcaattaaccacactttgttttggattaacttgattgtatatataccttatgttttttctcttctccctttttcttttcataataaattaaacatgatttattaatctggaaattagtttacaagttacaaggttttggttccaaaagaccttgaaaactgacactactctggcacgttaagagagaaagtaccaaagaaaccaaaactagagacgtatgcaacgacgtcagtatccgttacccattaatcatctaaacccaaattttggtgctttatacgttatatatactccacactcttgcaaccattattatatatacaacgaggaaaaatagtactattttctacgaacttcagaatctttcgtctctcttaattatttttctcaaatttctcgaaacatctagttttcttttcaaccagccaatcatg

SEQ ID NO: 34896 - DNA, 3000 bp, Unknown; identical to SEQ ID NO: 34895
  misc_feature (1)..( 3000): 2750-1469P.txt file - cDNA_ID_3083001; gDNA_ID_2926238; Annot_ID_203951

SEQ ID NO: 34897 - DNA, 3003 bp, Unknown; identical to SEQ ID NO: 28901
  misc_feature (1)..( 3003): 2750-1469P.txt file - cDNA_ID_3083009; gDNA_ID_2926206; Annot_ID_202238

SEQ ID NO: 34898 - DNA, 3003 bp, Unknown; identical to SEQ ID NO: 28901
  misc_feature (1)..( 3003): 2750-1469P.txt file - cDNA_ID_3083009; gDNA_ID_2926238; Annot_ID_203948

SEQ ID NO: 34899 - DNA, 3003 bp, Unknown
  misc_feature (1)..( 3003): 2750-1469P.txt file - cDNA_ID_3083017; gDNA_ID_2926206; Annot_ID_202235
aaccagaaacggcttaagcttgagaagaatcttaagttaagaggaatgtctacaaaccaaggttctggtggagatggaaatttacagtttcctgacttgactactgaactctttgtatctacttacgaagctgctgctaaagttgtgcatgatttctccaagccgctaatcaacatgatgaaagcagcaggatgggatcttgatactgcagccaattctattgagcctgatgttgtttacgccaagaggcctcacaaggaatatgcatttgaatcatacatatgccaaaggatgttcagtgggtttcagcagaagaacttctcagtaaactcagagagtgctacggttatggccgatgatgacacagacacctttttccgccagtttcttgctctcaaggacatggatccactagatgctctaggtacaaaccctgattccaactttggtatattctgcaggagcaagtagctcctcttagtccacccaaagatggaagcttctttctttggaaatctagaccagcgtgactacgtgacaggaggtggccacccgaggactgcattttaccaggccttcttaaaacttgcaaagtcgatatggatcttgcacaagcttgcttactcttttgatccagctgcaaagatcttccaagtgaaaaagggtagtgagttctctgattcatacatggaaagtgttgtgaagaacatacattaatatggattcaatctgtgtacaaaacgaaattagagatatggtgtaatccagcttcctcataacatttagcaatatggtttaaagattcggaccaagttccttcgatagaagccaaatccaagagaaaagccgcaacatccaacgcaacttggattggagctttgcctttatgcaaatcttcaaaacgaccttcatcactcactttttcccttatgaattcgatctgctcgtcttcccattgtgctatactagcaacctcctgcatgttttcaagataccatgaccatgaatatgtctctatgctttaaaactcagtacaaccgaaaaagaagaacaaaaaaacttttgtcatacctcatacggacatcctaatgtccaccacggtgatctcaatgctaccctagccgcatcttttgcttctacattccgccctaccctgcgaataagaatctgaagataagtggctacatctttctctacgaaaataaaatggagatatgttttaggtatgtaaagtttacaaacttctgtagtatgtttgcataatatacaaaaggtcgtccaaatcctggaaagaggtctttctttgtgtaaaattctcctgtcaccatagctgaaaccttccatagacaaaaagaagaaaatgtcctgaaaaagtgtcacagaagagagattcatgataatagaatgtcatatcatatgcgtcaaatgtcttacatgatctccttcatcaaaatgccgtaatactttccgctccaacaaatctggaaacagtccaacctagacgatacaaaacaaaagcaaatactgtttattgtggtgtacataaccttttatctataagtcatgagtttttcagtcttgcctttttcaaaacatagacatcgagattgtcaatttcagattcagcaaaagcacccttttcgtaaagtttttcacctgcctctcccgaagcacgatatagttctgtcaactcttgtgcatcttcttcaactagaatccggtgaatgtattcatctacctgaatatcaaaaaatgtaagattgtttcttggtaacacaaaaaagacataaatcctcttaaaaggataagctacgtataaacagaatgagaagtctttacatttctagctataagcctgactccactcctccaaacttccacaaccggcatatccattctgttctcgaatacaaaaaagttaaaaaccaagaataacccaacaacatatttttactactgcaagagttaccaagaaagagatccaaatctcttaccctggtggagcagtaggccatctcaaaagcgcagtaacagagcctacttagacaaaaaaaaaaaccagaaaaacaaaactaaagacaagctcctggaaaaagctaatggattctatcgaaagtgtggtcttacctgacgaattcttcgaaagcggaatagcaagagggatcagtccctgcttagctccaggagatatgattgtctcacctgcagaagatatatgaagcaactgagactttaagaaccataagtttccctttctccattattacaaatccagaataagtgatgaaaagaaacgaatacataagtttggacataaatgaggaacaaaattgagcattattttacctcttgtttgaagcactttgagtaagtgatgaagatgcattggaggttcagtggcagcaacatctttgataaatgatacatgccctacacaacaacgctaatcttaagtcaatcccaatgtgtctctttggaagaattattacacattcttttgttaatttgttgtctccaccaagaataatcaaaaagacagtcatagtcactgcattttcctacaaaagattgttctaaaatactcaacaaagatataagctcaagcattttctcgatttgaaaagccatcaaacaatcgacaattactataattcgacaatcacatgcaattctcacaaacggaggaaaaacgaaattaccagaagagcaacaagagactctagctctgaaatggcgtatagggagagcagtagagggagttatgtgcatcgaaatcgaacccatggcttcttcttatctctctatctttctcttcactctgcttcctcaacctcacagaattttcgtaattcagcagtagcagcaaaagatagccattgattttgtttctgattcagcaaaaaaaaaagaaaaaaaaatgagatgggcttagtctgttacaatttaaggcccaaacccaacaaagactaaagacgcgtaaccgacaaaaaccgtcattaaatg

SEQ ID NO: 34900 - DNA, 3003 bp, Unknown; identical to SEQ ID NO: 34899
  misc_feature (1)..( 3003): 2750-1469P.txt file - cDNA_ID_3083017; gDNA_ID_2926238; Annot_ID_203945

SEQ ID NO: 34901 - DNA, 3003 bp, Unknown
  misc_feature (1)..( 3003): 2750-1469P.txt file - cDNA_ID_3083025; gDNA_ID_2926238; Annot_ID_142797
ttctgaagtcttcaaaagacattcctttttcagaaccatcatcagattttgagaaagtagcggcatcgagtagcgcatctaccatctccttgtaatcacttgattccgcatcagaactctcagtggagaacacactcttcaaaatcaccaccaggaacgactctaaatcagacctgaagacatactagaatgtgtcacattcagagaataaccccatctaatctaacaatctcaattcattttctatccaaatatgttaagtggatcaagagaccagtaatggacatacaacaaaacaggtaatgaaacttggataacagaagcaacttgaagccacaagatggataccttctcaagaccccattgccattaacatccaaagtctggtaaataaactcagcaatctcatcatcagttcctttctcgtatgttgcctaaaaagcaacaggaattgagttgaacacaatcgaatctctcaaattctatatcgagtcctagaactgctaatcctattgaactctgcattttaagatcttcaaaagctcagaagaagaaaccaaatgattaagaggataaaaagacttgagtataccttagcaataacaagatcttcaaaagtcattttatcatctttcctgtgttgagtaaccatatcaaagatcctttctcctaaagaaccactcagaccaaaatactcctgtgaaaatcgaaatccgacacacatcgtgtaaggcttaattcaaaattatcaaccacaaaaaccagatgacaacagaacacaattttttttttgtcaaaacctggaaaacagggtacgagacgtattggtcattgctctgagacttggaagcgagggaaaaaaagagagatttgagatcagcgagcttcttctgagtaaaagctctgcaataaaacacaaacacacaattgataagatcgattttcaatttagaaattagagagtgaaagtgagattggttccgatgaagacctggaagcagaagtgaagcaatgatcaacagaagacgaattcgaatttccctttttcgccgggtttttttctcccctcagttctccggcaggtttcgtcgtctctgttcttctattatttttgattgatcttccacttcttcaaaattacaacttcaaccccttaaaatcgaaatattcttaatgtactccattacttttaatgcgttgatctcgaagcagcagagtaaaatataaaagttgtgagttgaaatcacacaaagaacagaaaataaaggggggcaaacacgaagagctcacaactagattcatgcttttagatttccactggtgagtctaatctgtttaattattgcaattcgttcttgttcttgtcgaatatacagttctgttttagtatctttttttatgtgttcatgtctgttttgactttgttgccgagaaattttactgaaactagtaaagctaagctctctgaatcgtttttcatgtttaattgaagcagtagattgttcttcttcctctattggatgccatggaagtagaaatcttcaggattcttcttggctttgattctgagattttgcaatttgaaagtttaatcaaaggctactgtgatttttttggatatttttctatgatttatgattttgagttgtggtgttttctcttttttccgttgttgagatgttgataaattttctgtccagaattgttgcctcacactatttgctgattcggtttggtttgtattggttttgaaattaaaactgatttcggttcggtttcattggttttgttgaaaataactaaaagagtcacgcgatggagaatttggagagatgtgcgtcgattaaaaaagtcatgaattggaaaggggtttacccacagaatcgccctcactcgctcaacgcgctctttctgcgagtgggtacgaaatatagccttctgattggcttaaaaactcaaaaaaagtgcaatagtatacttgttgctagctcttattatttgataaagttttgtacttgcatcttttttttcagtcaccgaaagttggaatttcctttgtgataagatctaaacaaatatcaaagtctacaaatgctggattaagcaagttaaagcctttgtgattcccttgtattttcaacaacctcgtcttcaaaactttatccaaagacatatgtggatagccatagcaagccacagttacattatacaggaaaggtaccaccttaaggctctgcattccaaagaaaatgtcatagtcactttgtttgatatgtttgttctgtggattgttaacattggtttatgcttgagtgaggtcccagacaggaaatcaaactcacattatgcatgtagctagtgtcgttctgttgaccctataaagcctttacttttactgtagttagcttatagttgcattctttaggttagttctctgctttacacactttgcaacctagtagaacttttctcttatgacacccatggtcaatacattggttgacaataatgaaagtggagctgctataacatcttttctttttatcaagtgattttatgttcggtaatagcttactgtttcattaactctgacaaactgtttattattgcactgtctgaacacttaaagatgaacaacggaccataatttcactttcacatatatctgcagaacctcattgacctggcaggttctgaaagctcaaaggctgaaaccagtggtttaaggcgcaaggaaaggtcttatataaataaagctttgctgactttagggactatgagttcttggttatcattgttttcccccaagcgacaatagtttttcgaatttaagaaccttttttgcaagttggatcgttcttttgcaaatttgtaggtacttgttatagtatttgatactcttatttactttctgttggtgacatgcataatgctgatttcactgtctcttatatttttatgatccaaacatgaaacacatacataatccatcctcaaccaatg

SEQ ID NO: 34902 - DNA, 3003 bp, Unknown; identical to SEQ ID NO: 34901
  misc_feature (1)..( 3003): 2750-1469P.txt file - cDNA_ID_3083025; gDNA_ID_2926206; Annot_ID_141757

SEQ ID NO: 34903 - DNA, 3003 bp, Unknown; identical to SEQ ID NO: 34901
  misc_feature (1)..( 3003): 2750-1469P.txt file - cDNA_ID_3083025; gDNA_ID_2926206; Annot_ID_202233

SEQ ID NO: 34904 - DNA, 3003 bp, Unknown; identical to SEQ ID NO: 34901
  misc_feature (1)..( 3003): 2750-1469P.txt file - cDNA_ID_3083025; gDNA_ID_2926238; Annot_ID_203943

SEQ ID NO: 34905 - DNA, 3000 bp, Unknown
  misc_feature (1)..( 3000): 2750-1469P.txt file - cDNA_ID_3083029; gDNA_ID_2926206; Annot_ID_202232
cgaatctttaaaccatattgctaaatgttatgaggaagctggattacaccatatctctaatttcgttttgtacacagattgaatccatattaatgtatgttcttcacaacactttccatgtatgaatcagagaactcactaccctttttcacttggaagatctttgcagctggatcaaaagagtaagcaagcttgtgcaagatccatatcgactttgcaagttttaagaaggcctggtaaaatgcagtcctcgggtggccacctcctgtcacgtagtcacgctggtctagatttccaaagaaagaagcttccatctttgggtggactaagaggagctacttgctcctgcagaatataccaaagttggaatcagggtttgtacctagagcatctagtggatccatgtccttgagagcaagaaactggcggaaaaaggtgtctgtgtcatcatcggccataaccgtagcactctctgagtttactgagaagttcttctgctgaaacccactgaacatcctttggcatatgtatgattcaaatgcatattccttgtgaggcctcttggcgtaaacaacatcaggctcaatagaattggctgcagtatcaagatcccatcctgctgctttcatcatgttgattagcggcttggagaaatcatgcacaactttagcagcagcttcgtaagtagatacaaagagttcagtagtcaagtcaggaaactgtaaatttccatctccaccagaaccttggtttgtagacattcctcttaacttaagattcttctcaagcttaagccgtttctggtttgcttcctcaatcttctgcagcatctgcgtgatctcggaatccttgttctgaatctcagactgaaacttcttcaccatgacctcataagtcttcaacaaactctgctgctcttgaatctctgcagctaaacgagagtcttgtggagagacacatacaggcttggggttattctctctgtaaaaatgcttcatttcggaaagattcttgagttcagaaatgacaactttgtccgctgcctgaatcttctcgggatcgtaaggagtatgagcactttgaagctcgatataagcagatttcaaagacgagatgtttccaaagagattggagataagtgcttccatagcttcaggattttgattgatagactcttccattggttgaggatggattatgtatgtgtttcatgtttggatcataaaaatataagagacagtgaaatcagcattatgcatgtcaccaacagaaagtaaataagagtatcaaatactataacaagtacctacaaatttgcaaaagaacgatccaacttgcaaaaaaggttcttaaattcgaaaaactattgtcgcttgggggaaaacaatgataaccaagaactcatagtccctaaagtcagcaaagctttatttatataagacctttccttgcgccttaaaccactggtttcagcctttgagctttcagaacctgccaggtcaatgaggttctgcagatatatgtgaaagtgaaattatggtccgttgttcatctttaagtgttcagacagtgcaataataaacagtttgtcagagttaatgaaacagtaagctattaccgaacataaaatcacttgataaaaagaaaagatgttatagcagctccactttcattattgtcaaccaatgtattgaccatgggtgtcataagagaaaagttctactaggttgcaaagtgtgtaaagcagagaactaacctaaagaatgcaactataagctaactacagtaaaagtaaaggctttatagggtcaacagaacgacactagctacatgcataatgtgagtttgatttcctgtctgggacctcactcaagcataaaccaatgttaacaatccacagaacaaacatatcaaacaaagtgactatgacattttctttggaatgcagagccttaaggtggtacctttcctgtataatgtaactgtggcttgctatggctatccacatatgtctttggataaagttttgaagacgaggttgttgaaaatacaagggaatcacaaaggctttaacttgcttaatccagcatttgtagactttgatatttgtttagatcttatcacaaaggaaattccaactttcggtgactgaaaaaaaagatgcaagtacaaaactttatcaaataataagagctagcaacaagtatactattgcactttttttgagtttttaagccaatcagaaggctatatttcgtacccactcgcagaaagagcgcgttgagcgagtgagggcgattctgtgggtaaacccctttccaattcatgacttttttaatcgacgcacatctctccaaattctccatcgcgtgactcttttagttattttcaacaaaaccaatgaaaccgaaccgaaatcagttttaatttcaaaaccaatacaaaccaaaccgaatcagcaaatagtgtgaggcaacaattctggacagaaaatttatcaacatctcaacaacggaaaaaagagaaaacaccacaactcaaaatcataaatcatagaaaaatatccaaaaaaatcacagtagcctttgattaaactttcaaattgcaaaatctcagaatcaaagccaagaagaatcctgaagatttctacttccatggcatccaatagaggaagaagaacaatctactgcttcaattaaacatgaaaaacgattcagagagcttagctttactagtttcagtaaaatttctcggcaacaaagtcaaaacagacatgaacacataaaaaaagatactaaaacagaactgtatattcgacaagaacaagaacgaattgcaataattaaacagattagactcaccagtggaaatctaaaagcatgaatctagttgtgagctcttcgtgtttgcccccctttattttctgttctttgtgtgatttcaactcacaacttttatattttactctgctgcttcgagatcaacgcattaaaagtaatg

SEQ ID NO: 34906 - DNA, 3000 bp, Unknown; identical to SEQ ID NO: 34905
  misc_feature (1)..( 3000): 2750-1469P.txt file - cDNA_ID_3083029; gDNA_ID_2926238; Annot_ID_203942

SEQ ID NO: 34907 - DNA, 3003 bp, Unknown; identical to SEQ ID NO: 28635
  misc_feature (1)..( 3003): 2750-1469P.txt file - cDNA_ID_3083036; gDNA_ID_2926206; Annot_ID_202230

SEQ ID NO: 34908 - DNA, 3003 bp, Unknown; identical to SEQ ID NO: 28635
  misc_feature (1)..( 3003): 2750-1469P.txt file - cDNA_ID_3083036; gDNA_ID_2926238; Annot_ID_203940

SEQ ID NO: 34909 - DNA, 3000 bp, Unknown; identical to SEQ ID NO: 28633
  misc_feature (1)..( 3000): 2750-1469P.txt file - cDNA_ID_3083040; gDNA_ID_2926206; Annot_ID_202228

SEQ ID NO: 34910 - DNA, 3000 bp, Unknown; identical to SEQ ID NO: 28633
  misc_feature (1)..( 3000): 2750-1469P.txt file - cDNA_ID_3083040; gDNA_ID_2926238; Annot_ID_203938

SEQ ID NO: 34911 - DNA, 1318 bp, Unknown
  misc_feature (1)..( 1318): 2750-1469P.txt file - cDNA_ID_3083044; gDNA_ID_1620634; Annot_ID_162834
ttccatcagatgacataaccgattcgttgtagaaaaccctaccaaaattctccttgtcagggaaaacctcagcctgttttggaaggtaagcaccaccactatcaacaagatatatgcaaggaagtctgcaccgagcagcaatctcttgtgctctgagatgtttcttgatagtaatgggataatacgtccctcctttaactgtaggatcatttgccataaacatacaaatacgtccatggattggtcctatccctgtgattatcccacctgaaggcaaaggctcctcatacaattcatgtcctgcaagctgcaaacatattcatatccagtaagcagcaacatcaaacaagtttttaatcaatgccaattccctaatcttcttttgttttcctaacttatgcaagtactaatcaacaataaactctagattgcaaatgtgcattaaatccaaacaaagaaacaaaacaaaacctgagagagctccaaaaaggaagaaccaggatcaagtagccgatcaatcctttctctaggcaaaagcttgtttctgcttctgttcctcttaaccgcttcctctccacctccggccaatacctacaaatctccaccgagatacacttatatcattcatctgcaaacaattaagacatcaatcgataaatgagatggctttacctttttgatatgggaacgaagctccgataagatcccttccatggcgatcgaattgctagaaaaagcctccgaatttctgtcgactccgtccggtaaaatgcccacgcagaaacccttttgtagtccccggaaagttcgaaaaggatcgggacgagaatcggttcctggtcggatccgccattgttgaatactagtaagctctttcgaagctgaaacaactcttctccccaaaatccttaacattttcgtctcactgtctctcgaaaccgatttcacttaaaagacatatttatacacactgttgtgactgactacttgattgtctgtaattcatatctcaaaccaaagagaaaagaggagataagctcaaggaaacaaaaatactatttttataaatcgttttcaaaattcgtctcatttctttagagaatcgtgtgtgacaatctcacagtggaaagcaaaaaaaatgttacattttcgacaaaaattggaggaaaaaattgaagctttatccaatcaagcaataagacaacgatacgacgacgtttttagctttcttcaagaagtgtatactagtagataagacgcaactcactctccgtctagcggcgggattatcagactgctgcattagctatcgtcaatg

SEQ ID NO: 34912 - DNA, 3000 bp, Unknown
  misc_feature (1)..( 3000): 2750-1469P.txt file - cDNA_ID_3083044; gDNA_ID_2926206; Annot_ID_202226
gagagacaaagtcccaaaacctttctggtatcacaaggatcaatcactccatcatcccaaagtctcgccgtcgagtagtaaggatttgcctctctctcatacgcatccaccgttttcttcttgaacgcttcttcctcttcctcagtccactgcatcacaaagaaaaacgcaaattcatcaatgttgaacaaacagagttgaaatcggtttagagaatgttttattcagtaccttgattccttgtctcttcttggtagccctttcaatctgagttaaaacacctgcagcctgcaaagttttcgccaagccaataacaacgtcaaacaaaaccaaactgaattttgttctgctacactaagattataaacacattttgattcagtttggtttcggtttaaacatttcggtgcattctggtttacctgagcgcctcccatgatgccaattctggcgtttggccaaatgaacataaaatctggactgtatgcacgcccacacattgcatagtttccagcaccaaagcttgcacccgttatgattgtaatctttggtacctgaatgaagacccgagcttagaatctggcttatcctaatcaaatctctcagactcttaaccaagaattaaacataccttagcacaggatactgccatcaccattttcgctccagcttttgcaatgccgttggcctcagctctagaacccacctataagcaaaaacggagcaagtaagatagatagagacactcttatatagccaaatgtgagaacacaacacaaacactacaattaccataaagcctgtgatgttttggaggaaaacaagaggaattttacgttgagaacataattcgatgaagtgagctccttttagtgcagattcattgaacagtatgccattgttcccgataatacccaccgtctgaccataaattctagcaaaaccagtcacaagcgtctgccaaaaagaagttccacataagaaagtaaaaaggtaacatttggatacaaaataaggcgaataacattatctcacagtgccgtattgtttcttgaactcgtcaaattcacttccatcaacaatccgggcaataatagaccgcacatcaaattgctgtttgtgatctactggagcaatggagcgaagctcgtttatgtcatagagcggttccttgtatacaagatttttgcttccaaatgttccttccatcccttgttttgcagccatgtgcaaattcttgacaatgtttcttccaatagcgaggccatgtagctcgtctgcaagcttagagcatcttaaggtctaaactctaaaacacgattattgttttcatattaaattgcagaaagagatgaatatatgtaccttgagcaaaataatctgacacaccggacacagtacagtgaacagtggcgcctcctaaatcctcagctgaaacttcttctcctgtagcagcctgttcaaaagctttttcatttagcgttagattctcaagaaactacttaagactagaacgagagagagagagagagaaagtaacttgagaaaattgaccttgacaagtggcggtcctgctaaaaatatggtaccattccctttgaccattacactttcatcagccatggcaggaatgtaggcaccaccagcagtgcaggagcctaaaacaatggcgatttgtggaattccatcagatgacataaccgattcgttgtagaaaaccctaccaaaattctccttgtcagggaaaacctcagcctgttttggaaggtaagcaccaccactatcaacaagatatatgcaaggaagtctgcaccgagcagcaatctcttgtgctctgagatgtttcttgatagtaatgggataatacgtccctcctttaactgtaggatcatttgccataaacatacaaatacgtccatggattggtcctatccctgtgattatcccacctgaaggcaaaggctcctcatacaattcatgtcctgcaagctgcaaacatattcatatccagtaagcagcaacatcaaacaagtttttaatcaatgccaattccctaatcttcttttgttttcctaacttatgcaagtactaatcaacaataaactctagattgcaaatgtgcattaaatccaaacaaagaaacaaaacaaaacctgagagagctccaaaaaggaagaaccaggatcaagtagccgatcaatcctttctctaggcaaaagcttgtttctgcttctgttcctcttaaccgcttcctctccacctccggccaatacctacaaatctccaccgagatacacttatatcattcatctgcaaacaattaagacatcaatcgataaatgagatggctttacctttttgatatgggaacgaagctccgataagatcccttccatggcgatcgaattgctagaaaaagcctccgaatttctgtcgactccgtccggtaaaatgcccacgcagaaacccttttgtagtccccggaaagttcgaaaaggatcgggacgagaatcggttcctggtcggatccgccattgttgaatactagtaagctctttcgaagctgaaacaactcttctccccaaaatccttaacattttcgtctcactgtctctcgaaaccgatttcacttaaaagacatatttatacacactgttgtgactgactacttgattgtctgtaattcatatctcaaaccaaagagaaaagaggagataagctcaaggaaacaaaaatactatttttataaatcgttttcaaaattcgtctcatttctttagagaatcgtgtgtgacaatctcacagtggaaagcaaaaaaaatgttacattttcgacaaaaattggaggaaaaaattgaagctttatccaatcaagcaataagacaacgatacgacgacgtttttagctttcttcaagaagtgtatactagtagataagacgcaactcactctccgtctagcggcgggattatcagactgctgcattagctatcgtcaatg

SEQ ID NO: 34913 - DNA, 3000 bp, Unknown; identical to SEQ ID NO: 34912
  misc_feature (1)..( 3000): 2750-1469P.txt file - cDNA_ID_3083044; gDNA_ID_2926238; Annot_ID_203936

SEQ ID NO: 34914 - DNA, 3000 bp, Unknown; identical to SEQ ID NO: 9651
  misc_feature (1)..( 3000): 2750-1469P.txt file - cDNA_ID_3083090; gDNA_ID_1972165; Annot_ID_179728

SEQ ID NO: 34915 - DNA, 1599 bp, Unknown
  misc_feature (1)..( 1599): 2750-1469P.txt file - cDNA_ID_3083090; gDNA_ID_2926239; Annot_ID_142846
agaggatcggatattcggattgtgaggtggacgaaggattcgattcatgtgggttccacttatcttgtgttatgacacgtggctttgctcttacggacctaaacaaaaagataagcattaagccattaagcataggccagttttgttttgttaatggcaggtcaaagataataaagagttgggcctgatgtaaatttttgttttaagcaaacccaaaggaaattggccatataaagtataaaccaaactaaaccgaagaaattgaccagcttcctacaagtaggtgttggataagtttcttgctctagaattaaaaacaagtacattgtagaattgatgaatgcaatcctagaaaaaagtcaaagaatgttggcttttgatcgatgaaatgcatgtactacaccactaggaaatttattattctggctgatgtgctctgcatcaaaacattagttattcgtttacgttagaagttagataaccagctagtggcagatgttaatctgactttttttatttattactgatttataattagacttgtcagatataatgtatttaggatgaatttcttgagtttccaagttactagttcaaccgaaactataccaatttgtataattttgaagtacaacaagtcatagagctcgtgtgtaaaaacaataatagtaacgcgttgagacaaatacggacgtgaagacatgtattgtaagcacgtcgctttgtttccaagtaacaccctcacccgaaaagtctaataatataatgaaaaagataatccaactaaatcttttacaatatatctaaaacttttgattacgtttgaccaaacattaaaagattaattaagtagtatcatgtagacgatttcaaagaatctgagcaaaagtctcctgtgaccaaaatactaataagctctgaatagtaaaaaaaagtaaataaaaaaaagtttgaaaatacataatgactcatgttaatatcatttaaagtattttaatctggattaaaaagctctagttcattgaatcgttgattaaccatagcagcaactcgacaatatataaatcatctttcgtatgcaaatttttgtcaacctttgaacacactagaattaggtttattttattaacaaaatgagaattttttggaatcccacgtccaagttgatgacttttttgtgatttccacaaaatatgcatataaatatcaattagattacaaagacattaaaatagaaaaattacagaacacaagaatttttttttgcaattactatacaaaatgtaatctttactgttgacaaaagaaaatacaattcttactattatagtaacaccatagatagagaatgtcataaagcaaaaaaattaaatagtaaatacaaatcattcttttttcaaatatttttaacaaatcattcttgtatatatgtacacacacaccccacaacatcccttcaacatatacgcgtcctatttccacgttctctctatattacatttttccttgaaaacatctcgaggttcaaaatctttaacccctacaaatcaagaaaaggagacagaggagaagagagaaaagaaaaacgcagaaacaatg

SEQ ID NO: 34916 - DNA, 1599 bp, Unknown; identical to SEQ ID NO: 34915
  misc_feature (1)..( 1599): 2750-1469P.txt file - cDNA_ID_3083090; gDNA_ID_2926239; Annot_ID_204017

SEQ ID NO: 34917 - DNA, 3003 bp, Unknown
  misc_feature (1)..( 3003): 2750-1469P.txt file - cDNA_ID_3083093; gDNA_ID_2926239; Annot_ID_142845
tggcttttagggatttcacaatttgacaaaggataacatgactaaaaacagaaacataaccattttaggttaacatcaaacgttcgcttagctatacaatcaactgcccaattgggacgatgacttttttctgtttattctagtcataaattcatcccaaatcagaatttattagtgtacgtgtttttttggtttgtctataattatgaaaccgcctacaaagatcttaatctcaccgtctaaattttagttaacaatccaaacctatatatacaaaaagagatagttagggggtgaagtttgaacaaacagaaacaataggggtgaaaaatgggaagaaaatgaaaatgagaatgagaaaggaggtgggaaagagggaacgtggagtatgtcggtaaggaatgtggtcaaaggcacataccatgtgggctcacatgtttcactatactttgtcatccaaaatctctctgtctctttcacgttttttcggtgctcgtacaatttttagttagtccctaaaatccatctagccaaatgtgtattctcggatattttgactaccttcatgatataaaagtaatccgattctaatttagaagttctaaccgtttcgtatgttactaattgaatttgaaatgaagtcgtaaccgataccgatgtttattaatgtatgtgtgacaacttcaaaatacaacatgctaattgaatatattcaaaaaaacaaatgtaggatagaacatgctaaatgatagtccaacatatcacttgtgtttacaaatactctgatattttggtaatatagatcactagaaatgttataaaattctcttaatagcttttctagttactctaccgatcgaataatatttcggacccactgcttgaatgcatatatatttgaatttgataaagttgtcttctttctgttgtaggtggatagtgtttcttaggtttcggtgtcacattctcaaagattatgtggcgcttgacaattggcttgaagatacaaacacactgacatagagatgtatataataaacatgtatggttggtatgcatgcaatgataatgatcgttaattaattgttctatgtttcacaaacgagtgatttcattttcatgagtcatgatgccctttctttttggctggaaaatatttttctttctttttcactttttctttgtggaattcttctaattattgttgtagtattcgagtgattatgataaagagggtcctttggtgtgtcatatatgggtagtaaaatcattaattcaaaatgcagaaagaaaaagacattatcattataacaactgtctggatatggtgttgttttatgaagttcttgattttcaacctttattatcaccactttaattaatgagctatatttatcactcacgtttggacaaagcatggccatgggggctctacatatatcagagaccaatcgaacttaagaagtttaacgtggaaaagttatttaacggccactttacccacacacacatgcagtaataaggtcgagatattgtggcctcaagacaattttcaattatgtgtttttgttcaaactatatatacgtccttttcaaaaaaacatcttaaatcatttccaaaattcagaaatgaagattacgtgtatatgtaaaacatttcttcacgaaaacgacaacttttgaatcagtgaaagttgttcgcaacaataatggaaccaagttcatgtatatgaatatattttttcttcgtaaaaagttgttcatgagatttgatatatatgtatgaaccaagttcacatgtaaatatgtaatatatatgctcttcatatcatatacatctccaaggtttgatcatttgcaagtttggtgggtattttgcttgatctacaatcagaatcaggatggagatcttctttatattcgttagcccaaacaatgttagacacaacaacaatgtcttttttgagatcgtacatattaaattatagtgcttgaagagaacggaaagaatatatataatgtcagccattagagtttttagttcatcgttatacatccgttaatcgtttgctcaacaaccttaacatatatatgcttttataatagacactacttttataaaaatctattttcataaaaaagtctcaatttttaggacaagaatagcactatgcaacttaataataggtgagttttcctagttgaaatatttaatataagatttgtgatatttttaatttcattacaaagtatgaattcataacttcataatactccaaaagtcagccagaaatataataattataaaatcaatcgccaacaacaaatggtctaatgatgaagttcacgcggtttcaactttcaaacatgaaaaaagtgtttctgctttttaagccttatttcaacggttaaatagtaaaagagcttcactattacaatttcaccctatggtttgattttagctcttttataaaataatttttttctcatgtctaacattttttcttcatttttaagcttgtaattcaataaaactcgaaaagtatacaataaggaaaaaggacttcttggggttaaaatcccgctagcttagtttttgggggttaaagttccgccggctttagtattttaccatgtattcctcccttgtatttcacctttggatcaatcttatgaattattcagaggaaaaagaaaaaaaaaaaaaagaatttaaaaattgccaaagttttgtggaaaaacaactttcggataaaaaacatttaaatattaatttagaaaagaaaaaaacaattctctttgtagagggaagtctgaaaacgccgagaagaagacgaagaagaagaagaagaagaaagcttgagactttctctctgtgtgcaatttcgaaatcgataaagacttcaactttcggttctaacaatgacaatttccgtatagtttgattttgtccacctctttcaccgattacctgatttcatcgctggcgttagtcatcaaatg

SEQ ID NO: 34918 - DNA, 3003 bp, Unknown; identical to SEQ ID NO: 34917
  misc_feature (1)..( 3003): 2750-1469P.txt file - cDNA_ID_3083093; gDNA_ID_2926239; Annot_ID_204016

SEQ ID NO: 34919 - DNA, 3003 bp, Unknown
  misc_feature (1)..( 3003): 2750-1469P.txt file - cDNA_ID_3083099; gDNA_ID_2926239; Annot_ID_142843
ttatcaccagttggtttaatttttttgttaatttatgtagatgtgtcgtggagacagaggagcaacaatggtgggttctcgagccagatggtcggtggcgtgagggcggagcagtcagtgcaagagcctcggttaccatcggagtgggcttattgactgattttatgttcgtaacttttgggtgtgtttagggggaagattttatgatgggtttggtttgaagaaagattagagttgatgacaggtagtgaaatagtggaaaaaaggttagggttaatgtagagatagtggaagatttggaagaagaataaagaaagttggaagtgtggagaggacgaggttttggatcgtttaaccaccattgatggcttgatagatgaagaaaagagctttgagacagacagagataggtgactctcttttctttttttttgggtttttcttttttacttttttactgggaaatgaaatgtcagtctgtcacggggctgttcctttagtgtcatccctctctgcctctcttttgttcacacaactcttaagcaatggataagtaagtaattagtaaaagaaaagtttgttatatgattttgattcccacatcaggtggatatatatttcctaaaatctttgcatgcgaaatcatattttgatgaaaaaatcaatactaagaaaacatgtactctttttttttttttattgacagaatttgacaatctaattttagaaaagaaattctcacaaaccgagagataacagtaataagtaacaacaacccataactgggtaacacaaattgacgtcaaaaggcaaaaaaaaaaaaggggggtaaatctgaggaaagaacatcctaaattcctaatcaatttggtgtcaaaacacaaattagtttcacaagtatgtattatcatacactataatttcgataaatattagtatattacttactaaatccactaaaaaaatttactatgttcttaagaaaacttaccattgagactactactgacagtctgacagaagtaaccaatacaaaaagataaaaaggtgatatgtactatatacccaaaacctaatgagccttgttattagcaacaaaactcaggtcatatagtagtatttaaacaagtgaaatggtaaaatcgtatagaaaggaatttggcaacctattaattaatggatcattaaatatttagaagcacacgagcacttaaataactcgatttttgattaaatgctgaaatgctggtcttctttgtggatcaacgtgcagagtttgtcctatgccatttgttactccagattaataaatattgacaacttctattagtattgaaatttgagttgtggcagctgtttttagttgtattggttttctcggtgtttgtttccaacaactagtaccaaatcatcatgtccagtttttttattattactagtagtattttctttcgtcgacctatattattgtttcaagttttgtaaccacataatctaattagcacagtaatgtagtcatcaaataacaattcgtcttgctcgagtcctgaatccaataccctgatctaaaccattttctatgggagtatgggaatgggactcacattttcatgtgggtgtttttgtatgttgactgcttcacgcggttcgtatcgttctactaaattattggtaattgttcggatatataacatttatgaaaaccatttgcactttcacatgactcgcattaatgccactttcctcattttccatagttcacataagaacaacatagtacatatactataaactatgtgattgattactattttgaagaaaataaagcttgcatacatacaggtttctgtattcacatttagattttcggattcacaagctcgaagtattcatatttgtattttcaagttattttctctgtgttatactcggaaaccacattggcctatctaattaacaaaacatatgatatgcttaaatggcattaaatgctaatatgaaaaacatgtcctatggattattggtaagtgcgagatttaatgaaagttacaatgcttgatttcttaaaggttacaatttcgtactattgaagacaaactatatttgcaagagaagaaattagctaccaaaattaatacagtatagtattccctcttctgtcactatctgttcactgcttctgcaaaccaatattaaaacaagttgacctatttgcaactatctgtctccaattatgtttcaatttttgtgtattttggattttctttgctcggcctttttccttatatggattctgaatgctaggaaaaaacagaatagagtgaattggttctcacatgcatagaagaattttcaagagaaacatatttgctcaactaacaactaccaacccatcaccaaattttcgtttcatttgttgtacaaattatagacccaaaaatgttcatccacaatcgattgaggtacctcatgtacacctatattaaacatacaacataattccaaaatggtttggatccggtctggttttttactttgaggcaaataacattagattatttaagattgaaagctcacaactagccttcttttagggcaaagtacacgtaaccaattttttaattttcatatcgaacttaacaaattgtaaccatttgcaaaaatgaagcaaacaaaaagtacaaaacagattacatggactattatataattggaagcccgtttggccttaaagcccgttaaaaaaacatatgtgtattttttagcaatatgtctgataaaaaaatttaaaaactaatcttgtttaattcagtaagacatttactagacttttcacaattcaacacagttgttgttggttgagctacccagccagtatcaagagaggaaggtagagaggagtgagagagagctttgggatcgatttcatgtcgtagatctttcactctgggtttgcgttccacaaaatcctaattcgcggaactctggatttgatcggcgatg

SEQ ID NO: 34920 - DNA, 3003 bp, Unknown; identical to SEQ ID NO: 34919
  misc_feature (1)..( 3003): 2750-1469P.txt file - cDNA_ID_3083099; gDNA_ID_2926239; Annot_ID_204014

SEQ ID NO: 34921 - DNA, 3003 bp, Unknown; identical to SEQ ID NO: 28656
  misc_feature (1)..( 3003): 2750-1469P.txt file - cDNA_ID_3083103; gDNA_ID_2926239; Annot_ID_204013

SEQ ID NO: 34922 - DNA, 3000 bp, Unknown
  misc_feature (1)..( 3000): 2750-1469P.txt file - cDNA_ID_3083111; gDNA_ID_2926239; Annot_ID_142838
caacggtggtcctatcgttagggaaaaaggacatgaaacaagatgcttgattttaacccacgaatgataattagctttacgattcccaaagtagttcttgcaaattaccaatcgtgattgattattcccacctatttatgtcatttgttaatcttgtgaaatttagctttttttttggtaagccttgtgaaatttagcttaaatagtctatattacaatcaaaagaaataaaacattccataattattaaggtaaataaagttataagaaataaaaaaaaatagagagagaggaagcattggggggggggggggggacttcacttggttttgtaaacatttgtttatgtacgtacatgttcatttgatagccgagtacatgtagcttgattatttgtattgttgtcgttgttgtgtaccatccatattcaaatcagtatgtatgttgttgacatcaaataataattccatttaacaaaataatttaaactatgtatgctatatgcctatattataaatcatcttcatttttagtctaattaaaattttaaaattaaaaactaccaatgaaatcatccacgatctgattcaatttcgttgcttaagggtcagtcaaatggtggtagcagcactatgggaaaaggtaatccactttcctcaaccatagccattagttcagacatgataagagttgactcataatctaaaacattaattgtttctttaattagtgttggatccttattaaatagaaaagatttggaaatgatgattttggttttggtagcaaatccactaagtattcacaactttctcctggcaataatcacttaaaacacatttaataaaacttgattggtctcatgactccctaaccacacatccacgagaaattctttgctacttgatttttttttttttttttttggcagtattgatcactctagaactagatgataatgatcgtttaaggcattaatttcgatggtggttacagtattaagcataaatcgatcccttaatgcaaatgtgaatcatgtgattataattactgttaaacttggagacttatatgattatgtttaagtgtgtttcttcctttttacccttttctcgtgagtgattatattggtgctagaatgcaatatattaatcgtttaatatactgtggtagtgtttaaaaacatgattaatagatgatgatatcatattagtatgatcttagaaaacaaatttcaaatgtggcggcgcaataatatttttgtcaatagtgaattttaggtaagatccgaagaagatacgtacgggagttcagaaatggttctacatcattcggtaatcttacctatttttgggtaatattacctaattaaggagttgtgtttttaacgaatatggtaaatagaccaaggttttcaaaaaatgaaaaccatatccggaaaagttgttgttttattgaattgaagttaatttaagaggctatatataagagtttatttaatacttctacactaggttcataattcaattttttttaaaatatgtatattaaaacacgtcaaatttaccataaatttcagcatggtgtatgttagtacgtagaatcgttcgtcgtacgtagtgtcatatactcatatgttaatatgtacatcataaacatgatgcaagcacaactggctatcgtggatatttgtggtgcaaatattttcattgtttggtatagagttattcgtatataatttttttggtttaatgttaagagtacgtcttatatttttttttggtttaatgttaagagtacgtcgtgtttttaagtgtggcaaatatgtaaacgaatgataaaatcatcatttgtaataggattgtaaattaaaaacatatcctctagaaataaaatgtggtatatatgacaaaaagaaaagaaaaaaatcttttaagaatttgttgatagcgaggatcagatcctagaaggctacacagagggtttatccagaatcttgaaaaaaaaatttggacaaaaaaaactttggtactttggaataatttgaataagaggtttttgtcacttggctcaggcattagtattaatgttttgggttttggctgtagccaagagggagatatctccaaaaagacccaaagagagaatctttactctattggcatcaaatcaaacgcatatgatataaaggttttactctataagattctaataaaaatatttgttcaacgaaatatgcatgctaaggttttttaagctatgggtataactttatatttggtttcactttcggttgaggtgtaaattcatttttggcttcataaatagctcaaagttgttgaacaagaataaaacttggtcatcacatttctactttaataaaatttcttaactcatggggaaattcatgcatgaaatctttttaattcgtagaaaacttcgaacaaatttgaggtttcttctgtctccatctctatttgatttggcaaatccgtttgactctcttttaatcataagagttcagggaattttcaactttatttatgtctctttttaggtccacaaagccacacaagttattatctgaaaatgaccgaatggaaaaaaaaatgactaccactataccgagatttgtacttatcttagatcaaagcttcactatcattttcttccctgtattattatatagactttataataatcatcaaatagaaagtcgtgtgaaattaaatggtagctttttatgtcatatatatttacaaataaatcgaaatggaagttgagaagttcgtaattatgtgtcttctatttgtaaacctaacgtgtcgtcctttttttaaagaatcttggaagcactatggaggaagagtcaaacatagtgaatgttatccattatataagaggaccaagcttctccacaaacacatcacacacttactcagcaacaatcctctttctctctctctctctctttcccaatcattaacacaaaaaattatg

SEQ ID NO: 34923 - DNA, 3000 bp, Unknown; identical to SEQ ID NO: 34922
  misc_feature (1)..( 3000): 2750-1469P.txt file - cDNA_ID_3083111; gDNA_ID_2926239; Annot_ID_204009

SEQ ID NO: 34924 - DNA, 232 bp, Unknown
  misc_feature (1)..( 232): 2750-1469P.txt file - cDNA_ID_3083122; gDNA_ID_1591517; Annot_ID_151099
tcatagagcagaaaccaataatttcaagtttgagggccatagattatcagatagaagccaattcaaaccgtcaagcttacctgattccagatcatttagtacccaaggaagaggtaatcaaatttctataatttgcttagcccataaaactaaaattgtctttggaaaagatgcctcgcgcagtttctaatatatgttggttccggaagtaggggattctccagactcaatg

SEQ ID NO: 34925 - DNA, 3003 bp, Unknown; identical to SEQ ID NO: 28655
  misc_feature (1)..( 3003): 2750-1469P.txt file - cDNA_ID_3083122; gDNA_ID_2926239; Annot_ID_204006

SEQ ID NO: 34926 - DNA, 3000 bp, Unknown; identical to SEQ ID NO: 16190
  misc_feature (1)..( 3000): 2750-1469P.txt file - cDNA_ID_3083130; gDNA_ID_2926239; Annot_ID_204002

SEQ ID NO: 34927 - DNA, 3000 bp, Unknown
  misc_feature (1)..( 3000): 2750-1469P.txt file - cDNA_ID_3083154; gDNA_ID_2926239; Annot_ID_203992
tagaaatgagtttatacaaaaataaggatttatggttttgattgtgtacctaagtcgtgttctcggggaaacagtggtaaacgttgttattgttgttgtttctgatttttgcggttctagcatgaatcccaaagaaccgaggttttcgtcatcgtcatcatcgtatgggatcccaatctgaagaagcgttttggagtcatcaacgatggttttaccttgaaagagcactccaatgtttaatccacccttgagaatctgcgttaccgcctccaataccgctagtttcagtgagccaaccgtggctgattcgggaacgtctaccaatagctccgagatattcaacgacttaataccgaatttcactgaaaatgcaacaagagaatgttatataaataacaatttttcatatagatttgatctcaaatagatatacataccggtacatggagtatcatgtgattcagatgaatgattttggtaaaacagctttcgtttcttcaaaggatacatattctgcgattcttggctaatacacgaacctcgctcttttaagtgactcacctttcttttactatctacataaatccaaggaaatacaaaaaaaaaaaaaaagaaggtcaataatattcttcatttctctgtaaaaaagctttccttatatataagtaaagttcgcgagtgatatgatgacttgatcttaccgatcttggaacgtgaatcaaagttttcttcttgtgtgattggcgagttaggcatggaagggccaagagctaaccagtccttagacaataacacctgagaaaggttctccagaccaggttgcggcttaacctcaacttccattgtctccaagaagttattgacgacgacattatcgtccttcgtctcctttgtttcgtgagccaacgagccgataacaattcggtttttacgctcacctgagaatcttccagccacttgggctaaaacctcgaactccgatctttgttttctcataatttttagcctgcgtccctggataaaaaataaaagatgcaatcgagtgagccaaaatgtatgtaacttatggcaaaataaatcatgttcgaatgtatatgcgtactctgggtgatctacatgccctaggaacaacaggaagttggtaaatatcgacaccacagtccaccatgttccttgcaacacacacaactgcaaattgcttacgttaagcctgagcctgcgcaatctcggtttatcaaacattcatatatccgatatatgagacacaaaaatgatgaggataattggaaaaacaaacattcgtcacaaatctcatacaaattcacaaaccttttgattatctgaaacgattttgattttgtgcgagaaagaaaagtgagatttatgttggaatttgtttgtgtggaagtaaaatatatagaaagatatgagccgtataaaaacatccgcctttaaagttgggtttgtgtctgaacaaaaaccccatgaaaccacaaaaattctttacaaaaaaactccaatgttttaagaaaatttgaactcaattttaacaacacatgtcaacatctgagtagtctgaaattatcagtaaatttaaaacgttttctgaattatatttttctctaaagacatgtttttttttgggggctaaaactaaccaacgttttttttagcttttagacctaaaaccctcctccgaacagtttggaccagttcttcgttcccatgacttctcaacatcgatccttcttttaacacgtggacgactctacattattcatggataaatctcttctcattcactaatattttcttgttgtggaggaatttctttgcgagtactttttggataaataacgtggcaaaatggagtacatattttgttccattcggaagcattttaggatgtaactggcaatcagttaaagaaacgtgttgaataaggtgtatatataatagaaatcaagtcaaatgaatttgaatggaaaatgtgattgcagaacaataaattaaattgataatgtttaaaattaatgttgaatgatacttaattttaagtaaaactttggatttaatctttttcgctaacgtagctcccaagttaacgacaatatatggtcaacaaatttaaagttgccaaagcaatctaaggttatatatattattggtagttaattctcatatctagcgaaaaccataaaacaataatcattcttaagaaagcttcaacttcgtcactttcattaactatttatgttttaactgtttcaaatcaaactgataatgataggttggattttttagtagacaattcggattccaaatgccaaatggtatgtaggtacataaacaatatagagaaagagtaggtcaccgatagaaagcacgaccaaaagcgtcgatgtcaaagctcgatgcttacgtactaaagatacaagtagacgagtcaattacaataaaaagaaacccctggacgacggagcggttgaactacttaacaagtcagtcctaattcggatgataagcaaattaagcaaaagactcggttctcttttttctttttagggccacttttatttagggtaataaataactattatccttatgatcacaaaatttatttatttttcttactaaaacttttgtttataaattagtttgtaaacaattttgagacacgaaataacataacttttcctttttttgttttgatgattgttttttaggaaccatgtgtgatgcatatttggtaaagaccattgacttatttaactctttcctttttttcttgttttcagactcaaaaactccaaccaaaatttgcttattgttgtatagattgaactttgcacttagctcccaaagtccaacacccgattaaaaactcccataaagagctaaacacgaaacctaatttctccctacacacatctcaaatctctccaattttgttcaaagctcgaattctgttcaaagctcggatttttaattgcttcaatg

SEQ ID NO: 34928 - DNA, 3000 bp, Unknown; identical to SEQ ID NO: 28651
  misc_feature (1)..( 3000): 2750-1469P.txt file - cDNA_ID_3083159; gDNA_ID_2926239; Annot_ID_203990

SEQ ID NO: 34929 - DNA, 3000 bp, Unknown
  misc_feature (1)..( 3000): 2750-1469P.txt file - cDNA_ID_3083163; gDNA_ID_2926239; Annot_ID_142814
cggcaaaatcaaataatctttttcttagttcgaatttaatttcccaagagaaaaatgtcaggccgaggaaagggaggaaaaggattaggaaagggaggagccaagagacatcggaaagtactcagagacaacatccaagggattaccaaacctgcgattcgtcgtctcgcgagaagaggaggcgtgaagcgtatcagtggtttgatctatgaagagactcgcggcgttctcaagatctttctcgagaacgtgattcgtgacgccgttacttacacggagcacgctcgccggaaaactgttacggcgatggacgtcgtttacgctctcaagagacaaggacgaactttgtatggattcggcggctaaatcgttcggattgcaatttcggattttgtaaactcttcaatttcagcatctagggatttcagatttgtaatttctcagttaaacgatgaatgaattgaaaaaaaaagaattgtcttcaactttaatttttaatcatatacagtaatcgaaacgtgatttaactaatcctctgtttattacgaaatcattctaataatcgtaacgccactttcgcgtttagttaaattttccctgtgaaatgctccgtatgggctcataataagttacagtaaaatcttttggctaataatgtagtggcccaacatatatgttttgtttgggcctattataataagtagtcagcactcagtaaaaccttttgtagtggcccaacaaaatttatcgtcgaagtctcgaaatcaaatttttaaattgattatgtcaagtgataacttcattgaaaaattctagtgtagggtaactggaagagaatatagattcttcaccaatcaggtgcaatcgccatattactaacgtaattgtacaaaaatatacaattacatcaatgtcaatagtttagtgtacattaacatattctcaatcagtcgttactgaagtcaaattttataatgagttgttgttgtataatgggactctctacctagaacagttcgctgtacttatactgtagccactgaaaattacttttttctctaatcgacccatttttctgattttttcgaccatgaataataaaccacttttctttccgatttacacaaatacaaaagctatggagcaaaatgtgttgtttctttttcattattattgctatagactgtttcatacacaagttccagtacaacttaaaacaccatgatttcacagacaatttcactctgccgaccttatttgggcgtgtgagtcgtcaatgtcaaagctatagtgtctttataaattgaggatgtattcttttctttcttttttttgtcaacaaaattattaggattagcaatcttattttctacaaagagatacaacaagtgtatttgacataactcttatgacatatctgatcaacatgcaaaatatgactttgagctgcaatttaaggtacaatagtctagctagattcatgaatcttctctataaatctttttttttctttttttttttaatgttctatctttgagctgtaatgtaaaaaaagatgggtgagaccaaacttgctatgttttgaactaactgttcctcaaaatttggaggaccacttgtttggcacttttggcttgccttcatgaaaagtccaaatctatttcatagaaagggaaatgaaataacgatcgcctcgtgattttcagttttttttttttttttttttttttttttgtaatcagtattcttgtgaattctcccactatctaaacttttaaaaagtaatatgattgacgtagtttctcttaaaaaatttaaataagtttttttccattggatatgtgtcttggactaatatttcgaccattaggtaggtcagaaaatatggatttcgagtctataacttttggtgacctttttatcgcgtcaatcggatttgagagatccttaagataatatgcacaaaagtaactaacgctccaaaacatctaatagaaaaccgtgtgatcattatattaatcttaaaccacaaacatacataattacttaaccatgaaatggtcgaaataaagtgtgattacaaaatttatagcatcttcgaggcagtccactgctttagatcctttatttctacaatttcagatgtctctttgccacaatctaactcttaattttttcatactgtatatgatagtcatagctattatcaacagttttatttcaaacttgacgaacaatctaaactagataaaaagttaggaaagtcgtaaataccaagcagaattgagataccacttcttggaaaaatcaacagctctatttaatgaaaatattgccaacttatatcgaaatactttggaatatatgagaagtcatagatacgtgtcaatttggttgcacttgtaaaacccatccacgccgacgcagcatttgtcaacgcccatctctcgcgtcccacgtttgactcacatgattcctgcttcggtgataagccactcttattttagtttgcaatttccgtctgtgagacgagttgtttctttttttcttctcaatactaaatttatgttattagttttgcttgaaataaaactgataagaatgagttatagcaaccacaaattgtttttgagtagatttttactttctatactttattgtaaacatgaacaattcaaagacatagatggtttctaattatagcacccaaaatctaatggtttttaaattttctactaaaaaaacaaatatcataagaaaaaaaaaaaaaaccaaatacttccactcaaggtctagtcacacgtgagatgcaccaaaattacaagtaacaacataattacttttttgaatcttcaaaccaatacatttataatttttgcctataaatttcttcacatatcttcttcatacttgaactatatcacatgttccaaatatagacgagaacaaaacaaaaaaaaaaagtcgtcgataagagagtcctttgaaatccccaaaatg

SEQ ID NO: 34930 - DNA, 3000 bp, Unknown; identical to SEQ ID NO: 34929
  misc_feature (1)..( 3000): 2750-1469P.txt file - cDNA_ID_3083163; gDNA_ID_2926239; Annot_ID_203986

SEQ ID NO: 34931 - DNA, 3000 bp, Unknown
  misc_feature (1)..( 3000): 2750-1469P.txt file - cDNA_ID_3083167; gDNA_ID_2926239; Annot_ID_142813
gcttatgttttatttgaacattaaccaaccgttgtataaattcaaattgatagctaggcaggcccggctctaggggagtgccagaggtgctagtacacagggtcctcatttttttttcttaattttaagtcttctagtttgcagtttttttttttttaaggggaaaactacaaaaaaaacaaccaccaaaataaaagataataagtttaaaataaaaatacagtaaacacatgtcacataaagttattttgtttagatttaagggctatttttgtttgtagcacagggcccaataaaatattgagccgggctgctaggtttactatcactataatagacacggttgcaatttgatagctaggtttgctctcaaccgttgtatagtaatattagtcaccataatacaaatctgcagttcattaatcatagactgatggacacggttgcaatttgatagctaagtttactatgtgcatcgaagatgatgcagttagcaatggtagcttcaaaacattagtccgtgattcttttgtcacctccgaaataaacatttttatcttaaatatatgtgcaagattatactataatgcttctggaaatatgtagtatataaaattttttgtttaaacgtgtcttcccaacaaagattatagttatatactacacttttattataaaggcgtttcttattgttttggggtaataaagaaaaactgatcaattaaggactagtcatatatatgcatgcatgaaaactttatttttatttttttttctgcatgaaaactttatacgaatataccttttcgaatgggccaatgtttacgtaatcgtcacttactgatccacttgcagatttatgatcttcttcataatgcaacaataaagtgaaataatgattacccattaatgtagtaagtgtggttatttttaattaaactgtttgtacgcggggttgactttaaccaggtactaaacgacgagacgtttgcaatactagtgctaatggcactcttcacaacgttcataacgacgcctactgtaatggccatttacaagccggcacgtggcacccaccgcaaactaaaagacttgtcggcgagccaagactccaccaaggaagagcttcgcatcctagcctgcctccacggcccagccaatgtctcctccctcatctctctcgtcgagtccatccgaaccaccaaggtaaattacctttcttttatatttttacgttacaataatctatatttaaatttgtaaatctatgataagagttatatcagaaaattaagatatcattgaaatgctcaatgaaaatgtatcctacgtataattacacacattttgtatagttaaaattaaaaatcagctgggtaataatttataatcttggttaataatttaaaaagtcgtatttgttttggcagatactacggctaaagctgtttgtgatgcatctgatggaactaacggaacggtcttcgtcaatcataatggtgcaaagagcccgtaaaaacggacttcctttcgttcaccgttaccgtcatggtgagcgtcacagcaacgtcataggaggcttcgaagcctatcgtcaactaggccgggtcgcagtccggcccatcaccgcagtctctccattacccacaatgcacgaagacatttgccacatggcagataccaagagggtcacaatgatcattttacctttccacaaacgatggaacgctgatcatggtcatagccaccaccaccaagacggaggaggagatggaaacgtaccggaaaacgttggtcatggttggcgattggttaaccaaagggttttgaagaatgcgccgtgttcggtggcggttcttgtagaccgtggacttgggtccattgaggcccaaactttgagcttagatgggtcgaatgtggttgaaagggtttgtgtgattttctttggtgggcctgatgaccgtgagtctatagagctcggcgggagaatggctgagcatccggccgttaaagttaccgttattaggtttttggtaagagaaacgttgaggagtaccgccgtcactttacgaccggcaccgtctaaaggcaaggagaagaactatgcctttttaacaaccaacgtggatccagaaaaagaaaaggtaaatctcttttgatcccctatgtttatataccagttatgacaaatataactatagctttctttcttggaaaaataattataggaattagacgaaggggcattggaagacttcaagagcaaatggaaagaaatggtggagtacaaagaaaaggaaccaaacaacatcattgaagaaatactgtcaataggacagagtaaagactttgatctaatagtggttggaagagggaggataccgtcggccgaggtggcggcattagctgagcgtcaagctgaacatcctgagttaggtcctatcggagacgtgctcgcctcttcgatcaaccacatcattccatcaatccttgtggttcaacaacacaacaaagctcatgtagaggatattacggtttccaaaattgttagtgagtcttctctaagtattaacggagacacaaatgtatgataacaataaataaattgatctagtacttaaacttcggcttaatgcatggttaaagtggttagttgaagatgtagtttatctacaatatatagatagctcttgagtaagaattgtaagatcgtctacatataaataaccatgattgggcatcttgggcatcgtctacatataatttcatatttggactaaatagtaaatacaattatcatttgggccatttgagaaactaccggaaacctctcacgtgccagagacacgtaccaaaaaaaaccccgaacatttattaggaagaagagaaaaaacggaaaagaaaaaaaaacgcatcaatctgagcagcacaagtctgcgagatttggattagatctgattcaggttggattgatcatcgttcggagctccgggaaacatg

SEQ ID NO: 34932 - DNA, 3000 bp, Unknown; identical to SEQ ID NO: 34931
  misc_feature (1)..( 3000): 2750-1469P.txt file - cDNA_ID_3083167; gDNA_ID_2926239; Annot_ID_203985

SEQ ID NO: 34933 - DNA, 1472 bp, Unknown
  misc_feature (1)..( 1472): 2750-1469P.txt file - cDNA_ID_3083193; gDNA_ID_2926240; Annot_ID_142871
tcgactcacctcttcctcctttctctatcttgtaccaataatctcttcagaaactaatgcatgtataggaaacggggatatatatcaaaatagttgctcgtatatgatttgtcgtccacacaaaatgcgtctcatttattacaacatataaatgaaagaaacgcgtctaatacatgagagtatgattatagctaaaacaaactaagcttgtaatagtaattcttatataaaccatccctcgccatagaattttgaacctcgaaatcactaattatccagccatttctgagctgtatttcaaaattgtgggttttatatattattaagatatatacaaaattataaggtcagtaattcttctttgatcgaccaatgtagaaggggcaggtaccaaacacaagcctaggcatagtgataacgtttggtgacctgtttccatcgtactcaaaaacgacctttgctcaacttgatacgctgcgtttcatttattccttgctgtggattttagcatatttatccagcactttaatatgggtcatggaatgggctcataacagtttactgtcttctattagactcaaataagtccatcaggcccaaccatttaaggtcgtcatttgatgtttgactttttaacgacacatcatgcacgacgaattaagctcattacataacatcaggatggtaataacaatctaccaaaccatactttatcatataaagaatatatactgtatgcgtttatatatttaacatttactggagtattttttggcccaaaaataaatggagtaatcatttaatctttccttggaagccttgcgtgatattagtgcttttgatttgaactgcattatcaaataaatttaaagacatacgaagaattgaatagaagaatgtattctatgctaataaatcgacgagaaatatatatataattcccactatttgatcactattggtagtcaataatataaaaaaagaattataattaaaataaaaaacttaggtgaaggtggatgtaacgatcaaaagcaggttgaatacactaactgatttcaaccacaaccacttgtagacaatatacttgtagtacaatataattgatttgcaataattataataccttatgattctaagcaaagtttgtccatctttaagcatggataatcaacggttttaactactttcatgttcaccggttgaataaattattttacctgaggttctgatcacatgcggcaaccacacggtgaggcgatgattataaccgttggatgaatgtcacggaccgttatataaattccaccactctcgcgtcgttaaaattaattaaaaatctataaaggtaaaagatttcatctttctcctgacgcgttttggcggttcgttctgcacagtttcttcttctgatgctctttttttgtttttaagaattaagggtttctactttaatcgattggagcacaatg

SEQ ID NO: 34934 - DNA, 1472 bp, Unknown; identical to SEQ ID NO: 34933
  misc_feature (1)..( 1472): 2750-1469P.txt file - cDNA_ID_3083193; gDNA_ID_2926240; Annot_ID_204063

SEQ ID NO: 34935 - DNA, 3003 bp, Unknown
  misc_feature (1)..( 3003): 2750-1469P.txt file - cDNA_ID_3083201; gDNA_ID_2926240; Annot_ID_142867
gtgagacgttttcaccgtcgacaagtttaagaacggttaggtttacgtaaggttggtttgtcattctaaccgcaaaggccagtgtctcacggtcgtctgctccaccgaggaatattgaacagatgttgattctcattgagccgttcttcatcgccgttcccatgttcttgaaatctggaagccgtccttggtccattagaaccgcaacggagctaggtgaggcattccggacgttgcgacagagccttcgttctgctgcagtcccgtcggccatcccgaaaatgatgagatcggtttctttttcgaaggccaaggcacatacatcctcgtgcatcgtcttgctcggtgcaactgctgtgaaacattcaacggaaacgttttcttgcaaatcgtggccgcttcggaatttctcgaaggctttggagatctgatctctgcggctggaagacgttgatgactcgtcgttgtgacctggatggtgttgaatgaggagagggacgttattttgctcaagctcttcgagattaacggaaacgatggagtgcgaagaggcgctcgagggacaagtagagagctccaagacggtgaggatgggaggaacggtttcacggtggtagaaacaagtgaggatcttgagaggtttgtttggttcgtagtgttgaacggtttgtcgccggtaagtgatgtgtttcctctgcacccacccgtagagatttttgacaatggccgtgaaaatggtcgagtgaaccatggcagagatcaccattatcccaaatgcctcgtggcttatattctgcatcccttaaaacaagtagttaaaagtcaaaacactaattggcgatgaatgatatttcatttgtactaaatcaatgtgtaccttgtagttcaagagctgtttgaagatttggacatcgtagatcccttgtatgcagacgatgaagccgacaatcactgcgtgtgatataggaacttggaagtaaagcgatggaaggacgatggaggcaaactttgcagcactaatggtaaagataaggaactccaaagatatgatgtcgcgtagattgaatgaaaagaaatccactttgttaccaatcccgatgacgtaacacggcataagaaccgcataacagaagctaccgatcttgtcagtgagaccagtaccgaaaggaggcgtcttaggagtgacaagaccgagagccacggatccgactacgtaaggaaaccctacagtttcagacaggaaagtggcggtgcacaacatgacgcaaatggtgcatagatgggaagccttgagtttctttccttcaggggttctcttcactatccagttgaatattggtcggcacacaactactataccaaccagcagtagtacctttgtgaaggtaggcagataagtggtcttggagtaattttgatgcaagaaactgtcaaaggtaatcaaaaggaggaaaaaaccccagccgaagcagttagccaccattatggaggagagggctaaccttccgggctccgagttcagcatcttgagattcgacaaaaccgaatacgccacttgaaaatacactacggattggtttgttagtaaattgtggagctgctcgggattatttttcgccacggttccacggatgttgctcgtgattactgtacatgctatggcgcccaccacgtaaggaaacagaaaaagagataatccattgatgattgctagcttgcctcctcgctttataactcccatgtccacttgagccgtgcttatgtatgagatgaacatgaaggatattgcctcaaatgattctattatgaaatagcttcttgtgttgaataatttttttactaaatcaatgttttgtcccaaagccgagggtcctaagaatatcccagcctgtttcatatataccaacaaaatatcacacttctatagtttaaacctttttttctttgcgggaaatatagagagatccaaaatttattaaaaaaaacgtagaaaatggtatgataaagtgattacataccagaatttgagtgacgaagtcgacatttgcgagagggcggagaagagcttggaagacggaagagagagaagagacgagagaaatgagaagaagaagaagaggagttgaatatttcaatggatcatctcctctaagtaatccgccagagcttgatcccaaccatgcctcgcatacaaattcatgtgtgccattacttgtaacactattgttcatcttgtttctctttgggaatattttttcttcttaaaactagtattcacgttcttctttataaccatttttgtttgtgtttttgaattcagcataacgctaactaattgagcaaacagatcaagcttgttgagctggggaagaagatacatgtatcttttttaagatattaaacagtttttgttgttttttcaaggattttgtgttgactttattataaccgtcagagaaaaataggaaattatatatgtcatatctcactttggcagatgtattttttggtattttacacattttttttttattatagttttatttttttgttgatcctgatcttttttaaattaatacttataaggagtattactaggttgattattaattaatctttttttgttagggatctaacttcatggatttagtagctaggttggttattataacatcaacatgcaaaatatatattacaaacacacatgtttgtgcaatcaatctcaggctataatgatgatcatctgaccatgctcaagatttttgtaccacacagaaaacatatatagaaaaccttaaaagtaggatgacctctaaagagaaataaagaacaagaggataaacaacatgtacaattaaacccctaaatatagctagagagagcagaaacaaaaaaaagaagagaataattaatactttcttcttttcttcaactcacaacacaatctctctctttccctctatggcttgactctttaggggaaatacctagcaggagggaatg

SEQ ID NO: 34936 - DNA, 3003 bp, Unknown; identical to SEQ ID NO: 34935
  misc_feature (1)..( 3003): 2750-1469P.txt file - cDNA_ID_3083201; gDNA_ID_2926240; Annot_ID_204059

SEQ ID NO: 34937 - DNA, 3003 bp, Unknown
  misc_feature (1)..( 3003): 2750-1469P.txt file - cDNA_ID_3083209; gDNA_ID_2926240; Annot_ID_204057
atataacttaacacacaaaaacccaaccaggagcgaaatcaacaaacagataattctgaaacaaaagcgcagagcagagtttccaaatcagtaaacaacgaaattccaaccttacatctcaactcctcgtgaaatcgaaacacgataagaaccatgcgatgacaaaaccctaggaaaataagcaaaaggcaacgactgaaacctaaatgctcacttaaactggaatcggagcttgatcaacagagaagttgagtgagagcggtgaaaaatcgaagaagacgaggtctcagagagaaagagagagagagggagaagaagcttaggccatcatgactgatggcaatgcaaaagacgatgacaaagccggaggagcgacggaaactgagcgacggaatttttagagccttttaagctgcaaattttaaatataccttcttcttcttcttttttttcaatttcttctgctttctaatatacaactttctcctttttactttttctacggtaaattttgaaagaaattagacattagtcaaactgtttacaagtatttccttctgcggaaaaatagacatcgatgcaaaatatttttaaaaaatatatatctattaatttatcatttttaagaaaaaattatcctttgcatataaaatgcgcgtaacaatgaatttcctcgatgaatttgaagaaaaacaataattggtcatattaaaagaaaaagaagaagtaaatataatattatctataaaaaatcatgtgttgtcaaatcatgcaatgaaaacatgaatacaataacacaattcaatataccttttagcatataggcatggtcataaactaattaataagaatattgtttcttttgttgataaaatattgtttgtctccgaagaaatatatgtagggagatattaagttattatgattgtttctaatgaagtgagacattaagacttattactaatagtagctaacttaaatggaaaaatgtaaaccgtgaaaactataatacttctatcaaacaaatgaaaaaggagacacatcttcctcttttatacttttaccctttttagattttattagatgtggacatgcaatgttgcataagccaaacagtaaaagttgtactaaacattatataaatgctcaactaaacaaagagaaacagacattataataatcgctagttttgtacttaagtgtggttgcgtgatagaaatatttgttttatagccatggtacgtattacctaagtacgtaggatcgtaaatgggttgagagaatgaatgttcttgatcccattttcttatgacagtattttgatttgggtgatttgcagatataacattttttcactaaataattaactaactaacaccataaatttgtaaatgtaataaataaccttcaaggggtgtgaaaagacatcactgtcctggtgttacgtttgtcagcgaggaaggaaaatgtggtgacgtggctttattattagtgttgaggtgagaaaagaaatcaggtggtatgagagaagttcctttttctctttcttttttctttaccccttcccaattgtaattcatattatctaatctttaaaaaattaattcaagttcatgatatatcaattaaaaagttgtatagttttctacatatatcatgacttaaattttttaaaacagacacaaaataatttagatgtgaatagtgttgtcaatgaataacataacgttctgtatagatacacaatatttttttatggaaagatattaaaccctaagggataatatatagggaacccaagggtttaaatctaaaccaataattaaatcacttaacatccttaatcaaaacaaataattcattttaaaacgtatataaaacaaggtatacgtaaatagtatatttacaaatagaatagtatctctcaacttgcaacaacaaaactcaatttcataaccaagacaccaagcgcaacaacgaaagtcgattccctgaatccaaattgtgttcctctctctgtaattcgaaacccccaaatcaaatctcacccaaaagtaattaagagactctgatttgaaaacaaaaacaagtaacgatgtaggtgtgaggactttactggggagaaagagagggggagggaaaaagaaagagagagaaagagagagggggagagagagaaagagagaagggagagagaacggaagagagaggtacacataaagagagatgagagaaatagatagaggggtaaacttggaattaatatacaaaatatagaggatatcatttttttctttttttaatgttagtttcttaattataaactttttgttggttagttttgccaattccccttttgattttatgaaaatagggttttctcaataattaagttggtatcatgagtaaaaaatcatttcaagcataaacaatcttaaactcttaaattgtttacgactaaagctttttttgttttcgtaaacacatcagatttatcacaagatgcaaccaaaagatttgccaaatcctcaaaaaaaaaaatcgatcaaagcgtttgcgttttttcttttcttttattttttttaatgaaaaataatgaagaaaacaatttcatgcaataattacgttggaagcctttttgggctcgaaattcgaatgctttatctatgatgggattgcaagaattttttattaaaaaaaaaaagttatggcgtttcggttaaactcagaaactctaatcgagttagaaaactcacgatcgagttttggagctttggttaggattgaactacaccagttattgcaaactccgaaaagaaatcaaggtccgcataaccacgaaccaaacaagaccggaattaaatccccaaaagattaaatgttccaatttggaccggtccacagaaacacaaaaccaggaccggaccaagcaaataacaaaagataaaattggtcaacgaaaagtcagctataatctctgctctccacaacaaattaacaatg

SEQ ID NO: 34938 - DNA, 3000 bp, Unknown
  misc_feature (1)..( 3000): 2750-1469P.txt file - cDNA_ID_3083216; gDNA_ID_2926240; Annot_ID_204055
cccatcatagataaagcattcgaatttcgagcccaaaaaggcttccaacgtaattattgcatgaaattgttttcttcattatttttcattaaaaaaaataaaagaaaagaaaaaacgcaaacgctttgatcgatttttttttttgaggatttggcaaatcttttggttgcatcttgtgataaatctgatgtgtttacgaaaacaaaaaaagctttagtcgtaaacaatttaagagtttaagattgtttatgcttgaaatgattttttactcatgataccaacttaattattgagaaaaccctattttcataaaatcaaaaggggaattggcaaaactaaccaacaaaaagtttataattaagaaactaacattaaaaaaagaaaaaaatgatatcctctatattttgtatattaattccaagtttacccctctatctatttctctcatctctctttatgtgtacctctctcttccgttctctctcccttctctctttctctctctccccctctctctttctctctctttctttttccctccccctctctttctccccagtaaagtcctcacacctacatcgttacttgtttttgttttcaaatcagagtctcttaattacttttgggtgagatttgatttgggggtttcgaattacagagagaggaacacaatttggattcagggaatcgactttcgttgttgcgcttggtgtcttggttatgaaattgagttttgttgttgcaagttgagagatactattctatttgtaaatatactatttacgtataccttgttttatatacgttttaaaatgaattatttgttttgattaaggatgttaagtgatttaattattggtttagatttaaacccttgggttccctatatattatcccttagggtttaatatctttccataaaaaaatattgtgtatctatacagaacgttatgttattcattgacaacactattcacatctaaattattttgtgtctgttttaaaaaatttaagtcatgatatatgtagaaaactatacaactttttaattgatatatcatgaacttgaattaattttttaaagattagataatatgaattacaattgggaaggggtaaagaaaaaagaaagagaaaaaggaacttctctcataccacctgatttcttttctcacctcaacactaataataaagccacgtcaccacattttccttcctcgctgacaaacgtaacaccaggacagtgatgtcttttcacaccccttgaaggttatttattacatttacaaatttatggtgttagttagttaattatttagtgaaaaaatgttatatctgcaaatcacccaaatcaaaatactgtcataagaaaatgggatcaagaacattcattctctcaacccatttacgatcctacgtacttaggtaatacgtaccatggctataaaacaaatatttctatcacgcaaccacacttaagtacaaaactagcgattattataatgtctgtttctctttgtttagttgagcatttatataatgtttagtacaacttttactgtttggcttatgcaacattgcatgtccacatctaataaaatctaaaaagggtaaaagtataaaagaggaagatgtgtctcctttttcatttgtttgatagaagtattatagttttcacggtttacatttttccatttaagttagctactattagtaataagtcttaatgtctcacttcattagaaacaatcataataacttaatatctccctacatatatttcttcggagacaaacaatattttatcaacaaaagaaacaatattcttattaattagtttatgaccatgcctatatgctaaaaggtatattgaattgtgttattgtattcatgttttcattgcatgatttgacaacacatgattttttatagataatattatatttacttcttctttttcttttaatatgaccaattattgtttttcttcaaattcatcgaggaaattcattgttacgcgcattttatatgcaaaggataattttttcttaaaaatgataaattaatagatatatattttttaaaaatattttgcatcgatgtctatttttccgcagaaggaaatacttgtaaacagtttgactaatgtctaatttctttcaaaatttaccgtagaaaaagtaaaaaggagaaagttgtatattagaaagcagaagaaattgaaaaaaaagaagaagaagaaggtatatttaaaatttgcagcttaaaaggctctaaaaattccgtcgctcagtttccgtcgctcctccggctttgtcatcgtcttttgcattgccatcagtcatgatggcctaagcttcttctccctctctctctctttctctctgagacctcgtcttcttcgatttttcaccgctctcactcaacttctctgttgatcaagctccgattccagtttaagtgagcatttaggtttcagtcgttgccttttgcttattttcctagggttttgtcatcgcatggttcttatcgtgtttcgatttcacgaggagttgagatgtaaggttggaatttcgttgtttactgatttggaaactctgctctgcgcttttgtttcagaattatctgtttgttgatttcgctcctggttgggtttttgtgtgttaagttatatggccttgttcgttagctgactgaaaattgtatacatttgtgtttcgtatttcatcatgtgaatttcttcgtgattttgtaatttcacatcaatggctgcctcataagctacctcttgagtgtcttaataatgcacaccatgtgtttgaaggttttcatccttctgttgtctagttagtaaaaccgtacgaaaaatctggagactgtgtctgtcttgattacatgcttgagcaataagacccgtttcaatcattggaaggactggatttgttgttacactgtaaatcctttgatattctttccttttacccaatcaatgtcaggatg

SEQ ID NO: 34939 - DNA, 3000 bp, Unknown
  misc_feature (1)..( 3000): 2750-1469P.txt file - cDNA_ID_3083220; gDNA_ID_2926240; Annot_ID_204053
agctaacaagaacaatttattggaaacttacttttaacagcacagctgaaaggtttgatcctagagagcactcctggatgaatattgcatcgatgaagtcgagaagaggctgccattctcttgttgttctgaatgaaaaactgtaagtttcttctccccatttttcttcttctttgagagtaactaacagacaaattttgggtaagagttttaaggttgtattcatatgcactattgcagatatgcgattggtgggtttgatggtgagacaatggtatcgagtgttgagatatatgagccaaggacagggacatggatgacgggagaaccaatgaaggatttaagaggatattcagcagtggcagtggttaaagactcaatatatgtgatcggaggatacaaaggggaagaggatgacatattagacactgtaggatcagttctgaacttgaaatgaaattaaaacaatttacataagcagacacggtttaatctttgatcatgtgtgtgtttgcaggttgagtgttttaaggaaggtgaagggtggaaaaacgtgccttcttcctcgatcggtaggcgttgctttctatctgcggtggctttgtaaatggggaaactttgaagctgttgtttttttggtggccaagtcatgagagacagagataagcctttaggagttttgattttggggaaagagtttccctctatgaagtagaagcaaaatggaaatatcgatttgctataaaaaagtacaaaaaaacatctaaccaattaggtgcgttcgggtctaggtcgagagatctattttataaacgttcctgggcactcaaatttgagcgggcttttataactagattaaggcccatttctaaacaaaataatccaaaatcacttcatcagagcgtttgaaagaatcttcgaaacgagaatgcaaacgtaaaaacgatgggcttgggcctaagcgaataaaaaaggtttaaggataaaaggggaaaattcctgggtggtcttactctctttatccgcttgactaaaaaaaattggcgtcgagtgatagagacgaagaagaagaagaaaatgccgtgcctcaacctctccaccaacgttaaccttgacggcgtcgatacatcttccattctctcggaagcttcctccaccgtcgcgaaaatcatcggcaagcctgagaacgtaatccctttttctctctcgatttaacctctagttcgtttcgttctgttcgaattttgtttcgattcttcgttttctcctgagatttgccttgtgtgcgtctttatctcttaatcattttcttctccttattgaataacagcgattcgagtgttgttttcttcacatgcatgatatagaaaccctaagcaattttatctcgttgctccgttctattctagtggttcacatttccggagtcttctcttgacttatttgtacaatcttcgttggggttcttcttttttattttaccacgatttctaggccattcctggcccttgaatttctcattgctgaagtttgttttcaaaaacaatattggtctgctttgacgattgcttgtttatgttagtgatgtttaaatatttttgtcctgtaatgttgtttcttagatcattatctgattgcattgttcattgtggtaatttgcagtatgtgatgattgtcttgaaaggctcagtgcctatgtcatttggcgggaccgaggatcctgcagcttatggtgaattagtttctatcggtggccttaatgcggatgtgaacaagaagctaagcgctgctgtttccgccattcttgagactaagctatcggtgcccaagtctcgattcttcctcaagttttatgacaccaaggcaagcaattccctctctctgataacttttttgatgtagtgacataacatatgcaaatgtgttaatgatttcatatgcccgatatgcgtccatgtctcattttcattgttcgttgtctctctaggaccatcaaagtcaagaatatgcacaatgtttacacgctttacaccagcactactaggtcatgaatagggaacaaatacatcttatgtgtgtaagttcatcatcataagacggacctataacttttactcataaactaggcattataaacaattaaatcaaatgcataaaccgttccactactcgaattcaatctttacacccacactgttgagttatttaggagattcgttcaacttctctaaatccgttgtctaactggcttagagggtcatccatcatctggagtgtttatgcctataaccacctgatatatcaattatacatttcttttctcgtgtggttcttcttgcagggatccttctttggttggaacggggcgactctttaattccgtggtaggtgattagtgtgattgtcttgaaatgtatgatctactctcatcgatcaagtaactttgaactacttcgtattgtaaacatatctaaggtttgatggagttgcattaagaaataacatttatgctatatatgatgctacaacttactatcagggtaaacaatggttatttagtctttgtctactcgttagatataattatgtttagaattcgaagatgaatgttatcaaagaaaaaaggatttgacattgtcaagtctactactccatatgacagatcaacattgtgttaaaaatattttctattagggaaacttcctgtgactggaacattaatggtcaaatgcactttgcctaagtaatcaagaattattgtataaactacgttaagcaaaaaaataacctgagttataatatcaggaggttatttttatttttattttagcaaatgaatatagattagctatcagatgaagcaaggtgtataatcaaagttgaaagacgcgtaattgtgatcctatatatacataacactaccgcaacttcagcaacctctaaatcattcgtctcctaaaattttccaatctcaaaatcccaaaagaacaaaatcgaatg

SEQ ID NO: 34940 - DNA, 3003 bp, Unknown; identical to SEQ ID NO: 28664
  misc_feature (1)..( 3003): 2750-1469P.txt file - cDNA_ID_3083224; gDNA_ID_2926240; Annot_ID_204052

SEQ ID NO: 34941 - DNA, 3003 bp, Unknown
  misc_feature (1)..( 3003): 2750-1469P.txt file - cDNA_ID_3083229; gDNA_ID_2926240; Annot_ID_204048
aaatcttcagaaacatatctaaatattggatgttgaaaaagaatgcatcttatatttatctatttgtgcagattgttgcaaatccagtcttaacgtgtagaacgaattggagaggagcaaattctgactggtaagcagtttctgatttcccatacatttcagtgcattgaattatcttaggaattctaaggataattcctaaggatttttgattcaaatcttagtgattggaatagcaaacttggggactgttacttagcttctccactgaactattggacctgcttagtgtctccaccgaactgttgaggatcctgcacgcttctggtacttggttacttccataagcattgcatacatacatgacaaagttctggtagttctgttcaccaaagacatataaatgaaaagttttctttctcctttgatcttgaaagttattagcttaatttataggactaacctcttgaagtggtaggttattcacaaccacccatggtacaaatctatgtgctggataaagttcagaagtttcttcagcatacctctgttcaagctgcacattgtcacatagatgtcattttttcttgcttattatatgtttagctttcctgttgtggctgtataagttaactaatgttctctcctctgagcaggatttacctggtttccgtatccgttaatgtaacaatcaaccgctgctctgctcaatccaaccatttctaaacaatcagcccatttttcaagtttgttctccaagactagctgttccgtacagtagatgtatccaaaatgcttcatctgcaagtgacataggcagagcacatataattcacattaacagtcaaagcctctatatggtaatcttactgcataaatccaagaagattttggtagcttttaccgtttaagagacttaccacatcagggtatgcgtttattgcacaggcatgaattgcgttgagcgcacactcagcttctccgtgctgaaaacaaagcaacagtcaaatgctatgtcctaattctatgatgtacaatgcaagtgagacatagcaagaagagtccaagacctggcagagaatggttccatctggtctgatagcggcgttgccccatggaacgagctggagatcaatggatgagattaagccggtttcgaagatcttaggcaagcggttgacgatgaattctgcacagaaggggcatagagcttcgtagtataaacttagtgtaactttctggcttgaagacagagataagaggcagaagaagattgtgcaacttgtgatgcaaagcctctgatatgatgccattggtggaaacaagaagaagaggaagattgcagagaattgtttttgactcttgctttattcttgtgtctcattaaacaaggaaagtaagacataaaactgtttcttattactttcagtgattcgttgatgctttattattgtttaaaggcatcttgggcgttttggcgttgaaacaattgttgcggcgttgtttgatttaactgaaaacggcacgtagttagttttcggaatatcaaaacgacatgatgtttaatcgctgggttgggtcagtcacacttcgtcttccacatctaatccacctgagcttactgagtcggaacaacatcagccaataaagccctgaaccctaattttcttttggctttggctggagaacgactgtatgtgtgttcaacaatgtcgtcgatgaacttcaatccatttcaaaactggttcgagaaaccaccgaacccagtcccgtccatcaacttcgtctcgctcgctgattccttctttcccaagtcgcagtctccgaatttcgcttcgattggacttccaaaattctcaaagaagtccccaaaacccgaaacagcaggaaccgacgaaccaggaccgtacaagcaaatagcagagcagttcttatgggagtgtgagaacataccggattacaggcacactccagaagtggataagcttctcaacgaagatccagttttcgagaagaaggagaatccgagcacagaagagattgaagctgagcagaaatggtgggagagttttcgagcgagtcctgtggttcagtttatgactcgcgccgaggagattgccgacgatatgaacaagatggagctcgaggataacgacacgccttatcggaaagaagacaaggattactggagagccattcctcatgtcccgggctttgacgggaggcccatgcctaggaaggcgatcaaatcaaaggaagagagtgatgataagttttgggatttcatgaaacagtttctcttcggcctctggggtttccgtcaacgtccttacccgcctggtcgacccattgatgtggctcaggctattggttacaaacggctcgagaagcgctattatgactgtaagtgccttcgtttgcttaaccatagtgtgatatcttggtgaaatgattttgactctcccatgtcatgatgtttctgaatcgttaagggagcatattcaagtgtttctggatcgttaagacattaccgggttgcttcatattgatgttgtttctgtgtttgtgggatttgatccatattctgtgtttatgagttagtaggtggctatcatgattcagtgagaggctctggattccaagctcttgttgttcttaatgttgttaaattgtatagtcatagtttcttgtctatgcgcgagtttatatggttccacattttatcttgtttatgttctgcatgaaggtccaagcttgtgcctgttgttgaattgcaggaatatgatgaaagtggtatgcttttttgtgggttcctttgtgttggatcataaccttttgtttgttctcctatgatttaaaattgtagtcataatgaagactggtggttggtggtataaagaccgacttggccgttctagaggcccttgtgagattataacccttaagacggcttatggagctggaataattgacagagatactttcatttggggcgaggacatg

SEQ ID NO: 34942 - DNA, 3003 bp, Unknown; identical to SEQ ID NO: 28660
  misc_feature (1)..( 3003): 2750-1469P.txt file - cDNA_ID_3083255; gDNA_ID_2926240; Annot_ID_204039

SEQ ID NO: 34943 - DNA, 651 bp, Unknown
  misc_feature (1)..( 651): 2750-1469P.txt file - cDNA_ID_3083257; gDNA_ID_2926240; Annot_ID_204037
acgaagaattgggaaagacgatgagtctctattctttacgggctgcgaagaagctggcctggaggtgaagcatctcggaaaccgagtttattgtatcaagcttagagaaagcaacctctgaagaataggctgacaaactcatgaatcatccacatgctcgcctctgaaactaaaggttctgtttgtttctctcgctgcttatttggatttgctttttctgtcaaaattaatgtgaaatgagatagtgtcgattcttaactaatgtttcccttaatcaattgaatttgatgggtggacggaaaaaaaaactgtatttcatttgtagtataatatgtggggaaattagtgaagaaaagaacatagaatcaatattggcattttctttcaaaaatggggcaataagaaaagaactattaattagaactgagacgatcacacacataaagaatcgcattcttgctttgccgtgagaaagtttgaaatgaaaataaattgtgatactttgcctgtgtacatacataaagagtcttgggcattgcatatacttactatagcttcagccaattgttgtgacagctaaacattaaatcttttcacacaaaaaaaaaaaaaaaagggaaagacttgtaagccttgaatctgtaacccatg

SEQ ID NO: 34944 - DNA, 3003 bp, Unknown; identical to SEQ ID NO: 28670
  misc_feature (1)..( 3003): 2750-1469P.txt file - cDNA_ID_3083280; gDNA_ID_2926241; Annot_ID_204099

SEQ ID NO: 34945 - DNA, 3000 bp, Unknown
  misc_feature (1)..( 3000): 2750-1469P.txt file - cDNA_ID_3083297; gDNA_ID_2926241; Annot_ID_142893
aggtaaattacactgttcaatttaaacgctgcgtttaacaacatatagatttccgctaacttctagcataacaatgtgctaaagagccaaagtatattggagattggtgtttgttacttgtacaataattaatcataatgaaagattgttctctctgtgcaatctcatattgcaaatcaaaatttggaccatatagccaaccaaaaaaaaaaaaaacagatgaatacacttgaaaaactgtgccgaatatattggaaattaactcttttcaaaacttaagtggaaaactaaacgtttgtaaatgaacaaagagtcataaacgaaacttggatgatccaaccatatcctctcgttttattttaataatagtgtggacatcgacataaataaacgaataattctagagaagatgaaaagccctagttgaatttttcaaatttttaataatacagtagtgtggatatcgaaaataaataaacgaaatatgcaaaaacctctcggatacgtaattccaatatatacttatatatgttctcacagtaaaaaaataaatatggtgcaaggagaatttgattggaagtaacgaaaataaaactcgaaatcaactattatcatttaggcatttatgatgtccacacgaatatatatatatatatatatatatatatatatatatatatattctacttcttttttcgaatacacgcattataccaaaaaaaaacttataattactctagagaagatcaaaagtccctactagttgaacttcaatgactacacacattaacaaaaaaacgtttaaatattctagagaagatacaaagccctagttgaatcaaccacgagtcatggcgcttcgtatgaaccatgtaaggtttcttcttatcctcattgtggttgctttcgtggccggagaaagttttacggtgaagcaagattcagcaaagggagatgtaatttgggaagaagtatttcacggggattatggttcttggagcccgactccaaaaattccaagacgtagtccagcacctattcctcatgatgattttgcaccaccacgtaggttgaaagcgtaattagagatttctgattttgctaacgatcaaagcgagatttttttatagttatagaatctcttgatacgttatatcttttttaagcatctatatattatactatagtctatagatttcgataagaataatggttttgagaaaaaatttccttgtcatgctttaaattgataataagttttttatgccgcatatcactgttcagtaatctgtttctaaattagtgtttttcttactcgatctctacctatctagcgtaattataccttgtaaatcaaaatttagaccttaaaacatgtttacgctctgatcaatcgaatgtgctccagaatatcaaaagtcggaaaccctaaaaactatatttcgtggtgcgacacaagtctcttacatttctgaacatgcaatagtaaagctgtatcgctagcttatcgagattattgcatctttatatacttctagtgttctatctctttgtactctattttttttctgttttctagaaaattatgaaattattatatcaccaatatttgttacaaaaacaaaacaaaaaggtgttcttccctgcaaagatcaatgggtgaagagagtgtgaatattgcttgaaatttagtttgtgtgaaaaaagcatattccaacacactcgattttcattgaattaaaaatacgaaataggaaatttgatatttaaataggaaataggaaataagatcagctatatagtaagaaaatttgatatttaacttttgtttttgatgtgcgtatatatttgttatgtcttgtaagttgtaaatctacaagtttcaaaattgattaaaaacaggtgatttcagagggatatttgaaatcacatggtagatgtgtcataatcaaacacatgtttaagaagggtcccacaattacgcgttctatttatttaacttttattggtacatctttctactactacctttcttgtggccctacttttactagatcataaaatcatgatacaagcttgatttatgattcagtcaaatcaaatctatattatatgacctaaactttggaacattactcaaagtgaaacatcaataactcattaacacatctgattactgttgaagtatcctctctagtattaataccaactaattctttcctttcaagtgtcaactatgtatatatctctatatatattactaaatagttgaaatatcttctgatttttcacaaataattacgtagtattattagcgaactaacacccacattccctgttcaattaattcaccaacctcaattaatatgtgtattaagcctgaaattattagagacagatattttgtgcctcactatatcattaaatgtcgtttaaatgttcttagtcaatgaacgctctttcttttcagatttcttttctatcaacaaaaactgatactaatatgtctatatatataacgcaaacgtttaattaaagaattgacttaaattcttagttaagttacaacattcttttatttattgtaaactaaaatttcctaaattataaagacaatttttgtactaattatttaaaaaaaatattatataagctgataaaacaggtcaagtgatatttgacgtcatcatttctatcgaggaaaataatatttatccaaatctaacagtgctataaaattcaacttcagcttaaaaaaataaaaataaaaattcaattacggcgactttctcatcttcgaagagtgttcaaacacgaatcaaacaaaacaaagaaaacgaataaaaagttccgatctttgacgaacacagagaaacataagaagaattgcaattttgtgaattttggtcatctctgtctttgaaaaagagaaaaaaacagagagagatttgcggtgacaatcaatcaaaaagctagaaactttagagtaaacagagaatg

SEQ ID NO: 34946 - DNA, 3000 bp, Unknown; identical to SEQ ID NO: 34945
  misc_feature (1)..( 3000): 2750-1469P.txt file - cDNA_ID_3083297; gDNA_ID_2926241; Annot_ID_204093

SEQ ID NO: 34947 - DNA, 3000 bp, Unknown; identical to SEQ ID NO: 28669
  misc_feature (1)..( 3000): 2750-1469P.txt file - cDNA_ID_3083311; gDNA_ID_2926241; Annot_ID_204088

SEQ ID NO: 34948 - DNA, 3000 bp, Unknown
  misc_feature (1)..( 3000): 2750-1469P.txt file - cDNA_ID_3083321; gDNA_ID_2926241; Annot_ID_142885
attccgtgtacgtcctgttttccttaacacgtacacaacgaccaaacatgttttcctttggttcaaatttccatttatcttatttgcatctccactcaccgaccatagtaaatacgggaatatccattacccaactgcatcataaattcaggagaaacccattaaatgcaactgaaaacatgattatatctacaaaaataaatagaatttcgatgtacacacttagaaacataaatatttacacatttagcattttcaaccaacaaaattggaaataaaaaaattctgggtttttctataaaaaaacaaagtcgatttcgaataaaatgaagatcatagcgtgttataacaaaaaaaatctttaaaacttcattacttacacgataatgcttatcttggctccaaacttcgtaaatagacaagatcaacacttcttgagcatcaatgtacgttcgcaattaatgtttgttcctggattcatctttaactcaacaattattatcaataattttataatataataacatgtaatgatgattttgcattaattataacaagagtcacgtctaaactttttgggccattaaatgttgatgtcatttcgtttataatgaaaaaatctctcttctaactgtacagcgcgctcctcaacgtgaaacaaaaatatctctaactaaaccggaacagtgtacctaactaaacctgactaactaaaccgtacattcaacaatttctcatctgtagcagcaagggcaaaatggtcaaatttcagctgaaaagacaaaacgtgaaaaccacctttcactttggcaattcctgaaaataaaacatgatcaaagggtgtggcttgcaaattacccttagataaatgagaagcgtatataaagaaattagtaggagcgtatcaacttaaaaaaggaaagtttgttacccgaaccatgtatagctgttagattatcacctaaccgtgtataacggctagattatcaccgaacctaaggttggtgttttgctctgggctttaaacaaaccctaagtgaaaaggaaaaaggaaacttgagtctcaaacaaataagtttataaatacctgcgtctcgcgtcttctatctccacgagttaaaagatgcaatttctctgattagctttattatcaattctcttcttcgatatctgtctgcttcaagatgatgatgctctgattctttcttcgcccttcgtttagaaagaatcattccacaagtcaaagcccaagaaagactcatacatatacaacggatctctgttcacttgttatagctacgaagaagacgagagagagagatcatcacacacgcaagcatcacgtctcgtataaacgacggaggatattcacttcgccgtcaatttgggaccacatctcaccgtagaaagagagagcgagacgattcgaaggagttaaaggcttacatgtcgccgggatttaaggcttttggattcatgatgttggaggttttctccgcgatggagattgagcaggtggagggatcgtcggagattgggggattcgtttttccggtaacggttactgatgatcgcatgtgctctcagatggtcgatgtgttctcggaggcccaacacaaacaatttcagcccatcaaacaatgagccccattgtcaggttatttcgcaactcattttcttgtttaatttagaaattaatatatttttaattaaagggtttttcctcagtgatgtcgaaaaaaagggttttttctcattaatttttaaaaaatcttttgcaatttttattcaagtttttgtttaaactttaagttttttttttatttttgaagtaatattttagatcaagtgttttatttttaaaatatacataatatttttgttttaaatgttaaattttagtatgtgtaaactaattggacacaacatcccgtccataatatgagatccttaagcggtgttctaggtttaatatgtttacatatatataaatgtttaacaattttttattttaaaaaaattttaaatttgtattttttctaccactatttaaactttaatattttttttatttctaattaatattttagataaaataatttttatatatacatagtatgttttttgtttttaagtgttaaattttaaatatgtgtaaactaaatgaatacaacatcccgtccataatataaggtccttaagcggtgttctaggttcaatatgttatacacatctttaaattttaacattttttatattttaaaatatattaagttgtatttttcatatcactatttaaaatttaaggtttttgtttttgtttttgtttttgtttttatacaaaatatttttgttttaaatgttaaattttaattatgtgtaaactaattggacacaatatcttgtccataatatgaggtccttaagcggtgttctaaattcaatatgtttatacatataatttttttacattttaaaaaaaataaattaaaatttgcaattttttaccactattaaaagttttttaatttttgaaaaatatatataatagtaaaaatacttaaaaatatctaaaaataaccgaaacaccagaaaatatctaaaacaatggatactaaattttaaaactgaaagaagtggaaccaaactgaactaaattttaaaatattcaaataaactttataatcgaaagaaccgaaatcgagtggaaccgaaccgataaccgattgggtaatcgcggaggattactttcaagaagagattcgtgatcttagccgtacacttgtcgggatctgagccgcgcctgtaaggagaaagagagagatggttctagttttaaaatgcagcgttttgtggaaagctcaccatcgacggtctgttactgggccacgtcatcgaaacggataaaatggaaccatccaaaaggaagatagaagtaccaagaagattgcggagagtcgtgaaaagttttgagctttgatcactcactcactagtaatg

SEQ ID NO: 34949 - DNA, 3000 bp, Unknown; identical to SEQ ID NO: 34948
  misc_feature (1)..( 3000): 2750-1469P.txt file - cDNA_ID_3083321; gDNA_ID_2926241; Annot_ID_204086

SEQ ID NO: 34950 - DNA, 3000 bp, Unknown
  misc_feature (1)..( 3000): 2750-1469P.txt file - cDNA_ID_3083338; gDNA_ID_2926241; Annot_ID_142882
acaaaatgcatacaaattgtacttttaaatatttcataggctttgcataactaaaatacttagattttagatgggaaaaaacattgaagataaccaagagtatcgtcttgggaaaaatatctcccctcgcctcggtggaatatctggaggtcgatcttgtccaataactcgctgttgaaactcagctggatttcggctgttagaccacgatgagctagtggagcaagaagatcgttgttcagccatccaaagtttgtgcctaatggcctttcagcattaacgattctaactaccgcctcgtcttccgagtcttccttataaatgacctcgcactcgatctttacaccagccattctagacttggagattcccatatggctcaagttttcgacttgtatatggaatcgatcattggagccacactctagctccgcgccacatttcttaagtggtatctcctcacaacttatggtagaagatgatagcttttctcgggtagttacgtaaatgacaaaggtgagatccgacaaggaaattttgggtttggtaagtttcacttccttagctccggaatgttctccttctttggccatcatcacctgtgacttctcttttctttgttttggaatgagttttatgttattcaccatccatatttttagtgttacaaatcttctttatatctcaccacaatgactctcaattatttttatgtttttttgcattaattctcattaattgttaattgattaattaggagtaatttttataacaaaatattgaattcctataatctccttttcacatgcatatattattaacttccaaatttattgctcatggtttaaacattatgtgttaacatatttttatactacattattattgtatgtatttaatatcataggtttaaatataaatttaattaataatatgcaattatgcatggcacggggaaccactaagactattgtcatgatattaatatgctgttaaagggctttaacgggcttcggggtttaaaaggcctcagatcttagcaaccgcttaaattctcggtttagtttcggttaagacgaattatcatcaaattagaattagaagttgatattccttttggttcgattcaatttgttttggagagaaatgtcatttctcctccgcttaacaccgccgccgttatctcaccgccggagctcatctctctttctcaaacatccatttcaacaatctccgagacctctgagctccggtaaaccctcgaaaataggggataaaaaaaaaataggggattggtttcttgttcatcaagcatcaacgcctttgcagtaaattttttggtgcaaaacaaagctcttgattatttaggtagaaacgcttacatatttttaaatttcacagactttgtatatacataataattagtttttagaggggaaaaaacattgaagatatctaagagtatcttcaggggaaaaatatctctggtcgctttcaatgaatatctcaaggctgatcttgtcaagtaagtcgccgtttaaactcaccttgacatcgccggttaggccacgtctgattagatcttctggagcaagaagatcgttgaacaaccatcgtaagtttgtgtctaatgaccttcgacctttaacgattgtgacaatgttttgccaatctttcttataaacgacttcccaagtgatcattacatcatccataccagacttgggcagttcaaaacgactcaagtctacgatttctattttgacccggtcattagggttaaactcgcggtccgcgccaaattctacaactgttaacttctttgatttggttgtgtacacgcctatgacaaaggtgagatccgacatggagattttgggtttgggaagttccttagctcccgagtgttctccttcttcggccatgaccaccggggacttctccatctacttttaacctctctttgttttggaatgaattttgtgtttatatattcaccctccataatttatatatagtggtacaaatcctcaatgaattaggaatactggaactaaaattgattacaattaaatatctaatatagagttttaattttcgtcatatattctaataatatagagtatttttttgaataatttacaaaatatatggaaatttgtagatttatactagctaggtgtattatgggccattctgcagcatttcatggttatgagtccaacatttcatactaggtggattagatattaaaataatgaattaatttaattactataataaattaataattttcagattttattatttttagagattttttatgatttaatttagtattgattttttcttattaaatattagttagataagggtgttaaatattttgacaaatgttaacacatatttttatctaattagatttattctctgagttatttcaaactaaattaaaattctctcacaaaacaaaatacatatgttattaactgattgtaaactttcatttgtgtcaacaaactacttttacagttttgaaacaacttcttattcatgacatttgctctataattatactaggtggtggacctctcccaccatgttacgaacctaaatctaaaatacatatatcaatatgttacaatttcaactaaagttaatcgaaacgttttaaattgcaaacaaaattaactgaaatttagtttaaatgtttttctaccaaaaactataaatctcttgaaatattcaatatagtgtgtataatgagttttaaaatttatttaatagttgtaaagtaaaactatttggggttaaatatcaacctcttacttgataagatcaggttgggcctcgggtattaaactcataaaggcctcagatcttacttcttagcaatcgcttaaatgttcgggtttaggttcggttcagaagaattatcaccgaattagaattagaagttgattcgttttggttcgattaaatttgttttggagagaaatg

SEQ ID NO: 34951 - DNA, 3000 bp, Unknown; identical to SEQ ID NO: 34950
  misc_feature (1)..( 3000): 2750-1469P.txt file - cDNA_ID_3083338; gDNA_ID_2926241; Annot_ID_204083

SEQ ID NO: 34952 - DNA, 3000 bp, Unknown; identical to SEQ ID NO: 672
  misc_feature (1)..( 3000): 2750-1469P.txt file - cDNA_ID_3083344; gDNA_ID_1620305; Annot_ID_152801

SEQ ID NO: 34953 - DNA, 3000 bp, Unknown; identical to SEQ ID NO: 28668
  misc_feature (1)..( 3000): 2750-1469P.txt file - cDNA_ID_3083344; gDNA_ID_2926241; Annot_ID_204080

SEQ ID NO: 34954 - DNA, 3000 bp, Unknown; identical to SEQ ID NO: 671
  misc_feature (1)..( 3000): 2750-1469P.txt file - cDNA_ID_3083348; gDNA_ID_2926241; Annot_ID_204077

SEQ ID NO: 34955 - DNA, 3000 bp, Unknown; identical to SEQ ID NO: 677
  misc_feature (1)..( 3000): 2750-1469P.txt file - cDNA_ID_3083365; gDNA_ID_1620305; Annot_ID_152793

SEQ ID NO: 34956 - DNA, 3000 bp, Unknown
  misc_feature (1)..( 3000): 2750-1469P.txt file - cDNA_ID_3083365; gDNA_ID_2926241; Annot_ID_204072
ggcgcgattcatcttctaagcacgggatcaagcgattttcttcaaagctattacatcaacccgatccttaaccggatattcacgcctgatcaatactcagatcgtctcatgaaaccctattccacctttgtccaagtaacttaaccaacaccacaccgtacctatctttaacttttccggtttactctaaaccgatggtccaatcctttttttgttttggcagaatttgtatgatttaggagctagaaagattggagtgacgacgttaccgccattgggttgtttaccggcggcgataaccttgtttggtgaaaccgggaacaataatacctgcgtggaaagactaaaccaggatgcggtttccttcaataccaaactcaacaacacgtctatgaacttaaccaacaatcttcccggtctgaaattggtcgtctttgacatctataatcctctcttaaacatggccatgaaccctgtcgagaatggtacgatttctatcaaaccgcaactttatttaacgactaacaccgacactttaatttctcgttttaaatatttcaattttttatatttttgaacgtagggttttttgaatcaagaagagcatgttgtggaaccggaacagtggaaacgtcgtttctatgtaatgcaagatcggtgggtacatgttcgaatgctacgaattacgtgttttgggatggttttcatccatccgaagcagccaatcgtgttatcgcaaataatcttcttgtccaaggaatacccctcatctcttaaacctaagtttattccaaaacattgattcagatagttaagatgttatatgatcaaacaaaacacagaaaaaagatataatgaaaactattcttgatataaacaaagaaagctcaaggggaaagttagtttctttcacatgatttaacatgggatctcttcgtggtcgcgtttggactaaacccaacgaattaatgggtattttaatttacaaatgggttcccgaaataattaaaaagaaaaaatctttgtttctggtatggcagaatagtgtaagaggtaacgtatgtctctttaaattcgaatacgaacgacgtactacgaagcaggttcaaacaaactaaaagttatcttctttttcaagcaactcctttaatctctcttccaaaaaaccctaatcattcacgacttcttggtactcagtcctctcaaaatcttttactgcattcaaccagaaaatgaagatgtttattacaatgtcgatgtgcttatcgggttatcgcctgtttctacgccgggcgttgggaccgggtgagacacttgtaccgggctctaatcataatgggagattcagttgttgatgccggtaacaacaaccaccgtattaccctcgtcaaagccaattttcctccctacggacgtgacttcgtcgcccacagtgcaactggccgtttctctaacggaaaacttgccacagactttaccggttcgaaccagcctagctaattcacattatagtacaatctatcatgcatttcctttttccttaaaatttgtttgttgttgagcagctgagaatttagggtttacatcttacccggtggcttaccttagccaagaagcaaatgagacaaatttgttaaccggagccaatttcgcatctggagcttccggttttgacgacgcaactgccatattttacgtaactaattaatctcctcaagcctgtttaatgtagctatatattaagttagtaataaataacattgatatggtcttatcgatcattattgtagaatgcaataacattgagccagcagctgaaaaactacaaagagtaccaaaacaaggtgacgaacattgtgggaaaagaaagagcaaatgagatattctcaggtgcaattcatcttctaagcacaggatcaagcgattttcttcaaagttattacatcaatccgatccttaaccggattttcacgcctgatcaatactcagatcatctcttgagatcctattccacctttgtccaagtaacttaaccaacactacaacgcaccaagttttaattttaccggtttactctctaaaccggttttcttttttggcagaatttgtatggtttaggggctaggaggattggagtgacgacgttaccgccattaggttgtttaccagcagcgataaccctgtttggtggggtcgggaacaatatgtgcgtggaaagactaaaccaggatgcagtttccttcaatacgaaactcaacaacacgtctattaacttaaccaacaatcttcccggtctgaagttggtcgtctttgacatctataatcctctattgaacatggtcataaaccctgtcgagtatggtacggtattttgacatttcgactaacacctacattctttttttttgttcccattaatatcttttgttaatggttttttaaactgtagggtttttcgaatcaagaagggcttgttgtggaacgggtacaatggaaacttcgttcctatgtaatgcattgtcggtgggtacatgctcgaatgctacgaattacgtgttttgggatggttttcatccatccgaggcagccaatcgtgttatcgcaaataatcttcttgtccaaggaatacccctcatctcttaaacctaactttattccaaaacattgactcaaacagtcaaaaatatgaatatatgatgaaaatatatcctagatcgttatatagttcaatgaatggttggagattattaactaaaggtttggtttggaaattattgctttctttaataaataaatttgtaaataaataatttcagttacggggatatttgatcatatcaatagtaaagagcgaaatgtatatatttcccactaatatagggaccttaaataaattgcttgattacaaaaatggtccttctcttctgaagtaaatagaacaagtgagaaaggtttatccatggcgatttaggcgcccaaaagctcaaaaattcattcatg

SEQ ID NO: 34957 - DNA, 3000 bp, Unknown
  misc_feature (1)..( 3000): 2750-1469P.txt file - cDNA_ID_3083424; gDNA_ID_2926242; Annot_ID_142919
cgcaattaccgcgtttaaatttcccacaactaccagtggattggccatagtcggcgtaagtgatctttgaaataacatatccttgttcgcaatcgaaatccaatgcgattggtttaccatccttagcctctttatgagtcgcgcacattgtgtattccgctgactcactaagagaggaattaatggagctagagagactacgtttctcgtctccgtgaaaagaaacgtctatctttgaagcgaaactaaacacgaaggaaagaaacagaacaacaagcaaaataaagccatgaagacaacggcaatgtgagtctcccattttgttgttggtgttgtgttctcactaataatcaaaaggaatatgagaatgaggactaggctatttatggataatttttatatacatttgagttataatgtgaatgtggtcgtgaagttttctctccatttctcactctccttcttcttggcttttgggggagttaatgaataacaatccttttgacttttctacgattacttaataacaggtttgcattttcagtagcaaaaataagtaaatatcattgatttttaaattgtttcctaaataataggttataggttatagttaatcacataagacttttttagttttgtacaatttttgtgactaactattttataaattattttgcataactttttatattttagatataagttattatttgaaaatttatttcattcctataaattacattttttcattttgcttaggggtttataaactctaggttggtgccacatcgaagcatgacttgctcttataggtctagttgttgaactatcaccgcaacatttgataaacaatattaggaacatgtatgaaaaatctgtaactatggcaagtatcaaaaagtttttgacaaaacaagttcttgttctagaaaaacttgtccatactcatgaaaactcaaacaaatctgtctcaaaagttccgaaaactatgtaagtgtcatttttaaatcttgtcttcttacaaatttcatttatttttaactaatcatacttataaacgaattcttataggatatacctgcattcaaaatcaaggatttggtatataagagagacaaacaagtgagagaagaagagtttatctaacttgtcaacgacggccctctacttgttgtgatagatacttatgaaagcttaaaggaatgtaaagatgtaagtggtatttgtagttggtataattcatttttaaacatattacaactgatttcatatcttgtaaattttgaatatgacaaaatctatcatggtcaaacaaatcgaaaaaacacaagcacatgtggccatgtagtcttaatgactggtttcgacacaactctggaaggtgtcaactactggaaaattcagaattcttggggtacaaaatatgggcataacggttttggcaaaattataaggaagtccagccagtgaaacaacaaacaatctatgtttctcaaaatcattcagctgttggtttgatattgagactctctcttctatatgtttgctaaataacttaaggcttcctttttctaggtttagttgcgagtagattttgaaaaacaaaagatgcatgaatggtattaagcgctgagctttactgatagacaatactaatttggttaatcttatactatttatttggggagtacatcgtaagttataattttgaaagtataacaaatatcattaggatgccatttaaaaacttaataatataacaaaattattccactaactaaactcgcacgtcatggatcagaaatcgggtttacaaatatttacaaagattacacaaatatttaaaaacaacattaactatttagttagcaaatggtggtagaaaaacgacagtttgttaaatcatggacaaacggtaatctaaaaaaaaaaaaaaaacaaatctgtagctcatgactttttcgattggacagatgaagataaacgatatggaccatatgggtagcagaagctaagcttattagaagctaaagatgagactcgtcaacagaaagcgaaaattaagatgcttaaagaatctctaaagatcataaatatataagatgtgagtagtgtgaacaatacgttaatgaataaatacgagtaagaaagaaactataatttcaaaatgaagttatggcaattaatgagaagaaaaaatgcttcgtcgacaatttatcgtgttgttttggaaaggttacgagactggaaattgaagtggattcaaaaatagtgactggtttataagatagcgatcattaattttcatccactgtcatctttgatacgtttttgcgataattttatatcaaaagattagataatgcacataactcatgtgtataaaaagttaaatcgataactatgtgttttcatttatatatgttggatttttattcgtttgagtctatttccgaacttgttcatttgattttgttcttaaataccgatgaagctacttatccaggagatgttggactgcagtttattttcttacttttttccaataaattggagacaataatggtctcttccatagccttcgaccaaaaacaagaaagaaagaaacaagaaacgcccaatttttaatactcgtactacacaatttagaagtaagggagccgaccacaattgcttccttacacgttaagtccaagctctctcgatgcatgaaaatcccacgtggcatggttcctcaatagaacgatcttcttagatacgtgtcgggcgaaatgatatttggaagataagttggaaaataagaaaaatgcgtaccagaacacacgtggcaggttttgctttatcaaagtcatgacgtggcatctcattggaaccaaaaacttgctataaaaacaacaagcagctctaaatgcttcattaacacgacgagtattcggcaaagtttaaagaatccatcttaaatctttacttggaagccaagcaaacaagaaacaaatcatg

SEQ ID NO: 34958 - DNA, 3000 bp, Unknown; identical to SEQ ID NO: 34957
  misc_feature (1)..( 3000): 2750-1469P.txt file - cDNA_ID_3083424; gDNA_ID_2926242; Annot_ID_204134

SEQ ID NO: 34959 - DNA, 3003 bp, Unknown; identical to SEQ ID NO: 28682
  misc_feature (1)..( 3003): 2750-1469P.txt file - cDNA_ID_3083430; gDNA_ID_2926242; Annot_ID_204133

SEQ ID NO: 34960 - DNA, 3000 bp, Unknown
  misc_feature (1)..( 3000): 2750-1469P.txt file - cDNA_ID_3083470; gDNA_ID_2926242; Annot_ID_204123
ttccctagtcctagagatgggtaagaactgagcttccctatatctgaatgatgcatcattgccgacatttcactttgagtgtcagaatcatcaggtggctctaacgcaagagctgaatcccaaaatttctgcatcatcgtgtttgccatatcatttacagctccagaactgttctccaccattgaaatagctgcgtgagtaatctgaagaacgtctacacaagctgcagctgatccatctttatctataattggaagatgtagaaactttccatcatgcattgtatgcaacgcatccagaatcgttgtctctagcgatgcacattcaggattcggtgtcattaccttctcgacaagagtcaattcaggagataaattttgtgccaccactcgcatcagaatgtcctttgaagtcaagattccactgattttgttccccgtggaaatgattacagagttaacccgcaaatccctcatccttttcgcagcaactgaaacaggatctgatggtgctacaagtgcaaccttcgaattgtctgtaataatcgttgacaaggcgggtttaaacattctctccctcaaggtttcaatgaaagcatacggtgcagaatatccgcttccccattgcttctccacaccttccactgcagcagctaaagcactaccttgctctgcagctttctccatcctagaaatagcatcatacaaacactttgtaatatccaacaaagcaatgacttcaccattctccacaacaggcaagtgtctaaacttcccttgaaccatcttctgaagagcctcaagcgccaacgaatcagaagtaacaaaaataggattcctagtcataaccttagagaccaaagtttgatccggtctcaacccttcagcaatcactcttgtagctacatctttatcagtaacaatcccggaaagaagcgcacttgaatcagtcaacaaacaagcatcaacacgcctagcagccattcttcgacaagcatcgaaaacagtagttccttcaggaatagtaagagctttcgataacctaagcttcttcactgttctctctccattagaaggagcttgagattgaggttgaggaggaggtgaattgggttttgaggtgttcccattaacacttccattctctgattgtactggtttcttagaaggtggtggtcctcgccgtacagtagaattgcttctcctccctgatgttgaagaaggacccgtcgcttgagtactcatattcggtcaatctagggtttacttagatcctaaatccgtcaaaaatgattcctttagatatcaaactcgtctctgcaaatgaaaaattcaacctttaattcaaaaactattgaaatttcatctaaagcacgaatctgaataaaacccaattcacaataaagacgatttgctctgagaatacgatgcaacatacacgaaaaggattcgaatttaacggacgagggaaatgaaacaacttgaaaccctaaggatttgagcagaagttatgtgggaagattgggaatttagggtttaccttcttctttcttcttcaaggtctctctctcgagcacttttgttgccaaaaaacaaacggctcttaacaattgagttaagccatttatcgagttttcattggttgttcctgtttccgcgtgtgtggtggttcgccacctcctttcttataatcgacgactaaaaatgttaaatataatactaatatttctttctataaaattcgtaaaagcaaaaatgttttttttttttctgataaatgtctataaatcaccctttctttttaaacaatgaaatttgatgacatttctctcttgtatctagaagagttaatggctaacataaatacaaaatttttttaattcaaataaatatgatttgtgtgggttacatggaaaaattgtcaaataataaagcaaaaaaaaattgtatagatgcagtgcaagttgtttctggtcaacttgccgtcgagcctcacaactgtttgttacaagtggactcgcatgtaattccctcttttaataacttaccagttacaccatccaacatgtgatttgacagaaaaatattttagtgaaatgtgatcggtgcagatttttctatgtacgtttaagcctttaaggtagacgtttaatgcaaaaatatccgtggaaataacaacaccgattaatggaaccaagtagatacctcctccgtttggatggctcaaatgcaaccatgatgcaagcttttgcgatcgaccaaagtgagagaactagatcgagatggattattcggaaccattacggcacccttatgtaatggcagcatcttaatagtaaacaaaagctttagcctaaggttttagcttccttcactctttgcatacattgtgaatctgcggttttagatggaccatagtggaaaaaggctttcatcaataactcgtggacttgatcaatggtagaaaagagaacacatagatggaaaactagatatttgatatatccatctttggttcaaactcttatccagtgttgaggtgatatacacatgaagacataacaatcgcattgccgagaaactagtattcattaacctttttctctaaagacattgtcctatcaatctaaaatttagatgttaaaaaagaaacccaaaagatgtagctatcttaaaatgacagtcgtttgcgagactggccaggccatcccatgggccataggctcaagttgtgcttggcagaatttagtgattggttttttttgtataaacaatcattagtttaaggctttacttgcaacaaatgaagagtttaagggttctttttggtaattttcccgaatcacacaagtgagctagctcatcagagtccacgagcttcccactaaaaaattgaaaattgttgcttctgtcatctgaaattaaacaaagcgagaaaaggcgatacaaacgatttcgaatgcttcatcttctcctttgaaaatccttcttctgcttaatg

SEQ ID NO: 34961 - DNA, 3003 bp, Unknown; identical to SEQ ID NO: 28680
  misc_feature (1)..( 3003): 2750-1469P.txt file - cDNA_ID_3083475; gDNA_ID_2926242; Annot_ID_204121

SEQ ID NO: 34962 - DNA, 3003 bp, Unknown
  misc_feature (1)..( 3003): 2750-1469P.txt file - cDNA_ID_3083484; gDNA_ID_2926242; Annot_ID_142904
gttacggttgtatattatttgatttttcctatgcattttccattagactctatttgatttttcctatgcatcttctattagattctagttcattctttcttatttttttaattcatttgtcttgggtggctaatgaagcaataatggtttttagtttttatttgagatatttgtaattaatgatgcatataatttactgttttacgtggaaaaacgtattctaatttcttgtaaattgcaatcgcattgtatattgtaccgaggaaaaggatcgatttgcctgcgtgtgtataagctttatcaacgagatccaaagtaatctatatatgacccattgacctaccatcatacacaaagtcaacacacctaaaaatgattatgatcatgttaatctattaccgcttcacatacaattgataaaaccaaactaaaactaaaactaaatataaatactataaactagttaagtaacccacgaaaaagtctcggcttggctataaaaatgcagtcaccttccactttttattatctttctgatagtcattctatcagaaatattttatacattagactgatttgtagtattttcgtctgcttaaatttgaacatatcgttcgttaatcattaatgtttcctaagttagtaacaggcctaattcttaattgtatgttcaatacttttatcttatgatctgatgtctgaactttgaggtaaaatggtactagtatagttccatagttatgaatttgaaagactgattaaaaatatatattcaaaatacatatcaatctacagtgttctttttttgtttgctaaattatatgaatctacaaaataaaaacgttatttcttcgaaagaagtgttgtcgaaaaaacattttgaaaagaactgcgcattggctacctgtcttattctgacaatattgctccaccgttatattttaaaagcattcacatctatttttatcttctcaccaatcttacctactaccatgtgttcgcagtaaattaagacatacgacgatcgaaatactgtaattatttatttttattgattacactaaactaatcttttcatcaagataatctttcttatgggatttctgattgtaaaggggtttttcctcaatttttccctattattttttcaatttagttttgcccaaaaaaaaaaaaagaaactatttaataaagttctataatatattattgatataatccgattgagttagctcgattagaagaatcatagatggctagataaagacatctagtcgacctctactactctagtgatctaagattcaactggagagcagtgttatgactttgaaaaaaaaaaaaaaaaaaatcagcatgatatacaacttttatagattagtcactattcgatgaatgatgggaaatttctttggcaatttgactttggtcaaatatgtcatgatattggtggaagtaaattattgatcatcaacatttccgggaggtgaaatcagttttgacatgacagtatataatattaaaatacttgtttctatgaataaaaacagcataaatccaaataaagctcgaattatttaaataaaagaacaataacaattcagataaatttatgaacaataataaaagagttttgaaatggaattaaatatcttctgaagtgaaatatgtaataaaaatacagtagtaatttttatttgttttgaggcataataaaatgaggaaaaaacccgcaaacatatgctgtgggacccaccatgttttttttttcaacttgatcatctcttaactctctctcattcaccagaaaacaaaaattacacaaaaatcaaaacttttactttttatttctcctctctggatcttcctcttcaaagctcaaggccattagggtttatctgagctccaaaatcaccctaattctagtgtatttctcagcaagcaagcttcttctttttttgtcctgggtaagcctttgttccttcaatttatcgccagcttcttctttatctcttaccttttcttctttgcacgcctccattagcactttatttatttttcttctgtaaccctctctttgatttgctttaattcatgagatttggggaccgtattcagggttttttttgggtgggtttctctgatttttttttcctttttcagacctttcattatctctatgtggtcacttaaggtctctgcagtttcaattcaaaaatttagtttaaaaaaaaaaaaaatctgggtgtgtgttcattagctagctcctctttgttcactcattggctctctatgatttgacatttaagattattgctgcatttaattgtgctaaatcgattctgcactcatgcttcagctactgttctttgtgtccctgtaaatttaagtttttgagatctgaaactataagaaattttccgattttggttctcattagttgttagatctcttatctcactcgaagcttctttttttacgcggtttgatttattaatttcgttacttctctgtaaattctcgatctttagggttcttctcatcccctggtttaataatgggtccaatctcagttcttgttcactctaattttactttcacaatatctccaattacgcagatgctttttgacaaattttctccattaaaagtgtcttcttttttagctgtattaaatttataggtctctctatctgtactggtatagggttcatgattgagtctacaaaaacataatgaatgacctaaaagctattaactttcgtttctagatctgcttgcttctctttaatatcttcacctcattgctctaatagacattaatctccatttgaagttagtattcttttaccagttttactgatttttctttttcattcaggtaactgtgattgttgcaggatcttgtgtagaaacagatcacaagaagatgaatgataactcggtggtgcggctttgattatcttcagagattttagattctgtatccactctgttgcgatg

SEQ ID NO: 34963 - DNA, 3003 bp, Unknown; identical to SEQ ID NO: 34962
  misc_feature (1)..( 3003): 2750-1469P.txt file - cDNA_ID_3083484; gDNA_ID_2926242; Annot_ID_204118

SEQ ID NO: 34964 - DNA, 3003 bp, Unknown; identical to SEQ ID NO: 28671
  misc_feature (1)..( 3003): 2750-1469P.txt file - cDNA_ID_3083490; gDNA_ID_2926242; Annot_ID_204113

SEQ ID NO: 34965 - DNA, 3003 bp, Unknown
  misc_feature (1)..( 3003): 2750-1469P.txt file - cDNA_ID_3083524; gDNA_ID_2926243; Annot_ID_142940
gataacgtataatgttatcttgaatgtgtttgggaaaatgggtactccttggaataagattacgtctcttgttgagaagatgaagagtgatgggattgctccggatgcgtatacttacaacactcttataacttgttgtaaacgaggctctttgcatcaggaagctgctcaggtttttgaagaaatgaaggctgctgggtttagttatgataaggttacttataatgcgttattagatgtttatggaaagtctcatcggcctaaggaagctatgaaggttttgaatgaaatggtgctcaatggattttctccgagcattgtgacttacaactccttgatctctgcatatgcgagggatggtatgctggatgaggcaatggagcttaaaaatcagatggcggaaaagggaacgaaacctgatgtttttacttatacaacacttttgtcagggtttgagagggctgggaaggtcgaatctgctatgagtatttttgaagagatgagaaatgcagggtgcaaaccaaatatttgtacttttaatgcctttataaagatgtatggtaacaggggaaagtttactgaaatgatgaagatatttgacgagatcaatgtgtgtggtctctcccccgacattgtcacttggaatacactattagcagtctttggccaaaacgggatggattcagaagtatcgggtgtattcaaggaaatgaagagagctgggttcgtacccgaaagggaaactttcaacaccctaatcagtgcgtatagccgctgtggttcgtttgaacaagctatgactgtttacagacgaatgcttgatgctggggtcactcctgacctttccacctataacactgtgttggcagctttggcccgtggaggaatgtgggaacaatctgaaaaagttcttgcagagatggaggatggtcggtgcaaaccaaatgaattaacttactgctctctacttcatgcatatgcaaatggcaaggagattggtctgatgcattctctagcagaagaggtttattctggagttatcgagcctcgagctgtgcttttgaagacccttgtcttggtttgtagtaagtgtgatcttttgccagaggctgaacgtgcattctctgagctcaaagaaagagggttttcaccagacataaccacattaaattccatggtctccatatatggaagaaggcagatggtggcaaaggcgaacggagtcttggactacatgaaagaaaggggtttcacaccaagcatggcgacctacaatagcctcatgtatatgcatagtcggtctgcagatttcggaaaatcagaggaaatcttgagggaaatactggctaaggggatcaagccagacatcatatcgtacaacacagtcatttacgcctattgtagaaatactcggatgagagatgcatctagaatattttcagagatgaggaattcagggattgtccctgatgttatcacctacaatacgtttattggttcttatgcagctgactcaatgtttgaggaggccatcggcgtcgttaggtacatgatcaagcatggttgtagaccaaaccagaacacctacaactccattgtcgatggatactgcaagctaaacaggaaagatgaggcaaaactttttgtcgaagatctgaggaatcttgatccccatgctcccaaaggcgaggatcttaggttgctggaacggatagtgaagaagtggccatagataattgttgatgagaaacctcacagtaaacttgtcaaaccctgacttcagatctgctgtaagtgttaatttttatcataactttcatgctcgttgagcatgtgaggcacctttttttcttttcttgtttgtacttgagagagaaaaagtcccactatttgccttcaaatttaaataaggataaactgttagaaataagaatatttcattgttagtgtgttacatctgtaaccattccaatgactgaaggagtattgttgccctttgtgaaatatgtagacacatcaactgctgacttctggactgatttcaatctaactttaaaatagtctgaacactttgttgctgcagaggaaggtcctaaacacttaagctcgtagctgttagtgcaggatccgtggtgaagaactcaacaagtgatatatcttcttggtgactcatagtaagaattatctgcataagagcttcaatgtttctcagctctcactgtagttaccgtctcacatgatcttaaacttgatagtaagaattgtctgtgaatcggattgtattgaccataactgttagaatctcagcgtagctgctataagcctgatcatgttctcgaaagagttattatggctcttacctaatggctatttgatttctgcattaggtgtatcgtgtcagatgcttctcacggttgttgtctgagaagaacataactgaggcgtcacacacaagagggacatacggcagtatcggtcaaaaccagtttttccggggaatggtatatatatatatatatgagtcaatgtgtctagaaaatggttaccaatggtattttctttttgatatttgttcctgtgttttgtactttctctgatttggttatctatttaaccaaaagcaatgtaacacagctagcaaaccaaggcagctaacagtaaatgccaacgtccatgttattgtctcgagcctttttgttgttcttattgtcaataaccaatatccctaaacccggttaacaatagtcgggaaaccgaaccgtattggtggatcctatcaaatcaaagcaaaccagaacagataaacgaattgaaccaaatcagagctaaaccgaaaaaatgcaacttgaaattctgctggacctacattgggcctttcggcctgtataaatttccacaatttacggtaatacccttgtaagaaaccctaagtaataatgatgtgctttaaaagcgcacagcctcacttccaaacccttcgtttacagcaaaaaatcgaaaatg

SEQ ID NO: 34966 - DNA, 3 bp, Unknown
  misc_feature (1)..( 3): 2750-1469P.txt file - cDNA_ID_3083544; gDNA_ID_2926224; Annot_ID_203412
cgc

SEQ ID NO: 34967 - DNA, 3003 bp, Unknown; identical to SEQ ID NO: 28703
  misc_feature (1)..( 3003): 2750-1469P.txt file - cDNA_ID_3083544; gDNA_ID_2926243; Annot_ID_204185

SEQ ID NO: 34968 - DNA, 3000 bp, Unknown
  misc_feature (1)..( 3000): 2750-1469P.txt file - cDNA_ID_3083554; gDNA_ID_2926243; Annot_ID_204182
accgtaacgtttaaatatctcgttcagcttttcttcagatggaaccgaacctgaatccgcaaagttgaggactaaagcatagggtggtaatgaatctgcagaacagtccttgagaccaatttgctctttcgagcctgagccagtgatttctttatttgcaggtaatatctcttcttctgcagagtctttcttatcacaaggttctgatgtctcagtgatacttgccttctttgagtcaccattgagtttactgcaaaacagttcattaatgaacttttcaaaatcttcataattcgaggggtctatgttgattgaatcaggtattcccgttgaggtattggcagcgtgaaggcttgagagcatctcatcaggagaagaaatctttctttcagcaagctcttgatgtctcggcttcttagtcttctcattctcaacttccgtagatttagaagcacggcaaggcttaagtgtaggagttaaagaattcatctcattttccactccagttccatgacacggttcagccgtcttctgcagtttattagtatcacccactgacaaaagactttcctcattagagtgtttagacactgaatcctccttttgctgacttttcttgatccttttctcagacttaccagattccgaagactcaaccttacgcttcttttcagaatgcgacttaccatccaatttctcagttgatctgctcccacagcgtttctttacagtcaaatctgacaaagtcttctcctttgtctgttcagcattatctttataatctgtctttctctttttggcagatattccttcatccatatttacttctgggagagaagccagggtcgcagcagattccaccgaccttacaaatgtttcatagtcaatgaagtgagaatagtctttccattgttgaaaagccaatacctgagctcggttaatcacaaattgcagcttctcagtcgcatcatagcaaggaaagcaagctaaatgcttcatataatccacaagtttagcaggttcaaaagagattccatccgataacttgtctccaccgtatctaacacttgagtcctcacgaattccagcattgattatgttctgagtcttgagtttgttataggcttcctctgaaacacaagagcaagataaaccaaactctactctccttgaaacctcatccaaagcacaatcaatagcatcacgaaactcagcggagttactctgctcctgcatttgagagaaattctgatgaaaaggctttatctgagatgcattattccaagcaaatgtacaatccccaaaatacgcaaccaagacatttcctttcttgaagtgcctcatcgcagctttagaggcaacagatttatcaaagaccagtccaggccaccatggataacttcttagtttagcccaaaccaaatctgagtcaaaaagcttcagattctctttagaaaatcctttcttatccttgttcttaagcagatctgaatcagcatcaaaatcaaccccgttacagagactatccttatcatcacgagcagagacaaatacttttcgctcaactccagtgaggttcactaccaagtcctgagcttgaaagctcatgggatcagctagggtttcagatgtgtgagccataccgtagtcaaaactcgacgcatttatggcaaaatcagcgttggagtcagattcgactccttctggttccgtagacataacgagcaccaacaaaaatccctagacaacgaagaaacaaaaaaaagcagaaattgcttcagtatatgcttccattaaagcaaaaacagtacatcatacgagagacgaagaaaataatcggagagcaaaaaaggtggacagaacctccggtggcggttacggtttcgccggcgacgaaagcttagattttgggtaatgaagaaataacagagtttctttcgttttgagggggtttatgagagagctacgtgtacgtcacgaattattccacgtggcagtacttgattttgtctcgactcatcacaaccatacattattacattgagtgaggttcaaaattttcaaacttttgcttttccctctttatttgaacttgaatttgacttgtttttactgatattaaatagaatagaattttactacaagtagattagaattttactacaactagtttatttctaaagaattaaatttgttaattttatgtttaatgagaaccaaatgttttcctacaacattaagacacttttttataagttttctaaacttgtttaatagtatgttttactaaaaagtgatattttgaaaaacctcttttggggatatttttaaatactcctcatagactaacaaaataatatatcaattcatatataaacacaataacaccgtttattgtgtaaagtgcttagctctctcaatggtcaaaaaatgcaaaatccattttcttgttatgtctttgtcatttttattgttatgtcatgtggcgtctcaacattgagaggatattttgggagccagtaacgttcgagattcaaaattgtggatgagattttaacgattgaaacaaaagtactaaaaaatagtcgtttattagcacatgtactcttttttttgtttggacagctattagcacatgtactcttatatgtatgtatgtatataaaaacgtgaatagtgagtggaataagagaaagtagttaaaattcaaagcgataagagtaccattttgtttttattatattctattctatggacgcgattcctctgcgttgtttacctattcaaatgaagttctaagccaaaaaaaaaattagtcgatttgtttttatgttcataacaccccacgggctaactaatatggtccaaaacaatataacaacaacaaaataatcacgcaaaaatctaaaaaaccagccttgtgtccatactccacccacatatataaggagagaaacaaaaagagcgtaagataaatcaaggagaagattaagaaagatg

SEQ ID NO: 34969 - DNA, 3003 bp, Unknown; identical to SEQ ID NO: 28695
  misc_feature (1)..( 3003): 2750-1469P.txt file - cDNA_ID_3083578; gDNA_ID_2926243; Annot_ID_204175

SEQ ID NO: 34970 - DNA, 3003 bp, Unknown; identical to SEQ ID NO: 34965
  misc_feature (1)..( 3003): 2750-1469P.txt file - cDNA_ID_3083584; gDNA_ID_2926243; Annot_ID_204174

SEQ ID NO: 34971 - DNA, 3003 bp, Unknown; identical to SEQ ID NO: 28694
  misc_feature (1)..( 3003): 2750-1469P.txt file - cDNA_ID_3083592; gDNA_ID_2926243; Annot_ID_204171

SEQ ID NO: 34972 - DNA, 3000 bp, Unknown
  misc_feature (1)..( 3000): 2750-1469P.txt file - cDNA_ID_3083596; gDNA_ID_2926243; Annot_ID_204170
agaaacattaaggtgaaaaccttagtgaactgtggtgttaggtttcgatataatctattaagtcaatgcgaacgttcttattatagtgttttatattggtgtcggagggatgcggtataacaccaaacttacttgatagctggtagagagttgttgcgagcaagaagtcgtcaagaagatatataacttgttgagtgcacaaacagctaagagcttaagtgttcatgaccttcctctgcagcatcaacatattcagactaaattatggttagattatatctcatagagcacaacaatcctcatttaatcattggaacggttaaaaacataacacactaaaggcgaactagtcttaatttctatagttaaacttcaaggcagatagtaagtaggtttgttagctgttagagactttttctcactcattcttatcacgaaaagacaaatgtgcctcacatactcaacgagcacagaagtaatgataaaattataacttacagtaggttcaaagtcagggtttgacaagttcactgtgaggtttctcatcaacagcaaaacctgcaagaaaaactgtgattagtgacggatactaggaaaaagaacaatcactgacagctacaaataggtaccatgacacctaaaactgactcatggttgtaacaatcccattatttgaccaacatctccatagaatcatggtactttggctttttggtgtttccaactcgtgaatctatatattgcaagtactgatctttatatttatcttctcacacagctgaatttattcgggaactcaaagaagaagactaaatgattgatatgctgcaacacacatatcagttaatctaaaggcaagtaaagctccaactcacagtttcgaaatttataggatccatttccttgagctttttcatgcggcctttgctgtcaggatcgaacacactcccaatgaagttataaacctcagcaaaatcaggaagacctgcaaagcaaccattacaacagcgtccaccacaaaatgaaaactaagaaatagtccctcaattgttcagataattaccatgcattgagggagcttgtttcgccagtctcaaacccttagaatctgatagtgttctgcttgagcttccgataccagatgctgaaggactagtttcacttatcatgtcatttgatccaacatcaactgaaacaatgatatgtaagccgcatttagcatatgaaaacttcagaagatagagtgactagactaccaaagcaaaatataaaaactgagtacagatgagaacgcatgccttctgctccacaaagagtatcaagttcatcttctggtggaataaccccacttacagcaatgtttaacaatgcagatgtatcatcatcccatggagtatatccaggcaggttatttatttgagtaggaaaggacatggaaacgtgaagcgacatttgagctgcagatttgagttgaaatcagattgattacatgttactccatctgtcaacccaaagtaatatctattacaatagaactaaccatttttcgatgccttttgaggatatggatgagcagctttgcgcttaggcctagggggtggaacatgtgctaaagtcccatttttttggacctttagaaagtatttttgggcatggctcctgatctgcagtaaatcaaacaggcacaggatgattgagtggggaaatgtgccaaggttgtatattaaaccaaaaatccaaagaagctgatctcaaacctgaataactgtctttgaaccaacaaaatcttctatctttttccagtcacgatcaaacctaaggacacgagaaaattgtcaggacaaagtaagattcttttttctaaaagagagagaagcctttcacacacacaaaagagcaatgtaatatgtggaagtaacgaaccattaccaaaatctgaattgtagtttaggactgtagttggaaattggtttcatgcatagctctaaaagctgacttgtagtaagttttttcagttctcatgttaaacatttttaataaagaaagatacgacttctgcaaaataccactatttatgcagaaaccagatgccaagtcctctactcaatcattttggcaacctaagataagcttaaaccatacttcggttttatgagaagaaacattcatcagcgattaatataaattctgatctatcgaatatacaatccaacctaacaaatcaaagaagacattgttgcttctgcaaaatccaattgcatacgcaaaactccagatgatctaccacataaccaaacttcgatctgattaagcaaattaagtagaaattacgcgaaattacgcaaaattcagctataaattagagctcgaaacacaaagaatcagtcaatcaaatagctggtggaagaaaaaaagagcgcggtaaaattacaattgaagagcttccagaaacttgtcgtgttctccttcagtccaactctctctagacttggtgattgtgtaagctttcctcaccttcttctccggtgcttcaccagcttccgtcgttgcaatcgtcgtctctgtagcatctgtagaagtttccgccggtattacttcggcgaccaccggattggttgaggtcattatcggtattttattcaagatagagatcgtctagagagagagagactgaagagagaaggggttagagagagaaatgacgacgatatccacatggcgggcaagaagttggtgtataatatgtggagacgcttcgcttgcaatttcaggccatccatttttctcctttttcttattttatttcttaaaatttaaaatcaaagtaccaaatcggtttatatataccggtgtattttaacactacaaatccggtccggtgtggaagttgtaaaaatagcctttcaaatccaatccatttgatttacatgaaattagaaaaccagaaaaactgagccacaatgatgatacgatgatgatcctaaccgttggcgaggaatg

SEQ ID NO: 34973 - DNA, 3000 bp, Unknown; identical to SEQ ID NO: 28693
  misc_feature (1)..( 3000): 2750-1469P.txt file - cDNA_ID_3083601; gDNA_ID_2926243; Annot_ID_204168

SEQ ID NO: 34974 - DNA, 3000 bp, Unknown; identical to SEQ ID NO: 28690
  misc_feature (1)..( 3000): 2750-1469P.txt file - cDNA_ID_3083616; gDNA_ID_2926243; Annot_ID_204165

SEQ ID NO: 34975 - DNA, 3003 bp, Unknown; identical to SEQ ID NO: 28689
  misc_feature (1)..( 3003): 2750-1469P.txt file - cDNA_ID_3083618; gDNA_ID_2926243; Annot_ID_204164

SEQ ID NO: 34976 - DNA, 3003 bp, Unknown; identical to SEQ ID NO: 28688
  misc_feature (1)..( 3003): 2750-1469P.txt file - cDNA_ID_3083629; gDNA_ID_2926243; Annot_ID_204162

SEQ ID NO: 34977 - DNA, 3000 bp, Unknown; identical to SEQ ID NO: 28683
  misc_feature (1)..( 3000): 2750-1469P.txt file - cDNA_ID_3083637; gDNA_ID_2926243; Annot_ID_204158

SEQ ID NO: 34978 - DNA, 3000 bp, Unknown; identical to SEQ ID NO: 28683
  misc_feature (1)..( 3000): 2750-1469P.txt file - cDNA_ID_3083637; gDNA_ID_2926262; Annot_ID_204794

SEQ ID NO: 34979 - DNA, 1190 bp, Unknown
  misc_feature (1)..( 1190): 2750-1469P.txt file - cDNA_ID_3083643; gDNA_ID_2926243; Annot_ID_204157
tcaatcttctgttgttggagaacacaaatctgtcgctaaggtcaaagctttttcctcctccttcgattgctgttctagacatgatgaatcagagtctgtaatcgttactttctgtggctaggagcagcgaatcctgaccgttggattggtttttctttttctttttaatgtccgtgatattattgtctgaagaagaaagagagaccagttttgacttttgacttcgagtaatgagaagaaaaagcacagtgagattgctgttcttgacgttgagtcagagtctgtggctaggagcagcttcttttgttttttgaatcgacaatggttgaggaataaacgaaatcctgaccgttggattttttcttttcttttcttctacttaataatgtccgtgatattattattgtctaaaggggagacccgagaaagagcgagaccagttttgactttttggacattgtgtgttttcgattcgatcttttttttctgaaggtatgcttttgaattcgatttttttttttttttctcgagatctttgcttcgtggtgtttcctttggacttcgtttggtgatatttctgggtttcgtcttttgacgttttttttttcttctcgatgaaatgtttactcagctgccaaatttctctgtttgatattgagtgagagagatttgttactttttacaaaatcaactagttttaggttaccaaatttggtttcggtttcgatgcttaaacaataacttggtgtagtcggtctctgtatgaatgtgtgtgtgtgttgtttttgctgctgatttggatctgtgcttttgttatagcgttgaaaatgcctcgttatgatgacctttgaacacggactcgttatatgctaatttggaactttgcttgaaacagttgatttttatctggatttacatttgatgttttatgcttttatctcaaaactctgtatatatgaagctacggatatttgacctctgatatcctattttgaagtctcagccttgagtgcaccacctgcatgaggatgtcatgagatttttttttttagtggtttttgaatcttgtaactactagttgttttggagaaattatgagattgttcctaaaatgtttggtagcccttgtaataaaggtgtcagctttgctcttgggaaatgttttcgttggtcttagatgttggtaaatg

SEQ ID NO: 34980 - DNA, 904 bp, Unknown
  misc_feature (1)..( 904): 2750-1469P.txt file - cDNA_ID_3083649; gDNA_ID_2926244; Annot_ID_142951
aagctttctctctttccactagggtttcgtgatctctatgagttcttcgattggttgtttttttcttttctcaaagtttctctctctccattagtctgctgatgttaccaatgaacctaccgaccttttctctcacgcgctagcttcggcgtttggtaataatcttcatttggtttttatttcacctgcgtggtttttttttcctttcattttaaagattttgcagtaacaatcatattgaaatccaaatggctaatgttattacactgcataggttagttgcttctagttatttatattaaagatttgatactactatgaattataatttgattggctataaacatccgattataccagctcctacaattgagaaagttataacaaaatggttgtcaatacattaatgaatactaaccaccttaattaaaattgacaccagtgaaaaagcattaaatatttggaccaccttttaaatagatgattaatcagtaattggacaaaatgctagtatttttacaaatcgggaaataaaggggtgaaatcgtaaataaataaaaagtatgggccacataataaagaagaatacaggcgcatgagaaattaacataattacctctcctttattacagttagtcaatttctaacccaaaacttttgttttgttctttcctttttcttaattttgattttattaaaatttggtcatgtattttcactactgtaatagagctggcatctctgatctttcaactccaccaatctcgaaatcttttctttcaattttctcaaaaaattaaaaccctaattcttattggattctgtttccttgaggagcaattgtgttctgttcgctgcattttttttgttctgctgacggaggaagaagaaacgagaagagatg

SEQ ID NO: 34981 - DNA, 904 bp, Unknown; identical to SEQ ID NO: 34980
  misc_feature (1)..( 904): 2750-1469P.txt file - cDNA_ID_3083649; gDNA_ID_2926244; Annot_ID_204210

SEQ ID NO: 34982 - DNA, 115 bp, Unknown
  misc_feature (1)..( 115): 2750-1469P.txt file - cDNA_ID_3083658; gDNA_ID_2926245; Annot_ID_204212
caatatctgttgcgcttctacaggaaaatcactcacattgcgaggaaaaaagattatttgactcaaggaaacaaaagataattcggaaatttcttttgttttcctctcagtgatg

SEQ ID NO: 34983 - DNA, 3003 bp, Unknown; identical to SEQ ID NO: 28712
  misc_feature (1)..( 3003): 2750-1469P.txt file - cDNA_ID_3083705; gDNA_ID_2926246; Annot_ID_204238

SEQ ID NO: 34984 - DNA, 3000 bp, Unknown; identical to SEQ ID NO: 28711
  misc_feature (1)..( 3000): 2750-1469P.txt file - cDNA_ID_3083709; gDNA_ID_2926246; Annot_ID_204237

SEQ ID NO: 34985 - DNA, 3003 bp, Unknown
  misc_feature (1)..( 3003): 2750-1469P.txt file - cDNA_ID_3083714; gDNA_ID_2926246; Annot_ID_142964
gactttctgttggagttcatcaacagcctgctgtaaggattgtatagtttttgatacaatatcttcgtatacggtttccacttcagccatcgaatctaggctgaaaatgatcccttcctgtataaacacatcttctagcattttgatgtcttcgttgctcatcctctctttcatctgtataaaataacaataatgcaaatgtatcttctacatcccgttttctgaatattagagagaatgaggaaatggctgacgtagagtcttaaccttttctaggatcctcccacatttttcatctttggtaaccgaggagggttcctcctgtgccttcgcagatttcacttcactagcacgtggtgatgcttttatgtgttttgccctgtacagtaaatggaagcaaacatctctcttaaacacgttcaataacgtaacacatggagcaagaaaccgttactgtgctctgagatgcatacctcatgccaaacctgagagttgagagcgtctcagatgcatttaaagtgcttggtgagcaacagcaaagcagcgccattcgagaatttccaccctgtggcatgagagaccacaatagaattgagaacaagctagaaaattataaaataaaatcaacctgagaagatatactaaccagggcatcctgtaagatgcgagtaagcttggagtcacgatatggtatgtgattccctttgctagatggcccactagtgagagcgtttatcacgttccccaaggctgagagcgatttattgatcgtcttcgcttcttcaagaaccctaccttctgctccagttttgtctgctttctctgagccagccaggtcgacaagaatcagttttcctgtttttaccctgttcacatgccagatatgtatataagctccaccactacagcatcacttttttctgattaattgtaaaaaatcgttaccttttatctttaactgaatcctgctggattgtgaacaagtaggcgcagtggcttctactgctggacatattcatttctgtcattcattgttaaactggaaacattcttcaagatgactctcaatcagttttaacctttcagtcaactcggagtagcataatcataatctcactatcgactaaatggggaaacattgaacaagtaagtgctgtaaaagctaagaggatacgggtttccccaactgcgcggttagctaaaccggtctgaaatggcaattggcatcagaaataagaaagaagaaggccgtataaggcaattaagaaacttagggtagctgctatcttacgcatagatgttgtaatgcctccaccgaatctgatacaggcacctgaagcaacgaatgattaaaacttgcctacccagtaaagatttttctcaacactagcaaatagaagatataagacaatgaagctagcctctgtaacgcctgacaagagtattccttgtgttttgttctccttgatctgtatgtttgcttttgataagtccaacaggtccctgagagatatatgaatttatcgataagctatataccctagaagaaatcagagggaattacatacacaatacctgactttctccatgtagatctcaacctagaggagacaaaagacacgtaagatgtctatacaggagagcttgaaaggagacttatagcaagtgcatttaagtcagtaccatagacaatttaacagtgtatcttgcaatatcattggaagagctgatttgctcaaacatcccatggaccactcttggaagaagtcctttattgtgctcatcacagtcctggatgcctggtccctgaatcaatcgaagaaaaccaaaatgagccagaagaaggaatggtccttgtgctacaggaagaggtatcaagatgagttaggtgacctccatggaataagtcttcccagcccctgtctgcatagtataacatgaaacgatcaaattgagatcaaaatctgccaaattaagaaaaagacattgaaagcatttccagataaaagagatcaggagaagaacaaacctgtccataagtgatgattgttccgtttataccatttacagcgtctgaaagtagtagtagtagtacaaaggtaaaagatgcaaaagacaaaggtaggaggaaaccaaaaccaaaaatgttgattacattgtaaaatcataagattggtgctcaaatgtttagatctaaaatccagaagagaagatcaaggaatcaattagtacctctcatgatggggagagccagaaactcataaaccgcagcttgggtagagtcctcataaaaaactctatcgaggctaaatgtaaattcatcttccttgtcatcctacacgcaagtaaaaacgctagatagagtttgagagacagagagagagagacaatattaatcaagcacacggcgtcgagtagacaaacttggaaaacgaaggtttcagcgtcgatgggtcgagcacagacaccatctctgctgggatcgcgcatctctttagagcttcgcggcctgaatcgcgcacagacggttacgttagacatctcctctccttatcggaacgagctcagtctacagtgaaacacccaaaatgagtcagcagaagatgaatgaaattggggaaatagtagcacaggaaatttgaagctgagagaaaaggaatcggaacttacctctcaaatggagtggagagtcagagtagggtttctcttacgggcgggaaagaagaaactcgaaatctgatttttgagaaaagagaaggaagaagaagaaggagaaggagaagaggtcacgaggatacgcgtgtgggttgttaaaagatctaatggtccataagaagacacgtgtcactaggaacacggtagctaaggtgcccgccacgcagagaataatagcttagaaagaatagggggtgttgttatccccttgggcgtggagtggattagggagactcgcactcttcttcttcttctttgtacccagaaagaaagagagctccaacaatg

SEQ ID NO: 34986 - DNA, 3003 bp, Unknown; identical to SEQ ID NO: 34985
  misc_feature (1)..( 3003): 2750-1469P.txt file - cDNA_ID_3083714; gDNA_ID_2926246; Annot_ID_204236

SEQ ID NO: 34987 - DNA, 3000 bp, Unknown; identical to SEQ ID NO: 28710
  misc_feature (1)..( 3000): 2750-1469P.txt file - cDNA_ID_3083720; gDNA_ID_2926246; Annot_ID_204235

SEQ ID NO: 34988 - DNA, 3000 bp, Unknown; identical to SEQ ID NO: 28709
  misc_feature (1)..( 3000): 2750-1469P.txt file - cDNA_ID_3083724; gDNA_ID_2926246; Annot_ID_204233

SEQ ID NO: 34989 - DNA, 3003 bp, Unknown
  misc_feature (1)..( 3003): 2750-1469P.txt file - cDNA_ID_3083734; gDNA_ID_2926246; Annot_ID_142959
actcccttggcggagaccagaacctctccagacgaggattgaagaccagagtagcactctagccgaggaagaggtacctcattcattactcgacattttatctatcaaaaaggcagctaatgaaatacaaattctgtaagcagatgtggaaagtggatgtgtataacagacaaggcaaaaccttattggagagatgcgacaagctgctccacagcattgctgaaatggccgctgctgaggccggagactcacaaccgagccccgtctctgttcttgacgcctcaatttaccacgaggactcttctccgtcccccgtcctgaaacgcacccttgactttgctgatgctgaagaagacgaatcctggggtggctcaatattatcatcgtccgactctgaatatgtatacatctcggacatcctccgagcctcagattgccttccacaagagtccgacagcttctcctttctggaaaagcagcaatacctcaaaggaaaatgcgcctccagagccgcagctcaggaaagacgcctcatcttcgacgcagtgcaagagattgtggcgcggagaaggagcttgcccccgtggatgatggtaggagaggctgataataagatgcaagtgatctggtctgaatttcagaagataagagacaaaaagtcgtccacggaggaagatgaccttgtgggatacgtgtgcggggtcctcggaagagatttgtcggaggaccgatggcgagattttcaggtggagatgtcagaagcagttcttgacgtcgaacgcctcatattcaaagatctcatcggcgagaccatacgccagttggcttttcttaacaggtccgactcgctgcgtaggaggctgctcttttgatataaaactagactaaattctctgacccaagtctgaaactaaacccaacctacgacctataccatgtctaaccaaacatgcgagagtgatagttcttttgtgtgtttttttgtgtgaaatgtgtgatttatcaagtttgggacttggcgcctgttgtctaaaagactaaaaccatacactcttttttttgctctttctgaatcaaactgctgctcatttgtgtggtgtattcggactaataaagactttaaaagtgttatgggcttcaagtggaccgtttatctctaatcatagtctactccaacattcatctacttcagtagtggcccattcagacccaataaggcttttcggcattgacttatatgagcagagagagaaatatgcaaaagatgatcaaagaaaaacttgtgatttgtaattttcaaaaatatgcaaagaaaagcggatcatactccagtagtctttttctttgaaaaacagaatcatataataatatcttccaaactgtaaaaagaaaacgagagaggtagacacaacacacacttttattttttttgaggtggaaaaaaaaacgttaatgggggaacaaagccacgtgaaggtgggaagaacgcaccaattatagtataaggtgacaagtcagcagagaggtcacagtcgtggaccaatccacttccaacaccaccatagccgtcccttcgacactttggctgacaaatgttcaaaggcatattttatattgggaccaagattttgcttgggacaagctatgccccacgactctcccgctagtgctctctggtcgcttctcctctgcttctagagaccaaccatttccaccaactctgttttcagttcacacacctcattctgcaatgcccaccaccgcaccaatggagttgagaagagcccaacttctttcttcactctctgttcaaaactggactggtcaaaccatcatctctctttgaccctactcctacactcgagatttctaatgggtgcacaatctccactgggccaccttttgtcaccagtctctctctctctctctctcttttcttttttaatccttctccataacatttttatacctttctgattactattgctggctccattgaagaatgatcctaatcttgaagaaactgaaagtaactcgtgccaaagagatagtaagtagtaataaaaataaatggaccactccagatgattctatctgaagaagcagtgagtccctctctgttatccacctgcccgatgtttagcaaaagttaactaaagcataatataaagctaatcttttatcataatgtctgatcaaaagaatttaagaaaagaagagatgattcatttagttttgtcagctagctgcaatgggaggccttaaatcagtcaggtaacaggaagacttactcattggttgctttgctttgagctgccacagcctcttttagtttacaaggattgtgttgttgggtcccaacactagtgaaattgcctcctattttcccacagagagcacaaggattttttcccttgcacgttccaccattcttttactctcacggatgatacaggaaccaatcctttttgcgcttcatctgagtcaaaagcctgaaaaagaccacatataatacatctcagcctaaaaagcaaataccatacctacgactggaaacatatgggataagaggataaataaataaagggaatccttcaaatggtaagtttcaaagtaaaagtgttatggtatgatcttgtctgccttttctttgaaaaagccaagattgtgggtgtaactgttatcaaaagataaaaagattcgtgagatctttctttcttgtgactttttccttcaactaggctcctcctttatggcttctctccgccaacaaagaaagggagaggcctcaactataaagctatttataaccctttgttagacaatcagtccccattcggagattggttgcctcggccattcagaaatcacactacttttttatttatttatttataagatcaaaaacccttttccatccttggtttctatactcttgtctctcagaaatcaagaggccttatgagctatctacatgcaagcctcctcaggaaaagaaccatg

SEQ ID NO: 34990 - DNA, 3003 bp, Unknown; identical to SEQ ID NO: 34989
  misc_feature (1)..( 3003): 2750-1469P.txt file - cDNA_ID_3083734; gDNA_ID_2926246; Annot_ID_204231

SEQ ID NO: 34991 - DNA, 3003 bp, Unknown
  misc_feature (1)..( 3003): 2750-1469P.txt file - cDNA_ID_3083739; gDNA_ID_2926246; Annot_ID_142958
aggagtctgtttctcacggcgggggcaagcacaggatccttgcagagcttgcccgcgttgaacaggaagtcgctttcttggaggtagctaaactaactcgtatctctttcaaattccgacgtaggtctctcgtggatagctcaattatcctttttagatcaattgttacaacaattaggtaaaggtcgctaagattgtttcctgtgaaagcaaaaaccagtatggcagatctgttccaatcagaagagcatggtagttctcttgacaataagtggcaccatttcagtcagtcttgtttatgactctatgaattgtattcccaaaatctaaatctgctgggttctctttggatccactattggaatggttctctgttgatcttattcttagggatgtgcaagaatacttttgatcatagtccaattagtatcattctctcttggttatcatctatcgaggcatgttaaaagttaaccttctcccaagtttctctgttgcacagataatgtgtttgcctattgttcctactagtgagctctaacacttactaaaaatagctttactctctctttctgtttcatgtactatatccagaaagagttgaaggaggtcgagaacacagatattgtatcaaccgtgtgtgaggagtaagtatgggatactcaacctatgtttttttttaacgcttgcaagcaactgtgtgctagctcctgtaggtatattatctggatttgactgaaacttgtacgttgattggtgatcaaattgatattcccttggttcgcaggctgctatctgtcatcgagaaaggacccgatcctctgttgccactgtgagtgctttttaaaccttgaaactctagtgttggtttggactgaataactgatggatgttgtggtgctggcagaaccaatggacctttgaacttaggatgggaccggtggtttgaaggaccaaatggaggagaaggctgcagatgcttaatactttgattcgctagacagagtaatgtgttacatatactagtttcttgctaggatatcattttacatgggatccaaaatggggctgtagcagagaaaaagcgtacagattaatgagcattggaattgcatagaacggcttagttgcacctacgtaaacagtattatatgtatatgtaatgtatgggatccggatctgacatacgagtaatggagtttcaggcttacagcttctcatcttcttattctagatcttgttgaaagaagctgaaatgtgcatagtgatatttgggggctaatagagtaatagctaatgaggaagtgggtacaatcttgaagaccgttaagtgtgtctctcttttttctttttagataacttttggccacatccaccctccatgatacacacacgctagtttcgaggatcagaatacatacatacctatgtttattatatagatagaacgataatggaacacagagcacatgcctcatctgttgtctttttattattacttattactcttctcctccacttctgtattattacagtctgttaaagtagaacccccttttgtttttttctttctatgtctcaaaaattaaaacaagttatgaggtttaaaaaaaaaattgagaaatgtagagggtattagtagaagtgatttacggtaagtttattcgacagctaaaaagatagtttatgcattccaaaatattcctcaaatttgtgatgagtaaacaaatactggtaaggtgggttttctgacaacctttggatatacagtagtatgtcatctgttttcattgcctcattggtcaagatcaaagttgatgacctcattagagctccttcttctcccataaataaaaaaaaattgatcaaagtttgtagtatgaatttgttatataaacagaagagaaattaacacagagatgtgagttggtccaaaagaaaaatgattgagcagccggaagaagcacgttacaacatctgcagcatatctggtcagagagagtacagaaatattggggattcaaacaattcacctcgtgatgaaacctgaacattgaaacatgcattatagcctcactcacatgctcacataatgccaaaccctttttctctgttcccgccttgcttttttttttcgtggcaatagaatacaatacattggttgggtgattaaataaagagaatgactaggataagtaagttagccgttaaagttgtaaatctcgagtaagtgaagtggtccgtttttatgaaactcataaaaacgaaagtcccatgtccctaaaacactagtagaatgtggtaacgtatcttcttcacattcacgttttcatatgggaaacgaatgaaataaacaatgcaaaacgcaataacttaattagaatcttgaactggccgataagtgcaaccgtaacggaaagcagaggcagagagagaagagagaagagggagagagctgccttgggaatagatagaaagagagcgtatcaacggtggtcattactttatgatggcattcccaactttgaaactgccacgtcgatgtcggtcaacagcggggtccatatctcctcatcttccgttccatattttttccacgtggcatttttctttcctcttgaaacaagaattcagaattgaatcgtaaactctgaactagagtaagtaaataatgtattgactagaagaagaagtaagtagtacgggctgggtaagtaaagataataaatatgcggggtttgatctttacttatttattaggactcaaacttagccattattaactcaaaaatcaaaattactcctaaaacaagcagataggaaaaaacacaaataaataaaaaaaaggaaattgaatgcagagttgtcagagtgtatttaaaaaagaaaaaaaaagcacgttaggaggagtatcctttagactagagtaagggagtgggtgctttaaagaagcagagaagcgggagaagagtgtgcagcagcaacagccaacagaagaaaatg

SEQ ID NO: 34992 - DNA, 3003 bp, Unknown; identical to SEQ ID NO: 34991
  misc_feature (1)..( 3003): 2750-1469P.txt file - cDNA_ID_3083739; gDNA_ID_2926246; Annot_ID_204230

SEQ ID NO: 34993 - DNA, 3003 bp, Unknown
  misc_feature (1)..( 3003): 2750-1469P.txt file - cDNA_ID_3083745; gDNA_ID_2926246; Annot_ID_142955
cttcaagaagacaacatcaccaacaacaacgtcaaagatggagatatgttgccgcctgctgtcccgaaggacttccactttgatgttattgcttatcttggacagcttgtcgaactgtctctcctgcctaaagttgctgagagcagagacaactatgaccaagaagactgctacaaagatgcttccgccttcataccaaccttctttgatgccatgttctttgataccgaagccaagggagaaaatagcgcagaccaacaagatcaagatggttaggtctttgaaagcttcatacacaaagaagagaagtcctttaggcggtggcttatggtaggtgttagagccaaagaggtcacggcgtctactgacttcttgctcattcccgtggatccctttggtggggttagtcctaagggaagcggcgacaccctccacgccgcccagcgcttggatgcccggtaagtccttacccttcatgatctccacaagttgttcttgatcaatggcaggaacgtaagagagaggcatagagttgatctttgctccctcaccggactcgagggctgtgtaggagagagagagagaggcatctgaggttttgggatcaatccttgcgggaactatctccttaacaagagagagcatagccctcatagagtagatggcagcgtaggcaaaacgccaacgcctctgggccttgttgaggctggaggtggtaaggttgagcaaaagtgcactgtaatcatattccttgaggtccctcatgctttatttgtgtgaaagaaagagagtttttagaaggaaaagagtctcgctctctctcaactaaatgtggtgttacttgtaagacacttaagactcgcaaagaatgatttctctctctctaataccctaagcttcgtggtactatttaaatccgtattggccgccttttgattgctatttatctgctttaaaatattaaatatctcgtgtaaagtaacttgtcctagtttaatattttcaggcggtggaaccactcagaaacgttgtaaacacgaagtcatgtcgatcaaaggacatgggccgcacatccttttgtacttgtgttttgacttatctgttgtctcgtgtttcggtttggaaccactgtgccctaaaagagagagttaatctgagattttggtagtaatttctaaagcagccgtatgatgtaatggtgtggacaagccgtcattgtagaatgaggaggaatagcgtgcgtgtaccaacttgcttagtccgcacggacaaatgaaaagaaatggcgaatatagtaaagcgaaagaagaaaaaaaggatttagattgaatcttccacaccaacttggtttggtataatatctatcaagtgaaatttatactactcaaactcaaaatccgtctacttttccacaaatctatgtttagaaataataaaatggagcagcgtgtacgacgaaggcattatgagtttgatcaccgaaacttcatagcactttccattttcgctgtcatctctttctttgttcatgtgacgacagcaagacataaaagcagttgactttatttttataaacaaacaaaataagttgacctccactaaaactagacgtgaggtgagaccagatttggcataaaattccgatacaagcgatgaagtgaatgtcgagaaactcctcaaatcatatacatacatacacagagatgctcagtgacatacattagatcacgagttactgtatgtggataagaaagaaacaagagtgtttgcaccaaaagcagtagcaagcttaacaaaatcccaaccaacaaatacaatggcttgctcgagaataaatagactaaccatcatcttatgaaactaaacaatggttcaggaataagtagaagggaagattacaactaattaagctcactcataacggtaactagtaataacaaagctctcagcatgcaacaaattaagagctatggtttaagaagaagatccctggctgtgcagcagcagttgttggtgtgcagacgcagtgaaccaccaagccccatgagatccctccacctgctttcctccggcattgaagctagccacaccaatccctcaacctccttgtccttggcgattcgcgcatctaaaaaggcaccagagcacttgtctttggcgaaagcagcgcacttgcccttggcggcagccacacagccctcgaattcccgctcttcgcacttctctcgttccctcatgtcaccaccagatccccgccaccacggcggcttacagttgttggaggcggagacggcgcacccaattttagcaccttcctcgcactggtccttgattagggtttcgcaacgcttgaaagcggctgaccatgaatccagtgatcggaaagctagaacataagaaccaccggagggtacaggtccccggagcagcggaatcggacggtcgaacacaacggtagtcgcagccgccgagaaatcatcgtcatcttccatcatttcaatttctcttcaaaggcccatcgggcttttgattgaggccatccacctatatttatttaattaattaagtttgggggatccaaaacataattagtataacgatactactactaaccgactggactagattattctacttgatatatcctctcgagaactattgctgccgctactcgtttcatatctccgtctccggctcgatccgccaagtagagtaagcaggtatctccgagcatcttgacatcgcttctttcctgcttctgtttcctttgaccttattacagagggaggactcatcattcttctttctcttctactttttttcatgtttattttggggtttagggttttagaagtttgatcgatctgttattataactttggtttcaatcgatctgggtgtccatttgcttttcgatgtttaggattttctgtgcttatttgaatcaccttgtatcttgtatttctccttgtaatttagcacatcatctgcactgcagcaatg

SEQ ID NO: 34994 - DNA, 3003 bp, Unknown; identical to SEQ ID NO: 34993
  misc_feature (1)..( 3003): 2750-1469P.txt file - cDNA_ID_3083745; gDNA_ID_2926246; Annot_ID_204227

SEQ ID NO: 34995 - DNA, 3003 bp, Unknown; identical to SEQ ID NO: 28862
  misc_feature (1)..( 3003): 2750-1469P.txt file - cDNA_ID_3083762; gDNA_ID_2926227; Annot_ID_203551

SEQ ID NO: 34996 - DNA, 3003 bp, Unknown; identical to SEQ ID NO: 28862
  misc_feature (1)..( 3003): 2750-1469P.txt file - cDNA_ID_3083762; gDNA_ID_2926246; Annot_ID_204222

SEQ ID NO: 34997 - DNA, 884 bp, Unknown
  misc_feature (1)..( 884): 2750-1469P.txt file - cDNA_ID_3083777; gDNA_ID_2926246; Annot_ID_204215
gatcgctttgaaaagaaaaaccggagtacaatatttcagttacggaaaataattgcgtacaaaaatgggcaaaaaaatggctctacgttacttaagcgagcaaaatcatttttactagaaaagagaactgaaaaagcaaagttttgtatttttttctcttcatatatatatatatatatatatatctttttttttttcatctttatatatatatatatatatatatatatatatatatatatatatatatatatatatatctaaaataggaattgagcaaggaaaatctcatactactaatttgaaatttaagaaaaaaaggaaggcgaatcgtagacgggaaattgttcttttgccgctctcggacgaatcgtctggtctgcttctttttccttcttcttatagtctttgctttttggccttaagaaaatgattttatcttttgataaagtttccatttttggtgatataatacaaatagtgtattagtagtttgattctcttcaccacggtgtcggtacgattgaagctcctccctccaagagccttcgtacagaggtatattttaattaattttgtgcatcatgatgattgcgggagctggttcccactttttcgctgtttatgaaaattactcactctcactgtttgatgaaagcaatcataaatctcgctgaaagctaccctttatttgttttaatctttaatctggtgcatgacttgacactgattggattgcctcatctctgtatgtagcagtttctccatgtatactcttttcttttttaagaaaaaattataatttattaagacttgttttgttatatggtttttgttttgaagacgtttctgctgaaatttcaagcaagtgtgtttgtcagatg

SEQ ID NO: 34998 - DNA, 3000 bp, Unknown; identical to SEQ ID NO: 28722
  misc_feature (1)..( 3000): 2750-1469P.txt file - cDNA_ID_3083858; gDNA_ID_2926248; Annot_ID_204277

SEQ ID NO: 34999 - DNA, 3000 bp, Unknown
  misc_feature (1)..( 3000): 2750-1469P.txt file - cDNA_ID_3083862; gDNA_ID_2926248; Annot_ID_142979
tttggaatcttttagaagcagaatatgtgcttatggtttttttaatttattttggttgcattttggtaaggtttttaagggaaatacataccaccaaatgatgccggtttagttagtaatgactgacgactagtgaagtaaagtctctccttatatctctttgctaaaagcttcaatatttgtttaatagtaaacattgtcaacagatttggaaagactaaatcaacgtttaacaatatgtcaaaatgtaattcaaattgattaatcatagtagcgaaatttgaagaacctttttcttttgttgattaaaaaatccaaatctctacgtttttctcacattcttcaatcttcttgaccttgtcccgtttaattccttcactaaaatcttttcaaccctcacgtgctgatgttgacatggaataattgttgttacttgtcaaataataagaagaagaaaaaacagactaatgtatgttcctctttgattgttctggttaggcaaattacttgcatatctccacatgtacgaattagtaatattcattcataaagttagtatgatttatagattcaaaaaaataaacacagatcgagtttagtttagtcaaatatttgaatgttttcaagaacaagaagagtttctgcaatcaactgaaatatcattttcatggtcttggttcaaaaccagcagtattacaaacagtgagaaaggtttttggtatttgtaacaacaatgtattgttgcagtgactccaaattcaaaaatggaagtcatgtgcattcaccaagttacggcaaaagtaaaagactaaacttattactatttccgaataatccggagcgataccctaaacaacattcacctcaaaagttctaaataacacgaataggctgatttttgtatatatgcttttggctgacgttttttttttgttctttgctttaagacttcaattcttttaagcaaaaatttggatgggaaataaaaaggatgatgaggtggcctacttgtattgagcggataaacatcagccaacaaaaatctttgttaaaataaaaagtgaaagacagagagagagatggccacgtggacaaacatggtgggcgtttacacgtggaatataacaacactccgcgttgctgattatttgattccatttaaataaaattaaaaaatactgattattctttcttttgttcacagaaaattccttcattcacaatttctcttttaaataattaaagaccacaaattttgaacataagaattagaaaaattaaagatcattcactagagtagtcgacattattattaatttagtataaataaataaggtgtgaatccacgtgggatgacaggtgggagcgaagtctagtgcatgtcatgtaagattttgatttactttcaacacgcttcatcgctatttggaccacttcgctgacttttttttgtttttttttttactactgagtagtactagtatttcttacacatatcagagccaaaaatacaaccccgacgaatctttctttagatacaaataaaaaatatttactcctacaagtttcattcaccgtacgttttacttgttatatcattgcaatgacgcggcttctaaatatgtactaccatatgtgtgtttgggaatctgacagttgtatattgcactggatccaaaccatttcagaacaagagtacattttctctgttcgtacgcattatttgttttgtgccgactgcgaatataacgatttccatttattcatatactaaatatcatacaatccataaatgaatagtcttctttttttcttgggggaatttacaattccaatcaaattaatttcttagctaatcataacggtagtcttgttttctgtaacttaattcttcttcttttttattttgataggaacgttaggtatctattatgtaaaacttgctaacaacaattctctaattctttgtttatatctgatctcttcctccatgacacggggctaatctaaacttctaaaagcatattgatccaatagcttatttaatatattttgtctgtcaaccattaggttacttttgttacgatgaatttttcaaaagaaaaatacaagaattatgggatgaggaaaatctagtgggtcaattgaccataaaggctaaatcggattgaagaataaaaatcggattgtgactcgtaactcgtaagcgtgacgaaatattaacgcaacatttatatgtattgggacaaattattaacgaataactaccaaatgcaaaaaatacgagacagttgagtacttgagcttggtcacaaaatcatcatcaaggaaaaacaataaccatacagtaaaaatatagttctacaactttacaaatttgaaagcgtgtttagaatgatgcacacaaataatcaatctgtcaaaaaaaaacatattgtttgattttactctaagattaaggcgattgtttttacttaagatattcttaactgatgcaagttacccctgtaattgtttgagattgctatttttaaactctagaatacgaagaaaaaaaaagtatgaattatttagttagctgctttaaatctagagtttatcatccgaaaaagggatatctaagctttattatttttaatgtaatcacgaattgtgtccttttcaccaaaagagtcattcgtgttcgtattttattcaactaaataattctataagttctagtatattcaataattattaaaaaatctcatcttaataattttaattagagaaaagaacaaaaaactacacttctatcgtccctctacgatttcacaccttcttttcacacatccttataaattaattagattcttctcttttctctccttcctctctgtcttctcttctttttttcaatgaaacctctcttcatttataagtaacccaacaaaaaaataaaattatctccctcttatttcttctcttcacgtcacaaagacaattcgattccaaataatg

SEQ ID NO: 35000 - DNA, 3000 bp, Unknown; identical to SEQ ID NO: 34999
  misc_feature (1)..( 3000): 2750-1469P.txt file - cDNA_ID_3083862; gDNA_ID_2926248; Annot_ID_204275

SEQ ID NO: 35001 - DNA, 3000 bp, Unknown; identical to SEQ ID NO: 28719
  misc_feature (1)..( 3000): 2750-1469P.txt file - cDNA_ID_3083866; gDNA_ID_2926248; Annot_ID_204273

SEQ ID NO: 35002 - DNA, 3000 bp, Unknown; identical to SEQ ID NO: 28718
  misc_feature (1)..( 3000): 2750-1469P.txt file - cDNA_ID_3083870; gDNA_ID_2926248; Annot_ID_204272

SEQ ID NO: 35003 - DNA, 3000 bp, Unknown
  misc_feature (1)..( 3000): 2750-1469P.txt file - cDNA_ID_3083876; gDNA_ID_2926248; Annot_ID_142974
cctcccaagatcagagcaacagtagttgctatccatcctccaaccaggaagggttgaggccaaaaccgagtttgcattctcctctgccacgtgagtctccaaaaaacatccgacaagaagattattagaagaaggaccttcatatacacaacaaaaggtgaaggtgaaagcacagctttcaatgagaagaaggaccttcaaggtccttactagcagctaaatcaatagaacctgcctcagaagaacggagacgattatgccactttttgagttctttcttcttagccttagtagacatgactgtccaacccataggcaagggaaaactgggatctggatctttgatggagtcacgcatagacctcttaggttgagcagcttgttgaatagaaccagaaccctgaattactccaaccttgagatcagatgagatcgttcctggttttgcaacccaccttttactagccaaagtctgcgatgaaagagaagactggggagagaaaggtaatagagggtcagtaatccgtggaggagagctaagggatcgcttttttgatctagagcgcctcctttttgatttcgacaaaggtatctcagctgcaataggaggagaaaggtcgacacctctaactgagtcactacttccagctgccggaagaatattggaggaagagccacctctttggctcctgaaggagagtccttcttaaatggcaattttttctgaagagggatgaggcaacgactcaataaatgtccgtatttaccacaatttaaacacttcggcggaggtcgaggatactccacatcaaccctagcagaattaccctgaacatcctttacaacaacagaagaaggaagaggcaagtccagcttgatcaccaccttaactttagttgaacctatattgatggggtctaatcttgatttttctgtgtgaagaggaacccctatggcactagcaataacactaatcccttcaagcgaatagagctgaggaggaacattcttcaatacagcccaggttggagcagtcttcaactcatcaatattaaggagaccttctgaagaccaagggtagactgtacaagaacagttaccagcttgccagaatcccacatccaccacccattggcgagtattaagagccggaataaaaatcagagccacagtctcggagacgatgcgaacggtaatatcaccgtaatttccccaaattggattcaaatcagagaagatccgggttgcaggaggacaagagccatgaaattgagctacgacatggcccttccacaaagcagcagacttcaacaagaccgaggaaggagcgatcacaaccggagtaccatcttccaagtaagttggctgactcatttgcttaaggttatgcagtgaagccttaaacttagctacccaaggaagatcaatttttgaatcggagctgggggcctgagaggaagagcccgaaataggagtcgaagactgaggaatagcagatcccaaagagagagacttggtagcaaccatatctgaggagccaacaggccctgagctcggagctaagagaggagctgagccaactgaaggagtcaaaatgggggaaccagcggaggagatctcggacactgatcccaagccaaccgaggaggaaattacagtaggcagaggctgaatggatgacccattcgcttcaatagctaccagaggagtaagagtagacgacttcgggatgagagaaacagtctccgaaataacctcgggagacaaggaattctcttccaagtcgaaaaccagaggaacagggagaaccagagccaaagagccagcgcagggaagaccagaggaaggaggcgaagcagatccggaaggagcagacgacgacagggggacagagccggactgagcgcaagccaaaacccgagcgaactttgaactgacaggaaggagagggatcttctttttcttcttagacatgacaagatctcaaccggcgagaagccggcgaccagcaacgcggcggcagaaacggaaaaaccctaatcgcctaaaagttggtcacattgtttatgtactcaaaatgaatgttgggaatatattaccggcgactctgttggtttgagatattaacaatgattcgaagagatagttttcaaggtaatcactaaacacgttagaatgtctggcaaaaaaaaaatttacacgttgaaatatacattgttgtttaacaacatgttattaacccttttttttggttttaatgttatgaaaacataacaacttgttctcacgcgttaacatgtgctcccacgttaacacattaataatccatttaaatattaatgaaatagcaatgttccatcaccatggagactttttgttgttcatgtgatactttataatgagcgtcgtaagtttactaacatagataagagtgtaatttatgagaacaagaacaatttgttcccaaatcccaagtaacagaattagtatgaatcgtttaactatataagaagcaaggaacaaaaagactcgcaatgttgttaaatatggccacatacacatgtgaagtattatggtatgggatcacgatgtaactctacccttgcgcgcatcacatgtaaattattgaattctaataatttatttcaagttaatacaagtcgtcttgaacaataatacaactgatcagtatatctttataaacaattaaaatatattattttcgtttctttgcacgttgaattaaatgtaagtccagagaggaaaatcagatgattaattctgtatgtctaattgaacattttataatataatcgtatgcattattcgtataaaaaactatataattactaaacaattttattacgaaataaactggtagtgttttgaatctactacaacgcacaaacaactatataatccaacagcattatactgctcacaagaaaaacaaagagagcttcatcatcatatcctaattattaagctcattttccaatg

SEQ ID NO: 35004 - DNA, 3000 bp, Unknown; identical to SEQ ID NO: 35003
  misc_feature (1)..( 3000): 2750-1469P.txt file - cDNA_ID_3083876; gDNA_ID_2926248; Annot_ID_204268

SEQ ID NO: 35005 - DNA, 3000 bp, Unknown
  misc_feature (1)..( 3000): 2750-1469P.txt file - cDNA_ID_3083880; gDNA_ID_2926248; Annot_ID_142973
gctcatcgccaacccggagctcaacaacatcgggtgctgtaacgagctaaacgccggttacgccgccgatggatacgctcgatctcgtggagtcggtgcttgcgtcgtgactttcaccgttggtggactcagcgttttgaacgctatcgctggtgcgtacagtgagaacctaccagttatatgtatcgttggaggtcctaactccaacgattttggcactaaccggattcttcatcacaccattggtttacctgattttagccaagagcttaggtgtttccaaactgttacttgctatcaggtataaccacattatcgaatcttgatcatcacattcttagattttgacagtgtgtttgttttcaggctgtggtgaaccatttagaggatgctcatgaacagatcgacaaggcgatagcaacagctctgagagagagcaagcctgtgtacattagcatcagctgtaacttagctgccattcctcatcctacatttgctagttatcctgtcccttttgacctaactccaaggtaaatataactgatcaatcctgttctcttcaagaatcaagctcaaagatgtgtggattgtttcttaaattaggttgagcaacaaggattgtttagaagctgccgtggaagcaacattggagtttctaaacaaggccgtgaagcccgttatggtcggtggtcccaagttgcgtgtggctaaagctagggatgcctttgtggagctagctgatgcttcaggctaccccgtggcagtgatgccatctgccaaaggctttgtcccagagaaccatcctcatttcattggcacttactggggagcagtgagcactcttttctgctctgagattgtcgagtccgcggatgcttacatcttcgcaggtccaatcttcaacgactacagctccgttggttactcacttctcctcaagaaagaaaaagccatcattgtgcatcctgatagtgtcgttgtggctaatggtcctacctttggttgcgttcggatgagcgaattcttcagggagttggctaagagggtgaaacctaacaagacggcttatgagaactaccatagaatctttgtccctgaaggtaagcctttgaaatgcaaaccaagagagcctttgagaatcaacgcaatgttccaacacattcagaagatgctctctaatgaaaccgctgtgattgctgaaactggtgattcttggttcaattgtcagaaacttaagctgcctaaaggatgtgggtacgtatctagaaaaaggaaactaaatcttttaccttttaacattgttgaagcagtcaatataagctcatctagtaaagtcaacatctagaaattgctggttaaagagtggtggtatatatgtacttggttggaaacgatataaaatgccttggtatttagcctgagatgatttatgggcctatatagatatccccagaactttttagtaattctctggaaaagaaaaaacacacaagagttttaaaaagtcgttgttctctatattgtaggtacgagtttcaaatgcagtatggatcaattggttggtctgttggtgcgactctaggatacgctcaagcaacaccggagaagagagtgttgtctttcattggagacggaagtttccaagtgacggctcaggacgtttccacaatgattcgtaacggacagaagaccatcatcttcctgatcaacaacggtggctacaccattgaagttgagattcatgatggtccttacaatgtgatcaagaattggaactacactggtcttgtcgatgctattcataatggtgaaggcaaatgctggaccacaaaggtaattgatgtttacagttggaaattaaacatatgagtccagggttgaagagtaacattatgaatgttgtgtttttggtaggtgagatacgaggaggagttagtggaagcgattaacacggcgacattggagaagaaagatagtctttgtttcattgaagtgattgttcacaaggatgatacgagcaaagagttgcttgagtggggctctcgcgtctcagctgctaatggtcgtcctcccaatcctcagtagaagcaagagaaaagaaacgaatcttgagtgtcgctcaagcatctatcgtttattggcaatctaatcacatcgctacttttgttctttctcttatgtctaattaagtactggtttcgattttttgaccgctggttttaattgattttgcttttaatatccttcatattagggaaccccttgttgacaaagttttcattataaacttcaatatttctgctttttcttaaacgtgaaatgaaaattgttgatggaatcaggatggaatattctaatcttattaatgcctttacgtgcatgtaaattattgagttccaataattatactaacttctcaatataaggtaataaaattcttgaacaatacgaatctagtatttctttaggttctttttcgtttctttggcagctacttaatgtaagttatatcatagttaagacgaaaatcagagacttaatgctgcattaatggttcatcttggcaaacaagttcaaagatacatatatagttaataacaaaaataaaataaaaaatccatgttatactctaatatagtttgaaaataaatttattttcatcatcttctaacgtaaaatgtcttttcgtatcacaaaaaattataaattttttagtgcaaaataaaacgtccgtgtttcgtgtatataagtatcaatttatataagtaaatttctatctgtaaaaaagtaactaaatgtaagatgacagcaagaaaattgcaaaaatatttcagtaaatctttatgcttttggcacaaggaagtcagaaaccgaatgtaatttgcactaatcaacatgtacaactatataacccatctaataattccaatttattactcatcatcaccactaaaataaatactaaaaggtttcattttcttcataataagctttccaatg

SEQ ID NO: 35006 - DNA, 3000 bp, Unknown; identical to SEQ ID NO: 35005
  misc_feature (1)..( 3000): 2750-1469P.txt file - cDNA_ID_3083880; gDNA_ID_2926248; Annot_ID_204267

SEQ ID NO: 35007 - DNA, 3003 bp, Unknown; identical to SEQ ID NO: 28717
  misc_feature (1)..( 3003): 2750-1469P.txt file - cDNA_ID_3083884; gDNA_ID_2926248; Annot_ID_204266

SEQ ID NO: 35008 - DNA, 3003 bp, Unknown; identical to SEQ ID NO: 26633
  misc_feature (1)..( 3003): 2750-1469P.txt file - cDNA_ID_3083892; gDNA_ID_2926248; Annot_ID_204264

SEQ ID NO: 35009 - DNA, 3000 bp, Unknown
  misc_feature (1)..( 3000): 2750-1469P.txt file - cDNA_ID_3083930; gDNA_ID_2926249; Annot_ID_204321
cgagagatagcattttaattgtttagggcctccataatgttaggaacgtatatgcactttgataatttaaagccaatagagccaagaaacctgaatatttcaaagaacaatcgaaaaaacaagtaatttgtcagtttgtcactgacaaaacaaatccatatccaatttttcaaccattattcgccattcgaattccaagaacaatgttcactgctccaaattaaaaacacagagattctccgcgagaattgctgtcgtccaggcgaccgtttaatttttctgataaattataagccaattttcataataaccaaaatacccctgttgaatagtcaaatcttgtagcaaaataatatgatcagcccatgcatatttatagacgattaaccctcttttggaccaaaattcgtacaacaatcttcctaaaacaacactaaacaattcagtccaggcgacgatctctcctagagcagaagaccgaggaggccacgccggcgacaaccaagagaccaaaaaaacaaacacaccgccttaacaatcaagtgacatcaccgttgtctcctcttttctattatttgataaataataaataaattcattttgttttacttgactttgactttgaacattatgagtactgataccgctttacgtatcttggtccaatatttcgattgcccatacttaagctgtgaatggtaaccaaaaccgcatccaaaaccgcactacaacagtgttgtaacagtatcaaaatctctacatatacatatgtatctatgtattttcgttattatttgaatcgcatcgcactttttccacaccacaaaacgcaatcaccattcggaaccttaatttaatttttcaatagagcgaacttgttaattgtaattcgccacaactatatatttcactttaactagacacaccctttcgttgatttttttttttttttttgcacacaccctttagttgattagtattaccaaatttctagacagatagaaccatataagtaacggatagtaataaaaaaaaagagactatcttttagatgcatggggataaggaactgtcagtttttagtttttatttcgtgtttttaaaacataaatgaaacacatgcttttttagggggtattatagaattgggtacttattgggccaaaaactagagaaaaagaacattttaatgggcttataaaaataagtacttgttgaaataaaaaatgacgattttacccctttctctaattgattgtgttctcatctttcatcgtcttcttcatcatcaccacaattttttccgaccacaacagtccttgcttctcagttctccccaccgcaattacttcattaacgccgtattcttctactctatcattgttatatccgtcaacaccaatcttttctaaaatcccatggatccaatcaaacgaattgtcattgaaggaatctaaactctaagggatactgtccagggaacccaaaaactctaatcttaaacacaaatcagatcaattattttccaattcatcaaaattctaaaccaaaagagaaatcaatttttatcgaagctttgaaaaacttggatgttggaaggagaaagagaaaaacaatcgacaatgaattattagggcaaaaacgtctttacaaccatatataagtacctagatttgtgaggtatatgagatatgccttattcaacaaaggaatagacttaattgtggtttattcataatcgatcctgcttttttaccaggtacagaagggagagagataaaggttacattatgattaatttgaaaaatagattgaacattatgcaggagaaaagctgaggaaaagaaagcagaagaagacaggttgtcataagaaaagagagtaatgacattagaagattccaaaagataaaaaaattactgaagtggacattggagatggtgttggcagagagatttgtcctctcttttctctctatataaaataaaatatctcatatttcttccgttatatattctcctcgtatatagtatatattcaatgactgatgggaatataatctaaaatatattaactcgagtactaaaattctcagttctacgtcttgtcttgtttaatacaaggaaaaactgatacgactataatctagtattgtactatttcatttttccttataataaaatttgaatttttggtttgtctagtgtgacatgacatctctgcgcgtgtacgttcccggctaaaactttgggaagtgtgtttctctgttgcagtaaagattacagtgtatatcattctatattattatagtatataaattatagttctcttctcaaaccagaaatttacttttaagtataaataattgttgattctgtaattaaacaatgaatttgtactaaggtatttagacaaattcactcctctctcagttaataaataatcaaaggggaagaacagagttgcatgaatagaaagctagggtttgctctataattgtagtctttttgtattaggttaaagatggatccctggagagtttgaccctcccctatttatacaatgggtcgaacataccaaaatatgataaacttctaattatcttaagtctaaatctccattacttccattcttcatgagattaccctcttttaaatggaagttttcccttcacacgacctcagaagccgcttatggcgatctcgattgtcgacctaaatcttctggcgagctcatgacttaaggcccattcacaggctatccgggattccccggttcaatcgaattctcgattttattcacgttattccttggtttaaattggtattgtcggaggtgctaattcctgcaccaacaattagtccccccagttcggagagtccgagttgcttaattcgaaatttccgaacttagaaattgaatattcgatttaaatcttggaaagcgtgaattaatcattagatttccgaatcgattcgtatttcgaacgtatctgacatg

SEQ ID NO: 35010 - DNA, 3000 bp, Unknown
  misc_feature (1)..( 3000): 2750-1469P.txt file - cDNA_ID_3083942; gDNA_ID_2926249; Annot_ID_143005
aatgctcctggtggacccaatggttatatgtaaccagatcaatgggcctttaatgggtcaaaattattatcactcaaagcttctaatcaaacaaaggcccaaatacgtgaagagctctccgccgtaaatcagtggcttttcaccgacttcgccattgctaaccgccgtcgagcttccatggctgctgctccatggctccatctctctaggagaagaagctccactcagacttcattaagaagcttcctcatttgctcttcttcattcgattcggatgaattcatttccagtcaaagccgcgtaatcggcgggagaggagaagaggaagtacgattttccggtgctctcttctctcgtatgattcattcttctacttatcatccttaccgtcaaattccattgccacactcctctgtacaactgcttgatgcgagtcttgggtgtagaggtttctctagtggtagttctaatgttagtgatggatgtgatgaagaagttgaatctgaatgcgataatgatgaagaaactggggtcagttgtgttgaatcaagtactaatccggaagaagtagagagagtctgcaaagtgattgatgaattgtttgcgttagatagaaatatggaagctgttcttgatgaaatgaaactagatttatcacatgatctcatcgttgaggttttagaacgttttcgacatgctaggaagcctgcatttaggttcttctgttgggctgcagagagacaaggatttgctcatgactcaagaacatataactccatgatgagtattttagcaaagactagacagttcgagacgatggtttcggttctcgaagagatgggtacgaaaggtctattgacgatggagacattcactatcgcgatgaaagctttcgctgctgcgaaagagaggaagaaagctgttggtatctttgagttgatgaagaagtacaagtttaagattggtgttgaaaccattaattgcttgcttgatagtcttggcagggctaagcttggaaaagaagctcaggttctgtttgataagctgaaggagaggtttacacctaatatgatgacttacactgttctactcaatggttggtgcagggtgaggaacttgatagaagcagctagaatctggaatgatatgattgatcagggattgaaacctgacattgtagctcacaacgtaatgcttgaagggttgttgaggagtaggaaaaaatcagatgcgatcaaattgttccatgttatgaaatccaagggaccttgccctaatgtccgtagctataccatcatgatccgtgacttctgcaaacagtcgagcatggaaactgccattgaatactttgatgacatggttgattccgggttgcaacctgatgcagcggtttacacgtgtctgatcacggggtttgggactcagaagaagctggatactgtttacgaactgctcaaggagatgcaagaaaagggacatcctccggatggcaaaacgtataatgcgttgatcaaactgatggcgaaccagaaaatgccggaacatgccacaaggatctacaacaagatgatccagaacgaaattgagccatcgatacacacattcaacatgataatgaaatcatacttcatggcgagaaactatgagatggggagagcagtttgggaagagatgatcaagaaagggatttgtcctgacgataactcctacacggttttgatcagagggcttataggtgaaggcaagtcgagagaggcatgcagatacttagaggagatgcttgacaaaggaatgaaaacccctttgattgattataacaagtttgcagctgatttccacagaggggggcaaccggagatatttgaggaattggcacagagagctaagttctcaggtaagtttgctgcagcagagatctttgcgagatgggctcagatgactagaaggagattcaaacagaggttcatggaagattgatgacttgggggcgggtaactggatcgttcaactcactcactcggagaaagcttatctgcgaacatgacttcactagcacagcttggactgaactgatcgttcaactcactcactcggagaaagcttttttgtaatttgcttctataacaagaaaatattaattaacagttgtgcactctaatgaaaaaattaagcattctttcactgagaaagtgaagaattgcaactaggccgagagaatagcttaaaacagagcttaaatcgtctgcaaatcatttgaatacaaaacaaagttttagcaaaaggaagatgaaaagttgatgtaaatcatttgaatacaaaacaaagtttaacaaaaggaagatgaaacgtaaatgttttctataaaataaagtttaacaaaaggaagaaagaaacataaaaaaccaaaccagtgtaatgtggacactaaagatgaaagacaaaaaaggtaagaaacttcaacatttctatcatcaaacttgacattaagctttaaaatccccagaaacccaaaatgtgataacatttctatcctagatttctagttttagagaaagatcaagaacataaaacaaaagaataactctcttttattatttaggaaactctgtcaaaacctaaatctcttgatctctcttaaagtcatatataaattaaacttatgtatattggagcttaatatataaattattttgttttatgatttaagaaataagaaagaagctaacaatatatgaacaattgaattaatattgaaaactaagagaaatttggttttgggttattacaaaaaaacaattacagtattagccaagaaaagagagagtttgctcttatagggtctaaaagaaggcccatttacaaatgggcttattagtttaaaggactggtgcttctcttcgtcaatggaggttggtataataatagggtttctgtaggtacgaaagaaaaccctatttgcgcggcatctctctcgtcttcctttactccgtcaaaaccatg

SEQ ID NO: 35011 - DNA, 3000 bp, Unknown
  misc_feature (1)..( 3000): 2750-1469P.txt file - cDNA_ID_3083942; gDNA_ID_2926249; Annot_ID_204318
agggcattggagattcgttcggaggattgggagaaagctggtctgcaactagtgtggcccatgccagatcgccttcttcaggataatcgcattgtttctgacagggcgatctgacgttttatctggccgatagcagatgatccttggtggctttttggattgtttttttcctttgctttttattttcgaataaacgcccttgtgatggctggcgaccttgttaaactctaatttattctggaataaatgtctttgtaatatcccccgatctcgttcggtcgttgattaatacaatgcaatcttattaaattggcttatttcctccgcgacctctgaggtcggcttttgagttcttttcgaagtaacgcaattttttctgtctaattggactagatgttaggtgcgagactgagcccggcttttgagaaagaatattcagcgtgtgctggatgcgagacgtctctcggcttatgtccagcaggcttatgtatgatttaaagagggagttctgggctctgtttccaaaataagtgaggcgggctcagcatattatttggggggcgagatgctgggctcggcttactccccgtagagcatctgttcggcagatcgcgaaacggttcggcttatgtttctgtccgaaccagagcttaagtgcgagaaaactggtctcggctttcccaaaaattaagtttctaatagggcgtggattatttcaccactgcatccatgtgggacgcgcgtcgaacgcctggccagggcgccgagagttgacataacagatcttaaagcgaactctgtattgagaatgcaaactttaattttattaagtattatacctgcatccttgcgataggcgatctgcgtacttagaatatatgaatacagtttgttttttttttttttttttttttgtagctaagctaataatagtaccttttgaggtgggctgcattccacggattttccacttctttcagcttcatggtcatcagcagatagactcctggatgaagtaccttcgagatcaaataaggtccttcccatcgagctccgagttttccggcgttctcttcggtgatactgtaaacttcccgaagcacgaggtcgcctacgttgaagcaacgttctcggacgttacgattgtagtatctcgccgctgcattctggtaattctggatccggatggcggcttgatcgcgaagttcttcggcgaaatcattgtggtcgcctaaaagctgatcgttcagtttgtggtcgttggacatcatgcatcttcgtaaagttggaactccggcttcgtttggagccattgcctcgatgccgtaagccagggagaaaggggataatgatgtaggtcgccgaggcgtagttctgtatgactagagtacgccatccagctcgtttgcccaattcccctttttagggcctagtcttttcttaatcccggctatgatcgttttgtttgtggcttcggctagaccgttcccttgagggtatcttggagtcgagttgctcatgcgaatgttccatttggcgaggaagtttctagtaatgagcgagacgaactgcttcccattgtctgtaacgatctcataaggaagaccgtgccggcaaataatgttcttccagatgaatgcaaccacatcgcgtgacttgactttgtggtatgcctgtgcctcgacccatttggtgaagtaatcagttaagactaacataaatcttttggatccggaaggaggcattggtcctacgatatccatggcccatcgcatgaatggatacggcgccgtgatcgaacgcagtatctcgggaggaacgttcttcatcgggccgtgtctctgacatggttcgcacttcgccgcgtaggcttcgcagtccgccagcatagttggccagtaatgaccatcttttttgattttaaggcagagagctcgtccgccagtaatgactttgtggtatgcatgtgcctcgacccatttggtgaagtaatcagttaggactaacataaatcttttggatccggaaggaggcattggtcctacgatatccatggcccatcgcatgaatggatacggcgccgtgaccgaacgcagtatctcgggaggaacgttcttcatcgggccgtgtctctgacatggttcgcacttcaccgcgtaggcttcgcagtccgccagcatagttggccagtaatgaccatcttttttgattttaaggcagagagctcgtccgccagaatgattccccccgtctccgtcatgcgtttccttcatgagtgttagaaatggagatttagacctaagataattagaagtttatcatattttggtatgttcgacccattgtataaataggggagggtcaaactccccagagatccatctttaacctaatacaagagactacaattatagagcaaaccctagctttctattcaagcaactctgttcttcccctttgattatttgttagctgagagaggagtgaatttgtctaaatcccttagtacaaattcattgtttgattacagaatcaacaatccctttagttttatatacatcccgcagagttattgatgattgatgttacactgattgactcatcttgattttcagttatgtaatatccataaacacgtatacaaagataacgtgaactaagagaaatgtatgatagaatcaaataaatctgaaaataaattggtcccctaaaaaaaacttgagaaaatatcacgaccctaaaacgaagataagatgcatacagataacttccaactaaaaaaagaaattgacacctttgatgattatgcgtttgcgctttaatgctcctggtggacccaatggttatatgtaaccagatcaatgggcctttaatgggtcaaaattattatcactcaaagcttctaatcaaacaaaggcccaaatacgtgaagagctctccgccgtaaatcagtggcttttcaccgacttcgccattgctaaccgccgtcgagcttccatg

SEQ ID NO: 35012 - DNA, 3003 bp, Unknown
  misc_feature (1)..( 3003): 2750-1469P.txt file - cDNA_ID_3083958; gDNA_ID_2926249; Annot_ID_142996
gtaacaaccaatttagcaggcttacaactggaacaaggtatatggtataaatttaaattgaagatagcatttacgtatacctggtcaagcttgtaatagccttccttgtctgtgacagatcttagactaccatctactaagattttaacgccctcaactcccactgaattaccgtcaactacgcgacccccaatggagaatcctgttacctaaaggagcattcagttcaatatttagtggacagaacatgtaagcagagtccgattatagaaacacagagtggtataagagtttgcagttattcttgacctgaaatttttggggaacagtgacatgttgatgctctacagatacaggcataacaggaggtgaaacatcaaagaccgtattctcacccttataatgcggcaccaattcgtattttcctgagtaaatcaaagtgaccaaaaaacaggtcaatagaaatatagagctggaccatgcaaccagaattccaagcgtccttcttgaacttcaacatgcttaatagtcatttaacttatgttgtacaatacataattcatcaggctaaagcttaaggtaaaatgaatgctcaatgaattggttatggataagtaatgatttaccacaagggatggacttgaaactgaaaattccttctgcatcggatacagcatggcaaagagatttcctttctccagcagcgtcaccagatccttggggacaatctaccatggaaacatcatctgaatgcaaatatatatggacacccaggattggattcccctacaaaaggaaacaaaataatttctataaaaaaattaaaattaagaatagagacagacaagtgcatgatggataggaacccaatcaaaccaatgatattcagattctactcatgaaagcagaggaatgtagttggatttgaacatcggaagaaaaaagaaacagagcaatagagggattacctgagcaacaaccgaccccttaagatcataaccaaggacgaagaatatgtcatcaaccatgccatttgcaaatccaagttccacctacaggtaaacagagaacttgaactattagcatgcataattaacaaagttcaagccaaatatatagaaacggatacaatagtaaagaaccgagtagggaaagacatgtgaacttaaaatggaaaaggttggtctggagaattttatacaaaaaaagtaaaataaaaattaaatgcaaaatcaaaaagatctgagacctctgttgaaccgcgaacttcaacttgcagctctggatgggatgcacggatattgtatgttcctgcaaccaatcagacaggctcgtcatttgattataacaagatacctggaaactaggcacttgacatttgatattactctatgggaaaacttccaactacatacatgcaaggcaagaataacaaagtgatagaaaaatagaaaaagagacactgatgatgaaagcttactccttacctggaataatattcttgaataagtagctcccatctgacgatgtgagaacagaagcgacaggatcttctgatccatcagaagacaacaattcaacattgacatctgctgggcctccattcttaatcagacaactctccccaccaacagctcccaagactttaccggataatgtaaaactgcaatatacaaaagagtaaagcatgaaaattttaaacgaagaaagatgaccaaaccaccaattacaaagttgaaaaaagaaaaaagaggcaaacgcatagactaaaacgaaccccgtgaagtggaagttaatatcatcattgttgttgcaactagagtcgtcaacaacaacagttacctgcaacaccaaatttaatgtcataactagctacaagccggatgtttttttatcaagaaagattcttgatgcataatcctcagagaaaaaatggcaaacagattaaccttatctggattccatgaccatccgtcaggtccatttatcttgagaatgaatgagccctacgagaagaaagcatagaaatcacttgcagaataaatgcaacaccgattaaccccgaaaagggtatgatgaataccttgtcatatactgggatgaaatagtaaccatttggggcacactgtgtactgtcttttaccaatccatctactgtttgaagctcaaccttgtaatttgaaggggaacaaacaaacaaatcaatgaaacctcactcagaaaaagatagaaaaaaaaacagtcaactaattgaattcttactgtgatatgagaaaaatccagtttcccatcggatcctttccgagacctgaccaaagacgaactcgcctgcacgtttaataattcagcagcgttagttaataaatccagatccgatcgttcttactgctgctagttcgttaacccatgataatctccaaaaatcaaaacatcctccaactacactgaatctactttagaagcaaacacacacactagctagtaaaatcggtcaggaagcaatcagaacgatggataaaacgaatcgggaaagaaagaaaaaaaagagagataaacctcgacaaaaccaccgcagccttttatcgaatccgcggaaacaccgtagactgtagaaatcgctatgaggaaaacgatcagagaatgacaaatcttcctactggccgccattgtacccgacgtgaagctccagtgaaggagctaaaatggttgaacttaagaaaaagaagaatgattattgttcgtcaatggagcacggatccaagatatcggaccgatgactccgatctgtagatctccgttggttttatcaaggttctcttgactctttagggcttaatgggctttataaagcccactaaaaataatatttaattaaaaataatatttaattaaaaataattgttttttaattacagctgtcgtgatttgcttaccgtttgaagaagagtcaagtaatcgtcagtcaactgtagaaaccaaatttccggtagaaaaatcaaaatg

SEQ ID NO: 35013 - DNA, 3003 bp, Unknown; identical to SEQ ID NO: 35012
  misc_feature (1)..( 3003): 2750-1469P.txt file - cDNA_ID_3083958; gDNA_ID_2926249; Annot_ID_204308

SEQ ID NO: 35014 - DNA, 3000 bp, Unknown; identical to SEQ ID NO: 28725
  misc_feature (1)..( 3000): 2750-1469P.txt file - cDNA_ID_3083962; gDNA_ID_2926249; Annot_ID_204307

SEQ ID NO: 35015 - DNA, 3000 bp, Unknown; identical to SEQ ID NO: 28724
  misc_feature (1)..( 3000): 2750-1469P.txt file - cDNA_ID_3083969; gDNA_ID_2926249; Annot_ID_204305

SEQ ID NO: 35016 - DNA, 3000 bp, Unknown; identical to SEQ ID NO: 28723
  misc_feature (1)..( 3000): 2750-1469P.txt file - cDNA_ID_3083980; gDNA_ID_2926249; Annot_ID_204302

SEQ ID NO: 35017 - DNA, 3000 bp, Unknown
  misc_feature (1)..( 3000): 2750-1469P.txt file - cDNA_ID_3083986; gDNA_ID_2926249; Annot_ID_142990
actctggtctgagttatggtaactatagacagtttcctccttatgctgagtttgatgatggctactcttcaaatcctcctccctatggtggaaacaatatgccaatggattccaagggaagatatccaaatcatggagataactattcttcaaggcatcaagacaacaattatggtgggttccaacgccagagacgtgaagaatatggaaaagcctacaatcgttattagatgactgtagtcagaacttgtttggtaagttgtttctcctctatgaagatgaaagttagtaatgtgctgttcttggagtttatggttttgattgagtagcagatcgaagtgtacattgtggatttttgaagagttcatctttgtctctccctactttgtggcctaaaaaagttgtttgaaaatttcagggtctgcgactctgctgaatatgtgttacgacgaacgagcaaaccaagggttgtaggtaatctgaattcttattaggttgtacacaatgtggcttggagacaatgagcaaactaagggttgtttccttgctgttacgtcactctcatatgtagtaatgttgaataccactatcctttggcttttgtttttaaatatctaaagatttcttgtttaagagtagtgataaaaccattatgattgtactcgtagtttagcctttaaagatattgttttctttgagatatgtttcatttgtgcatatgaatctcttttgcttctgtcaaaatggattctgtctggccatggtttgcaagagttctctgctttccaggagctaacgtctcaaaacttgatcggaagaactttgtttaatactaatttcaaagtttccccaaatctcgttctgacgtgcattagttatgttttgactcttcgttttcctctccaaaagttgcgacttccgcgcttcccaataaagatgcagagcttggttggaacttgaaagaactttgtggtgacattaataatgcagagcttggttggaacttgaaagaactttgtggtgacattaaaagggtcgtattgtctcttcgttttcttctccaaaggtgcgacttttgttattccctttacgcctatataatggcggacgcatctcccaagttttaaacatatatcccattctctccttacctttgagagatgtcgacatccactgtagaaactggatatggtggtcgcatcagagtgacagtggctagaaatgacagagacattaccagtgaagtgagaacatttctgtgtaataaagaaaacgcgaacaaaatcatcggtctggatacagaacgatcggttgtaggaggcgatagcgaatacccaccggagagcaagctcgtgattctcgagctcagtgatggccagaattgcctaataatcccgcttccttatgtacaaggtaataagctgcccgtttctctcaccaatttcctcaatcttccagatttcacctttacaggtgttggtataaacaaggctttgaaaatgctcaagagcgagtgtggtttgacctgcaagaatgccgttgatatcggaccttcgtcgtgggcctctctcagctagattcgtggcgagatcaaacttcatttcagtcattgggtctcgttttggaaaccaacaagccctatctatgaagattgggacaatgacagtcttaccgaggatcagatcaatcttgcagcagcgaatgcttacttggctttcaaagttgggaatttgattagagaagctatgtattgagtcatgcctctgtttgtttttttgtttgtttcggtctctcctatgttttgtcttgttttgctcgtcaattgcctgcagttcaatggacgattttgtcaccatcttaaatcattttggccccaaggtctaatatttggtaaggtatgcccgtatgggattgttacttgttagaaacttcatcactttgcaacacgcgacattcgtaaatcgcaacccccattactttacccggctaccaaagggttgaatcttctcaccaaaataatttagtccataaaaggtacaaatattcggcttgtcatctcgttaattattgggctgggcctgaaattttaaaacctattacaaatctattattagcccacaaacctggaacagttgggctcttttaaaaatttaaaattatgggtactggaatccaacggcagagacaatggataagcctacaatcgttattagacctttttagtctgtctgattgtgtacagaagatttgtttcagtttaggcattattgcattttgaagacttgatggaatggtttatgtgttgccatgaagaacttattcaggaagataaaatctaacgttatgacattactaatatttgcctcatgaatcttaaaggtcaagacagctgtactacatgcatttaactttcgactcttcggtttcctctccaaatgatgtggcttttgaaatctaacgttatgacattactaatatttgcctcatgaatcttaaaggtcaagacagctgtactacatgcatttaactttcgactcttcggtttcctctccaaatgatgtggcttttgaaattcccttttacctataaagatgcaagtatatcttgagcacttggattcatcatgtaccctcattattccagtaaaatatgaattcgaagtgttaagacgataatttcagtatattcagatattgggccggcctgacaactttatacttattacaaaagcctatattagccaacataactaacacttggctccttttccaaatattttgagggggctaaagtatatattgtttagatttggggtcaaattgaaaattataattaaacttaagccgcctctctcttcttctaactcacgcagccgaaccctagctttcataaaattttcattcatcatcgttcttgcttcttgctaaaggccttgccttgtgcttcctcgtcctatctctcttacctccgtaatttgttcgtaagagaagtatcgtgatg

SEQ ID NO: 35018 - DNA, 3000 bp, Unknown; identical to SEQ ID NO: 35017
  misc_feature (1)..( 3000): 2750-1469P.txt file - cDNA_ID_3083986; gDNA_ID_2926249; Annot_ID_204300

SEQ ID NO: 35019 - DNA, 3003 bp, Unknown
  misc_feature (1)..( 3003): 2750-1469P.txt file - cDNA_ID_3084000; gDNA_ID_2684120; Annot_ID_190926
tgattaatcggtatattgactcttagcaaaaaaaaaaaaaaatcggtatattgataaaaccgattctcattctaacaaaatagttacagttttgataaatatccaatttatacaacgataagggaaatagcagaggaacgtgtggagtggtattgtttaagagatccgagaaactgagttgaattttttttttctcaaagagaaagatcaaaggtttcacgtgaggagtagaaagtggaagaccgacataaatgcattatgtattgttgcatattatggaatgtatcaaaactacccaatactcattaccatgtggtgggttatatctcacattggcctcttctccactatgtagtgctgtccatcaattattaaaaaaattaatggtgtaaagtatcttcattgttgtttgtttcttaagagttgaatgtgatatgtcaatatcctctatactaaaatatttgatataatttgatagagttttcatgttgtgtggattgaaccaaagaaaattttgacccttgtatgtagttgtaagtagctttgcttgttcttagtctccacttagtcactcgttttgtaagaaaaaaagtggttgcagcgaaaatataacaaatgtaaaatttaataaagttacacgatttaacaaatgtaagccaaaaatgaatatctcgtcggaaatttactcaaaagttacacgtcttaagcttacaaactcactttatttttccgatcaacattcccttaaaaaacaacattgttttactttcttcttttctattttttaaaatgtgaaatgcacttaaaaagcttaattccttttaaactaatggaaacaaattctttcagtgtttattaatatcaatggatcggataactcaagagtctagataatgaagtaacttatacataaaaaaactttttaagtgcggtttgcataatttaatttgtttcctatttagtatataataacccatttgactaaatatataatactctttcttaaatctttaatactctttttttttaatcccactagtttgcgtgtacgccacttctaaatttatgttagtatcagaccttgaccttaacactgtacaatgggaagagtcccaaacatagtaggagtagtcggaaattagagcatctccatcagtagtctctcatatagtttctcattaactaaaaaatataaaatgataataaagtagaagagagattgagaatagtttctctgcagagaaactttagaataatgattaagagactatgtgtatatgtgtgtttataattggacagaagttaaatcataataaaatatcattatttattttttttagaaactttttgaaatatctcaccaatggagattacgctctcttttttttttttccttatatattcccagtcataacttggagttgtattaaatgtacctacgataaaaaaatcacgtgagaataaaacggagtatttctttacctttacaaaagaaaatgaaaataaaacaattaaacttttaaggaagatcagataagtagttgaaagcctttaatctagtagttgaggactgatgagattaagtagtgagaggaagaggcttgaggaggatctctaacattaatcaaactctctcatcttcctcctgcactccaacaaaatcttctcgtctctctttaaaccaatagcacacaatggcacatgaaacaccacccacgcccagtacaagaaagaggatctgcagcttattcttgatcgtttgtgtcattgcatgtattattggtttggtcgtttttatactcatcaacgaatgcaaacgtccggcgccaaaagtagaattagcttctatggacttcatggtgcttaatatcacatagactcgtcttagtgcaaagtgggatttgtccataaggatccctgcagatcttcctggtgactatatatgtcttcaaggagactttcaagtttcatttctttacaagaatgttactctctttacctcacctccacaaaagtaagctgtttactattaacaacctccgataccgctgtcctcagcttcttaaagtttctgttgttgtctccgacgaaaacattagttcgattggaacatacattatggaagatgtcaaagagaagaagcaagtaacttttggattgcagttttctcttaccgattgcagaaaaaagacgttaggagttatgagttatgcatgctgtggagtcaccttgaggttcgaacccggatctgagatgaaggcgtctgtgtttggaaagcatccaaggtacacaaatttctgaccaagtccacgtcaacaccagtataatgttagagtttgcaaagatttgacattacttaagggctttattgaattagagatttagtttatttgtaaatgactttagatttggttcgactttatttagggtctaaagtttattgtataactgtttaatatttgtcaggacttaatgaagatgtaatgtttagactttggtgtattttgtacgacatgcatgatataataaaggaattatcataattaaattgaacttataaaaatatgacttgccttacttctcttttgaaatagaaattctaatgtaggtaaaatgtttgtgtttacataattacattacatcaacaaacgtaaaaaaatgtttgtgtcattaaatgtttatccacgtactcttcacaacgatcataagtcataattcagaaaattcctttaataaatgtgaactgaataagcttttgtatagtcatcaaataaaaagtcaactgtacaattaaaagtccgcaaacatctcgatcgtctaagagacgacttttctcgtaactttatgaagaatatacaatagtagtggcttgatcgcgtccacacatttacattgcgacttttcttgcatgccgtctcacgcactatatttaggcaaaacacaattgtcttcatttcaagactagttcttgttttctccatattcctcaacaacatcaaaatg

SEQ ID NO: 35020 - DNA, 3003 bp, Unknown; identical to SEQ ID NO: 35019
  misc_feature (1)..( 3003): 2750-1469P.txt file - cDNA_ID_3084000; gDNA_ID_2926250; Annot_ID_143023

SEQ ID NO: 35021 - DNA, 3003 bp, Unknown; identical to SEQ ID NO: 35019
  misc_feature (1)..( 3003): 2750-1469P.txt file - cDNA_ID_3084000; gDNA_ID_2926250; Annot_ID_204348

SEQ ID NO: 35022 - DNA, 3000 bp, Unknown; identical to SEQ ID NO: 28730
  misc_feature (1)..( 3000): 2750-1469P.txt file - cDNA_ID_3084005; gDNA_ID_2926250; Annot_ID_204341

SEQ ID NO: 35023 - DNA, 3003 bp, Unknown
  misc_feature (1)..( 3003): 2750-1469P.txt file - cDNA_ID_3084009; gDNA_ID_1972165; Annot_ID_179758
aataaaaaccaaacaaaagcttcaatatgattcacttaaaatgtggtaagtaggggagatgaaaaggacttatcttatagaaattgagtcgtttattttgttggtccaccatacatttacatgaaatggttacatcaggacgagtgttgtctgagacctagaaaatcagaaaccaaaaccacaaaagaattaaaatgaaattacagacacaatcatgaatctctaacataagaaataacaaaaccaccttcacgtgatacaactctttggtttcttcaacacaaaatcccattttgtgtacagctctatacccaacattttcgacataagactttgggacatttgtacgaaacattttcttcaatttctccaaagtgcttttagttaacggaccatctcttagagttcctgatgaactaacactgcatcaatttgataagataacaatcggtaaacttgtttattcaacataaaaaagacttgattagcgagaaatgcgcaatccaactatagtttctaagttgtctagatagtagataaccgactcaactatagtgtccaagttgtcaacacagtttcaatccactacaaaccacctacggtaattacaatgctcttaaaccaacactaggctaatcactaaccctgccccaggtaaaacagagtttgtgtgtgtccctaaaaactgaaaatttgaggagaagtcaaaaaccttactcatggaaaacaacattaccaaaccgagcgatcagtctgagtttgacatcctctgatccaccataacctagcaacgtcttctttgccctatcaaatcccattataatgtcatcctccactttctctgtcacccataaccatggattttccagttttcccaaatcactcttcgctaagattaccaaagatttttcttctgcgtctttcctccactctgaagaaccgggcacaagttgaaagttgctatcctctggatccgaaccaacgagaaaccatctagaaatgtaaccgtttgcgtagattatctttgtattagtactcccgacgtttttattgtgttttttaagaagagaaggtggaacagaggatgctctcaatgcaacattttcaagtcgtttatgtggtggaacgtaagacatctctgaaacgaatatatgatactaggaaaattaaaagctgattccaaaaagataactcaagtttccgagcaacgaagtatgagaagaagaaacaaaagagtaccttttaattatatcagcttaggtcattcaaaagaagaacgacgatcatacgagaggaaactgaaaaggcgcagagcagtgaactgaagtggaagagacgagacggtttggtctttttatcactagaagtttagtcttggaaatgtgcataatatttaatttcatttcaattttcaaatcaaaaaataaaaccgataacgaaactcttgttatcatattatgagcgttgataatttagagaatctctgttcttttagaaaattgtatgaacattttgttaaataaataactatttttaaatgctaaacctcattgtttagtcctaaatgttaggaatcttagtattcatttttttttcctcttatgatatacacttccggtttagatttctaggacgttttaaatttaattattactgctaataaaaatagttatttatttttaaacaattaaataaaacaattgtatctctagagtaaaaaaagttttaaaaattttggtgaatgtttttatttggcaacccaacttaattcctgaaacgaatcacgagaattatttaacgtactacaaaaggtacatctaattttctaaaaccgaattagactatcgtcttggttgtttttggatgttgcatgtctatattatgataattattctgtaagcattacaattaaatcgtttctgtttttactaaaggagttttgactgttttaaacgactgtaaacactcgtgtgtctgcttaaatcatgtggaaagttaaatgataacagttagaacatccaactttacatatgctttgattagacattttctacgatatgtttcggattgacacgtgctaatcatatctgatcattttcccattttacatatgttctaattaggcattttcgacgatacattttagatcgataatgtgttaataatcatctgacattttttactttgtatgttctaattatgtatttatacgataaacattagatcgacacatgcaaaacattcgacaatttgttgaacactgaagacctaatttggtataatacagctcagcgaagatacgttacaactaatttggagcgtttatagaaaatataggcaaatagccaaatatgctaataaaaagatttagaactttaataggtaatttaacacattttataacacacaagcatatatatttaaaagggaaaaaactagtcaactttcatagaccatcattaccataataactcaattcaatcaaattttaatttttggctactatttttcttttctaaaaccaaaacatcatcatagtagattcttcaattttaaaatatagaattcaaattgttgaccagggaataaatagaattgcaaaaaaacaaattaagatattttacattccaacttttcccccaaaaaattagagaaaaaaatcaaattaaattcaataattccaaaacataaaacgtacaaaaaagttaatgataaaaaaacgtaaaaaaaaatacaaaaatacaaagaaaaaagaaagacagcgtggagagtaaagctattggtagcatggctgcaacagaaggccaagtgtttggtcttacaatttcatttttaactctttgtgttaattaacccaattagccctttcctccttcagggtttatttaacttgccctttctcgtttcctcctttttttcttaaaccactctgcttcctcttcctctgagaaatcaaatcactcacactccaaaaaaaaatctaaactttctcagagtttaatg

SEQ ID NO: 35024 - DNA, 2987 bp, Unknown
  misc_feature (1)..( 2987): 2750-1469P.txt file - cDNA_ID_3084009; gDNA_ID_2926250; Annot_ID_204339
aagcttcaatatgattcacttaaaatgtggtaagtaggggagatgaaaaggacttatcttatagaaattgagtcgtttattttgttggtccaccatacatttacatgaaatggttacatcaggacgagtgttgtctgagacctagaaaatcagaaaccaaaaccacaaaagaattaaaatgaaattacagacacaatcatgaatctctaacataagaaataacaaaaccaccttcacgtgatacaactctttggtttcttcaacacaaaatcccattttgtgtacagctctatacccaacattttcgacataagactttgggacatttgtacgaaacattttcttcaatttctccaaagtgcttttagttaacggaccatctcttagagttcctgatgaactaacactgcatcaatttgataagataacaatcggtaaacttgtttattcaacataaaaaagacttgattagcgagaaatgcgcaatccaactatagtttctaagttgtctagatagtagataaccgactcaactatagtgtccaagttgtcaacacagtttcaatccactacaaaccacctacggtaattacaatgctcttaaaccaacactaggctaatcactaaccctgccccaggtaaaacagagtttgtgtgtgtccctaaaaactgaaaatttgaggagaagtcaaaaaccttactcatggaaaacaacattaccaaaccgagcgatcagtctgagtttgacatcctctgatccaccataacctagcaacgtcttctttgccctatcaaatcccattataatgtcatcctccactttctctgtcacccataaccatggattttccagttttcccaaatcactcttcgctaagattaccaaagatttttcttctgcgtctttcctccactctgaagaaccgggcacaagttgaaagttgctatcctctggatccgaaccaacgagaaaccatctagaaatgtaaccgtttgcgtagattatctttgtattagtactcccgacgtttttattgtgttttttaagaagagaaggtggaacagaggatgctctcaatgcaacattttcaagtcgtttatgtggtggaacgtaagacatctctgaaacgaatatatgatactaggaaaattaaaagctgattccaaaaagataactcaagtttccgagcaacgaagtatgagaagaagaaacaaaagagtaccttttaattatatcagcttaggtcattcaaaagaagaacgacgatcatacgagaggaaactgaaaaggcgcagagcagtgaactgaagtggaagagacgagacggtttggtctttttatcactagaagtttagtcttggaaatgtgcataatatttaatttcatttcaattttcaaatcaaaaaataaaaccgataacgaaactcttgttatcatattatgagcgttgataatttagagaatctctgttcttttagaaaattgtatgaacattttgttaaataaataactatttttaaatgctaaacctcattgtttagtcctaaatgttaggaatcttagtattcatttttttttcctcttatgatatacacttccggtttagatttctaggacgttttaaatttaattattactgctaataaaaatagttatttatttttaaacaattaaataaaacaattgtatctctagagtaaaaaaagttttaaaaattttggtgaatgtttttatttggcaacccaacttaattcctgaaacgaatcacgagaattatttaacgtactacaaaaggtacatctaattttctaaaaccgaattagactatcgtcttggttgtttttggatgttgcatgtctatattatgataattattctgtaagcattacaattaaatcgtttctgtttttactaaaggagttttgactgttttaaacgactgtaaacactcgtgtgtctgcttaaatcatgtggaaagttaaatgataacagttagaacatccaactttacatatgctttgattagacattttctacgatatgtttcggattgacacgtgctaatcatatctgatcattttcccattttacatatgttctaattaggcattttcgacgatacattttagatcgataatgtgttaataatcatctgacattttttactttgtatgttctaattatgtatttatacgataaacattagatcgacacatgcaaaacattcgacaatttgttgaacactgaagacctaatttggtataatacagctcagcgaagatacgttacaactaatttggagcgtttatagaaaatataggcaaatagccaaatatgctaataaaaagatttagaactttaataggtaatttaacacattttataacacacaagcatatatatttaaaagggaaaaaactagtcaactttcatagaccatcattaccataataactcaattcaatcaaattttaatttttggctactatttttcttttctaaaaccaaaacatcatcatagtagattcttcaattttaaaatatagaattcaaattgttgaccagggaataaatagaattgcaaaaaaacaaattaagatattttacattccaacttttcccccaaaaaattagagaaaaaaatcaaattaaattcaataattccaaaacataaaacgtacaaaaaagttaatgataaaaaaacgtaaaaaaaaatacaaaaatacaaagaaaaaagaaagacagcgtggagagtaaagctattggtagcatggctgcaacagaaggccaagtgtttggtcttacaatttcatttttaactctttgtgttaattaacccaattagccctttcctccttcagggtttatttaacttgccctttctcgtttcctcctttttttcttaaaccactctgcttcctcttcctctgagaaatcaaatcactcacactccaaaaaaaaatctaaactttctcagagtttaatg

SEQ ID NO: 35025 - DNA, 3003 bp, Unknown
  misc_feature (1)..( 3003): 2750-1469P.txt file - cDNA_ID_3084023; gDNA_ID_2926251; Annot_ID_143043
aggttactttcttgattaaagtacaagagtatttcagtgtttatttattataaccattattggatatccgttgggataagtgttcatacacaaaatggtttagtaatatcgatacgcatcaagccaatgaataattaatagttttccccatcattattggttttgggtcagaaaccaaatagttttcatctaaaatctttgaatgtaaaaagtgatccaccacagcacgctgagatgaaccctcaaaagaggataagtatacatgttggatacgaatgataactaagccatcctagaaggatttatataccgctcattttgaagactatcatattatataatcagctattccaacataagggggagaatgtatacagctggtgaaaaaaaagataaaaagaaatgaattatcaatgatcctcggagtaaagaatgtatattaagagtctaaaagataatttaattatagaatttagcgttgtaattgccagacgcatttgctgacccaaataaagtgatgaagtcacttataccagttgtaaattaaatgctccagaatataatgaatgtcctgtaaggaccaatttcaaactgctattgagtcttaagatcgcatgaagcgtaatagaccttggttccaaatataaatatcctcgtaaaagtgaaggagcacaaaattaaaaatgaccaaattgaggaaataaatattttgatgatctcttgaagagagtgaatgatccctaaaagagacataaacatgacaaatgaaacattcaagtacttgacaatgaagagatctagctagctatgtcatgtcaaaatataatggaatcaaaagcaaatcgacgtcgtaatatatttgcatgctatgagcagttgaaattatagacaaaaaggaggatcatgaaagaaagtctattgaaaagtgtacacaaagtaatgattagccaaaaatggaaaagaagaaatagacatataattataatctctagtagagatatttagactagtagtctatgcacatgatgtgtaaaaccagtggaaaataaatgagtctttatgtgaaagaatagtgaaattaatgataagaaatgtattatgaagagatatattctcttgtggtggatgtaatattttttttttaagtatctaaagtctggcaataagagacggaacactggatatgacatttatatgaaattcttgaaagatataatctctgaaggattaattatatgagaattatgttctctagaactctactcgatcgaataaaaaaaaaaaatatatgtaacatgacatataatcatataaatgtatatttatgttgagtttgcaaaatatattgatcaaactaatatttgttttgaaaatcattaaaactcctagagagttatcataagtaatacgatgacaataatctatgataaaatatcactagataatgatatttataagtctatatgaaaaccatataattttgatcattaagattatggttattaattccaacgagatattgtatttgattgaaaatcatctcctgaagaagatgtttccgagggggagattgaatgatatgcgtggatgtaccctttttccttatcatagtttttatcccacatgatttttctatgacaaggtttttaacgagacattaaagaacacgcaaataatacacttgatgaatgttaggaaattctatcaatcatccaaatgaatattatacactaatgatatttagagaaataaataagatggtcaagataaatcatctaaaagattcatgagcagcagaaaaatggcgttgtactttatccagaaatttgttcaagagaagaattggcagacttattctcaaatactgtttattctctgccacatcttctaatcatgcagagattttaccaattcatgaagctagccgcgagtgtgtatggctaagatccatagttcaccatatacaagaagactgtggtatgtatgcagggaaaaagactccaacaaatatgtacgaagacaatgcagcatgcataactcaaagacggatacatcaaaggcgatagaacaaagcacatcctaccaaaattcttctttacccacgatctacaaaagagcgtcgatgtacaagttttacagatccgttcgaatgataatctggctgacttattcaccaaggcgctacctattgctacttattcatcgtatcggattacgccgtctcaaagatctcgacgaatatactcataagggggagtaattgtgtgttgcactctttttcccttaaccatggtttttcctattgggttttcctggtaaggttcttaatgaggcagcatttcaaatactttacgagttatgatactataatggtcatcagggggagtgttatgaataaagatggatgcccattataaggcccatcatctaagcccataatctacatgtttttagggttttaccatttccttatactcctatataaagaaccctttatctcaatggaataacacactcatttcctctatctctttctctgtttataacaaaatttactattttttaaattatgttttaaaatgtgattactttccaaactcactcttttgttaattattatgatttatcttcaaaaatttggctacttagtcaatattctcatgaatcaatacaaaatatccggttcaactatccccggtttggtgtaatcataaccgatgcaatcatatatttaatgaattaaaaaatagaagaagcgcaacgtttcagaaatcaaaaagccccaacgttccgattaatttcaaaaaactgaaataaatctcagccgttcattaacacgctcctttcaccctccgatcacatctcgtcttcttcacaacgtttcctttactctctctctccatctcttcccccttgagacccaaatttcaaatttctctcttctctctctcactgactcagtgaattctcatcttctctcatcacccaaccaaatcaagcatg

SEQ ID NO: 35026 - DNA, 3003 bp, Unknown; identical to SEQ ID NO: 35025
  misc_feature (1)..( 3003): 2750-1469P.txt file - cDNA_ID_3084023; gDNA_ID_2926251; Annot_ID_204391

SEQ ID NO: 35027 - DNA, 3000 bp, Unknown; identical to SEQ ID NO: 28738
  misc_feature (1)..( 3000): 2750-1469P.txt file - cDNA_ID_3084041; gDNA_ID_2926251; Annot_ID_204385

SEQ ID NO: 35028 - DNA, 3000 bp, Unknown
  misc_feature (1)..( 3000): 2750-1469P.txt file - cDNA_ID_3084092; gDNA_ID_2926251; Annot_ID_143026
ttaaggtggttcgcaacaacagtatgtctcgaccactttgcaaacaatgcaagtctcgttgcatatttccagtcatcttggaaacatggaatgaaagctgcctccgtaatgaatattattgctctgaagcttgtttctattcctaattttattatatatgttgttttcgagctttttatatttgatgtgtgattttgatttatttgattgcgaccatgtttttttctattctaggtgagtacccacgctacgcgtgggcttatgtttagctttgattttttatattatctttacttgttcattcgttctaagaacttgtagttttttgaaattattttcatatggaactattaaatttcatagtatcatataactaataaattttgtaaaattaataaatctaaactatagatgacaatagagttattaagtttgtgagagaaataagagaattcactataacaaagtcatcactgtgagatgcatggttattatcatgttggtaatattgtgtatcaagtcacagaagaatttgtttttttttagtgtacgctttagattgaggtaaatcataaaatcaacatcacgagttttctcttacaccaaaataatttgaatctcatctacaaccagaaagaataataataatggtcatgggttatgtttctattaaacattctgctaactttgtctctaaatccaaaaactcggcttcatgtacgcaagccaattcatcaaactactatttgccacatagaacctacaatcattcactttgttcaatttaccttacaacaatatacacaaaatttgtatttgtatggataagaaggtgtaagaacaaaaatgattgactttgtgtgctaccatttattatattcatgttttcttcttttttttgtgcattttactcagttaagtgctagaacggtattaatattagtaaaagcaatgtagatataaacatttaaaataaccttacaaacttcttgataacttagctttaaactatttgatgcatataaagctagctatgaggtgatggagtctaaaacctactttagccatgaaaatgatagttttatgaagagtcgatgctttaaaatgatagaggagaagtttaagggttgatgataatcttaaattgaagaagtatataaaagtcattgattattggaaggtaaaacttaattttaactttttagctttaaattctatttggacatgtgacattcttttaggtgttgatgtgtcactcatacagagagagttgaccaactttcatatatatgatttaacgtgtcttgcttcaacatgaataaaaaattacgttttaaagttttttttgttaaatattattttcattaatttaactaggaaatgaacccgcccgatatcgcgttggagcttattttataaatttgtattttatgattaagttttatatgggtactttaatgtaataatgtatagtgttatgaatatattgttcagaagaagactgattacgagttttaatattattttttaaaaatattattatttggatgtgttagttctattatatacagaataaataaacccactattaaagtggttatgatatactttgcacattttatttagtcctacttaaaatatgaataaattgctttaaactacaataaatattttataataaatatagcatctcaaatataataagaacgttgtatttaaaacatgggagatttgcaaaactacccttttttactacccttttgcaacaatacctttttatgttgtccatttttaaaaataccccttcccttgccaaaaatgaccaaagtaccctcatctaattggaacatgtaatttgaaactgaaattttcccgccaaatttctggcgtcaaaatttattttttccgccaaaacaaaattctgccaaactttttttccgccaaaaaaaaattcctgccaaaaaaaaatttcccgccaattttgttttcgtaacagattttttctcagccaaaaaaggcttttaaaaatccttgtaaattttttttgggcggaaatagatttacaagggattttcaaagggttttaaaagatttacaagagatttttaaaggattttaaaatatttacaagggattttaaaagggttttaaaatatttacaagggattttaaaagggttttaaaatatttacaagggattttaaaaggttttaaaaagatttacaagagtttttaaagagtgttcttgtaaatttttcaaaaatcttttaaaaacccttgtacatcctttaaactccatttaaaccttttaaaaatctcttgtaaatcttttaaaatctcttgtaaattttccttttaaaattccttgtaaatactttaaaactattttaaaatcccatgtaaatcttttaaaatccttttaaaatccattgtaaatctatttcccgccaaaaaattgtttttgacgggaaattgttttttgaaaaaataatttttgcgggaaatattttggcggaaaaatttgggcaggaaatttgttttggaatattttaggcaaaaaaatattaatgttacatttttgttaacataagataatttccaaataggggtaaaatggtcattaaaaatttaaagagggtagaaatgaaaatgaataaaacaaaagggtagagttgaaaagaggcatcatgaaaagggcattagaaagaatttttcttaaaatatctaaacctaaaatgtcaagcattacaataatcaatttaaaataatctaatatactatagaaggtaactcaaatcgacaacatggacatttatgatttgtctcaaaccatttttcaaggcgttctgcatcaaacacattattttgtggattgttagtggttagttagactagctacatttatttcacttatgtggttcttcacttctattttcagaattctcagaagtttatgatctaagtaagtggtgttcgagttatgtctatgagtcaccgatg

SEQ ID NO: 35029 - DNA, 3000 bp, Unknown
  misc_feature (1)..( 3000): 2750-1469P.txt file - cDNA_ID_3084092; gDNA_ID_2926251; Annot_ID_204367
aggtggttcgcaacaacagtatgtctcgaccactttgcaaacaatgcaagtctcgttgcatatttccagtcatcttggaaacatggaatgaaagctgcctccgtaatgaatattattgctctgaagcttgtttctattcctaattttattatatatgttgttttcgagctttttatatttgatgtgtgattttgatttatttgattgcgaccatgtttttttctattctaggtgagtacccacgctacgcgtgggcttatgtttagctttgattttttatattatctttacttgttcattcgttctaagaacttgtagttttttgaaattattttcatatggaactattaaatttcatagtatcatataactaataaattttgtaaaattaataaatctaaactatagatgacaatagagttattaagtttgtgagagaaataagagaattcactataacaaagtcatcactgtgagatgcatggttattatcatgttggtaatattgtgtatcaagtcacagaagaatttgtttttttttagtgtacgctttagattgaggtaaatcataaaatcaacatcacgagttttctcttacaccaaaataatttgaatctcatctacaaccagaaagaataataataatggtcatgggttatgtttctattaaacattctgctaactttgtctctaaatccaaaaactcggcttcatgtacgcaagccaattcatcaaactactatttgccacatagaacctacaatcattcactttgttcaatttaccttacaacaatatacacaaaatttgtatttgtatggataagaaggtgtaagaacaaaaatgattgactttgtgtgctaccatttattatattcatgttttcttcttttttttgtgcattttactcagttaagtgctagaacggtattaatattagtaaaagcaatgtagatataaacatttaaaataaccttacaaacttcttgataacttagctttaaactatttgatgcatataaagctagctatgaggtgatggagtctaaaacctactttagccatgaaaatgatagttttatgaagagtcgatgctttaaaatgatagaggagaagtttaagggttgatgataatcttaaattgaagaagtatataaaagtcattgattattggaaggtaaaacttaattttaactttttagctttaaattctatttggacatgtgacattcttttaggtgttgatgtgtcactcatacagagagagttgaccaactttcatatatatgatttaacgtgtcttgcttcaacatgaataaaaaattacgttttaaagttttttttgttaaatattattttcattaatttaactaggaaatgaacccgcccgatatcgcgttggagcttattttataaatttgtattttatgattaagttttatatgggtactttaatgtaataatgtatagtgttatgaatatattgttcagaagaagactgattacgagttttaatattattttttaaaaatattattatttggatgtgttagttctattatatacagaataaataaacccactattaaagtggttatgatatactttgcacattttatttagtcctacttaaaatatgaataaattgctttaaactacaataaatattttataataaatatagcatctcaaatataataagaacgttgtatttaaaacatgggagatttgcaaaactacccttttttactacccttttgcaacaatacctttttatgttgtccatttttaaaaataccccttcccttgccaaaaatgaccaaagtaccctcatctaattggaacatgtaatttgaaactgaaattttcccgccaaatttctggcgtcaaaatttattttttccgccaaaacaaaattctgccaaactttttttccgccaaaaaaaaattcctgccaaaaaaaaatttcccgccaattttgttttcgtaacagattttttctcagccaaaaaaggcttttaaaaatccttgtaaattttttttgggcggaaatagatttacaagggattttcaaagggttttaaaagatttacaagagatttttaaaggattttaaaatatttacaagggattttaaaagggttttaaaatatttacaagggattttaaaagggttttaaaatatttacaagggattttaaaaggttttaaaaagatttacaagagtttttaaagagtgttcttgtaaatttttcaaaaatcttttaaaaacccttgtacatcctttaaactccatttaaaccttttaaaaatctcttgtaaatcttttaaaatctcttgtaaattttccttttaaaattccttgtaaatactttaaaactattttaaaatcccatgtaaatcttttaaaatccttttaaaatccattgtaaatctatttcccgccaaaaaattgtttttgacgggaaattgttttttgaaaaaataatttttgcgggaaatattttggcggaaaaatttgggcaggaaatttgttttggaatattttaggcaaaaaaatattaatgttacatttttgttaacataagataatttccaaataggggtaaaatggtcattaaaaatttaaagagggtagaaatgaaaatgaataaaacaaaagggtagagttgaaaagaggcatcatgaaaagggcattagaaagaatttttcttaaaatatctaaacctaaaatgtcaagcattacaataatcaatttaaaataatctaatatactatagaaggtaactcaaatcgacaacatggacatttatgatttgtctcaaaccatttttcaaggcgttctgcatcaaacacattattttgtggattgttagtggttagttagactagctacatttatttcacttatgtggttcttcacttctattttcagaattctcagaagtttatgatctaagtaagtggtgttcgagttatgtctatgagtcaccgatgatg

SEQ ID NO: 35030 - DNA, 3000 bp, Unknown
  misc_feature (1)..( 3000): 2750-1469P.txt file - cDNA_ID_3084106; gDNA_ID_2926251; Annot_ID_204363
acgtgttaatctcagatgaagatcaagctattctgctgctcatgtccttaccgaagcagtttgatcaactgaaagatactcttaagtatagctcaggaagaacaactctctcagtcgatgaagtagttggagctatttactcaaaggagctggaacttggctcaaataagaagagtatacgaggacaagctgagggtctgtatgtcaaagagaagaacgagacaagaggtagaccagagcagagggaaaatgacaacaagaacaactgttctagatctagatctaagtctaaaactaggaaaggttgttggatctatggagaagagggacatttcaaggcgtcatgtccaaacaagggaaagccacataacaaagggaaagaccaagggaacaacagcaagggcgaagctcctttggttacaaagaacacatttgagggcttaggatactatgtgtcagaggcattacattcaactgacgtaaatctggagaatgagtggatcatggacaaaggttgcagttaccacatgactcacaagaagtaatggtttgaggatttgagtgaagatgtaggaggatctgtaagaattgggaacaagacaacctcaaaggtcaaaggcattggaagggttagaatccaaaacaaggatggaacatctttcttactcacccttgtaaggtacattcctgacatggatcataatttaccatctatgggaaccttagatgaacaaggttatagttttgagtcaagtaaaggagtcttagtggttaaggaaggaactagggctgtactgataggtaacaaacatgagaagctttacttactccaaggaaagcctgagataagtaattcaatgactgtggagagaaggaaagatgatacagtcttatgtcacagaagattaggccatataagtcaaaagaatatggatatcttggtcaagaaagggtacctagaccgaaagagagtctcaagacttgaaatgtgtgaagaatgtatctatgttaaagcaagaaggttaatttttgtgaacgcaactcatggaactgaagataagttaagctatatccactctgacttatggggagcaccatcggttcctttatttctgggaaagtgtcagtatttcatctcattcatagatgactactcaagaaaaacgtgggtttactttctcaagcataaagatgaggcatttggaacatttgctgagtggtgtgttatggttgaaaaccaaacggatagaaagattaagattctaagaaccgacaatggtctagaattctgtaataatcagttcaatgagttttgcaaggatagaggcatagtcagacctcgaacatgtgcctatactcctcaacaaaacagcgttgtagagaggatgaacataacgattatggagaaggtcagaagcatgttaagcgagtctggcttaccaaagacgttctaggctgaagctacgaacactgcagtcaccctcttcaacaagacaccgtcatctacaatcgattttgagattcctgataagtgctggtcaggtaagtctccggtttatagctatctaaaaagatttggctgtgttgcttttgttcatgccggtgaaggcaaactggtgcctagagcaaagaagtgcatctttctaggctatcctgcaggggtaaagggatacaaagtctgggtgttggatgaaaagaagtgcacagttagcaggaatgtagcatttcaggaaaatgctgtttacaaggatttgatgcaaaaaaaaaaacaaagatgatcaagatcaagctgaaacatcaagagattctttcgacatttatctagaaggccttggagatttgagtttaggtggagacctcttggaagaaacaggatccctgggaggtccttcacaaactcaggtcaatctctaagatgatgattcagagaacaatgaagtggtgactaatactcttgacagttaccatttggtcagagatagagaaagaagggaggtaagagctcctaggcgctttgatgtggaaggctattacagtgagtctgcagatgatgaggaatcattaaatgctgaagcccttgtcaccacttttgatggagataccatcgaacctgcaagttatcaagaagcactgaaagatgatgattgggttctgtggaaggaaggcatagatgaagagatggattcactgttgagaaatgatacatggactgtagtcacaaagcctaaagaacagagagtgatcggctgcaaatggattttcaagcgtaagcctggaattccaggtgtagagatggcaagatttaaagcaagactcgttgctaagggatatgcacaacgagaagggatagattacactgaagttttctctcctatggtgaaacacgtttccataaggattctgcttgccattgttgcagaggaggactatgaactggagcaacttgatgttaaaattacatttcttcatggagaattggaagagaagatctatatggaagctcctaaaggtttcgaagatcagtttaagtcagatcaagtgtgtctgttaaacaaatccctatatggtctgaaacagtcaccaaaaagatggaaccagaagttcgatagctacatgctagagattggttttgagaagagtcctcgtgatagttgtgcttacataaagtcactggaggatggttcaaagatctacttactcatctatgtagatgacatgttggtggctacaaaagacatgaaggtcatttcagaattgaagcagaagttaagtgagagatttgaaatgaaagaccttggagctgcaaagaaaattcttggtatggagatcacaagagaaagaagtaaaggaaccttaacactgtctcaagaagattatctaaataaggtattggagctttataaaatggagcaatgcaagccggtgatgactcgtcttggtgttcaccttaagatgcaggctgcttcagagcagcaactcctggatgatgaagagtacatg

SEQ ID NO: 35031 - DNA, 317 bp, Unknown; identical to SEQ ID NO: 28741
  misc_feature (1)..( 317): 2750-1469P.txt file - cDNA_ID_3084146; gDNA_ID_2926252; Annot_ID_204416

SEQ ID NO: 35032 - DNA, 3000 bp, Unknown; identical to SEQ ID NO: 28740
  misc_feature (1)..( 3000): 2750-1469P.txt file - cDNA_ID_3084163; gDNA_ID_2926252; Annot_ID_204411

SEQ ID NO: 35033 - DNA, 3003 bp, Unknown
  misc_feature (1)..( 3003): 2750-1469P.txt file - cDNA_ID_3084167; gDNA_ID_2926252; Annot_ID_143050
cgtggtttgaaccctttgacttgccatgagtctgagagagtctttcaatgacatttctagcaaccgaacgaggcgatccatgccgcaacccattatccacacaatcagcagaagagtaacgtaaatgggtgcctttagcttctctaaatgactgggactttcgtttctcatcgaaagtgtctgatggtgatgtagggactgtccattgaactcggggtggaagcctccttcgatttatactctcagaaacaccactgtgtgaagaattactcttttgcttgcacggttccaaatgctcttctccatcaatataacggtccagaactttactagagacattactcgaacaagatgatgaactcccagacgaatcatgctgaaacttgtctgctttacactgcctttctctaacttgtctttctggagtaaagcatctggtacacagtattcattacattgtttgtcagtggtttaatcaaatatagaaccaagatagcgaaaacattacagaaaatcatcaaaacaatctcataagaatgaagaaaggccaaaagcataccgagatgaatgattgcgccgcctatccttgcttttagtagcactagttgttagttcattcttggaagtttctccaaacttgtcaaaaaggaaacctgcagaggaccatgaaaggcttcgtctaagagctagaccaccagaaacttgaccatgtgacttaggactatcgaactcttgttcagcctgactactagcttgggttctcatcttactatccgcttctttttcgcagttaacttgtttatcatttccattaccagaagatctgaaaaagaagagctttttcattgttttctccaatcaaaaggtgctataacaactgcagctgcaatcaaaacatatagaagcaaatcaatagattgtaagatatctcctgcactaaactaggaaaagttcacattttgcagcaaattagttcatgtcaatctccaaaaaaagtgctccaagtgaatcttacaaacaatttgctcgatgaaagataaaccagttcaacaaaagaaatgagaaaaaacagcataaatgatcttagactcgagataatcaactataactctactcagagattcagaaactcaagacttatcatagtaaacatcgagccaaggcctaaaataaaagaccagactaccctaagcatcttcaaagctacgataaaccctagagactaatcaaatcacaaatcgaacctaaatcctacttgcggagaagttgatgaagattatgttcggcgagattactcgaacactaacaaaatctagaaaggctctctctttaaacgatctcaatcgatttcgtcgccagaaaatccaactctactctctctactctcttctaatagttggaaaattgaaagaaaaaggaaaaaaaaacactgagaggcgacagctttttatgacgacacaattggctttaaagaaaaccaaagaaacacagagaaaaattttaaaatttcaaaagggaagatctttagaatttatgaacataccataaaacagcgattttgcaaatcgaaaattcgaatggagaagaaactgaaacgcagatttaataacagcgctagataacgtggatttgatctaaagggagaagtgcaagaagtgtgagagtgtctcgttgacgacgaagaatccaaaagaacaaaacggctccaaaaatctttattggcggtgtgataatgtaaatagagtatccagtgaagggtatttctggtaacctttttaaatctttcattgcgcggcggatagagccatttggacttttggaggagcggggctacaattatttgtttttcactaacaacacataacagtgatcaataacaacattggaaaaacttgtaaattacaaattaaatgtagggtatttagttgttttaagataagtataataaaatatataggtttgagtgatatgaggtaattatgatacagttttgaagtgataacgataagaattgttggtatgataccgtttttgttgttgataagctttgagaccgggaaggtgtatgtataccaccatacctaatactataaattaccaactacgctcataatcaattatataattataaatttggtataaaagtcgagaaatctaacaaaaatgataaggttatttctcaatttactttcatgctttatttttcttctttatgtttggcaatagcacctagtatttaaacaatacatatagtatttcgacacatagttgcccgtaataaattgaaataatataaaagagaagtaatgcgttattttagatagaaatctgacatcatatatttataattatattttctataaataaaatattatctatatatagtttttttacacttggaattatatattgaccacacatcatgtgttaaattttttttttttttttttttttgcattgatactttggccatattttagttttactcataacatattaggtataatcacgatcagtcctaatattttgaaagcccaaaaaaaaaaagactttattttgagatattttttcacaaggtaaatttaatttcagtaaaaaaagggtttttaataattaaaaatatctgtatattaatattttgtatagactagttatatattaatcaaaaattgggaatcctagactatttttgtttcatcaactggacctggtactggatcaaacgttgctgcaaactaaaatgacaaagcccaaaaatcaaaacatactctcggttagggattagatcagaccggacggtttcctaccttttcaaacgctgtcgttttgaactatagagtaccacaaaccaacgacgccgtttcacttggcactatttatttcttctgtagttttttttcttctcatacatatatcaatcaatcaagatcaccaccacaaggcaaaatctaaactctctctgcaaaatttctgctaacttcttcctcccattttcttgccatg

SEQ ID NO: 35034 - DNA, 3003 bp, Unknown; identical to SEQ ID NO: 35033
  misc_feature (1)..( 3003): 2750-1469P.txt file - cDNA_ID_3084167; gDNA_ID_2926252; Annot_ID_204410

SEQ ID NO: 35035 - DNA, 3000 bp, Unknown
  misc_feature (1)..( 3000): 2750-1469P.txt file - cDNA_ID_3084171; gDNA_ID_2926252; Annot_ID_143049
gtctcgaaatatgacatccgcagcatgtagtctacaagaatccgtttcagtttggtattattccattcagtaatattttccacatctactgaatccaaatgatcgatgcgagcacgacatctctgggcttgcaaattctccacattgctcccttcttccaactgagatacaaaaccaaaaaaatacgtaagccaggccatatccatgtgatgttactccagaagatatagaaactatcccaaatgataaaaatttagaagacaatgcaaatagtcagatgggaagttccaatgaaccaactccaccactacattgaattcatcgagatccaatgtctagtgagacataattgccaaagacagatactttactttgatcttcaacatcgaagatcaaattttttacagataagtggatatcatttagcaaaatcagaaactttaatcgctaaattaattgattcagtttcgtctacataatttaaaacaccgatcacagagggagagagacggaaaaatcaacctttcgtttgaggccttgtaatcgagtaacaaggcaagtaagacgcgaaacggtatcgtctttagaccaatcggaatcagccaattctccgacgccgttaacaatggttgagacctctttctcgaaagaacggtgattggtacggatcgtcttcttgtaatgctcgaaaggaacgcggaggagctggtgctcaagcttgagagattccgtaaattgattcgatctcgaagacgagacgacgaccggcgacggagtgatcgtagcggcggattccgtcatgacggtgtcagagtttccgttggtggcggaatcgatttccatggcaagaaaatgggaggaagaagttagcagaaattttgcagagagagtttagattttgccttgtggtggtgatcttgattgattgatatatgtatgagaagaaaaaaaactacagaagaaataaatagtgccaagtgaaacggcgtcgttggtttgtggtactctatagttcaaaacgacagcgtttgaaaaggtaggaaaccgtccggtctgatctaatccctaaccgagagtatgttttgatttttgggctttgtcattttagtttgcagcaacgtttgatccagtaccaggtccagttgatgaaacaaaaatagtctaggattcccaatttttgattaatatataactagtctatacaaaatattaatatacagatatttttaattattaaaaaccctttttttactgaaattaaatttaccttgtgaaaaaatatctcaaaataaagtctttttttttttgggctttcaaaatattaggactgatcgtgattatacctaatatgttatgagtaaaactaaaatatggccaaagtatcaatgcaaaaaaaaaaaaaaaaaaaaaatttaacacatgatgtgtggtcaatatataattccaagtgtaaaaaaactatatatagataatattttatttatagaaaatataattataaatatatgatgtcagatttctatctaaaataacgcattacttctcttttatattatttcaatttattacgggcaactatgtgtcgaaatactatatgtattgtttaaatactaggtgctattgccaaacataaagaagaaaaataaagcatgaaagtaaattgagaaataaccttatcatttttgttagatttctcgacttttataccaaatttataattatataattgattatgagcgtagttggtaatttatagtattaggtatggtggtatacatacaccttcccggtctcaaagcttatcaacaacaaaaacggtatcataccaacaattcttatcgttatcacttcaaaactgtatcataattacctcatatcactcaaacctatatattttattatacttatcttaaaacaactaaataccctacatttaatttgtaatttacaagtttttccaatgttgttattgatcactgttatgtgttgttagtgaaaaacaaataattgtagccccgctcctccaaaagtccaaatggctctatccgccgcgcaatgaaagatttaaaaaggttaccagaaatacccttcactggatactctatttacattatcacaccgccaataaagatttttggagccgttttgttcttttggattcttcgtcgtcaacgagacactctcacacttcttgcacttctccctttagatcaaatccacgttatctagcgctgttattaaatctgcgtttcagtttcttctccattcgaattttcgatttgcaaaatcgctgttttatggtatgttcataaattctaaagatcttcccttttgaaattttaaaatttttctctgtgtttctttggttttctttaaagccaattgtgtcgtcataaaaagctgtcgcctctcagtgtttttttttcctttttctttcaattttccaactattagaagagagtagagagagtagagttggattttctggcgacgaaatcgattgagatcgtttaaagagagagcctttctagattttgttagtgttcgagtaatctcgccgaacataatcttcatcaacttctccgcaagtaggatttaggttcgatttgtgatttgattagtctctagggtttatcgtagctttgaagatgcttagggtagtctggtcttttattttaggccttggctcgatgtttactatgataagtcttgagtttctgaatctctgagtagagttatagttgattatctcgagtctaagatcatttatgctgttttttctcatttcttttgttgaactggtttatctttcatcgagcaaattgtttgtaagattcacttggagcactttttttggagattgacatgaactaatttgctgcaaaatgtgaacttttcctagtttagtgcaggagatatcttacaatctattgatttgcttctatatgttttgattgcagctgcagttgttatagcaccttttgattggagaaaacaatg

SEQ ID NO: 35036 - DNA, 3000 bp, Unknown; identical to SEQ ID NO: 35035
  misc_feature (1)..( 3000): 2750-1469P.txt file - cDNA_ID_3084171; gDNA_ID_2926252; Annot_ID_204409

SEQ ID NO: 35037 - DNA, 3000 bp, Unknown
  misc_feature (1)..( 3000): 2750-1469P.txt file - cDNA_ID_3084175; gDNA_ID_2926252; Annot_ID_204408
agaaaaggagaagagcgagctgcaggctggattggagaaagagcttgatagaagatcaggtgagtggacgtcaaaactcgaaaaattccagcttgaagagaagaagctccgagagcgtgtaagagagcttgctgagcataatgtctcactccagagagaactatctgctttccacgaaaatgagacagagaacaaagacatgataacacatttggagagaagagttgctgagctgaccacaacagcagataaattgcatgaagagaacaattatgttaaacaaactctctccaagttacaagagagttacgcaggtgctacagaagatcttgatttcttgagaagaaactttgaagagaaggatcaagaatgcagggagttgcacaaatctgttacaaagtttttcagaacttgcaaagaacaagggaagacaattgagggacttcgagatggtgtttctgaggaggttaagaagcaaccgtcagagaaattagaccagttggtcaagaaattgcaggtcgagcaggtaaggttgacagggatcgagctttcacttagaagggaagtagaatcaatgaagcttgaaactgactctcttcgccatgaaaatatctgtctactgaatcgattgaaagggaatggtcaagaaatagacattacaacccttaagctagagaatgagttgaagatgcgtgtctgctacttgcaagaacagggactgtcaatgttaaatgagagcagccagctgtgttacaagttactgaagttcatcaaagggaaattaactcagcttcctgaaacctatcaggataagaattcagtgaaggacggattaagtgagcagtttatgattgagtctgaaatgaaagtccatgggataaggcgcggaactgaaaacctgaagaggagtttgcaaacggtgaccagtgtggtagcttcgaattcagaatcgtcttcctcaaatactggtaggcctagggaacaaagaaaccaatcagttgaagtaagtccacggatatgtccatttcttaatatctctattgtattttcttgtatgtcctgttttgctttacactaatatgtggctaatgtatacctggcccaatctcatgtaggaaaacttgcgagcagaactgagtgctgagaccctaatcacaagtttagtgcgggagaaactgtattccaaggaaaaggaaatcgaacagctccaagcagaactagcagcagcagtacgaggtaatgagattctgagatgtgaggtccaaagcagtttagacaacctatcagttacaacccacgaactgaaagacctcaagcatcaggtattgcaaaacaagaataacacatatcccatgtctgtttttgtatataaagaaactattcccatttataaaatgttaactttacgctaatcttttttgacatcagatgttgaagaaggaggaaagcataagacggctcgaaagcaatctccaggaagcggcgaaagaaatggcgaggctgaacgcactattgtcaaaagtgtctaatgaaagaggccagatatggagtgagtataaacaatacggtgagaaaaacatgcttttgaactcagagaacgagacattgaaaggaatggtagagaaattggaggagaaggtattagagaaagaaggagagatcacaatactacaagacacaatcggaagcaagcatctgaatctcctctcaagtcctgatttcttggtataagggtttttctttatcattgtttcttagacgatgggtcattctttggggcttatagatatgattgtttcttcttttatttttacttttcttcttttggattgcttatctcaaagctggattctctctagtttcagatttgtacttaaaaatgggcttataaacttagtggtgaagtttatggtaaagaaagtttgtcatttgactcaattctattcaataaatcttcataagccattagttcaaaaagagactagcaataattttatatatatactatcttacataaatatatatatatatatatatatagacttggtatttttacttttttcactaaatatatgatcacttttcactatagttagtcattctttttctcaataagtttgacaaagctagtcttatattattttttttcctacacttgtagtaacaaattggtaccatattttagagaatatttcataaaaatagtagaggtattaaatgttgcaaaaaaaaagtcaaaccgttaaagtcaaaaagaaatggagagacgacaggtagagaaaataaaatactataaatttaccagaaaaaaaaaaacaccataaacacgatgaccgcgactatcggtactttctctctctaaaaaaaacaaatccaacgtctccgtctcttcttcaaacgcgtcttcttctctattttaaccctctttcatcgtctctttcgctttttataggttttgatttgtattagtaatcatcttgctaatctttccccctcattgatctgaaatcgaatgatggattattattctactccaagcttttgaaataaggaaccctatttctttcatctaatcctcgatttcatcaggtatttcaaatcaattacccaatcaggttgatgggtcaaagttgaaacctttagattcatatgtggatggagttatgtaaagttttcttcttaatcaaaatttgtttctcccagatgcttgttatcagattgatgggttaaaagttaaaaaatttagtttcctatgttgaaaatttggagactttatccttttttcgattctagattactaaatgttttgtttttgtttgtgtggaatgcagattaatgttgtttacatttgtgaatgcgtgtttgaattctgaatcctgggtttgtggagttggaattgagtctgacaagaagattgggtttcttcataatatagttataagcactgatttgatgaacgatttgatagctggttcttttggttgagacatgtgaattatg

SEQ ID NO: 35038 - DNA, 3000 bp, Unknown
  misc_feature (1)..( 3000): 2750-1469P.txt file - cDNA_ID_3084179; gDNA_ID_2926252; Annot_ID_143047
gtagagaaattggaggagaaggtattagagaaagaaggagagatcacaatactacaagacacaatcggaagcaagcatctgaatctcctctcaagtcctgatttcttggtataagggtttttctttatcattgtttcttagacgatgggtcattctttggggcttatagatatgattgtttcttcttttatttttacttttcttcttttggattgcttatctcaaagctggattctctctagtttcagatttgtacttaaaaatgggcttataaacttagtggtgaagtttatggtaaagaaagtttgtcatttgactcaattctattcaataaatcttcataagccattagttcaaaaagagactagcaataattttatatatatactatcttacataaatatatatatatatatatatatagacttggtatttttacttttttcactaaatatatgatcacttttcactatagttagtcattctttttctcaataagtttgacaaagctagtcttatattattttttttcctacacttgtagtaacaaattggtaccatattttagagaatatttcataaaaatagtagaggtattaaatgttgcaaaaaaaaagtcaaaccgttaaagtcaaaaagaaatggagagacgacaggtagagaaaataaaatactataaatttaccagaaaaaaaaaaacaccataaacacgatgaccgcgactatcggtactttctctctctaaaaaaaacaaatccaacgtctccgtctcttcttcaaacgcgtcttcttctctattttaaccctctttcatcgtctctttcgctttttataggttttgatttgtattagtaatcatcttgctaatctttccccctcattgatctgaaatcgaatgatggattattattctactccaagcttttgaaataaggaaccctatttctttcatctaatcctcgatttcatcaggtatttcaaatcaattacccaatcaggttgatgggtcaaagttgaaacctttagattcatatgtggatggagttatgtaaagttttcttcttaatcaaaatttgtttctcccagatgcttgttatcagattgatgggttaaaagttaaaaaatttagtttcctatgttgaaaatttggagactttatccttttttcgattctagattactaaatgttttgtttttgtttgtgtggaatgcagattaatgttgtttacatttgtgaatgcgtgtttgaattctgaatcctgggtttgtggagttggaattgagtctgacaagaagattgggtttcttcataatatagttataagcactgatttgatgaacgatttgatagctggttcttttggttgagacatgtgaattatggtatctacaacatttaggagaattgtatcgccttgttggagaccttttggtattggagaagattctagtcctggtagtgatgatacgaatggccgtctcgatggtctcttgtggtacaaagattctgggaaccacatcactggagagttttctatggcagtcgttcaagctaacaaccttcttgaagatcatagccagttagaatctggtcctattagtttgcatgagtctggacctgaggcaacttttgttggtgtttatgatggtcatggaggtcccgaggctgctcggtttgtaaacgataggctcttttataacatcaagaggtacacatcagaacagcgagggatgtcgcctgatgttatcaccagagggtttgtagcaacagaggaggagtttctcggtttagtgcaggagcaatggaagaccaagccacagattgcttctgtgggagcttgttgtttggttggtattgtttgtaatggattgttgtatgttgcaaacgcaggagattctcgggttgtgttagggaaagtcgcaaatccgtttaaagagttgaaagctgttcagttatcaacagagcataatgcaagtatcgaatctgtgagagaggagttacgtttgttgcatcctgatgatccgaatatcgtggtcttgaaacacaaagtttggcgtgttaaagggattatacaggtctcaagatccattggtgacgcataccttaaaagagcggagtttaatcaagaaccgctactacctaagtttagggttccagaacgttttgaaaagccgatcatgagagcggaaccgactataacagttcataagattcatccggaagatcagtttcttatatttgcctcggatggtttatgggagcatctaagcaaccaggaagctgttgatattgtcaattcttgtccacgcaatgtaagacatatcacaacactcttcttgtcttgtttttttgtctggtttgaattggttttgttgtttgttgaatttgtggtgtcttgttgattctttcagggtgtggctcggaagttagtgaaagctgcattacaagaagcagcaaagaagagagagatgaggtattctgatttggagaagatagaacgtggcattcggcgacactttcacgacgatattaccgttattgttgtcttcctccacgctacaaacttcgctactcgaactccgatctctgtcaaaggaggtggtctcctctcagcccataatcccgttttatagatcattttttttctccttatttgaaccagaatttgattttgtttgcttcttttgttacaaaattgtgtgaaaatcttacttctttaattattttctgatcgaaaagtgtaaatttcctctcttttttcctcaaatctcaattgtactttctgtttacgaaatagtgaaacagaatcgaaccaacattcatcaatctgaatttgaaccgaattttactcttataccgaatttaaaccgaaatagaatcttattctatccgaattgaaccaaaccggaagttgtggcagtcaaacaaaaaggttcagtggaaaccattttcccggaaaatcctttcaggagctgagaaagtgaaagctgtgaggtatg

SEQ ID NO: 35039 - DNA, 3000 bp, Unknown; identical to SEQ ID NO: 35038
  misc_feature (1)..( 3000): 2750-1469P.txt file - cDNA_ID_3084179; gDNA_ID_2926252; Annot_ID_204407

SEQ ID NO: 35040 - DNA, 3003 bp, Unknown
  misc_feature (1)..( 3003): 2750-1469P.txt file - cDNA_ID_3084185; gDNA_ID_2926252; Annot_ID_204404
cttatttgttcattcgttttctgagattctatatcaaataatagtcagtcatcactagaaaatgctcaaacaactaatatgattcatacacatttcatatcatatgcttggcaatattggaccgaacttcatgatttttctgtccatgaatgcaaatgtgttgtgatctctgagttacatctcaaaatgtgaacttgacatcatattctcgttcaaaaaaggaagataagacaaaacatttaagaaacatttcacaatcatagggggcaaaagatcaaaatttaaaatttcggacgagagtggaaactatcaatctttaaggggatgatttggcaaaagtgttgtttttatttttcttttactgttttcgttttatcatctttcaacgtctttctctcccgacggccaaaaaccccaattttgccaaatccaattttacacccagaaaccctaattttccttactttgatttgattttgtgatggacgattatacaagagagatgatggatctcaagactttggtcactcgaaccctagagaagaaaggtgtcctcgctaagatccgggtaaattccctctacttctctaccatacattattcgcagaaatttttgagtggaaatgagaacagagaagtgattcgtttgaaatacatacattactctttttctagggttcctgctattcagatcgaaatgctcgatattgttaattgcctatgcatctggaatcttgctgatagtttatttgtgtttgtaggctgagctccgtgcaagtgtgtttgaagcaattgaagaagaggatagagtgatagagaacaatgaaggaccgcctccagctctgttgggaagctgtaatgatcgtgcaaggaagcttcatgcttctccttcaggttttttcttcacaagtttttgcttttatccttttaaatctttcctctatgaatggtttggttctaaatggcatctcttggtttgaaatttttgttgaaatgcaggaaggttactatctgcgttgatttgtgaatacttggactgggcacaacttaatcacacgctcatagtttatcaacctgaaagcaatttggtaatcaatataatcccgttttcttttgctatgtttcattaagaagattgttgatgaatttttctcactaatctggtgaactcctgcaaaacctattcaaagccaaaagattcgtggaagtctgagttacgcgactttaatagcaacaatggttttgagctcaatagaaatggagatagtggaccactccttctcgatgttcttgaagggttcttgaagtttgaggtatttctttctttttttcccctgaagatgtttgcagccaagtgtgaaacagaactttactatctataacttcttctcttagtttacaatctttacaaccatactctaaacaaattacaatagtccacctgtagtatgtgtgatttatgagttgtagtgttaacagttcctattatgtaagtgaagatgatcaatactttacacccaagctttacaaacaccaacttacataaaatcttggtactctgtcctcgcaaccaagagaagaagttatagatagtaaaattcagttttccaagaaaaataaagtctcttagtagagattagagttcttcagagatttgaaaaacacgtttagcaaatttcctagcctcaagttctcttcacatctaagaatcatgtttccatcctatcatagttaaaaccattatcatctgtttttgccgtatgctcctcagatgtagtgatcaacttttttttgtaatgaattttttcttcagagcatgacgcagggcatgggtagtagttcaaggagagattcagaaacagagtcgtcatcaagccttgagtccagaaatcctcctcgcagatcatctgcttctgatagcttacctcctcaacgaaggtacacatatcttcaacttcttattattatgccaaatcaaagatcgttactcttcgacatgattgctttatttaccttcaaataaatgggcaggccggtttctgcatctcaagcatcgggtgagtcatcatttccctagtttcttgaagtattggttgaaatacgtatgcttcattattttttgataccaaataaatatgacaagatgttacagatagaagagccgggttgtctacatctgggtacagaaaagatgaattcaactggagacaaggtaaccaagatacacatgaagaggtaacaagagcttcagcggcgctggaaaatctacagcttgataggaaaactcggaacttaacatcgtcttggaggtaagctttcaaggaagtctcattgaatcccacattgaaatgaaaacaaagcaagttgtggtaaatctgatccatcgggcttgcttgtgttgtaggaatgtgagggatggaacaaatgaagaagaagggagagattgatttaggctttggataaacatttcagcttctggattagtagagtaatggtttgtgtacgtgatatatgtatgtttctcctttatttgcaactgcgttttcaattagccttttttttaacgcacgaacctctgtctccttgagaacaaaaaacatgaaacagtaaaatgttttcttttgagatttgttatgggaagagaagagttcagaaagaagaatcaaagaaagcacaatgtggttgaatattttcattcacttgcttcttattttagtgtctccaaaattattatgtctctagtaataaacaaggtttttgaatgatgtgttcactgtttgttttactcgtactttttttttgttttccctttagtcttctctctctctctcgcttcttcgtttaaaactttaaactaaagtatcgaagaagccaactctggatgacgcaaaagcttctctcagaacggcattgtagaattctccggtgaccaaataatccgattgcattagtagggaatctgttattttgatctgatccgtcaaattggcggtaagaacaatg

SEQ ID NO: 35041 - DNA, 3000 bp, Unknown
  misc_feature (1)..( 3000): 2750-1469P.txt file - cDNA_ID_3084233; gDNA_ID_2926253; Annot_ID_143072
tataccactatatcagtattgtataatgaacatgcaaattacatttttaaatttacccaccattttgcacttttaccttatacaagtgaaaagggacaatagtactaggtcccactacgatataaaaaggaaagatacgatttttctttatctctaaacacgaaacatatactgtatgatggtttgtaatagatggtataatcagaatgcatttgaatagttgattaacattttcgctttcgtaaagatgaaacagagagatataattctacaacatttgccggagtccaattgtccaaaagtaatatctttaattcatttttaacagaaaacaaaagtaacatctctatgaatcatggtttatagcccattaatatgtagttcatacatatctaaaaatatattatcgtctactggaaattattgcaaggagattcctaatagactttctaggactattaattaatagggctattgattatcagttgtttcataagttaagtaggaacactaaagtataattgaacaatagactatttatttcgtatactgtattagtgtattctaaattgtattttattacgttccacgtaattgggccataagaagacccggcaatccacgtgaaagagaatccttcccactagcatccacgttgccacattaatttttaaatagtttctcatcaattaaacattataatattaatcaccataaacatcaccataaattttttgttggtacaacaatctccatcttttgtttgtcgcatatcttcggataacaaactttttttagtggaatgtgttttctaaatggtaaatgaccatactatatactagtagaacgtaaaaaacaaaatgctaaatccaatacaacttcttaaaccttgtgtaaaacttttaaattagcaaaaaaaatattaacgagatacctatcaggctactacaccacaattaatctcagagagcccaaaacaataatcattaattcattacatatccctaggagaactcctttttaaaatctttcaaaaactttagcatttccgatggtcaaaatcccccaaaataataatatggatccgtttccacgcgctccttgcaatttataaataaaattcattagaccaaaccttattttttacccttatgtatatagtatgtttgatttacatgagggaaaaaaacgaagtcgttacatgtcgtggtttacacgcgataaagaagagcgtgagagaatagtgaatctaaacctgaactgtcttggtcattaagtgaaaaatgcatggaaaatctcgagttgttgtttcctacatctctctgttttttttgttttaataaagtttttactatttcctatacgtatcaacttgtaagcaaaacctttttcaaactttgatccataaattaaatacatatcgatgtatctcgtatatatatattacagtgaccaagctcttcatttttttctgtattattttttgttgtagtaggcttttgttttgatggaggaaaacccgcatcgagtttcacgtagaaaccatggcgggacccactgtcaaaacgacgccgtggacgaagagaaccgtcgacgacggcataaccaccacactcacggcgacgaagtcaaatgctccagtaagagatgccgatcgtgggcggctgcggcgattgctgactgtgtagcgctttgttgctgtccatgtgcgatcatcaaccttcttactcttactctcgtcaaagtcccgtggatgatcggacggcgatgtctcggcggcggcggtcggaataagaagaagcggagagtaatacacaggaggaaacgccgcgggaatatcaacggtgaagatgagttttatcatcataataaccatcaccgccggtttgagacagccgaggagggtgagaaatgcggctgcggcggtggcggaggaggatgttatggcggcggagattatgatgatcaccggtttgtggtagagagagatgggagtttaacgaaggaggaggaggaggaggagagaacgacgtcgtgtaaaggagaagatcatgatgagtcgcgaataagtgcaagagttgaagccgagagagtgtggttagagttgtatcagattggtcatcttggatttggtagagtctctttcactggaattcaatgattgatcaatttgtaggattttttagttatattcgaataaatataaaatgtgaatgttttagtctatgtgttctattctatgataggtctcgctcgtgagcgtattcgcatatatacatctcgatcgatccactatgctagaaaccacatttgtgatatataactgcagaaatttgttcattccatcaaaatatcatgaattagctcgacagtggacctagaagtgttcacattgttagagacttatacctttaaataatttgattcataaaactagttttgaaaaaaaaaaaaaacagagaggaagtggttattggtagtttgatgattttttatcacattccaaagcttttgtcattcaatttttttagttacaattaattctatataatgccagtaaattatactcagtatgattggaagatgatttcttaacacttataagttcatatgatttttctcatattcactaaatacttaaaaccctatacaattagaatcttttatttaaatcaataaagtacaaactatataacaaaatgaagctagcctaccaataacacccaaaatatagcaatgggcccgtttataaacagattgaatagttgggctagataagagacccactaacaaagttctgctcctaaaccgaccctgcgcattttagtcggcagcaaaatttattacgatatcgtgctctaatgtgcgccgtccgcgcacaataccctttcctctctgcttgtgcctgacatagttgttattcagttcattcctgcttccccgccttcctcttttaggaaccaatagagctcgagagagtagtcgagtgaaacaataatg

SEQ ID NO: 35042 - DNA, 3000 bp, Unknown; identical to SEQ ID NO: 35041
  misc_feature (1)..( 3000): 2750-1469P.txt file - cDNA_ID_3084233; gDNA_ID_2926253; Annot_ID_204450

SEQ ID NO: 35043 - DNA, 3000 bp, Unknown
  misc_feature (1)..( 3000): 2750-1469P.txt file - cDNA_ID_3084245; gDNA_ID_2926253; Annot_ID_143068
attatatatcgatgagacggatagaaacgcagctaaacaatagaaatgctcacttacctttgtgtcatcacttgtcccgtcaccttttgcgccatggtcaagcacattgattgttccggaacttcccccttcggcgatagaccttcggtttcctttccagtatacactgtacctagcgtcacaagtcccgaatctcgaagagaataaggagattaagaggagaaagttcagggaaagacatttcaatgttagtctacacatctttaatattgtaaacgatttgtttctagggtagaatttgtttaattatgagatgatataaaatggtaaagcgagggtcatatttataagtggagaaaaaacactgttacgcatatgagaatgaatctatgatacagttaaacagttagatgaggacaaaaagccttggaactctcttccttttcaaatcaagcatgtttctactcatttgctatattttattaaattgacatcaacatctttacttacgatttggctttgatttgttgttgaataggcgtgttacttagaaattgttttggtcgctactaatatcttagtgtgttctctagcattagttctaattttcatgcaatggctatgtattactgattttgaaggtttgtgtacagttttttaggcgctagaaataactgattactttcgtttagaacagagcataggtccggtcagatacttagccggtcttggtaagctattcggttcaatgaaaaccaaaatccatgtatcaggcatcaatagaaatggcgaaagagtcaagaaaagttgccatacagatgtcacgtaaacctcatcatcagataatcttatttatgtttagttcctgaaatcaagcaacgtaatttatgttaaatcgatggtgtcactgaatcttttaaaatcaagtaatcctttgttgtcaactcatatttgcaaagatccattaattgcaagacaataagatgctcgatattgttttctgtttattgttatagagagcttaaaccaacatctgaggatttctggttaattataagcatattagtaaggtccagtgtatgaaattaaactcgtgatctgaatacacgtgcatgagtccccaggtaaaaggatatataggctgctataataagatttgcacgttgctacgtgtatgggtgtatgcagcccatgcgtgttgacaaactttgttgaattattctatttgatttcatgatcttgagaagcctattgcttaccaaaattggaataacataatcactcattgtagaagttcttctaatcttgttactattttattaatttttctattgcttttggcagttgaaagtttgatatatagattttgttttcaagtaactgatttcttgtcctctttctcacaatatcttgaatataataagtacaagataggtaatggtacttttttttggtttaaatgagatagttaacgttgcaacgtgagactaattttgcaatattttgatggtttaatcattttatatattatacaggggggaaaaatgttggatggcaaatcggtgaagtggtcataactcgcaagtcacatgaacaatatttctagtactccgtagaattcgtgtatgtccaagtccaacaactcgcataagacgtaaaatttgaaaatttcatcattgtgtattcttaacccgtgatttgatgtaacgtttactacgttcgtctataatctagagcattgtaataggcgtgtatgattgaatcattttaatagtgactatttgtttttggtcaacttctatattaatgttttacatgcatcgtgttgtatacttgtattgcacgcaattatgtgaataacgtcaatcgtgtacgaaattcactcttttgtcgtaaccatttatttacaattggtgattcctatctaaaatcccaattggcaattatttattactcggacaaaaaaatttaaattcaaaaagtgctagttacaggccttatcatttaagagaaagtatatagcaagcccatattcatttaaggcccatcctcgtgtaagaccacaccaacggtcgaatcagacacgacatcgaatagcgaactaaatcttgtcgctttatgtgatgacttggcgatttcgtaattgagatttccttttctgacaaaacaacattacacaatttaacaaataccgaaaaagtgaagaacgagaatctgtgtacgccacgcttcgcttaacgtttcatactcctctaactagtagccgtccgattagtttctggcttttcatgacctaaatctaaccgtcaattagagaagcttacaatacacttaaccgcaggaaagatattcaaaaccattaaaagcagtcaacacaaatgacgtgagtcttagtaattccaaccaaaacacgccacgtgtgcggatactcttcttccttgagagcgcggacgtcaaaactaactatcaactgaaactttgaaactacctattggggtccgctctctctctctctctgccatcagaagaaaaaaccaaacaccgagacaaaacacatcacgaagaagagagagatttgccattttcggcaaggaagtgttttattctagggcttctctagttgctgcgtagacaagatggtggagtgaaattgcggcggtgacttttcaggtatgacggcgccacgacgtagtcggcgatttactttttgtgtttgtttaacttgtttagcttgacgctgagagattatggaacaaaacatctagttttacagattagggaggtttgaggttgtggttaactttggataaatctattgttaaatgtagagctaggcttttgggagctcttacttattagatcttattcactgtctctgtgctaaagtaatttttgttccaatttggttgtgtgaaagtgatttaacaaaaacctatgttttgtttgtgtgtttggacttaacagattgacaaattgaattaaagatcttgaatacatatg

SEQ ID NO: 35044 - DNA, 3000 bp, Unknown; identical to SEQ ID NO: 35043
  misc_feature (1)..( 3000): 2750-1469P.txt file - cDNA_ID_3084245; gDNA_ID_2926253; Annot_ID_204446

SEQ ID NO: 35045 - DNA, 3000 bp, Unknown; identical to SEQ ID NO: 28749
  misc_feature (1)..( 3000): 2750-1469P.txt file - cDNA_ID_3084253; gDNA_ID_2926253; Annot_ID_204444

SEQ ID NO: 35046 - DNA, 3003 bp, Unknown
  misc_feature (1)..( 3003): 2750-1469P.txt file - cDNA_ID_3084257; gDNA_ID_2926253; Annot_ID_143065
cttgtgaagtcctcagatcagatttcattggtaagtttattctgatttacaacatctctttctactttcttctccaactcaaactaaaagagctctagatctacacattatccgaatgctcttgccttggaaggatcctaaaaatcaaagtactaaagtagtgaatttgggactgaacctctcctcgattttcaaatcctagtggctagtactaaaatcatgttgtatagactgaagttctgttctttagtctacaattttttccaatatgtatcatcgactttctatggtcacacatctttggattaataagtcgaaaggattgctttaagtagataagtatctttagagaaatagtttgacattctttggccttggaaagtcaggggaatcaaaaccaactgtcataggcatataagtccttatttccttgagagtttcattctttcttataccggtttttgctcatgatgagtttgttttttgcagagataagaacgtttgaggtgcttctcagaacatatgaagtgaaggaagtgaaaatggataccagtagcatggttggtgagagccacgaggaggacaatgaaggaatgaggccttgcaagagaaagcaccgttcaaacgaaaacgacactgtttcacaggacaactcttctaatgcttcttcagtcgtcatggctcggccttgtagtgaagcaagaggtcacaccggttacttaacgtttgcaagactccaatgtctagcttagtccaaattctccaactacattatgatattcatgtattagatattttcatgatttgtcttattacgctttctttttgttaaaaaaataattgctgtgaatttgtttctagaatacaaaattcgaaatttggtaatgacaaaaccaaaatccaaaattttgaaatatgataaatagtagtttctagagataaattgttctacaagtaatatataaatagaaacgcgtttccttttctcgatgggagaaggagacatgtaatgcactctataaatatcgaaaacgtctgtttaattttctttctcttacaattgtctattcacaaaccctagagatccattcttcgaaagcctgagatcaaaatccaaattcttttttcctcttcttataattttccctttatccatcaagaaattatgtgtcccttgagatttgtattagtgttcttctcggcggtactcgcaggatatatcgcgtggaggacggtgaattctacgccggaactattctcagacgagttattacaagccgaagccaaggaaaaacaaggactcgatttcaagagaaagatggataatgggttatggacgttcgttgatatggctagcggaagatacctttggagaaatctcaaggagatgcgtcagagaagtcaatgaccgatataaacaaagtttcgcctgtttggcttctgatatgtagaaagttgagaacaagaaaaattgtttcttcgttttcgtaaatcttgtccgaattcatctgaatttggtagtttcattcattctttaatttggtattcatgtacttgaatttcatcgttcgtataaataaagaaaccttattcttcccgccaactctaatatattaatctgaaggtaaacgaacgaactagatgatagagatcatatcaaacccacaaatttaaccataaccaaccttaatacataattacatactaaagagtaaagagttaacaaatcttgtaaaacaagttgataaagccttttacaaagcttaagtcttaagatgtgaatagcttagcttgtggcttaggccattcacatcggtaatgatatgagtagattggaatttctttatacataattttgtttttctaaagtaaaaacatatagaggaaattatggcctactttcagaaggttttggctaaaaaaaagaaaccaaacttatatagagagatagagatttaggacaacaaaaagcaccatataatataagttttcattgttcatatagtcctaaatcctaattagttatgcttttgtttctgcaattctgcttggatatgtttgtataactttcttgtaatttggatgaccaactattgtatctgatttcatatcaatgaatgaatcagatgttaaaaaaaaaaaacttgattcaatctgtatagagtgatttttaagggactacaataacatgggcccaaataaatgtttaagataagctaagagaagattaagcccaataaggaattgagagggccctcgatattatattaaaagaaaagaaatgtagctggaaacgaaccggcacggatttcactccttacttttctccactccagtctctctcttttctgcgtttcctcttctctctgtggcgtagagttatagagaggaatttaggtcttcttctttggtttttcctttgctcttcattctcatactctctcgacagtgaaatcaggttcttgttttttttcgtagacctacatttttcgaatttcgtttttttcttcgtgccgaaatgtcgatatctctctttgtctttgccgtaccattttctgtagttggggattttagctgcattttttattttccttaggttctgggttatatttctctgtttgttagtgtcttctcttgttgtctgaagagtaacgaggtcgaatctgttcttctgcatgttagggtttttgttggcgttgtgtctcaacctgtggtgtaatgagataatcagagacccttttgtgaaaaagtttcgcttttgtcttctttccgtctatatgtttggtgtgtgtttctcgacttaaaaaatccatgctttctggtaaagtgatggtctttgtcattgggttgctttgcttctgttgatagtttcttctggtgttgttttgtttttgttttctgatagtgatgtgaattgcaaagttctgttttttttccctgttgatcgtttaaattttagctattattggtttcgacatgttgttcttccaggaatttggtatg

SEQ ID NO: 35047 - DNA, 3003 bp, Unknown; identical to SEQ ID NO: 35046
  misc_feature (1)..( 3003): 2750-1469P.txt file - cDNA_ID_3084257; gDNA_ID_2926253; Annot_ID_204443

SEQ ID NO: 35048 - DNA, 3003 bp, Unknown; identical to SEQ ID NO: 28748
  misc_feature (1)..( 3003): 2750-1469P.txt file - cDNA_ID_3084264; gDNA_ID_2926253; Annot_ID_204441

SEQ ID NO: 35049 - DNA, 3000 bp, Unknown; identical to SEQ ID NO: 28747
  misc_feature (1)..( 3000): 2750-1469P.txt file - cDNA_ID_3084268; gDNA_ID_2926253; Annot_ID_204440

SEQ ID NO: 35050 - DNA, 3000 bp, Unknown
  misc_feature (1)..( 3000): 2750-1469P.txt file - cDNA_ID_3084272; gDNA_ID_2926253; Annot_ID_143062
acaaggttacagttgaaagtgcagaagcagctcttaagtaagtgctattgattctttgcattttctatggtttagattcttttagtaacagaaaacattttaatttctatgtgaaataagctgatttcgcgcttaaaacttttatgtttgcaggtacaatgttgctatcaaatgtgccactataactcctggtatgtgatgtccttcgcaaatcgcaacacatatgctgcttgttccgatcagaggaagcatttttacatcttctgtatgttatttttggcagatgagggtagagtgaaggagtttggactgaaatcaatgtggaggagtcctaatgggacgatcagaaacattctagatggtttgtctctgtattgtcaaaaaacaatgcatgtttgctgaataggaatatcttggttaaattgcttgcgactttttattttatcctgttagcaggttcttttacaatctagtatctacacatttcttacacagtgttctatattttctaggaaccgtattccgtgaacctattatgtgcagcaatatcccccggcttgttcctggtaaatttatttgccttgttatgaatctgtgttaggatctgttttgagataccaaatgagaactcaaatcttttgtctttataggttgggaaaagcctatatgcattggtagacatgcctttggtgaccagtatcgtgccactgatacagtaattaaagggccaggaaagttgaaaatggtttttggtaagatcataccaaactatattcattagacaatgaggattcttcaatcatatagttcagattctaagtggatacatctcttgtctaattagtcccagaagatggaaacgcacctgtggagctagatgtatatgatttcaagggcccaggtgtcgcacttgctatgtacaacgtagatgaggtctgtctcttttagtaactggctttagttttggcatggttttggtttctgacaaccatgctggttttgtgacatgccagtcaattagagcttttgctgagtcatctatggcgatggcattaactaagaaatggccattatacttgagcaccaagaacacaattctcaagaaatatgatggcaggtttgtttttatcttcttggtgatttgaagtctgggtttcacttttcagcaagcgagctgctttaatatgtggtggaacaatacagatttaaggacatatttcaagaagtttatgaggcgaattggaagcaaaagtttgaagagcactcaatctggtcctttttcttaaaaaattgtgttctgcgtcctttttctttacatattcattaaaggtaatatgtgaataatactgttggtttaggtacgagcaccggttgattgatgacatggtggcttacgcagtcaaaagtgaaggtggctatgtctgggcttgcaaaaactacgacggtgatgttcaaagcgatcttcttgcccaaggtataaattaaaaaatatagttcttaaaattattatttttgtatcgatacagcaactaagatacttaatgcttcctttctttattcttttctaaatgtagggtttggctcattaggcctcatgacctccgttttggtttgtatcgttaaccgaaagccaatattcaatttttctttgcaaatgaaagtcttgatatgatatgttttgttcagctgtccgctgatgggaaaacactcgagtcggaagcggctcatggaacagtaactcggcatttccgactgcaccaaaagggacaagaaaccagtactaacagcatagcctcaatatttgcatggacacgcggcttagaacacaggtctcttgcctttcacacacggtctacattactagttaactgagttctgcatttctttatgcatttacactgacaacgttcttgtgtcttgtaacctagtttctcttgattttcattttgatggattttttttaccctttttgcttctcaagggcgaaactggataagaacgagaaattaatggatttcgtgaagaagctcgagtcgtcatgtgtaaacactgttgagacagggaaaatgaccaaggatcttgcccttttaatccatggtcccaagtaagtagtctttccttttctcactagcagcaacttttctattacaatctggtcatgtgcatgaaatacgaaagagcttaatctgtcttgaactttaatgtgaaatcaaatccaaactgatcctgttccaagctgatgaatgtgctgaaaactctaattaagttgtgtattttaatagaaaaccatatagaagccaaaccgattcatactggattaagttataatgctgttactgttctattatcgttcttgatggtttaataaaacatttttaatgcagggtgagtagggatttgtttttgaacacggaagagttcattgatgcagtagcctccaagctcaaaacacagttcaaagagcttcctcttgtctgaccattcctgggaattgggaacaatacaaaaataatgctcgcaataattcataacccaacacaaaacaaaaataatattggcgggtttatatgaatattttggttggaaataaacgtttttgcttaatttttccaatttattttaaaaatttgagtgacaatatctgttttcagtttcgtatccaacactaatttatacatacactaaaaagtgatcaatggcgatttgcaatatcagttttgctgggttaagtaggtgttaaaattgttgaaaatgaacggtatacttgaagaaattttgtccaagaatcaaaatctaaaacagagatcataggcgtcggtttaatgtttgtaaattcgattatttatagcagaaccgtaccgaaccagaccgggactgctaaaacccttcttttagttttcgttgtcggctcagtcctcacttcaccggtgcgttaaacccttttccgttctcattccctctcttctccgcatctctcactctctctgtgtatgtgtgatg

SEQ ID NO: 35051 - DNA, 3000 bp, Unknown; identical to SEQ ID NO: 35050
  misc_feature (1)..( 3000): 2750-1469P.txt file - cDNA_ID_3084272; gDNA_ID_2926253; Annot_ID_204439

SEQ ID NO: 35052 - DNA, 3000 bp, Unknown; identical to SEQ ID NO: 28746
  misc_feature (1)..( 3000): 2750-1469P.txt file - cDNA_ID_3084276; gDNA_ID_2926253; Annot_ID_204438

SEQ ID NO: 35053 - DNA, 3000 bp, Unknown; identical to SEQ ID NO: 28745
  misc_feature (1)..( 3000): 2750-1469P.txt file - cDNA_ID_3084282; gDNA_ID_2926253; Annot_ID_204436

SEQ ID NO: 35054 - DNA, 3000 bp, Unknown
  misc_feature (1)..( 3000): 2750-1469P.txt file - cDNA_ID_3084286; gDNA_ID_2926253; Annot_ID_143058
tatgtttcagcagcattgcagggtaagttgttaaaaccttcacttcattagcaagtttggtaatactgtaactgaacttatgagctgtcctctatagtgtgatactgtaaagagggatatatgctttttgttttaactcattaattttcaaaggaaagatggtttagctgccaagagagacttagaagttagaaccactgattttagattttagtgtcttattgtgagagttgctttgttagtggactcttcactgttggctcactttttttttttgcatatgatcttgcagagaaaatcacttccagagttttggcgagatcgtcctgtagtaagttgcttttctctggtcacatatttaactaccgcaccgtattaagttattaacagttcctccttgcccgttagctcatgcccattcgatttctacatgttttactctgtagaatctggcaggcatttacagtttgatgaccaggacacgatgtgttgtactaatgtaatcttattgtgtagccagctgaaggttggaaggaacacaactgtatacctgatgagcactatgttcagacattgctatctgtaagatcaatgtttgatccaaccatgtgaattgttgtttagaaataaatagtattactaatcaaatctggtaatgcttcttcaaatttcagcaaaagggtgtagatagcgaactcacacgaagatcactgacacactcagcttgggacctttcatcctcgaaaagtaatgaacgtcgtggatggcatcctatgacttacaagttttctgatgctactcctgatcttatacagtccattaaggtaagcatccgtaagaccaacattttatttggtagaaatgaaactatccattacaatgtatgtatctctttttctttttttcttgccatggctttagccctcttacaaacttaaaacataaatagaatctctaactaaacacattgattctcagggaatcgacaatatcaactacgagactgaataccggcgagaatggtgtagcagtaaagggaaaccatcaccgtgcttcctcttcgccaggaagttcactcgtcccgccgctctccgcctactccgtgaagtaaacttttctttcactatcatagcttaaactaagaaactaacatcacaaacattttgatgaactcattgtgggtttctttacttcctctatttctttggcagactatcttgttagagggcaaagagcatgacaataagtagatccttcaccatttaaagcatatattacacataggtacgtaagataaccaagagttactatgtttgtacaattgtactactgtgatttcatctgtaatacttacgatgacgaatttacatagaaacttacaccatttggtaaatgagtaaaagccagccttgataaaagatggacggtagagaaagagctcagcaggggtgacctgagaacacatgaaaacgagagctgtaacaatgacgtagcgtcattacagccgttgattactcgtgtgttctcatatcaaccctgtcgagatccactaccttcatgatatattgatatcttcttgttattacattttgagttttggtttgtctcaaacatgctggaaactataaatacacagacaatgaatggattgggtagtacacaataacaccacaacaattgtgtagtacacgagcaagttatgtggcattcattatgtttgggatagtacaagaaaaaacttcggacatgtgtactgcaaacttgattaaaagaagaaaatcatcatcattgtacttttctgaaagtacaacggcgagttttgtactagcagaatttccgaactttctatggtagtattaaaatttctctatggtccctagtccccatattctaaatttagatcaaagtggcctcacaattacgaaaagtggggcaaagttacaaaagcccatattagcaattttgtttaataacttgcatggagagtggggaaaagtaataaaagcccatattctttgtgacaaaagagagcgcgtaaattttgcatatattggttttagtcccacatcgtaaacacagagagaagaataacaaactcaaggcatatataaaacggagagagctctcgaagaaaattcacggagccgtgcaataagcacatagcgaactattctttcgccttttactaaagaataccgtgtgcttgtcgtaccaagcggcatacgcctatttttggagggttgtctcttactgagattaactctatcaatcaataacttgaaaattttctcaataaattaattttcctcaacattcaatctttaatctttaaacgtattcctcaataaatgacttacgagtaactttccatcaagtgttcagcttaaacaagtcccacatcggaagtgtatttgcaaaccaaaggcaaagttttgctataaaaaggatcacgatttacttacctaagcatacctttctcggccttttggctaagatcaagtgtagtatctgttcttatcagtttaatatctgatatgtggaccatcggttcacacgatattaactcaatttattgagggagtgagccatcaaaatagcttgctatttgtgctcacactattgcaagggattggcgtatcccaccaatcacagtgtaaagacttttgagttagtcatgttttaagttgttctcaaagtcgtaactgcagtaaaatcctgctggttcttcttttgtccctccatcgagttgtgtttgagatttcatcgttgcagaaagtaaatagttatgggccaatttaagttagtaggcccaactggcttcagcaattagttgaaatgctgacttagaaaaagcaacaagaccgatgaaaaatgatgacattatttcatcaggaagttagaaaatcatataaaatcgaaatcaagggagactaaaaaaattatataatgcaatctttcgatctaataaaatcggccctgttctcggataagcagataatg

SEQ ID NO: 35055 - DNA, 3000 bp, Unknown
  misc_feature (1)..( 3000): 2750-1469P.txt file - cDNA_ID_3084286; gDNA_ID_2926253; Annot_ID_204435
tctgaatagaaaacacgcagaaattgtggtgaatgatacctctgtctttcctatgtttcagcagcattgcagggtaagttgttaaaaccttcacttcattagcaagtttggtaatactgtaactgaacttatgagctgtcctctatagtgtgatactgtaaagagggatatatgctttttgttttaactcattaattttcaaaggaaagatggtttagctgccaagagagacttagaagttagaaccactgattttagattttagtgtcttattgtgagagttgctttgttagtggactcttcactgttggctcactttttttttttgcatatgatcttgcagagaaaatcacttccagagttttggcgagatcgtcctgtagtaagttgcttttctctggtcacatatttaactaccgcaccgtattaagttattaacagttcctccttgcccgttagctcatgcccattcgatttctacatgttttactctgtagaatctggcaggcatttacagtttgatgaccaggacacgatgtgttgtactaatgtaatcttattgtgtagccagctgaaggttggaaggaacacaactgtatacctgatgagcactatgttcagacattgctatctgtaagatcaatgtttgatccaaccatgtgaattgttgtttagaaataaatagtattactaatcaaatctggtaatgcttcttcaaatttcagcaaaagggtgtagatagcgaactcacacgaagatcactgacacactcagcttgggacctttcatcctcgaaaagtaatgaacgtcgtggatggcatcctatgacttacaagttttctgatgctactcctgatcttatacagtccattaaggtaagcatccgtaagaccaacattttatttggtagaaatgaaactatccattacaatgtatgtatctctttttctttttttcttgccatggctttagccctcttacaaacttaaaacataaatagaatctctaactaaacacattgattctcagggaatcgacaatatcaactacgagactgaataccggcgagaatggtgtagcagtaaagggaaaccatcaccgtgcttcctcttcgccaggaagttcactcgtcccgccgctctccgcctactccgtgaagtaaacttttctttcactatcatagcttaaactaagaaactaacatcacaaacattttgatgaactcattgtgggtttctttacttcctctatttctttggcagactatcttgttagagggcaaagagcatgacaataagtagatccttcaccatttaaagcatatattacacataggtacgtaagataaccaagagttactatgtttgtacaattgtactactgtgatttcatctgtaatacttacgatgacgaatttacatagaaacttacaccatttggtaaatgagtaaaagccagccttgataaaagatggacggtagagaaagagctcagcaggggtgacctgagaacacatgaaaacgagagctgtaacaatgacgtagcgtcattacagccgttgattactcgtgtgttctcatatcaaccctgtcgagatccactaccttcatgatatattgatatcttcttgttattacattttgagttttggtttgtctcaaacatgctggaaactataaatacacagacaatgaatggattgggtagtacacaataacaccacaacaattgtgtagtacacgagcaagttatgtggcattcattatgtttgggatagtacaagaaaaaacttcggacatgtgtactgcaaacttgattaaaagaagaaaatcatcatcattgtacttttctgaaagtacaacggcgagttttgtactagcagaatttccgaactttctatggtagtattaaaatttctctatggtccctagtccccatattctaaatttagatcaaagtggcctcacaattacgaaaagtggggcaaagttacaaaagcccatattagcaattttgtttaataacttgcatggagagtggggaaaagtaataaaagcccatattctttgtgacaaaagagagcgcgtaaattttgcatatattggttttagtcccacatcgtaaacacagagagaagaataacaaactcaaggcatatataaaacggagagagctctcgaagaaaattcacggagccgtgcaataagcacatagcgaactattctttcgccttttactaaagaataccgtgtgcttgtcgtaccaagcggcatacgcctatttttggagggttgtctcttactgagattaactctatcaatcaataacttgaaaattttctcaataaattaattttcctcaacattcaatctttaatctttaaacgtattcctcaataaatgacttacgagtaactttccatcaagtgttcagcttaaacaagtcccacatcggaagtgtatttgcaaaccaaaggcaaagttttgctataaaaaggatcacgatttacttacctaagcatacctttctcggccttttggctaagatcaagtgtagtatctgttcttatcagtttaatatctgatatgtggaccatcggttcacacgatattaactcaatttattgagggagtgagccatcaaaatagcttgctatttgtgctcacactattgcaagggattggcgtatcccaccaatcacagtgtaaagacttttgagttagtcatgttttaagttgttctcaaagtcgtaactgcagtaaaatcctgctggttcttcttttgtccctccatcgagttgtgtttgagatttcatcgttgcagaaagtaaatagttatgggccaatttaagttagtaggcccaactggcttcagcaattagttgaaatgctgacttagaaaaagcaacaagaccgatgaaaaatgatgacattatttcatcaggaagttagaaaatcatataaaatcgaaatcaagggagactaaaaaaattatataatg

SEQ ID NO: 35056 - DNA, 3000 bp, Unknown
  misc_feature (1)..( 3000): 2750-1469P.txt file - cDNA_ID_3084309; gDNA_ID_2926218; Annot_ID_203169
ccaacatctagttaattaatcgtagtttataatatctatattattcatatcacatactaataaattacattgtttatgttagattcatgtaataattaggcgtggatcagctctacaaaaggaaaacgattagaaaaggtattactgagtatcaagttcgatgagttggttggttgggatgagagataaatttatatctacaatgaagaatatagagcctacaaggttactagtttatttatttatcaggaaatgatgagcaatttgatcgaatagtgaaatagttttgacaaaaagaatcattaccttttattctttcatagacgacgtccatatattgatcgactaatattcttaaaactaaaggctatcaactttttatttttcctttgaaaatggtcgaacgagaatctgcatctaatacatggccgtgtctagattattaaacgcatgataaaataaatatttttttaatatgtcacaagaattttttattttttgttagtgggcgtttaattaacttttgttattaaatattttaaaaccatatcatatccattatatatcaattttatgttaaataactagaaaaatacgcatataaaataaataaataaaactgtaattttaaaataatctagaaaagagaaatattattaaaaaaagagacgcctttactttgtcgtgtcaaccgaaaatcaggtaatggctgacgtggcaaaactctggtcgaggttgcacgcttaggacccacatatacctaagagtttggagaaacggttgccgttagcagtttagtcatcaaagactttgactccagagaaatagttttttttttttttttggggcaaaacagtagatgttatgaaattaggagattttttttctttccattttgtattttggacaaaaatttagttatattctgttttttttttcttccataaagtgcacagtcctcgaatttacccatttggtggtttacaataagagcacgtcgcatccaaaattgtcctgtgaatgtgatatatggtcaaaagaatattaacatgcatgtctcatacgtacgaaaatatgcttgatttcattaaatacttatttagcatgaaaattatttctcacataccggtaattaattgattttcagtattagactttctagctttgctaagaattgcattgagtatatatatatatatatatatatatgtgtgtttttgtgattttgccacatttctttttacaaactttggccaagcgtaattagctcatcagccataaattaatcacgcgtaactaaggactcgataaacgggattaacgtgatgcggacaattatttgcatatgatacttttatgcctcgtagggttccacatgttaggtagagacactcttgattccttacacgtgaggtgtcggttcggaattttgatttgaaccttgccttaatgtcatgccatattgccatggacgcatatttatatataacttcatacacattaacacatgatatatatattttacttctatgggtgtataatgtaacatacgaacatataacaataaatatgtcctttggctaccgaatatgataatgaatctatgatttattacgttattgttcaagttaatatatatgtggaaacaaagatatatgtatatatatatgaggaatgcttacactaaagtcgtttgtttcttgatgcatatatatactgtagttttttacgaatatgaagagataactggttgcgaaatcagaaagcttacaaaaattaagaaagtatgtatatatatatatatgaaagtgtggtttgttcaatcaacaattgatttaggttccacaattaattaacaaaaaggtgataatttcgttatcccaaaaaaaataaaaataagcttcaatcaaatgtaaaccgaactatatctgaaagtagtggtcataaaaataattgtagactattttagtcccataaccacgtttccctttttaataaggtttccttctcctagaagttactaagaatcctattcaaattcttctaaatctcgtaattaaatcatgatgcatgcatatgcatcgatgttttctacatcagcagtggaagcttctatgagattttgagcatctgagattctagagtatgagaagaataaaattcaccggcgagtcatgaagatgacatgtgaggcaaatttcagataaaatggttcaggtaaatggacattcaaagaagaagtgaaaatgggattaattaagccatcgagtgaaaaagcatgtagttaaattccgttgagaatctgatatttgatcttactgcaggagggagtcttcgaacaatgaatatctgattctgccggataaattattgaatcgagttaaactcacgagtgaataaacgtgaatgactttggcacacaaccgtgactcgaactccgatgaatatttgtcagcgatgagatactaagccacgtggcattatataaatttcaacagtatagcatatatagctaaaagaaaataatacagttataacttataagaaggaaatgttccgatgcagttacgagaatcttttggcgtattataaaattacatgctaggagcatgattggctgatacaagtcttaatgcggtaatcgttaaaataataaactaaagtggtgattaaaaatgaaaaaatccttcaaattattttgaatttttacaattgtggaaccatgttacagagcatggtatttcaatttttatcgtactactactactacggtattgtttccatttttttaataataacacaaaaggggttaaatcatgataaataacaaaaatgaaggaccaacactttgaagagaagattattgcctaatgtgtattttcttgaattttcaaattttcattttgaaactttttgattgaaaataattggttctgttcgtatgagttcctgagattatttattaattaatatatatactaaaaaattaggagcaagatg

SEQ ID NO: 35057 - DNA, 3000 bp, Unknown; identical to SEQ ID NO: 35056
  misc_feature (1)..( 3000): 2750-1469P.txt file - cDNA_ID_3084309; gDNA_ID_2926254; Annot_ID_204483

SEQ ID NO: 35058 - DNA, 3003 bp, Unknown; identical to SEQ ID NO: 28758
  misc_feature (1)..( 3003): 2750-1469P.txt file - cDNA_ID_3084324; gDNA_ID_1971813; Annot_ID_175854

SEQ ID NO: 35059 - DNA, 3003 bp, Unknown; identical to SEQ ID NO: 28758
  misc_feature (1)..( 3003): 2750-1469P.txt file - cDNA_ID_3084324; gDNA_ID_2926218; Annot_ID_203158

SEQ ID NO: 35060 - DNA, 3003 bp, Unknown; identical to SEQ ID NO: 28758
  misc_feature (1)..( 3003): 2750-1469P.txt file - cDNA_ID_3084324; gDNA_ID_2926254; Annot_ID_204472

SEQ ID NO: 35061 - DNA, 3000 bp, Unknown
  misc_feature (1)..( 3000): 2750-1469P.txt file - cDNA_ID_3084348; gDNA_ID_2926262; Annot_ID_143234
gccaagaagataactacttacaaggaggtattactctctttgttccattaaggaattggtgatgtaatcaatgagttttcagtttaagacgcattagaattgatctttatatgaacaagtattcacttcaagaagcaatcctctaagttagttgttgagcattgtctcaaattcttcttctaatcaggagtcttgcccttatatagaggcattgtatcagaaaatgtgaaaatctacgtttgagactgtggctcttgtgattccaggttgcagacgaaattatttcagattttgccacaattaagcaaaacgcagagaagcctttgaatgaaaatgaggtatagcgagatggaaagctcatatcatctgtcttgagttatttggaaaaaaaaaaagctataacaacattctcttatgttcaatcagtacaatgagaagaacataaggcggagagtctacgatgcgctcaatgtgttcatggcgttggatattattgcaagggataaaaaggaaatccggtggaaaggacttcctattacctgcaaaaaggatgtggaagaagtcaaggtttagcttccaagcttttcctttcagttatctcatctatgtaattgctctctctcttcgtcttctctactaatctctctacctctatttgcagatggatcgtaataaagttatgagcagtgtgcaaaagaaggctgcttttcttaaagagttgagagaaaaggtgatcttctttctgtttgatggaaaatttaaatacaagactctcttagaatttgagatcttgttatgcatgtcaatagatgacaaaagttattgatattgcaggttttctagaatccatagatacgtcgtgtattgaatcattttatgttgtcttaatgaaatgttaaaccgtctttctacgttttgcttataatgttactcaaatgttgttatcatcaggtctcaagtcttgagagtcttatgtcgagaaatcaagagatggttgtgaagactcaaggcccagcagaaggatttaccttaccattcattctacttgaggtacttcaaaaatctctttctcgtccgtagtttctatttcatgtttttcgatatcctaatctatttccatctctatagacaaaccctcacgcagtagtcgaaatcgagatttctgaagatatgcaacttgtacacctcgacttcaataggtaaaaataaacaacatttcttctcaaaatcaaaatcagttctgctatctcttaaatcggaattgaaatcttcgtaaattttgttgtgagcagcacacctttctcggtccatgatgatgcttacattttgaaactgatgcaagaacagaagcaagaacagaacagagtatcttcttcttcatctacacatcaccaatctcaacatagctccgctcattcttcatccagttcttgcattgcttctggaacctcaggcccggtttgctggaactcgggatccattgatactcgctgaccgagcttctattcccaaattcttcaagaagaagaagtaatgatctaattggtatactaaaaaattatacatctggtttagtgttcaattgagagagactgtaaaatcaattcataggccaacaaatgtttgtttatccaattttcctttttattcgaacttgatgcgatatttcaacggaaacagaaactattgttttaaaccaaaactaaccgtgttgaatctattggctattttccttctgtttgattggtctaacaaatttagtctccggttaggttggtttaccgaagctagttagattcaatttacgcgcttaaatggcgcgtgtgctaggaaagttcaaaatttgcaattcccatgcaaaaataatgttttttgtctggaaaaggaaaaaaagagacatcgcggcggttcgagggaaagaaaagcgaaattggttggggacacttcggaagaatgttggactgtttttcaattgccgtcaaaataaatactatatactattcttttcatcaacttaatctactcattctcaatacattttaaatcaatatcatctaatattatttagtaattagtgttggcccattttagtccaatctattagttacttgtttagttaaagttgaggtatatagacgtactaaaattcaagcacaaccaatttctcttctgtataattagatttgtagctgatatagtccacaaaagcagtagatatcatatcagccctaattttcttatagaacaactaagatatatcacaattgcagttttctcttgaataccactaagtactaacgtcacctagatccaatcctaacgtttatcatcttttattttatttttcgattttttgcatgctaattaaaacgtttctaaatatcttgacgtacatcaatgttttctgatttttactgactttaaagtttaaaccatacaaccagtcaagctaagtgcttttttcttttattttctaaaactgtgtatatgtataatttgcacacatagtacagaagtagcagtattgccagaaagagagaatcagaaagaaacttatgggttaagcaatcggacacactcactctcctccaccttcccaaaaccctaagcaaatatgtatataatatataaaacaaaaagagcctcgcaataacactgtggacacactcaattcttattttattcatctatatatataattaatatgatattcaaacatattctatatatatatatatatgtgtatatgtgtgggtatgtatataaatgaataaaggttcttcctttacctttgccttctctctctatctttcgctaagctctcatctcctcttctttcctctctctaaagctcttccctttgtttttattgatgtaattctccacttcttcatataagccttcaccaaaaaaaaaatcagctttaaatcctttatttgctcaaaaaaaaacagaaaactaaagagagaagatatcatcaaagaagaaagatcaaagatg

SEQ ID NO: 35062 - DNA, 3000 bp, Unknown; identical to SEQ ID NO: 35061
  misc_feature (1)..( 3000): 2750-1469P.txt file - cDNA_ID_3084348; gDNA_ID_2926255; Annot_ID_204523

SEQ ID NO: 35063 - DNA, 3000 bp, Unknown; identical to SEQ ID NO: 35061
  misc_feature (1)..( 3000): 2750-1469P.txt file - cDNA_ID_3084348; gDNA_ID_2926262; Annot_ID_204768

SEQ ID NO: 35064 - DNA, 3000 bp, Unknown; identical to SEQ ID NO: 28775
  misc_feature (1)..( 3000): 2750-1469P.txt file - cDNA_ID_3084359; gDNA_ID_2926255; Annot_ID_204518

SEQ ID NO: 35065 - DNA, 3003 bp, Unknown
  misc_feature (1)..( 3003): 2750-1469P.txt file - cDNA_ID_3084363; gDNA_ID_2926255; Annot_ID_143111
catctttgggtcaaaccaagcttcctcatcatcactcttctcttttttcttaaactctttttcatcaaaatctgatttgcttccatcagtgttatcatcaacttgaatgttgttatctactctaaactcttcactgtcactgttgcttgattcctcagacatgagataaagcgggttcaacgaaccaaccgcgggtgaaatgccaaccttcttgttaaagacacggttacgttcatcaccatttgaggaattcttatctgaagatccaacctcactcaatgaatccttctcttttgagtttgactggacaggataagtacagctacggtggtgacggcctttcttcttagacttgtcctctattacaagtgccttgatcaaagctttcacagaccttttgatttcagaatgtgtttttcttgacctctcttctgaattaagtttcttggacttctcctctggattatgcttcttttttgttttctctcctgagttggaagactctttggactttactgcagaactaggcttctttggtctttgcacagattcctaaagcaatgagtcccattggtgagagagttaataagaatataccataccgctgtaagataataagtttgcatcaacttactacatctgttttatcttccagcttgatcttgggtactggaataccatctggtgatgatggtatagtgttgtttacttcgttttttgttccttaaagcagaaaatagaaaatgttacaaaagataaacaattatggtcatgagcttcctttattaatataggagctgagaacattaaacagaaccagggtataaacttatctattactaaacttggcttcaagcacatatatccaaccaaaccaaaacatttgagattatgaagtgtgctatcttttgaagtactaaaacggaacgaggacatggcaaaaacaccaaactaaggtacgagagagcagaagaatcaacaaaactgtcttaccaggagcggttcttctacaaacgggtcttttgtgaggaagtcgtttcttgatgtaacgccaatggttgtgtttaagaatgtcaaatagaccccacatgaatccagggtggttttggattggggagcaagtaactttgtgacgcaagttcttccccattggttacttgtggtaaaaaaaaaaaaactcactcaagctataactttatcaaacctgaaaaacaaaacataagccataaaacacatcaatctccagcaaaatttataacgaaaacagaataagaattttgcagaagcagaacattttaatggtcagagaattgaactttggatcaatcttttacattacccagattgtgaaggttgaagagcatgaaaccgttcacatatatctaaatttcaaataatgaagacactaagtaataacataaaacgtacttatacgcattctacaacgtacaaggtcatcaatggtgatcccaaatccaaaacggtaatcgtgattttggcaatttacccaatcatatatacacgaaatggacacaatttggaaacggaattaatgtggttacctttgtgggaaaggtgaaatgtttatggatttgtgtggaacatcgtcttctcggttgccatatccatggcgaaagaaagaaagagagaagacagagcggaaccatgcgtgcgtgcgtaacatgaactttcagaaatttgccgttttcacgaattttggatttatttatcttgttttgtatattaaaatgaataaatgggccttataacaacatgggctaactataataatcttgatttttcatgggttccttaatgggctgacgattgaccaattggcccagctcaggacaatttttagcccctttttcaatatctggcacaataatattaacctcccttttctttttaaaatgtgaaactggtagtgcgtatatatcaattcttcaataacctccctgtagaaccaaataaaaattaacaaatatagaaaaagtttttagtttttattttgtgtaattgtaaatttgctctgattatctgtctaaagaaaatatatcgttttacgacatttgtgatttattcgcgactaaatgtcacatgcaaattttattgggtgtattgaatatttgaagtttatagagttaatgtggtagtcttgtaaaattcgttcttttttactctccacgtaatgataaaaccataacgtaatttctattttcatttccaagatggtactatatttttatactatttgtatttggctatttgctttcaacccattatcaagtcatttgactttttgccattaatacttaaattactttcttttctgatctcttacaaaaccaccacactcttcctcaaaagtcaactccttcgtataaaaaacatctgttttttaatagaccaaaaacattatatatgttagtataattttgtttttatttcttcgatattgcacgttggtttagtcaaaccgaatcggatagcgcattcccgaatcagaatgttaacaggatttgaattttcttgggttagaaattaaaaaattgtgccaacttcagcccacaaaaaaaaaacaacaataagatcaattataactaaaatctcttaatttggacaattttttttaagaaaaagacgtatatcaataaatatataaataatctgaacttaaatcaaactaatctttaggttcgtaataattaatagaaaagattttggccaaaagtattttgtagtataattttactaattccactaacaattagaataaaccaatccctaaagaataaaacttcacaaagtcaactcttcactttctctctcccacctatgtgactctgtctcttcttcttcatttggttccaacttccaacatatattcaaccaaactcaattctcaagcatctccttttcatgaacaacgccgattcaagtggctagagaaaaacgacatcgttttaaagattctaatctctcacttctcttaaacaaatg

SEQ ID NO: 35066 - DNA, 3003 bp, Unknown; identical to SEQ ID NO: 35065
  misc_feature (1)..( 3003): 2750-1469P.txt file - cDNA_ID_3084363; gDNA_ID_2926255; Annot_ID_204517

SEQ ID NO: 35067 - DNA, 3003 bp, Unknown; identical to SEQ ID NO: 28771
  misc_feature (1)..( 3003): 2750-1469P.txt file - cDNA_ID_3084395; gDNA_ID_2926255; Annot_ID_204508

SEQ ID NO: 35068 - DNA, 453 bp, Unknown
  misc_feature (1)..( 453): 2750-1469P.txt file - cDNA_ID_3084401; gDNA_ID_2926255; Annot_ID_204501
aagcttgtgagtctgtgacagacgacagttcaattatacagttgtttcggaatatgtacagaaccaacaaaaaaagtcaataatttcgtagtttaattatggaagcttttgataaaaaaaaaaacaaattatggaagcatgtcgtttttgtggcgacgagttcatgaaaaacgtcacgtagttagatattcaaaatgatcaattgccataaataacagttatggcccataagtaacagagatagtaagggctgggcccaaaaattcaattaagaaattagtaagagtgtcagtaatttttaccactaagaagatgacatgtgtaatcacaacgactaaccttcaaatcagacggtcatcaatgctcacaccaatcggtccgttcccatactctcctttaatggcttctgagagatatttaagtttagcaaaaaaatcctaagcttctacaatg

SEQ ID NO: 35069 - DNA, 3000 bp, Unknown; identical to SEQ ID NO: 1022
  misc_feature (1)..( 3000): 2750-1469P.txt file - cDNA_ID_3084430; gDNA_ID_2926256; Annot_ID_143119

SEQ ID NO: 35070 - DNA, 3000 bp, Unknown; identical to SEQ ID NO: 1022
  misc_feature (1)..( 3000): 2750-1469P.txt file - cDNA_ID_3084430; gDNA_ID_2926256; Annot_ID_204556

SEQ ID NO: 35071 - DNA, 3003 bp, Unknown
  misc_feature (1)..( 3003): 2750-1469P.txt file - cDNA_ID_3084446; gDNA_ID_2926272; Annot_ID_205177
cctcacgaatcagcgtcctcgggaaggtctagggttagactattggtgggaagatgagaggctttcaaaatcagaggacctggaggaactgagagacgcaatggactcgatgtcgaagatgttgaaagatctgaaggatttgcagaatcaacgagattgtgaggaggacgtgaagaagaagggtgttttacacggaactcatcaaaagcaaacctttaatcctgaatcatgttctgtgaatttcgatgggtttaacaagaacactgaagaatttgatcttgatgaaatatttgattatgtgtcaacagctgaagctctatcgatgaacttggacatggacgatgtctctgtggtgaccacgaatcaaaaccccgtctctgcttctgaaactgttgaagatagagaattggttgttcacaaaaatatggatgaggacaatatccacgtgtctgatatggacgacaaggatacgatgctaatgatttctgacaagaacaatgttttacctgaaaacttggatgaattcgatcaagagctagatcttgatcagctacttgattttgagacaaactatgaaagccttttgaagagttgtgagatggaggattatgcctcgatggtgactacaaagcaaaatctgtgctcaaatcctgaagctgttgaagatggaggattaatgattcaaaaagatttaccggaggataatctctgcttttctgattatttcagtgacttacattgctgatatttgaaactccctccaagataacagatgtttcaaggattgcttcggtttattttcgttagagatactttactcaaggaaggttccggtttgacttcaatcaattttccatgcttcattggatttctgggatgttgatctaactcaaaccggttcagttttggtttgccttaactaatgaagaaaccatccttttttcttttaagttttgtagtcttttctatcaacttgtcttgttttatatgtgtgatgttttcttcttatattaaaagtttaaaaccaatgagtcttactactctttttttcttgtatcaacttgtgtcttgtttaactgtgggatgttttctaatctaaccaacaaataatattaaaaccaatattgagtcttacaacagaaaacatctgtctgacaatctttgattaggaatgtctctgctttcttattaagtaccaaaaccagtcatcatctaggccagtattttgtgattacttcataacttgaaaacagataaagctttaccaaaatagagcagaatggctccataacaaattgcagaagaaccggtgctaattgattccattcaaaacgtgatgcagagaagtgtttatatggcggggaaagtttgggaaaaaacaccttgtaattggttcaaatgcaatgtagggggagcttgggtgttaagaaatgagttgggtggttttacttcacagtcgccgggcgatatttagtataagaagtgtagaggatgcaaagctaagagttttgctttggtctattgaaagcatgtcaagtcacaaagtcatgagagtttttttttgcttgccaagaaaaaggattggtagaagcagttaataggccgcaggcttggcccctcttttaaagctcaatcttttgctttaaagagttttttgtttagttccaggtgtggaagatgatggttttggaaacttttggtgcaaacaggggagcaaatcttattgctaaaagtgtgacaggagatctgagactgcagtcgtatgtggcaatgggtcctccaagctgcctggtaagagtttttgaggaagaaaggacttgcatctctgtttgttaatgcagtttcgtttcatgggctaaagttctttttgtgaactgatatttgcagtccgttgttgagtttgtttagtgtagggagtttgttttgtctcctgtagtttagaccctcacttttttgtagctatatggctttatcagtgtataaaagccagatgatgagaaaaagaaaaaaaaattgcagaagaacccttaatttatgacatatataataccactcatgaagaacagttgaaatttctgacaagtaaattgaattccaaccaagtcaaacacgtttattcgagtttcttttttgttttttctcaaagtataataagatgttgaattctgattagctgaaagatgacacgattttattcattgtttttgggtctaccaaaattggaaagtgagtaaataaatggctttctgcgacatttggctttcccatgttactaatttattaaaggaacagttgaacgcaataaataaaaacaaagacatgcactgatcacacaattcctagactcccaaattatcattctaacaggtaaatttcacggtgatatgttaaatatgtagcctgtaggtccaaatacaacaactactttttttgttttttttctattttcattatacatccttattgttatctaattagtaattatcagcattaaagatctgggacactcctgtttaaagctttcatcgactatttgcctattagttgtaacaatcagcctatggttataggtgaatctagactcatataatcaattctgacttaaaccttgtttgaaagtaaagagtgtttctaaacggttacctatagttgtaaacattcatgtctataataaaaacacaccaatatcaatttacacatagccaaataagagtctcaaatgagtcaaaatattaaaactgatttatgaaaacacaaattttataaaaataaatggtgaacaaatgttaagattagtgaaagttcctattttgaaaaacaaatgtctttgaacccaattaatatgccttgtaaaccagtccatagtatcaaactccaaaaaaaaaaagttacttttaatttcaaatatttacataaaattttgcatgcactactctgttcttatataatcttcgtcttcttcttctctgcttgagtcaacaagaaataaacagagctaaaatg

SEQ ID NO: 35072 - DNA, 3003 bp, Unknown; identical to SEQ ID NO: 28473
  misc_feature (1)..( 3003): 2750-1469P.txt file - cDNA_ID_3084458; gDNA_ID_2926256; Annot_ID_204547

SEQ ID NO: 35073 - DNA, 3003 bp, Unknown; identical to SEQ ID NO: 28472
  misc_feature (1)..( 3003): 2750-1469P.txt file - cDNA_ID_3084462; gDNA_ID_2926256; Annot_ID_204545

SEQ ID NO: 35074 - DNA, 3003 bp, Unknown; identical to SEQ ID NO: 28472
  misc_feature (1)..( 3003): 2750-1469P.txt file - cDNA_ID_3084462; gDNA_ID_2926272; Annot_ID_205172

SEQ ID NO: 35075 - DNA, 3003 bp, Unknown
  misc_feature (1)..( 3003): 2750-1469P.txt file - cDNA_ID_3084465; gDNA_ID_2926272; Annot_ID_143454
aacatggagctccaagaaggtgacatgtccaaggctttggttgctttgcatccaacaactacttctattccaactcccaaactaaagaacattagccgtctcaggacagagcaccaagtgtaagctaatatctcctcctatattttatcttccatataaattttggggaaaaaatcgctctccatctggttttagaacatgcgggtcagccagggttatggcatttttatatatttcaccgatcggcccgagctggctctggttgactcgtatgccaccctgcattgaacaaaccagtaggagacaagcaagcaaaacgttttaagataaggtctatggtaaaatgacaaggtaactgataaatgtgtcgtctatttgcaggtacgagctcccagattcacatcgtctccttgatggtgtaagtcaatttttaactctctctatactcgagttgtttcacttgagcaacactgtttaaaagtcctcatttgataaaataacagatggataaaagagaaccagatgatccaagtccttatctcttagctatatggacaccaggtgagaataaaactgcaatgtttcattcatgtgtctacagtatcaaagaaagtacagctagagctaaaaagcatttgaaatagagtcggttaaatatgaaagtttgaatctgtaaatgaaagccggaacgtagcattggtggatgttatatgtaaattagtttttgagattggtctaatgtagttgtttgactgccaggtgaaacagcgaattcggcacaaccgcctgaacagaagtgtggagggaaagcgtctggcaaaatgtgctttgacgagacttgttctgagtgtaacagtctgagggaagcaaactcacagacagttcgaggaactcttctggtgagattatcttgatcttttgtgttgctcatgaaaaggagaagtgagaatacaagtttgctaatatcattttttcgtcattcacagataccttgtcggactgccatgagaggaagttttccgctcaacgggacatatttccaagtcaacgaggttagatgaaataaaactcaaacagacagacgaaacattatttctgtttagtgttggttctttatcctccttgccattttttatcttgcagttatttgcagaccacgagtccagtctcaaacccatcgatgttcctagagattggatatgggatctcccaagaaggactgtttacttcggaacatcagtaacatcaatattcagaggtaaaaacattcgtaatagagttagttaatcaaatgtccaaaacacaagaaagcttcaccgtccaatacacaagaaagcttcaccttctctttgccaaaaaagatcttagaatgttttgctgaatttgtgcaggtctttcaacggagcagatacagttctgcttttggaaaggtaaacgttaactttcgacccagagaaatccggaaaatctattgctttgttctgatcaatacgttaaacatatacacacacactttacacttaggaccaatactgttctgatctgtgatagaaactggtaaacatctaacaattatgattgcaggattcgtatgtgtccgtggattcgaacagaagacaagagcaccgcgtccattaatggcaaggttgcattttcctgcgagcaaattgaagaacaacaaaacctaaagatgactggaagaaagcaaacgcattgcttctctgctctcctctatttaaagccaggaaaagtcccatttagacataataacaggaatccaaataggctattttctctttctttcttatttcattcatagagcagaagcgacacaaaaaagttttttgggttatttattttctctctaacaaatttgtagcgttttgggtctttttctggctgtcactagcgtggcaaatccaatgtctgcgcacacttaggcgcattgtcaataaaatttctccggccaccggagtgtttagcatcttttaaccggcggctaatgcgaatatttccggtaacacatattccttattctatgttgggttttgtgataacggcagtgggccttactagacaatgatcatcaataaaactaacacaaagttgaatgctacaaagtagaaagtgaagaaaaaataatatagacattgccgaatgccaaccaaaaagaaaagcaaaatcatcaaatcgaacaaagtatttttataattactctcgactcttgagcataataatctctttgattaagcatgaaacattgtttttaataaaatactaaacatgttatatgttaagaaaaattgaattatttttgtaacatggatataacttgaaaaaacatgtgtgtgaagaacagaaaagattatataataatatggtagattaaaaacattagattatacgaggagcaaagtagttagcaccagcaaaaactcacatactcatgtttagcatgtgcccaacacaacacttacaccttttgggcctcacgaatggccaagtaggtgagagagaatcactgttatttacctttttgccctcatgtatattctctcgttaaaagtatctgaaccaatgattatccgccacgtagatactctctgggtgcaccaagttgcaagagtagcatctaaaccaatcactttgaatatatccaagatgccatcccggttcaagtttttatcaagagtaaaagttccattttcatttctcataatcagattcgtattcacgcgcctattatctcgaacttatccaacacgcgcgtttaatcaaccgttggattctcaatggacggtggattaaattagctgaaaagtaaagcggtgcgttttacgcgcttcttctggctagccgccgcacgtgtcatgcacgtgatagcgcacgttagctttgaccattgtcttttgttctctattagttttttaacacacgcccccttattcgatttctcacccacccaaagccactcactctctcttctctctctctgaagcgatg

SEQ ID NO: 35076 - DNA, 3003 bp, Unknown; identical to SEQ ID NO: 35075
  misc_feature (1)..( 3003): 2750-1469P.txt file - cDNA_ID_3084465; gDNA_ID_2926256; Annot_ID_204544

SEQ ID NO: 35077 - DNA, 3003 bp, Unknown; identical to SEQ ID NO: 35075
  misc_feature (1)..( 3003): 2750-1469P.txt file - cDNA_ID_3084465; gDNA_ID_2926272; Annot_ID_205171

SEQ ID NO: 35078 - DNA, 1859 bp, Unknown; identical to SEQ ID NO: 28781
  misc_feature (1)..( 1859): 2750-1469P.txt file - cDNA_ID_3084480; gDNA_ID_2926257; Annot_ID_204611

SEQ ID NO: 35079 - DNA, 3000 bp, Unknown
  misc_feature (1)..( 3000): 2750-1469P.txt file - cDNA_ID_3084488; gDNA_ID_2926257; Annot_ID_143148
ctcaattgatggaatatttggtgatgcagctaaggggaaggagtcattgagctttgggatgaggattcgtgttgcgttgggagcagcaaaaggtattctctaccttcacacagaagccaacccgccagttttccaccgagacatcaaagccagtaacatcctcctcgaccccaacttcaatgccaaagttgcagactttggactgtctcgacttgctcctgttttggaggacgaagaggatgtgcctaagcacgtctcaaccgttgtccgtgggactccagtgagtcatcaaaatgaatgatgtgaaacatatattggcacaagagattcattgcttagttttattgaatgttgtaggggtacctggatcctgaatatttcctgacacacaagctgacggacaagagcgatgtttacagcatcggagttgtgttcttggagctgctgactggtatgcacgccatatcccatggaaaaaatatagtacgagaggtgaagacggctgagcagagggatatgatggtatcgctgatagacaagagaatggagccgtggtcgatggaaagtgttgaaaagtttgcggctttggcactgaggtgtagccacgactcaccagagatgaggccaggaatggcggaggtggtgaaggagctggagtcactgctccaagcatcccccgatagggagacaagagtggaattggcgtcatcttcgtcagtgctgtcaacatcgtcgtcgaatgtgacaagagacctttacgagtcgtcgagccttctaggaagcgatctcagcagcggctttgttcccagcatcgctcctcgctgactccaaccattgcatctatgtacaaatctctatacatatactttgactccacctttcttactttttaaccaattagatatcttccagttacactgtaatatattcttttcaaaaatcgttaataccaaacttcgaatcaaaaaaaaaaaaaaaaaattcgttataccaacatcaatgtctgaaggcccaatacaggcccaatcacagtccctggtttcgtttttaattttcctccgatcaacgctgaaacttgtcgacccgccggcgacgatggatttacagcaaaagcaggcgtgttggaaacttgaactcgaggttatagataacgattcttcatgggtatgcttcagcttctccacctcttatatcaccgtttcttcgggttccgttttgctaaagcttatgctgatgtaggtcagtaaatttgatccttctaagaagaagaagaagaagaagcagaagcctctgatacgcgaagacgacatcttcttccagaatggaggacactttacgggtaatgaattagctttcaaagaattgcgttggaagataatcagttaatcgtacccaaatctatgttgtgtctgaagctactgtcctttattgatgttatcgtaacagaggataacttaccggactgtcaatctagccggaaatttgagccagattatggctacaaagaggtacttttcgctaaaattagagttctttagttatgctactggttctcatttgtgatccgagcttttctatgctctgcagctcttgagtatggtgtttgataggcttcgtgaggaagatgtcgaggtttctacagagaggccaagaacagtgatgatgcctcctcagctccttgcagaagggacgataactgtttgtttaaactttgctgatctctgcagaacgtacgaattctaactcatcttccctttaactacttgtagttattgagccatttatcacttttaaatatacatttttcaggatgcataggaagccagatcatgtcatgaaattcttacttgcccaaatggagacaaaagtatcgctgaacaaacagcagcggctagagattaagggtttagtgtcttctaaggattttcaagctgtgttccggaaatacattggtgaattccataactagtctccggtgttgattttttttttgtttttctagtggtgggtgtcttgtctgatatgtaaaatcattgtgtcttagatgcgttcgtaatctgcgtctgctgcaaaagtcctgacacagctctcgcggaggagggcaatggtcttttcaatctcagatgtgagacggtaagtagaataatctctgcaaccatctgattgctgcgttcaggtcaggggaaagatgaggataaattggtctcatttgagtctgttcttgtgcagtgtggtttagtagcaccagtcgatataccaaatctactgtgaagaaactcatgaagatatggaaattcaagagcaacgtgctgggcaaggttccattgtaagatttatagtgatttcttctgactttgttagtcagttgtatcagaagacgttttctctacaactctaaaaaagaagttcccgcgtcctgagagatgttgtagggctgaactaaaactctcgaaaccgtttgtgagatgtctttagctagtgtatgcctaatggaagttctttaatgatcagttactgagacaaaacgcaaatgatgcaaatttgctaagagtaacgtgtcattttatatgcacgtaatgcaaaaacataagttccctagttcctgtcacggtaaagaggatttgctttagatcacattgtgcatttgtgaaatgactttaaagatgggttggtccgaagcttgcgcaagaaaaattgaatatgacatgtcagctaactctagtgggggttggcttcgaatcttagcttggcagtgacacgttactttggagttgtctcacattccagtcctctgattaatatctctccaacatgtgcttcaagtttcatctctttgcttttgggctgaaacctaggaccgcttcccttgccttgtaagttaatgttttttatttaaataatcaagtccatgttttattgactctgtggatatgaatatatacctaaacatgcaaccaaatgaagaggaatctgttctcatccataaaccaacgaaaaatg

SEQ ID NO: 35080 - DNA, 3000 bp, Unknown; identical to SEQ ID NO: 35079
  misc_feature (1)..( 3000): 2750-1469P.txt file - cDNA_ID_3084488; gDNA_ID_2926257; Annot_ID_204609

SEQ ID NO: 35081 - DNA, 3003 bp, Unknown
  misc_feature (1)..( 3003): 2750-1469P.txt file - cDNA_ID_3084492; gDNA_ID_2926257; Annot_ID_143147
acaatttaatttataaatgctcgtgctgtatagcacgggttatgatctagtcaactatatatgatacaatggtatgcaattatgttactttttggtttgaaagttgcttagattgattctaagcaaacaattttttgttccataaattctctcttatctagtatttcaatcacatcataataggctcatggctaaatattggattgacataatttgaataacaaatatataactaactactcatttgctttaaaagttttcatatgaaatagaaaaaagaaagcaaaaattaagtagtcttttataccattattaggtttctctctttgcatttgtatatagtcatattggagagagtgtcgtatattgaatttttcggtatatctaacgtctcaaaagactattacttaaaaaacatgcacaccattgttaatgttaccaatttatcataaaacacaaaaagaccatatcatataaaccaaaaaaatgtaataatacgaaacgactaagttaaaaattactgaactatgaatggtttagtagcaaacagctaagttgcaatacacaaaaatttctaatcgttatcgaataatgattattaaaaaagtagcaaaataagaaaagtaaaatgaaagtagtgtatgatacagtaacatgattttttgtattttctattttaaatgaagatatttagttaagagtgggattaatggaggatttaatgcaatgtgaaacttttaatttttatattactaagttttgttttttaaatgatattaatttagaatgacatgtgacactcattgatgtgatgatgtgttactcatatggagagaattgaccaattttcatatatatatatatatatatatatatatatatgatttgacgttacggaaaactatataatgtatgcggggcttgaatatattgaaataaatctgtcttggtcatttaaattttgcctgagtcctgacatgggcttagatgtagaaagggagaacagaagttggaataaatcacgtttatgaattcgattaatacataaatggtgtggatgaggtgtgttttgtcgtttctagtattcaacttgcgggttagatcttactttacattaataatatatcatatagtatttgtaattatttctttttaataaaaagataaaattaataatagaggcgatggagatggataatatagttgactgattgtttaatgttaactagcgttggggacagatggatccacacaactcgactcaaaaaattaatgcctggtttacgaacgtgtctttcttgacggaccccatgctttcattgtttggacatagatacttacttttgattccatattccaattttctaatctattagtaaatgattacgtttgtagaggtggtagctgatagatggcttcaaatgtttggggcaaacttaagtgaaaatatccaaattcaactggatagttttttaaaactgaaataggttttataattttcagaagaaggatcaacaataacgacatttgttttaatactatagagaagagagggagagatctaacacaaggtttctcaatttggtcttaactcttaactactagtattaaaatggtatgcgattaaataaactgctagttggataacaaaattagttgccgacaattaaatgaagggaatggtttctcaaatttggcaagtagagtgtttttatattatacccgtgtgggctaaacagaaaagaatgggcctatggatcaagagaaaagcccaattgtaacgagacattacaatatcaagatatgatgggttgggtatttgcgatgatcatatctctctccaacacattacttttggtcgagctttcttcttcaatgggcccattagcgatctcgacggagctttcttcatctggttgttcttcacctgcctgaaaaaggtcgagaaaaaacccataaatgaatgggaagaaagaaggaaagggagagtagtgttgaaacatttattacgaaggtgaagcgtctcatcttctcctgctgctccttggctctcagagatcggattggagaaatcttctgttgtccaaatcaaacggcaaattactttaaatactcttcataactaaaagaaagaagctactatatatgtttgctgcttacagaggaataggcgtggagctccttcaatcgaaagaggcgatcgacctggatttcaaggcttttctgtgtctctcctctctggagaagatggctcatgtgcagatccatggcttcatctctctcctttagcagcttctcagtgctctctcgatcctctctcagcctctcgagtttcttcttgaaggcactaagctcctccgcaagagaagcatcgattgatgtctcaagattcagattctccttgagcttctctgcagctttgggcttcacgaagaaagcatcctcctttggggtctggtagatgtttctcggctgcagtgcttttcgacctgaacatttcatttctttttgtgttttggatgatgaatgtttgagattgagagaaaagcaaagcaaagcaagcagagcaacttatctcaaaatgcttttttagaaccaaaaatgatgttcacaataagattatagaaaggagaggccatttcacacagaaagagaagaatcataagcaatacgacaagacaaaaaaagaaagagaaaaaaagaaactagccgttaagcgccgaatccaattcaaattcaaaataaatcttttttttttgttttttgtatagttaggaagtagttggtgaacaaaaaacgaaagtaaaacctcagggactgttacaaattaacattttaattggacataattgagattattgggctatattgggccactattgagatgattgggctatattgggccacttgatgtcactcatatgaatgacatgacgacatttggacataaaatgaaccaaccaaccaaaaaaaagaaagggagagcttcaaagagataagatg

SEQ ID NO: 35082 - DNA, 3003 bp, Unknown; identical to SEQ ID NO: 35081
  misc_feature (1)..( 3003): 2750-1469P.txt file - cDNA_ID_3084492; gDNA_ID_2926257; Annot_ID_204608

SEQ ID NO: 35083 - DNA, 3000 bp, Unknown; identical to SEQ ID NO: 28780
  misc_feature (1)..( 3000): 2750-1469P.txt file - cDNA_ID_3084504; gDNA_ID_2926257; Annot_ID_204605

SEQ ID NO: 35084 - DNA, 3003 bp, Unknown
  misc_feature (1)..( 3003): 2750-1469P.txt file - cDNA_ID_3084517; gDNA_ID_2926257; Annot_ID_143142
atgacattagcagagagagagaagtagaaagttagacttacttaaagtctatagcgtagttaagtactcaatcttcttcttgtcaagtgattaactggtagtatcacacgccaaactaattggttaaatgttataacttaaagcctatgttttatcctttatcaatacttgaaacaaaacttaggagatcaactaactatgtatattatcgattatataagttttatgtttttttggatattttctacaattgtgcattccataatgatcatatatagtgtatctaattttaaatattttattataaaatatttaaactatcttaccatgccgaagaaaagaaaacgaagaataaaaagtgaatttttttttttatcaacattagttatctttaaaataaaattatcactatattaaatgttaaaatatttattatcatttcacatctaaaatatatttttatattcgtaaattggtagtatctttacattttacacaactatatatgtatatttataatatttgtacaagtgattacctgtagattagtgtggctattaataagtttaacactacaatttttcttactttaaatattctaaccttttttcttgaaattgttttagtgtttaatacttttttagcctttaagtttttttttttttaaatggcgttgacatacatataaaaattaatattagtacatgtacagtatattgacaaactagaataattaaagcttaaaaaaatactataataaatgggttgaaatgacttgattgcttatttaagcaaaaacatatactttccatttcaataacacatccagctaagtaaaaataaatgtaacgtatctttgaatacagaaagaaaaaaacgaaatttcgatatttgaaatttaaaacaaaggatgagtaaatgcaacttgcttaatcttggtttactacagatacagaaacaactaagagtggacctgtgttttcctaactaatatacatcatcatattagtaatatataaagaaagtacaaatcgaaactgacagaaagttaagaaaatattaccaaataaggagattaattgataatctacgagtagatagaaaaggaaataaggaattgttaggattgcaaatgggaaagaagaaaagtgatgagaggcataaatcttgaggatgatatattaagaatcaaagacttaaggcaaaaaatagtgtcaataagccgtttccttgaatgttactttctgaacttgggattctctaccataattgtcaagattttctagacattaacgattagcaccctattgaacaataaatacaagcactcttgttcctttctcatctcatattcacacaaacacaaacccccaaaatcacttttgttccttggactatggaactaaacctctctacacccacatcatgttcctccagcagcatctcatcatcttcgcatgaggccatccctaggaccaagggtaaaacgaaagaggaggtcacggctgagccgtcgaaggagaatcagcagcggctagagttccgcttcctgttcaacgagagtagtacaagaaacgaggctaaagcgagggtgtttgcttgcaccttctgcaaaaaagagttctctacgtctcaagccttaggaggacatcagaacgctcacaagcaagagcgatcattggctaaaaggcgtaaagagatcgaaatcaactatcctgaactctccatctacagccagtacccgccaagtggactttccttcagcagcagctcctcgcagtatgatctcggggttcgttacaatcctaacattgctaaaactactaagccctatccgttcaacatcttcgcatgtcgatttggatacagagggggactaaatttccctcccatgtctcacctctcggttccaaagacagacgatttgtccataaacttgatttcaaatctagagggcagcattcacgaccaagccgtaaaaaaagatcaacctgaagctgatccttgcaaggattctgatatagacttgtcccttaagctatagaatgcatgttcttttttaggagagttaatttttactagtttgtccttgattctgcacttctttcttacattgtgtttttacatataatttttaagtgaagaaaaaagtgactttcatgaattccctggtcttctacttaaaacacaaaaaagtgtttgggtaattaacttctgaatttcaaattttataaaacgtatttgtgttgataacagcttatttgctaacttaatgataaataaagactacaatatatgagagagttataacccttttaatatttgaatttcaacagttaataatatcatttattaatttgattatgttcctcctattagcaaatatgcagaaagaaaacccgacatttatataaagccacaactactaaaacttgttagatgatctaattattgactcgacctccacaagactaaatttagagttgaagtttttggatatatatgtatacatatagagactagagagagtacatattaaaattcaaaaatgatatatttgtatatagaagattccaacctgaagatgaggatgcaagttggtggaagtgttgtgggatagaaattcagacagattttgtgatgtgagttaagtcttgttgtttaaaatattaagaaaaggtttccttagcgtgatctctctcgaactaaacagcaagaagttacaatgctaccaaaggacgcaatgagctaggtcaactcaagctcctccaggatgaaactgaaagtgtacagagcaaagtcctctcttgggatttgagcttagtaggtgaaggttgcattcaattaccctcaactaatagcattcactcctcagcccccctcaaccacccaccctactctcttctctgaggttatataaacctcattctcactagcatactaagcataatagtacgcagagacaagagagagatagagagaaaagagagagatagagaaatg

SEQ ID NO: 35085 - DNA, 3003 bp, Unknown; identical to SEQ ID NO: 35084
  misc_feature (1)..( 3003): 2750-1469P.txt file - cDNA_ID_3084517; gDNA_ID_2926257; Annot_ID_204601

SEQ ID NO: 35086 - DNA, 3003 bp, Unknown; identical to SEQ ID NO: 28779
  misc_feature (1)..( 3003): 2750-1469P.txt file - cDNA_ID_3084523; gDNA_ID_2926257; Annot_ID_204599

SEQ ID NO: 35087 - DNA, 3000 bp, Unknown
  misc_feature (1)..( 3000): 2750-1469P.txt file - cDNA_ID_3084535; gDNA_ID_2926257; Annot_ID_204595
ttgtaacaataaatgttgagaaataagtaaatagcgaaagcaaggaatggatcggagaatatgcagaaacctaaccatgcatgttccctgtgtccccatgggatactttaattgatgcgggctctcctttttggaccttggatgtgtggtccttgatcaactaatctcctactattaaaacaaataaagaaacccatttagagaaaatgttgtcggaactcggaagagatcgttctcaccataccgagttaccatcaataatcttaagataaagaattgattttatgactgaggcgcaaagaattgaaaaatctatggccggagtccatttctttctttattcgtatatttgctatccaaatttaataggagtaggtggttaatatttacgaattgtagaaaattgacttagcctaaccataaaatttaaaccgtcgatgtcatcagaatttaatttgttttaatctttatttaggtttctgcttacctaatcagctgcgtataactttgaaacagttttctcgcgttatttaaacaaaattttggctactgactgacgtttcccttagttcttattctagtctgcgtatgcgatattatgaaatactaataaatttgtcggtaagcaattgtaataacattaaacttgtcgtgagaatatgaatcatatatacaaaaaactacttcctgcaatagaagcgagaacattttcagatttttctatactcactaatgataataatatatgtatagacataagacgcgtgtctattaagatcgagaaaaaaagaatgttgtgtgttttgaccgttaagtgtttgtaattaatcttcatgatgaaacgaatgtaaatctatgtataccagaaatacagtttaacaaaagaattctggttatcaagcgtcgttagctcaattagtaaagaccctaggcgaagcttagagatcgtcggttcgagtgacgcttggaacgaaactaatattacatgatgtggtttcgggtctgaggaattacgggcttcgacccagaacctcctggtattcaaaaaaaaaaaaaaaaaaaaagaattctggttttacgatatcaaatatcaatacatgcatatcgtggacggacaaatactgtaattagatgttgaattaatggaaattatatagtcgccagaccattaataaacgtaagacaatgcttacgggagatatcagttatgttatcgtacgtttctttcttctgcacgaaagccctttatttttcttcctgcagccttcatttattcttgcattacgttttttttttttttttgtaaacgtgtttataacatattaacatggacctcgtatattccatttttttaattcattttatttatgttttcttttgttaattacttcagaagttatttatggtcatatatattatatcgttaaattttgtcgtaaaaatgggttatatggtcacattaatcttgcatgggaccaaaagtaacaagctaaattaataatgtattcttttattttgtttgtcaacaattaataatgtattcaaaatcagtagatattttgattggagcaacctttcgaaccaacgaaagaaaaggggcaattatataaccatccatttttattgacagaaccttgatttcgtaattatttaacgagcttctttccttcctccttctctttttccccaacgaaagaagcttccatgaaacagcatcagaaaaaatcaaaattaaaaacaaatgaaatctttcgtacatcacattattaacgcggtaatttatttttattttattcccgtacatgtcttttaatggatttatatatattaaaaaagatgttgatttggttttatgtgaatactgtagtactaatttatgcctaccaaaaaaaaatagtactaatttatgtgtggcttggatttatatatatgtacaaatgggcacagcgtgacagcgaaaatagtaacgtacgatttatctaatctttaaaacgttgtgtgttttggataaattacaaaaataattaaaattgattttatattttgttgtacgctgcggtgggtagatcacgtcgtagatttactataaaaattgacactgcaaaatttatcctcttttttttggtattaaactttaaccaaaacttcacaagattataaaagccttgcactctaacaatgcaatgcgatgatttctaagtcgtcaaatgtttaagtctgaggaattgggacataattagtgtgattgtgggtagtgatcatacatggaactaatacatctttataaaattatactgactttccaacttagctaagtaagaaaatagtaactattaaaaaaaaacaatgagataatgttaaatattaatcaaatttgtttttcttttttattttgggcaaaagttattttttcaagcgcactgtttgtactttataatgtgaaacatatattgaaaataatcaattgaaatcttaaatgtagtcatatttctttttttcaaaaagcatcaaatagatcaatttgcccataagactcgatttatttttccacgaatatgggaaaaaacaactggagatttttaaaaaggaatgacatatgttttccaaatgtattaactaatgattccaacataagcaaatatattttctaaaaatagtgaaataaacaactgtgaaatgtatacaaaaagcatgaaatatattttcccaagtattgtttaaatttgataaataattcaagttatttggaacagtgatggagtggaaaaataaacataagaatcataattaaaaatgaacgtagagtttagatagtgatttgaaaagattaaggaagattaggaaatgacactagttataggacgattccaaccttgagcagtggggcgggagttgtagtaacctgtcaaccgcaatatatagcctggtgctcaaaatgagacttgaactaatactaataaggggaatttggatgttcaaaggacttaaccacgattgatg

SEQ ID NO: 35088 - DNA, 3000 bp, Unknown; identical to SEQ ID NO: 28776
  misc_feature (1)..( 3000): 2750-1469P.txt file - cDNA_ID_3084546; gDNA_ID_2926257; Annot_ID_204589

SEQ ID NO: 35089 - DNA, 3000 bp, Unknown
  misc_feature (1)..( 3000): 2750-1469P.txt file - cDNA_ID_3084583; gDNA_ID_2926258; Annot_ID_143178
tcgtggaattcgtggacggagtactggctttgcagggtgattctcccattgagaaattctccctcaagtgtataactggtattcatccagatcatgtgaatcgttggatatgtaatgtgctgcagcgtggtgtttcggatctttatcttttcactgatttttctgatgaggataccgaagaggatggtggttataggctacctcaagagatgttcgtcagtagaacactggttaagctgaaattaagaagtgaacactgtgttaattggtggcattgggatattggcgcttccttaccaaatcttaaaagtcttaatattgactcggacttgattttctttggtgagatggagaaatttctttcttctttccctgtgcttgaggaagtacacatggctaatatggagtggagagaattagatgaaaccatgtcaagtgcaagcctcacgaagctaagtatccacggcaccggtgttgaagagtttgaacatccaaagagcatttctattgatactccaaatctgctttacttaaactattctgatttagttgcggaggattatccattagttaaaatgggaaagttacttgaggctcgaatccatcttataataaaaaatgaagatcagatcaagcggataagagaaccaatttgttagaggatgatgagggtgatgttgttctccaattttgcaatgtggtgaagctcattaacggcatacaaaatattcagacactttacttaactgaagatactcttgaggtcagttttctattatgttctctctggtccatttttgaaagatcaattgcaaagtacctcattcgggttttttttttcttgttttcaggttcttactatgtgctgtgaatcaatgcctgtgttcaacaacctcaaaaccttaggacttaaaagtgatgagggtcgcggttggcaggcagtgccagctcttctgagaaactgtccacatctagaatttctaatcattgaggtcaattacagaccataaaactactcggacaacacatttgttaaagttgttggttagactcaatcgtcttattgtcttctttatgctttcagggtctcttacactctgtgacagataaatgcggggatgcttgtgactgcatttcgcgggaagacaaaggtcgttcgctcatatcttgtccagtgaagaagttagaggttagagggtttcgtggaacaattcgagagaaagagatgataaggcatttcttggagtatttcccgtgtttggatgagatggagatagatgccgaagagaatgattctacaaactttgaagtgcctagaattttaaaagttgtcgcgtataggctccacgatgtggtctcgacagagatagttggacattggcagagttcggcacaatctgggggttggtcccagacccagatggatgagatgtactatgaggtacactatttgatcaccgttttcaatcacataaattcatgacagctttgaataaactaactgtcttttcttttcttttacagttggctccccgcaataaagagcgtatctacgatatgttcttcttcatgcgtagagcttcttccacggtacctcctcctccgccacaagagatgtctcaagactaccttcagatgcaacttgaagttgcggatcttaaggagaggcaacgagaccaggaagccaagcttgcggatcttaaggagaggctacgggctatgttagatatgattgttgaccagaacccaattatagcctcagcgttgagggctagagaggcaactaactcagagcgagaaaaggcgtcgagtggtcaggagatgaccgagaaggagcgggactatgatgctctgttcgatatcattgtcgagcagaacccaatgctagcatcggcagttagagctctgcgtgcaaccgactcagagcgtgctgagacatccagtaatcaggagatgaccgagctcggccaagctacggcaacatattttcccccacgagaaggagaatagatctgtgattgttttcttaatgctttccaatttggttcggtttgtgtttatttagttggaattccagttcaaaatcctgaagcgaagcagcttgtaaatttggatcttcatatcttccctactctctcgacgttgcatctgtacacggtaggtgcggaagctaactgttctcttctgtctctgctgattttatactcctttgaaggtatcttatatcatttttgcgggtacaagtaattatgttcgactgcatataaagttatttgatttgaattgtccggttcgcattaaccaaaccaacttaagctttcagttcttttttcttcccgataaaaagcaaactttcagtttaagaagctgagacatccaaaattcaatagcatcatcagctcatcacgatgcttctctgtttataatcctaatcaattttgcaactgggcgttgggcctcacctccgtaacccaaagtcaaacaattccggtttgtttaccgaattaaaccggtgattaaagtagaaccaacaacatccacacttggttttaaaaaccctcaatttcgtttgtctgctgtcttcttcttcttaaagttggatgtttcggctactctgatgcatttgcatgtattgtcgaactgaaagtctgtgacttttcttctcctctacgatagaaaccagtgacctagcactcccaactctcactcttatcactggacgcattctccaaaattttgatcttcgattaagccattcgtagcgaggtaaatgctcaagttttacctatctcctctgcttccactgattctgtttcttgattcaaagttttctttgtgtgaattcatattttcgtgtgaattcatattttcgtgtgaattgtgaattagggttttctctgttcccgtttctactctctcatcttttggggaaaagttgtcaactttcatgttttacctgtagccgtaataacgtactcttaatctcgtgtacgcaagatg

SEQ ID NO: 35090 - DNA, 3000 bp, Unknown; identical to SEQ ID NO: 35089
  misc_feature (1)..( 3000): 2750-1469P.txt file - cDNA_ID_3084583; gDNA_ID_2926258; Annot_ID_204643

SEQ ID NO: 35091 - DNA, 3003 bp, Unknown; identical to SEQ ID NO: 28375
  misc_feature (1)..( 3003): 2750-1469P.txt file - cDNA_ID_3084587; gDNA_ID_2926258; Annot_ID_204642

SEQ ID NO: 35092 - DNA, 3000 bp, Unknown; identical to SEQ ID NO: 28374
  misc_feature (1)..( 3000): 2750-1469P.txt file - cDNA_ID_3084619; gDNA_ID_2926258; Annot_ID_204631

SEQ ID NO: 35093 - DNA, 3003 bp, Unknown
  misc_feature (1)..( 3003): 2750-1469P.txt file - cDNA_ID_3084627; gDNA_ID_2926258; Annot_ID_204628
gcagaaacacaatactgatttaaacactcaaagaagtctaaatgaatatctctaatcagtgataactgataagtacctagaggcaagatgccgagcagcagcagtagagcagttcatttcatgttcagcatgcagtatgaagaggatgtccagcactcgagccaaacgaggattaggcttgtaagacctattgcccctgtaatcaattgaagattaaagaatgtatcctgtgttacagacacgtttgaagcttgaaacagatttaaactgactaaagaaacacagtttttctgactacccttttaaaatgcaagtgttaaatcaaataaagacagaagaaagaggggaaagtacattgaatccagcatatagaggaaattctctgaataagaaaggttggccgaaggaagaacaggaggcctgcctgccgtcctcaaataagcagctgctgcaattgttggtgcctgcaaacacgttgtaaaccctttttctagtcccgcaacttatacacagatacgttaaggaaacaaatcatcaacagatagaacaatacctttccgagaatgcgaacaatctgtttatcacgaacttgttttgacttgtaaatgtcttggccctgcacccaatgaaagaaaatcgagttggcatagccattttcagaaaaaggcatcttgacagtacgaaaagaacaggatttcaaaacttacactaagagcaggatttgcatcagggtgaaagatagaaagtgcactcatggcactcacaagaactcccattgggtgtgcatcatgaggcatggactgtatgatatcctgcaaaaacattcagaaatcgtctcagatcaaaaatccatagaaaattcttttactaagcatatacacataactatattcacaacggcgagtaagacataaggtactaatactagaaagagatccagtatccttaatagacatggtttacaagcaagacaaacaacttgtacacttgacaagaaatcattttcaaaatccctctttggtttggatttgcattctgatacaaagtttggaatttgcactagtatgaaaatccaaataacgaaagagtagaaatttcaccaatactccttgtggcacagctgaatgctgagaaacagtgaactcccaatcagctagctgactttgagaaggcagatttccatacactggagacaaaaaaaggggaattttaacacgacactaagagagacacaattttcaagacattttcttttccacaagtagacgccacaaaagtaaaataagcaacaacaacaacaagaataagcaacgagattgataaagacttactgaggagataagcaacctcaataaaagtactgctctcagccaactcttcaattgggtatccccgataacgtaagattccttcatctccgtcgatgtaacaaatcgaagatcgaaccggagccgtgttcaagtaaccaggatcgtacaacttcagccccttatcatccttccccgtcgttatctgcacaccaaacatgcaaatccatcaaattccttatcatattcagggaaaattaggtgagacgaatcaaaattcagataaaactaactcgattccacaattctgttcaggattacaaatccgttacataccttcttgagatcaacggctttaacggtaccatgctctgagacagggacctgatatttcttccccgtacgctcatcgacgatcgtcaagtttcctttgagtgatccatgaggtgcagcggtaatgtgagccgatgtacaccatggcgcgatcgccggcaacacctgttccaatccgacggtatcagacaccgccaaatgcgcggtgagaacggctaatctagctttcactctctgcgaaatctccatttcttcctctcaaaaaattttaaaaaaaatatctgaattcaatttcaaaggaaggaagcgaagaagaagaagaagaaacaatcttgcggtaagtgacttggcttttgtatcctgcatttgctaattttggtagtagctgatatttttattctctgcgggtaagtgtattgaaaatcggatccattgtttatccaaagctcgacggtgataagattattcagcttagatcaacggatagaattgttcgtcaaaaactaatatggaaagtctaaagaggcttatctgtcaagtttatcaaaggattaagactttcgtttctgaaatccacccgggcaagggcagtgaagactacgcgctcaatgagaatgacaggtggaagaacacgagcgagtgtctttcagacgctatgtagatcgagtagaagtcgattggcgtcctcggattgctaaataactatctggttttcgataatgggccaactcattggtctcacattgagaaatttaatttccctaagtgtattgatcggcccattagctctttacgcctgggctgatgacaatagtaataagaacaagggaaatggtccaatatctttgcagttaaaatttatgaacatatggaaattttatatttgtagcacaaagattcaccagtaagaggctggtaatacactgcattgggtcacaacgggccggtccattaaacccaattaactcttatgtatgagaaggaacttaaaaccccattcagtttttgatggacttgtgaacgctgctactaaaccaaggtcacttctcagttctcacaacacatatgttatgtttgcaaattaaatgcagttttataatttttagtatttaactgactatcccaaattattttcaaaatatctttgaaatttaaaaagtgattcaattatgaaacctccactcacacttttgtaccatcctttgcttttgcactaatcaaatttatttgtttgttcagttaaattgttcaaaaaaggagaaagttatgtccaacaaaaaagagagaaaaaaatgcaattagccttttaataaaaaaaggagtagtaattacaaaaaaaaatgaagtactgtagattatgatg

SEQ ID NO: 35094 - DNA, 3000 bp, Unknown
  misc_feature (1)..( 3000): 2750-1469P.txt file - cDNA_ID_3084631; gDNA_ID_2926258; Annot_ID_143160
attcatgtatcattgccaccggtaatgcaataatatgaacctgcatgactatgaggaaaatataaaagtacaggaaatagccacttaacctagcaatttcaagggcgaacttcactgcgtgtgctggcattagaggtcctttcctgtctagatattgtcgaagatctccctagaaataaacacttaataattagaagcatagattttatgcagtgaaatatgaaacacagcagtttgcagaggttaagatctaaacatcttaaacaacaattaaatatcaaagccattcttcatgtcatatctaactaactgtcgaggtaaacaaaggactagctcaaaacgttgtcagtttattttgtaagcttcttaagatctactcaaccaagtattaccagaatgtttataggattccaactgctagtgttcatgatggatcttgaatctaagatgataatttgtaaacctggagaggtcatacatcctctgaatgtggttattcagattgagaaagattaggacctttggtaaatactcggtgacaatcatcatgggggtactctgagtaactgcccctagaaactgaacaacattcggatggcgtatcttttgaagcagtgcaagttcgtccctaaatgcattcctggataccagaaggatatgaaaacctttagagcatgattaatacaataatacaaagaaatcaatggatgtagactcacactttgtcttcatcagtgaacatttcctctccaaaggttttaacagccacgtcaattccacgccatgaagccttgttaaaggtaccctgtaaagcagacagacagtaattacaactgtgaacagcaaataaaagcaagtgaaaacagcaacaaataaatttgggcaagggaactacttacctttgaaattttgacagagttggaaaaatcaagctctgtaggatgaatctcgtactctggaacttctttatcagttaggacatgcataggagcaatctaaaatcagaaacgattattaaagaaatcaatccaaacattcagaaactaaaacatccatcaatgcaactatgagggataaacacataccgtaggcttagcaccatgtttctccaaaagtttaatcacatcatgatttttgtaatacactgcatctgcaagaggctggtaagatcaatcacaaattgttaaccatcactgttattgcaaccgagtttgctaaatctaagtgctccagtaaaacatatgatttgtgcggcaattcgtcgaacacaaaacgaactaaagagtctacgagaagtcaagtcaggcaaagcaaacaaaattcagcccagagaaagttcgaattcataccgtactaccccatcggtccttcgtatcaaccttagcaccacggctaagcagcagctcaacgacatcggttcgtccttgacaagcggcgacgtgaagagcagtacgggcatcgatgtcacggtaatcaacattagtacccgaatcaagcatcttattgatgccatcgatatcaccttcgttggctaaatacattaaacgaatcgtcggatccccgatcccagctgtagccgccgcagccaagtcgtcgtcctcatcttccgttaacgtatcaatcggggttcttgattccggcgcaagcgaagactgcctacctagcttgaatctcgccggcgatttaggcttaatcgtcatgttcaacagaggacttggtgagaattttctgccgcaagcaatatgagctgtaaatggaactgtaacggcagcaacagaaaagaaaaagaaaagtagaaaaaaaagtcccaaccaatcagcaggctttaagggtttgcctcttaatgcgggtgaagtatcatactcgttttcctcctccctactcatcataatctacagtacttcatttttttttgtaattactactcctttttttattaaaaggctaattgcatttttttctctcttttttgttggacataactttctccttttttgaacaatttaactgaacaaacaaataaatttgattagtgcaaaagcaaaggatggtacaaaagtgtgagtggaggtttcataattgaatcactttttaaatttcaaagatattttgaaaataatttgggatagtcagttaaatactaaaaattataaaactgcatttaatttgcaaacataacatatgtgttgtgagaactgagaagtgaccttggtttagtagcagcgttcacaagtccatcaaaaactgaatggggttttaagttccttctcatacataagagttaattgggtttaatggaccggcccgttgtgacccaatgcagtgtattaccagcctcttactggtgaatctttgtgctacaaatataaaatttccatatgttcataaattttaactgcaaagatattggaccatttcccttgttcttattactattgtcatcagcccaggcgtaaagagctaatgggccgatcaatacacttagggaaattaaatttctcaatgtgagaccaatgagttggcccattatcgaaaaccagatagttatttagcaatccgaggacgccaatcgacttctactcgatctacatagcgtctgaaagacactcgctcgtgttcttccacctgtcattctcattgagcgcgtagtcttcactgcccttgcccgggtggatttcagaaacgaaagtcttaatcctttgataaacttgacagataagcctctttagactttccatattagtttttgacgaacaattctatccgttgatctaagctgaataatcttatcaccgtcgagctttggataaacaatggatccgattttcaatacacttacccgcagagaataaaaatatcagctactaccaaaattagcaaatgcaggatacaaaagccaagtcacttaccgcaagattgtttcttcttcttcttcttcgcttccttcctttgaaattgaattcagatattttttttaaaattttttgagaggaagaaatg

SEQ ID NO: 35095 - DNA, 3000 bp, Unknown; identical to SEQ ID NO: 35094
  misc_feature (1)..( 3000): 2750-1469P.txt file - cDNA_ID_3084631; gDNA_ID_2926258; Annot_ID_204627

SEQ ID NO: 35096 - DNA, 3003 bp, Unknown
  misc_feature (1)..( 3003): 2750-1469P.txt file - cDNA_ID_3084650; gDNA_ID_2926258; Annot_ID_143154
ttttaaaaaacaaaaaaaaaactataaacttcaaagattttgctatggttattagattatgacattaaaatattaattttaatagattttcattctaaaatgcatctagatttcaatattgatttccaagtagcaagaaaattatttaaaatcatagttaaattaaattaatcttaatttgatttaaaattaaaaaaactcaaaattaagttgtcaaactacaactgactgccacaaggttataattttaatttaagcgattgcaaatatagttcaagaaaccatgcattaaaaaaaaaaaaagtggacaaattttaggtgactttgggtatttatggtcatcaatgtactctattagtggacttgaaaactttgaaaagcccaacatttgttctggctctttaatctgagacctaaacattgctgatttggtccatctaaaaaacatagtcaaagtccgtttgtccggaagttttttctaccaattccaaaaggcctttctcggcctatatgacctttgtgttggtccctgacttctcctatgactaattgctgtgccctgtgtgccatttttttttaatcagagttttctcattttatatatcaacaagttatacaatttcggattaaattccgacatcgtcaaaaaggaagaaaaaatccgaccaactctaatattattggttatagtttttgcgtgttaacattttttagttaatatagagatcaaatttgggccaaaattatctacgagaaagtctgtctcaactatccaaagttaaagatattttcgctgagaagttaaaaataatatttcgatgggcccttcaatcttagctaatttactaaagtaacccttgtcgaaaaatcaaaaatataaaatcgcaaaacgaacacggcttagtttatcttcttgtctctctctcatttcttgttattatccacgaacgaagaaaaacctagaaaacagttgaagaaagaaaatcacaagagaagccatggccggaattggaccgattactcaggattgggaaccagttgtgatccgcaagagagctcctaacgctgcagctaagcgcgacgagaagactgtcaacgccgctcgtcgaagcggcgccgatattgagaccgttcgaaaatgtttgttttctttctttctctatctccgtctctctgatctacctttgtagcttaagttgtgggagaatatttctctggtttaggttaaatttggcgattgaatctagatgagttttattacgctgtgttttagtttccatgattagggttatttgccttcgtcgccgtcactggattattgtggttgtcttagaagagatctgtgttaggttttcgcctgttgtgattcgaatttcgtttgctgcagtaacagttcgtccgattttacttatggattcttgttcgtatcagattgatgtttctgttttgacatttgaatatgcctttatcattttttctttttcgtgaaatctcctttgttctatatgagtatttctagttgttgcaagtaatcatctaacgagatttgttgtttttgttattgctgggtttagtcaatgctggatcgaacaaggctgcatcaagcggcacctccttgaacacaaagaagctagatgatgatactgagaacttatctcgtgagttattcaatctctttctcaaggtgtattgatctgatttctatattgatatagtaatgttagtatctatctctatatcccttggacacagtgggtgaactagattcttagggtctgttttcttgcaatgtttgaattgtactagtgagtggaagtctttttttgttgatgggttattgggatgccacgagctgatgctttatgtactatttatccgcaaatcactgtgttttccatatgtgtcttagattgattagtagtgttggttatctttaacaccttggttgtgtatggttttgaaatcagatgatcgtgtgcccactgaattgaagaaagccatcatgcaagctagaggggagaagaagctgactcagtcccaacttgcccatgtactttcatttttctctgtatctttctctttcttttactgtctttcgtcagtaattgaattcattgtatgggttttgattctgtagctgatcaatgagaagccacaagtgatccaagaatacgagtctgggaaagcaattccgaatcaacagatcctttcaaagctggagagggcacttggtgctaaactccgtggaaagaagtagaagtgtagaacaaagctcttaaaggtaacaacaaaagctgatcgcagtttctctccagtccacatgctttaccatatcctaaaaactatatctatgtatggtttggtttaatggcgtagtagtttgttgcgaggaatctttcatgatgtaagaaaaacaaagctgtttggaaccttttgtcattataaataatctcttctctttctttttcgtcatgtctcgtaaactttatctgccacggatgtatgttcttaaagaaattgaagattgaaattgatcaattgccaataatgatctcttttgtctctgtatatgtattgattcaaacagaaatcatagtagaaaactgtcaagagaaattgaccttttaacataatatctaagtttgggctggataatatctaatttttgggcctggataacgttttacgcgtcagggactaagttgtacaaaatgaaactaaagggacaaaatagtaaagttgggtgccactgttccccgcgccacaaaacaaaaacagtacagtgagtcagtgaagctgacattcacacacacacactcacacaaaaaccaaaaactaattttcacgaaatccgaagcttaaaaattattcctctactgtttcaatttcatctcttcttcctcttgagttggcaatttctagggttttctcattttcctttttttccatttctggaaactggtaaaaggctttttctttgtctgtgggggagaaacaaaaatg

SEQ ID NO: 35097 - DNA, 3003 bp, Unknown; identical to SEQ ID NO: 35096
  misc_feature (1)..( 3003): 2750-1469P.txt file - cDNA_ID_3084650; gDNA_ID_2926258; Annot_ID_204621

SEQ ID NO: 35098 - DNA, 75 bp, Unknown
  misc_feature (1)..( 75): 2750-1469P.txt file - cDNA_ID_3084682; gDNA_ID_2926259; Annot_ID_204688
cttcaaaactttgaaggagtggaatctgattttactcagttgatgggagcttagtctttctagcttgcattaatg

SEQ ID NO: 35099 - DNA, 3000 bp, Unknown; identical to SEQ ID NO: 28387
  misc_feature (1)..( 3000): 2750-1469P.txt file - cDNA_ID_3084686; gDNA_ID_2926259; Annot_ID_204685

SEQ ID NO: 35100 - DNA, 3003 bp, Unknown; identical to SEQ ID NO: 28382
  misc_feature (1)..( 3003): 2750-1469P.txt file - cDNA_ID_3084702; gDNA_ID_2926259; Annot_ID_204675

SEQ ID NO: 35101 - DNA, 3003 bp, Unknown
  misc_feature (1)..( 3003): 2750-1469P.txt file - cDNA_ID_3084744; gDNA_ID_2926259; Annot_ID_143182
ccttttgctccaaagcagcacaagcctgcaataagaataatgcaaacattcttcaagattcacattaactaatacaaacgtaagaaaaagtttaaggtttagtgtttaggacctgcactgcgtcctctaaagcaccgtcaagaaatgttgtaagcgcaaagttcatctttagcctatgatcagtcactctactgtcctgtaattttcagacatcataagcaaaacagaatccatcaagttttcaaagcaaggctctggatccgtgtattaccttataattgtatgttcttatcttttctgaacgagctccagtcccaacctgtttccgcaagaatcgacatagagcagaataagatgaatatttgatgatgaccttgagtttagaaagactatggggataataaaatgaagtggacctgagatttcctttcattccttatcttctcttgttgttcccttacttttatttcatacctatatatagacatataatgtttcaacaaaaaaagactaaggtgggacttgatagaggagaagaagagtagagagtttgctccttgaatgttgcttacagttttgctcgcagaagctggaaagcacgcgccttattcctaatctgggtcctttcttctgtacagaaaatgcgaatacctgacggtttgtggaatagatctatagccgtctccaccttgttcacattttggcctgcaccaagacctcttttcagtattattagcaagtgaaatgtgagagaaacagaaagcgaatttctttagcataacctccagcgccgccagatcttgcagatgtaagttcaatgtcctttgggtcaatcaccacttccacttcatcagcctaaaatgacaaaaaaaacaaagcagagatgacagttttggactggttaccaattatcaatcagaatatcgaaaaatggaacatgcgaaagctagtttacctctggcatgatggctacagttgctgtagaagtgtgtacacgaccctgtgtttctgtttgaggaacacgctggactcgatgaacaccagattcatacttgagcttgctatagacacgatttcctttaatctccatcacacacgtcttgtaacctccatgttcagccttataaaagtaggaagattaaaaagctatactggtgagaacatgtctctaagttgttatgctctactgccattttcattacacactccttaaatgccaaaacaaaacacagagagcatctcacctctgagcatgaaaccattgaaaacttccaagagctgcgctcgctgtacctctgatacatccgcacctgcaagcaaaagaataatgcaaagcatactgattcatggtaggatctgaagtttttaattattgcacttgcttctcttagccatgaaatataggaacaataaaatttgaaagttttttaagaaataagactgaaacaaaacggtgaactatcggaaggcattaaaatcagatagaggatcagaagaaatcaaggaaagcatgtacctacaaggtcaccagtccaaattgcagcttcatcgccaccagttcctgctctaactgcggaaggaactaagatttcagactcgtccagaggtagataggtaaaacaatggcgggaagtccgagcaaaaggcagtttttcaagaaaaaaggccagtgtagacaaatgatactacttgtcgacatatagtttagtcagttaccttcaagcaaaatgtttctggcatcaagaggatcggaaggaagaagtaacacctgacacaagccaacacaatgttacgagttgagtatcagaatcaaatttttaaaatgagcaacattcgattttcagctgccgaataagtcagctatggaaccaaggctctaaaccttaagttgtttttcaagctcctcaatttctttagtgagcgagttgatttcacttcctatcatttcagccatatcttcatcatctccagcctctttcgccaaaactgaagcaataaaccaatcagtaaatcataaccagcttccgaggaacagaatcaaagcaaagtaaaagaaaggaggagacttgaagggacctttgctttctagtaactgcttctcacagtccttgaatcttctgaagactgttacaacctaaaattgaattcaatgttaagaaaccccgaaaaaagctgcaaattttgaacactaaaagaatgtgcaaatacctcgtcaagctccgacatggattgtgccagtttttggtattcagattgattcgaaacaacatctgggtcagctagtttcacctacaaatcattcaaaactcttaagaatgagattaagaaacaaaccttaaccattaatggaataagtgtaggaacaaaccgataactccttccatgtcttctcaacagactccattttcctaatgaggtaaggttcctaaatgtttcaacagacaaaatcatcgaacaattctgaaacttttgaaaaaaaaatccaacattgggagaactagaatcacttacggccatacaaacgagtcgtcgagtcctgcgagaccgagaaggcggccacgagactagacaaactccagacggtgactttctcgaacgtaaagtgaatggtgacgagtgaagatgaaggaaggctcgagccgttggactcgtcgtcatcgagctattcattgtctagactctagagagagaggtggaagaagacgagtggcgcgggagttgctggataaggaagcctagtttagatgatgagacgtgtttggctattaggacaaaactatcctcgccaattatagaagaaacccttttatttattgggcctttagcccatactaatttacattctcggttacacggtgtaacttacacctgctagtaactctatgggcctatggcccaatatatgtgaagtcaaaactgattcgtcgcgaagttgagtttttgttaaataataaatcaattgaatcgcggtactcaatttcttctcttcctccggcgacgatg

SEQ ID NO: 35102 - DNA, 3003 bp, Unknown; identical to SEQ ID NO: 35101
  misc_feature (1)..( 3003): 2750-1469P.txt file - cDNA_ID_3084744; gDNA_ID_2926259; Annot_ID_204659

SEQ ID NO: 35103 - DNA, 3000 bp, Unknown
  misc_feature (1)..( 3000): 2750-1469P.txt file - cDNA_ID_3084746; gDNA_ID_2926259; Annot_ID_204658
ttgagatgggcaaagagtatagatccggcgatgactcgagcctcatgttatcgtatcacaggcatgcttttgggctcggggagcattataactcagtggtgctcgtcaacaacatcaccggatgatggatgatggactttatctaaagctttaagaaaagtgcttttgtatcaaaagtttactgaaattctttcttctttaatgtttgttggatttgagagaaccaatgtgtaacttcaatttttcatttggttacaaggcgaagcataatctattgctacacagttccaggtttttcattacagaacaagaatgtagcagcaatttgtacggagaacatgacacgaagaaacatatgacctttgaacaatttcgcgagccaatttggcagagacagttctagagatctgaaagggaatataacaaacacaagttgttcctcccgaatcttgagattttagcaccaaaagaagaaaatgatgacgaatctatgcttattatcacccataaattttgctaattcaattgacacatggccttatcacgaatctgccaaagattcttcatttctgtagatttccaaatctggtgtcagaatcatgctttcctgtttaaatctgctaaaattttgtatttttggaaagttgaaaatgcaatgaacatggattctctttctcgtgttcaatgcaacaacaactacaaagactcttaagagtcaagaccaacaactctcacatttagataaaaaaacttgaaaatggttttgacaaagtgtaaaagctaaagtaagaactgtgttggatcacttacttgctctctagactccaggtcacacaagcagaaaagtatctcaaagacgatcctctttttgtttgtttttcttgctttccgtttctttagagcctgaaacttgtggggaatctattgttgcttgaaaagataagcatctaactggataaaccataatccaatctccacctcagtggatgcatcaaaagcaaaagattttgccaaaaaaagaaaagcaccatagagtagacatgatcacactgttgcatacctccctggatccgtggatcattacaaaccatatgacaaggatatttccgtaattagaaaagaaaagtttacatgaactgtatatgcaacttggttctgatgttcatgcagtttttagagaacgccaaagggcacatcactagtatggaagtaaagtagtgacaaagatctgatttatgcaacgttaccatcctccacgtatccaactctataaataggcctactttgtaatttgtatagcatcaaagcaaaaacaaacataaagatccttgagttcccactcacatagtcacactacatttgtatcacatttatatacatagaaatggaaagcgttagaagtttagttgaagacaaaccagtggtgatattcagcaaaagctcttgctgcatgagccactcaattcaaacactgatctcagggtttggggcaaagatgacggtctacgagctagaccaattctcaaacggtcaggagatcgagaaggcattggtacagatggggtgtaaacccagtgtaccagctgtgttcatagggcaacaattcatcggtggtgctaaccaagtaatgactcttcaggtcaagaaccagctagccgcaatgctaagaagagccggagccatatgggtgtaacagaagacaagagagtcaaatgcaaactaggatagaataagatgagaatgatacatatcgttgttttgcttcttctttaattttcggggtttcgagtatctaccatgcacggatatgttttcaacaagtgcaacactatagtttacacaactctagagctaattaagatcaagaactttgtattctcagttaccatacttgttaaatcaaccaatataagctaagaagactaataagcaataaaagagaaagatttgcttttccattgatacctaaagattgttcaacaaaatgaaaggccttttatttatcatcagccatgagaaaagaagaaacaaacaaaagtagagattttcactaacttcttcacttgtaaatgtaatcttttaaaaggccatttgcatgctcgacctcagaatgtcttcgccaactatcaacagctctagaaactgtagcttttgcttcccgaatctcttgagccgagaacttgtgctctatgattcccaaaggtccaggttgcagaacattgatcacagtttcagcttctttctcaagctgcctgtacaaaatgaaaccttagaatttcaacataaacacacacacaaaaaacaaatcttttattgtgtaatctcttgtcatacggagaaatacgatgcaagcattaaccaacctaaaaagctctagattggatacaaattgaattctttttatcagtcaattcttcaatagtaacgcagtaatacaatgaagagaagaaaacaatggagaaaccttaagatcccggagaagggtaaagctctagcgatcctgtaaatcgacatcgtcgccggaggaagagaagaaattgagtaccgcgattcaattgatttattatttaacaaaaactcaacttcgcgacgaatcagttttgacttcacatatattgggccataggcccatagagttactagcaggtgtaagttacaccgtgtaaccgagaatgtaaattagtatgggctaaaggcccaataaataaaagggtttcttctataattggcgaggatagttttgtcctaatagccaaacacgtctcatcatctaaactaggcttccttatccagcaactcccgcgccactcgtcttcttccacctctctctctagagtctagacaatgaatagctcgatgacgacgagtccaacggctcgagccttccttcatcttcactcgtcaccattcactttacgttcgagaaagtcaccgtctggagtttgtctagtctcgtggccgccttctcggtctcgcaggactcgacgactcgtttgtatg

SEQ ID NO: 35104 - DNA, 13 bp, Unknown
  misc_feature (1)..( 13): 2750-1469P.txt file - cDNA_ID_3084761; gDNA_ID_2926223; Annot_ID_203388
gaattcgttgatg

SEQ ID NO: 35105 - DNA, 3003 bp, Unknown
  misc_feature (1)..( 3003): 2750-1469P.txt file - cDNA_ID_3084761; gDNA_ID_2926260; Annot_ID_204723
gatattctcttaacaatgtgagttatattcaaaaagagacttcaagtcttgaagttttagtaataactaattataatttattttatctaataacacattcatataagaattgcttcatacaacttttagatctttagtagtcaaagattgaacataatcttctggatatgtcacttattatccattcattacttctccttctcgagatgatgaaacttcaagttcatccatctcgtattgaattccactctagaatcataatgtatttatatctcatcatattaactttgagatttggagaactataccgcatcgataattttaattttgtattcccatagaaaacaatgtatatgctcttctagagtcttttaataagattttatactacttgatatactagattatttcatcgttagaattttttttttttttttttttttttctcaacttctgatgataatttaagttcttgaaaaaaaaactttgaccatcaaaaatatgatatcttcttaagatacattaaactagtcattcatgaaaatttctataagtgattatacctttaaattaagttatttatcaatcaatttattttataaaataatcaagtattatatactaatacaattttaatgcaatattgtaaaaccaatcagaataaaactattttgtgcaaaatctggattttacatatatcttgaaaaaacttttatttagggtaatatgaatgcgtgcaagatttgggtaaaatgatttcgtgcaaaattagggcaaaaccatgaacaatttttttttttttttttatttagataccacaaagatttagagaaaaaaatcttataaaaagaaaaattatcttggaacgtttttagtaaaaataataataacacaatcaaatatatgaaaatcttataaaaagatttagataataataacacaaagatttagatatatggaatcttataaaaaaaaaattattttgcaacatttttagtaaaaataataataacacaatcaaatatatggaaatcaaatatttaatatggaaaagtcaatatctaaaagtgataagatatgtataacgttttaatcaaaagagttaaataagggatatcatatcaatcataaatggattttagacaatataatatttataaaatgatattgaatatagatgcaactattcaaaactggaatgctaaaacattaatacatgcttgcatcacccaccaccggggtatgaatagttacaaaattagttatataattataaaattggtaatttatatattcaatattgtaatagtaaatcacaaaaattaacaattaacaagcatgattctcttctttaacgattttctttgtagaatcattgaatcatgcgatagtaattatagaaacaaatgataagcatgattctcttctttattgaatcattgaaaacatgcttttaccgatctatactataatcatcgatcggctcatattgttttgtttcaataatagaaaataagtactatgaaccatgagtcgataaataaacatggttcttaaaaaaaaatgtaagaatctctatatctaccttttagagcgtgctgataacgtgttataaacagagaaagagatagaagatatgagtgtattattccattgagataaagggttctttatataggagtacaaggaaagggtaaaaccctagaaacatctagatgatgggcttagatgatgggccttataatgggcatccatttttattcataacacatgcatatctttttttgtttgttaattagttacaaatacgaggaattaccgatcgagacccttatatcgattcgctgggatataagatcccttctaaccaagaatcaaactatgggtcaatcttctcgctcccaacaaagagtctcacaaccactagaccaatgtttagttagtagagccaacacattattttgtacttattacaaaacaatttaggtagtgattaacaaattactaaaagaactatcattttattagaaatattaataatacaaattaccattacatgaaaaaaaatatctaaggattgaaaaaattgtgattaaaaaatgcctattaatttgcatgtcatcttaagtataatacggtagtagaaacgcataggaaataaaatcccaaaacaaacttcgggaagaccgagtagaataatgcaacattcttgttttatatctttcacaatgccttgtttcactgcctctacacaatctggaatttttcttgcgtcagccacacaagacaatggatttggaagcaacccttgttctgacattggagccatagccaaatcattattacctttcgtatcagaaagtgatagtattacaaccatcactgttaagatagacgcacacactctttgtatgttctcacccattgttaaatgtttgtataacttgtattttatcttgtgatgctactatgacatattgtttatagtaattatatatcttgtacggttatgaatttttttgatgaaatatatatattgcctttttcatagattgtatacatgtatcatgtatgtgttagttgtccttgaacattgtatgttcttgagaataagaatactatgtatgtaatcaaaataagaagaatagaatgtaatgcacgagctttttgttttggggtcaaaagtattgtgttagattattttacttttctctctttaattcgtatttaattgttatcaaataattaaaaccaaaaaatgttttaatctataaattgtcaaaagactttgtgttgttttcaatagaaaataaaaactgtatattagtttttattattttcaatcataaataaacaaaaatttgaaaaatatttaaccaaatgatatagaaagaaattaaaaaatagttctagaggcaataaaatgaaatttaagtaatacattttatctggacaaatttttttctcccagacccagttatcgagaagcttctctcgaatatg

SEQ ID NO: 35106 - DNA, 3000 bp, Unknown
  misc_feature (1)..( 3000): 2750-1469P.txt file - cDNA_ID_3084776; gDNA_ID_2926260; Annot_ID_143212
gtgaatgtatttcaaaatcactaattcaatacgagatgatttcaaaaaaatagtaaactctttcaaaatacatagttcaatacacccccttaaataaaataaagaggaaggagagtaagagaaaagaagaagaaacctgagcactaaggtcatctccattggtgagatactttaaaagtttctcaaaaaaaatatataataatattttattataatttagtttctgtccaattataaacacacatctatacacataatctctcaatcattactttaaagtttatctgcagagaaactattttcaaactttctcctatctcttttctattttattattattttatattttttagttaataaaaaaccatgtgagagactactgatggagacgctctaagctactccaccaaataattgggaatgttcatcaattgtagtaatatgtttctttgaagagtgtgcgtagaagtttatcaccccttcatgctgaagttgattccttgttttggcaatggaatgtatgatctcgataggtgttacgagttgctcctttgcaaccgattgtgcagatcttatctctatccttgagaaactttcggagtggccgacgttagtagctgagatagcgacttttggttcccttgtctgattttttccttcatttagtattaatttcctttctcgttgatttaatgtgagggggcattgcctcggaacaaagcacgtgctcgtaatagtttgttttctcatgtaagcaaatcggttcatgaatggttttctatagaagagagtctcttccagattacttaatacataaataatgttcgacggaaaaaaaaaaaaaaaaccctgaagcttctccatcaacaaataacaccattaccagatttagcctagcactatatgtaaatgaggctgtatgttacataaatgttatacaaccaaggcaccaaaatcaaatactactctgagattaaaccacaaaataacaaattttgttatataaagagtactacccaaattaggttataacaaatttgaccatttttaatatcataacaaatacgatctcatctacaaacatccgggaactgtaaatatattaaaaatagttagatcaagtagcaaacgcaattccaatatcttttaaaaaattattgaaatcagcatgataaaaaaaaaaagataagatcggacatagaaaagtgaaataaagttttttaatcagcatgatctccaccacgtcatcggacacagcatgatgaaatcaagataaaaaggtaccgttagtgtttgttgtttagaaagttgctccccaagcatcattttagagcttatttagttgtaagtcaataagttactatagctaggtagctccttaaaagaaggtcgttttggcagttagctcggtcgatagatgcgtggcttagtttgctcttctcttaatgagtctttctattgaaatgcttatattcctggttgatgcagaacaatgatatgtcatatgtggttgtacttcgaagacaagggtttccagattcgaaaaattctcgagtaaattcgacgaaagctttctgtctttctttccaataagtcttaatagttaaatgaatcaggttgtcgacgatcggtattgatttacaacaaaaaagtaagtatacctgaaacaaaaacaaaaatcatcacttaaatttcaatcactaacttaaaaatttctgtaagcaatgttacactaacaacatatctcaagagtctcagcagatacgcaaatgaccttaactttggtgagtggtgaatgtcccaatttcatttcttaactggtgacgttggaaagtctcaccagtcagctctgttatatataccgaaaaccaaaattttctccaaattagtcattagaggttgtctatcaaaatggtgatttagtctataggactttagaatggcataaccattgccactcccaagtaacctacaagtcccgaattttactgtagagaacccatcactacacgtcaacgattcacatagttaatcactacacgtcaagtttcagttaaaggaatcaattacacgtagaatctcatgatttaggctggttcaatccatccctataataatcaatcacctcatagaacatcggtttaataatccatctgatatcaacgacacgagataaggttcagccgataccttctcgacaacactggatctcggcgggactgtttacacggcggctggaacggtgaagtggacggctaagcaatctgatatgtggcggttcaagccatggtggttagccctcatgggtcgatagttaaacaacaacatatcaacatatcataaagcaagccagaaacttccagcacaagttacagattaaatctagggctttcttacccttaacggcctcgacaatgtctacgactgctccggtgacagtggctaacgtcatgtgactcgtgttggaaacctctggcaacacacggcggtggtggtggtgatgaacgacaaagatctctcctttctgacaagttcctcgatccattcaaacacaacagcacgatgacaacaataccggtggctcaatcgtctctctcataatcacggtggttgtggctttaaagaaggtggctggataaccaacggtgaggcatagtctcgatcacgctaacggtggcttagggtttaactcaaaatagttctttttatttcgtccaaaatcagagacggcgatatacacaagcacacaaatgtaacaaagaaacccttgtcatatttagtcattgggctaaatgggctgcaacttattaacaacaaactggcccaactactaattatagaattggggatgttaaagattttgtcgtttgtaacattttctaggaaacatccatggagtttctgtgccaatagtcaacggtcacacggatccttttcttccttgttaaaatccttcttccatccatctaggatcttgctccatccttcaccattctaatg

SEQ ID NO: 35107 - DNA, 3000 bp, Unknown; identical to SEQ ID NO: 35106
  misc_feature (1)..( 3000): 2750-1469P.txt file - cDNA_ID_3084776; gDNA_ID_2926260; Annot_ID_204718

SEQ ID NO: 35108 - DNA, 3000 bp, Unknown
  misc_feature (1)..( 3000): 2750-1469P.txt file - cDNA_ID_3084780; gDNA_ID_2926260; Annot_ID_204717
atataaatttttaaaacttggtaatgtcgatttaaaaatttcatcgtcctgttatcgtcatccattaaatcgttgtaagtctttttaaaaccactgtaaaaggttttaaaatcatatacaagagtttttaaaatccttataactcttataaagtcttcaaaaacatatgtaaatcattttttaacttttcaaaaaaattattataaatattttacaacatttgtaaatatttttgaactattttaaaactcttgtgaacccttataaaaggttttaaaaagatatacaagatttttaaaagtcggatttacaagagtttttaagagttttggcagaaaattattgtcgaaatttttttgcgggaaaaattattattttattttgttaaccttcaactttttcaaataagggtaaaatctacatatacatttttgcagccattttaacaaataaatcttggacttgaaacttatttacgagtcaatgccactgaatatatttttttcaatcgacattttaaatcaaatatttacctaacaaaaatattgcctaaaatctctctatattaactccaccattacttcaaaaaaaatctagcattacttcaaaaattatcattcctaaaacctctcataagtatttattaatttttggttttaatttgctgtaaaaaaaatcagtttcaattatacaaatcttttaaggtatgattttctttccatatttatttaatatttcgttttttacagcatctaatatttcgtttataaataacaaattaattatttagcattcaagaaaatttcttctaatctatcctttaattatattgactttattgattttttaaatatatatgaatagagattcaaatcttccatatatgtttatcatcttctaaggaagttaaacaattattttctgaatctaaactaaaatttaggaaactaaatatataaataaaatcgttttaattattttctaagctaaactatattacactctgatctttactttgaatcattcattttcagtgtaatataaagaatcaatctcatattttcagttagtaaaatgtacatgtattaagataatattattgtttcaaataatgttacaaaactacccaatttaggctattaaatgacgtgaaatacaggtagtccaaaaactcaagtacatatcaatcacaaattatgactaaactaaatatttatttataacattatctacattaaaaaaattgaactacattttgtagagttattttgtttagtaagaattacaaaatatgtcattacgtaaaaggtaaaaaaatattaatttttgaaatagattattgaaatattaaaacttataaaaagtaatatctcacgagagttatatggtgggacgggtttggatcgatattaatacaaatttataatatcatcaaccaaaagtaataatacagtttaaatcttgttttaatattttatcagcatcagtttctttaattgtacatatataaaattattaactttaatacacaaataaagtgatgaagtcacttcaattacagaatttactatttagcattgtaattgccagacgcatttgctgacccaaataaagtgatgaagtcacttataccagttgtaaattaaatgctccagaatataatgaatgtcctgtaaggaccaatttcaaactgctattgagtcttaagatcgcatgaagcgtaatagaccttggttccaaatataaatatcctcgtaaaagtgaaggagcacaaaattaaaaatgaccaaattgaggaaataaatattttgatgatctcttgaagagagtgaatgatctctaaaagagacataaacatgacaaataaaacattcaagtacttgacaatgaagagatctagctagctatgtcatgtcaaaatataatggaatcaaaagcaaatcgacgtcgtaatatatttgcatgctatgagcagttgatattatagacaaaaaggaggatcatgaaagaaagtctattgaaaagtgtacacaaagtaatgattagccaaaaatggaaaagaagaaatagacatataattataatctctagtagaaatatttggactagtagtctatgcacatgatgtgtaaaaccagtggaaaataaatgagtctttatgtgaaagaatagtgaaattaatgagattttcacaaagataagaaatgtattatgaagagatatattctcttgtggtggatgtaatattttttttttaagtctaaagtctggcaataagagatggaacactggatatgacatttatatgaaattcttgaaagatataatctctgaaggattaattatatgagaattatgttctctaaaactctactcgatcgaataaaaagaaatatgtaacatggcatataatcatataaatgtatatttatgttgagtttgtcaaaatatattgatcaaactaatatttgttttgaaaatcattaaaactcctatagagttatcataagtaatacgatgacaataatgtatgataaaatatcactagataatgatatttataagtctatatgaaaaccatataattttgatcattaagattatggttattaattccaacgagatattgtatttgattgaaaatcatctcctgaagaagatgtttccgagggggagattgaatgatatacgtggatgtaccctttttccttatcatagtttttatcccacatgatttttctatgacaaggtttttaacgagacattaaagaacacgcaaataatacacttgatgaatattaagaaattctatcaatcatccaaatgaatattatacactaatgatatttagagaaataaataagatggtcaagatgaatcatctaaaagattcatgagcagaagaatggcgttgtactttatccagaaatttgtttaagagaagatttggcagacttattctcaaatactgtttattctctgccacatcttctaatcatg

SEQ ID NO: 35109 - DNA, 3000 bp, Unknown; identical to SEQ ID NO: 28388
  misc_feature (1)..( 3000): 2750-1469P.txt file - cDNA_ID_3084798; gDNA_ID_2926260; Annot_ID_204710

SEQ ID NO: 35110 - DNA, 3000 bp, Unknown
  misc_feature (1)..( 3000): 2750-1469P.txt file - cDNA_ID_3084816; gDNA_ID_2926260; Annot_ID_204705
acttatttatttctattcatttggttttggttagtctgtcactatataatgtctgattctgctaaggacaaattagccactttgtagtgacttcaaacttaaatagtattcagtcatcaatttagcaccttatcaaacatttaaaatagtgaaaaacacaaaagatccgtatttgacataaataaaattttacgagaaaacattatttgtagatggaccgagattcgtgaagatcggtcaacaaatttaaattaagttcggactcgactgcttagtaaaaatagaaaagataaaactaaaatcgaaaaaaacaagaagaataaaatatatccgttttgggaaagaaggaagtattatatatcgtgaaatagtctcttttgtataaaatagggagtcttttgtatgtaaaagatccgcaatttttaccaaataataatatagcggattatacggtgagttacacaacaaaacagaacaagaagttgttccataaatttcggttttcttagtttgttgtgatgtagatatgatctccatagatcctctaagatagtgtttgtaatctatttaaaagcttgtaatctcagttttgaatatgttggaaatacatttctcttccctttacgatctctgaatctatatagtatcagagcctgaaatttcaatctaaactctgtttttcttgttttcgacggcaaaccaacccaacccgacaacgataccagcagccacggaggtccgacgaacgatttctccgtacgatttgactgctgccgacaacccaggagtcgtgatctcgcatcctctgctccagggaacgaactatgatgagtgggcatgcggaatgaagacgtctctccttacacgaaagaagtttggattccttgacggatctatagctcgaccggctgaaggatcaccagaccttgaagactggtggacgattcaggcactcctcgtgtcatggatcaagatgtcgattgattcgaatctgaaatcgaacatctcccatcgagatgtagctaaggacttgtgggatcatctcaaaaagcgtttttctgtcatgaatgggccaaagatctaacaaatcaaggcagaattggcgtgttgcaagcacagaggacttgcaattgaagcgtacttcggaaagcttactcgcatttgggatagtatggcagcttatcgaccattgagagtatgcaagtgtggtaaatgtgaatgcaatcttggtgagttgcatgagaaagactgtgaagatgacaaagagcatcaattcctctttggacttgatgacaatgtttttcgaacagtgaggtctaccttggtgtcatgagtaccgattcagcccatggaggaggtttataacattgtgagacaagaggagaatttagtgaggaattgtacaaagggcgtcgacgaaagccaagacgtgaatgctttttgcggtccaaacaactcaacaatttcataaggaagacaaaccaacaatgttttgtaaacattgtaatcacgccagtcattcgagtgaaagcaactacggagtgatagggtaccccgagtggtgaggagacaggccaagatcttgcacatcatcgagtcacggacgttgccacggaggacataatagagcggctgggagaggtcgtaacaatgtctcatatgctaatgatgtccaagtgcatgagcctgtgagctacgaaagctcaaactatgtggtaacggacagagacacagatggtgtgagcggattcagtgactcacaatggaaggtgataaagactcttctcaatgctggaaaggtcaacgaatctgaaaattgactggtacgtaaacctttggataatggatacaggtgcttcgcatcatttaacagatgttaaggatattcaaccagttagtgttctattagctgatggtaggcaaagattgtcagtaaaagaaggatgagtacggcttgggccaactttgatacttcactcagtttttttttgttttttttatttttttattttcttttatcaaactaacttgctttcattaaagaacgagaacaagtacagaggaaagagttttagaaaacccagaacataattccatacaataaatgacgttccccaatgccaagacaagaaagataaaggtcttcgattgtagatccatgagaactttggaacaagggcttggaagcgcactgcaacaagtgagatcacggtgaatcgagaggtcttctttgaaggacgatagattggtcatggtcgaaagacgctgcgacgttgaagaatgaatcaaggttaaggttctcgtcaggacacgttgcgatacccacaataatgctatgacagagattcaagagactatggtgctatagtcggttgagggaggctttaaaacccaaagcggaaggtagagatcacttcgatagatagatccaaacattggatagcataggatctggatgatggagatggtgatgaaggtacaaaacttgtaaacgacataagaactgcttggggaacattggtcattaacgaaaggttagaacaagacaacaattaaaccaccagcaaggacgattcgagatagatagattatagatcttcaagctttcgtaaacataccacaagtccctaagagcaacaaataccagggtttgcaaagagtaaatgaaagaccaaagcgttaatggtgatacctctcttcgatggagtcacaaccacagagtaaagaagatcgacgcaagtaaagttttgggcttagcatagggcttatgaaaacagacctgagagtattaggctttgaattttttgcatatttgatgggtttgggccttcttggatgggatgggtcaaatttggaaacaaggtccactggggaaaaccctagtttcactgtggattgccagatcgagaggaggttgtggccaccgtccgtgaattacgatgagatttgcaacgcagagatcaacaccgatgcatgacggatctgcggtaacaggcgatg

SEQ ID NO: 35111 - DNA, 3003 bp, Unknown
  misc_feature (1)..( 3003): 2750-1469P.txt file - cDNA_ID_3084820; gDNA_ID_2926247; Annot_ID_142970
ctttcaaaaagtataacctaaatagttcaaatatatatgaatcatgtgccatcctttggatgagagaaatttaagaaaagttaagtcgaagttgaccagttcacagaaaaaaaaaaacagctaaacattaacattgattagccaaatattttttgctcctctaagttactatacgcattttaattaaaatttaggtgatcaatcaaatattagcacgaagatcatcctagatggaaaactaattgaataaatctctaaatcatcatctttaatctaacaagcaaaacaactccttgataatcctaaccccaattgaggatctaacttagtcataacaaaagaacataagaaataaatatagaagaaatatgttaaaatataaaataaaaaatccaggtttttttatttttttggtttttaaaaagttaggtttcataaatgtttttaaataaaaagtgtagagtcaaagattcgattcaccaaactatctctttgcctttctaagaaccagaataaaatacaaattagttgaggtgaaatgatagtgtaattttgtttttttattttcttggtccacaacataatatgaataataacacatgaatgacactaacacagaccataactcacaccaatttagtataaattgttaaatatatttgttaaaggtttttgtagtgagaagttacacatgaaaagtacataaataaataaaaaaattacacaaaaagaccttctttgctgtcgattgaattaataaacatgtgcaaattaatgtaaatatagaaacacgacacagccaaaaagaaaataacattttcttagtggtccacaaatgacaaattaagtacatacaacttcttagatagaaccaaacgaagagaggggaaaacaaaattacaaaataaaaaatattatctatcacgtggaaacaaaatgcatgaaactatatatggggtaatagcctaataggaattaaaaaaacaaaaaaaaacctaaacaaaaaaaaatccataagttatacacaaaatgtatttggcttgtcttgtgtccagattctttataatgttaatggtactttttctctttcgttgaaggcatcaaagatggtttgatagtgttacttttttgttgtgcaaaagaaaaacctttagtcctattatcttccattatctttgtatattttcactataaagtcgatataaacgttctttattgtgaactgtaatctttctgtattattgaacatgcgttaaaagaaatttttttttgcaaacctttcactttcatcaatttaattttcaattcaattagtggtcctacgtacaaagtagttgtacagtatacaacttattagatagtatggcgagacaataattagaaaaagattggactgcttgaaaattaaaggaaaaaagattcatagcaaaatcgtaagtaaataaaaattattacttcttatgatgaagcaaaatgtttgggatatgaaataatatgaacaaaagaaaaaatgattaagttcacagttgaataagtggtgatggtctaacggtttttaaataaatgaaatatgttttaaacacgatattatcaacgattgatattttattagttttaaaaatgaatacttaaaatcactagttaaattctatttttcttttaaatcttaaatcttataacaaaaatccgaaattgcttaacttttacatacaagtgtgtttataaatttgtagagttttgattactcagattggagatatcttgctaatgatattttttcttctttgggatgtgttgccttcttcgctaaaggagagagaaccccatttgtgaattctgacgtcttcggaaatgtaatgaggctacatttgacaaacttaaaaattgctcagaatcttatttgctcctaaaccaaatgatggagaaaacagtcttttacggtaatttttatctttttcttgtctaatttttctatgagattttttatttaaatagtcagttataaacattaaaatattacttgatattttgaaaattaaaatgatatatgctatgaaataattttgattattttaaatatatcactgttaaaccggtcgtccaatattagtatagtaccactttctctctacaatctctttagctttatatacatttttataggttttctaaacgtctttgtcccacaataatctctctaagtacatttttatacattttctttacaaatatttgtatacattttatatacgtatttttctatgcttaagagttttggtttacaaataatataaataattgagtatgtgaatccgacatccacgagatagtcttaatataagtgacaatagttttaaaatataagtaacaaaaactagaaatatgttttttgcagattttttgaattaaaagcattttatgcaattgatgattaaaagattcaattgaaaaaatctcaaacttgtttttcttttatcatgtaataaagttgtagttccacttgagaatatgttttttttttcctgatatccattcggcggaaattacatatatatcattttttaaaaatgttacatatcacttattaatttttttaaaaataattaacgatttattaatttatcgatttatgtcattttttacattgtttcaatttgaaatcgatttttttttattaaattataaaaatgttaatttattgagtattaatttatagagattttattctatataacattaggtggagaattacatttatattcttcttaccttcatattaggtggaggattacatttatattcttcttacataagataagaaaaagaacacgtgaactactgaacacgtgaacgcgtgatccaccaccggttcgttctgcaataccgtctcaagtataaaactaaaaattgatcgacaaaaaaaaaaagactatatataatgcctcccaagtctcttcagtgtcatcaaagtataaagtaaaaacaaagactcgagttaatatg

SEQ ID NO: 35112 - DNA, 3003 bp, Unknown; identical to SEQ ID NO: 35111
  misc_feature (1)..( 3003): 2750-1469P.txt file - cDNA_ID_3084820; gDNA_ID_2926247; Annot_ID_204257

SEQ ID NO: 35113 - DNA, 3003 bp, Unknown; identical to SEQ ID NO: 28012
  misc_feature (1)..( 3003): 2750-1469P.txt file - cDNA_ID_3084836; gDNA_ID_2926261; Annot_ID_204747

SEQ ID NO: 35114 - DNA, 3000 bp, Unknown
  misc_feature (1)..( 3000): 2750-1469P.txt file - cDNA_ID_3084840; gDNA_ID_2926261; Annot_ID_204743
aaagcttttcgagacatcaaatttcaatgagattgtttttgtttagatttgaatcgttgggctaatttggtaaataaatctacaaactatgcccaagtagcttattcatactcacgaatgaacattaagatgccacgaagctacataattatcatgttagaacaccgtcattgttctcttcagtattaatagtaaaaaaaccaaattgacgatttctcgaagactattaaaggaatatccgcaaagaagaaaaaaaaacatttttttggtaaaggactaatctttttgtttgcatcggccatctctaaccttacgattgtgtgttcttgctttgagcgaaaccctagaatcggtcttaacccatttgagcagagatgctgcgagtagcaggaaggaggcttttttctgtttcgcagagatcatcgacggcgacctccttcgtcctttcccgtgaccataccctttccgatggaggcaactcctcttccgcttctagatctgtcccctctgcagatctctcatctttcaattcttaccaccggagcgttataagaggtctgccgatctacaactctttctgtctctcgattgattttcatttctggtgttatccattgaatgattcataaatttttaaaagtcacctcttttgggcttgtataagtccggaaatgattgagattcctagtttcgtatctgcgagatgatctatgggaattaagtcatctgttttgaattcttatgatgtgtattagagcttgatgtaccatttcgtctcattcttctccttgctggaatagtgattgatcggatatgaattgaccagctttgagataatccttttttgatgagataatcgattttgacatgtagtttattcattattatggaaatggatgttttatcgtctttgggcacatcatataagatacttgcatcagtaaacgaatctggaattccatatctttaaccaaaagggctatgtttgcaatcttatcttaggagttttcttatgttttaagcatttatgatcattgaagttccttccttggatcttgcgttagatagattagtttagttttcactgaatttgatatcatggtagaaaattgtttggatgacaccttctgttatctcttggaatccgtttttataatcttatgttattctatgcattaatgttaaatgtttgctagtgttattcctttcttctgtgttatctcttgaaaatatttttgcttaatacttggtgttgttgaacacttgaccaagtataaagtttgcccttgatgtgaaatattaatgtttcatgctattttcaggttttgcttctcaagtcattactcagggaaatgagataggttttggttcggaagtcccagccacagtcgaagctgtcaaaacacctaactcaaagattgtctatgacgaccataaccatgagcgttacccacctggtgaccctagcaagcgggcattcgcctattttgtcttgtcgggtggaaggtttgtttatgcctctgttctccgcctgcttgttctgaagcttattgtgagcatgtctgcaagtaaagatgtccttgcccttgcatccctcgaggttgacctagggagcatagaaccaggaactaccgtgacagtcaagtggcgtggaaagcccgtcttcatcaggcgaagaacagaagatgacatcaagctggccaatagtgtggatgttggatccctgagggacccacaagaagactcggttagagtcaagaatccagaatggttgatcgtggttggagtatgcactcatttggggtgcatccccttgcctaatgctggtgattatggtggttggttttgtccgtgtcacggatcacattacgatatatctggaagaattaggaaaggtcctgcaccatacaacctggaagtaccgacctacagcttcttggaagagaataaattactcattggttaatgaataaagcacaacagtccgagtgtcatggtctggatgatcttaaatctgtttttgtttttatattttccggcattttagcgtgcaagttcgctttcctcacactttgggctcagcaaaaattggcttgttttgctgaataatacaaacttgtcattgtatgacttagtatctgtctcatctggtgaaaatacattgttcatacttcatagtctctgtttattatttgaaaagagttttgaatagtatcatccctatttttcttatgtttgtaattttgtaacatatcgtttgtaagagagtttcctttccttaaagtctgtagccattatcacaattgagacaaaaacttggtaaggttcaaggtgtgttataaaactttcgtgttcttactggagacgacatttcgaagaccttcaattctcaactaagccataaaccttctcttccatagtgagaaatccaattgtgaacctcgagactactactttgatgaaagatgtcatattctggttgtggatcttagcctaattttcttgttcagattgttttcatcgatgactacttctttgatgatgtccttctagctctttcttctagtattgaaaagttcacacagatgtaaaacagtctttttgttggaaatcttgtttaaacattacaacaacaaaatatatcctttaccaagtatagaccccctattattattattaaaaattacgatttttatacaaataaaataatttatcttacaaatacacacacacaaaaaaattatatcgtaaaaccaaaagattttattaattaaaattagaaaaaaaaccatgccatcaaaatcctgaagtaaaaaaatatcaagtaatacgcaaaaaccaaaaaaaacaaaacaaattgaccttttctcaaagacaatttttaagggacttactagtaagtagtctcttatgttttgttttgcatcggccgtcccaaacctgaggatttctctgttcagctagagcgaaaccctagattcacatttgagctgagagatg

SEQ ID NO: 35115 - DNA, 3003 bp, Unknown; identical to SEQ ID NO: 28389
  misc_feature (1)..( 3003): 2750-1469P.txt file - cDNA_ID_3084842; gDNA_ID_2926261; Annot_ID_204739

SEQ ID NO: 35116 - DNA, 3003 bp, Unknown
  misc_feature (1)..( 3003): 2750-1469P.txt file - cDNA_ID_3084846; gDNA_ID_2926261; Annot_ID_143220
ctttcacgtaatgctcaaactgagtatcttagaggtttcctcaacggtcaagtcgataagcagaacttcaagaaaaacgtacccgttgtgacctacgaagatattaggtcttatatcgaccgtatcgctaatggagagccgtctgatctcatctgtgatcgacccatcagtgtactcttgaccaggtaccttcaaaacagtttcaaaggttgcatgttaaagttaaatccttaaatgtaagatcttgacttgaagttcagaagaaacttgaaatctaggctcttacataacctaaattatattcgacccatttggttcaaaacttgttgatacatgagtttgtttaggcttgataatgtagattaaattaaagtatagtttattataaaatctgaaaagccttaaggaaaccattgtatttgcagctcgggtacttcaggaggagttccaaagttgattcctttgacaacagaggatttggaacagaggatttcgttttcttctctctatgcacctctactctacaagtaaagagttaaaaactccgagttttgtctctttgttgataccataaacagtaagtagtaaaaccccgagtccgatgttgttactgtttgcaggcacatcgatgggcttagcgaaggaaaatctctcatattttattttgtgacccgagagagcaagactgccaatgggttgatggtcaggactatggttactagttttttgaaaagcattaaacagaccaactcatttctttggttagtcaataaaacccttacttgcacgttacattacataattcagtctttccacaagtgattaaccgaagtgcctaacaaacaagcctcttgatactactcgtgtttctttactgtgtttgttctattacttgcagggatagcttacaggtaagcccgcatgcgattactacttgtgcagacactactcagagcatgtactgccaattgctttgtgggcttcttgaaagagataatgttgctcgcctcggtgcaccctttgcttcatcattcctcaaagtaatcaagttcttggaagatcattggcctgagttatgctcaaacataaggactggccgtctcagcgactggatcacagacgcgacctgtacttcagggatcggtaagttcctcactgctccaaatccggaactagcaagcctgatcgagcaagaatgcagtaaaacatcatgggaggcaatattgaagagactttggccaaaagcaaaatgcatcgaatccatcattacaggcaccatggcacagtacattccattgctggaattctatagtggtggtcttcctttgacttcatcgttttacggcagctctgaatgtttcatgggtgtcaactttaatcctctgtgtaagcctagtgatgtgtcgtacaccatcattccatgtatggggtacttcgagttcttagaggtcgagaaagaccatcaagaagctggtcatgatcccacagagaaacctgtggttgtcgatcttgtcgatgttaaaatcggccatgattatgaacctgttgtcacaacgttttcaggtaactcttttctcttgttaaccataaccgtttcaaaataaatgtcgttttgaaattttattgcagtcttcggttttttaaatgtgtatcaaaattctatatgtttctgcctaccaaaaaaataaataaaaaatctatatgtttcttcaagatctatatatgattttacaggtctatataggtaccgtgtgggggacgttttaagagcgactggtttctacaacaatgcgccacatttttgtttcgtgggaagacagaaagttgttctgagcatcgacatggacaagacctacgaagacgacctcctcaaggcagtgacaaacgcaaagctcctgcttgagccacatgacctgatgctcatggatttcactagccgtgtagattcgtcctcgtttccaggacactatgtaatctattgggaactcgggagcaaagtcaaggacgccaagtttgaacctaaccgcgatgttatggaagaatgctgcttcactgttgaggagtctctcgatgctgtatacagaaaaggacgaaagaatgataagaacattggaccacttgagattaaggttgttaagcctggcgcttttgacgagctcatgaacttctttctgtctagaggctcttctgtgagtcagtacaagacaccgaggtcggtgacgaatgaagaagccttgaagatattggaggccaacgttatttccgagtttcttagccggaaaattccatcgtgggagttacatgagttacactccggcagataaacccgcagtcataatatctgtgagatttgagggcaggggaggagaacaatgtttacgacttttcttaatttaaacctctctgtttttttccagccaacaaatgctctgttcttcaagtttttatctttacaaatgcatcagagttaccaaatgcatgtttataagtcatttcccacattgtaaataactttaccaaatgcaccatagtcgagccattaattttaaatttcgaaaaaaaccgaaaccgtcaataatcatgttgctcacagttactacaactgggctaggtcaaattactgttttttttttaacttgaataattataaaatcacaataagacgggggtcaaaactcataattaaactgggatatctacaaattcgaaagaaactttgtttggtgtcaactgaatccgtaatgcttaacttgcttccgcggccctgtcggaaactcatcctcaatttccggctcacgaactttttgccacatgacaccttttatctgcacagagagagagagagatgggtcagatccaatccactgcagccagcgcaaaggtttcttctctcactcttttgtaagcaatttcgtgatccacaagtgactagacttgacctaaaccgtaagtgttttgctttttgtttttgttgttgcagacaatagaaaagcagcaatcatg

SEQ ID NO: 35117 - DNA, 3003 bp, Unknown
  misc_feature (1)..( 3003): 2750-1469P.txt file - cDNA_ID_3084846; gDNA_ID_2926261; Annot_ID_204738
catagttctgaagcttcgagagagaggggccagaaggtcacccagaacagaggttttgcagacaatagaaagcagtaagcaagcatgttaccaaagttcgatccaacaaaccaaaaagcttgtctgtctcttcttgaggatttgaccaccaacgtaaagcagattcaagattccgtattggaagcaatactttcacgtaatgctcaaactgagtatcttagaggtttcctcaacggtcaagtcgataagcagaacttcaagaaaaacgtacccgttgtgacctacgaagatattaggtcttatatcgaccgtatcgctaatggagagccgtctgatctcatctgtgatcgacccatcagtgtactcttgaccaggtaccttcaaaacagtttcaaaggttgcatgttaaagttaaatccttaaatgtaagatcttgacttgaagttcagaagaaacttgaaatctaggctcttacataacctaaattatattcgacccatttggttcaaaacttgttgatacatgagtttgtttaggcttgataatgtagattaaattaaagtatagtttattataaaatctgaaaagccttaaggaaaccattgtatttgcagctcgggtacttcaggaggagttccaaagttgattcctttgacaacagaggatttggaacagaggatttcgttttcttctctctatgcacctctactctacaagtaaagagttaaaaactccgagttttgtctctttgttgataccataaacagtaagtagtaaaaccccgagtccgatgttgttactgtttgcaggcacatcgatgggcttagcgaaggaaaatctctcatattttattttgtgacccgagagagcaagactgccaatgggttgatggtcaggactatggttactagttttttgaaaagcattaaacagaccaactcatttctttggttagtcaataaaacccttacttgcacgttacattacataattcagtctttccacaagtgattaaccgaagtgcctaacaaacaagcctcttgatactactcgtgtttctttactgtgtttgttctattacttgcagggatagcttacaggtaagcccgcatgcgattactacttgtgcagacactactcagagcatgtactgccaattgctttgtgggcttcttgaaagagataatgttgctcgcctcggtgcaccctttgcttcatcattcctcaaagtaatcaagttcttggaagatcattggcctgagttatgctcaaacataaggactggccgtctcagcgactggatcacagacgcgacctgtacttcagggatcggtaagttcctcactgctccaaatccggaactagcaagcctgatcgagcaagaatgcagtaaaacatcatgggaggcaatattgaagagactttggccaaaagcaaaatgcatcgaatccatcattacaggcaccatggcacagtacattccattgctggaattctatagtggtggtcttcctttgacttcatcgttttacggcagctctgaatgtttcatgggtgtcaactttaatcctctgtgtaagcctagtgatgtgtcgtacaccatcattccatgtatggggtacttcgagttcttagaggtcgagaaagaccatcaagaagctggtcatgatcccacagagaaacctgtggttgtcgatcttgtcgatgttaaaatcggccatgattatgaacctgttgtcacaacgttttcaggtaactcttttctcttgttaaccataaccgtttcaaaataaatgtcgttttgaaattttattgcagtcttcggttttttaaatgtgtatcaaaattctatatgtttctgcctaccaaaaaaataaataaaaaatctatatgtttcttcaagatctatatatgattttacaggtctatataggtaccgtgtgggggacgttttaagagcgactggtttctacaacaatgcgccacatttttgtttcgtgggaagacagaaagttgttctgagcatcgacatggacaagacctacgaagacgacctcctcaaggcagtgacaaacgcaaagctcctgcttgagccacatgacctgatgctcatggatttcactagccgtgtagattcgtcctcgtttccaggacactatgtaatctattgggaactcgggagcaaagtcaaggacgccaagtttgaacctaaccgcgatgttatggaagaatgctgcttcactgttgaggagtctctcgatgctgtatacagaaaaggacgaaagaatgataagaacattggaccacttgagattaaggttgttaagcctggcgcttttgacgagctcatgaacttctttctgtctagaggctcttctgtgagtcagtacaagacaccgaggtcggtgacgaatgaagaagccttgaagatattggaggccaacgttatttccgagtttcttagccggaaaattccatcgtgggagttacatgagttacactccggcagataaacccgcagtcataatatctgtgagatttgagggcaggggaggagaacaatgtttacgacttttcttaatttaaacctctctgtttttttccagccaacaaatgctctgttcttcaagtttttatctttacaaatgcatcagagttaccaaatgcatgtttataagtcatttcccacattgtaaataactttaccaaatgcaccatagtcgagccattaattttaaatttcgaaaaaaaccgaaaccgtcaataatcatgttgctcacagttactacaactgggctaggtcaaattactgttttttttttaacttgaataattataaaatcacaataagacgggggtcaaaactcataattaaactgggatatctacaaattcgaaagaaactttgtttggtgtcaactgaatccgtaatgcttaacttgcttccgcggccctgtcggaaactcatcctcaatttccggctcacgaactttttgccacatg

SEQ ID NO: 35118 - DNA, 3003 bp, Unknown
  misc_feature (1)..( 3003): 2750-1469P.txt file - cDNA_ID_3084850; gDNA_ID_2926261; Annot_ID_143219
tgtaacctacgaagatattaagccttatatcgatcgtatcgccaatggagagccgtctgatctcatctgtgatcgacccatcagtgtactcttgactaggtatcttccaaacaatttcatagatttgtatttataagtttaatgcaagatttgaaagaatttagaccagactagaatatgagaagagactttaaatctaggctcacataacccaaataagatctacccactttggattttcttaattcctctgttttgcctgaagaattgtggttaaaaaattattgatacatgagtttgtcaatcttttaaaaaaagtacattaaggaagggattgtatctgcagctcaggtacttcaggaggagttccgaagctgattcctttgacaacagaggagttggaacagaggatttcgtttgcttctctctatagacctctactctacaagtaaagagttttccaaactccaacttgtgtctgttttattgatgataccaaaagaaaaagagtaggtaaaaccccaaactcattgtatctacggtttgcaggtacatcgagggtattagagaaagaaaatctttcatgttatatttcgtgactcgagaaagcgagactgcttctgggatactggtcaggactatgataacttgtgttttgaaaagcgtgacgccagctaactcttttatctggtaaatctataaaaacctttgctcccacgttacattacacaattcattctttctgctactatttctttattgtgtttgttatatgacttacagggatcaatcacagataagcccgcatgcgattacgacttgttcagacactactcagagcatgtactgccaactgctttgtgggcttctacaacgagataatgtaggtcgccttggtgcaccatttgcttcatcctttctcaaaataatcaagttcttggaggatcactggcctgagttttgctcaaacataaggactggttgtctcagtgactggattacagacccccaatgtgtttcagggatcggtaagttcctcactgctcctaatccggaactagcgagccttatcgagcaagaatgcagtcaaacatcatgggaagcaatagtgaagagactatggccaaaagcaaaatgcatcgaagccattgttacaggaaccatggcacagtacaatccattactggaattctatagcggtggtcttcctgtgatttcaacgttttatggcagctctgaatgtttcttcggtctcaatctcaatcctctgtctaagcctaatgaggtgtcgtacaccatcattccatgtatggcttatttcgagttcttagaggttgagaaagactatgaaagtggtcatgatcccgcagagaatcctgttgtagtcgatcttgtcgatgttaaaatcggtcatgattatgaacctgttgtcacaacgtttgctggtaagtgttttttcttgtttactctctcaatttcaaaactaaatgacatgttaataattttcttaatgtgtatcaaaattctttatacaggtttgtataggtaccgtttaggggacgttttaagagtgactggtttctacaacaatgcgccacagtttcatttcgtgggaagacagaaagttgttctgagcatcgacatggacaagacctacgacgaagacctcctcaaggcagtgactaacgcgagtctcctgcttgagccacatgacctaatgctcatggatttcactagccgtgtggattcctcctcgtatccaggtcactacgtgctctactgggaactcgggagaaaagtcaaggacgccaagcttgagcttgaccagaatgttttggaggaatgctgcttcaccattgaggagtctctggacgcggtttacagaaaaggacgaaagaatgataagaacattggaccacttgagattaaggttgttaagcctggcgctttcgacaagctcatgaacttctttctgtctagaggctcttctgtgagtcagtataagacaccgaggtcggtgacgaatgaagaagccttgaagatattggaggccaacgttgtgtccgagtttcttagccagaaaactccgtcgtgggagctacatgagctgcattccagccgataaaaccgccctcacaatttttttttctagttgagagtaggatacttaagaagggtgaaacaatgtagaacctaaaataaaacttagcaatgatgagaaaattttactctcacttgtcctaccattcaaagctatataccattgatgggatatcaaataagagtataccattgtaaccatccaaaaatctttaactcctctactacgcaagatttttgaccgaccttatcacatggattttgtctttgttgtttcaaaagcttgtcaaaaatagttacacaaaatatgggaaaatcacaaaatcatgttttttttataatattttaaatagaatttttctaattaagtttaaatatttaaaagactaggttaaaaatacaaaactacatttttgttatgtttttggtatcttattaataaataaataaacccgaaaaggactaaaaatacaaaagctaaaaaggctcaaggcccaatataaaagaaacgaaaagcccaataacgatttttttttgttaaacaagttacttttttgagaaacgaaaaaaaaatctaaatatttggacatatgcagtaaaagtctaaaatgtatcagactttcaacaacgtgtcaatactcaatacccaataaaagcttttatctcctcgtagtactcaagttggatttgttttctcatcctttgttaaatcctctttatgagaaaagaacaaaatcaactcatacatacacaattgccggtaccctaacatttcgccacaccacaccttttgtctcctttatccaatctctcctccatagttctgaagcttcgagagagaggggccagaaggtcacccagaacagaggttttgcagacaatagaaagcagtaagcaagcatg

SEQ ID NO: 35119 - DNA, 3003 bp, Unknown; identical to SEQ ID NO: 35118
  misc_feature (1)..( 3003): 2750-1469P.txt file - cDNA_ID_3084850; gDNA_ID_2926261; Annot_ID_204737

SEQ ID NO: 35120 - DNA, 3003 bp, Unknown
  misc_feature (1)..( 3003): 2750-1469P.txt file - cDNA_ID_3084854; gDNA_ID_2926261; Annot_ID_143218
ccaactcatctctttggtaaattaacaaaaactttttccccacgttacattacacaattcacttttttgtgaacatgctcattggtgcttactactgtttgtttttcgtgtttgttatattacttgcagggatagattacagataagcccgcatgaaatttctacttgtgaagacactactcagagcatgtactgtcaattgctttgtgggcttctacaacgagataatgtagctcgcctcggtgcaccctttgcttctgtcttcatcagagtaatcaagtacttggaaggtcattggcaagagttatgctcaaacataaggactggccgtctcagtgactggatcacagaccctcaatgtgtctcagggattagtaagttcctcaccgctccaaatccggacctagcgagccttatcgagcaagaatgcagtaaaacctcatgggaggcaatagtgaagagactttggccaaaagcaaaatgcgtcgaagccgtcgttacaggctccatggcacagtacattccgttgctggaattctatggcggtggtcttccgttgatttcatcgtggtatggcagctctgaatgtttcatgggtgtcaatgtcaatcctctgtgcaagcctagcgatgtgtcgtacaccatcatcccatctatggcgtacttcgagttcttagaggtcaagaaagaccaacaagaagctggtcttgatcccatagagaaccatgtggtcgtcgatcttgtcgatgttaaaattggccatgattatgaacctgtcgtcacaacgttttctggtaagtatttgttgcagagtctttgcttagagaaaatgatagaaagacaaaataatcattttaattgttttcttaatgtgtaacaaaaaatgtctctctcaagatctccatatggtttgacaggtctgtataggtaccgtgtgggtgatcttttaagagttactggtttctacaacaattcaccacatttccgtttcgtgggaagacagaaagttgttctgagcctccacatggccaatacatacgaagaagacctccttaaggcagtgacaaacgcaaagctcctgctcgagccacatgacctgatgctaatggagttcactagccgtgtggattcgtcctcgtttgtaggacactatgtgctctattgggaacttgggagcaaagtcaaggacgccaagctcgaacctaaccgcgatgttatggaagaatgttgcttcaccgttgagaagtatctggaccctctctatagacaagaacgaagaaaagataagaacattggacctcttgagattaaggttgttaagcctggcgccttcgacgaactcatgaatttctttctgtctcgaggctcttctgtgagtcagtacaagacgccgaggtcggtgaagactgaagaagccgtcaagatattggaggccaacgttgtttccgagtttcttagtcaggaaactccgccgtggggataaaaccccgtcattttctcttttttttacttgagggcagcagatagtttagaaaacttttcttgatttttttaattactaaattagtcttccatatcataatctaaaaattccttttaatgtttggacaaatactggaagttccaatatccctaaccttaaatctatatcaaaggtagttgtaattcggattcggaaaaatccagatttgtactttaattgtgcacaaaccttattattatatataattaaaaattaggaattttgtagactacatttttatgtgtacttattttaaaaaataacatgtgttgaattttcagtgttaaaaaaaacatgtgttgaattttttggaaattgtctttttcttttaatgcctaaagtcaaatatgtatcaccaatccgtttcacggtcatttcccgtagatcagtccaaattttaaattactagtcaaaaatttgttactttagacattcaactattttaaagactacaaaatgtctgattacaaaaacaaatccattcactcattttatcttacaacaaaataccaaactagtcaaaattttgtttttataaacattcaactattttaaagactagtttttctcattgtctttttttacgtagttgtctgataaaaaaacaaatccatttactcattttgtctacaaatggataccaaactaatatgagttcaaattatgaatcttataccaattttttattttacaaatattactctgtacatgtgattctgagtttaaatatatatgaccaaaactacaaaaataatctatattaaattaaatttaattaaaacgtactttctaaaataagaaatctcgtatgtatgtgcggatcaaatcgagtttgaaattatattttcacctataatacattatatttatgttgtgattcaatttgattttttttttaaattacatttttacagaaaaatgtttctataagtgtccaatgatatccatagcatctttcctgaaattgggataccataatctttccgaaaatgtgatatataccatccacaatctaaaacacttgtaccacaagattgatgaccgtagtagtaaccacatggtttttgtctgcattcattgtttctaaagattgggggaaaagacaaaactacttaatcttactttcaaatcttcaacgtgtcactgatttctccatttaaaatgtttttatctcctcgtagtgctcaccaaaaggttggactctctatgctaattgaccctcttcctgaaaaaaataccaaatctggcaactcatccacaattttacgccaccgaacatttcgccaaaccacacattttgtctgctttctacttcgccagggaaagtggccagagctcatctacttcgcaagaactaagcaatctcttgtaaggtttgttctttcactttcttgtaagcaatttcattggaaggacttaaaatcaggattttctttttggttattgttgccgacagtcaaaaggcagcacaagcaatcatg

SEQ ID NO: 35121 - DNA, 3003 bp, Unknown
  misc_feature (1)..( 3003): 2750-1469P.txt file - cDNA_ID_3084854; gDNA_ID_2926261; Annot_ID_204736
ttaaatgttttgcagctctggtactacagcaggaattcaaaatttgattcctttgacaacagaggatggggaacagaggattatgtttggatctctctatagatctttactctataagtaaatatttctaaactccaacgtgggtttgttttattgatgtgataccaaaagaaacattcattgtaattgcaggtacgtcgaggggattagagaaggaaagtctctcacgttctatttcgtgaaccctgaaagagagactgcctctgggatactgatcaggactatgataacttgtattttgaaaagcgtaaacaaaaccaactcatctctttggtaaattaacaaaaactttttccccacgttacattacacaattcacttttttgtgaacatgctcattggtgcttactactgtttgtttttcgtgtttgttatattacttgcagggatagattacagataagcccgcatgaaatttctacttgtgaagacactactcagagcatgtactgtcaattgctttgtgggcttctacaacgagataatgtagctcgcctcggtgcaccctttgcttctgtcttcatcagagtaatcaagtacttggaaggtcattggcaagagttatgctcaaacataaggactggccgtctcagtgactggatcacagaccctcaatgtgtctcagggattagtaagttcctcaccgctccaaatccggacctagcgagccttatcgagcaagaatgcagtaaaacctcatgggaggcaatagtgaagagactttggccaaaagcaaaatgcgtcgaagccgtcgttacaggctccatggcacagtacattccgttgctggaattctatggcggtggtcttccgttgatttcatcgtggtatggcagctctgaatgtttcatgggtgtcaatgtcaatcctctgtgcaagcctagcgatgtgtcgtacaccatcatcccatctatggcgtacttcgagttcttagaggtcaagaaagaccaacaagaagctggtcttgatcccatagagaaccatgtggtcgtcgatcttgtcgatgttaaaattggccatgattatgaacctgtcgtcacaacgttttctggtaagtatttgttgcagagtctttgcttagagaaaatgatagaaagacaaaataatcattttaattgttttcttaatgtgtaacaaaaaatgtctctctcaagatctccatatggtttgacaggtctgtataggtaccgtgtgggtgatcttttaagagttactggtttctacaacaattcaccacatttccgtttcgtgggaagacagaaagttgttctgagcctccacatggccaatacatacgaagaagacctccttaaggcagtgacaaacgcaaagctcctgctcgagccacatgacctgatgctaatggagttcactagccgtgtggattcgtcctcgtttgtaggacactatgtgctctattgggaacttgggagcaaagtcaaggacgccaagctcgaacctaaccgcgatgttatggaagaatgttgcttcaccgttgagaagtatctggaccctctctatagacaagaacgaagaaaagataagaacattggacctcttgagattaaggttgttaagcctggcgccttcgacgaactcatgaatttctttctgtctcgaggctcttctgtgagtcagtacaagacgccgaggtcggtgaagactgaagaagccgtcaagatattggaggccaacgttgtttccgagtttcttagtcaggaaactccgccgtggggataaaaccccgtcattttctcttttttttacttgagggcagcagatagtttagaaaacttttcttgatttttttaattactaaattagtcttccatatcataatctaaaaattccttttaatgtttggacaaatactggaagttccaatatccctaaccttaaatctatatcaaaggtagttgtaattcggattcggaaaaatccagatttgtactttaattgtgcacaaaccttattattatatataattaaaaattaggaattttgtagactacatttttatgtgtacttattttaaaaaataacatgtgttgaattttcagtgttaaaaaaaacatgtgttgaattttttggaaattgtctttttcttttaatgcctaaagtcaaatatgtatcaccaatccgtttcacggtcatttcccgtagatcagtccaaattttaaattactagtcaaaaatttgttactttagacattcaactattttaaagactacaaaatgtctgattacaaaaacaaatccattcactcattttatcttacaacaaaataccaaactagtcaaaattttgtttttataaacattcaactattttaaagactagtttttctcattgtctttttttacgtagttgtctgataaaaaaacaaatccatttactcattttgtctacaaatggataccaaactaatatgagttcaaattatgaatcttataccaattttttattttacaaatattactctgtacatgtgattctgagtttaaatatatatgaccaaaactacaaaaataatctatattaaattaaatttaattaaaacgtactttctaaaataagaaatctcgtatgtatgtgcggatcaaatcgagtttgaaattatattttcacctataatacattatatttatgttgtgattcaatttgattttttttttaaattacatttttacagaaaaatgtttctataagtgtccaatgatatccatagcatctttcctgaaattgggataccataatctttccgaaaatgtgatatataccatccacaatctaaaacacttgtaccacaagattgatgaccgtagtagtaaccacatggtttttgtctgcattcattgtttctaaagattgggggaaaagacaaaactacttaatcttactttcaaatcttcaacgtgtcactgatttctccatttaaaatg

SEQ ID NO: 35122 - DNA, 3003 bp, Unknown; identical to SEQ ID NO: 35121
  misc_feature (1)..( 3003): 2750-1469P.txt file - cDNA_ID_3084854; gDNA_ID_2926270; Annot_ID_205107

SEQ ID NO: 35123 - DNA, 3003 bp, Unknown
  misc_feature (1)..( 3003): 2750-1469P.txt file - cDNA_ID_3084858; gDNA_ID_2926270; Annot_ID_143419
tttatgttaagctattttcaaaaaatccttctttgatattgacttggacgtacggtatctctgacaagcgagacttttagcatgctttcggcttcgaagattcaaatattgcggctgctttgctttgattccgctgagagtggaactccccccagataacaatgatgatcttcgcatgcacatgaagatcgcaactcttatgtgtgaatagatttcgatatacactatattcatttacgtgcatctttaatttatctcatatattcatcctttgtggggtatgttcgtagactcgtagcaatcaaaacattagggtaaaatgttatcagtagtaatgagtttataatgtggtcccaactcccaattgcagactttaaaaattatttttttcagacttgaactgcacaatttagaaaactaaatgttacctctatctatttgtttaagttttatggtttattcttaaaactcaaaagaatgctttgtgtattttgtatagtttctctttgtcaatgcttatatgtatttaaaatacatgagaagaggaattagctcatagaagtgtcaaagtcttcttacatagtatatagcttactcaatttctaaaacttttgtcaagttttgtaatagacattctgatttctagaaagtatatatactgtgcattttctaaacttctggtattataaaacaaaaaaatcgataaaacaaatcatattatcagatttttaacaacatgcaactttttctaagtaaactaacaaaaaaaagaaattacaattattcctcacatgttaaaacaggcttttgatcaggtccggcccaacccgccagcccaaagcccgccagagctattatcaaactttaccaaactgatagatgcttctttccaaagattaactaacatagtgaagcaacaagctctatgaagggtcagctagagaatgttgtctgtgcttacttggatgagtcaactcctcaactgtatcttcctattctctgatacaagaagtcaaaagtttcttcagactttgccttcatcaatgtttctttaattataaacccatgccgaaatgcagcttggatcgtgatctgtttccatttgatagcttgctggagtttctaatctcttcttcttcttccagcttctttctccttgcagcctcctccttctgtctctgcaggagctccaattctcgatacctttcctcttctttacgttgaagttccattgcttctcgcctttgagattcttcaaccctcctactattttcttctaacatcttatccagctcttctctttctctcctagcttgttccttttaattaatttccaaactttttagtttcagcaagtattccaaagccagaaaaccaaacaaatagagcggcaaaattgaacaaacaactagctagacttacttcttttcttcttgcctcgtttagagcagcttctttttctttcttcagctgtatttccacgtcaagaaacatcttctcataagcttcctttgtccgtctttcaatttcttctttaacttcttcggttttcatcctttcctctacatttttccttactgcttcctcaatccgctgtgcagtctcttcttctagtcgcttgagctccgcctcatgctgcaatctacatttagtaagggaaaaaagatttagaaagaagataagactgataacactagccaataaaaacttttcaagatcatataaacgcacaaattgatcagttattcttctattcatgtccaaacagtattcaatttagataaggaaacaaagaggttgatcaacaatcacagaggcgataattcaagaaatgtatttttgccctttcgtgcatgtcaacttgctcactagcaaaatacattcccctaatgtggaaaactatattgcttcatacacaaaataataaagtataatacaatctgaaagacaaagacaatgtttaatcaattaccttgccttgtcttcctgttctttcttcacttcaatcgcaattctatgctcggaaggagacaatgaactacttctatccctttggtgttgccttggtgcaggagatctgctcttcttatgcctacaaaaattggaaacctactcttatgaaaatgtgttgaactaaagcagctccttcttcactagcagctggacatcgaacattaatgtccatagaaattcgtttgcaaaacagcaacgatccaaagtgaagtaacaaatttgaaatttgttctcgacaaaatcgctaaaccctaaacctattctctaagccctaatcctattctctaatcccaagtatctaaacgtaattcccccacatcaccataagatacgagattcgatttctccacattaagcaaggaagattgttgcagaccttgatgtgtagggtgagcggctgcggtcgcgcctggtacgacggctgctacgatgagtcacaggcgagcgagagtaccgtcggcggtgagacggcgacctagatcgcgagtcgtttcgagccattttcaccaccgcaattatttgattggtcaaattgatttctctctttcggagcttttttatgcgactgctctcgtacgatttatcgatcggttcaatattttgttaaccggacagacgcaagttgaaccgaccttgtttgcggtttaattcaaaaaaaaattatcctaattaattagggttaatgaataaatttatctttctaaaaatgggattttctttacttatgctttgtcagttaattctatttatggaaataagaacaaatcatacggcaacgaacatatcgtcacaccacaccatttgactgactgctttttctaatctctccttacaaagctttcaagcatagaaagacacaggccaaagctcatccatccacctcgccagaacaaaggtttgcttgctcttcactcttttgtaaacaatttcgtgatacgacttagaaggttttttttttttgttgttggcagacaatcaaaagcaagcatg

SEQ ID NO: 35124 - DNA, 3003 bp, Unknown; identical to SEQ ID NO: 35123
  misc_feature (1)..( 3003): 2750-1469P.txt file - cDNA_ID_3084858; gDNA_ID_2926261; Annot_ID_204735

SEQ ID NO: 35125 - DNA, 3003 bp, Unknown; identical to SEQ ID NO: 35123
  misc_feature (1)..( 3003): 2750-1469P.txt file - cDNA_ID_3084858; gDNA_ID_2926270; Annot_ID_205106

SEQ ID NO: 35126 - DNA, 3000 bp, Unknown; identical to SEQ ID NO: 28457
  misc_feature (1)..( 3000): 2750-1469P.txt file - cDNA_ID_3084862; gDNA_ID_2926261; Annot_ID_204734

SEQ ID NO: 35127 - DNA, 3000 bp, Unknown; identical to SEQ ID NO: 28457
  misc_feature (1)..( 3000): 2750-1469P.txt file - cDNA_ID_3084862; gDNA_ID_2926270; Annot_ID_205105

SEQ ID NO: 35128 - DNA, 3003 bp, Unknown
  misc_feature (1)..( 3003): 2750-1469P.txt file - cDNA_ID_3084864; gDNA_ID_2926270; Annot_ID_143417
tttttccttatatttttgtaacgattattatttggatcaacccattgataaaaactctcttcttgttctgtttaggcatgtgaaaggtgtggaagaaggaaaagggatgatgtttcttttcactaaacaagaatccatgactccttctggcttgcctgctcgagtcgcaaccagcagctatttcaagagtgactatttcaagaaccgtccatcgaactggtattactcgtacaccagccctgatgaagtcatcttatgccctaacaacaccgaaagtctatactgccatttgctctgtggcttagtccaaagagacgaggttgtgaggacgggttccatctttgcttcagtcatggtccgagctatcgaggtccttaagaattcttgggaggagttgtgttcaaacatccgatcgggccatctcagtaactgggtcacagacttgggttgtcaaaactctgtttctttggttcttggagggccacgtcctgaattagcagacactattgaagaaatatgcaaccaaaattcttggaaaggtatagtcaaaagactttggccaaacaccaaatatatcgaaaccgttgtcactggttcaatgggacagtacgttcccatgttgaactactattgtaacgacttgcctctcgtttcaacaacttacggttcttcggagactacctttgggatcaatctagatcctctgtgcaaacctgaagatgtttcttacactttcatgcccaacatgtcttactttgagttcataccaatggatggaggagacaagaacgatgtggttgacctagaagatgtgaaacttgggtgcacttatgaacccgttgtcacaaatttcgctggtgagcttaaaaacatcgatcatgaattcaataaaatgcatacttttttctacatggtttaactaatgtttgtgaaaatgttttttttttcttcaggcttgtataggatgagagtgggagatattgttttggtgactggtttctacaacaacgcgcctcagtttaagtttgtaagaagagaaaacgtcgtcttaagcatcgattccgataaaactaacgaagaagatctgtttaaggctgtgagtcaagcgaagctcgtactcgagtcatcaggtctcgatctgaaagacttcaccagttatgctgacacctcaacatttccaggtcactacgtggtttacttggaagtagataccaaagagggagaggagaaggagacggcacagtttgagctcgatgaagaggcactctccacgtgttgtttggtaatggaggagtcgcttgataatgtttacaagagatgtcgattcaaagacggatcgatcgggcctctcgagataagagtggtgcgtcaaggaacgtttgattctctcatggacttcttcatctcacaaggtgcttccaccggtcaatacaagactcctagatgcattaagtcagggaaagccttgcaagtattggagacatgtgtggtagccaaattcttcagtatttgattgttcttccttggttttatataggttcaagtgatttgtcttctttttttttccataaagggtttggttcaattgatttgttgtgatttgagagtgtactaatttgtctgaatgtttgtttatatttttttaatatatatatttgattcagtctttatctgattttcctctttaaacggaaaacaccattgagaatttccgagtctttactcagaaacagagtattttattccattgaactgaagttggcaaagacttggaagatggccaaacaactttgagatgaaaccaaacccttcgttacacttcaccaccctgagccatgagtccatgactaacaacaagtaccaaaataacaatccggtttcgttttctttcggttcgtgtgtttttcaaaaaccaggtaaaccatgtgtagtttggttttgttttggttatgatgattttagcataattttagtagagtgtccaaaacacaaaattttatatgcagtttagtacctgactaatcttgcagcttttagaaaaataattgcaactttgcaaaattctctccaagcaaaagaaaagattggactcgtcaatagaagcaggcccggtccaaaaggtggtacatacaggcgacggcccaaaggcccaatttatccggaattaatataaaatatggttaactgtaaatatatgattttcaaatggatacactcatacaagctttgattcctaaaattagattacaaaaattatttttcgtactttgctgcatatataataattgatttgtacataacaaatcaattatacgatcgaatttcaaaattttaatagataatatactggaacaaatacatatacaaatataccaataaaaataaaactgacccaattagtttattttattttttagtaaaaaaacagatgaaaaattagaaatgttgggtccgcactcattccttatttgtgcataacactgctgccaaaacatgcgaagctaataagctcccaaaaaagtttaaagattgagaaaaagaaaaagagaactatgaactcaaagaacggtcctaccccgcaccattccaaagattttaattaatatttttatcatctattttttcttgtagatccttctctttataaaacccttttgtcacctcttctttcctcataacatcacatcatagcctaaaccaaagaaaacccttatttgcgatccccacttgttgttcatcaccaagccaagctccatgtcctagtcactccacagattccctatcatcatcaattcgtttcaaacttagttcctttcaaagtcttgtacatatatacacacacacctattattctcttggtgtgtttgtgtgttacatatacgtgtgagtacatactttgttgtaaaagtggatcggaggtatggaaagggaccggttccaccggaaacatcggcggcggcggatgataattcgtcttggaacgagactgatgtcaccgccatg

SEQ ID NO: 35129 - DNA, 3003 bp, Unknown
  misc_feature (1)..( 3003): 2750-1469P.txt file - cDNA_ID_3084864; gDNA_ID_2926261; Annot_ID_204732
actatggcctcttgtttctgcgtacggatgcatttataaaatgttgttttttcatttcgctaatttgacatttatggtagatacgtgtgtttttggaaggacacaccaaaatactagtagacgaagacaccaaaccccacttggtgtgcatatcaaagtcagaagatggagactacttggaagtttatttgatcaaaactcgtgtttgacgttgtagcttattaagaaatgacttttaactctcaaggtttacctggaacatcgttttctttttccagcgaatttctgggcaaatatccctccaggcccacacttcataagctccattaaattataagtttttaattttatgtcaaacccaaaccgttttggttgtctttaatccgttaagaaatttcagggcaactagaagcaatccataaatattattacgattacaaaatttgcttaagaggattaatcaaaatatttttgtgaaaaatatttcaaatattaactttcattacaaataaaggatttttaccccccaaaaaaaaaataaagtacttttataattaaaccaaaatattataattacctaattataaatgaatattttatgattatcttacataaaagatcgatgtttacaaaacaaatcattttcaaaagaaaaataagtacattaaataataagatcccctttgatttatggtttatttagaaagtcaaaacgcgaaaatgttcgaaaatattataaagccatttattcagtagatgtaatgtcttatacggcccgagaagcggatgcgttccgcgtagcaattgctcgggcttgcatggacgctacttaaatcgacacgattcatactatattgtctgtcaaatcgatagctcgtgggacgtatcagattcattaagaggcgatggatggcttgtcctttctcgctagaatattgccctcctcgggttaaagagctaccacagataaatgtcaccctacacacatagttcgaatatctcttttgggcaataaaatgtcatattttgtcctctttagctagtgtgatttttgagacataattgtaaagatttaattaagctaattggcgttctagatgaatggtcatcctttggtatttaagtaagaaaattcaaacttttaaaaatttgattttttttttttctttgaattatttttttctagtttgtactagtttttctaggcgattttttttaaaaaaaatcaatggatgaatttgttttgttgcaaaataaataaataaaaaaaaaaaaatatatgtagtagggttgctggaaagattatcataaaattaaatatttaacagtttatggagaaagaagataaagaacggaagagattaacaagaaaatagttttggtttttccttttagggcatttgtatcaattgaagacgaatgacaatgtttggtttggtttggtttggtagaagtaaaaaaacatatagtaccgttgggcaggataagactagactacgattggagcttaagcgagaaccatatataatatatcagtgataccattggatcgtactattgtctttgctgttgtattattgatctttatttttggttttgtttttgtttaatgcaatttcaaaaatttccaaatcctttgtaattaaattgagtgtaccaatctggagaaaagatacgagactctgttgcaggtgagtctaaagtctcttgcgttcaatttcatgttcttttctaatattgaaacttcgtttgtaatttctagtctccatcactttcatcacacgactcactcaactaaataaatagtttttgttgactcccattgtagagtcttttgtggtctttgttgtttatgaatttaactatatttttaatcattttcttaatatttatatttgactcgcagcgtagagtcttgttgtggtctggtctttgtgtatgagttttatttttcttgcgcgaaagttttaacttgtttcggaagtaccaaattttgcagaagttccttgtggatttctctgcgttttcctgacttctcatgattcatgaaacagacaccaaaagaagaataaaaaaactgatagttgcataatgttgactattaaataatcgacaagatgatacttgctgaacaattcgtcacaagttaaaacccaaggaacaaataaatcgtcaaaagttattttaaactagattacatacgcaaattttaattttatcacaattttgcatggtactagtatactgcataattgcatttaaactttcaaaatttgaaacctaagctggtattacttgtattcctctacatattacacataatacttatttattatattaagcttaccaatgtcctttgagttattttaccaaaaaaaataatgttctttgaattagttaaactaattttccatgaaacagttagctaataaatattttccatgaagccttagatcgatgtcaaagtctcacatcatgaaaggttctcacagactctacacgttttttactaagcattgctttggaaatttacgaaagaacattttccacgaaaccatattttcgacgaaattacattttccatgaatatgccgacaaaagaaaaacattttccatggatattagttaaacaaactatttatcatcagatgtctatattcctatgtaatcagctaattacttcgctcgtatattaatctattcctagttgttggaatacaaacaaaatgaagcatttgtgtgtcacacttcacacgctaaggtcagtattctataatcaactaaaacattatcaaattgtgttactcggtcgagactttttatacagttaaaacattgacccagactcacgaactgccaaatccatttaattagttagggtttctcttgctatatatagagccaagtgttaactctgttttcatatcaactatcaactaataaccaaactatccattcttttcttcttattttttcatatcaacttaaagagaaccaaatatg

SEQ ID NO: 35130 - DNA, 3000 bp, Unknown; identical to SEQ ID NO: 28456
  misc_feature (1)..( 3000): 2750-1469P.txt file - cDNA_ID_3084868; gDNA_ID_2926261; Annot_ID_204730

SEQ ID NO: 35131 - DNA, 3000 bp, Unknown
  misc_feature (1)..( 3000): 2750-1469P.txt file - cDNA_ID_3084874; gDNA_ID_2926262; Annot_ID_143238
cactttcttttttccttttttgagaagtaaaacgacgtcgtttaccatattaccaaacgatttgtttttgagtcaaccacctctttaaccagagtcattcttcagttcttcttctttttcgatctgcttcgtagagtcgatagagggaagaatcaaagaaggaagtctgtatcttttgagctctccaaaggtaaaaacactcagagatttgatttgtttttttcggtctttaccttggatacgtcattctcagatggtagcgaatttgtagatcttaaggcttgaatctatttcatatgatcaattacttatagatgtgatgatgatgcaactctttctttatttactgctatgagattcaatcaattttttatttttatttttgtgtattccatgtttttgatgttatactcatgtctggatttcgtcaaagttattttcttttagtgattttggtaaagaaacttgttcctgacgtatgaacctaattgtgttggactatgtgctccatcttcatagaaaatgatgttgaaagtgtagattggtgggtgatttttaacaagttttgtctaagtctgataccaagcttctcatattgttaattgtgtgtggtgttacagatgtttgacgaccaagacctcggcttctttgccaattttctggggattttcatcttcataatggtcattgcataccatttcgtggtggcagagcctaaattcgaatgagaatgaggtttcatctttgttagtttctacaaaaaaaaaacttataaatgtgttggaatcaatatgtctttagcattctataggtcgtgatgtttcgccagtagatgagtaatcaatgtattttgacaatgtggttttggatggattaagagttaaaagacttcatttttcgtagtgtttcaatcattcaagttttagtatgcaagttttctgtttagagcatattgcatacatgggcgaatatggtatacctggatttcccagttcttcaggtcttctctgtagctctgttacttctatcacagttatcgggtatttgagaaaaaagagttagctaaaatgaatttctccatataatcatggtttactacaggtttacttgattcgcgttagctttatctgcatccaaagttttttccatgatgttatgtcatatgtgataccgttactatgtttataactttatacagtctggttcactggagtttctgtgattatgttgagtacatactcattcatcctttggtaactctcaagtttaggttgtttgaattgcctctgttgtgatacttattgtctattgcatcaatcttctaatgcaccaccctagactatttgaacaaagagctgtttcattcttaaacctctgtgtctccttgctaaatggtcatgctttaatgtcttcacctgtctttctcttctatagatatgtagtcttgctagatagttagttctacagctctcttttgtagtcttgttagagagttagttgagatattacctcttaaaagtatccttgaacgctttccggttatgaccaatttgttgtagctccttgtaagtagaacttactgggaccagcgagacagtttatgtgaatgttcatgcttaagtgtcgaacgtatctatctctactatagctctgtagtcttgttagacagttagttttatatctccatttttttgtagtcttgctagttgagatattacctcttctcttcaaagtatccttgaacgctcaccggttatgaaatctctacactatagctctgtagtcttgctagatagttagttctttagctctctttttgtagcctagttctttagctctccttttgtagccttgctacagagtaagatgggatattacctccttgaacgctctccggttatgaccaatttgttgtagctccttgtaagtagaacttaggatagagtgagtcaactttaagaaagaacctagtatgtggcataaccagattgcaggctctgtctcggctacagtaacgtaactctatagctctttgttttgttcagaaagaaccagtgattggatgattcgtccttagaaactggacctaacaacagtcattggctttgaaatcaagccacaacaatgcctatatgaaccgtccatttcatttatccgtttcaaaccagcccattacatttcgtcccattgataaccaaaagcggttcaatcagattatgttttaattttaccaaattctttatgaagtttaaattatactcacattaaaaggattattggataatgtaaaaattctgaacaattactgattttggaaaattaacaaatattctttgaaatagaagaaaaagcctttttccttttgacaacaacatataaaatcatactcccattaaaaagattttaatgtaaaattctgaatataagatattttttacaacaacaaccaaaaatatttatttttttccttttttacagcaacaagaaggaaaaacttttttttttgtcaagaaaaggggagattatgtaaacagataaaacagggaaaataactaaccgaactctcttaattaacatcttcaaataaggaaaattatgatccgcatatttaggaagatcaatgcattaaaacaacttgcacgtggaaagagagactatacgctccacacaagttgcactaatggtacctctcacaaaccaatcaaaatactgaataatgccaacgtgtacaaattagggttttacctcacaaccatcgaacattctcgaaacattttaaacagcctggcgccatagatctaaactctcatcgaccaatttttgaccgtccgatggaaactctagcctcaacccaaaactctatataaagaaatcttttccttcgttattgcttaccaaatacaaaccctagccgccttattcgtcttcttcgttctctagttttttcctcagtctctgttcttagatcccttgtagtttccaaatcttccgataaaaatg

SEQ ID NO: 35132 - DNA, 3000 bp, Unknown; identical to SEQ ID NO: 35131
  misc_feature (1)..( 3000): 2750-1469P.txt file - cDNA_ID_3084874; gDNA_ID_2926262; Annot_ID_204773

SEQ ID NO: 35133 - DNA, 3000 bp, Unknown
  misc_feature (1)..( 3000): 2750-1469P.txt file - cDNA_ID_3084878; gDNA_ID_2926262; Annot_ID_204777
gtagcgatgtaatttttttgtaaatgtatgcatatgcatatgtgaacctgtgataattgcagtgagattagttgcatcaatcccttgagtaacctcttcagctgttgaagctgaaccaaatccacttggtcctcttcttcctgtgattagtgaatataatcccatttttaatagattgacctcaagaaacaatgtagaagagagagagcgagagagacaagagaggaagaagaagataggtttgggagaataaaatggtactatgagagaatcatatatataagtggcaaagagtcattaatgcttatttttggtaccttctagtttcatggaccttattgtgtgaatttatccatgaattataaatacacattaaacccatccccaccaatattgaatatagatatgtacagtatgtatattagttttttcttgtgacggtcgattctcgatagtgcatgcattcgaaatctaattaagaaaaagttcgtatttttcttcgatatagaaaataaactcgctgttgtcaacttaagcatgtctatttctaaataagttgttgttaaggtctctaaacttttaagtcctttttctctaaaaaaacccttctaatattggttctaaattgccgacaatggcgagtgttttccctctcttattattcgaaaatgttactataccataaaagtttattaatctttacataatttacacattactttccccttttcaaaacgaacaaaataaatcgtttgctatcaaacatgttaatgtacgttggtagtaatgtcccctccttttttaggggtatttaatgtcctctcgtttttcgaagattaaaacaaaagaatatgatttgtgtgtatagaaaaatgaacataatctaagtaaacgttacatttggggattgatgattaatcccaatttttgtttttttttataaaaaaacactgaaaggtattaaggtgctctaagctattgaaaaacaaaatgttgaataaaaatatagggatgaccaaattattaatgaaaggttggtgagaagccgttggttactatactgagttttcagctacttgacatcctcctttcttcacatgtttccagtgaatgtgttaccacttacccaaatccctcctaatttaggggcgagtttcatttaattaaccatctaattagtttcattttttccccaaaacttagggaggttattatgcaactaaaccgatgactatagtctaaaccaacaaaatcaaagtggtgtgggtttgtttctttcatgtagagacgaaaatacttgactttgtcatccatattcaaacctgcattggatgttcttgatagaaaataaagaagaaaacctaacataactaaacaaggtctcgtacaaattttaaacaactgaagagcataaatcttatactaaagaaaatcattaaaactctactcaagaatacttcatcggtcgtttacagagtttttgaccggcagataaagaaagatatatacttatttggataaagaaacaatacagaatgtataaaattaattcatagcccgtgctcatagatatcgatgttcctttcacatcccgtttccaagttcagagaatccaactacgagatttggatctttcttttttttgccttgcaaaattgattgctgagagagcctcataatgacattgttaggtggtagatttacacaaaggtacacacacacaccactatcgagattaatgccatatttattattgttattattgtttcaacatactaattcgtgatttaaacaatcaaaacctataatgctttatgatgtaaaactgatagttgaacaaacttgtcgtggtagctgagagtatattcttttcaaagctgaacttatatttagcgattattttgtttgtttagtactctataaccggttaacattattttgtttggcatgcaacgaaacaaatctaaatagaatggaccaacctacatttgtaactgcttcagtaaaaaaaaaaaaaaaaaaaagaagaaacagaagagattatattgctagatctagcacctatatattaggatagtcgaattatgtaagtagaataatgaaggcatttactctatctatcatgtttttagcggcgactggcacatgacatccggctcattggctcatttgtatggggaagtgatgtgaccatgtgagactataacgtctaacgatattgactatttatttccttatattatattactgccaaaaaaggcagctcaaaaaatactattgtgcaacggttattattccatggatcaaagatatcaataattttttgttaaccacattttgtttttatcaacatatttaaatattttgtatagtaattaatgtgtcatcatttgaatacaaatctgtatatcatataataaaaaagtccacttaaccattaaaaatttcataattcgtctagaattctacataaaatcttctggtcaggttataaagatgtctttaacactcatggtacaagtaatttgttaaatagcaaggcaagatttgttttccaaattgagataaacaaagaaaaaaaagggttgacttactaatattaatacgtgaatgtgtatgtacgttgtgatacagtcacatactgtgcccatacaggcaatgcgtgtgcttcacatgtacttgtccacatctttgattatgacaatggccggagggaaaaaaatataataagttgaagtggacaatgaggatgggccactggatttttatgagtccaaaaggcccattaagaactcaggggtctatttagtaaaacgtaagagtttaagggcaacaaaacaatattgattaaagctgaggtgtttatcgtaattctccgagaagataatatctgtttctctctctctcactctcgcggtgcgtaattccatctttgaaatctcagagcaacaaaaccctagctacatttctcgatatcggagaaaagatccggcgaagatg

SEQ ID NO: 35134 - DNA, 3000 bp, Unknown; identical to SEQ ID NO: 28687
  misc_feature (1)..( 3000): 2750-1469P.txt file - cDNA_ID_3084891; gDNA_ID_2926243; Annot_ID_204160

SEQ ID NO: 35135 - DNA, 455 bp, Unknown
  misc_feature (1)..( 455): 2750-1469P.txt file - cDNA_ID_3084891; gDNA_ID_2926262; Annot_ID_204796
ctttgacagattgtgtgtctcatctttttgttatctgtttttcgttgttttttttttttggtaaaaagatttcgtagtttgttgacataatgaatgtcaaaaaaaaaaaaaaagtccataccataacaaaagtaagcttactttgttcgttttaattttaaatatttaagaattagcttaacaaattcggtaaaatttgggatttttcaatgtaaaatatgatcattatttttgtttgtgaatattttatacgaacgttacaaatataatgtattatagaatgtggtattgaagagggagagtgtttagagggaaagcgtgagacgcacgtggatctctgtccctcttttttctcgaaagcttgctttcctgttctttccttttgtttcaatattcgttgaaaacataacagagagaactaaacggaaaaaaaccctgaaaattagataaaaatg

SEQ ID NO: 35136 - DNA, 3003 bp, Unknown
  misc_feature (1)..( 3003): 2750-1469P.txt file - cDNA_ID_3084895; gDNA_ID_2926262; Annot_ID_204793
ttggaactatgcttgaaacagttgatttcatttgttgtttaatctcaaaactatatctatatatacatatatgaagctacggatatttgaaaacatatacaaaacactaggaccaacctaacaagtctttagagagtctgtctccactgatccaaccctagcttccactgttgagattcttcagagagagtctgtctccactgatccaaccctagcttccactgttgagattcttcagagagagtctgtctccacagattcaatgtccggagcatttctggttctgcgctgtaatccccagtaaaagacaataatgtgtggctgctttgtaataggtttctcttagttcccagtttccacaatacatagatatcttcccagatttctccaaccaacaggtctttgtcaccttcttgcttctgttgttgctagcacactcaccattcttaggcagctgagatgctttcaaaaccgatgactggattctgccaactggtccctggaagcaggaagctgttgagattctgcagagagagtctgtctccacagattcaatgtccggagcatttctggttctgcgctgtaatccccagtaaaagacaataatgtgtggctgctttgtaataggtttctcttagttcccagtttccacaacacatagatatcttcccagatttctccaaccaacaggtctttgtcaccttcttgcttctgttgttgctagcacactcaccattcttaggcagctgagatgctttcaaaaccgatgactggattctgccaactggtccctggaagcaggaagctgttgagattctgcagagagagtctgtctccacagattcagtgtccggaacatttatggttctgagctgaaatccccagtaaaagacaataacatttggctgctttgtaataggtttcttttagttcccagtttccacaacacatagatatcttctcagattctccaacaggtcttgtcacctttgtaataggtttcttttagttcccagtttccacaacacatagatatcttaccagaatctccaagcaacaggtctttgtcaccttcttgcttctgttgttgctagcacactcacaattcttaggtagctgagatgctttcaaaaccgataactggattctaccaactggtcccaggaagcttccattgttgagattcagtgaggtgtaatccccagtaaaagacaataatgtgtggctgctttgctctgatgggtttggatcacaaaaatgccatagacttcctgtatttcaataacatgtggaacaaagcaaaggctacagtcacagactatgagacagaacacagaagatttcgtatccccaaagagttgaaccaaaagatgggaagtgggtaacttgatcagaagacaacggaaacgtgacttaacccaaccactgagatgttcctgattagcagccgagaggtgtacatgtgtttgcatacggatagagctcaaacaaaattcttcattctctgcagaagcctgagatgttctccacgcaacctgcatcatctgttgcaatttccaataagctagttagcctctgtgaagcattatgtcgaataggtgatatgcaacatttttgttcttgacacttggtgacctcctcatagtaatccgagccaattccgatgtgggtttttcttcgtggtgaataaagaacctatcaatgccaaaaccagagagtaaatcatcaaaaattaggacatgtgattgtgactgtaatcgaaatccaatggtgaagaaaacaagtccacgatgctccttgaaagatcgaattctcaatcttctgttgttggagaacacaaatctgtcgctaaggtcaaagctttttcctcctccttcgattgctgttctagacatgatgaatcagagtctgtaatcgttactttctgtggctaggagcagcgaatcctgaccgttggattggtttttctttttctttttaatgtccgtgatattattgtctgaagaagaaagagagaccagttttgacttttgacttcgagtaatgagaagaaaaagcacagtgagattgctgttcttgacgttgagtcagagtctgtggctaggagcagcttcttttgttttttgaatcgacaatggttgaggaataaacgaaatcctgaccgttggattttttcttttcttttcttctacttaataatgtccgtgatattattattgtctaaaggggagacccgagaaagagcgagaccagttttgactttttggacattgtgtgttttcgattcgatcttttttttctgaaggtatgcttttgaattcgatttttttttttttttctcgagatctttgcttcgtggtgtttcctttggacttcgtttggtgatatttctgggtttcgtcttttgacgttttttttttcttctcgatgaaatgtttactcagctgccaaatttctctgtttgatattgagtgagagagatttgttactttttacaaaatcaactagttttaggttaccaaatttggtttcggtttcgatgcttaaacaataacttggtgtagtcggtctctgtatgaatgtgtgtgtgtgttgtttttgctgctgatttggatctgtgcttttgttatagcgttgaaaatgcctcgttatgatgacctttgaacacggactcgttatatgctaatttggaactttgcttgaaacagttgatttttatctggatttacatttgatgttttatgcttttatctcaaaactctgtatatatgaagctacggatatttgacctctgatatcctattttgaagtctcagccttgagtgcaccacctgcatgaggatgtcatgagatttttttttttagtggtttttgaatcttgtaactactagttgttttggagaaattatgagattgttcctaaaatgtttggtagcccttgtaataaaggtgtcagctttgctcttgggaaatgttttcgttggtcttagatgttggtaaatg

SEQ ID NO: 35137 - DNA, 3003 bp, Unknown
  misc_feature (1)..( 3003): 2750-1469P.txt file - cDNA_ID_3084901; gDNA_ID_2926262; Annot_ID_143254
atgaagctgaatcgatctcgatgtatctactgctgacgagctacttcgtctagaatcgagtcttcgacgagtctctcttgctacggctaacagacctgtcgctgcttctcttttcggagaactacacaggcgagcttctctcatttcatcctcttgtctctggttgatactgagattataatgattatactattgaagcaaattgtttctccagtgaagtctttgttgagttataaacgaaagatgtgaagtgtgtcaattataatggcggattgtttttgtttctctgttatgttacttcgattagttgatcgttttttttttttttcggatattacacaacaggtgtctcaaattggtgtcaatcttcaaaagcgtggtgtttggacaagtagtaataggtcctcctggatcgggcaagaccacttactgcaatggcatgtctcagtgtcagtgcatctctctaatgggcaggtttcatcttctttctctttttggatcaaagaaagaagcttgcttacttgtgtacctgtgaatctctttgtattgattgttttgctgtcccttgctttgtaaagtttaaaaagttgcaagttcagttaaaaattagttgtgaaatgtttgttgccttgtctttatttttgctagagatatttgcagattcgtgagaacttctctgtaagtataatctcgttgtgttactttttgttgttgttgttgcaggagatcctgcaaatgatgcattaccgtatccatttttaagccaactcttacaaaatggtaaaaagaaatcaggtgtatattgtttcttgacattgatcttagtttgtcttggtttgtctcatcttatgactatgatgtggtagcttgcatgttgtatacggttgatacacacaagcttgatttctctatgtgcacttcttgtagttgcgtatgaagaagaacagtgctatctatctagattctagagtaatttgtatataataatagagtactaccaattgatactgagccttaatgggagcatctacttgtcttgtgttgttttctttttctcttcaatcattgttctgttatcgtcattagtgtaccttccttgttaaagccggattgtagatatcactgaatccatgtttcttatatatatggctttattgctgcagtgtcttttattatgataataatcacttgatacgtggtaatatctatctataggatgttttcacttcttgtctaatgtctacttactatttattacgtggggttttcttgcaggaacttgcggctacttgtgccactgcggttaagtcaagtaagcatgtagatggaagaatagtgaccagccgttgagtcaagagtgcagacaggtagatccttgcgctctcttggtcaactgcagctacttactatcttggatccttgccctccaaaactgctctgctaaaacgttggtagctctctgggaagatgaggaactaaagtcattggctcctctggctccctcagctatacatggaagaccatgaatgaatctagaggagagaagctcagcaacggtcaacagagcataacaaatgcgtatggcttcagtgacgatcccgggccatttcttagatttctgagagagacagagtggctgaatgagaatgatcatagacattgtttctctcttggtatcaagagaggagatggtgaaagtaatctgaatgtttcttggatcacaagattcaagtactctacgttatgtagatcttcttctgtgattcaagtatataccgattagaactattttttccttgaaagtacagaacaaaagtgttgttgaattattttacttgtaaaaccaaaaacataaccaaggaaatgaagattatgccgttaaaattcttctcttttggtcgaacgttggagtttttttcctgataaatagtgtgcaaggcacgtgagggaaaagagaaggaagcttgtggaagaagtgaaggctcatttgtttggtatgatgtgtaaataaaaaaaaggttgatttgcgcagaaagagacttcatgaacctgatggtgtgcatgaagcacagaccctctcactgacctatcaagactctagcggccaactccatgtaccgaccgaaacaggggaagctctgttgagaaagctggagaccacaatctcggacatagtttcaggttgtttttgcaatgtaggacaagtgtttgttgacagctgtagaagtgagctaagaggacctcctcctcatcctcctgcaaatatgaacaactcaagatgcgagtaagtgagtttgcaagaaactgtcccaagctgacgagctgtgacacaacccatagttattgtcttctcacgagaatggaaaatcaaagaaagataaggtttggaaatgctctgatacaaatgtgtctggctctaatggcttgcatgatcacttggtttcatcatagaggtgacaaattcagcatttgtgtcgtcttcacttgtactaagggtgtctgagcaagaaacctacctacagaactagtgaaggctaatatgctctgcaaaatgcaacatgttcatataactttcgagaacaaaacgggtcacaataagataacacaaagatgagatcgatcttttgtaaggaaacacaaaactaaactagagagcatgaaaacccttatctaatgtataattcaatttcacaatgaccaaggcgaagaatcactcattagtagaaccatgaaacaggaacaacactctatgaacattcaattttcccatgtaaacttagtccgtttttgatcagattcctctgtattttttgtattttattttcaagaaaaaagaaacgaggactttaaattcaaaataagcaagagcgagccaggccacgtgtcagcgctgatgtgactaacgtctttttgtgtttcctctgatgatatatattcatcatcgttcacgctctttctctacttaaaagaaagaaagaaaacctcaagaaaccctcaaagatg

SEQ ID NO: 35138 - DNA, 3003 bp, Unknown; identical to SEQ ID NO: 28403
  misc_feature (1)..( 3003): 2750-1469P.txt file - cDNA_ID_3084901; gDNA_ID_2926262; Annot_ID_204791

SEQ ID NO: 35139 - DNA, 3003 bp, Unknown; identical to SEQ ID NO: 28402
  misc_feature (1)..( 3003): 2750-1469P.txt file - cDNA_ID_3084913; gDNA_ID_2926262; Annot_ID_204787

SEQ ID NO: 35140 - DNA, 3003 bp, Unknown; identical to SEQ ID NO: 28265
  misc_feature (1)..( 3003): 2750-1469P.txt file - cDNA_ID_3084917; gDNA_ID_2926262; Annot_ID_204786

SEQ ID NO: 35141 - DNA, 3000 bp, Unknown
  misc_feature (1)..( 3000): 2750-1469P.txt file - cDNA_ID_3084919; gDNA_ID_2926262; Annot_ID_204785
caacgtacaaagccgtttcaccggactggttttgctcggccaacaactctttcagctccacgccgtcgtgttctccgatcatctccaaaagaaggtccgttttgccttctctaaccgccgtgtgtaacggcgtgtcgtcacgtcttgccgtcatctgcttcgtcatcgtcttcttgatctctttcatgattgatgatgattctgtttaaagaatctttgggattaaaaaaagtttggcggaaatttagatcgagatagggaggtctacatgagtagatttgaggaagattcagacaagagtaacatgaattctctggacaagaaacaacaaaatatattattacctcttaactatgctcgtggttttggctgcttgtgttatatcacatagacatatcttaaaactatcttaatacaacaaacaacacatgatcaaaccttagtgtccactcgaagcattatttttgtttgtttttctatttgaaaacaaaaaacaatcagatttaggtcaacaaacaaatcatgagtatatttgaataaaatgtttatcaaaaccaacagaatcaactttaaatgttctccgtgccactaattcactaaaatgaaatttgcgatggatttagtcatttagacattttttcaaagaaaaccaaaaaacaattggcgatagaaagtgacatatgaagaaaataataaatgagtctccattattggggttttctgtgtgaacgtggtaaaatatccgacgattatgaatttatgataccaaccaaccatgaaaataacactggtccaaagtgaaaatagatttcacattcacaagctccaagtctcgaaatccaaatatgaatcaacaaatagtgtttgagacttgcatattcgtcttgaccgcatagcgcagtggattagcgcgtttgacttcggatcaaaaggtcgtgggttcgactcccactgtggtcgtttaagactttaagtacttgttcttttctttttcctgattttatctattttggccgatacgtatcagaaattctccgtataaatcaaccatgttcgtttacaatccttcattcaatcgtcccttaactctaaacaaccgaaaaatcaaaatttaccaaagagacaacaaaacccagaataaattcaatatttatgaaatactaatgattttagagaggttgtgtgataacaaaacttcagtacaactaaaattaataaggttggacaaaaagagaggagataacataagccgataatcaaaggctgaatcattcatttctagaagctagagctgggagaatgaaactacactttgatagcgtacttcctcactgggaaatacatctccttcttcttctcacgctctgtcttcaacgaagcctgttaccacaaacaccataagttattatgattgctaatttgctatccaattcaaaagaacattatataattggaaatggtaattcgggtaaagacctgatgcttggtgagacgtctacggatagctcgtgttttcttgggacggagatcaagaggcaagagcttcttgttcttgtatgcctctcttaaagcagatttctgcttctgggagatcactgtcaacacctgagcaatggatttcctcacaaccttgctggatatcaataacacacaactttcaatcaatgacttgtcaaaccgaatccgactaaaccaaaataaggtgttcatcaactacatacaaggcccaaatttgattgatctaagatacatattcgagtcataagctaaatccacatccattctactgatgatatcccaaatgatgatacaaatgcaaattccaaaacagagcaccatatgttctcttactccaaattcttcaattactctaaatctaagtgaaatgtctccaaattggaaagtaacactaaatcctaacaaatgaggatatatatacacacatttcatatatacgtataagtagatatataaaagacatacattttggagagcttgttgggagcgcctccggtgactttagcgacacggaggagagcgagttcagccttgaattccttcaactgattctgaagatcggtctttgatttatctctaagctcatgaaccttaattctcgctatacaacaaaatcaaaccaaaacaaaaacaaatccaatcagaatcacgcaattgaagaatcaaaagaaacgaacacgaattagattaaggattataaggatctgttcttcgtcatacccatcgtgagtgttgagaactgatgtgccgcctatttgctcttttctggctccaaaccctaattttgttgaagaagaaaatttatacgatgcctttgtgaaatcgatttgagttagaaaaccctcgtgattctcttggcaaatataatgggccgtgtaatagcccaatagttatttccacaaaacatgggctttttattaaagaacatttaattgggtcgtcgtatgccgaaaagagaaaaggtgtgaatagtgaaagctaatacgaataaattcgtcaataaaacccataagcatcagattctgattattttttgtttgtgagaatgagattcggaactatcattaagggttggcaaaaagaattggcctttctattttctttttggtgttttaaaaaaatatgattttctaacaaaatgattttttttttcttcttcttctatctaaaagagagtaaactacactgtatttatttgtagtagatggtccaaaaatcgtcagttcaatcgaatcaaaataatttcacacggtttctaggtctactagcaatcaatctctcacacattggtttgataagaatacgaataaacttacttttttctaaagtcgattccatcacccaaaaaaatatctttaactcgaacctaaaaatatgtacatttttaattgattttatatgtgactatagaaatctctccacattttcattgcaaacactaaagactttttcttaaatttcttgtaaaccatacaaaacatg

SEQ ID NO: 35142 - DNA, 3003 bp, Unknown; identical to SEQ ID NO: 28400
  misc_feature (1)..( 3003): 2750-1469P.txt file - cDNA_ID_3084923; gDNA_ID_2926262; Annot_ID_204784

SEQ ID NO: 35143 - DNA, 3003 bp, Unknown; identical to SEQ ID NO: 28396
  misc_feature (1)..( 3003): 2750-1469P.txt file - cDNA_ID_3084934; gDNA_ID_2926262; Annot_ID_204778

SEQ ID NO: 35144 - DNA, 3003 bp, Unknown; identical to SEQ ID NO: 28395
  misc_feature (1)..( 3003): 2750-1469P.txt file - cDNA_ID_3084938; gDNA_ID_2926262; Annot_ID_204776

SEQ ID NO: 35145 - DNA, 3000 bp, Unknown
  misc_feature (1)..( 3000): 2750-1469P.txt file - cDNA_ID_3084945; gDNA_ID_2926262; Annot_ID_143237
ttccagcttacttcaacgactctcagcgtcaggctacaaaggatgctggtgtcatcgctggtttgaacgttatgcgaatcatcaacgagcctacagccgccgctattgcctacggtcttgacaaaaaggctaccagcgttggagagaagaatgttcttatcttcgatcttggtggtggcacttttgatgtctctcttcttaccattgaagagggtatctttgaggtgaaggcaactgctggtgacacccatcttggtggggaagattttgacaacagaatggttaaccactttgtccaagagttcaagaggaagagtaagaaggatatcaccggtaacccaagagctcttaggaggttgagaacttcctgtgagagagcgaagaggactctttcttccactgctcagaccaccatcgagattgactctctatacgagggtatcgacttctactccaccatcacccgtgctagatttgaggagctcaacatggatctcttcaggaagtgtatggagccagttgagaagtgtcttcgtgatgctaagatggacaagagcactgttcatgatgttgtccttgttggtggttctacccgtatccctaaggttcagcaattgctccaggacttcttcaacggcaaagagctttgcaagtctattaaccctgatgaggctgttgcctacggtgctgctgtccagggagctattctcagcggtgaaggaaacgagaaggttcaagatcttctattgctcgatgtcactcctctctcccttggtttggaaactgccggtggtgtcatgaccactttgatcccaaggaacacaaccatcccaaccaagaaggaacaagtcttctccacctactcagacaaccaacccggtgtgttgatccaggtgtacgaaggagagagagccagaaccaaggacaacaaccttcttggtaaatttgagctctccggaattcctccagctcctcgtggtgtcccccagatcacagtctgctttgacattgatgccaatggtatcctcaatgtctctgctgaggacaagaccaccggacagaagaacaagatcaccatcaccaatgacaagggtcgtctctccaaggatgagattgagaagatggttcaagaggctgagaagtacaagtccgaagacgaggagcacaagaagaaggttgaagccaagaacgctctcgagaactacgcttacaacatgaggaacaccatccaagacgagaagattggtgagaagctcccggctgcagacaagaagaagatcgaggattctattgagcaggcgattcaatggctcgagggtaaccagttggctgaggctgatgagttcgaagacaagatgaaggaattggagagcatctgcaacccaatcattgccaagatgtaccaaggagctggtggtgaagccggtggtccaggtgcctctggtatggacgatgatgctccccctgcttcaggcggtgctggacctaagatcgaggaggtcgactaatttgttggacattgacctctctctttctcctatctctatctcttttacttgcttttttttgatctgttaagactttttatgttgggcttttttaaagaagcccattttgtggtgttttttggttagtactattttgaacaatggttggttctataccagtttagctacgatgacggataaaattaaaagtttgccattttctctcttattttggttatggtgtttgttcccttccaatctcgtaggtgaaacatgacttgttgtttgaaatgggaagtatttcccaaatggcataacataaaaattacttagagaaggaaccaacgataataattaattaatcaattacgagaaacccattttttattatgacatttgttgaatttatcatttctaacacagactaaagtcaattttacccttgttttgttgaaaagaaaaaaatctaaatctttttcccccacaaaatcctaaaacaaaattgatctctccatgtagtgttctccacgacgagatctggtgacaactccagtttaagcaagaccaaaagacttgaagagataaaaagctattaaatcaatctctttttctttgggtttttattagtgaaaagaaagtagaaaaaaaatctcaaagctttcatgaattggaagtttcaaatttggtttagatttgaagagataaattggaagtttttattaaattaatgttgatcaaaagcctagtgaatcttaagcattcaatttagttggtctatgtgaatgtgttgttgatgcttatttattttatttttttggtcaaccttgatgctttggttatagctttggatttgtgattttatctggattttttactttgatgttttatgctttatttcaaaactatatacgaagctacggatatttgaaacatatacaaaacagtgaaatcagtaggactgtgaattttcttatcctcaaagcctttgtagtgtaacagacaaatcaaataaatagcttcgcttatacctatgcccaatcagtaaaaagaaaagcctcacctcggcccacagccaatgacagcctttagtatgtcttactggcccattactctactacgaaatcttacgtgtcaagtaataaataaatcgaccccacatatgaacgttatagagcagttttccaattttcaacacgcgcttttcagtttttggacaatatcactttttcccttttcaaaatttggacaatatcagttttttcctctttttttccaggaacatatttgcctaggatttggaaaaggaatctatcacttagctaccgtcagatcaacctcaaacataatccaacggttataaataattacagaacattctggaaactcaagtctcagccttataaaaaacaagacttcaacgctctttcttcacaaacctaaaaacctagctctattctttctctttgctgctcttaaactttttcttagctttttctatcttcgtgtgataatg

SEQ ID NO: 35146 - DNA, 3000 bp, Unknown; identical to SEQ ID NO: 35145
  misc_feature (1)..( 3000): 2750-1469P.txt file - cDNA_ID_3084945; gDNA_ID_2926262; Annot_ID_204772

SEQ ID NO: 35147 - DNA, 3003 bp, Unknown; identical to SEQ ID NO: 28416
  misc_feature (1)..( 3003): 2750-1469P.txt file - cDNA_ID_3084983; gDNA_ID_2926263; Annot_ID_204836

SEQ ID NO: 35148 - DNA, 3003 bp, Unknown; identical to SEQ ID NO: 28415
  misc_feature (1)..( 3003): 2750-1469P.txt file - cDNA_ID_3084987; gDNA_ID_2926263; Annot_ID_204835

SEQ ID NO: 35149 - DNA, 3003 bp, Unknown; identical to SEQ ID NO: 28412
  misc_feature (1)..( 3003): 2750-1469P.txt file - cDNA_ID_3084991; gDNA_ID_2926263; Annot_ID_204833

SEQ ID NO: 35150 - DNA, 3003 bp, Unknown; identical to SEQ ID NO: 27704
  misc_feature (1)..( 3003): 2750-1469P.txt file - cDNA_ID_3084999; gDNA_ID_2926263; Annot_ID_204829

SEQ ID NO: 35151 - DNA, 3003 bp, Unknown; identical to SEQ ID NO: 28409
  misc_feature (1)..( 3003): 2750-1469P.txt file - cDNA_ID_3085003; gDNA_ID_2926263; Annot_ID_204828

SEQ ID NO: 35152 - DNA, 3000 bp, Unknown; identical to SEQ ID NO: 28408
  misc_feature (1)..( 3000): 2750-1469P.txt file - cDNA_ID_3085007; gDNA_ID_2926263; Annot_ID_204827

SEQ ID NO: 35153 - DNA, 3003 bp, Unknown; identical to SEQ ID NO: 28407
  misc_feature (1)..( 3003): 2750-1469P.txt file - cDNA_ID_3085011; gDNA_ID_2926263; Annot_ID_204824

SEQ ID NO: 35154 - DNA, 3003 bp, Unknown
  misc_feature (1)..( 3003): 2750-1469P.txt file - cDNA_ID_3085041; gDNA_ID_2926264; Annot_ID_143299
aattatatataatgtagaggatcgagcactaatcatacacttttgtcctctgccccttacagatggcaatcaagaaactgaaccattagatgagaaactaatggatgggtgagggcaactaacaattgtttttaacatcattcatgatccaacttgggtggcagcgaacaagtaaaactaatctctcacttctagtgtgcagaatcgaaatgaattgcagttggtataaaaactgacaagcctctcattgacgtgcaaggaatgtcgaatataaaccatcgagatcataaccaaatagaagaagacaaacaacacatggtctctccaaattttacgacatagcatcatcttctgtacaaatgtgaaagatatattagacaagtagaaaaactgaaatcataattacctctttaagatttacccattcccaggtttcattcgcagagttaatatcatacactaaagcatgacgcccctaatcaatgttgaaaaaaggaaataaatgatatcagaaaacggagatttggcactaaaacactaatatatagcaatgaaagataagatacctcaacagggttgtagtcagttataacagcttcgtagtattggttgtcatcaggccacttcgtccataccttccttccaaccaacgggtcatatgatcccgattcacctggttcatttgttaaagcgccagcctggggccttccagcaatgcctgtagatgggtactgcatcgacttcatcgagcacaaagaatgaaatattcttataccttagtcaatgaagaatataagaacaagattgacggtaccaacaattagaatcaagcagcatcatgacttactgtctttggcttcttggtctttggacctggtggaggacctccccttcttagtgcagatgacgatggttgcattgaagggtgcaaagaaggagatggtgggcccatcgctaatgaggcgattgattgtgatgtcttttgcttcttacgtgatcctgatacagccggactcggagcatcatgaaccagctgaggaacactagactgaaggctgtttgcctttctccattccctgacatgatttaaattaaccttgttggcttacttttgattgattgcagagatttatcagtgatcaattacatatacaacagaccttattcgcctgatcatttcatcagcgttaacccttgataacagctctctgtgttcctcatcagacactcgaagttcttttctgagttcagtgatcaaactttctttctcctgaatattttttttccagccgaaggaacaagaataaaaaaaggacaaaaggtaagcttgtgaagttacataaacatgtactaaactaatgaagaagacaagcaaaatagtacccaggtaatagcatcggactgggctttaaatgcgcggagtatcgagctataagcttcttgctcaatgagatgaatttgagtttccatttcattgtgcacccgtgataaaggagcagaattgagaactgaaggccttccattcccggtaggtctggcgtttctttgatatctaccttgatgagatggaggcaggtcatcatctgtacctgagttcccgcataaaaaaacatatcacaaaacacacggaaacaaatacggaagtaaaataaacttagagaaggaacgaatgcttctaactgaaaaagcacataagactcaccactactatcagaaggtcggtaatccatctgtgtactctcctgattattctttacagtgaacctaagaaatcaaaacgtgggatgtggcctgtctagttgcaccaaagcacgagctgcaagaccaagaaaacaacttcaaaggaggaaaaagccaaagcattcactcacatgcagagcatacgaagacgaaaagcaagaactttgaactttaaaccttgacacagaaaattaaactatccaaaacactggtcaaagttcttaaactcaagctaaacagacaaacatgttgccttctgcagattaaacaacagaaattgaatttctactaaacttgtgaaaaaattatttccaattaaagaacaacactttcctaaaccctaaaattcccgacgaaacctagcacatcaatgctagctttcaagatgaacaaaacttaaattgcgcagaaagaatgtaagatcgaaaagcaaaataccttctttggatctattctcgaaaaattcgaacagccatcgagaaaattactccctaaagatcatatagatttgagcgagaaagcagacaacacaaatctataaattagaagatccgaacaaaggacgattcttataggcaatctctcggctccaatccgaattcaccaacgttagatctccaggaagcagaaagaacgccgtggaattgaagaattacagaacaaatcgtgatgaattttccgagggatctatgagtcgcggacgtgaaacccacattattttgtgccctaattttttctcagttgataggttggtttgagttacacgaacgacggcaagttttgtcgtttcactctcatctttctatctcttttggttctgtcttaaacccgaacttcggtacactttcataccaacacttctgtttttgttttttttttgtttttaacatcatattttctgtgtaataattaatctcaaaaaagcatgttataattcagttttatttaccaacaagaatcgatttggctgcaaataaaaaagacaaaataataaataaaccgacattgtgaaaatgttctgaaccggaaaagtcaaagaatgtcggttcggtccaaaatcgaaaattaaacaagttccaatagaaaaatgtgaacaaagggaaaaaggaagaagaaatgttgttgcgtgtgtgttgtccgtcgtctttcttctacctccgaccgcttcatctcttcagttcaactgcgaaagttcctttttgtccctctcttcccagacaatttcgattaagcccttctcgatcttcttcctttcgtcggatg

SEQ ID NO: 35155 - DNA, 3003 bp, Unknown
  misc_feature (1)..( 3003): 2750-1469P.txt file - cDNA_ID_3085041; gDNA_ID_2926264; Annot_ID_204876
tctgatatctcccggagatatctatgatatatatatatataaagaacattcagaatcatatgtaaccaagtatccaagaatgagatgagctcttaaaacatacttttgagatgatatatatatatatatataaagaacattcagaattatatataatgtagaggatcgagcactaatcatacacttttgtcctctgccccttacagatggcaatcaagaaactgaaccattagatgagaaactaatggatgggtgagggcaactaacaattgtttttaacatcattcatgatccaacttgggtggcagcgaacaagtaaaactaatctctcacttctagtgtgcagaatcgaaatgaattgcagttggtataaaaactgacaagcctctcattgacgtgcaaggaatgtcgaatataaaccatcgagatcataaccaaatagaagaagacaaacaacacatggtctctccaaattttacgacatagcatcatcttctgtacaaatgtgaaagatatattagacaagtagaaaaactgaaatcataattacctctttaagatttacccattcccaggtttcattcgcagagttaatatcatacactaaagcatgacgcccctaatcaatgttgaaaaaaggaaataaatgatatcagaaaacggagatttggcactaaaacactaatatatagcaatgaaagataagatacctcaacagggttgtagtcagttataacagcttcgtagtattggttgtcatcaggccacttcgtccataccttccttccaaccaacgggtcatatgatcccgattcacctggttcatttgttaaagcgccagcctggggccttccagcaatgcctgtagatgggtactgcatcgacttcatcgagcacaaagaatgaaatattcttataccttagtcaatgaagaatataagaacaagattgacggtaccaacaattagaatcaagcagcatcatgacttactgtctttggcttcttggtctttggacctggtggaggacctccccttcttagtgcagatgacgatggttgcattgaagggtgcaaagaaggagatggtgggcccatcgctaatgaggcgattgattgtgatgtcttttgcttcttacgtgatcctgatacagccggactcggagcatcatgaaccagctgaggaacactagactgaaggctgtttgcctttctccattccctgacatgatttaaattaaccttgttggcttacttttgattgattgcagagatttatcagtgatcaattacatatacaacagaccttattcgcctgatcatttcatcagcgttaacccttgataacagctctctgtgttcctcatcagacactcgaagttcttttctgagttcagtgatcaaactttctttctcctgaatattttttttccagccgaaggaacaagaataaaaaaaggacaaaaggtaagcttgtgaagttacataaacatgtactaaactaatgaagaagacaagcaaaatagtacccaggtaatagcatcggactgggctttaaatgcgcggagtatcgagctataagcttcttgctcaatgagatgaatttgagtttccatttcattgtgcacccgtgataaaggagcagaattgagaactgaaggccttccattcccggtaggtctggcgtttctttgatatctaccttgatgagatggaggcaggtcatcatctgtacctgagttcccgcataaaaaaacatatcacaaaacacacggaaacaaatacggaagtaaaataaacttagagaaggaacgaatgcttctaactgaaaaagcacataagactcaccactactatcagaaggtcggtaatccatctgtgtactctcctgattattctttacagtgaacctaagaaatcaaaacgtgggatgtggcctgtctagttgcaccaaagcacgagctgcaagaccaagaaaacaacttcaaaggaggaaaaagccaaagcattcactcacatgcagagcatacgaagacgaaaagcaagaactttgaactttaaaccttgacacagaaaattaaactatccaaaacactggtcaaagttcttaaactcaagctaaacagacaaacatgttgccttctgcagattaaacaacagaaattgaatttctactaaacttgtgaaaaaattatttccaattaaagaacaacactttcctaaaccctaaaattcccgacgaaacctagcacatcaatgctagctttcaagatgaacaaaacttaaattgcgcagaaagaatgtaagatcgaaaagcaaaataccttctttggatctattctcgaaaaattcgaacagccatcgagaaaattactccctaaagatcatatagatttgagcgagaaagcagacaacacaaatctataaattagaagatccgaacaaaggacgattcttataggcaatctctcggctccaatccgaattcaccaacgttagatctccaggaagcagaaagaacgccgtggaattgaagaattacagaacaaatcgtgatgaattttccgagggatctatgagtcgcggacgtgaaacccacattattttgtgccctaattttttctcagttgataggttggtttgagttacacgaacgacggcaagttttgtcgtttcactctcatctttctatctcttttggttctgtcttaaacccgaacttcggtacactttcataccaacacttctgtttttgttttttttttgtttttaacatcatattttctgtgtaataattaatctcaaaaaagcatgttataattcagttttatttaccaacaagaatcgatttggctgcaaataaaaaagacaaaataataaataaaccgacattgtgaaaatgttctgaaccggaaaagtcaaagaatgtcggttcggtccaaaatcgaaaattaaacaagttccaatagaaaaatgtgaacaaagggaaaaaggaagaagaaatg

SEQ ID NO: 35156 - DNA, 3003 bp, Unknown
  misc_feature (1)..( 3003): 2750-1469P.txt file - cDNA_ID_3085049; gDNA_ID_2926264; Annot_ID_204874
atttaaggcctaccatctgaatcacttcataaataggagtcacaactttcctcaagaatgcatcttcctcgcctccataagctggcttcacattttccccagtcataggactaacattcccagccagcataccatagagttcaaatgccatctgcgaaagcatgaaatagagtaggaagtataagaatatcacatctaggaacgcatactagcaaaaaatctgtgtatttatcaaaagaaagcatggtaccctgagcacaattgacatttaaccaacattctaatttctaaggggaataatatcaattgacattttctcatcagaaatacgtcaacctgagcacatatacacatgttttgcctcaaaacaagactcagatgacaattttattactgtgcgtgcaagttatagctccttagcagaaatataaacaacaaaagatataactttcaaggattaagaatgacagtaaagcataagattatcattggcggacaagcataaaaatacaagaatcacgcacaaactacggaagaccttacaaactgaaacttacatgatgataaatgtagcagagacactctggcatgaatctcaagttcgctgcttcaccccaaattagaagatacagggccatatacaatagtttgcgctgctgcatttcctgctgtatagttggcaacctacaagaagatcatactttaaaacagattctccacaccagagtttgcataaacatttagacacacacacgaaatctaattcctgtacatgaacagcatacagaaactctctgttgctacaattcccttaccaaagactactctttcgaccaaggtatttgcaccatttcttatagttcttgaaaagcttcttcatcacttctgtcaatgcttgatcatctaactgtgagggcacaatgagaacaaacgaaaggataaactgaaagtacattcattaaatattatgctcatagtaggatgcagttacatatatattccatggaaaaaaaatgtactgcgcagaaatgtcctacatgcatggacacacgaaacctatataaaagtggtctttcaacaatggtaaaattaaggtataaacctttggctgctgatcaggcttaggaaattgtcttatatgcacattagcaagtaataagatcagatgctccctttgattagccacattgtctttctgcagaaccatagcataaacaagaaaaattgcatgttagcaagtaataagattaagtgctcctaagattagctgcattgtctttccgccaaaccattaaagaatttatagattactctcaacaaaagcttaatgacaattggcaagcatcacgaactagaaaaattacctgaaatccaaacatttcttgaagccaatcaagcatgtcttcatctttctttttcttgtgaccttctggccaaggaagacctctagtattgcggagagcaagaacagcagcttggatctgcagtaaggattacatcacccgctgataacatattacaaataataacaatgcccaacaagaagaggactaacctcaggatatctcataatcgcttgattggcactatcaggatcgagaggtaggatattataggggacatacaactgtgtcttttctgcaaccttatcttgagcttccagaatctggaaccattcaacttcattgtaaagttgcacaagagatggaaaaaaaaaagagacaggactagaaggtcacaatgccttacctcccggtcaacctcaatggactgtgtcagattaacagccttcaacacctcaaacaaaacattggcagtttggtatgcctttgtcagctgggcactgaaaattaacagcacttcaaagtatcattaagagaatttagtgctctcaaacactggcaaaacacaaattagcatcttaaaaagacaatttaagtaagttagacataccggtcagccttatcagcagcattgtgcaaagcttgaatatacttcttatagtagtgttgataaaagctttgcatttcacgggcatcacttttcttaaccctgcccatcagtgttggatcatgttcctgcaaaaaaatcaaagcaacagtagaccacatttgtcaaagaaaagtactaaaaccaagattccttctaatagctatccaaatctgccacatgcaagaatcaagcagagtataaagaatgctcactctttcaagacgctgtagaagtgcagtcttaaactgccgaacacctcttccactggaggtaggatccaatctatgtgctttctcaaatgcataaaaccgacctaagggagaaagcagaaccaaaaaccagataaacaaccaaatgacagagaaccaaattaagaaataagttttagaagaacttacagagatacgcaaccctaggattactagattcaacttcattagcaacccgaagaatgggggcaatctcaacaagagatgatggaacaacttcactatcgaatgactctccaagattaccagcagtctgagttcgtataatccgccgctgctgaggctgagacggcccttgatcaggacctcctctcgtagcagacattttgtctaccctataacctccaggttttaaatcgttttaaggtttcctcagcctccctgaaaacaaacaaaagtcattagacgaagatggttaaaaatcaacagtgacgaacagagatgcaacattgagaagaacatacagagaaacggagatccagaaaccctaacaatggcggagcaaaggagccacaactttttaagctacttagctgctaagtacgcaaagtgaaagggagagagagagagcagtctgaaatgaatgtttttttgtatttatcttccttttttaagcaccgctttaatagacacaaaaataaaaagaaattttaaaaaggacactttcgaaggtcgtgtccagaaaaaggctctaccttccatttaattacagtaacaccaccaagtttaaactgtggcaatg

SEQ ID NO: 35157 - DNA, 3000 bp, Unknown; identical to SEQ ID NO: 28420
  misc_feature (1)..( 3000): 2750-1469P.txt file - cDNA_ID_3085053; gDNA_ID_2926264; Annot_ID_204873

SEQ ID NO: 35158 - DNA, 3000 bp, Unknown; identical to SEQ ID NO: 28419
  misc_feature (1)..( 3000): 2750-1469P.txt file - cDNA_ID_3085061; gDNA_ID_2926264; Annot_ID_204871

SEQ ID NO: 35159 - DNA, 3003 bp, Unknown
  misc_feature (1)..( 3003): 2750-1469P.txt file - cDNA_ID_3085069; gDNA_ID_2926264; Annot_ID_143292
ggaacatcagtcagtgagttctggtactaccattacctgactttagtctttggttcattgtaacatgactttttgttttaagttctaaccatgatttgggaatggtaatattaggcaagatcccaagagaatggcgactgcactgcaaactgaaaacgaggaatcatgtactacttataacatgctcaaggtaggattttaaacttttccccctctttctatttgctcaaggtaacatactaacatatcaacacttgtacaatttcaggtctctaggaatctgttcagatggacaaaagaggttagctatgcagactattacgagcgcgccttgaccaacggcgtgttgggaattcaaagaggaacccagcctggactgatgatctacatgctcccattaggtaaaggtgtttctaaggctgtgacttatcacggttggggaacaccttatgattccttctggtgttgctatggcactggtaaactcttaaccacaattcatctggttttctacatttttgtaagatacaaaagtaagataaattttgagggtctttttttgtttctgtccacaggaattgaatccttctcaaaactgggagattccatatattttcaagaagatggtgcaactccagctctttatgtcacccaatatatatcaagctcacttgattggaaatctgctggtctttcaatatctcagaaagttaatcctgttgtgtcgtgggatccgtacatgcgtgtgacattcactctttcttcttccaaagtggtaaaacttttgcacaacttgatgcaacatgttacattgaagaaagagtctgatggatccaattttgttgcagggagtggcgaaggagtcgactttgaatctaagaattcctgtttggactaactctataggtgccaaagtatctttgaatgggcgacccttaaacgtaccaacttcaggtgatttgagcattaggttctaaaaagcagaactcgcttgactgttacagtctctagtttgtgaaatgagaatcatattgtacctgtctttttctttgcaggtaatttcctatcaatcaaacagaaatggaaatctggtgatcaagtaaccatggagctaccaatgagtatcagaaccgaagctataaaaggtataaacacacagttttgcttttgtagactggtacccttactccggcaatctataactagcagtatatgtataaattgtatgcaactctgttttgacattattttgtgagtatttcagatgatcggccagagtacgcatctcttcaagccatactctatggcccctacttgttagccggacacacgagcagggactggagcatcacaactcaggctaaacctggaaaatggataacccctatacctgaaactcaaaacagttaccttgtcacactctcacaacaatctggaaacgtatcttacgtgttttcaaatagcaaccaaaccatcacaatgagagtatcacccgagccagggacacaagatgccgttgcagcgactttcaggctcgtgactgataattctaaaccacggatttcgggtccagaaggactaattggaaggctggtcatgcttgagccgtttgatttccctggcatgattgtaaagcaagcaactgatagctccctcacagttcaagcttcttctcctagtgacaaaggagcttctagctttcggttagtatctggacttgacgggaagctaggaagcgtttcgttaagactagagagcaaaaaaggttgttttgtgtacagcgatcaaaccctaaagcaagggacaaaactaaggctagaatgtggttcggatgcgactgatgagaagtttaaagaggcagcaagctttagtttaaagacaggaatgcatcaatacaatccaatgagtttcgtgatgagcggaacacagaggaactttgtgttatcgccattgtttagcttaagagatgaaacatacaatgtgtacttcagtgtgcaaacttgaagaaagaaacccttattgggtgaaaatataagaaagaaaagtctcatttgaaatatagacatgtgtttagatgtttagcctcttaggtttgtttgtgattttgtgttctgcaatgtcatctaaaaatgtatgttgctgttacaataaatataaacaaatgtgtttttataaattgtgctaacgatgaatccatgtctttctttatattctaaatatagagtggagaatagtgtgttgccttgagctttcatgaaataatattctcatatgtgatctgttgcagaaattagaataccatagttattgtatcaaaatatccaacacatgaaaagtaaaatatccaacaaaatcacacgcataaacattacttacgaatacgatagttattgtgtttatgcgtgtgattttcactttggtggagataacttctatagaagaggggagaatattatacagtattttggaaatatgttataattttggagaaatcacaaatcaaagtttataattacattcagggagattttacaagattatagaaaaactttataagattttggaaaaactaatcatagaaattatacaaaattctctagtaatcatttaaaatctttgacatatctactttctatattttttaaaagtcattaaaattctttcaaaatcacaaaccaataacacccccttaatctttttttacaacaaatcctcctctgtttttatccaaatcctctctgtttttatccaaatcctcctctgtttttctctttcacttgattgaattctttttttagcagacattgcttcaatcgttagaaaatctatttttggcacacattttctttagaaatcttttgctttataaacatctcttctcattattttcttcttccatttcaaatcccctctccctaacagttttgagtctcttggattctgaacgtgggatctggggatttgaatagttacacttttttgtttatgaaaaaacatacgatg

SEQ ID NO: 35160 - DNA, 3003 bp, Unknown; identical to SEQ ID NO: 35159
  misc_feature (1)..( 3003): 2750-1469P.txt file - cDNA_ID_3085069; gDNA_ID_2926264; Annot_ID_204869

SEQ ID NO: 35161 - DNA, 3003 bp, Unknown
  misc_feature (1)..( 3003): 2750-1469P.txt file - cDNA_ID_3085073; gDNA_ID_2926264; Annot_ID_143291
taacaagtttgtgtgcaaagtatgctttgaagcatcctattagttaaaaatattaatggtccatgctgattgtaaaatttctagtaataattgtttcaacgtaactggttttagacaaacgtattgacatatgcttacaaaagcctgtttcttaagtgttgaggaagactttctctcaaagtattcttgtatgagctttctatgttctacaataatttcataaaactcatcgattaactattaagtattccaattattgtagggtaaatgtatttaactaccatatcgttgaaaagataaaaaatatatatatatatggtcttacaattagagacttgctcggtcttggtcttactaactaatcccccttccactatatatgtgcaataagtttcttagcaagattagtctcaccaactcgaagcattggaatggataaagatatacttttgacatacttttgaactattagtatgagtttaaataaaatcaattcttcgacaccaactagagttgagttatatacatatgcattgacacacaaaaccttagtcctatacagtatattctacatagcttatcaactgaacaaggttactgcctttgtagcaatccaataaggcacaacaacatagtatttacgttttctcactacaacgttgctaaaatgttttttttttttatataggtattcagtaggtttattttttataatatcattcattttttatttctcccacagataccagatctttttaggaacattgtatttatggtacatgtatttttaaaacggatctaagatcggatccaaatatcttagttttaaaattaaggtatccgtatctaaatccataaagtctaaagacattaaattctagatgggttttcagatcttagatatttgattcacctctaatttctagaaggagtatatggcagtgtacaagtggtaagaaaagtaactcgtgtatcctttgcactatactcgaaaaagagacatttggtggttaagattgacgtgtacatgatgctcctttcttgaagcaacaaactaaactcgtcatcctaaatattcatttccttaaacttttttgaaccactgatttcccaaccaaaaaaaataaaaatctttagagagaattgatctaataattgacggcagcaaatatcttagccacctatgaaaataactaaattgtcggaatgtcgaaaagacttcatcttaaaattgacaaatgacgaatacatctaactaaccatccatcactcttcataaatacacaactactctttcagtgtatatcctcttattcaatattttggttaaatcttttattcttttatttacttttacactcataataattgcacatcagggaatatcgatattgatagtgttttgaggattatttagtaagtaaaaacctaattttagtttagtaaacagtaaaatatactaagagtgttaatagtttttctaaaaagtccataatatagatcgtcgaactataaatgtaatttgtacaaagagaatctcccttgaaaaagagaagacagaaacctcagaaggaatatatgacagtacaaacagtaaatgaatctcttacccactttagatatataattggggttgaaatagtcttcatttgtcgtaatatgtacatatgttctccaatctccatataccaaatagacatgagagaagagtgaagactatttcagcccagttcaacaaattgagttatagaatcatgtattgttatgctttgtaaaatgcatatgtataatatagttttagttttgcttagtaagacaagtttatcattcataataatacttttgtttgcatgctattttacaaaagagtttctctgatagatttgtcttcatttacatgtcatccttttcactatctctctttatgtcttcttcaagcatcgaagatatcaagcactaaaaaaagaaaagaagaaagaaatcaagcattgcagtcacatcgttctcacacaccaaatgatctaccagatgccattttattattaattacaaaactattaactactcatattaaatatttttgaataatgataatgcttttttatagtgcaaaattagaaaactagaattacatgtcatcctgttccagttagttgtgttccaaattccaatcattcaagcatatatatatttttcaaataggataaaatgaaataagtttctagtttaaaaataatgttaaaaacagttaaggttacaactttagtttataaacaaacagttaaggttacaaatttagtttataaaaaaacagttaagaatttaacacaccaaaagcacataaattagtgtatttatttagacggcatgcaaattaaaataattcttttagtttattataatttgtatgaatctccttcaaccttttttccccaaaactcctctcttcttctctgcaacgaaaaacctcttcttcttcttctctctctctatccattttcactaattagcgattaaaaaggattctttttgtgtgtattaattatcgcttaaatcttaaataattctcctaatcgtctctgcacgttggtgatggtgtttagttgtcaattctacatctcgaggaaatccagaaacagctcactgatctatcgaaacagttttttttctttttacagagtcaatagaacaaaaccagataacagagatagtgacaaaccatccgtgacctcctctgtttttatcctaatctctctgctttctctttcacgtgattgaattctttttctttgttagacattgcttaaatcttcacaactcttttgctttatatatgtctcttctcacattatcctcttcttcatattcaaatctcctctccctaactgttttatggtctcttggattctgaatttgggatcttggggtttcgggttttgaaccatctctttagactttagttacacttttttcattcttttttaagacaaaagagatacgatg

SEQ ID NO: 35162 - DNA, 3003 bp, Unknown; identical to SEQ ID NO: 35161
  misc_feature (1)..( 3003): 2750-1469P.txt file - cDNA_ID_3085073; gDNA_ID_2926264; Annot_ID_204868

SEQ ID NO: 35163 - DNA, 3000 bp, Unknown
  misc_feature (1)..( 3000): 2750-1469P.txt file - cDNA_ID_3085079; gDNA_ID_2926264; Annot_ID_143289
gaatttatttccgacgagatctaaatgtctcaagaaagggagattctcaatgcaactaggaatcacaccggagattcccttccaatcagcgatgatgataccggagagacgagtgagcttacatatagagggcgaaatggagccggtcattagtccgctccgtttcgccttttggaaaagcgggtcttcggattcacctcggagtgtaatgccggcgactcgacgggtgttgggatcgcagctcacaccataccagcctttgcaacagtctagacctttccatgtgttgaaaactccaatgtagggctcgttgagctttgctcggaactctagaagcgccgctcggtcggacggtaagcaagaatggacagtcgtggagagaagcaagaagacgacgacgttagtcaataggatcactaacgatttcttagtatccatagtgtagagaatcttttgtgtgatgtgttttttttttagctttacataggttgaagcacgttgacatggaagtgtgacttaactatatggttttatttatagtcacatattgatgggagtaaagacgacgaaatacttctttttgttgcttcgttgaaccttctcattttttgccacgtcgtcacatactttgcatgctcatttgtttcattattatcagacttttctttgtgtgtggtcaagattggatcattatgattcattacaaataacatggttttgtttgtctcggtcgcctggttgtactatctatgtcacaactcagaaggcctgagcatgttcttggttcgactctcccgagtctctccatacgtactggaatataagaattacagatttggctatatgagaccataatatttgaaaaatgagattaaagtaacaatcgtggcaagacatatattagtattagttcttttttcttgtctacattgaattttttggacataataatgagggacaacattcaagtggcttaagctacagcaattagtattatcctagctagtttcatatcttgtccataatactgtactttttgactagactagttcctactagtttttatttatgtatagatgcatgatttattaatatactgtcaaattcattgatcttatcgttgtagatgagcatgtgatctttgtccttggtagcaatttgtacataaataatatgaacccccatgtaaagatgtttattttttcgaccttcttgttcaaccttcgagtcaatgaataataaaaaaattgttttgttaattttttctacagtatgacacaatcctaatcattgtttgcaaattgcctccatgaaccataatttacctttgattggcattttctgctacggttttgattattatgtgcttgttttcgttgctgtctagtgacataaaatctgacgagcaacgactcaaattttttatttttttttgataaagaacaacgactcaaatatgtaaggttttattttgtcttgttcattttatcgtccatagaccagcggaagattaaactgttcgtttgttttcgtcaaacagaaacgctaatagattcaacctttagtgaaattatgtttgtagacgttgaaaatcaacttcttaattcaacaacgtagtttagcgtatttagttatttcccttgagatatatcttaaaattcatggtcggccctaaaaacaggacaggtttggagacagcagctagagtaaacgtgattcggagatttagtagttgttataattgtatcaagagatttagaaggaagtgtcaagtcagaagggtgacattaatggctttgattattcaaaagacaactcatgtgcccgcgcatgtgcttgacgttcgtttgccgtgtattagaactttaaaaactgattcatataaatcatcggtcgattgaaatatattaacatggattatgatgacaacaatcattatacaattaagttttatgaaatgatcatccacaaaacataacttttgtcggctatttttttgttgacgtgacaaactaaattagtaaactgtgttttgagtgcaaaaagatgagaaatttgtgggattgattgcatagaataacacttacaaaaatgtaggtagtatgcaggggagtcaacaacagacgacttttcataattcagaaaacgaagaaaaacaaaaagaaaggtcgatttcccaaggactagggcatagcacgtgtctatatcactggaggatatatcacttagaccgttagacgtcacgtgtaatcgtgtattaatgcttgcaaaatgtggttcaatcaaatacccaattaagggttatgagaactaatacaaaaatgtggttcccgtaaataatgcatgagcaagcacatgactgacatgagagatagaccagcgaataaaggttaagtattgacgcaccatgcaaagcgtaacggtgaactggagctctactggctgagataattcacaaggtgaaggtgagatatattttaggagagccagaaaggtagaacccaagacaaataaagagagagaccaagtgagttttggactaatgtttttcaaagaatgtgtctataactatttattaagttccaaaaaaagacaaataaaagtatgatttttctatataggactactcgattaatcttaacaaaaagacgaataagcagaaaacatatatgtttgttttttcaaaacaataaccttggaaatcaaaacaccagaaaaatgtggctgtgaagaaaagtacaagagagacagtaaaaagaaaatgaaccaaaaaggcaaaaaaatgaatacgtggcttcaatgtagacccagacgatgaacgtcgcatcaccttccttacgggggaaatctcacattttgaaattacagaaaactccaaagaacccaaaattgaatattgaatattgaaaattgaaaaaatctctctttgaagaattgaaatctctctttgaagacgaacgaacctcgttgattcctccattcctcttcggctcgtccatg

SEQ ID NO: 35164 - DNA, 3000 bp, Unknown; identical to SEQ ID NO: 35163
  misc_feature (1)..( 3000): 2750-1469P.txt file - cDNA_ID_3085079; gDNA_ID_2926264; Annot_ID_204865

SEQ ID NO: 35165 - DNA, 3000 bp, Unknown
  misc_feature (1)..( 3000): 2750-1469P.txt file - cDNA_ID_3085107; gDNA_ID_2926264; Annot_ID_143280
gtctttgtttttttttttaaatataatattttatacattttaaataaagaataatattttaaattctttggctagtggctcgactccaccacccataagctatgacttcgggttcgaatgccataaaaagtggggtttgaagaaaaagttaacaagaaaatgaaatttggaaattttcttcgtattagaaaaagaatccttatgcataccaatgatcgagtattcttttgtatgtcaaaagaatcctcatacacaccaatgatcggattgacaccagtcttcaatcacgtacgattgttattttatttggagtcgtacgttgaagtgaagtagatagtattatttcttgtatgttaggacttaggtttggtgtttatatatcgtgaattctctttgatttgatgtatatatatgtgtgtgtgtgtgtgtgatgcctattttacgattcgtattttaaaaagcttggttttgtgggtgtttatcactgcatgaattaaatgacgtacttatatgatgcatgtgacaagactatgaatcgacatatgttggataattatcatatgtatatgaaaagttaaggttggggaaaaaaaaagtcagtatgcgtgtatcaatgtatgatttgttgtagtatgtaatatagaatctaaacggattgcatgtcagtaccacatggatgtgcgggttaacgtttgttgtttcccacaaaaccgcgatagtaatcaagaaagttaaacggattgcatgtcagtatttactagttcgaaacttggttggtatgaactgcatgttaattatatttttaatgacttcaaagtgtttgcttaatgtttttagttatgattttatgtttaaattatagataatctctagaacaaaaccaaacgttttagcggttattttgatcaacaatatgattgatatatactaaagatggcatatctatagatgattataactaggtatacaaaataagtaaaccatagcatcttaaaaacaattctactataaacgatatttttgtttgtttgtgtagacctttgatattcattgatatcatcacttactgaaaaaataaaaaattgaataagcaaaaagctgaataccgacgactgtcgatccttaaactcacgaatcacgattgtcaaacgcacgctcacggctcacgggaagctttagccgctatgataaacggtatcttttatctaggcggccaaaactttgttcaccataacacttcaaacacaaatgtagaccattacacatatataatcaaatggtttccacttaatatatgttagtattcaaaataacaagatattttaaaagcataacaagagttagtgtctctattttctccccaccttctttctaaatataaatattgcgtatgattcatcattttcgcctttttttaatggctaacgttcggtggttgagtgtctgagtgtctgagtgtctgagtcatatgctatatattatgctttgtcattttccatatcatatttgtgtatccccttgtccatgaccgattaattaatttcgctctcacaacaaacacttcactagagaaaatataattaccatctgttcccctgaaacaatacataatcaatgatgatatcaacatcaagtgttatagtgagaaatgcacagcgaaatttctcaattcggtttagtattccaacaaataaatcaattattgttcacaaagacgatctggccaaaactcatataaatgttatgtgttatggatcctttaatctccgtaataacaccaaattactaaacttcgaacgtattttaccttttgtaaccatttaatatgattttaataaacttttcatagtttttttttttacctacaattatttatggaaaatatttttttcagttgtattattattattattttcttaaaacaactatatttttttcatgaagggaaaacactttatattattttgtgaaagaaagaaattacaaatattgaactaattaacttatttctttaacaaaaaaaaatcttttaattgtttttgccaatagggtccccacattttacaggtgtccctcgtcccagcccatcacttgcgtgtcacttggacccaaatttctcctgttttttaaaagaaatttaatttctttctagtatataagaaaaaacaaaacaaattaaaaatgaacctatgataacgtcagccggagaagatcccagatctgcgcgcgctggcatctttcatagagcgccacgtggcaaaaagatttttcactttcgtaagtgatcttatcaaatctcggtcttttgtgtaaattcatcatcatcatataacttactctatttcgatttttcaataaattacttaatatcaaaaaccacaattctggcaaaaaagaaaaatccccaaaatctagggttttcttctcgcccaatttcacttttcttctacgaaattctccattcctgccggctgtcgggttttctgaatcgattctccttcaccaacttcttctctggttctgttcgattctgattttttttcaaggtcaattttttcttctctttaaactctgcaaaatcgtgatcgattaaattcacctcagggttttttgatttctgaaagaagttaatcttcttcgaaggcgattgcaaaagagtgctctgctgtgaatttccactggtatgttcaattttttctgtttttgaaattttgtttgctagaattcgtgaagggattgaaaaaattgatgcaggtggctaaagaatctcttgaatattacgagcttatgtaggtttagagtgtaaattcgagacatgtgagattttggtgctttctcatatttttgcatgcttctgcattgcttcatagccctaaaattgctctcttttttttgtagttggagtctgtatctttttcacggttttagtgatgaatttttttttttgattggattttgaattggttactgaacatgtgttgacttgattatgtagagatg

SEQ ID NO: 35166 - DNA, 3000 bp, Unknown; identical to SEQ ID NO: 35165
  misc_feature (1)..( 3000): 2750-1469P.txt file - cDNA_ID_3085107; gDNA_ID_2926264; Annot_ID_204854

SEQ ID NO: 35167 - DNA, 3000 bp, Unknown
  misc_feature (1)..( 3000): 2750-1469P.txt file - cDNA_ID_3085111; gDNA_ID_2926264; Annot_ID_204853
agtgatgaatttttttttttgattggattttgaattggttactgaacatgtgttgacttgattatgtagagatgcaatcaaaaccgggaagagaaaacgaagaggaagtcaataatcaccatgctgttcagcagccgatgatgtatgcagagccctggtggaaaaacaactcctttggtgttgtacctcaagcgagaccttctggaattccatcaaattcctcttctttggattgccccaatggttccgagtcaaacgatgttcattcagcatctgaagacggtgcgttgaatggtgaaaacgatggcacttggaaggattcacaagctgcaacttcctctcgttcaggtttgagttcttggtctttaggcctacttggtgtattgttcatattcatcatttctgcagtactgttttactggatgacctagtgatcactgtcgaaagtgatgttgttccacgttcggaatgttgcaacttggtgaagagttgttcctcaagcaggcagggaaattaaatgggcatttgtgtgattcggcactatagggcgtgtcaagttcatgaatctggtccttgaaatatacttgcattgtaattgtagggtttcatagttctatccatgccaaggagattctgtctcgttgatatgtgcattgtgatttctttattttgtttgtaatggtgtctttcttcaacttcagtagataatcacggaatggaaggaaatgacccagcgctctctatccgtaacatgcatgatcagccacttgtacaaccaccagagcttgttggacactatatcgtatgtggtttcctctcattccttaatatatatatatatatgctttatgagttcttgagctgttaaattgacttcttattggtccctcaaaaggatttatcttgtataacgcccttttcatatgtatgataaactcaaaacttccttacaggcttgtgtcccaaacccatatcaggatccatattatgggggattgatgggagcatatggtcatcagcaattggtatcttgtcgaaacctctttcaatctctacaatagttccatatggtgcagtgtttatttgatgtatgtgcgcttttgccactaagtacccgtttgtggtgattttatttactgttggaatgtgtctgggttcagcaatagtcagtgagatgcttttaaagttcatttctgaaataactgagaatccaaagttatatctgaaattatcgagaacaactaatggggattcttggggtcttataagttatatgtaaagttttcgatgatctgagtctatttgttgcatttattttgttcattggtttaaacagggttttcgtccatatcttggaatgcctcgtgaaagaacagctctgccacttgacatggcacaagagcccgtttatgtgaatgcaaagcagtacgagggaattctaaggcgaagaaaagcacgtgccaaggcagagctagagaggaaagtcatccgggacagaaaggtatttttttctcatttatgaaaattgtacttgattggtgtcctggtaatctaaggatggtgtagagtccataatagaagtggacccatgctatatgaaggattgataatgagcattaagaatttgcaagtttggtttgtcgctcggtaaacttgtattgactatgtttgaaatgcgacagccatatcttcacgagtcaagacacaagcatgcaatgagaagggcacgagcgagtggaggccggtttgcgaagaaaagtgaggtagaagcgggagaggatgcaggagggagagacagagaaaggggttcagcaaccaactcatcaggctctgaacaagttgagacagactctaatgagaccctgaattcttctggtgcaccataataaaaaaagccaaagctctgagaggagagagagacacacactttggctaatataatcattgcctcaaaccggcaaatcattcttggctttttcgtttttgtgtttgctagttgttcttgtcagagtctcatattgtgtgggtttaacagttatgatgaatgtacaaagagcgagttatgttaggtgttagattttggagacaagagactaaggaatagcaagtaggtcttgtttttattctttgaccttttttttctcttttgcaaaattgaaaaatacgtttgcttaatcgtttgcctttctgaccacaaagtgttaacaaggctataacaatgcttcagatttgtagtcaaattctctgttttcgccaacttaaacattatttgaccggaggagagtgattagaaagtagaagaaacctattaaacattatgttttgcaaagaaaaaaaaaacagcttgcaataagttgcatagtttgctcatggaagtttcaagtttgcatataaaccagatttgaaaaggacagtgaaaaaaaagaagttgttaaatctacaacgggcagatcgattatttatatcaacaaaaaacacgaagagcatatgaaagagaatatggaaacacataaaaaattaagagttgtcattctttgaatccccgcaagcaagaagaagaagaagaagaagagagtcaatttgtgtgttttgtcatttgaagaagagagagaaagaggaagactttgactcgtcttcttcctctcttcttctctctctatcactgcatttgtttttcctcacagcgtatgatgacttttctctttaatttatcctttttagctacatatcttcttttgcttcaactgatttatacccatttaaatgtttctacccattataagttctgaggtctgtgttttccctctttcccttgtctttgatcttagctagggtttactaatctggtttgagtatattagattagggttctgtttgatttaggatatgttgttaattagaaatagttattggcttaagttactaatggaaccttgaagaacagtgctcaaagttttaatctttctgggtttttcaggaaccttgagatttgattagatg

SEQ ID NO: 35168 - DNA, 3000 bp, Unknown; identical to SEQ ID NO: 8906
  misc_feature (1)..( 3000): 2750-1469P.txt file - cDNA_ID_3085127; gDNA_ID_1971919; Annot_ID_58538

SEQ ID NO: 35169 - DNA, 3000 bp, Unknown; identical to SEQ ID NO: 8897
  misc_feature (1)..( 3000): 2750-1469P.txt file - cDNA_ID_3085127; gDNA_ID_2926147; Annot_ID_197809

SEQ ID NO: 35170 - DNA, 3000 bp, Unknown; identical to SEQ ID NO: 8906
  misc_feature (1)..( 3000): 2750-1469P.txt file - cDNA_ID_3085127; gDNA_ID_2926265; Annot_ID_143305

SEQ ID NO: 35171 - DNA, 3000 bp, Unknown; identical to SEQ ID NO: 8906
  misc_feature (1)..( 3000): 2750-1469P.txt file - cDNA_ID_3085127; gDNA_ID_2926147; Annot_ID_139143

SEQ ID NO: 35172 - DNA, 3000 bp, Unknown; identical to SEQ ID NO: 8897
  misc_feature (1)..( 3000): 2750-1469P.txt file - cDNA_ID_3085127; gDNA_ID_1971919; Annot_ID_177169

SEQ ID NO: 35173 - DNA, 3000 bp, Unknown; identical to SEQ ID NO: 8897
  misc_feature (1)..( 3000): 2750-1469P.txt file - cDNA_ID_3085127; gDNA_ID_2926265; Annot_ID_204901

SEQ ID NO: 35174 - DNA, 3000 bp, Unknown; identical to SEQ ID NO: 28523
  misc_feature (1)..( 3000): 2750-1469P.txt file - cDNA_ID_3085140; gDNA_ID_2926147; Annot_ID_197798

SEQ ID NO: 35175 - DNA, 3000 bp, Unknown; identical to SEQ ID NO: 8902
  misc_feature (1)..( 3000): 2750-1469P.txt file - cDNA_ID_3085140; gDNA_ID_1971919; Annot_ID_177156

SEQ ID NO: 35176 - DNA, 3000 bp, Unknown; identical to SEQ ID NO: 8902
  misc_feature (1)..( 3000): 2750-1469P.txt file - cDNA_ID_3085140; gDNA_ID_2926265; Annot_ID_204890

SEQ ID NO: 35177 - DNA, 3003 bp, Unknown
  misc_feature (1)..( 3003): 2750-1469P.txt file - cDNA_ID_3085160; gDNA_ID_2926266; Annot_ID_143323
gtcaatccatagagaaatagaagataatgagatcttatagatttgagtttctgtttccgtttctatgtgctcttcttgttttctccataaaggaaaataaagatataaaaatctttattattattacaaaagagagaacaagataagaattgaaaatatattagctcttatcctaagccaactcactccttccttgatgtatgcatttttgttttgccataaaatcttatacccatttgcgggatgggatctatgaggcccattcaggtgtaaaaaattgtaatattttttagcgggaaaaagaacgataaatacaaaataatagatagcgataaagacaaatggtggtatcattttttctgtattactaaattatttcggtgtttttttgtttatgattgctaaacatgaaagttatatacatcttgtagttgcgaaaaagtgttactaatcaatcaaacccaaaaatggaggtatagttatttaaaggataatatagctatctataccgagatgaatcaaaaattatgattataccaatgttttctatataattagttctctctctataatttatgtaagttagacaaaaacgcccttattgcatatatcaaattatttagcaatgtaataaaatagttatcgatatttttgtcatcaatttcttcaagaataatatattatgaattagatgattatctatatgataataatatatatatgcctgtaaataataaaaatttatgttaaaacatatgatatcgcgataagaagaatgttaaggagatatacaattagtaatgtgttaaatttatttttaacatactaaattatacaatatattatataaacttgtcaatatattttaatctttcattcatcatgacataaaagtacggtaaaaataactgtaacgtactaatgtttcatttagcaaagtatctaacgtaataatatagcaaaaaagtcttaatcctcttttattgtgctgaatatacatacataaaaatacagatttataattttaaatcgataaatatttttcaacaaaggatttgtaaacttatcgcgatatcatagtttttagcacgttaaacaaatagttatatacttatcatcaatatattacgattatttttattcaatggcatttttgtaattaatttaaaagaaaaggatatttttggtttatatattatttctcctttatacttacctaaataactaatagttatgcatagattcttaatttcttcatcttctatgcatagatattaatatagcccttatttaaaagagatataattagagataacattactttgaatcttttttcttcccgctaattctttttgcttgtttaattggtatgtcagcggaggcacacgcgtaagtacttgaggaggaaacaatttagctcaatcgtcccctgatttccggcttttgagctgaggtcatatgtatgcacaataaaattgaacctcactatctcattctcagccttactcacaaaacaaattctagactattgatcaaatacagatgaatatgaaacaaacaaaatgtgaaagagtgaagaaagcaccaaagtttttacgagttatgactcgataggtataatcgaatctacgtctaaaccagattaattcaacaatccactatacgaaaatattacacatgtaggcatgtagctcgtacaacaagaacagagctcgcaacagcaagcggaatcaattgatgaagttaaacggagaagatagcaaactgagtacttatactcttatcatactaaatgataaaccctctatgagatttgaagaacttcctttgttttccttcaagaataccttttgcggttagaatctttcttcaactttccccgttaacacatccagctcacagcctaattgaacctcgcgatcttttccttactcacaaatgaaactcaaaataattcatcaaacacaaataaacatgaaacaccgaaatataaaagaatgaacaacactaaggattacacttgaatctagatttgggaaatctaaatatccaacatatgatagtgttacaacaagaaccgagctcaaaattcaaaagatgaagttaatcggagaagatagcaaagcgtaattatactctatcacatactaaatagaaaaaactatgaaatatttagagacttctcatatgttttccgtttagcatagtctctttgattagagtctttctttaaccttataactcaaccgaaccaagaaacttaagtttccgctgcacgattataataaacttaagttaaattgggttatatatttttttatttaatttttttgaatactcagaagatttgatcatgaactactgaaacaacgtttttggccaagaaataagaatttctacatcaaatttgtccatatagatcttatgatcattttcacaaacaaggtttcaatgcttttgggtacgttgaactttttccacggacgttgtaataccgtgtgaagttttattcatgtcctcttgttttttccaacgaaatactaagttacgtctaaccatccaaagaggaacaatgtatgatctaaattaattgaaaattcgaagaatccaatcacctttttttaggatcttaaaaattagaaagaaaaaaaacaagacagaaaaaactagtgaccgatggatgtgaatctctaagtcaagattagtaaacctaaacttaaccttctacgaaaaattctattataagttcccactaatcgtcccgccattttaaaaagatataaaaccgtggggagaagtagaaataaaaacaataaaacaattaacaaaacaagaaaaaacgaaaagcatgcaattgtttttcgttttttgttgaaacaaaaaacaaacttaacttcaccaaaaaaactacagaaaaaaaaagattcagtttccttttctttgtctccacttcttatataagagttgggcatttttattacaaacataacttttgaaatcatg

SEQ ID NO: 35178 - DNA, 3003 bp, Unknown; identical to SEQ ID NO: 35177
  misc_feature (1)..( 3003): 2750-1469P.txt file - cDNA_ID_3085160; gDNA_ID_2926266; Annot_ID_204942

SEQ ID NO: 35179 - DNA, 3003 bp, Unknown
  misc_feature (1)..( 3003): 2750-1469P.txt file - cDNA_ID_3085259; gDNA_ID_2926267; Annot_ID_143346
tttagttataaatatttttattggttgggttttattttcaaattaattttctcttgctttgctcttctattctctcaaaccttgtcctcccaaagatatgttatgtaaattaattaaaggaaatcaaattctgttaatgattatctgtaactttgtttttgtcaaacaatgattatctgtaactaagttcgtcgtattatacgcgtaatgatatatagtcgtgtctagtgtgtcatatgactcgtgttatacgcttcaacttatcctacatgtacctaaaggcgtgcaagcaaaattttgtttctaagcttatttgtgtagaaaaatacaaaagcaataaataatttgggtaaacttttgcatgtgatcaatggatggatatagtacacattgctacttatgttttcaagaaactctagtacgcaagaatagacacgagttcgaatattttgataaattggaataaacttgttgaatttgtagatagttatccattttatatattaggtgtcatacattgacacccaaattcaaaagtttatgtgtactttgtaattgtatgatgcatgtatttaatatagagtagattatagtgtcatttgagtcatcgttttcaaaaaagaagaaggtaaattgttaatgtcttcaatatatagctctattggtaagtgtaaagaaattggtgataaaaacgtagactaaaacattaagagcaattagcaacttaaaacctaaaacaatagcaaatttcatgatatgtaagaaatcgtttgaaaatagattataaaacaacgacaaatattaatatcgtagcttcggtggtttacatttgaagtaactttagatgacgacctaagtatcattaataaacaataagattacctgctaatcttggttaacggatagcttgatgctacaactggaaccggtttgctatataaccggttattggttaagaaccggtcaggttaggttagattagacctgatgttagtgtcaataccctacactttgtttgtgttcaagagttcaccataaagagattcgacgaatccaacggctcgtgagtgaagggtgcatagagatcggagagtagagaatcgaagcaggcgtaggatatttgttttgttgacgtcaaccatagaaagatatacacgtggaggtattgagaagagcgtcttaagaataaatgcttttcttggttttcttattaaaacagtaaaaatgcttttcttgttaaagaaaaaaaataaaaattccttgactaatccttcacgccgcgtctagcccattaaaaattttcggacaacaacaacaacaacttcgctttcctatctctttcagctttgctacactaaacttggcttatcattgctaatatggctcgactcggcttaattttgactaaccacaaatgttttgtaaaaatttcagtaaaaataaaacaaaaattaagcgaaataaatatctagggaaactatattacgcaatgtctaattaggaaactaaatcattatatttatcccaaagatattccaaaagatgattatccactagatattatctgattcgttgtaggtgaaaaaagaagaatgagaaagaacgtgaagactgtaacaagcacacaaaaaaagattgttaaaaacaaccaaataaaacgttattttcaatgtatgtatatccattttagtcggtgttaatgcgtttttatcgtttcctttttctcacgcaaaaactttttatttgggggtttttaacatctgtactcacgctaaagttctatcttctaaacatttggcatggggaatccattcatttattaatttaataaaaactttaagataattgatgaagtataaaattctgtattatcaacacaagaagagaaaaaaaaaacaaacataattcgccgatcgaggagcagccaggatccaacgactgcagtcgcgagtccgtaaatgtatatatatatccattaaaaaaaggaaattgtaatcctaatccaacggttgagataaaagctcacaccgtaacgctagatccatggcagaaacagcgtagcaaaaatctttttctttctctcattgttgttttgtcttgtttctaccattcatttttttttccttgttgttgcgtaatccaactaaccgaaaaaaaccaaactctttcttttctccatttctctctctcttggagggagtgccggaatctaatcggagttatcaccggaattacggttttgcttccgtgcaaagtttttacttgctcgtttggaattcacgacgtgtccgtcagaggaagcagaatttgaaattgaagcaccgattcactttttttttgttttggaaattatatatagatataattctctctgctggttatgatgatgattggatagaaagaaacaaaaaggaaagccaaagatataagaagaactctttctctctctgtttctgtctctctgctccttttgccacgtgaagtttagagaagaagaaggtttacgagatccgtttcagtaatttttagctgcttcaatttgcttttggacgaattacgaagagaagaagcacaattgatctggtaagtttttgtctttgtttgttgggttaattgttgattagggtttttgttattgattatctttgtgctcaacttttgaatttggtaggagttggttcttctctgcttctattaaaagatctgaatttaggctaattgtagttttatggcgtttttaattccgaattttgtgtctttataatatttttttctagtcaaactaattcttaccctatagattgcttgaatttgcttaatttggtgtctttgattttgagttggattggttttgtaatagaaagctcctgttttatccattgaattgtaatacattctggcatttgagactgggttgggtcccttatgtttgtttctggaggtggtaaaactagaaagttaaaaagtctcattctttgtaatttcttgtcagctggaacaatg

SEQ ID NO: 35180 - DNA, 3003 bp, Unknown; identical to SEQ ID NO: 35179
  misc_feature (1)..( 3003): 2750-1469P.txt file - cDNA_ID_3085259; gDNA_ID_2926267; Annot_ID_204977

SEQ ID NO: 35181 - DNA, 3003 bp, Unknown; identical to SEQ ID NO: 35179
  misc_feature (1)..( 3003): 2750-1469P.txt file - cDNA_ID_3085259; gDNA_ID_2926269; Annot_ID_205030

SEQ ID NO: 35182 - DNA, 3003 bp, Unknown; identical to SEQ ID NO: 28433
  misc_feature (1)..( 3003): 2750-1469P.txt file - cDNA_ID_3085269; gDNA_ID_2926267; Annot_ID_204974

SEQ ID NO: 35183 - DNA, 3003 bp, Unknown; identical to SEQ ID NO: 28432
  misc_feature (1)..( 3003): 2750-1469P.txt file - cDNA_ID_3085273; gDNA_ID_2926267; Annot_ID_204973

SEQ ID NO: 35184 - DNA, 3000 bp, Unknown
  misc_feature (1)..( 3000): 2750-1469P.txt file - cDNA_ID_3085297; gDNA_ID_2926267; Annot_ID_143335
attacgtatgagaaatttatagtttgtattgactaatttcattaactatttcaaattttcactcaagtttgatcatatatacatactaactagtccacacaaatctaactcatgttcactaacttttgacccttaaaataaaaaactcatgttcactaactgtccgatattaacaacagtaaccacaaaactgatcatatatatatactagaccacaacagctaacgcagcacctcgtttattgtttcgacgcaataacaataaaaacatttaagaggaaacatagtaaaaaataattgaattggtctagtttagactactgtagaatgcgtacagattggtcttcttacatattagagccatgcaccgttcgagtctaaaagcctagagttgcttatacagctgaacctccacaagacttatataaatcttgtggatatacgagcccccgtctccttttacgtttttgtggatttacataaatctttatggtcaccgagtctactgatataattttactgtcgcagtttgtttccactacttaagtttctataatttcacagtttgaaagaaaaattactggttattcagctaaattacaaagattagtttaattagtttagccagtataatgttttagtaaagtattaaacggcatttttcgttgggagaattatgttatggtataatctactaatacatacttttacacatatatcaaaaagtttgaccatagtaggtagtacaacatagaagaatcaagatcggaaccagcaaggaagaagatacggtcggtccatattaagctaagaggaccaacgtaactcgatatatatttttctgttctctacgttaccaccatataaattttaatattgaaaaaatcatcttttggcattgtgtttgatgtcggattcggaatatggaaagaggagagatatgagattttggcacaaaggaagctgccaaagcattagggcaaccgagtagtaacgagatcaaacatcgtttcaatcggacggtcggggtttgaccaatatttctcggatatcttttggaccctacgttctgacttgaacttgatcagtcacttcagtaccttagttttcattttcaatgtgatcatgagtttttttttacatgttagcttcaaaacaaatactaatattcattaactatggatcggcatagttttcatgtaatcagctgagcgtttatcatattgattgaagctaacatgtaaaattctcatgatcacattgacttttgcctacaaattttaaaagagtatacaaataattgcttaatgaagatagcttccatagagaaagagtaacagctttatacggaggcatagctttagacacgatctctgctcttgtgttttttgtttaacactgaatccacagtgaaattactgctcattttttttcattttttattacatttttttttttacttttttatttattacaatctacagttctaccaacttattcaacctagtggtaccatatcgaccccaaaattaatcaatctaattacaaggtagaaatagaaagattttatcaaaggagacaactctgatcgataatatgttgcaataaaaccatgaaaaactgtaaaaaatattgaaagctgaagaaaaattttcaaatcgataaaaggatagtactaaaccaatccggtttgtggcatctttttcacccaatcactatcaaagcattaactaaaaatcacaaggaagagcataatttgattctctacatcgcagtccacgataggatttctctatccaccgttggatcaaatttaataatgatgcacgcgcgcgtcaacgggattttacccagcaaaggaatgtcttttcaccggactcttaaaagacgttcttcttttttcacctttgcattggaaaacggcgtttcttcttagaaccgtcgccgtcaaatcatacggcctaataaatctccgtttaacgccgttactttaccgttaagtactaaaaaaacaaaaaaaaatcatttcgatcactgtctcattaagatgatcggagatgttttagcagggtttaacaagtgatgatagtaatgtatgtatatatgttactgacattattttgtcgttgtctaataggagggtactaaagtttctctctctcatggcgtcggagctcagcctctagtaatgtagactgtcctctctttctctctctcttctttaaacatctctgctctgttttccttccagttcacgctaatctcctgtgtcggtcccctctctcttttcctttggtctctcccaacaatggcagaacgactttgtacccttcttttgctctttgtttgaatttcgtttcttgctacaaagcttcaaaggatctgacttttccctaaacagaaaaagaggtctttaaccaaaaaaggttgttacttgttttctgggtttcgtggtgttactcttgaggaagaagaagaagaagatgagaaggatagagaccatgaaaggcttgtttttttgtctggggatggtggttttcatgctacttggttctgtttctccaatgaacaacgaaggttctagctctttcaaaatctcttttgtttctctattgttccatgagccagagagatttctctcttttttttccagagaacttgaatttttataaatttgtaacctttcttccgattttgaagatatcatatctgtttatctgtctatctaaacagtgactgttcctgagagagcaaaagtcatttgattcgttcttaaaaaaaacttactttagtgtttttggaaatatgataataatttgtgacctagctcacttcacagttgagtttattatactaatgatctagtggggttttagtttttggcatgtggttcatattttaccatttgactatcatcagtgtcaaatgattaaataagctttttttgatttgtttattgacttcaaaaagcttttgattttgcacaggaaaagcgttgatg

SEQ ID NO: 35185 - DNA, 3000 bp, Unknown; identical to SEQ ID NO: 35184
  misc_feature (1)..( 3000): 2750-1469P.txt file - cDNA_ID_3085297; gDNA_ID_2926267; Annot_ID_204963

SEQ ID NO: 35186 - DNA, 3003 bp, Unknown
  misc_feature (1)..( 3003): 2750-1469P.txt file - cDNA_ID_3085320; gDNA_ID_2926267; Annot_ID_143330
cacaatatacatagttacatatgacctcaaatcagcataagagttgttttgtatatggacatgactgaatcgaataccttgatctgctcgtactccctgatggcaacatttttagagtcttcagtgaccttgatggtttcttttaactcttctatcttcttaatccttgatttgtcaccgccaaagacctttgatgatgcaacttctagcttttctgctcttgcttccagtgaagaaagttcagatagaagcgtctgcactgtcaataaagcactagatctatctgcaaaggcgccctggactgccatcattaggccaaggtaatcgtggagtgtgtcctgacatgaataattcagagctcttagtgaaactaaatcccagctcaatgaaagtggaatagattcttcatatctctacaagtatctagtttaccaaatgcttgaccgtctgggaattcaactctctgtaaaatctgcttgctttcacagctgaagtggctaaattcttcatatcattggcacgagctctttgagaattgaagacagcttcttcgttctcgaatttcgtcagtttaatgaatgctaatcccaattcccccatagtctcccccatgtcttgctgtgccttcacgagggattcagcctacaaaaaacaaaaaccatgaaaaatactgatcttttgtgaagtaacaagtatgaaatctctctacctgctgtgaagcattaatgatctgttgctcaagatcatacattttctccttcttctccaaaaactctttatcttcttccacaacaggtggttttgatccaccccagtcattagaaactgactgtctaagttctttaaacattctcagaaaatctctacctcctctacccggctgaaccacctcaaccgaagaagctccaccgccttcaccaaacaactgtttcggcagcttcacagcaccatccaacatcctagaagccacatctgtgctcgtagcaagcggtaacttcccttgcgcttgaagaaaaaccttcaattcatcactgttcctgatcacaggatgtgcaacaagcctacgcaaatacttctccaatgcaactcttctctgctccacaaactcttgcttttgcatcacttgactctcaactatactcttatctggcctcggtggaatgcagaaacctctataagactcagctaatctatcagccaatgtaacaatgtctctgaatcttctcctcacgctaaactccgatccaccgtagtcagagagattcgttctagttgtaatctggtaagtgatgtaagtacttcctccaggaatcattgaatttgtggcctcttgctctttctgagggttagaaacagtgatcttgatgtaatcagagctcaaagaagacggagatctagataatgaatctgacgactgactatgaccatcttctgagccattgatctcggagatatcatcgaaagggctgaagataacatccgcgtaagacggaggctcgaggtaagagctgactctgtcgccgccgtttggtttagaacgaggactccgagattcgctgtagtaagacggtggcgcaaaaagtggatcggaatcagctggagttacgacaatcgacgggtgacgcgagtcgaagagagttgacatagcgctgcgataattagagttggatttatcgccgttgacattgcttttggtcaagggatcgccatcttcgcggagaaagagtttctccatctcttctttggatgagtggagatgggactcttcgtcattctctgagcccatcatctctggtaaatctataaggtgagctaattttagtaataaattcacaggaatttagggatttttcgattcggttcgagataacggagattacgaggatacggtggtcgtgaactgcaataaataagcggagtggctaagtcacggcggtgttggctccagatattgaatgtagtagcgtcaagtctcgtcaataactaattggggaagatgagatggaaagagtaatatctttcgggtcacgttaaagtgtttagctgggttttgacccgacccgtagcagcccagcccagcccaatatgcaaattattcttatacttaaatgtggtagagatatctctgcatccaaacgacctgactataggtctacttggttctttcttccacgaccgtatcgagtcaactactgtaataagatttccgatgaactcagggactcgaaattggggttaccgggtccgagccatttgggaaactatcgattctatcttcaccttatgctcttctgtattcttcggaaatgagaatgtagtagtctcatggagtttccaatggcgagaagcttaaagctctgttttctattggagaagagcaaaacgcatgattatgatacggagacacttctttcgtcatatgagagaagagtaaacagttctcgaggttttagagaatttttatcactttcagtaatgtctttgaagcactcaaagtcactgaaatttctggagaagctgaggcagcagatgtctcatgtctaaaaaaggtagctgttttcattcttattcttcgttttttaaaacacattgatgactgagaaaatcaaactcaacttggggacaagttgatgatgattgatgacgcacgcagcaatagattcggtttatagattttgggatagtttattaagatttctgatgcagtaatcttaattgggaaatagtaaagattctggtttaaggagaggatccaaaagcttttagagatttggtgtccgaggatgagaaaaaatcaaagaaaaggtactaaagtaggctggtaggggttcacctacatcttctggaacaagaatcatatttaaaactagaaagtagaaactgtttgttttgttgtttagttgttacaccaaatggtgtgtgctggttagactataagctctctgtctcctgcctataaaaagtatcaactttctctttctcttcgagtaagtgagcgcaatg

SEQ ID NO: 35187 - DNA, 3003 bp, Unknown; identical to SEQ ID NO: 35186
  misc_feature (1)..( 3003): 2750-1469P.txt file - cDNA_ID_3085320; gDNA_ID_2926267; Annot_ID_204957

SEQ ID NO: 35188 - DNA, 3003 bp, Unknown
  misc_feature (1)..( 3003): 2750-1469P.txt file - cDNA_ID_3085346; gDNA_ID_2926268; Annot_ID_205019
tagacaacgattcaacggtcaagatgatttagtgtctctttggtttctgtgatatataatttattgaaccctttataaattttgttttgaattttttctcttaagaaaatatttctgtgtaggtgctttgggaaaatatagaatcaaacacttatttgtaattttttttttttttttttaaatttattaggtatattttgttttgccctataaacattttcttaacactcaaaagtaaaccaagctacatcttcttcctcttttcataagaaagtaacagtaataatgataaaaataaacaagtcaagtattgtaaatattacatatctaaactcatgttgtcatcatgggtcggggatccgatacatccattgtgggagaacgagcaagcaacatcgtatatgttgggtgagtactctcataagtatcggactgttacaggaacttataatgctattctgcttggtatattctaattcactgtggatcacaaaatttccattgagtaagttaataaatagcaaagtttggtgtttcgaactccaaaagtatgctatattagcatcaaaagggtcaatcgttagcggtaaataatcgaaaggagtttcaataaaagtcggggagatctcagatactaattgccattctccactctttagcctccatacacataacttagcatctaaaccttcatcagagactatgttcatatacatgagaaatccttgactagttgtgcatgttcttatgaattcgcgatgcttttctaaatcagggaaatgagtaacccgacacttatcagaatttgtttcaaaagcgtaaaagtcgatggatataacaacttctgtatcctcactattgcgaacgagccaatgaagattttcgtttaagctaatgggatggtaaaaatcacgattgaacgaaaaagagaaaagaaaatggatagtgttgagactcgacaaccgtgtctcggacgaatatatctggactgaaaacttattttcgttattatggatcttttttgcctttcatcaaacataacaactttgtaactcaaaacgacgccgtttttagtttgtgttactattcccaagggacagaaaaaattatgctcgagagcacgacgattgatttctaagcattgatgtgaaattggattagctaggtataacgattgatcctgaggatagactcgacatcgatcaaaataaaccccatatcggtgttgtaaggaacaactttggcttctcggtatatgttcatttcgaatttatcggtcataaaagacgagatgtaagagtactggtacgattaaatccccaagtgttgcatctatgatgagccacaagttctatcttgtaacgcctacacatgagcgaccatgaagaagaatggtgcagagacatgaacatgacacgaaaatgtggagactcgataatagatttccactgcttacaaaccagtttagaagtcgtgatcatttttagtggtaattgtgcaagtataattgtccatagatcatctgtgaagaaacatattcttattcatatgtgttattgggatttactaaggtgtatttaaatactgaatttcacataaatttatttctcaataatatctagcttttgctgataaatctacgtaacataatggtatgtaaaaaaaaagtagattataaatttaatatatgtgtacataataaacagtaagagatttgatcaaattatatcttttcatgctatttagtattgtaattttctgaaataatcaattatcctaaaacaagttcataaataaaaagttaatatcctaaacaatatttacgtttaatatattttctctattaatactagatttgatggaaattttatctattttagttattttatataaaaagtttttttggtttataataatgaaaaacgtgattaatgataaaatcataataagagcgaagggcccattataacagcatttatttgggccgttgttggtctcaggttcccgctcttttttatcgatcgaggcgccaaaacacaaagaatcgattatatgttgtcatctttcagattgtcaattcaaagaagacgatcagatctaattgactcgagagagagagagagagacgtatgtttgggaggctgagaccaccgccgtcgccgccggattgtctggagagatatccggcgaagatcatcaaagacgatcctctctccgtctacggtataataaatacacactctttccattttcatgtgattctgattgtccaatagaaatctctaggttttgaaatccttggtttcttttgatggcattgtagagtcaacactgttgaaacttaagcaagggtcaacaagacaggacactacttcatcagaaacagaaggtgaagagaatctgtcatcaacatcatcgtctcatgtcttgtcttcggatacacaattaggagacactcatgatgcaatggctatagactcgtgtgaaagctcgaaacagataaagagcaagaacccatcagtactatccatgtttagcaagtacaagaatcaagctcaagcacgaaacatgaagacagagactcaggaatgatttgtaaacaaatgtatcccaagttcatgtgtgttgtactttgattatgtacaatttaactacattgttagtaaggagtctatatagatgcctgtatcaaaacatctctcaatcatgtgtttattactttagcctaaacaagctttatgatctttaaccaacggtgttgatagtactggtcatgtaggggttcatccataactaaacgtctaaaccttatattaaaatgggtctaactgatcaatcaaaaacatttggggtcaaaacaatatattggataaatataagggttcatcaaaaaaaacttaacatttcttcttcactgtaaaatgaaataaagcttatccatactcaacttcttcactctctcttaaaccttcaaaaaccctgaagagtgacgaatgaatcatg

SEQ ID NO: 35189 - DNA, 3003 bp, Unknown
  misc_feature (1)..( 3003): 2750-1469P.txt file - cDNA_ID_3085350; gDNA_ID_2926268; Annot_ID_205018
tattgcttacgtactctaggtaacctacaaatgctttggaattcagttttttccgtagcttggagtctaaatacttgcacttgattcttctttctgacctcccacggcgtgtgcattcgtcatagaaacaaggagcagtcaatttgaatatctccaactccttggttcgcttcggtttcgaaccacacttactcaaggcagcagcaatatgcttccaacacgtcctgtggtgtaaatactcatcttcctcacaatctgtaaaattatagacacatgttgatcaaacttgaaagttagcctcttccagagccagaaccaaaactttcacaaactacaaaaccagaactaaatatatatacattttcaagaaccatagatttcattgtcataaaaatccaaaatctaagccaattactagagagaatttcaaaattacacatggtaagatagtaagcatcaccacgacacaggaatagaaacaatctcgtcactttgaaaattccagaaagaaaaaaaacacaaactttcatcgaatcttcaaaaccctaactcccaaaattgcgttaaaccaagaaattaaaaatctttcaaaaacccccagaaaaaaaaatgaataaaaatcgagaaggaaattggaatttaccatcaataatagtaacacgagcaggactgctgacgtatttactattagtatttcgaacacgattacttcgtcttcttgacattgaaatttggtacagagagctctgagtgttttgtcttgccttgctttttattttccctcttctcttgtaaactttttgtttcgcttaatattagcagacgaattacgtaaagactcttttggccgttgattttacttactttttaatagacaacgattcaacggtcaagatgatttagtgtctctttggtttctgtgatatataatttattgaaccctttataaattttgttttgaattttttctcttaagaaaatatttctgtgtaggtgctttgggaaaatatagaatcaaacacttatttgtaattttttttttttttttttaaatttattaggtatattttgttttgccctataaacattttcttaacactcaaaagtaaaccaagctacatcttcttcctcttttcataagaaagtaacagtaataatgataaaaataaacaagtcaagtattgtaaatattacatatctaaactcatgttgtcatcatgggtcggggatccgatacatccattgtgggagaacgagcaagcaacatcgtatatgttgggtgagtactctcataagtatcggactgttacaggaacttataatgctattctgcttggtatattctaattcactgtggatcacaaaatttccattgagtaagttaataaatagcaaagtttggtgtttcgaactccaaaagtatgctatattagcatcaaaagggtcaatcgttagcggtaaataatcgaaaggagtttcaataaaagtcggggagatctcagatactaattgccattctccactctttagcctccatacacataacttagcatctaaaccttcatcagagactatgttcatatacatgagaaatccttgactagttgtgcatgttcttatgaattcgcgatgcttttctaaatcagggaaatgagtaacccgacacttatcagaatttgtttcaaaagcgtaaaagtcgatggatataacaacttctgtatcctcactattgcgaacgagccaatgaagattttcgtttaagctaatgggatggtaaaaatcacgattgaacgaaaaagagaaaagaaaatggatagtgttgagactcgacaaccgtgtctcggacgaatatatctggactgaaaacttattttcgttattatggatcttttttgcctttcatcaaacataacaactttgtaactcaaaacgacgccgtttttagtttgtgttactattcccaagggacagaaaaaattatgctcgagagcacgacgattgatttctaagcattgatgtgaaattggattagctaggtataacgattgatcctgaggatagactcgacatcgatcaaaataaaccccatatcggtgttgtaaggaacaactttggcttctcggtatatgttcatttcgaatttatcggtcataaaagacgagatgtaagagtactggtacgattaaatccccaagtgttgcatctatgatgagccacaagttctatcttgtaacgcctacacatgagcgaccatgaagaagaatggtgcagagacatgaacatgacacgaaaatgtggagactcgataatagatttccactgcttacaaaccagtttagaagtcgtgatcatttttagtggtaattgtgcaagtataattgtccatagatcatctgtgaagaaacatattcttattcatatgtgttattgggatttactaaggtgtatttaaatactgaatttcacataaatttatttctcaataatatctagcttttgctgataaatctacgtaacataatggtatgtaaaaaaaaagtagattataaatttaatatatgtgtacataataaacagtaagagatttgatcaaattatatcttttcatgctatttagtattgtaattttctgaaataatcaattatcctaaaacaagttcataaataaaaagttaatatcctaaacaatatttacgtttaatatattttctctattaatactagatttgatggaaattttatctattttagttattttatataaaaagtttttttggtttataataatgaaaaacgtgattaatgataaaatcataataagagcgaagggcccattataacagcatttatttgggccgttgttggtctcaggttcccgctcttttttatcgatcgaggcgccaaaacacaaagaatcgattatatgttgtcatctttcagattgtcaattcaaagaagacgatcagatctaattgactcgagagagagagagagagacgtatg

SEQ ID NO: 35190 - DNA, 3003 bp, Unknown; identical to SEQ ID NO: 28443
  misc_feature (1)..( 3003): 2750-1469P.txt file - cDNA_ID_3085355; gDNA_ID_2926268; Annot_ID_205015

SEQ ID NO: 35191 - DNA, 3003 bp, Unknown
  misc_feature (1)..( 3003): 2750-1469P.txt file - cDNA_ID_3085359; gDNA_ID_2926268; Annot_ID_143369
tagtttttcgtcaaaagtctttttcgtattattttgtattcaaaacaaattggtgtaaacactcatatcctttattaatagtttaataaactaaaacgattttctctctaattaataagctaaaaataggaataaaactattaaactaaggtttgatttaaaatcattgaaaaatacaaaacgcgattattatgaaacaaaaaataagtctcgaaacgacaaacatgttgtgaaacggatgaaatatattttaatgaggcctcctattaaaaagaaaaaataaataactcattgtaaaaaggaagaagcaattactgatgaccccctcgagaacgtaaaacactgcatgatctaacaccgacactggtcttaaatactccatgttatctctaatctgaatgggttcgaaactccatacttccaagttactaaacttggccagagcgaccactacactaaaagattaaaaaagacaatgcatttatgatttaacaccaatgagacctctccctttgacgtagctttcattaagatctctatcattatcattcagctaacagcttcagctttttaaaaaaaacttgaaacaagattaatgggttcacatttaatgtacacactgcgccaacacgtgtaggttatgaaccttatggtcgctaagaaaataaattgtgacagcaaaatgtaaccgaccaaagagagaaaaaagatggtccaacatatggtttctttttcttatatgattgatatagcatcagcaaaattagaaatgatattggaagtgtcttttaatacattgggtgttgctaactatcatactagcaccaagatataaatgaattgaaactaacgtcttataagtgttacaatcattgattcattgtcaggagatacaatatatactataataggtatgcaacttactgcatatatgtaaaaatgtcaaagaaaagattaattattcggttttgaaaaataaaatttgtgaaagacagtttttctttcaaattagttagttgctacgggaaattaaatcttagagtattttaaaaaaatcgaaaataaaataaaataaaattatgtggtcaaaatggcacggaaaccaaatttatgaaaatgttaaaaaaaactctgcaattaagggaatctaaaggtgtgtattcaatcttctactcattgagttatttagagtttttttttatgattttgaagaatttgggtgaatttatgaaagttgttatgatttattgtaaaatcctctcaaattccacttaaaaccatgagataattctgtatttttaactaagaaaatccattaaaattcacttaagtctcttaaagtcactaataacccaatctttaaaatcttttcaataacaaaagattttaaagtatacaagttcaataacattagatttcatgagacttttaaaaattcatgattgaataatatagaatttgttattttaacataaatcacttaaaatgtttgattgaatagttttaatagattttgtttaacaatttcaaacccacaaacaagtgtgtactttgaattgcttttacgttaaacattttttgtttgttatccaaggtatgtttttttttttactttgaatttcatcaagattttgtttgaatcataataaacaaaataaaatctttcatcaagtttttgtttgttttgatttgtttaagattgaaatcttactttcaaacctaaaaaaaaaatcttattttaccgaccatggagtacatttcaatcgccgaacttcttagctcccgcacgtagcgagaattttcatgagaggtggctgagacatttaatggctgactaaatatctttccccagccaactacattaacccctccatgcatgcctcacctactttatcttctagttacttcgtttatattttatgattttgtccaatatgttttcccatattactgttttaataatgtaatagctataatattcatttttccccatattattgtttaattattgcaaatatataactgaacgctaggtccaaacctaagtaaaagccatgaccctttttttttggtgaaccaaagctatgacagtttttaacatgcattaataatgaaattctttattttgtgttggatgatatcaaagtaaacaaaaattactagttaaaacttctttttacatttcagagaaataaatattttgattatcttgttaaatattatttacaaattacaagtgtaaacaaatttttatatttgtttacatttagttttggtgcaaatgtttgttctgttttattccagtgatttattcatctaatgaatccagtatattcctataagtagttaccatttgtacattttgtaaattgaaaaaaaaaactaaaatattaaggttttaaaatacaatttaacatatatatatataaataagaacaaaaaaaactttaaaatcaatcatattaaaaaggtatacatgtacacaccacataaaataattatcctcagcaccacaaaaatacaatcattcaattctcaaatatttgtggggtttaggcttacacatgttagctaaaaataaattaaaaacttatacaatttttttttttttttttacaaatccattaaccacaattttcatctaaaaggctctaaatggttagtggttactctgggatttagcggggccaataaaacttaccaaaaacgacaatatatttctttttcctttttatttttggacaaaaacgacaatatattctggtactaatattttgtggtacgaaataaactatttaaagcttaaattattcttcacgacaataaataaaattttatctaaacttaaatctcatctgccaaaattcgattatagtttatgtatatatataataatataataaaaaaaagaatgtatatagtttattctcaccactacatgtatataacacaaccattttcattagaagctcaaatttcaaatctcacttccttatcacaatg

SEQ ID NO: 35192 - DNA, 3003 bp, Unknown; identical to SEQ ID NO: 35191
  misc_feature (1)..( 3003): 2750-1469P.txt file - cDNA_ID_3085359; gDNA_ID_2926268; Annot_ID_205014

SEQ ID NO: 35193 - DNA, 3003 bp, Unknown
  misc_feature (1)..( 3003): 2750-1469P.txt file - cDNA_ID_3085364; gDNA_ID_2926268; Annot_ID_143367
acgtgttttgtcttgagcatgctgcggaagtggaacagcaacttcgtccttttggggggattaacttaatgttactgtgccatccaggtaacatcaaaactacaagattcattttattagtatttctgtatcagttatgcaattctttagtctttttcatcattttgacgcacaacatttgcagagtaccccaggatagaggctgaagcaaagatagttgccgaagagctcgtcatcaatcacgaatggaatgatactgaattcaggaatgtgacccgagaggatgaggaaacgattcaggcagcgttggataatgttgaagctaagggtgggaacagtgattggaccgtaaaattgggtgttaacctttcttacagcgctattctcagtcgctctcctctgtacagtaagcagatgccgtataactccatcatatacaaggcgttcggtcgcagctctccagtagcgagctcaccctcgaaacccaaagtctctggtaaaagatcgtccagacagaggaaatatgttgttggaaaatggtgtggtaaggtttggatgtcacatcaggtactattgtctaacctgaatccatactaattcagacattagtacacttctgtttggttcaatttgcttttctttcttcaggtgcatccctttttgctggagcaggacttagagggggaagaatctgaaagaagttgtcatcttcgagttgctatggatgaggatgccactggaaagagatcgtttcctaataatgtttccagggattcgacaacaatgtttggaagaaagtattgtaggaagagaaagataagagcaaaggcggtgccacgcaagaagcttacttcttttaagagggaagatggagtttctgatgacacatcagaagatcattcttataagcagcaatggagggcttccgggaatgaggaagagtcttattttgagacagggaacacagcttctggtgattcatcaaatcaaatgtctgatccgcacaagggaattatcagacataaaggttataaagaatttgagtcagatgatgaggtttcagaccgttcacttggggaagagtatactgtacgggcatgtgcagcttcagagagctcaatggagaatggctctcagcattcaatgtatgaccatgatgatgatgatgatgatatcgacaggcagcctagggggattccaaggagccaacagacaagagtttttaggaatccagtttcatatgagtcagaagataatggcgtttatcagcaaagcggaagaatatccataagtaataggcaagctaatcgaatggttggtgaatatgattcagcagagaattctttggaggaacgaggcttttgcagtacagggaaaaggcaaaccaggtcaacagccaaacgaatagcaaaaaccaagacagttcagagttcgagagacacaaaaggtcgctttttgcaagaatttgcatctggaaagaagaatgaagaattggattcatacatggagggacctagcacacggcttagggtgagacatcagaagccgtcgagagggtctttagaaacaaaaccaaagaagattggtaagaagagaagtggtaatgcttccttctccagagttgcaactgaaaaagatgtggaggaaaaagaagaagaagaagaagaagaagagaatgaggaagaggaatgtgcagcataccaatgtaacatggagggttgcacgatgagtttcagttcggaaaaacagttgatgttacacaaaagaaacatatgcccaattaaaggctgtggtaaaaacttcttctcacacaagtatttggttcaacaccagcgtgttcactcagacgaccgtcctctgaaatgtccatggaagggatgtaagatgacgttcaagtgggcttggtctagaaccgagcacataagggttcacacaggcgctaggccttatgtttgcgctgaaccggattgtggtcaaacattcaggtttgtctctgacttcagccggcataaaaggaagaccggtcattcggttaagaagaccaacaaaaggtgatttaggctctaacatggaatctatcatgaagaagattactccattgatctattagaagaaaattggattgtacgaatattaggggttttctaagtgtgtatgtctctctggtcctctgtcaattcgggattataaagtcaaagtcttaacatttggaatagccattgtttgttgcagacgttttcactttcagacagattctctctttgttgtattctctatttttgcagttgaatgaatctgtaacaacaacaaatcctggtgtaggaaaagcattgtgttactcaagtatttgacatatatggttgtatacgtggcttatcctggttggttgacagtcagagttcatcgccgtggacttcatttgactttgataaagactcaaacctaccaaattgctaatgaatgacattacctgtgtcaactaggatgtaaaactctctgacttcagcacacggcacaaacgaaagaccaaatgacttaacatttggaattgccattgtttgttgcataaagattcatctctttgttgtgttctctctcgtcttcttcagttagtctataataacaatcctggtgtagagagagactttgatttgataaataaaggagctgcttgtacaattaaaagctatgttgcataattatgaaatatcaaaatacgataaggacttagttgcaattctcaaagaaatatctgaaacgcataattttaagttaaaaaagtgtgcatgaaatgtgaactattggaccttgtcaacaaattaaagcaacggtttctttgagattctcattcgtgacgctataaacgacaaatgtaataaagtatccataaaggaaacaactttattcttcttcttccaccctttgatcttcttcttcaattacctccctgaaaattagggtttttgtaatgtgatttcgtaagaaaccaaaaaaaaaaaaatg

SEQ ID NO: 35194 - DNA, 3003 bp, Unknown; identical to SEQ ID NO: 35193
  misc_feature (1)..( 3003): 2750-1469P.txt file - cDNA_ID_3085364; gDNA_ID_2926268; Annot_ID_205011

SEQ ID NO: 35195 - DNA, 3003 bp, Unknown; identical to SEQ ID NO: 28442
  misc_feature (1)..( 3003): 2750-1469P.txt file - cDNA_ID_3085368; gDNA_ID_2926268; Annot_ID_205010

SEQ ID NO: 35196 - DNA, 3003 bp, Unknown
  misc_feature (1)..( 3003): 2750-1469P.txt file - cDNA_ID_3085372; gDNA_ID_2926268; Annot_ID_143365
gcttcttggtgacccattcaggttaggatcactctctccataaccaggacgatcaaaagacacaatgtatatcctcaattcctccacaagagcctaagcacaaagacaccatttttccccattagcttcactaaaagacacaaattttgacattttttctacatgctatcgatgattcaacaaatgggtgatgttagatttggccggaaaacttaccggcgataagaaattggcgaaatgcgagtctcgcatacaagaatcgaagccgtggatgtttatgatcttgaacttggcttcgtctctagggattccgaattctgtgtaagccagatgtcttccgtctctcagtttgatcctcggtgatgtcacggtgggtccaccgggagagccgacgattttggcgggtggtggttggattgtttgataaacccatgctaaaactccgacgaacgttaccaggagaagcgttttcagataaccttcataattgaagaaacaagtcttctaagaccatttagtaaaccgttttcggcccattagaccagcccattaagcggttttattaatatatatatttgttacgagaattttgactctttaattaattcattggtttatgaaattatgattagagaattaatttcataacatgagattattcaaagacaaaaggggataactctgtgaaaactatacagaaattttttattaaaaaggtaaaaaaaaacacacacattattctagttttaaccaaaaagtattacttcttttcttctgacatcccaaatatatttatttacttaaaaagatgcatagagcactacccatgctttaaagtctaagttggtgttaccaagaaaccgtatcaactttaatgaattgaactgaactaaaatatctgaatcgaaactgaaatgattctctgtttacatttgtaaaatcaattacagtttttgtcaaaatcaaatttggtccgatcaaaactaaccgattggtttggttcaatttggactaaaatgttaaatgaacaaacaattagcgaacaaacaagactagcgttctgatctaattccatcaatcatcccatccaagcaagaaattgtgagctctacacatcagttaaagatagatgtcttttttcaacttccataattattctcagcttagcaaaagagagatagtctcagattttattgcaaaagtgagatcgaacataaacaagaacataagaaagatgaaaaaaacataaccgagattttttagttaccagaagaagaactttgttgagtgttgtttctggtgtgagttcttgcagatgctgcagatttcttctccctctctatttcttctccagccattctctctcctctttctcttggaaattttctcactctctttccggaggaaaatttggtgaggcagtagcaatatctttgtttgagagctaacttctttatgatttttttgtccttatatataaacatgaaattaatgattaaactggttttaatatatttttgtattaaaatagtgaaagcttatcagtggttgcaaaatttatatgagaaaactctaaagcatcaatcttctaggaacatatcgagaaattgcgataggagcttggacaattcgaagaataatgggaaacccaaaaaccaatcttgatattgtgttgtgcatacaacttttcctcaattataaatatagctaatgacggacccgtaaaatgtttttaccgaggttataaacaaaataaaattatattaacaaatagagaaaaatgttgtttagtacgccaactttcaaaattggtcatttaatacgtgaattttgtatgtttccaaataaaacatgacaaaaacgttgaccggtcattttatacatataaaaacgttgacaaagccaaaaacaccgcgacgttttctgtcgtttacagaaccgataacaggcgttaatcatttcgttattactcaaaacgacgttgttttgtacttaacacaaatcacaagatctcaatttgatttttaaaagtctaaaacacacgtcgattccgagaaaccaccattgttaacactaaaagcagagattttcttctactcatccattgagcttctcttgattaccccagattttgtatcccaaagaagaagaaaaatctaagaaacttagaacccccttaccttgaaattgcttaaccgatgactaatctcagaaagacacaaagagaattaagagtgagaacaaggaaatctagaaaaactctagatctcagaacataaagaggaaaacaaagataaaagcttgaaactgaaaaatcgatttggaaatttagggatttgaagatttgggggtttctgagatttagagattaaaaaatcgaattgggattttgcggtttgtgtttaagcacaaaacaacgtcgttttggataataacggaatgaataacgtctgctaacgtctgttatcgattatgttaacgacagataacgttgtggtgtttgtggcatggtcaacgtttttctatgtgtaaaatggttggtcaacgattttgtcatgttttatttggccacatacgaagttcacgtattaaatgactatgttttaaaagttggcgtattaaacaacattttttccattaaagaaatatcgcataataatattatatatctatactatattttgaaaaatgttgtggctttctagaaaaaaggagaagaaggaagatttaaagcaaaaaaaaaagtatttaagctgtcataaatagaatttttttaatcaaaagtgtctaaaaggttatttaaactcggtttaaggtgtgtcaataggtagagaaataccgaattagctaacccgacccgtactcgggtggctctttctttcaattctttcttattttgtggtcgttaaacaaagaccggataagttgaagacattcgcgaccgttatttatttcgcagagtgattagagataaagagagagacagagagaatcaaaacaatg

SEQ ID NO: 35197 - DNA, 3003 bp, Unknown; identical to SEQ ID NO: 35196
  misc_feature (1)..( 3003): 2750-1469P.txt file - cDNA_ID_3085372; gDNA_ID_2926268; Annot_ID_205009

SEQ ID NO: 35198 - DNA, 3000 bp, Unknown
  misc_feature (1)..( 3000): 2750-1469P.txt file - cDNA_ID_3085376; gDNA_ID_2926268; Annot_ID_143364
tcggtctttaaccaagacgaagcaagcaaaacatatgttgtgatagcatggaaagtgagtaacttactggatcaggtttctttttggggactacgtctcctgcgaatatcttgattttctctgctcgttctggtccaagcaagcatgaaactatagcagaaacctgaaatcaggcaagaaatgagaaaagtatttccgattatacagttcttctaagctaagacgatgctcgcatattcatgttaacgatgcagctgcgcgtagtcttgtttacgaaaactcatcaggatacaagattttgagatatatggttatggtctcaggaaactgaagtagtagaacctgattgatcataccgccttctcatttgaagtactgcacacagctactttgactccgtttgttaaagcttgatcaaccaacctgcaaagttttagcaagagggctcagaacaaacaagaacatgtatatgattagttgaaataacaagccttacaaacattcatagcatcatgattcaggagtatcaatcattagtaagtttgctaaaccttgttttgggttaaaagttttagactttaaaaaaatcaaactcaaaagggacattcaagtaatagcatcgagaatatagaatagaacattagaagtgacactaactttgcaacaccgggtcgaagcggaagcagctttttctcgataagaaccatgaaaagctcagtcttctgcttgtgaagtccagctatgaactctttcctctctgcttcatctttaggagctttctctggccaaccaaccttgttaaaatacgcagtcatcctaccaaaacaaagccactccaatttcattcaaacgagagactaactcaagatttggtatagtaaatgcaattttgattgtatacctttctttaccaccaccgattttaagtaactcgccgtataaatcaacatcccacgtaacattcaaatctctctgcaaaagattccaattatcatcaccgaagctaagagctaatgaccaaaaaactaaaactgagaaacctctttgaaagtgtcgttgaaggagatcctgtgaccgtccttctcggtatcaacaagaacgccatcgcaatcgaagagaagagcagagggaagagtcgtcagagaagatgaagcagagcaggtgactccaacggagcgagatgatctgtataccattggttttgctctcagggactttccattgaatcgcaacttcaccgcctttgcaggtgccgcattgggaatgaaagatggtgataacttagattgaattgaagaagaagaagaagatggtgatagcgaagccaaggaaagagagattttcacagtggccattgttttgattctctctgtctctctctttatctctaatcactctgcgaaataaataacggtcgcgaatgtcttcaacttatccggtctttgtttaacgaccacaaaataagaaagaattgaaagaaagagccacccgagtacgggtcgggttagctaattcggtatttctctacctattgacacaccttaaaccgagtttaaataaccttttagacacttttgattaaaaaaattctatttatgacagcttaaatacttttttttttgctttaaatcttccttcttctccttttttctagaaagccacaacatttttcaaaatatagtatagatatataatattattatgcgatatttctttaatggaaaaaatgttgtttaatacgccaacttttaaaacatagtcatttaatacgtgaacttcgtatgtggccaaataaaacatgacaaaatcgttgaccaaccattttacacatagaaaaacgttgaccatgccacaaacaccacaacgttatctgtcgttaacataatcgataacagacgttagcagacgttattcattccgttattatccaaaacgacgttgttttgtgcttaaacacaaaccgcaaaatcccaattcgattttttaatctctaaatctcagaaacccccaaatcttcaaatccctaaatttccaaatcgatttttcagtttcaagcttttatctttgttttcctctttatgttctgagatctagagtttttctagatttccttgttctcactcttaattctctttgtgtctttctgagattagtcatcggttaagcaatttcaaggtaagggggttctaagtttcttagatttttcttcttctttgggatacaaaatctggggtaatcaagagaagctcaatggatgagtagaagaaaatctctgcttttagtgttaacaatggtggtttctcggaatcgacgtgtgttttagacttttaaaaatcaaattgagatcttgtgatttgtgttaagtacaaaacaacgtcgttttgagtaataacgaaatgattaacgcctgttatcggttctgtaaacgacagaaaacgtcgcggtgtttttggctttgtcaacgtttttatatgtataaaatgaccggtcaacgtttttgtcatgttttatttggaaacatacaaaattcacgtattaaatgaccaattttgaaagttggcgtactaaacaacatttttctctatttgttaatataattttattttgtttataacctcggtaaaaacattttacgggtccgtcattagctatatttataattgaggaaaagttgtatgcacaacacaatatcaagattggtttttgggtttcccattattcttcgaattgtccaagctcctatcgcaatttctcgatatgttcctagaagattgatgctttagagttttctcatataaattttgcaaccactgataagctttcactattttaatacaaaaatatattaaaaccagtttaatcattaatttcatgtttatatataaggacaaaaaaatcataaagaagttagctctcaaacaaagatattgctactgcctcaccaaattttcctccggaaagagagtgagaaaatttccaagagaaagaggagagagaatg

SEQ ID NO: 35199 - DNA, 3000 bp, Unknown; identical to SEQ ID NO: 35198
  misc_feature (1)..( 3000): 2750-1469P.txt file - cDNA_ID_3085376; gDNA_ID_2926268; Annot_ID_205008

SEQ ID NO: 35200 - DNA, 3003 bp, Unknown
  misc_feature (1)..( 3003): 2750-1469P.txt file - cDNA_ID_3085383; gDNA_ID_2926268; Annot_ID_143362
agacagaaatgaagcaaggtaataattgtagttatgttagaagactatgctgggtagataattctatctgcaagattcagaacttttagttgcaaacttacttaatacatcacagttcatgagtaataaattgtgtagcaaacttatcattctgcagtgtcttagaaccattacctccacacaaaactgtgatcctttgtaaactcttattgcagcctcaacccttatgtgatttatgatatttgttatatggttctacctctatactttctttgcagtcgatgttagaaaattgctacacttgaggcttggtctgccactggatcgccctcttttaagaattgctaatgccttggatttgtctgtgaatgatgactcaaagagtaacatgaacagaaggggtaggtttgcctgttttcttaattttctctctgtgtctcaatatttgccgtggttctaattgttaagttgcatgggcaaatgccaggttccaccttgctcaaagatgtgcatattggaatccctagcagcggaggttagtactatttgtatgcctttgtttccgttgttcatccttcggtctctcgattcgtttattgaatttgcaatgttatgcagtttcggagggtgtggcatctattatccaaggttcttatgagtattatcattatcttcaggatggctttgatgactcggtatatcatttctcattcttccatggttttaaaacactgtaaaagtagattgctgatgacgtgtggagtgaaacaaaactaaagcagaaactagggattaaaggctctgtgctaatttattagaatcttttactgcattcataccggaaactggagttcgtaaatgattattggcatgatagtttgttgcgcttcaagtatttctattgtattttagaaaactagaaataccttctcaacatctaacactaattttcacttgccgtgctagggatggggatgtgcttaccgatcattgcaaactattatctcgtggttcagacttcaacactacacatccatatctgtaccttcacataggtatgaaacttctgtttctcatgaatataaatcagagctcctctttcctcgattcgctaagtatttttctggattctcagggaaatacagcagacactcgtggaaataggtgacaaggatccttcgtttgtaggatcgcgtgaatggattggtgccatagagttaagctttgtgttggataaacttcttggtgtaagtcttctgctcttaacttcttggtgtaagtctcctgctctgaacttgatgttgagaagctcgtaatgtcttttatttgcaggtaagttgcaaaattatgaacttcagatccggatcagagctcccagagaaatgccgggagttagctatgcactttgagaaccaaggaactccaataatgattggtaagtcaagccaaatcactctgatattatagcataagtgaaagcgtagaccctatatataaaggatcagtggaccagtctttaatgcggtttaaagaaacctataagaaggatccgtttaatcttttaaactttgtattgtgaattggttttacttgcaggaggtggggttcttgcatacacgctattgggagtggattacgatgaaggaagcggggattgcgcgttcctgatcctggatccgcattatacaggaagtgaagatcacaagaagatcgtcaatggtggttggtgtgggtggaaaaaagctgttgatagcaaaggaaaaagctttttcttgcacaacaagttttacaatcttcttcttcctcaacgtcccaacatggtttaattatcattttcctacatgtaacaacaattactttttttcttatcacagttttagcctgctctggtctcctgatagtgcaaaaaatggagttttcaagaaatttgaatttcagtcgaataaataaaccatattgaaattaatgtccggcttttagattcggtgttacttcttgttagatgaatcgtttggcaaagtccaatggaaaccttttttctcattgcatggcattgaggggtagttttggtaaatttgtaaaaacttttggataagaatggaaaaaagcagcgataggaacgattacgtgcgggagtgtagagcacgtggaatagaatcaacagaaatagataattaccaaaacttacaaaactacacaaaacccccacatttagcctaatatttgtatagaatgcctaaattctaattggattcttttaagagaaataatggctatgggtattgaaaaatatatgtatatatataaaattcgatttatttggattgaatgtctgtaagaaaacttctttggaaaaagaagatatttcaaaacacgtcaaccagtaaaactaattaggacctatctgaactaataaaaagtatagtgtttgatttagaattaaattacatttaatggcttctccacaatttaaaaagccttatatgatgacgtgtaccttccctttactttttatttgtttttcctttttccaattttgtaaatcgccgattctctctcatcgactagtatttatagtctcgtcgaacttagaaatcggcgacatttgaatcttctaagactctggtggaaatttttattacttacctgcggagttctgatagcttcttcttcttcttcctgtcttggcttgagatccgaagccaagtacagaagagttcgttcgattagtttggattcgtttcgaattaatcactggtatgtataattctattactggatttaggttttatatgttgcttctttgatattatacaaaccagtgtgtttgtaacttagaggtagtgttgtttcgtgttatttttctgtttaattaatgttatgaagccaagctataatgttatttgttctagaatgtagattgttgtgttctgttttgctcttaacttgttgttttcggatttgttttctaaatcattcataaatcttgaacgtgtttagatg

SEQ ID NO: 35201 - DNA, 3003 bp, Unknown; identical to SEQ ID NO: 35200
  misc_feature (1)..( 3003): 2750-1469P.txt file - cDNA_ID_3085383; gDNA_ID_2926268; Annot_ID_205006

SEQ ID NO: 35202 - DNA, 3003 bp, Unknown; identical to SEQ ID NO: 28441
  misc_feature (1)..( 3003): 2750-1469P.txt file - cDNA_ID_3085387; gDNA_ID_2926268; Annot_ID_205005

SEQ ID NO: 35203 - DNA, 3000 bp, Unknown
  misc_feature (1)..( 3000): 2750-1469P.txt file - cDNA_ID_3085394; gDNA_ID_2926268; Annot_ID_205003
atacatatatatatatatatatatatttgttttatttttagtatattattatattagtatgttcccgatagaaattttgctattatagcaatacataggtcttatcatcaataacccacttctgatgtcccactaataattaacaactagtataagttatcgtgtgtaaaatattttctttcggtttttgtatacgagtaaaccctaaagcaatcgatctagttaaataaattataatataatttagataaaatctccaagaaaccatttctgttgtttaatctcccaactactgaataatataattaaggtcgaatcccatgaaaataagttatgacggaagaacatattgtaaatgtaagtttggttaacttgaactcaaactatgtgacatccaaatcttttgtctcctcgatcgtatttactttttgttgccaaggtttcaaatccacaggctcctacttttgtaaagtcaaaccttttcatttctaatgatactaacattcatagcaaaaaaaaacacattgtaaatttattatttatatatctcataaggacgagtattaggatccaaatgagaccttttggtcctccacatatcatgcggacaggatcatcaatcatcactgattagtattaatgaagttggcttttagataaagtattcaaccaataatatggggaatggacatctccgagactccgaccaataatgagaaagttaatcaaatctatttatgggtcggaccgatcactatttttctgatgcggaaacttatcaacaaactttgaattttttagctttttgttttacaatgaatctatttgcattaattttaaaactgtgtttataattaaacaagaaaaatggtttgaaatgatgaattcattggcctaggacgtgagatcaaaacgccaactccaaatccaaccaagccaatgttcatttctccacgtggcgtttttaatggatcaaaatcattgcaccaaacctaatttccaacaaatcaacatttatgcggcgaacttactccccaaatccaacgtaacaatcgcactatacactttttttttttaattccataaatttcatagttcttttttctccaaatttataattatagacagggtccaaaatgtttcatgaaaattaagtaaaaaagtaattaatattaaaaatgataaaatataggtcaattacctaaaaacagagtttttctttgctataaatggtaggttaatttttctaccaacattaaaaaaaaaaaaacactattatttagtagtaaattgtagtcttacctagattgattgaggaatttaatgaaatacttttacaaaaaaaaataccatgaaacaatatatgtgattacaaaagttaatgatctatgcgattaggaagaaaatgttcgaaattcaaagctattactaagatagttaaaaatatatccaaaacggataagaacgttcgatttaaaagtcatgtattcatttatcttatggaaaatattttaatcgaacacaaaattccgttgacacagattgagtcacacaatggataaacaaaaggatcacaattggcaatacaagagggcgtgtaagattggatgagaacaaaatgccacgagggatgaggagaggtggctcttgggaagaggcaaaggtcggtttattgcaataaccggcttttctagtttttttttaataaacagctctttgacgcaaagccaaaaacaatattggtcccggatttgttcactttccacattggattgataagaaaacataaatctgcctacatggaacaaaaaggtcgtcttgtttttcggatcacaaacaaaagcaaccttataatagtcactttttttcaggaacgtaaattatgcaaatattttcattttttgttttcatcttattttcctaatgttgggaatataatacggacagtgttacacggtgtaacttacaccgttggtccagctcaatacacaaatcaaatagaacattatctatgttaaattcttatgcatgttacaccaagtcggtaatatatattaaaaggtttaaaacaaatataagcaattgaaattaaatacaaaattgagcttgttagtgggacattgtttaactaacttctcatggaaattaaactcatcactcttgctatggttgagacattgtttaactaagttctcatggaaaaaatggggcgccacttaaggtataaaccaaaatatttgcgttaaaccctagataagctaagatgccatggaaacaaaacactgggcgagttttcttctcgtgacaattatcatcaaaaattatggaacaagttgatcctaatcctaatcctcttatcaatatctttgattgtcttaaagtttttatttattttatttcgtgataattgcattgtcttaaagttcatagttgcataataactttatccccaaactttcatgatctccacggaccaaaaaaaaaaaaacttaggaattagtttaccaaaaactccaactacttaaaatttcagatatttgttgtcagtattcaaatactacactcggaagtttcgttcgactatgatacatattctcagttcttttttgatgattcatggaagataaatttgaatatgaattctcctgttcgttataaattattgtaataaagacttaaagagtgatccagcttcatctctttatccacaaatgctattcccgtcacataaaaatgccaaaaaaagaaaaaaaagagtgataatctaagtgaaaacagatcacgagcgtgttagataagaatagagagacgcaaaaataaaatagatatttgcgagacgccacgtaagcaaccaaaaggttacggtaggacccacctcgctaatgtctatataaccagaaatgtgccaaagcctttcttcttcaaactaccaaacctacagaaatctctcttcttcttcttctctacaaaatttcaatggaagctgttcttgtcgcaatg

SEQ ID NO: 35204 - DNA, 3003 bp, Unknown
  misc_feature (1)..( 3003): 2750-1469P.txt file - cDNA_ID_3085402; gDNA_ID_2926268; Annot_ID_143357
aagtgtcttgatcctggtaaattaatccaccaaggatagtgtcatataacttgatatctaaagctaagtgtgttacatgaaattacttactcttctaagctctttagggagacctagatcctgagatattgtaggttaaagtctggttgttttctagtcactggatgagatcaaggtagtatcattagattctttaagaacttggttttgccatccgatggcgggtttgtgtcatttttgtttctgctgtaactgacttgatatagatcgacacaagctgattattgagtagtttctttagccagaaatgaggattagcattcatcaacaaaattttaatggaggaaatcagtcaatcacacaattgggttgcttaggcagtgatcgtctagatataagattgacacgtagagtttcttgcttctaccattgagattacttgttgttccaaatctcttgagtgggtattaacccgagggtaatcagacctaatttcaagaatcatccttagaccattgtttcttgcgacttatgattcttcagctttctcaaagtttgttttaatacgtttgttttgttccgatttgattaccaggacattcaccccacacacagtgtttgcgaatataactaattttgagatatgttaacaacataaaactttttaaaatgattttgcaactgtacgatatataaaaattaagatggtaaattatatagatagattgtttcataaataactatatattaaaatgacacaaaagtattgactttagaggtgggaaaaaactcttgtagccaaaaatgtttctatcggactttttgattggaatcctcttcagacttcaattatttgaatctttcaaaagatttgggaatcttctaacgttttggatttaaaattggataggcttttaaggacagttcagacacgccagctgtttggatcggtccacgatccctagaaaaagaacacgtcattgtaaattaaaatttttgggtttcgaacgtataatattcataaccaataaaatagtagagtcacttccaagaaactaggaaacatcaaaccacgtcgttgcattttggggatcttatgaaatacacaagcttatacaaaaaaaaatattataaaaaaatgaacgtatattaattcgtaattacataggcttaaaaccaagataagatcggtacatgttgaaaatgaaaattattcaatctcctaatagaggtgagacaattatcaattcgaaactcatacatcaatcataaaagctacaatattttctcaactccatcaattatccgtgggagtcatacaaaaaaaaaattaaaaaaattattacatatatatgtatttttttttcagaaaagtgaaatctctttcgaacatatgaaattatgaatattcatcaattggcctaggattacgagatcaacgtaaattatttaaataacaaaaataaaaaatatgtttccttgcattaggaagcatcattatccaaccacgacgccgggtattaagccaagatccattccaattattcattcatatctactacctaaaacgacattagctttttataaagaaagtcttaacccacgatcggtgttcatatttaaatattacatttgttgttaaacaccaatgttatgcctaacaacttaaataaaaccgccataattgttttttattgtgtttttgaaaaactacttgcccgttgttatcttgtggcctgagttttttttctcttttgtttttaatatatgtagtatgaaaccacgtttcaacaaatgggctgcgccaaatgttcacgcatcttgccttgagaattttgaataacaactaattagagattaaggtatggaaatgtacaaaaatcgccacgagatcctttcgtagatccacatggtattaccgggatacatggagaaacatgttttcttaagatcagtacattactcattaaatggtcgatattagtaaattatttttgtacgtaattgctcggtgcatggtttaagacgtgtgttcttaaaagctactccaattaataatgatgctttcatgtggtgtggaattaaaagttttggatgcgtagtggctaatcaaaaaatcataaagttcatagtttaagcttcgaaaatgcaaatagcttggggatacaaaagctatctttacaaaaatcttagaaatggtggagtcttacataatcacgtgtgtgatccaaattatagatgtaatagaagaaatttttcttgtattttcatgtattatatgcatcgcctttatcgtctacacatgaccaaaattttttcccattttcccatttttaatcctatacaaaagaagttttttttattgtacaaggcattaggtcaacaatgccatggtgtgaacaactttgtctccacatttttggggacatatcttaatctaattatcgctttcattacttccctaagcaacaagttgcttcatcttaattttcccattattgtataaaactatccatcaaccctgacaaatttaaacgatgaaagcctgaattattgataatgatattgatatcattatcatccaaacgatgaaagcctgaattattcagttttaaaaggatattcagttttctctcactgtcagctaacttagtcaaatcaaacattcataaatatatattacacaacatatagatctataagcatgacatttataaaaccatatattataaatcttatgatttattatcctaaactatttagaaagaatatgatgggttccttattcctctcaaatgcgtgtcctagaagttccacaagtctaaccaagacgtatacacaatgatacacaataataattcattttccaaacgttgatggtatttgagtaatttcaaatctctacagaaaaatatttctctttccctatatatatccgataccatctcattgcactttcaacctcaaacaaataaccaatcaaccaaaaaaaaaaaaaaaatg

SEQ ID NO: 35205 - DNA, 3003 bp, Unknown; identical to SEQ ID NO: 35204
  misc_feature (1)..( 3003): 2750-1469P.txt file - cDNA_ID_3085402; gDNA_ID_2926268; Annot_ID_205000

SEQ ID NO: 35206 - DNA, 3000 bp, Unknown; identical to SEQ ID NO: 28437
  misc_feature (1)..( 3000): 2750-1469P.txt file - cDNA_ID_3085406; gDNA_ID_2926268; Annot_ID_204998

SEQ ID NO: 35207 - DNA, 3003 bp, Unknown
  misc_feature (1)..( 3003): 2750-1469P.txt file - cDNA_ID_3085410; gDNA_ID_2926268; Annot_ID_143355
ccatcctctttttcataaaacagaaaaaagggaagaaaagcaacacacctgcgtcaccaccgagacttccgttgataggaaaccttcatcaactcggtcgccaccctcaccgatcactatgctctctcagcaatcgttacggccctcttatgctccttcgttttggccttgtccccgttcttgtagtctcttccgcagatgtggctcgagatattttgaagacgtatgaccgcgtttttgcaagccggccacggtcaaaaatctttgagaaaatattttatgaggcccgtgatgtggccttagctccttatggagagtattggaggcaaatgaagagcgtgtgcgtcctccatctcctcaccaacaaaatggtcagatcctttcgaaacgtgagacaagaagagatcagtctgatgatggagaagatccagaaatcaagttctttgcaagtgaatctaagcgagctcttggggagtttaactaacgatgtgatatctagagttgctttgggacggaaatatagtgatgaaacggattttaaggagttaatgaaaaggctcacgaagctactgggcgagttttgtgtggggacttatgtaccatggcttgcatggattgattggatcagcggtttggatggacaactaaaaaagacaggtaatgatcttgatgaattcttggagaaagttgtccaagatcatgaagatggcgacgcacaaaggactgactttgtggatgtattgctcagaatccagagggagaagagcgtcgggtttgaaatcgaccggttaagcataaaggcaatcatcttggtaaaacagaaaagaagaaaataaattcatattcaatgatgttttagtatataaccgtagttcttgtgttttggtaacttttcaggatgttgttgtgggtggtacggatacatcgtacgcacttatggagtgggcaatgacagagcttcttcatcgcccagagtgtctgaacagactccaagaagaagtccgtacgatttgtaagggaaattcgagtgtatcagaagatgacatcaaagacatgaactacttaaaagctgtgatcaaagagactatgaggctacatcctccacttccattgatggttcctcacgaatcaacacaagatgtcagattaggagattaccacatacctgcgggtacacaggtaatgatcaatgcttgggcgatcgggagagaggctgcgacgtggggaccagacgcggagaagtttagaccggagagacatttaaattcgtctgtcgatttccgaggtcacaattttgagcttattccatttggagcagggagaaggatttgtccagcaatatcattcgctgtgatcttgattgaggtgactttggctaacttagtgcatcggtatgattggagattaccggaggaatatatagaagatcaaaccaatgtcgctgaatcaaccggtatggtgattcaccgtttattccctctttacgccattgtatcatctactacttgatggatgcattatacataaatgcttactattatgttatgtctacaataaacatgtttactcatttgaaaatgttgctaccaaagagaagtttgagattttaaagtctcaagttcctaaactaatttagaaagccaggtgagcttacttgatttattgttatgttcaacaagcatcattagtcccttctcaagtgggcttcaagaacacaagctgatatcaagaacacgcatacccggtttcaaattatttccaatcattagacgattgcgcataatagcactgcgcagaggtcagttcgagttgactgtaaattagtagcttgattggtatatttagttcaaattttgtgttttttttttgtgtgatgttattaaatattctgataagtagtttagtggctttgtagaccattattgaaaccagattgagggatagctatatactaaagtagctaactaaaactcacaacaataataagtgttgcaatattaacgaccaaagcaacgactttgaggaatccaacactttcaaatgacgcgttaataataaaattaaaaacactatagaaaatctccaaacttagagagaaactaaaacacgaaccaatttgatattttttcctgagtgattcgttcttaatttctcgttaatgagcttgattggtttgtttagttcaactttgtgttatttactagttactacttaggggttgttattgaattaatgtatttgaatttgcagttttctttgtgggttttattttatcaaatacataattgaataacagtggatatcgccttgactttaaaacacattcaattccattagttcagtagttttgcgtgactatgctatttgttactttgacgtgcttgcatgactgtctacctcacagtttgaataagtataagtggaaatattcatagttttacttggttgtatctgttctctctccattgttatgttgatgaccttcttaaatgtcatgattttccagggtttaattagggcgccttaccttgaaagaaattggagaaagaaattataaacgtgaaactcctcttctttgcgcatacataaaaagagcaatccaaatcgtaaaaggattagatgagaaaccctagagaacttgttcctcaaagagaacttgttcactaagacaatttgaaagattcaacgttttttttttctttgtcaaactcttaataagaacgtgtaatagttgaattttcttatccatgtggggcagagaaataagaaaattttgagtggacagagttttggtcccaggagaaacttggcttctataattgtatacattagtcaaacagaagaaaacgaaattctggcttactagagatattgtgtggttcattctgtatgcaatctctaattccatatgactcagctcatctaagttctaaaagaagaccacaaaattcttagatactctttacaagaaaatcttgacgaaacttgaagaatacaagcatg

SEQ ID NO: 35208 - DNA, 3003 bp, Unknown; identical to SEQ ID NO: 35207
  misc_feature (1)..( 3003): 2750-1469P.txt file - cDNA_ID_3085410; gDNA_ID_2926268; Annot_ID_204997

SEQ ID NO: 35209 - DNA, 3003 bp, Unknown
  misc_feature (1)..( 3003): 2750-1469P.txt file - cDNA_ID_3085414; gDNA_ID_2926268; Annot_ID_143353
atatccttcatcagctcagcctcacccacacagaaatctaaaacgattttcttaaaaaatccagtgatgaaaatgatgatgatgatcatacttctcttatgctcaataatactcataaccattctcttcttcaaaaaacagtcgagagggaagaagagcaacgcacctccatcaccaccgagacttcctctgataagaaaccttcatcagctcgggcgccaccctcaccgatcattatgctccctcagccaccgttacggtcctctgatgctcctccactttggcagtgtccctgttcttgtagtctcctccgcagatgcggctaaagacgttttgaagacgcatgaccgcgtttttgctagccgtccacggtcaaaaatctttgataagattttttacaacgggcgagatgtggccttagctccttatggagagtattggaggcaaatgaaaagtgtgtgcgtcctccatctctttagtaacaaaatggtacgatcctttcgagacgttagacaagaagagatcagcctgatgattgagaagatccgaatatcgagttctttgcggataaatttaagcgagatcctggtgaatcttacaaacaatgtaatatgtagagttgctttgggacggaaatacggcggtaagaccgattttaaagacttaatgaaaaggctaacgaggctactaggcgagtttagtgtcgggagttatgtatcgtggctcgcatggattgactggatccgcggtttggatggtcaacttataaagataagcaatgatcttgatgaattcttggagagggttgtccaagatcatgtagatggggatggacacaagaatgattttgtggatttcttgctcacaattgagagagagaagagcgttgggtttgaaatcgaccggttaagcataaaagcaattatcttggtaaagggaagatacgaaaacaaatttaaattcactgatgagttagtatataaccatagttcttgttttggttttcaggatgtttttgtgggtgatatggacacaacatacactcttttggaatgggcaatgacagagctactatgccaccatgagtgtctagacagactccaagaagaagttcgtatggtttgtaaagacaaatcgggtgtatcagaagacgaccttcaagacatgaaatacttaaaagctgtgattaaagagacactaaggctacatcctccacttccattgatggttcctcacgaatcaacacatgatgtcaaattaagagactatcacatacctgccggtacacatgtaatgatcaatgcttgggcaatcgggagagaggctgcgacatggggaccagacgcggaagagtttagaccagagagacatttgaattcgtatgttgattaccgaggtcaggatacggagctggtcccgtttggagcagggagaaggatttgcccagcaatatcatttgctgtggtattggatgaggtggttttggctaacttagtgcatcagtttgattggacactaccggaggaatctacagaatatcagactgatgtcgctgaatcaaccggtatggcggttcatcgcatgttcccactcttcgccatgactacttgatttagacattacagcatatagatatgctttgttagaagcgtacaatacgcatgtcagtggtaaagagatcttaagatttgagttcttaagtaaactatagactaatagtttgactcaaaaaaaagtaaccacactaattaagtaagccaagcggcataatcagttccctcgcaattatcaacggaatataacagatcgatgtttccttctcaattaggctcttagtataagttccactgtagacataaatgagtaaatataagatatagatagagaccatgtatgcatgcaaaacttaaaaaaaacaaacagaaatcaattatatattttaattagggtgggatcagattaaaacttctggaactttaggatatcctttcgatcttgtaaaatttttataagatttttatcttcctattttaagactatatattaaaaagtggaaaagattggattatatcaaccctaattcaccgtctaatttgttttcctctttatgccattacatcatctactacttgattaaggcattatatacattaaaatgatttatattatgttactagatcagaacccatttgatacatgggttaatcaataaatgtttttttataaagtttaataaggtttttttgcagttttatctaaatattaataggctatgaaaatataatatggtgaagattttaagattttatgaaaatataatagacttctggaatttgatgctttagttttattacaaaagcttgtctagaagacttgaagtattagacaatataattgaggaaaatgaaagacagtaaaacgcttttgttgatgaaatcgaaacaattaccaaatttccgaggctgaaaagagatatgtcaatgccttagattagaggtgagttactttttggtgtgttttcacatatttcttcaaagttattagctttgatatttaaatattctacatttacaaacaaataggtggtagaatcatacctaaaatttaaaaagttattaatatacaaataaggactatatattttaggagataaatagttttcttggaccttgtagctgtctaaaatctagcaaaataggtattaaaaaaagtaaaagatttcttttttgtttggtcaacttacttgtattgtggagagattttttacctttactatataggatttgagagaatatatatttaatgcaaatttactttcctactatacttgggcaaaacagaagaaaatttgagtggaccctcgttacgtaacgcatagaagaaacttggcttatatataacgcaagtggcgaagtccacaagaagaacacaaaaaacttaagaaactcttcacgagaaaaacttgaagaacttaagaatccaagtttacaaaatatgatcatg

SEQ ID NO: 35210 - DNA, 3003 bp, Unknown; identical to SEQ ID NO: 35209
  misc_feature (1)..( 3003): 2750-1469P.txt file - cDNA_ID_3085414; gDNA_ID_2926268; Annot_ID_204995

SEQ ID NO: 35211 - DNA, 3003 bp, Unknown
  misc_feature (1)..( 3003): 2750-1469P.txt file - cDNA_ID_3085422; gDNA_ID_2926268; Annot_ID_143351
atgctcaataatctttgtagttaccatcataattttcagaaaacagaagagagggaagaaaagaaacacacttccgtcaccaccgggactaccgttgatcggaaaccttcatcaactcggccgccaccctcaccgatcactatgctctctcagccaccggtacggtcctcttatgcttcttcactttggccgtgtccccgttcttgtagtatcttcagctgaattggctagagacgttttgaagacgcatgaccgtgttttcgcaagccggccacggtcaaaaatcttcgagaaacttctttacgataagcatgatgtggcctcagctccttatggagagtactggaggcaaatgaaaagtgtgtgcgtcctccatctattcagcaacaaaatggtacgatcctttcgagaagtgagagaagaagagatcagtctgatgatggaaaagatcaggaaatcgatttctttgccggtaaatctaagcaagatcttggtgagtttaactaacgatgtgatatgtaaagttgctttgggacggaaatacggtggtgaaacggattttaaggagttaatggagagactaaataaactattggggacgtttagtgtggggagttatgtaccttggcttgcgtggattgattggatccgcggtttagactgtcaactagaaaagacggcaaacgatgttgataagttctttgagagagttgtgcaagatcatgtcgatggaaacagagatatgactgattttgtggatgtattgctcgctattcaaagagataagaccgtcgggtttgaaatcaaccgtgttagcataaaggcaattgtcatggtgaggaaacacacttttgaatgataccaattcagatttatgatgttttattgtgtaatgtttttttttttttacaacatgatgtgttagtaagtatataacagtagttcttgttttggttttaacttttcagaatgtttttgtgggtggtacggatacatcgtctacacttatggaatgggcaatgacagagcttctacgtcatccaaagtgtctgaaaagactccaagaagaagtccgcacgatttgcaaggataaatcaagtgtgtcagaagaagaaattcaaaacatgagctacttaaaagctgtaatcaaagaggcactcaggctccatcctccacttccattgatggttcctcacgaatcaacacaagatgtcagattaggagatcaccacataccagccggtacacaggtattgatcaatgcatgggcaatcgggagagaggctgcgacgtggggaccagacgtggaggagtttagaccagagaggcatttagattcgtctgttgattaccggggtcaggcttttgaactgattccattcggatcaggaagaaggatttgtccagcaatatcattcgctgtggtgttgaatgaggttgttttggctaacttagtgcatcggtttgattggagattatcagtcgaatctacagaagatcagaccgaggtcgctgaatcaacgggtattgcgatccaccgcatgttcccactctacgccattgcatcaaatactacttgaccagttgacctaggcatcttatatatatagaatcatagaaatgctttgttctgttacgtgtacgataaacatacacgtttactcatttcaaatgtgcaaccataactttgcgagttctccaccatatagctgtgttgttgttgatattgcttggactccacaaaacaaattaccaatcaggacgaaaaaaaaacaagtatgtccaacgtatttatcaaacttcttttttaaaaaaagaagtagaatcacaattagatctattggttcctttcaaaacgattatacagctaactaggagatacagtactttcatattgtgaccgaaaccatccgaaaaaatgttcaagatctttttgtttctattctgagcttatgtttatatatataaaaaaaaaaaaaggtggaatgacccgaaataatcgtcttatctgtatgtgtttctaatttctattagtgttcaagcaaaactataggtggtctagtagaacgtctgattgtgttatttaaaaatttagtgttactagtagtacgtctaatcattttttgtattgaatatataaattgtgttatcttatttattatttaaaagcatgataaaatttaatatttgttatataattaatattgtagaaataaatgcaaagttggttatcattagaaaattgtgattaattcgatttcaaaatatacaattacgttaaaatcagatttatttaagatacaaattttggttgtcgtatttgttatataattatgtttagtttgtgcatccattaataatttgcactgtggatgtatatattacataaatccaaaaattgagtggtaattacgtaaagtgtaaagttgtgcataagtccaaaagatcaaaaagaactttaaaactcacaagaattttgtgtaaagaacttacagaatccagacatgcaaaacctttttactggataccttttatgactacaaagtaaggtattcgaaatatacaaattatgatattattgtatttaagaaagttatttgaaatatactaataaggtatataattttaagagataaataattctgtggctattaaaaaatcaaacatatagaagtagaagatgaaatatatttttttttggtaaaatattatttttgtttattttatctttgaatagcaaaatggattgtttcagtttaattgtgatgtgtgattgggttgtcagtaatattgtagagatttctttgctttttaggcataggatttgtccatttgagaggaaattttattttgcccattaaagcaaagaaagaagaaaatctgagtggaccctagtaacgtaacatacgtagaaaaactttgattatataaccctgtccaacagaacataaattaacaagagaaatctctaagaactgtgaaaccaaaataataaaaaaaatg

SEQ ID NO: 35212 - DNA, 3003 bp, Unknown; identical to SEQ ID NO: 35211
  misc_feature (1)..( 3003): 2750-1469P.txt file - cDNA_ID_3085422; gDNA_ID_2926268; Annot_ID_204993

SEQ ID NO: 35213 - DNA, 3000 bp, Unknown; identical to SEQ ID NO: 28434
  misc_feature (1)..( 3000): 2750-1469P.txt file - cDNA_ID_3085430; gDNA_ID_2926268; Annot_ID_204991

SEQ ID NO: 35214 - DNA, 3000 bp, Unknown
  misc_feature (1)..( 3000): 2750-1469P.txt file - cDNA_ID_3085487; gDNA_ID_2926269; Annot_ID_143400
gatcgatattggatggaattttaccgaaaggacttataccgagaggacgtatacgaagaggactttttccaagaggacttataccaagactgcctgcaccaagtgggtccacaccaagtggaccttcacttggtggagattcaacgagtggaccttcaccagatgaacctttacctggtggagataaatcaggtggtagttttccaagtggaccttcatcggatgcaccagcaacaggtggatcaatacttagtggacttataccgagtgggcctgcattagatggatcagcatcagatgcatctgccttggatggttcaatattgggtggacttataccgagaggactaataccgagaggacgtatacttagaggacttataccaaaactacgtataccgagcaggccttcactaagtgggccttcaccggatggagatgcaatgaatggacttgcaccgggtggacctacaccaaatgaacctatacctagtggagatgcatcaggtggaagttttccgggtggaggtatttcccaagataaaccagtgcctacgaaaacatcaaataaacctacaactaatccatcatcaactaaaccgaaatctaaaccatcatctaaaccgacatctaaaccatcatctaaaccgatatctaaaccatcaactaaatcaacgtctaaaccatcatctaaatcgacatctaaaccatcaactaaaccgaaatctaaaccatcatctaaaccgacatctaaaccatcatctaaaccgatatctaaaccatcaactaaatcgacgtctaaaccatcatctaaaccgacatctaaaccatcaactgtatcagcatctaaaccatcatcgaaaccaacatctaaaccatcaacaaaaccaacagttaaaccaacacctaaaccgacatctaaatcaacagccaacccatctactaaaccaataaccaaaccgataaataaaccaacatccaaaccaagaacaaaaaccatagctaaaccatcatcgaaagaagcaggttaaccaacaacaaagccaacaacaactaaatcgacatctaaaccatcatctaaaccgtcatctaaaccatcaactaaaccaacatctaaatcggtagttaaaccatcaactaaaccaacgaataaacctgtaacaaaaccgatatctaaaccaacaacaaaatcaatagctaaaccatcatccaaagaagcaggtaaaccaacaacaaggccaacaattgagccatcatcaaaaccgacaacaaaaccagtggcaaaaccaatatcaaagtcaacaacaaaaccaatatcaaagtcggtagcaaagccagttagaaaaccgacatctaaaccgacaaaaaagtcagaagcaaagccaacatcaaaaacgactgtaaaaccagtagcaaaaccgacagcaaaaccggcagcgaagccaacatcaaaaccaaaagccaaaccgaaggcaaaaccagtatcaaagccggtagcaaaatcgatggcaaaaccaacatctaagcccgcagcaaagctagttacaaaaccgacaacaaaaccaacatctaaaccgacgaaaaaacttgcatcaaatccaccatcaaaaccgactgtaaaaccgtttgcaaaatcagcagcaaaaccgatagaaaaaccgccagcaaagccaacatcaaaactgacagcaaaaccggtggcaaaacaagtatcaaagtcagtagcaaaatcgacttcaaaaccaacaccaatgccggtagcaaagccaattacaaagtcggcaacaaaaccaacatctaaactgacaaaaaagccggtaggaaaacccgcatcaaaaccgactgtaaagctgatagcaaaaccaactgcaaagcctgtatcaaaaccgatagaaaaaacagcaggcaagccaacatcaaaaccagtatcaaaacctatggtaaaaccagtatcaaagccaacatcaaagtcggtagcaaagccagttacaaaaccgccagcaaaactaatatctaaaccggtagcaaaaccatcatctaaaccaacatctaaaaaggtagcaaaaccactatcaaaaccgattgtaaagccgatggtcaaatcagcagcaaaaccggcagcaaagcgaacatcaaaaccggtatcaaaccgacagtaaaaccggcaacgaaaccaaaattgaaaccaacaacaaaaccaacatctaaaccaaaaccgaccgcaaagcccgcagcaaaaccaccggctaaaccaaagaaatgaaaagatacggaggacaatgaaagatgatatggatatttttaatatgcatgtaatcattagaattccaaaattaaatctagttgataattactaactacgtgttgaagaaactaaaattctcaaatatcattttattaatatacgagtcttctttaacatcttataacattccatttattggatgccgaaaattatcctatttgctctattgaagattcagatcgctatgtttgagagcactcgagttttcaatcctcaatatttcaattagttaatcatacttattcatttatttcactgtattcgatttttaaaacatgtaagctataatatcacaaccgaaacaaactcttatcaaaaccacagcaaattaaatctaattgaaccaaacgaaatatatagtccaaccgattaaaaatgactttgaggttataattcaatcaaattttaacgaaaactgaactaatcaaaccaaccaacggtacctacccaaaccgaaatccgaaaataaaccaaaatacctacaactattttttttacaagaaagtgtgaccattttcgcatgaagaaagaaagacgaagaggcattgacgtgacgtagagctcaacattcactcgcatcgtttcgcatggggtaagcaggtgccgtgcacgtagaccacaccactctctcttcattaaaatccactcttctaattcatgaaattccacaatcatccgatatcaaacaagctatg

SEQ ID NO: 35215 - DNA, 3000 bp, Unknown; identical to SEQ ID NO: 35214
  misc_feature (1)..( 3000): 2750-1469P.txt file - cDNA_ID_3085487; gDNA_ID_2926269; Annot_ID_205062

SEQ ID NO: 35216 - DNA, 3000 bp, Unknown
  misc_feature (1)..( 3000): 2750-1469P.txt file - cDNA_ID_3085515; gDNA_ID_2926269; Annot_ID_205051
ctatgttagagaacaaaaacaaaaaagagtaccacgtacaaaaaacaaaaaaacagggaagatatgtgatattttttaatcaattagaaaaaagaaagaaagttaagaataaattaactgttaggtaacttaacgatgttattacgtactaaattaaatatatagtgcaaagagaaaattagctctttaaatttagacgatcatatttgataagaaattaaattgactaaaaatgtctattgcataaagcttattcagtattttaatatatattcatatattattttattgtttttaacataaggacaaaaaaagaaaaaaagaaaaatgataagtgaagggttgcaagtaaaacaaaggatttcttaaaccttaccttagttaggacggtccaggtgattcagttcattagatgcacgtcaagaaaaaagacaaaatctgccgctatattttgtagatgcaatgtataagtatgacctaatcagtgacatgtaatacctgtatccgggtggattctctggccaaagatgaatccaacgatgaagaggatgtgcatagtgctttagaaaaatcctccagaattggatcgtgtccaaaccgtccttgagactcgtactgtaccgaaccggtgcgtagacatcgtttgacataaactgtttcttctccttcgccggcagctcgaagaagctattcgcaacctccaaggcgtcatctagtatgttctggttgattccatggttcactatctaatatattcatcggacaaaaagaatggaaaaaatgaatcagttagagtggaaggatataccggaaaatgttgaaatattttggagccaattaaccagaaactacatttagacccccggcatgtgacagccacgtcacgttactaacacagctgatattttgatttcaacgaatacgagagctgatttaacgtgattttaaataatgacacgaactatatgtatgttaatactatgttgaatccgtggttatcaaatgtaagcaaacttctacattacatatatcgttgataaaaagaaacaaaaagtggatgaaaaagcagtttccttgcaaccaaaatttcggaaaaaaactcaaagttatatgaatttacttgtaaaatagcttacttgaaaaaaaccaagatgttgacatgccaaacttagctcctgaataacccctcgacgttcatcatctccccctttcagccgagaaacatcgatagtgggtacgattccggaatttgagtcacatggtttgctagaaggcgggacgacgtaacagtcaggtacatacggtaaactcctctcttgtgcagaattccccattttgaatgtgcttgaatcctcacctttctccattattggtatttgaatttgagtgttgagaaatcggttaatattgtgaagggataactaaaatgaaagtgtgagtggctcctctatatataaggtttgtaggcttgtagtcgtttattgatatttcggagttatatattaaaatatgacggtcgaatactaaattattattcttcctttttggaatatctagagcatgtgtaactgtcaattgtttatcgtgtaccaataagaaactaaactttattatcaaaatgataatataatgaacatccatatgttgtacgaaatgtataagaatgtccaaattcatatatgacgagggatattaataagatgttgggatatagtaggaagtaggaacactaacatggatttaatttttaaatggagacttcgatctcattcatagtcccaactactaaaaaacaaaaagaagctttccgcaaaaaagcatcctcttgtccggatttcaagccttcataaatatgttggacacatatgtgaatgcatgtacagataaattcgatatatatgtcgtttgagttgtaacaattctgtaaaaataataatgaaattgttatatacggtcatgcgtaaggtctaggtaaaatgtattgcgccgggttccttcatgcaatgggcatttatcttcctttgggaaagacaaaaaaatgtctgatgtcacattgtcactgacattaaaatgagaattttcaatcataatttaacacaactagcaattaagaaataatattacatcgatttttcatcgaaatacaactacctagcttctagtgatatacagtattagtactatttttcgttgggtatattagttaatttataaatacgtaatacgtaaataaaagttgcaaacaaaatgttcatcctagaaattatattttaggacaaaaagaattgttttcttgtacatgttttaaaaattcgactatattttaactttttatcccaaaaggctaaaccatatatctagtataatttttcgatcatacatgttctagttctgatgctccaacaactataaaaagtgttacaagggaaattctctggacgcatattattaggtaggtttggtaaagagaaacactcaggattagtcgaggagttatggttcaacaccccttcaatgccaattccaagccctctgcaagtattttcgagaaaaggaaaagtacataacaactaatatcaccattccacaagatcatatataaatacaagcattatttactggccattaaaatcttccctatatttgtatgttgtgcaatcaagaacaaaaaataaatatgaattactgcttcaatatctccatcaagatttaaccattttagggttgtggactttaactaacagcatatgaatcatatgaattgtgaaacacgaaaaatttgttaagaacaaaaaaaaggctatagggaacaaagcagatcatatatgttgtggtggttgtgaagttaggttatccaccaatgagcaaccttaacctatgccttatataaaaacatatatatttccataattccattcacacatatgcatatagacaactatagcaatacaagaaaattaaacgcaatttattgagaaaatacaaacagcgtgcactatg

SEQ ID NO: 35217 - DNA, 3003 bp, Unknown
  misc_feature (1)..( 3003): 2750-1469P.txt file - cDNA_ID_3085522; gDNA_ID_2926269; Annot_ID_143388
gcagctcacctcaccattaaagtatgagaagcatatctatattcgttatacgttactacattacgttagagattaatcgctactaattaatttgattttgttatactatagaacactgctccaatgccgaaaccaggttcacagggacaagctctagcaatgaggatcaacgctgataaggcagctttctatagttgtagattccatggttttcaagatactctctgtgacgacaagggcaaccatttcttcaaggattgttacatcgaaggaacttatgattttatctttggaagaggagcttccttgtacttggtaaccttaaaattaaatattagacatcttttaacatggtacacatatatatagcatttttttgatattaatagtacatatatttgtatgtaaactcgatagaatacgcaattgcacgctgttggagatggattaagagtgatcacagctcaaggtagacaaagtgcaaccgaacaaaacggatacacgttcgtgcactgcaaagtcactggaaccggaaccggaatctatttgggcaggtcttggatgagccaccctaaagtcgtctatgctttcacagagatgaccagcgtggtcaatccatctggctggagggagaacctcaaccgcggatatgacaagtacgtaacatttcatatcatctcatttacatatagaactacattttatatatatatttgattataaactgaatttgatattgtgtgttgtataaatacaggacggtgttctatggagaatacaagtgtttcggaccagggtcacacttagagaagagagtgccttacacacaagatattgacaaaaacgaagttacgcctttcctcactcttggttacattaagggctccacatggctacttcctcctcctaaatactgaaatttttcttaagacaacttatttgttgtaacaccgttctttaatttataattgaaatgttcccatctttttagtttctttattttttttttgtattgcttaagatatgaattgatcaatattttttctacatatataaatcttccaattcattcatttctatatataccggatgtttgtggtgtttttgttttcctttatttagaaattcctataggatatatatacaaaatttgtttttgtaaaatatcataattatgttcacaccctattgagttaatgatttgtttttgtttttcttatgttaaacgttcatggtatatatgtttaaagtaccaacaaaaagaaagagtcaatgtctatccatgatatatatgcttttattaaacattttgattattttaaccaaaaaaaagtagaacacacacattttctagatctcatcattttaatagttctagttgcaaatgttaaacttcaatatttttcgtatatatatgaatcagcttcttctttctttaattttctcggcgaattagtatattttaatccataagagatgcatgcataaattttattgaattaagtgaagacccaatggtcaaaagaaaaaaaaaatatagatatgcaccgacgaagccgccgcgagtagccgcgtcacagccaggtcagcaaaaagtcgccatccaattaaagaagagaaggatagcaacttctgcaacgtgttctgctgagtctgacttagattcggaatctggttcttacgatttaatgaccatccgattttcaacggctaagattgtttagaaccattagtacaatattgtcacatccgcagagaatccacgcccctaaatgagctttacttccatgtttttcgcatctcctcgtgataacatcgacgatcaattttttttctttcacgttttgttgatatatataaatacgttttcggaaatgttttaaataaatattgttggtcatattctatagtatattcggattaaaatcatttttaatttcactaattatggagagatattcctaaaatgccttagtatttaaagaatgcgagtcaattgcactagatgcatgtttttattttgtttctaacgtggaccttatgtaagcaggtctgaagtttatccacaatttgctgtactaattgataacatttgtatatgtattccaaatatgaaatgtcattaaatgtctcataaaagtgataatacaatactgtatttgggaaaaataaatgagtcatacaacatagtaatcaacaaggtaaaaagtcatataacgccgtccccaaaaacagtctgtcccagctccatcctaattgggtatccacgtcccgatcctgtcacaggacaccagtaagaaaacggaaaccgaaaatttcaagaaaccaatatcgttttcttttcctcaattaaagttataaaaaaaaaaaaatccctgaaaatatcacatggttttttaaaacaattagtgttaaaatcaaaatttactaccttctccaccgttatttacgaatttaccatgttggtatattcttaaaaacttttgtagttcttgtaattactaaattttttttccgtaattttttcgattattatttataactttccaactcaagccaatatttttttagtaaattttaaaggaatgttaatcttctaaagatatgtttgacttaaaaaggagttaaaaatgatgagatagccaaaaaaaagattagagaaatccaaataaataataaggggtaaaagagtcattgcagtcgataattagtctccgtctgacgtaggatacgtcaaaaatatccgatctcattcaaattacgctttctcttctttcccctacaaatactcaattctttcttcttcaattcatcacaacaaatcaaaaactccaagttcttacctttttcccatttacaatcggtaaatttctccgatcacgagatacaaatttcactttctgatatcttggatcttccgatcactttgaattttttggtttgttgattttttttttttttttgttccataaagttcgaattttttatagagaagaaaccatg

SEQ ID NO: 35218 - DNA, 3003 bp, Unknown; identical to SEQ ID NO: 35217
  misc_feature (1)..( 3003): 2750-1469P.txt file - cDNA_ID_3085522; gDNA_ID_2926269; Annot_ID_205047

SEQ ID NO: 35219 - DNA, 3003 bp, Unknown
  misc_feature (1)..( 3003): 2750-1469P.txt file - cDNA_ID_3085526; gDNA_ID_2926269; Annot_ID_143387
gggttacatatctctagccctagttgcattacttgtattttttgcctcgccggtggttctcgccgacgatataaccccaattccggcagacagagcccaaatcccacaatggttcatggccaacgttaaacccttttcccagagacggggcacgctagaccccgaacttgaagctgcagaagcatcgcgacgtgtcatcatcgtaagtaaatcacaattttatcatacctataagattgattaatgtattgaatccagttttcgtttttgagacaaagaaacctgataaaaattgcacaaattaaaatactttaaaccgttgtacttaaatttcagtatagttgtatttgctgggataaaaaaaaaaaagtaaaaccataatcaatttattctcttaggattgattcttgtatcgttttctttggtacggttttattgttttaactccgttcatattactttatccgaattggacaccaagcaatgcatactattaattccaatgcaggtgaatcaaaatggaggcggcgattttaagacaataaacgcggcaatcaagagcattccattagcaaacaagaaccgtgtgatcataaagttggctcctggtatataccatgagaaagttaccgtcgacgtaggccgaccatacgttacattgcttggcaaacctggtgcggaaaccaacttgacttatgccggaacagccgctaaatacggcaccgtggagagtgccacgcttatcgtctgggccacaaattttttggcagccaacctaaacattatagtatgtatacaaatttaaatctcagttactagtatacatactatgttacggattagttggacctaattaaattttctatctcctatagaacacttctccaatgccaaagcctggtacacaaggacaagctctagctatgagaatcaacggcgataaggctgctttctacaactgcagattctatggttttcaagacactctttgcgacgatagaggcaaccatttctttaagaattgttacatcgaaggaacctatgattttatctttggaagaggagcttccttgtacttggtacgttgtatactttgatctcctttttgcacacacacatatatatatatatagcatgaccgataagtaagtcatgttttatttatttgatccatagactacgcaattgcatgctgttggagacggattaagagtgatcgcggcacacaatcgacagagtacaactgagcaaaacgggtattcgttcgtgcattgcaaggttactggagtcggaaccgggatctacttgggtagggcttggatgagccaccctaaggtcgtctactcctacactgaaatgtctagtgtcgtcaacccatctggatggcaagagaacagagtgcgtgcgcatgacaagtaagtgtatcaatttcacattatatgattatgtgataagaaaccaacactaatatataagcataatttagtcatttccaattgagttaaacagtcataatttctcacatagagatattgcaatagtttcagtttgccccaaaaagaaaagatattgcaatagtttttacaagtttaaaatgtgatttgtgacagtgcgaaccaaccattaataagtaatattttttatataatgaatgataggacggtgttctatggagaatacatgtgcacgggaccaggatcacacaaagcgaagagagtggcacacacacaagacattgacaacaaagaagctagccaattccttaccctcggctacatcaagggctccaaatggcttctacctcctcccgcttactaaacagacccaatcatcactaaaattctgtatatgttacaattgtacgttttgttttcgaagtatcctctcttcctgtatataatggaggagtagagacttgtgtaattttggtttcatgataataaaatactcaatggttcacaaatgagaagcggataagaattcaaacatactgattattgtgcatggatagagtgacgcgactgattaatgttatgaatgacagtatatttgtatgcgaaattgcgaacacattaactataaatattttctagttaatgttaaaatgattggggacaatttctaaacaaaaaataatatggacattactttctatcattttttatgtttgatattagaactcgtattttggtagaaaattgttaacttgtgatttaaaaaaaaaaactgaagaatcacatttttagcagatggttgtgaaattacgtttttggttaaaaattgtagattcacaattttgtaaaggaaaatcacggatagctttttattggtggaacattttgtaatctttttctattattataaaaacttgataattgacattaccggtctagtagaaataaaacacaaaatttgaagagatatatataagttcgatcgaaaatcacggccaaatgtgggaagcgtcattgacgtaaagcaaatccaaatttaggaagtgtcattttaattaacattgaactactaaccactcctgtcatgtctagcaaatttacattcaaacataaattgtggtttaggtccttttcaggtaaatctatagatagatatatagcaaattaacaacatagttccttttggatgagtcaatattcaacatgttgattttgccaactgtaaattttccttttcgttgatggttacagatgaatgtgcgaatttatctccattcaaaattactgaatttgtaataataacaaaatcagatattcaaaaatgcttcaagaaatataaaccacagacgagaatagtaaaaatgagatatgtccggtcagagatcaacaagcaagacaagtataaaaaccccttcaaggcttcttcatttcttccatttttaaaagtaaataagatagtaatattaacacttagtttttcttttccttttcattattttcttttattttgtaacagaaataaaagaaaataaaagaaaataaaaagatg

SEQ ID NO: 35220 - DNA, 3003 bp, Unknown; identical to SEQ ID NO: 35219
  misc_feature (1)..( 3003): 2750-1469P.txt file - cDNA_ID_3085526; gDNA_ID_2926269; Annot_ID_205046

SEQ ID NO: 35221 - DNA, 3000 bp, Unknown; identical to SEQ ID NO: 28448
  misc_feature (1)..( 3000): 2750-1469P.txt file - cDNA_ID_3085542; gDNA_ID_2926269; Annot_ID_205039

SEQ ID NO: 35222 - DNA, 3000 bp, Unknown; identical to SEQ ID NO: 28447
  misc_feature (1)..( 3000): 2750-1469P.txt file - cDNA_ID_3085546; gDNA_ID_2926269; Annot_ID_205038

SEQ ID NO: 35223 - DNA, 3003 bp, Unknown
  misc_feature (1)..( 3003): 2750-1469P.txt file - cDNA_ID_3085550; gDNA_ID_2926269; Annot_ID_143377
aatagtcattatatcaaagacttcgttcggtcgtggagtcagagtcagagtcaactatacttgtaaatcgtaacttggatcttaatgtataaaaagatagttttagaagaaacaacaagatcataaaactattacaaacaatagggatatatatacttctcgttagagaatctacacatcaccggaaaaataagagaaaacagaaagaaaaattaaagagaaaatacgaagaagaaaggcgtagccttccctttgcctctgttgacttgccgtttgttttcttccttgatctgttgttaaccagaaccagagaaagataacggaaccgagctaacttccattagccgtagctcgacgtgcttcttaacgtcgtcgtcttctttctcggtttcttcctcctccatatctctttcccttccttagattaatgaaaacgaagctaactgttagtggttgctttagtcttctacgtctctcttcaccccatttataatgcttcatctggtcccatatccaaaaccttatatatataatggcgtatattattatcgtattattgtttaaacaatatattttaaacatgaattatgtcttgttaagttttcgacccatggaatctttttgaaagttatacctaacgtcggtaaaaatttaataaacatttttataacgtgcatctacttttaaaagaaatccatttgcattattgcattaaagatgtttaagcatttggctctccccaacagtttagttcaaattgtttgatagaaaaagttgtttctttttcttttcacgtacaagtacaacgcttgattctaaacattttaagttaaatttgaaccatagtttaacaaagttgtcgaaaaactcaattatactgcaaatgaacgatttgaacaatataatagtgttgaagctagtggaataagatatattcagacaaaggtatgacaagaagtatcgaggtggtttctgtagagggatggaattattctttaattattttttcgtcggcatagtttttgctatatatcttccacttgctggaattatattaatgtgttatctaaagttcgcagcataaattattgttgttgttactgtttatcgttaatactttttcttgctttattattagtagggctactttgctaaataaagaaaaaaaaatagaagtttaactcgtaaaaatgattaagtggtagtcgtaaataagtgattcataatgtaaaattaatatatagtgtcaaaaaaaaaacatgctatttatttttgacttctgcatgactattagcacacacaagaatatatattatatagaaatgtcgtcattccactagctataatatatacatttttgatttttttactaaatagatcatatattttcgtaaaatactaattttctaaggagctgatctagtttagtggtcatacgaggaccacttacctcatcagctcaacccactaatattgagtttgtaccagtttgacaaaaaaaatacttaacttttcagaaaataaaatggaattagttattttcataattacattttcagttaataaaactaggataacaaaaacttgagttttctttttcttcttctgaaagttatgacctacgtagctaggttttagtttacagtcgtggttaacttagagactctttgatcatcaatcagttaagaccaatgcttctttaagccatttagtttattcttgatgataaaagtacgtaacatcatttttaaaaaattgtggtgagtgagtaaaagtcacgatacaaagaaaaatattcatagtttgaaaagaacgtaaagtagagatgaaatgtgaatacgattatatatattgtttacatagttaatgtataggcctttctttctttatataggattgtaaagctctttacaccgctttatttataacaaaaatagaaatgagcaaataattacgtcgaataagcactaattccattaaagtgggagctagtaagcaccaagcacactagttcaactcgtatcaatttattgtatttaaatcagtagttaaaacttgtttaatttcctcattgagaaagatttgcccactttagttaagtcttatcccaaatagcactttagttaagtctttatcccaaataacttgtttacttttacttttctattaaaattatgaatagtactgaattcactatttaaataaaggcactatgaaataaaaagaactccataaaaaatgcattaattattttatatttcttaaatatagacaaactttatagaattaatggctacaataaatattacgttgaaaatgtcgttttaatatttctccatcttttttacataatatttatatgaatttaaatttgaatgtcgatacaacgataacacgaagacgagaaaatataactattttcattagaattgacaccaaacatatttaatctcttcatttttgtcttaaaaacaaaagaacatactttcgtgacataggttcatttagtacttgatggattttcgtgccattggttcatttactcgatgcaaggcacggttccatcgacacagcagcaatgtgattgtcacatgtcgcgtggtaagacgagggttgctagagcttaccagtaaaagaagatacacaaattttggtcttatccattaggcatacaaatttaaaatataattaatatctcatatttttaattttgacagaaccaatgaaataaaacacgcgcattactgcagtgaatcccaattataaggaatctgatttgacgtggatcttcaagacacttccacgaattaaactgcatgttcttaaatgcttacacgtattacttctacaactctcttctctactccagatgtctccatcttccttttatatccgatatctaaaacgctctcaagtatagcacaatccacaacaacaaaaagtacaaatcttactcttcttttcagctagattttactaatcactcgccaagaacaaccaatg

SEQ ID NO: 35224 - DNA, 3003 bp, Unknown; identical to SEQ ID NO: 35223
  misc_feature (1)..( 3003): 2750-1469P.txt file - cDNA_ID_3085550; gDNA_ID_2926269; Annot_ID_205036

SEQ ID NO: 35225 - DNA, 3003 bp, Unknown
  misc_feature (1)..( 3003): 2750-1469P.txt file - cDNA_ID_3085554; gDNA_ID_2926269; Annot_ID_143376
tatcaagtttatacatacacaatttcctttccaattttattggactgttttgggggatctcttcagtcagtttgaattcaaaaaattactacgtgcgtgtaatagtttatggcctggttattcgaaaacaccgtagactttagttagaattaatgtcgtatagttttacgtttgttgacaaaaagaagtgtatcttgatatatatattacgaagtcgttatatcagggtttcaaaagtactttgttttatattatatcttgtataacgagacttttactagcaattttctaagttcttgaagatagagatactggccttagaagtaacaactaacaagtatgaaaacttgaccaaaacagattccccgagcgtttgttttcaaatccttgacttttgtcaatccaaagaggttgactccttttgacttaatttttctgtatagtatacttattgaaacaattcctaatatgtatacgttattttcaatatataatgatataggaatgtgtcacagattcttaaatgtatatatacataggataatacttaaatttagaagacaattagaattcaagtagtagttaatgtaataatgttgtcattgtgtcacaattctatttcaaacctataattgtatgatgtgaaaaaataaaatttatagagcatcaacaactagaattagattcaatgtacatatggatttagaaatgaaaaatcatttcgttttgaaactgaaagactcatttttcttatcatcatatcaattgaaatgatggttacgatgataatgaatatcgttattatgaaatactttccgaccaacgcgttatctcctctttgttgtcttaaaagttttgcttatagatttttcgtcttttatgcttgtttcttcattttttacatgcgtgttagatcattagcgtaaatggttagtgcttaaaacttattggtatgcgaatctcggccgccgacaaatatttgtacttcaacttcaagacattcgtggaacttcaaaaacaatctttcgttttttcaaacaaacaaaataatttgaattcgtttcgcgaatgaggcgcgtgtatgacacctctgtctctgtgactatagcgaagctaggtttacttatgatgaaaaaagttcagttcaaaaccagttttttgttagtcgtgaaagtctattaacctgtttttctttataaaatttcccaatatagtattaatatatgaaattaacaaatcgttgaattgaaaacttttaactatcagtcaaagatgaatattagcctgaatatgttaagtgatcaattaactaattaattagctaggcatattaactgtgggatctcctctgggctttgggcggtttggataaagtaacatttgtcgggaaaacagtgaacaagtgctacacaatttttcaaatgtaaagacaaaaagttccattatgttgcaaacacgagacacaaatatttataatagaagagttgtttgaacaaattaagacagccagattatcatatgttttaaaaagaattgttatcgaaaaaacaaaacaaattttgtagaaagttcatgttctttcaacatgatacacaattccaaatactcaaaagtctttgatatttcatatatagatacgattacgaatatggaccgtagctaagaaaacagttcaaataactaaacacaaatacagctattatataaaaatacatcccgacagaaagaatatagttaaaagaaaatcaagagattaaaacgttgacaaaggaagggaaattggggatggccgcacgcacgccggcctcaccgccctgtcaacctttgcggccttctaagctatcgcaaatctcaaccactgcctttaccttctatttcaaacttatcggcccaaagacgtatgaatacgtgcatgtataccatatatacacaatattaaatcatttaaaatacgtatgtatgttcacgttcagggatgttcaaattgcaccgactcactcagtttgtaaatgtaacgcagcccaattctgtttcactaatagtctggcccatttcacaatcatccaaagcgagtttttaaaggtgatttcatgatttgctaggtaggtcagattcttttgagatttcacattccagacagtatagagcgaagagaaactgcaaaattgtacaaagaatggcaaaaaaaaaaaaaaaagcgtttttgtgaaaaaaatccgacctgccggaatcgaaccagcgacctaaagatttgctgtcacagactacagtcttccgctctaccaactgagctaaggtcggttattgattactaatacaaagatttgttaattaacctaagtaatcttggtagtcatgtcctctaatttccaaaccggagacaaaaccggtgagaagatcgctacaaaaattaccaatctctaacaaaattatttaaattaaaaatctccataaacttatttttccctctctgtaattttggataggtttttaatacggtcaaacgcattttttttacttctactaatcaagcacatttgaccatttccggttttggttcaaaccggaaaacgcacgatttcaatttgactgattcgcacgtgtcgtgtgggaatagcacgtggagaatagcaaaaggtcagggggagggaagatagagagatatgttaccgtcacttgcggttgacagatgacggagccggattttccttcaccggccatccatcgtttatagccactgacccacaacaacaccattaaccctttttgcttctgactccaatagtgaagtaaatttccaaacttttgtgtttcttcttcgacgtgaagactctttcggtggtgtgttgtgttgtgacttgtgaggtcttctttctcaaaacccaggactcactctctgtataataaatacgcaagaagatgaatgatccttagaatcattcaattctcttgtaaagcattctaatttggggcaatctcgatattgatcgcgaatcagcaatg

SEQ ID NO: 35226 - DNA, 3003 bp, Unknown; identical to SEQ ID NO: 35225
  misc_feature (1)..( 3003): 2750-1469P.txt file - cDNA_ID_3085554; gDNA_ID_2926269; Annot_ID_205034

SEQ ID NO: 35227 - DNA, 3003 bp, Unknown
  misc_feature (1)..( 3003): 2750-1469P.txt file - cDNA_ID_3085561; gDNA_ID_2926269; Annot_ID_143375
tgcttaacttcatttgaaaaacttcttgaaatagattcttacaaggtttatgtattggttgtttgtataggtactagatggagataaaggagagaaattagagagctccagtggtcgaatagcatcgcgcgatatcgtccagtttgttgcattacgagacatacaatgtgagtctcgtgtttcttgatttgtcaggcagagttttggtctctgatcattgtggttgttgttgttgttgttgcagatggagaggtctcagtggtagaagcacttctagcagaattgccaacacaatttttgacgtatatgagaaaccgtaatattactcccaccaccactactccatcttctacttgatccacactctcaacactgtacatacatcagtcagtcacagctataaacgctgtcgtcttatcttggcttttatttttgtttttttcgattttatattgtctggaatttttccgttttccagtattccacgtcaaattatatctcatcactcttcattattatatttgttgtcaaaaacataatttattatatatgccaaattattagttggtttgggcgtattcacatagatatgtactgtttcaacggtcaacatatatagttgttgactttcttaatttggttgggatttaggtggactttctaagtctaacttttattaaacgtgaccgttgattattctttaccgtacttgtcgctgaaacagatactgtctattacagcaacaaaacgagaccttaaaatataaatattctattatatagtatctatttttaatctcataatactaaatctgaaattttgtttatatatacgtattgtgttataattatcataaaattgaaagtaaattttttaaaaaagttgtcaagccgttttatgcaaaaaagattttttttttaaaaaaaaaatttacattatgtgacgtcgttaaactcattttccctgcttggcaaattcacaaaatgttgtttcttcgttctcgtcaacaaatctgaaaatacctacacatgccatgtgtatatcctgttttaaagtttaattttttcatttaaattcaaattcattgacatgtcgttgtaagatactctcaaccttttttctatcagattgactttcttattaaaaaagtcactttcttttctcgtaatcttagctatataatgtcatttttgtataatttagacgtagaaaagttggctaatttaatagatcataataatatcaaatcatatttatccatagtcaaatgagtacgttatacatcctgaacagcaatcctgaacagaaattattttttcgtcgtcccgtcaaaacgtgttatcctacgttttatcagatgccatgctatatgttatgtttttatttcaatgtatttataatcaagtttgaatattacatattttttactttaatagttaatacattacaaagaaacaaaaaaagcatgttgcttgttgttgagaaagaataacaaacaaacacatgtgtcatgtgtgccacgtgcaaacatgactaaaaaaagacaacagtttctcgattgcaactctcttggtttctttcctacttccgtaatgagaaaaaaagctctgtctatacctaaaaaaagttatttcttagaatatcaaaagctagattttaggaaattaaatatttgagatcaacaaatatcgttagttgtgaattgcgacttgtcaagggcccatacaaaatgtttttttttttgtgtgtgtgagcatatccttataataatttgtttgtttaataccaaaatggtgctttaaatgttaatatattactgtaaactttccctagatccactaatttttctttttatcgtttattaaaaaacattaatagtaatctaacccgttatctatatatacattttaagtgagtatgaaaatttactccaattttgatctcctgaattgtgataatcttatctctttttttctttctaaaacttgaatcttggacttggtgtttgcatgtaaaaatgttttttcattactcatttaactgaactatttctagatatagatgaaattagaaatcctcttcgaattatctatcaaaagtagaaagagcctcaataacaacatttcacacgtttttacttgagttagtgatcaatgtgtacacatttctcgaatataactaaatttgtctttcaatctctatccaaatattttataggggagaaaagaccccactctcgcgtaacgtaaactccttttctatatcacaacatatatgtaaaacaatttgattattttcttattccttaacttttccagagaatgtcggtttatagttatacacgaagaatatctatgtttctttgtatttaaatcaaacttccaaaagaatataattatttttcttttctcttcttcgattccatgcatgttttctcaaaaaagcaattaaacagaatatgtatatatgcatgcactccttctttatttttttctttttgtcatcttggagctttacatagcgttcatattattttacattcttctattagagcttttctactaatctttattgatatccatttcttaacttgttcagattcacacgtacacattttttgcaataatcaaatcaaaaagcttttttcacgcgtctctacagttttagcagggtacactgatatagtacatgattttctatatcgaaaattacaatagctagaaaaatatataatttttttaaaaatatgcaaaacttctgcttgacgttaaattttgttttgtcatttgtcttatgttcacacagacgaaaaagcttctataaaaccgtcaaaatagctcacccctaaaaccctaattatatattccctctttcattctccttcttcgtcttttctttgtttctcatattcaagacatcctcaattccaaatcttaaaccctaaatttacagacacaatcgagatcacctgaaaaaagaggtttaaagattttagcaaagatg

SEQ ID NO: 35228 - DNA, 3003 bp, Unknown; identical to SEQ ID NO: 35227
  misc_feature (1)..( 3003): 2750-1469P.txt file - cDNA_ID_3085561; gDNA_ID_2926269; Annot_ID_205032

SEQ ID NO: 35229 - DNA, 3003 bp, Unknown
  misc_feature (1)..( 3003): 2750-1469P.txt file - cDNA_ID_3085565; gDNA_ID_2926269; Annot_ID_143374
tagtcataggatctcccataaatcaaggatcccatcgtggtaacctcaacttatggagtaactctaacagtcagcaacataatcagtcaagtggcatgatgtggcctaactcaccatctcgcgtcaacggcgttccctctcagcgcatcccacctgttactgcattctctagagcatctcctttaatggtgaacatggcatcatcgcctgtgcaccaccacattggatctgccccggtattaaactcacctttttgggatagaagacaggcatatgtagctgaatctccagaatcttcaggatttcacttaggttctcccggtagcatgggatttcctggctcgtctccctcacatccaatggattttggttctcataaggttttttctcatgtcggtgggaatcgcatggaggccaattcaaaaaatgctgtattacgatcatcgcgacagatgcctcacctctttactggaaggagcccaatgctttcagtgtcaggctcatttgacttgcctaatgaacgatacaggaatctctctcaccgaagaagtgaatctaactctagtaatgctgaaaagaaactgtatgagcttgatgtagatcgcatattacgtggggaagacagtagaacaacgttgatgataaagaacattcctaataagtaagtgaattcaccttttctccctattattccctgttttataacattatatgttgctcatttgttcctatttgtctttgttctggtaatggtttaggtatacttctaagatgctcctagctgctattgatgagtactgtaaaggaacatatgattttctttatttgccaattgacttcaaggtatgcaggcctcttacctgttttttcatctaatggagtctaatgcagccttatagcttagggtattttctacatcgatataaatgaaccttccttctatttgcagaataaatgcaatgtcggatatgctttcatcaaccttatcgaacctgaaaatattgttccgttttataaggtataagctttgtacctttttatgatcaatttgtgtagatgatgtatcattgttctttagaaaaaaaggaaaaaagcgtttggttacaagtttaaaaccttaacaggcattcaacggtaagaaatgggaaaagttcaacagcgagaaggtggcatcgcttgcatatggtcggattcaggggaaatcagctcttattgcccatttccagaactcaagtttgatgaacgaagacaaacgttgcaggcctattctcttccacactgctggtccaaatgctggtgatcaggtaaggaagacaagggctcaattgatatccttattcaaactataacctctttctgttgcaagtaatcatatcatctggtagttatgtattcactatagcgtgacacacataaattaggttcatagttggtcctaatgagagaacctatttccctttcaattagctgtttttgatgagagattactgcatttgtaaatgtgcaggaaccatttccaatgggttcaaacatccggtcaagaccaggcaagcatcgaacaaatagcatcgagaactacaccaactttagcagtagctctgataaccgagacgaacctgcaaatgggaacgactccatgtaaccgataagccagacagttttcatgtcgtaagccagactaacccttttaggcgtcttgtatcagaggtaaaagaaaagagacccaaaagattaacacaaggtaaaatatatatatatcgttgacaaccccacagctctgtaaatccttgggggtgtggtaaattacctgagaaaactcattttgcagaggagaaagtttttgaagtcttggtccctttaaactccttcaggttacttcacaagttttgttgtatcactaaacctcccagagaaaaccttgcttgatttttttttctttttgctttctaagtttttatttttctgttttacttaaaaaattgttgggttgtgtctacaaggatctttttctttgtactttgcatacaaatgtaacaacctagtacgatgtgttcagtttcttcgcccgtggcttgggaccatataatatcatttatgtaaacccttttgagggcgaagtttttggcattgctttcttctcttttggtttttagtgtttctttgaatctttagtcggtcactttataagcttctgacacagtcagttgtttaaggcttcctcttggaataaataatactactaagacacttggtctctaaattttcgactatcagaattcttggttggatacatttttggcccctgagagtaagtggcccatttatggcagtggaggacctccttggctccttctccagtccagctcttgtatccatccattataaggctttggaaagaaagaagcaactgggtttggtctgcaacacatacttgatgattctcttggataaggaaccgatctcatgaactatattctataatactatatagttattcttgttatatttatagaaacaaaaagttactatatatgtagtccagtagtaattatgcttttgaaaaagttttgttagcctttctggtggcgaaatcttttttaattggtcattacgtaaaattggtgtgtcttattattcacgtctccctctaaaagatgcgttctctctttctttgttcctatttcaattacagtcacaccgcattataaaatatattttttttaaaaatacttttattcccatagaactataaacaaaattatctcttaaacgtcggcttaattcaaaaatctgatactaagacaattttccgatgtggaccaaaatatatacaagtagaccggttgtagtaaatatattcacgtgatcttacagccaatttaatacatatggaccatctagttttccactaatcaaacataaacctacactaattaatttggggaatacttaattctttatgttgtcaataatttcaaaacaacaataaaaggaaattaaatg

SEQ ID NO: 35230 - DNA, 3003 bp, Unknown; identical to SEQ ID NO: 35229
  misc_feature (1)..( 3003): 2750-1469P.txt file - cDNA_ID_3085565; gDNA_ID_2926267; Annot_ID_204978

SEQ ID NO: 35231 - DNA, 3003 bp, Unknown; identical to SEQ ID NO: 35229
  misc_feature (1)..( 3003): 2750-1469P.txt file - cDNA_ID_3085565; gDNA_ID_2926269; Annot_ID_205031

SEQ ID NO: 35232 - DNA, 3000 bp, Unknown
  misc_feature (1)..( 3000): 2750-1469P.txt file - cDNA_ID_3085569; gDNA_ID_2926270; Annot_ID_143403
tggaagcttgagatacttaacatgcacaaggcccgatattttatatgcggtcggagttgttagtcgttacatggagcatccaacaacaactcatttcaaagcggcaaaaaggattcttcgctatatcaaaggtaccgtaaactttggcttacattattcaactactagtgattacaagcttgttggatatagcgatagcgattggggtggagacgtagatgaccgaaagagtacaagtggttttgtgttttacattggagacacggctttcacatggatgtcgaagaaacaaccaattgtcactctatccacttgtgaagcggagtatgtagcggctacgtcatgtgtatgccatgctatttggttaagaaacctcttgaaggagttaagcttaccacaagaggaaccaacgaagatctttgtggacaacaagtcggcaatagctttggcgaagaacccggtcttccatgatcgaagtaaacacattgacacacgctatcactacattagagagtgtgttagcaagaaggacgtgcaattggagtatgtgaagacacatgatcaagtagccgatatttttaccaagcctctcaagggtgaaaactttatcaagatgaggagtttgcttggagtagcaaaatcaagtttaagagggggtgttgaaagttaaacttgattttgaatcaagtttaattattggatcaattatccaataattaattatggccaaatccaagttctagagttttctctagaaatatcatcatttccacctccttaaaagattctagaaattttctagaatcatcttccacctccttaaacataaaaatctagatactctaatagaataatctagatactctaatagaataatctagataatttgaataatgtaatctagatcttatgtaagaactctctagacttaggattaaaatattttagatattttgtagtttggaggctataaatacctcctccccctctcaaatgttgcaatgttgtgaagttgtattcaaagtttaaagcaaagtaataaaagttctatttcctaaaaaactctctcaaaacacttaaacactttctccattacctctaaaagaattttactctaacagttttaaccagacacagagccgtgtgcggtttgaaaatcggagacactggtcagcagatgatgcgtagccttctcataattcacaaaacccatgaaccagaagtcatgaccatccaccgtcgtcaactgaatatacttctcaggtggagtctctttcaccaccaccggattcaccgtcgctacattcgccaaaggtacaaccacctgccacaaaaccaaacaccaaacaacattagacctacgttaaaaacaatctccaaattcattcttttacaaaagcaagactttacttaccctgtagtagctccaagattcttgaccagaaggtgctgtgaagtacagaggacgatcgctacaaaaagcgacacgagcattcgaaagatagacagttccagcaacaggacctgtcgtcgtcgagagataacaagcgaaagttttcttcagcgtctcgtttggctctgttccgaaaatctgtctgaaaagcgactcgaatcctccttttgttatcgctttggccgtcaaattaaccttcccccacgccgtttccgacatagacggtcctgtcttcactgcaaaaaaaaaaaaaaaaaccaacaaaattcgtcaaagactcaaacttgctttgtccaaatgctccaattaagtggaaggagacttacgattgtgccagaggttacgtgcgacggtttctgccttgcgactccaggtatggaacattccgatgactggctcgagagggttgttagttgttggatgttcgacaggagagtagatgacgtacggttggtactgcgtctgctggttatctccagcgacccacgccgccgcctgttggttatcgggatgagcaactggagctgccggagctcccatcacgtgagtaccccatttcttctgatccggagacgatgaagaaggttctggttggtgctctgtttctagagttttgggttgctcttgatcaatgatgatcttaggttggtcttcttgtgatcctgtcatggctgaaattttctgaatttggttgatgattctgaaacgttcttcgtcttctattgaaatggatgtgatggattgtgttgaacttggttttttaatttataagattggattatacatatataaaacgcggttttgatgatgttacctttgggattaagagttggactattttaggctgaattttgacatttagtttaatccttaaccaataagataagaacacataatggttttagaatgttcttgataaatacaagattttagaaaagtctctgtgtcattcaatgattacattttgctgaatcttcttgtaattacagtaatgaagaagataataaataaggtgattgtgacatggactctctgctatgtcggcaaagaggcctaaacaacacgttcttcttttgtagtccaacacgttcttcttttgtagtccatcgcttgtttgttaccgtcaaactcaaacttcacttttaaaaacgaaccttgcaatttagacgaaagctagaacgaacaggtctaagacaattattaggccttttgagcccaatatctgtattaagtatttaagtttataaacaaaaggcccattaagtgtggagtctctatcttctagaggaaagaaagaatcaaagaatcgttgaaatcaaaattgcgattaatctcaaattaagtacacacgcgtaatcgtcagagatttggaactttccttgaatctccatcgtcttccgcgtaatttccctgggaattttcatagcggaaagggaattaaataaatactcttcgaatcagcttcgtctgtttctctcgttgtgattgatttgctttatcttcgaaatcgttgagtttgaccgtaaaaactaaaaacaaaggagatg

SEQ ID NO: 35233 - DNA, 3003 bp, Unknown; identical to SEQ ID NO: 35129
  misc_feature (1)..( 3003): 2750-1469P.txt file - cDNA_ID_3085585; gDNA_ID_2926270; Annot_ID_143416

SEQ ID NO: 35234 - DNA, 3003 bp, Unknown; identical to SEQ ID NO: 35129
  misc_feature (1)..( 3003): 2750-1469P.txt file - cDNA_ID_3085585; gDNA_ID_2926270; Annot_ID_205102

SEQ ID NO: 35235 - DNA, 3000 bp, Unknown; identical to SEQ ID NO: 28456
  misc_feature (1)..( 3000): 2750-1469P.txt file - cDNA_ID_3085589; gDNA_ID_2926270; Annot_ID_205100

SEQ ID NO: 35236 - DNA, 3003 bp, Unknown; identical to SEQ ID NO: 28455
  misc_feature (1)..( 3003): 2750-1469P.txt file - cDNA_ID_3085601; gDNA_ID_2926270; Annot_ID_205096

SEQ ID NO: 35237 - DNA, 3000 bp, Unknown; identical to SEQ ID NO: 28454
  misc_feature (1)..( 3000): 2750-1469P.txt file - cDNA_ID_3085609; gDNA_ID_2926270; Annot_ID_205094

SEQ ID NO: 35238 - DNA, 3003 bp, Unknown; identical to SEQ ID NO: 27696
  misc_feature (1)..( 3003): 2750-1469P.txt file - cDNA_ID_3085613; gDNA_ID_2926270; Annot_ID_205092

SEQ ID NO: 35239 - DNA, 3000 bp, Unknown; identical to SEQ ID NO: 35232
  misc_feature (1)..( 3000): 2750-1469P.txt file - cDNA_ID_3085623; gDNA_ID_2926270; Annot_ID_205088

SEQ ID NO: 35240 - DNA, 3000 bp, Unknown
  misc_feature (1)..( 3000): 2750-1469P.txt file - cDNA_ID_3085629; gDNA_ID_2926145; Annot_ID_197673
tataagagaaacccgtcttatctaaaataatgaccagaagcaaacttctcccaagctttacaaatctcttaaaactcatggtaagtttcataaatgatttttatttgtttaaatcccataagcttaacattaagagtagcgagtagggtgtacctctgggataaaacatcagcaactacgtcttttgcatcggatgtgtgcgcgttatttttccatttatagttgtatgttgtccatgatatttcatctttgccgcagttctttctgattggtataagcatctcaatctattagatagtggcaagtacaacatcctcttatatggtactcatgttcttccccaatatgttgatatcttggcttgtcacaaaatagacattcattcagattttcattatatccccaaaaaatcatgcaatagtcatggcatacatcaatcattttttatggtaacccaagacttgaaaccaacttcagtacttgagcaaatatattatttgatggcaaatattttataattagttattaccataaatccatacaatgttcatttaagttattatcatctcctgttatatccatgccaacttctttggtcgggacagggcagaaccgtgtcattgatgcttcgttcattgtcatctgtgaaagggcaaaactcaaagtatatattgtcttattaaggcttatcatttaattaatgttttcttttctttctgttataggaaataaatagattatagaatatattgttttaaggagagttagtgctgacacctatgcaaaagctacaacagctcttcttggagtaccactaagtcacaactcttcttttcttgaaggcccaaccttggctcctcctcatgtaagggaagctatttggtgtggtagcacaaactccacctttgaagaaggtataacaaacttgtatttagaatgttggacaatttcatgttttgtatagcaacaatcataatattctaaacttcaaaaattatcgcatgattcaaattctcaaaccacattctgcaactcacatccgactatgaataatatgaatcaaagacagaaaataatacaaatcttaattaaacgagaactgcaataatacaactaatatgcccaagtttttgtggtctagtgatagaaaaatctttagtgaaaggtgaaactgccagatccaaattcgatttttcctgaaaacaaatatgggacgtctgttacttggatgttcgcccaaatgtttatctagtagtcagaaatgtaggtggcctaactaccccctgacattaatttgaaagcatttcaaactcggatcatgcaatgtggtggcccaattctacatggatcgggagaaattcactctgtaaaacatcggggcattcttcctatcgaagccgaccggatcagcaaataagatatatgagaaagaaaaaaaacagcaacaacaactaatatgtaggtgtagatatcatcttattgcaaaaactattgtccgtcaattttcaaccatgcaatgtatagctcagatttgttctttcaataataagtgttgtggtcctagatttcttgtggagagaggtttcaatgcatatttctgaaagcctcaacctaaaaataataattttgagcctctaatctaaaagaagcaaagagtgttacgttattggtttggtattatctagagaagtgcgcgcacgtttttgttgttattaccctagcattccatcgacccattactctatattttccacataaaaaaaatatatacttcttctgttttactttaaaagttgttataggaaaaacatttttattttaaattaattctcactatcctatacaaaaatttattatttcttactttttaattattcttattttgaagagtgttttgttagtggttgaaaatattaattttaaaaaattatatgatttataatgaaaaaaaaacaatttacgcaacctatggacttttaaatatgtgtagatatcttaaacaatgggtgtaagtaacgataaccacgtttaaacgagacggttaaaatttttatagcagttgtaaaaaaagcggttaaaaatagtaggatgaaaaaggtgctatcataaaaaagaccggttaaatatttagcttgaatggtagcattgtagcggttgaataatttacattataataaattaataaaaaatgaaattaatttagtaaaaaataaataaatgtatggagtaataaaccattttttaattcataatatgaaatattaatatatttaaataacaattgttataatattgaaatagtaaaagtaaaaacaaatgtattcactattgtttctcttcttatgtcacataatggcaaaaacaaagagcaaaatgacaaaataaaaattgtgcaacttctaaataaaaaaagatgtaaccataatttaaaaaaatgtaaccatattttccaatgctatcatgttatttgtttcaaccaccgacgaaaagaaaggtcctacttaattacaaattttacaatctcttttttttttttttttgttgaaacaagtttctcatgtattattagcaatcaaccctatatagggctgaatacatatatccatccataagcacaagatctacaagttttcatttccggccacacgtagttgcccgaagtggcgaagttacaatacattacattagtaaattaaatatatatctaactagcaatcttaattcttttattattcattgaaaaattattacgactataaaaattttgaatacacaaataccatatatatatatatatatatattattcgtataaagcttataataaatatgtagggtaaagattttaaacatgttttaaacaagtgttacaaatttaactgataccagcttctaaacttcactaagatatcaaagtcttatcattttcttttagtatataagaacatacaatcaaaaatgaataacttatacctcactgacttactacaaatcagatatg

SEQ ID NO: 35241 - DNA, 3000 bp, Unknown; identical to SEQ ID NO: 35240
  misc_feature (1)..( 3000): 2750-1469P.txt file - cDNA_ID_3085629; gDNA_ID_1621187; Annot_ID_57439

SEQ ID NO: 35242 - DNA, 3000 bp, Unknown; identical to SEQ ID NO: 35240
  misc_feature (1)..( 3000): 2750-1469P.txt file - cDNA_ID_3085629; gDNA_ID_2926145; Annot_ID_139069

SEQ ID NO: 35243 - DNA, 3000 bp, Unknown; identical to SEQ ID NO: 35240
  misc_feature (1)..( 3000): 2750-1469P.txt file - cDNA_ID_3085629; gDNA_ID_1621187; Annot_ID_174461

SEQ ID NO: 35244 - DNA, 3000 bp, Unknown
  misc_feature (1)..( 3000): 2750-1469P.txt file - cDNA_ID_3085636; gDNA_ID_2926145; Annot_ID_197670
ttttgtttgtctgttttaagaaattgattacttagggcctgactggtttaaacgcagcgggtgcggttgcggttgcgggagtttgcggaaacgggcggttgcggtttcaagcgttatcaagcgttttgaacgactggttgaacgtttgataatgggtgcgtttgcgggagttttatgactggtaaaccagcgagtgcaatagtaattaaataaaaaataaccaaaataaatataatatattactattaaaagaaaaaatacaatatattattatgataaattgaaaatattagaaaaattaaacatgcttaataattaaaaccataaataaaacattaaattcaaaaataaataaattttgtaagaaaaagcttaatactttatgcatttggtacatcaccaaaaattgcatcaagtagtgtgataaactgtaaataacgttgaactcgcgggttttccggattgcctctatacatatgataaagttgtaacaagaaacgggtcatctcgtctgaccaaatgattttctaatcgagaaaacaaattaaaacatgtattcaatcaaaaaactcaaaaaaataaaaaataaaaaaaatgacgatgccatgaaatactcagagaattacactagctaatgaatggatgaaatgatagatcatacttacgttgattcttgattttgattttgattttcgtcagtttgggtggatgtcgtaattgagagaatagagttttaatatattgattagggttttctgataagaataagatatatagggtttgggtggaagacataattcttttaattaattaaaaaaaaaaaaaatctaaccgctaccgcccacaaacgtttgtgggaaggagattttgaaatctggcgatttcgaacggtccaaagcggtatctagcagtttgtatgattggtgccaatcgctaacaaccgctaccacccgcaaatgcagcgtttgcggatggcagagggaaaaccaatcaagcccttaattgttccttaaaaacaagagaaaacgcgttacaaaagctcaaaggactgttttcctcttcttccttttttttatatataataatcttattttaacagaattatattgaataataaaaacgaaaactaaagaagagatgacatacgtgatatgtcatagaataagaagaatatgatattaagaagagttaattaaaaaataaaccataagatgttcttaaaattataactttttatgatgtaaaaataagtatcagataatacacaattcggattttcaacgaattgggttattgttaactttttatgagaatgatttcgttatggattataaatttttggttttatatgcgttttaaatgattgaatagttaggattttgatgatggtcgagatgattacaatttacgtttgaaaaattaagtgttcgtgtaaacaatggtggagcttttctttctcggccaatagagtcacgtaaatcttattacctactagtcatgcaagctaacctttgttattcagtcttcgcactaagtctatacctcaatcaatcaattcttctattttttgtcaagtttctagttgtctttgaatttcttttctaattttgtctggcttcttctatacgaaaatgacttggtttcacacattattttccaaagaaaattataacgaatgctatcttaataactatttaggatttacatacttgaactaagaaataatatattaacaattcaatacaaagaaaaaaaaaacatacaatacaataagaaggtccatgagattacattgaggggaccagttgattgtacatgaccataccttgtgcaagacttcaaaagtcaatcctttttgtcgtagatctcttccctaaaagttgaatttctattatttttaccaaagtatatttgacaaaaataaaactaaacctcttttgttatttacagtgataaggaaattcgagattaaaaaataaaaaaaaagaataataataataattcgagatgttaaatctacatatggtgatcttgactcttgaggcgtccgtgttttatttaagtttcgtattttttaggtttgaacttacgttaaagggacttccgctaagcattctagtcagtctgaagatctttttttcccttactgctcttgtttctagccatgttctgcttaggtgagtcttttttatcgagttgattcttaagtaacctttactacttaagaatttagtgatgatttgattttcgaatgtatatactttcataattctttagcttttttggtatgggacggtatgggaccatatttttagaatttactttgtaatttctatatctttcattttttgaaatgatatttacattcttataagaaaaatagtttcttattttatggtacaagttgttaaaaaatcacacaataaagttaagagatatttttaagaaagatttgtattatattactatactaaaagtaacatcaatgcattttcccattgttgaaaaaactaattaatcttatcgtccaaatgaacatgactaacccatattttatttgctaatgaaaaattgaccatcgttgtcagtccatataaatccaccaatcctgccgtcaataacttttatataagtgtttttttttaaatacattataatataacattcaaagaactcatacattatctttatacaaaagtagaaaacaacaacttaaacaagtcagtaaactatttttatattaatgtgaatgtgtgtgtgaagtgataatttccgaagattttgtttgacaaagtaaacggctaataattaaagagagaattcaagatattgacttatttgtcctctattaacaagtgacaacccatagtcaactatcacggactagtcaacgaaatcaattttcagtttataaaagaccgtagagagataatctgcaactgtatgaacaaaacaaacccagaaagaaaaatatcactaacctcattcaaagagagaatg

SEQ ID NO: 35245 - DNA, 3000 bp, Unknown; identical to SEQ ID NO: 35244
  misc_feature (1)..( 3000): 2750-1469P.txt file - cDNA_ID_3085636; gDNA_ID_2926271; Annot_ID_143435

SEQ ID NO: 35246 - DNA, 3000 bp, Unknown; identical to SEQ ID NO: 35244
  misc_feature (1)..( 3000): 2750-1469P.txt file - cDNA_ID_3085636; gDNA_ID_2926145; Annot_ID_139068

SEQ ID NO: 35247 - DNA, 3000 bp, Unknown; identical to SEQ ID NO: 35244
  misc_feature (1)..( 3000): 2750-1469P.txt file - cDNA_ID_3085636; gDNA_ID_2926271; Annot_ID_205143

SEQ ID NO: 35248 - DNA, 3003 bp, Unknown
  misc_feature (1)..( 3003): 2750-1469P.txt file - cDNA_ID_3085658; gDNA_ID_2926144; Annot_ID_197652
attaaatttatcgattgtatctctttttacattggtcccaatttggaatcggaaaaatatattaatttatagagtattaatatatggaggttttactgtatacttgtcttttgtgatttgttttaacagtaattgttgggaaaaaagaaggaaaataattgtcttttgtccaaaaaaataaggaaaagaattgtagaaaataaggaaaagagtggataaacttgtaaaattatgtatggtatattaaaaattagtcatgtaacacacgacgaatatttgatatttagtagttaaaccatttggttactgaaaatatagagattttagaggatactgatctgcgttagaaaggatctgctctccaaaagaacgttaattttatttagtcttggagagatatacgagtaacggtttctgagcatcctaactattaaaaaaattgaatcatgtgtctaaaagtgaagaaaacacatagaaagaagcaaagtgcatgtctttacttatattggttttgttaggcaagaatataaatatgaattgaaattgtaaagatgaaaatgcaaaaagttcttagaaaatggggaattaaaaaaaacttagtgctagcacatatcaatacaaaaacaaaacatgtgctagcactaagttttttttaattccccattttctaagaactttttgcattttccacataaactcatctatattgattattaaaagacgactgaagttgatgacctagtggcaagtccttcgtcgtatgacacaaaaagtcctagattcgaaccaaaaaaagaggacaatggagtggttgagagacccacgagactaataatgaaatgaaagaaagtttcatggtttgacaaaagcaagccgggtgctagtcaaaccaaagaggctgctagtgatatcattcgtcaaaccaagggggctgctgtaatatgtgagatttggtacttagtagttgaatcatagatatattaattaattgaaagtacttacaagaaactttcactacaaaaacattattcgtaaactaaagagaagaaaaaataacattttttctttgttttggtaaatgatttatgttaatagagtgttttctggtaattctaattaaactaattagaataatctaacttttaccctattacagtgtgcatttttttgttccgttttttttatcaacaatatttaacatagaatccaactacaacgtatatataaacaataaatttggaattccatgatatatatacccttgtatcgaaaagaaaaatccatgaaaactatactaactattatctttaaaatacacaatcttttttcttgcactttcagaataatacgccaaacagttgaaagacattaacaaaacgttaaatctcatacattttttcaatttaaaaatttatactaactattaatcaaaaaattgtgagtgtctaccagcatttcagaccttggcattatcaccaatactaatagttccggaagtttttctattttcttgggtctatgtaaagataaattattgactttggagaacactttttttgggttctttagttctaatttttcttggatcgtacggtatatttagaaatcacggaatgaaaaacttcacgagaatattaatcgagatccaaggaacattctcccattaacggaaaacgaagccaatgtttagacgttagctcaattggagccaatggcagttaaatcggttaatataaatccttcaggatatcattgtttcattgattactcctgtaaagaaactgataagtttttgcgcatgggatggttttatacattatcaaatacggacatccaaccatgggtgttgccaacctacgtagaagtttcacatgtctacacacaaaagtggaagcatttgtctaggtaataagatgtatgattggccaaaacaaacgaaaaatgacgttctatacaaattactcagatctagtgaaaatggtaactaataaaattgtcgataaaaaaaaaacaaaaaataaaaacaaagaaaaaaaaacaaaaacaaaaaattatactaaaattaaatttacccacatataccattaattaaagcattacctcgaatagtaataacgccaaaaacaaaggaatgtcgtctcctcacactctttcgctcctcattccttctctaaacatctcctattctctcttgacaccgttgattccaaatcgagtagctagaatatagtcaccgctttttatgtgtgtttgtcactttcaaacatcaagttcgtcatcacggtataattataccaaaactataagctttcgttacgttactatacatacccgaactcaagttttttcatgttcatacccaaaattgtagataatgtcgaaaatctacattgatcgatcgtcaaatcattatcaaaccataaacaatgccaagtcatctcctgagtcacatatatatgatgcgtctagctagagcattgttgttactatgttgcataaaaacggtcggttcaattcttcattcttctcttctactaatgttgttttgctcaatttcttactctaaacacctagttttacaaaagaggtctagtaacctgttaacactaaaaaaaaacatccacaactctatgtttttcttctcaagtcaaacactcttgaacattgttactactatgcttcttattagacattccaagaaaaatttaattatcacttgtatagcataggaatcaaattgagcattgacaattaaagtgttgtagactttaaaacctagtagccgaaagaaaaaaaacagatgctttaaaccactttgtacaattccatatgtaatagactattaacgtatacactacttgaataaaaatatctcataatccacaaaagtaaaagccgccaagctagattattctgcctatataaggaatcgttacgaagaaacctaaattcactcatatctaaccataaccaaaaacattctcttagagagcaaagaaaatg

SEQ ID NO: 35249 - DNA, 3003 bp, Unknown; identical to SEQ ID NO: 35248
  misc_feature (1)..( 3003): 2750-1469P.txt file - cDNA_ID_3085658; gDNA_ID_2926271; Annot_ID_143428

SEQ ID NO: 35250 - DNA, 3003 bp, Unknown; identical to SEQ ID NO: 35248
  misc_feature (1)..( 3003): 2750-1469P.txt file - cDNA_ID_3085658; gDNA_ID_2926144; Annot_ID_139061

SEQ ID NO: 35251 - DNA, 3003 bp, Unknown; identical to SEQ ID NO: 35248
  misc_feature (1)..( 3003): 2750-1469P.txt file - cDNA_ID_3085658; gDNA_ID_2926271; Annot_ID_205136

SEQ ID NO: 35252 - DNA, 3000 bp, Unknown
  misc_feature (1)..( 3000): 2750-1469P.txt file - cDNA_ID_3085677; gDNA_ID_2926144; Annot_ID_197646
ctacattaaattgatgggttctttgtagctcaataaaagactgacgagtccagtggaactagataggttcaaaggtcaggggagatgatcgaacctggtattgatgtagagagcttgcttaagcaagaatgagatgtgtgttatagtcttgcatagtgatgcatactatatgagtgttgtgtctttttctatgtgattgctgattgtgttttaaaggtagaatcgcgtatcgtacttccactgggcggaaaagatcctctcactgagtaattctttactcaccccttttcctccaggtcacggtgagaatcgtgtgtagtcgcgcaagtccgtctcgcttatggtgtattttgggaacctcgggtttattttctttaattgttatcttcttatacgatttattaaagagttttcaatgatttaaggttatttttaagacgattttatatttgaattaagaaagtggaatagaggaaaaatataagcaaggtgaaagtacgccgtctcaacgttgagggagacgggcgtgacactgatggcaagatttcagtttcttgtactgtcagttgcgcctcgtctggtgaggttgtcgtccgcgcacgccaaaactctagtgtgggtgaagagaactttctgtgagcttcaacaacagtcaggcccgtaacgcttgttaattaaatccaacacatgtggatgtggcacaaccatctctctatcttggtccatgtttgtttctctatgtctattacctattccaattttattgatgtttcgacgttgtgatttgtacgaaaaggcattcgtcaaaattatgtgtcgacatccttactttggatctctgtttataattctcaaaccatggtcaaaactttaatccaaaactcttctgtctaagagtataagagcaagaatccttagtatcgtatctatacattcgagtcagtttcaatgtgacaatgggcatcaccttggcatgtttctcttataccgatcaatagcttagccgactctttgccaaataatctcgcatcctccagatttgtatccagcttagcaagacattaaatgaccttttgtcgagagatcccgaatcaacgtgaaaacaaattctacctgttttaaaagttttctctaatccatcttctttgaaatttgaagaacattttttccaaccctcctcctatatggagagaactctctatgaaacttaatgtcgttggcttcaggctactaagccgagcaagcacccgagctccacaatcctttcactacttcgtgtagagtgtcacgcatcagcgagtatcaaggttttggatgcttttcagtgtcactatgtctaataactgtgggtaatctctcactgcctgaagtgttcgttgtcatgatcccgactaaccgttttcttgcttgtggcaacctcaacaattgtctccaagatcttttagactcatcgtttgtctattcatgttctttttatgttgcatccttagatgcttgtaatcttatttttgtattatctaaacttgtagaacttgtcatctttagcgtgcttagagtattaatgaaaacatgcttgacactaatgtcaaagcatgtgggcccaagcccgtgggttgaaggttcacttgacactaatgtaatccatctctttggaaggaagaactctacgtttttcgttggaaggaagaactctacgattaccacattatgacaaaacctttccaattatacgacaatcaaaaattcattgacatttctaccacattttgtggacaattgtacccttgtgagaataaagatgtgttggagagagaaacggaagcaattgcattaattgcaatcgaggacaatttttgttacactcgggacaaattttatatcgggacaagatcgtatcgaatgaataataggatgagatcagagacaagtttagatcgaatgaataaatagaaatagatcgagacaagttcaaatcgactaagtcaaacacaaaagtagatcgagataagttcaaatgggggacatatgtcgtggacatggaacagaaaattgtggaccaaaaccacattggcgtgtagccaatttatctttggggacaaaaaagagatcttttcttatatttctcaaaatctagattcaaaatcgatattgttagagttttggaattagatctaaagtttttaagaagatgaaaaagtagtacaaaaaagatgaagaaaaaaaatactaatcaagaaagagaaagagaaaaacttaataacttagtatttgctttgggtaaaatagtattttgaaataaaaatgtagtagatttagaaaggaggaaggttttttgttattttggacaaatacttgttttcatttattcaagaagtggtgattcaaagatcacaaagtttaaaacatatataaaagagttattccctaataccatagtaagatagataaggtaaaaggacatataggttctatgagagctttgaaacaaaagctattaagcattttgatacttgtgaggtcacgactatttgattgattttccacgagcgaatcggtagatgacaagttggtcactatcaaaagacaaggtgacattgaagaaggtttcacgtccgagattttcggcgacacgagaggggcgagcttgaattgttcgtcggcaaggagatgggtaattgcggttatatcgtcgggtgggattggagataaaaagttaagaaagctttggtaaacactgtttcttggagacgggatcataatgccgttattcctcaaattttcattttcatgaataataactttaatatggtattttggaaaaaatttagaaagatgtggtatttttgttagttttttctttttcttattatacccttaaccagaataatacataaataataaaaataaaaggaaatacaatttagacctaaaactgaaaaatatcttacgtagtagctctttagggttcgctcttctcttttcttcttatcattctcaatg

SEQ ID NO: 35253 - DNA, 3000 bp, Unknown; identical to SEQ ID NO: 35252
  misc_feature (1)..( 3000): 2750-1469P.txt file - cDNA_ID_3085677; gDNA_ID_2926271; Annot_ID_205130

SEQ ID NO: 35254 - DNA, 3000 bp, Unknown
  misc_feature (1)..( 3000): 2750-1469P.txt file - cDNA_ID_3085687; gDNA_ID_2926144; Annot_ID_197643
gcggccgcgatgttgatcctatatggtgaatcacgttccttacccattcttggtgctttctccctttatcggtaagattgcatccatgggcgacccttgggtgtgttcggatgcacttatccttgtgcttcctcgaacacttttctcgatccatcccatccgacgatcggtctgtccgacccgatccgtcagacgatcggcatgtcccatccgacccgtccgacgatcggtctgtccgatccgtctggccgatccgatccgtctgacgatcggtctggccgatctgatccaacgatcggtctaccagatccgattcgtctctaagccgaacggtctaccctctccatcctctacactccatcgaaccgttggatcgggaggtagcatgcgcatcagttcggtcgagttatactcgccgagccgcaccccctttccgaccaacaactctaggatgtgttggaactcctttaagaatgttttatggtgttttgcatgttgtgagatgatgtgagatgccttgggcgtcctcccttatataggaggcgaatggatgcttcccgaagcatcacatccggtccttgcacccttccgaaaggtcacatccgttctttgcatcctttcgaaaggtcacatctgttccttgcatcctttgggcgatgcaaccgttcgttggtacccgctcgaccttacaccttttggccgagacacctcttcacccgtgagctaccacagtcgaccagctcgagtgtcagctgaccggaccacccagctgggtcagtacttgattagctcaccgagctcagtcgagctgtcggtcagctcacctagctgagctagctagttttacagctggtttagctcacctagcttagctagctagttcatccagcttgtccagctcacctagctggttcggcttgaactttctcgttcttcctactaagtattttggtccgttcctcgaccatgatctagttttctcttaaaacaaaccggccttttttatgaacgcgggacgcggtcgttacaagtctaccccccttaaactgaattcgtcctcgaattcggcgggtgagagatcttgtttactccctaacttgggacacgggcgttacaagtctaccccccttaaactgaattcgtcctcgaattcagcggatgtaagatcttgtttactccttaacgttttcccatctttagtctctccgagactttagatatcatatttgatcaaatctctatttccgagcttgatcaagtttcctgatctttgtctcttacgacactcgatcaaattcctgatcctggtcctttcccggactcaatcattattttcgatctttgtcctttcttggccttgatcaatatttcccgatctttgtcctttcttggacttgatcaacgttttccaatctttgtcctttcctggacttgatcaacgttttctgatctttgtctcttccgacattcgatcaaatttccgatcttggtcctttcccggactcgatcattatttcccgatctttgtcctttcctggacttgatcaacgttttctgatctttgtctcttccgacattcgatcaaatttctgatcctggtcctttcccggactcgatcattattctagacttaggtctcttttcgaccttgtcgtttttttcatgatcttggtcaatctccgataagatcaaaaccccagaaatagtcaaatcccgactaagtctgtacccgatcttagtcaagttccgactagatccaaatttcgttgatatcggtccatctccgaatatatcaaccaacttcccgtcatgttaaaagctttgactaaaaggataatatcttggttcccgatcatgagttcggtaacaatttccgtttccaaacacatcgatccctcaacttccttatccgccaaactctcactatgacgttttctcgagcacctatccatcctaggatcaagaatgctctgataccaacttgtgagaccccgtcccggacgtctcggcgtccggcgacgttgtactcaagttcgcgcctcttcccggccgaacctcttaatttttcgctatgcaacatagaattgcctttacgaggctaaaatctataatcgctctcttattacacagcggaagtctttctaaccttggtttaattctaaccaactcttgtaccggtttcatcgtctttgttccttagacatagatcgatcctttactcggtcaagacatgcatatgttcgctaactattctaaggaaaacaatcgcatattcctttatcctactttcacggtcaattaccaaacgtctatcttaactaataagctagatcgttacataccttggtcaatatgcggatttgattccttagcccgtttgtcgccttactccattcgttcaacgactcgtcatcggtcgtgaattgatgaaccaatccctatcgttacttagccatacaaccaaccaaccccactggtctaagtacaatgatagagattggggatcgtacgattcccttggttcacgatggccgaatcaagctcttggcttattggtccattcgttctccaaacgtacgcccctccggctacatggtggacgattgagccatcggcttatcgaaccatccatgtttccgttccggtcgtttaacactacgaccgcccacggtttactaaccgtttacccgtccggtccatggtggtcgataaagctttcggcttaatgatccatccatgcggtccgaacgatatccttatcacacccaagggtccgtggattcatccactggatcatcgtaggctagcccatgaaatctttcttccgtcggccttaggtttgctcgcgggtccaacatccgttttgtccatcggttcccaccgtggactttcccgttggttatccgtcgagtcaccctttggtcttaccgatctctgatcggtttcaccatggctgaggagatagatacatgaaggcggccgcgatgttgatcctatatg

SEQ ID NO: 35255 - DNA, 3000 bp, Unknown; identical to SEQ ID NO: 35254
  misc_feature (1)..( 3000): 2750-1469P.txt file - cDNA_ID_3085687; gDNA_ID_2926271; Annot_ID_205127

SEQ ID NO: 35256 - DNA, 3000 bp, Unknown; identical to SEQ ID NO: 28459
  misc_feature (1)..( 3000): 2750-1469P.txt file - cDNA_ID_3085697; gDNA_ID_2926144; Annot_ID_197640

SEQ ID NO: 35257 - DNA, 3000 bp, Unknown; identical to SEQ ID NO: 28459
  misc_feature (1)..( 3000): 2750-1469P.txt file - cDNA_ID_3085697; gDNA_ID_2926271; Annot_ID_205124

SEQ ID NO: 35258 - DNA, 3000 bp, Unknown
  misc_feature (1)..( 3000): 2750-1469P.txt file - cDNA_ID_3085705; gDNA_ID_2926271; Annot_ID_205119
cggcgccgggttttctctcctctccgacaactcgttttcaaacactctctcatctatttctttctttttcatggctttcttctacttttttcgaagttgtacccttatatccaacattatcacgaccgatgcaaatgaaatctttatcaaaactgtctctagatcaattttctttaaaatcttcgcgattctcgtcgttcgtccctctcacaggttctcctcgaagtcaagaccagcacctctatgctcctctttctgggactcagatcccctcaccaagtgttttgcttggttgcgacaggaacggagctctgcgttgacgctggagccgatgaagtacatgacggtagaagaatcatcccaaaacggcaccacaaccacagatccgccgccgcagtcagaaaagaagtcaaaggaagggttaaccctaaccctaattctactatttttcactcgtaatgggcctggcccaagaagtttattttctccatccagcccaccttacaatctatcccagctcagacataaactaaggggcataagcccatctattataaggcacaggtttgttttttctcttcatcgtgctaagtacaattctgaagatctcttacttatttggactcctacctaagaaagtagcgatggatttagattggacttgttattatccttctcgaaacctggtggattgatttgctcgttttgtattcgatgtaagattaatctcgaaacgttttggattgtggttagacatgtttgaattcaagctgaatcatcttgcgtcatttgctttgaggagcaatgcatctcaactctttcaaaccttactaaagaacacgcctccaatctctcaaaccttaccgaagaacaagcctcaacgctctctaactttattgaagaacacgcctaggtactttcaacctcacactttctcaagcctttttgaatcattgatttgtggctgcgatttgattgaacgacaccaatctagtctcccaatgttcctttggttatggccttgtgattatctttggcgatttcgacaaatcttatccggcatttggaatatctttccaccggcagtctcctcgatggagcattctaccaaaagctcatttgcgtcaatcgcgcaagccgtctatcaccaccagttggtcgggattttctcgaagcttgtcttcgaatttgaatctcctatggcatcaaaagatttttcaaacattgcaagcttctccaagttgagcatctttttaaaaacacattgagcctttagctttcttttccatgcattatcttaatttcagtttgtatgaattttcctctttttgaggttttaagtgaatgaaagttcttttgtccaaaaaaaacccgacatattatgtttctttcctataattgtttcaaataaatttaaaatatatattttctaaaggttatgaatcaagataaacacaacaactaatcaatctccacaataactagtatatagtttgacaaaaaaataaataaagataaaagtactttttacggggctttatagatttgggtacatttaagttaaaaaagtcagaataaatcactttttgtttggtttatagagataagcattttctgttagacaaaattaccattttgccctcaatctccttcttctttctttattctttctttattctttctttctttcttcatcgcttatttctcttcttaatatttccagaaaatctcaattttttttttggtttttttttgtttttgatcacaaaaatccaataataatgaaatctataccctaagggatagtaaaaagtgaacccaaacaaaataattaaaccgatttgataagaatataagaacgctaaaacaatttccaaatttgataaaagtttaagattttgagattttggttttgcaattttgttggttcgttgtctaggtttagagatttatttgggttttgtctaatctatttatttttgaaatttatttcaatttaatttgtttgtatgttgttgatgaattttgttggaaatttccggattttcttctatatagaaaattcttcaacatgaattagctagagaatccaaaatcataacaaaaatatcaattttcagttccttaatccaaaacaaaagaactgctattaaaaatcagcttgaattttgatctggttcgggaagggaaagagatagtgatataatttgtaggtggaaaagatttgggggagactaagattaaaacggtaaaacagaaagtagaaaagtacatgaagctgtaaggcacaaaaaaaatgccgatacttacaaagggacaaggttttaagtgtttttctcataattgatcctactttatacaactataaacaaggagaatcacaagtatctttaatttgaaagatgatatatgaaatattttagatctacaactatgtatctatatatttatttagttattgatgttaagaaaatactttatttagttttattttaggtttaaaatttaatattttattggatatcatctaagttacaatttacactttgaatatatcatttaatattaatataatctaatttaataaaattaattaatatatttatctatatatatatattacgcttatatatatatatatttttaataattatatattttatttttaaagcctgcaaataacccgtaaacacacgggtttgaccctcaccaacctcacggtagagcagtcagggtgggattagaaagctttagttctgacaaacctaacaattaccactaaaattggaaaaaatgtcaaaacaaatcacaaattttaaaatttgggacgaaaaaaccatgaagttttgacatgtcatttaaatctcaaagtttaatttgactttacaataaaatggttaagttgtgttgattgagtcattttaggcatgccgtttttttgttatttaaaagataacaaagttaattttctataacatctaacaaaaagtaacgacaatg

SEQ ID NO: 35259 - DNA, 3003 bp, Unknown; identical to SEQ ID NO: 28473
  misc_feature (1)..( 3003): 2750-1469P.txt file - cDNA_ID_3085725; gDNA_ID_2926272; Annot_ID_205174

SEQ ID NO: 35260 - DNA, 3003 bp, Unknown
  misc_feature (1)..( 3003): 2750-1469P.txt file - cDNA_ID_3085733; gDNA_ID_2926272; Annot_ID_143453
attgagttccaaaacatagaaattaacccatggtggttttacaatgcagctctgcgttcatgtctctagctgctcgattccctccaaaattaagcagcagccgagaagatgaaaggaatgttagaagcgtagttgttgaagatccagaaggatgcattctgaacttaaatgaaattccttcgtggcaggaaaaggttcaacatccatctgacatggaagtttctggggttgatagtggatcaaaagagcagctaagggactgttcaaactctggaattgaaagatttaatttcttagagaagagtattcaaaatttagaagaggaagtattatcatcacaagattcttttgatccggcgatatttcagtcgtgtgggagagttggatcctgttcatgttccaaatcagacgcagagtttcctacaaccaggtgtgaaacaaaaactgtcagtggaacatcacaatcagtgcaaactgggagcccaaacttgtctgatgaaatttgtcttcaagggaatgagagaccgcatctatatgaaggatctggtgatgttcagaaacaagaaactacaaatgtcgctcagaagaaacctgatcttgaaaaaacaatgaattggaaagactctgtctgttttggtcagccaagaaatgatactaattggcaaacaactccttccagcagctatgagcagtgtgcgactcgacagccacatgtactagacatagaggattttggaatgcaaggtgaaggccttggttattcttggatgtccatctcaccaagagttgacagagtaaagaacaaaaatgtaccacgcaggtttttcagacaaggtggaagtgttccaagagaattcacaggtcagatcataccatcaacgcctcatgaattaccaggaatgggattgtccggttcctcaagcgccgtccaagaacaccaggacgatacccaacataatcaacaagatgagatgaataaagcatcccatttacaaaaaacatttttggatctgctcaactcctctgaagaatgccttacaagacagtccagtaccaaacagaacatcacggatggctgtctaccgagagatagaactgctgaagacgtggttgatccgctcagtaacaattcaagcttacagaacatattggtcgaatcaaattccagcaataaagagcagacggcagttgaatacaaggagacaaatgccactattttacgagagatgaaagggacgcttgctgatgggaaaaagcctacaagccagtgggatagtctcagaaaagatgtggaggggaatgaagggagacaggaacgaaacaaaaacaatatggattccatagactatgaagcaataagacgtgctagtatcagcgagatttctgaggctatcaaggaaagagggatgaataacatgttggccgtacgaattaaggtaaatctactaatttcagttgagaccctcatcaaatctgtcagaaggcttgaacatcagtaaattatgtaaccatatttacaacattgcaggatttcctagaacggatagttaaagatcatggtggtatcgaccttgaatggttgagagaatctcctcctgataaagccaagtgggtaaatcacatttttagtgactgcaacactagcacgatcgatttactcaacaattacgtcaaactgagtattaacaagttgctcatgaacatttcacagggactatctcttgagcataagaggtctgggtttgaaaagtgttgaatgcgtgcgactcttaacactccacaatcttgctttccctgtgagtcagactattccattatctactaaaaacttagaataactccggctaactaagctggaacttgtattgatgatatgaaggttgacacgaatgttggaaggatagcagttaggatgggatgggtgcctctacaacccctacctgaatcacttcagttacacctcctggagctgtaagtttctttttgtttgtcatctaaacaacgaaatttttatgcaagtcataaccatgctgtgttttcacagatacccagtgctcgagtccatccaaaaatttctttggccaagactttgcaaactcgatcaacgaacactgtatgctcataaactctaacaaatcatctgtctgaaaaaccaatatttctttggtagaattctattgtcattactcattactaacagcgaaattaattaacgttctttttcttactcaggtatgaattacactaccaactgattacgtttggaaaggtattattgctctaagctttgaatttatcatatggtaatttcaagcattgtaggcacctgatcaattatgtgtctaaatcatgtgaattcatgtcaggtattttgcacaaagagtagaccaaattgtaatgcatgtccaatgagaggagagtgcagacactttgccagtgcttatgctaggtaagcaagctttcatgtacttatatgcaataattaaagataaaatttaggattatgggtaagtaacaaaaaattaggctcagtttcatggtagctagctggaaatagtattacaagaacaacataaagatcaaagacagaatcatggatccatatgcactatcattttagctcttgtaatccatacatgaacactatatgccaaagtagggatttcaaatatgagattcgatgactgatgccattgtaacagtgcaagacttgctttaccggcaccagaggagaggagcttaacaagtgcaactattccggtccctcccgagtcctatcctcctgtagccatcccgatgatagaactacctcttccgttggagaaatccctagcaagtggagcaccatcgaatagagaaaactgtgaaccaataattgaagagccggcctcgcccgggcaagagtgcactgaaataaccgagagtgatattgaagatgcttactacaatgaggaccctgacgagatcccaacaataaaactcaacattgaacagtttggaatg

SEQ ID NO: 35261 - DNA, 3003 bp, Unknown
  misc_feature (1)..( 3003): 2750-1469P.txt file - cDNA_ID_3085733; gDNA_ID_2926272; Annot_ID_205170
accatccaaaaggtcgaacttatataaaacaagttaataactaaacaatacatgtgatcacaatcaatgacagttttgatcttaaaatagaaatgattgagcaaacctcaaaaatgtcttcttaggatcacaaaatctttcctttagcttattaaagccgggagttcaactctctctcccttgtagactttttgttttcaaatctttttctttcaaaaaatcaataattagttaatgggcataatatttggttttaattaagtccatagattttttaggaccatctctaatcacgacaaatatcctaaattgtaacacatttaaaacttaaaagtattgcattcacaatccttaaaatatatatatatatatatatatatatatatatatatatatatgaaagttatatagaaacgataactccttactcaacaattagcccaaaaaaacatccataatgcatttaaactaggaattttaacaaactcaaataggttggtagttaaaaaaaaacaaatagtagatgtacatacgtacctttaaaaatatatactcatatcgaaagttttaaattttgcgaaattaaatacatttatctatcaattaaaatacatttaataatgcataattctgtaatatctatctttaatttccatatagaaccaaaacaaaataaacatatcaaatagttttaacttaacaaaaacgttagggaaaagttgacctaactagcttgattgacgttgaacttgtcaatgcgaaagcgatatttccaatatatactacatgtagtattatttatatggaagtttctaaaaaggtgttgagtggattgttacttgttggaggatgctattttttccttcttgccataatattttacgagtatgggataactacatactcatgattatgaaacgctcactttatttgaaaaacctcctaatacaccaaatatgtcactagattccaaaacgtagaccaattgtatctaatctcaaattctcaatcaaagtattaatttaccgatggtaagaaaagttaaccgatataattatcaaaagaaagaataagtcaacagattcttaatctctttattttggtatatgaacatttgtacaaaaatctcaaaagatatgtaactgtttaaaatataaattcactgagattaattcttcagactcgtgttagctataataatgtcaagagttcttcttgtttcaaggaaaaaccttaaagatatgtatattttctgtaattatgatgatataatttgctattcattgtcacaaacattactttaaaaaatcgtattttcattactacaatgttgactaagaacaaaaatacattgattattgatatatcgtcaactgaattttcttccgagggatataattctcaaacatagcaagaatctcataataatgtttcgtgactacctttagacgaaatttttttaagattcgtaacgtgacttatggtctcttgctgtgggggtcaatgcgaataaatctaaatgtatgggagtcaaataaaataccaagaaaaataaaggagcagcacccaataaactatatgggaccagaaatcctttcattggtttaaaataggattatcccgaaagatgaaggactaaattgaaactgattgggggtaggaagagatccgtcacaatcattaatggcttccacgcggaaacttgtcgtttatacaatttcattaactttcgggtcgggtttatattccaaatgggtcaaataatattagtttaatacactaacggagtaattaattggtgactacaattttatcagtttggtgcaattagaaacgaacatagtcgtaaaatacgagttcggtgttatacctttatttacgttaaaaaaatacgagaattttgtgtcaaatttcaaattaatttcatgaatatatggaaattattagatactctagcgaaaatagtgattatgagcgttttacaaaaatacgattttagcattgaacttcctttatgtaattcggtcaaatgttggcatgaagaagcaagtttgcaacattaaatttcatttaaaaatcgtgttgacatactttaaaatctaaatataggaagaagaccaaaacattaaatttagtaagattctaatgaacatttataagttataacttataaccaacaaaagttgggtttagcgttgttgctttatctgaaaacttgcaaactaaaccattttaataggactaatgacaattaacaacaaaatacacttaagcaacaacgtcctcgtgaatataatttgggcctcaggcccatattgctaacgccaactgatatttcactttattccttcttcatctcaccacactctctctctatctctatctctaacggcatagctgactcagtgttctccggcattgactcgcctgagaatcagaaagcttagatcggtgagcttttagctccattttctgtttatttacatattatttcctttttttctctctcccttttttatctggaatttgttctgctaaattttccagctgttacattttccgatcacgagaagaatcactgggtttttatgttaatcaatacatgttcctgttttctgatcataaatctcagctattaacacctgattttgattctgcgtaataaaaacctctgatttgcttttatcttcactttccccataaacattgcttactttattcgctcttcttttaccgtttccagctaaaaaattcttcgctattcaatgtgtttctcgttttgttgatgagaaaaatatctgacaaaaaatcatttattgcattttatggtgcagattcttagttaatgtcgccttctctaaccaagtcagattaaaaaggagtgttcgtccatgttgctttgttttggtgtttggagagagttttcggagagttaggtgagtgttatttggggtgaggtagtgataaggtttgaagggggagtgattcatcaagtgtgttatg

SEQ ID NO: 35262 - DNA, 3000 bp, Unknown; identical to SEQ ID NO: 28469
  misc_feature (1)..( 3000): 2750-1469P.txt file - cDNA_ID_3085741; gDNA_ID_2926272; Annot_ID_205168

SEQ ID NO: 35263 - DNA, 3003 bp, Unknown
  misc_feature (1)..( 3003): 2750-1469P.txt file - cDNA_ID_3085753; gDNA_ID_2926272; Annot_ID_143445
caggtctgcttttcgtacttgcgtggccaatcttcaggtattgctttctctctatgtttgtaaatctctctgtaccttttaaacatgtatagcattctgatttctttttactcatctttaagtttagcggatcgaccgaggctcgatactttgctgcttttgttccgttagtgaatggcttaaggcttgttattaacggactatccatttccccaaattcgatgctaatcaaatccgtcacaagagaagggagagcagagtaagttgtctagtttttttttccaactttgatatgatttttcaacaatctgattacacatttcttgttttccaaccatcacagagagttgcttaaaggtcctttgttctacgttctagctcttcttttctctgcggttttcttctggagagagtctcctatcggtatgatctcgttagcaatgatgtgtggtggcgatggtaaattttctgtcaagtactactgtataactattactacaatttacaaaatgcgcataaatgtactaactaagtgctgcatcaatatgtctatgtaggaatagctgatataatgggacgtaagtttgggtcaactaagataccttacaacccaagaaagagttgggcaggaagcatctccatgttcatcttcggcttcttcatctccatcgcgtaaaaatattaccaatcccactattaatcatcaaaatgtctccttcttgacgacgaacaagtcttaagaactgagatgagtttgctactaaacctaaccgttttcttttgtaattttgcagattactttactattactcaagccttgggtaccttcacatgaactgggaaacgaccttgcagagagtagcaatggtctcaatggtcgccacggtagtcgagtcgctacccatcaccgatcaattagacgacaatatttcggttcctctggctactattttagctgcttatttaagtttcggatattagattaatccctcataaaccgaatgtgtatatacgtatttttttaatgaatccgaccttacaaatgtttccacgattacggtactagttgcatagattttacctccgagtctctgacctctgccatttacataatgattcaaatattcatagctaatcttgtttcgggttagtatactatacttagtagtagtgttcgatacatagaaagcaaaatggaacaccaaaaagattataggacatttagtatgatgttttgaaaacatagtgttagctagaaactatatgggtgatgtgaatttcctagaaaatatataggtatagttaaactatagtgctatcaatgtaatgtattcaaatcaagaaaaagatacctaacaacaactattatgactttgagattcacgagaggttagcattgaagcattgttgacaatttacgatattttgtaaatgttttcactaaaaaaaacatttaagaaatactttttctctttttttttttttcttttttttttcatttaagaaatactacattacaaatgttaggaaacttcgtcgaaaactcaaaatattctctattgtgcatgacatctaaaatgggcaactctgtatttgtgtccaaatcaatgaacccagtctatgagaaagaaaatctgtcttttgaactattttgttgttacctaacaattgatttgaattcgtgatggaatccaggattcaagtttcttccgaaaattgatcaatattgggtgcatctgatttcaattattaagtcatgaagacagtaaaaagcaaagatattttacgaaaagatgaattcaataatttcaaaattcaaaaagtttgtgtttccatgttggaacataattactattaagggaatcccccttaatatagtatctgagtcattcacagatacacaattatatccgattgacatattgccatttcggtaaatacgattctaacatctagagagaaaactacatctgtaaagaaaccatttagggggtatgtaggagcctagcagatttaataaaacagtttttattttatttttttgggtaatctttactattgtagtgtgaattgttacttgaaaagttttgaagacttttattctgtaaacgctctaattgataagaatttttcatatttttgtattctaattgcaatttttggatttcttgctatatatactcgtgatcaaatttagaaatggaaatattaactatgaaagaaaagaaagacgatagtgtatatagacttacaccaacaatgttaactccttttcacatggcactataattttactgtgaatatgaaaagtttcttgacaaaaataaaacaaaatgatataaatagatcatcaacatctaccattctatttttagatcggatacaaaaacagatcacacgacctatatattctatgcccaactttaatttgaatcttttgaacaaaaaaaccttaatttgaagacttagaaaacgtacgtcccctaaattaaatgcgtatttgatagtatccaatgtacttattaatttgtagtacttacttttttttgtagttcgcatgtatccaaaaaattgcggtgaaggacatatagaattaaaccggacaaatactgacgtaatccgaagcggccggttctggtttacacgcgtggagcggtaggtttaaacgtgtcactcaaaaagcaattcaaaaggggtactttagtaaaatagacaaacatgccaagtaacgtttccgcttctctgcattaaacactcgtcacctttataattcctctgcaacgcagcgagaatgagatctctctctctaaccttaaatggaaacaatcgatataaattaagtagagaatacaaaatattttgtaattaaggaatttaattagtaaatttttgaattcgtaattaacaaaaaaaaaaaaattaggaaaagaataaattttgtacggcgataattacacggtttcgccgccgagaggaggaagaaaaattcgttttctgatgatg

SEQ ID NO: 35264 - DNA, 3003 bp, Unknown; identical to SEQ ID NO: 35263
  misc_feature (1)..( 3003): 2750-1469P.txt file - cDNA_ID_3085753; gDNA_ID_2926272; Annot_ID_205164

SEQ ID NO: 35265 - DNA, 3000 bp, Unknown; identical to SEQ ID NO: 28468
  misc_feature (1)..( 3000): 2750-1469P.txt file - cDNA_ID_3085757; gDNA_ID_2926272; Annot_ID_205162

SEQ ID NO: 35266 - DNA, 3003 bp, Unknown; identical to SEQ ID NO: 28467
  misc_feature (1)..( 3003): 2750-1469P.txt file - cDNA_ID_3085761; gDNA_ID_2926272; Annot_ID_205160

SEQ ID NO: 35267 - DNA, 3003 bp, Unknown; identical to SEQ ID NO: 28466
  misc_feature (1)..( 3003): 2750-1469P.txt file - cDNA_ID_3085766; gDNA_ID_2926272; Annot_ID_205158

SEQ ID NO: 35268 - DNA, 3000 bp, Unknown
  misc_feature (1)..( 3000): 2750-1469P.txt file - cDNA_ID_3085770; gDNA_ID_2926272; Annot_ID_143437
ccctatatataacaggtgaacaaagtttctgagtattagatatgactcagattgcagtagtttatgcgtatggaatatctagttccttttaagttctagaatatggcattgcttttatgtttttttccaaggaatactgatttcagttgtactgctgtcactaaccctcaagacatttctttctttgcaaaaaggtcattcattgaggaatctaaagctggtattaagatatcccctctggataataccttttatgggttgagcgataggttagtgacattatctgggaccttcgaggagcagatgcgggcaatcgatttgattttggctaagcttactgaggacgatcattactcccagaatgtgcattccccatattcatatgcaggtatatcaactcagtacttgcttagttaggtttgttatcctccttgaagcttcttttgttatcgtgttctgtatgtctttgattgcatttattcatgttggaaagcaatatagtaaatggttagatcatttccggagtttcctttgacaattgaattgacactatcaaattatttgttttaagactgtttagtcactacacatggacaggcgtagataggctagaaatcacagtacaaggtttttgatttcttgttttagggtcatgtgaacaatctaagtgtcaagtgtagatgctggatcatatcccttgataaaaatgtaagattagagtaggattttctactgagttttagattgtcagatgtcaactaaggtatagtaatggcatttagtatctttcatctcacatggaccttctttccattttgagggttgtgtatgatggttgtctgttgtagcttaattctcttgtaagttcctttaaactcggcattttaggtcttttctactctggttttcatggtcctccatatgcgtatgcgcttccttctgttgcaacagcgggatacaattcggttaactacgcacccaacggttctggaggcaagtatcaaaaccacaaggttagcctcttctcacaatcttccaccctattagtatttatgcgtttatatgaatcaatctctatttgtgttactactatggataatatggtgttacaagtcatatcttccaccctatttatgtaaacgcatatatacatgaaaaatccctatcgatgttattactatgattgtttggatcaattcgtactacagaaactttaggagataccaatgtgaaatctacatctgatatttgttaggaattaggcttattaaaaggattggtgatgcttttaatgaaccaaactacgaaaataaatttgatcggagatgcaattcctgtcacgtcttactgtgataataagatggcattttggtatttaaacagctagagattcgtttttttctacattacttaagctgtgttttgacatatattccaggaagaagctagtaccacggtgacaattggtgttgcggatgagcatataggattggtgcttggacgtggaggaagaaacatcatggaaatcactcaggtatttggcaacccttagttaaaactctttcggtccactgaaacttaaaacccacttttcttcccgcagatgactggtgcccgaattaaaatatcagaccgaggtgattttatgtctggaaccactgataggtaaagttacgattattggagagttacaacagaacaatgtgtttgatacctctcatgtctaacttgatataaatggaaaatatggacaggaaagtgagtatcacagggccacagagagcaatccaacaagctgagacaatgataaaacagaaagttgattcagccacagagagaaccaccgattgaaaccgttaagagaatccatctcggttcctatctttggtctgttgacttcatttgtggaggcttaagctatcggatggggatcattaatcatctttgagtgaggcagagatttctctctaggagctctctttcgttttatttatatgtcgacattatataatgtgtttttctctgggagagaagcagatttggagttagagaagtactattttcatttgttcttttaataactttgttgcaatttgttgaagttttgtttcccttgagttctttctgttgtaacaatttacaataaccagccattacattgcatttgcttctttcttttatcaactattttcagttcatgataccaaaacgtgttgtgtcggtataggacttaggaggatggtaaatactaagctcttcaaaaatcaactccgtaaaagttttatcttctgctgtttacacatcagacccttacttttctctatttacataattcagatcttgtaaattttctcccagactcttcagtaaatatcaagttatggatcctgaaacttttatttaactacaagtgctcggatcttttactatttacaagtaagacttgtatcttctgataattatatatatgacgaggaacagttttctattttctgaagtacccctaatatttgggtactaaacacagaagcacccatatcctttgctagtgtacgtaattgacccaaactttttaattagtatatacacttggagatacgatctcgcttctcacaatccttctccctctccggctccgaaccattcacgttctccggcagctctggtcatcgccgccatttcggtttctaactttatgttggtgtttctccttccctttatttctcagttatcacttaattagctttcgtgaaatcactttcaaatttagtgttcagatctctgtatgattgcaatgtccccaactttaatttcgtgatcgtctccgagaaagactaggatctcattgttggaaaatgaaggatcgtgataagctcaattctggattttagaagtcgtttctacttgattatggagtttattgtatccaattgttagatcgaaactcttttgttctcaaaaatggcagagtgaagctgtgacgtggtctctctggtaatg

SEQ ID NO: 35269 - DNA, 3000 bp, Unknown; identical to SEQ ID NO: 35268
  misc_feature (1)..( 3000): 2750-1469P.txt file - cDNA_ID_3085770; gDNA_ID_2926272; Annot_ID_205155

SEQ ID NO: 35270 - DNA, 3003 bp, Unknown
  misc_feature (1)..( 3003): 2750-1469P.txt file - cDNA_ID_3085809; gDNA_ID_2926273; Annot_ID_205218
attaggcatgaaatttgaagattaaaagagaatcacctaaaggaatctagtttttcagttgccaagcattagaaaaaagtggtgaggactccagaaattgtagttacgataagctatgttatcggggaaggagctagttgatgtgatcctttggatttaggctcagctagacgtttagataatagcttggcatcgagtggttcagacgcaacattatctttcgtcttcttccttttgaccaacattagacaccgtttgaaacaatgaaaaaggcggggtactttgaagtccaaacagtctaaaatgagtgtcgtcttaccaaactaaaaacgacaggctgtgttgataacgtgggctctcttgggctttgaatataagttaatgggcttatatgaaacctgtattttctattttgaaaagaaagttataaaggacggtgtggaccagaagacactcttcgttttctctccacgtgggatatcacaggttcaagttccaacggtccatttttttgggtgcaaaattccaatggtccattaatccacgcatttaatcttacgacgttgtttagcataattaattaatttgaaatttagaacaaataaaaacgcaagagaacacaaaccacaaaatggaaactagtcaattagaagatctcaatatttcgacactactacaaactaacacaccaaaacaaaacaataacaatcatccaattctaaattaactaataagattaaacgtaaaccgtaacactctaattcccagtttttaacaaacagcatcacaaagaaataaaaactcgtcgaaggaagacaatggcagtcttcgtaattaaggttttgtttataacaagagagatgtggcggcaatagtgaccaatgcggtgaacaacgcaggagcgttaacgtgaaacgccgcgtttttcgcattactgttctctgaacttgtcggcgagtctgacggagctccttccggtgaagattcatccaccggtggtgctggcggagaagctgcggttggagaaggtgcttccacaggagacggtgacttagccggggtcggtgtcggtgcactcactggctccggtgccggcgccggcgatgaagattttccgaaaagctcagcgggaaggagcacattatccacagtgaatataacaacaggtgtctcatcgaccaccgtgtcggcgagtctcgacggaccaacgccggtatggagaataacctcgtcaccggaagttgacgtcgttaaatcgtatttaccggcgccgttagtggctaaagtggagatagcgtctttgttagtctttaacgatcctttgggtttgtattcagcgagggcgtgatactctaggagcgagaccacctcagcttgtgtgagattcgtcagatctggtacacctctagctttaaaagcttcatcggacggtgcaaaaaccgtcaagcctttttcaacggtggattcgaatgttttaataacaccgctcgatacgagcaaattcgcgaaggttttgcaaccggctttctcgagaagtccggtgatgttgctaactccggcggaagaaggagcaggtgcggttaagattccgggagcgatgatcggagcgttgatttcgagaacggagatgttgtaagggatttgtttaacggatttggtgtaagaggaatcgagcttggagccaggagcggcggagccaaagccgactttgcctcctttgagatcggtgacgttaacgaatcctaggttcccgagagcgtgtccggtggtttggtaaagcgtggtggtgagagttgtgcctttagagagctgatggagttttaaaggatcgtagtagtcgaggaggacgaggaggctgagagcatttttgacgacggagagtgggtgttttccggcgagggaagacattgcgccattgttgagaacaaggacggtgattgtagtgcggctgttgatttcgtcggcgagttttgtttgagaaaggtagttgttgaatgaggaatattccggcgtatcagagaggatttgagtaatgttatggccggagacggtagaagctacggtgaggagagataatgtgaaagcgaagagagtgaaagctcgtgatgtcgccattggaatttggaaggttgagttgaactgtggagaagagaaagtgagaagacaaagagagtgatgaagttaataagaagaagaagaggttaaatgttaaccatggttatattgaagagttaactatggttaatttgagaacacgtgctgcttccttttgctaaaaagcctgtaatcacgaaaatgggtgggctttgagcttctttctttatggttcgtcctcttccaaaagcaaccgaaccgaaccgttatatcattatcaatttatcatccttgttagagttaaccatggtcaagtagctaactaaaatttgagcttatttatggatgctcattagataatcatccaaaattttgtaaaaggcactcagataaaaaggatttagatatttttacttgacaactagtaatatcgttagtacttagtagactcataaataagtgtcgttatcagttttaaatacttggtcaatagttggtaacatcttttagaaatggaaagaaggttctaattgcccgacacagcactgataaagaaattattattttttataaaaacgacaaatcaaaatacgtagtttactactgtcatgtaaaaatctgcaaaagttttatcatttgattagaaaaaaataaaataaaccttcacaaatcagtaaactattactccgtattaattaatgggcggagatgaggctttaattccttactttgagcccaattatgaggctaataacaatgtgtgagcacgtgtcactcttcagcttcacatgattatgtattgggcctgtaataagcccaaacttcgtaagctggtcaaaaacaacgacgaagagaaaaagctccgccgcagaatctgagatcggatctttagagagagagagaaagatg

SEQ ID NO: 35271 - DNA, 3000 bp, Unknown
  misc_feature (1)..( 3000): 2750-1469P.txt file - cDNA_ID_3085813; gDNA_ID_2926273; Annot_ID_143489
ggcaaagtcggctttggctccgccgctcctggctccaagctcgattcctcttacaccaaatccgttaaacaaatcccttacaacatctccgttctcgaaatcaacgctccgatcatcgctcccggaatcttaaccgcacctgctccttcttccgccggagttagcaacatcaccggacttctcgagaaagccggttgcaaaaccttcgcgaatttgctcgtatcgagcggtgttattaaaacattcgaatccaccgttgaaaaaggcttgacggtttttgcaccgtccgatgaagcttttaaagctagaggtgtaccagatctgacgaatctcacacaagctgaggtggtctcgctcctagagtatcacgccctcgctgaatacaaacccaaaggatcgttaaagactaacaaagacgctatctccactttagccactaacggcgccggtaaatacgatttaacgacgtcaacttccggtgacgaggttattctccataccggcgttggtccgtcgagactcgccgacacggtggtcgatgagacacctgttgttatattcactgtggataatgtgctccttcccgctgagcttttcggaaaatcttcatcgccggcgccggcaccggagccagtgagtgcaccgacaccgaccccggctaagtcaccgtctcctgtggaagcaccttctccaaccgcagcttctccgccagcaccaccggtggatgaatcttcaccggaaggagctccgtcagactcgccgacaagttcagagaacagtaatgcgaaaaacgcggcgtttcacgttaacgctcctgcgttgttcaccgcattggtcactattgccgccacatctctcttgttataaacaaaaccttaattacgaagactgccattgtcttccttcgacgagtttttatttctttgtgatgctgtttgttaaaaactgggaattagagtgttacggtttacgtttaatcttattagttaatttagaattggatgattgttattgttttgttttggtgtgttagtttgtagtagtgtcgaaatattgagatcttctaattgactagtttccattttgtggtttgtgttctcttgcgtttttatttgttctaaatttcaaattaattaattatgctaaacaacgtcgtaagattaaatgcgtggattaatggaccattggaattttgcacccaaaaaaatggaccgttggaacttgaacctgtgatatcccacgtggagagaaaacgaagagtgtcttctggtccacaccgtcctttataactttcttttcaaaatagaaaatacaggtttcatataagcccattaacttatattcaaagcccaagagagcccacgttatcaacacagcctgtcgtttttagtttggtaagacgacactcattttagactgtttggacttcaaagtaccccgcctttttcattgtttcaaacggtgtctaatgttggtcaaaaggaagaagacgaaagataatgttgcgtctgaaccactcgatgccaagctattatctaaacgtctagctgagcctaaatccaaaggatcacatcaactagctccttccccgataacatagcttatcgtaactacaatttctggagtcctcaccacttttttctaatgcttggcaactgaaaaactagattcctttaggtgattctcttttaatcttcaaatttcatgcctaatctgtgaaactaggaattgctgataatgtttttgtggttgacaatgtaagtataatgcttaaagatttgaatatttacatatcatagatagagacgcattatgcatgggagtgctactctagttagagattcacatatggtaccatcttgcagtaatgaaggggcgtggtgattttgatatggaccacttgtatgcatcaaaacaaaactcatcattgtagcaactccagaaattacccacgaaatcgtttgctatttatgattccttcttctgtgttttttatgccttagcttgtatgagatgaagaataactttcatctttttgtttgtggtggacaatgcctagtctaaaaatagtaaataatataggtagagaatcataacagctttgatcattttgaagcatgataataattccggatgttgactagctcctacaatttgcaatttagtctttattagtataagttttcttcccccttctttatttcttttcttgtttgtctttcaaatttggttgcatctcaaaaaaaaatatcaacacaagaaatgagtaagagttttatagtggtcctagtccttagatcaattatatttattttttactattcatatcacatgcttagatttcattttacataggaacaagatatatgtctctttggaaccaaggttttttccttaaaattagaccccaattatgagggaaacctggtttgaacacgagatgccaaaccgcgaatccaagacttcgacctttgaaatgggtttggtattaaggtaaaggagttttcttttgagcctcttttgaaaataaaaggtgcttatggattaactttttaaaatcaaattgtagtacatgcatagttggtccaaatttcatgtgatctttctctgtagttgattacaactaaagtaatcaattagtatgaaattgaatgatttggtatggtcgatttacgtatgtacctctcaagtgttttctactaagtttgcactattagtacagtaactattcaatcaagaacaagaaacagagagtctgagaaagagaagagtctgttttggtcttcttcttcatcatcttcgtcctgaactcatgcatatctctggcccctctataatcatgagtttccttttgccatcattaccttcaaaagccttgtctttcttcatcactctctatctcaaaagaaacaactacagctttatagatcgtctatataaagcttactcttccattgtgtttactcagttcgttttgtgtgataaaaccacaagaagatg

SEQ ID NO: 35272 - DNA, 3000 bp, Unknown; identical to SEQ ID NO: 35271
  misc_feature (1)..( 3000): 2750-1469P.txt file - cDNA_ID_3085813; gDNA_ID_2926273; Annot_ID_205216

SEQ ID NO: 35273 - DNA, 3003 bp, Unknown
  misc_feature (1)..( 3003): 2750-1469P.txt file - cDNA_ID_3085821; gDNA_ID_2926273; Annot_ID_143486
aatttcttctggaaagagaaattaaaacaaaactaaaatatgtggagagagacaaataaaataatacccctgggacttatcagtattgtcagagcaaagcctgagcttcttaataattgaaaataaaattaattaaaacaaaacacataaaaatttctgaaaaatctctctctctctctcttcatcgtcgccgtcgtcttctccgtctcctcctctctgtctcgctgctacttcttcttcatcttcctgatgaatactcacaaaaccgaagaaggtctgttccaccatcatgatcttgatccgacggctgacatactcgttcaatcaccaccctccattctccaccaccaccacgaccacaattccgaagtcgatcccgcgttttctctcccggaattcatactcttccgctcttctccttccggagattctcccggtctctcctcagacgagcaagacgattcccttaccggaaacccccaaattgctgattcgtcaaattctagggtttcgagtgcaggaagagatgggcttttcatcagccccgatcctcatatctcatctcagttctacacattcaacgcagcttctcactctctcatgtgtcgctgtctccgcgagggccgtctcgctactccggcggagatccgtatcgctacaccgaggtctgtcctcaagtcatggcgcgccgtttggaaggatcgtaacgaggaaacggcttacctcaccgcctggaaacggatccaggataagctcacctctcgcctcgacccagccaccggtaacgaatttctctgcttcaagaataattctcagcaattcgtctctcacattaaccagtggcaagatatagtcatggggtttcacgctgatggtgatttgaaacacttaggccagaaagagactattgataggattaagcaagtttggactgttggtgctaagctctatggaattcccgagagctttattagggtttgtgtagcggcgtgtcctgtttgcaatgccgactctggttctgcttcgaggaacaaacgccgtcgatttgagtatacggagtctcttgatgtgcctgccaaggaagttcccgataggttgcagcaactggctgctaagcacaaggttgtgctctgtataaggcagaagtatattaggtataagccgtttatggcagaggtgaaggattatgcttgtcacagagctggagagcctgtatcaattaagaagtctaggattttgaagagggagccttatcagtcaaagagatgcggttgtggttttaggattagagctattgttcccattgctaactacagtgaaaagaccaaaacttttgtatatcaggaagaagggacagctgtttttaagctatacgctgtccattcagggcatgagccgggggctatggatggaaatgcgagaatcatgcatcgggttgttggtcataagggttttttgatggatcaagagactgtctacggagtgcgggacgaagacgtggaaaccgaagggatgggattgactgggaaggatgaacgtgccgagatgcagtttactgtcttgcatcaggtgcaggaactaaggagcgaacttggcactctagaaggaaagattgggaatttttcacaagagatgttgggttcagtgtccacagagttgtttgagatgctcaacaagatcagaaatatcggcgttgagagtgcccaggatacaacgggcttggttgcagagaaatcacactcagatgaaatacttgttggagataacgatctagtacattggagtgaccatcaccacgagcatttatatggagatgggaaggatgcagaacttattgaagacgatgaggacagttttgagaggagccttgatgatgttgttccttgggaacagataacgccaccgtcagattgtacaaatcaaaaggaggatcttttgtctgagacatgtaagcctgagaaatggttaaagtgcaatgactttgatgagaatagcattctgaatagcgaagattctaaattaacaaaaccgatgagccacgatggaggtagtatagaaacagatgtaggtttagctggtatacaagtcgatagcttctatcaagaaaactcgaaatggtatgactctccttgtggtttggattcaaacacggacggtgaagacactggattcagcagacatggggagattttgtagaaacatggtaaggttcttcgatataaccaatttctaactttctatctcacacatctcgttatgcatacccttccccaactcataaatgggaaccagattgtatattttatgtgttctattacaaggtttcagggattttttttgtttggctgtgtttcttgtaggtgttgtttccttcttgtgttatgtaaattcaaactcagattgtttctatgcatatatctaagatcggaaagctttcaaggtgtctcactttttgattattgccaagtgatcatctcttggtttttaagactccattagcaaatttgtccaaatatttctaatttttaatcaagactcaataaactttatgaatttttgaattgtaaatatacaaatacgtatgatcttggaaataaaagtaactccagaccgggaacaggctacgaatttcccggcgatcaacagctcagaaacgtagtgatgtgaaatgtcgcaattggtgtttgaatttccttcaattacacaaagttgctgtggaagtccagtgtcaactgaagggtatttcggtcatataatagtgaattttcatttcgatggcagaaaaatcaaactgcgacgacgcgatctgaagtatcgtctcatctacctctttgctctgtaccctgcaatttccttttgcagcggcttgagtcagactcgttgacccaactcggatcggactcagagctccgaggcaattcacgggaagagactgtttcgttcccgttggtctatttgttctagatctgtgagtcgctgagctcgccgtgaaaattgggaatg

SEQ ID NO: 35274 - DNA, 3003 bp, Unknown; identical to SEQ ID NO: 35273
  misc_feature (1)..( 3003): 2750-1469P.txt file - cDNA_ID_3085821; gDNA_ID_2926273; Annot_ID_205213

SEQ ID NO: 35275 - DNA, 3003 bp, Unknown
  misc_feature (1)..( 3003): 2750-1469P.txt file - cDNA_ID_3085825; gDNA_ID_2926273; Annot_ID_205212
gagcataacatttctggagtttgtgcacatcatattatgtaaagaataagctgttcctaataatggtttaccagattctatagcttcaactgaaaagttttctgatttaagaacttcggtggccatgtgcatcttccttgatatttcctcaagctcaagcctcttcctcagtatcacctctttgatcttagttattttgatcttgctaagcctaatgacttcatcctcaacctgtaaaacaaactcacattataaaaaagattgttcctatactattataaacggatagactaaacaatacagggagaaaacacagaaaggtttggtcctgtgcactcacgcgtttaatggaagcaacagaaagtatgttggcctcagttatttcagactcagtcaaagcgatgctacatgtgacattgtgaaatatcttttgctcttccgcaggcgtgtccagcagattccagagctccaacaaggacactgcaagatcttgaacctagaaaaacaaagtgatgagagtcagaaaccataatcacgcagaaaaacttgcactacattacaaagaagagctcagacttgtaaccttctgcattcgctgtaacttggcctctcgtaaattcacaatcatcatatccaacttatcaagagtacttctgctcacatccctagtgttggaatcaaccagagatgaatgtatccctcttatcatgcctttgaaatcttcaccaagaaccgagcacaacgagttaagcgttttcagcaaacactctacctcttccaatcttttgctctacattttgaaaagaattcaaagttaacataaggaaaacaggtgcacatgctcttgtaatataagtcccatatcatgagatctaacagcaaaaccaaccttttcattttggagctcacccaactggctacgcaattcctccaacctctgaagcgaaagatcggtctcttcagcagcaaacttcttcagataatctgttggatttccaagttgcagtgacaacttcagtaactgatcgataacttcattaaaccgaatcattctctcagctttccttttgcgcagtccatccaattgcacattaacattctcaagctcctctttcaagttttctcctaacctgctgttagactgtaagaagaaaatgcaccattacttgccataactccagcagacaaaaaccaaatatatcaaaactgaagtcttgaatacacttacatgaatctcttgtccacccatagaagagccaatagctgcaatttctgctctgccaacagcgatttctttcagcaaattcgctttaccccgactagcctcctcgacctttcgcttataaaccgagagacactccttctcgatatcagccaaagaagcatctttttcatcctcagtctctcccatttcattccatatttcctgatatcatcaaaattggtaaattcccaattttgaacataaacaaagaaaacgaggatgtgaatcttcttcaagaaaagacctgcaattggcgaagtaacaatccacatgtagtctcgattctcgaaaactgctctgttgaattccgtatcatggtgattaaaacctatagacaaaaattcccaattatcaacatcacagctgaattgtttcgtgactccgattctcgattacacaaataccaaattattcggaaacagatacagaattttctctgttttctccgcagagttaaattacaaaatcgcgatgactcatgaaaagttcaagaagatttttaacatctacaagagaaaagagcgagaaattagaaactacctggtttgaggatcagcgccaagaagaagatgttgtgaagaattgatcaaagagagagagagagcaaaattagggtttataagtgttgtgagtataacggatgtgaaattgaaatttgaacaaggagcgggaggagggtccgttacgatccgagtctcacgatttattttgacgtggaatcatctgagccgttgtattaaattcctctttccgttttttgcttttctcctttttatttgacggaccagatttagtaagcaataaagccttgaatttcgaaatggatttttttgaaatataattggctccataatgatatcttaaataaaataaaaatgtaggccagttaaacaactaaaatatattttcaaaaagcacataaattatcaaaatcttttcatagtaaaaaaaaaaaaaaaatggataatgactgcattgacatctctattactttgacattgatatactctttgactttgaactgatccatgcatatgataagagaatgtaaagaataaacgcaaaataactatttttgcaactatagaatgagactctaatattttgtttagaacttttatttcgtcaacaaaatgttacagtaactacattgcttttaaagttaaaacatgcgttatctgtaatcataaaagtatgatacatcgttcaaataaacttaaattttgtgtaaaaagttttaaaaacctttcaaacattatgtaaaaaacagaagtggacatagtatatagtctatagttcaatcacaaaactaatataaatttaacattggttttggtcgtctatagtctatacatatggacaatggtcatattggttaacgtaagtaaaatcattagtaatcaccacatctattgtaatcgtacaaaccaaattgttaatgatgattggggaagtggataaaggacgacgaaccaaaggcttgtctgaatttcttctggaaagagaaattaaaacaaaactaaaatatgtggagagagacaaataaaataatacccctgggacttatcagtattgtcagagcaaagcctgagcttcttaataattgaaaataaaattaattaaaacaaaacacataaaaatttctgaaaaatctctctctctctctcttcatcgtcgccgtcgtcttctccgtctcctcctctctgtctcgctgctacttcttcttcatcttcctgatg

SEQ ID NO: 35276 - DNA, 3003 bp, Unknown; identical to SEQ ID NO: 28477
  misc_feature (1)..( 3003): 2750-1469P.txt file - cDNA_ID_3085833; gDNA_ID_2926273; Annot_ID_205210

SEQ ID NO: 35277 - DNA, 3003 bp, Unknown
  misc_feature (1)..( 3003): 2750-1469P.txt file - cDNA_ID_3085837; gDNA_ID_2926273; Annot_ID_143481
ccagtatctcttatccattccaaatacctaaacacgatgaatccccaaaaaagaaagccatagcagtgagggagaagagaaagcaacttaaaaactttgaagtgctacattcagatggaagaagaaactaagccaatgactttaactagctaacctgttcaaagtttttctttttaccgaggtcataccgccattttgtagtggttttcttctcatatgcctgttacaactcaacaccaagaaagtttcatgagaaagagtaaagagtctaaagacctaaattctcatttgagcaaaggaaagctcaaagcagcaatgggatgcacctcaaagtgtaaggagttgaaagatccaaaaatctcatttaagcaaaagttcaaagccttagccatgagatgcaccaaaactctaaagatccaaattctcgtttatgaaaaaggagcttctagctttggccacgggaaactttataggttcaagtcaaaagaaaaaggaaaaggaattacctctatagttgtggtattgccagctaccaaggaaatatgcataattaagaaacccatcacgctcaacgcaaatgccaagttcaaaactgttgtacgatgaaacaaggtgagaatgattaataaatgaaaccaagttacacactacataccatatatagtataaggaagtaggaacataccaaatgcaagaaaagtagtagcaagagtgcctggggttccaggtatttcttcatcactaaagaatgcaatgaagtgcggcataagaaccaaagtcacaagggtcgtctctaaaaatgtgtagaactgcatatgaacataagaaaaacacacacaagttatgacaagaggaccagattacaagctgaagaagattctataacattagtagtggtagaaaacaaacttaccaagaaaagaagaaaatacttatagttcagtgctcctacacagttaacaacccaaacacaatggtgatccatcttcaacacacaccgaccacctatattggaatcaacctcacaacaattcagtttcaagactcttaagtatacatggtaagaaaagaaaagagaaactgaggaagcttacaaacagaacaatgatgacaacgagaaggttttagttgattgcacttccgacaaaaccgaactcttgggtttgaagaagaagaatcggattgtaaaccaacaaagtccaaactatttaacggatcagattcacctctttcttcatcagtagatggtctccaattaggaggcacaacaccaggatcagtaaaaaccactgagaaatagctccacaaaagcattgccagctgcaccaagataaaaacacatccttgtctaaattcacaaaacttcaatctaaaacagaacaagacttcacatctaaagcaataaaaaaggaccaaactttattgacagaattgagtaaagcacaaagctttagtattttgaattggggaagatgattgacttacgaggaaatggaagaggattaagatagtgagagcagcaagagaatcaaggccaccttgagagagtgcaggaccataattagtcaaaacgacagcgtaataagtaacaccgacaacaccaagaaccaaaaggatcatgatcgatccaagacctcgtaaggcagtacagaacttgaatacgttccacgccattgttgtaccagatctatgcatagtcaaaagcaacgatcgaaagaaaacctttctggatcttccttccggagtaaaaggaaagacgcgtagtcaaggccaaggaagaaatgaaataagtgtttctggggagatttcgaagaggtcttagggtttctttaaatctggaaacaaaatcaaaacaaggggtttaaggaataataatatgagagtgctaaattgtaagatgcagagaccccatgaaggaggaatgatgcggagcttgaggaatgagactttttctccttcttggattcgttttcctcttttggagctaacaagaaatttcagacgaaacacttttaactttagatttgtaatttaatgacttttagtcaatcaatctttcagaagcccaaactcaaactgtgtaaataatatgtattttttactactagcgtcagaaaatgttacatttcggtaatttccccggttgattcaaagcaacccaagcatcttgcggtgaacatactttacatcttgaaaattccaaatttttgttttaaccttggttttggaagattataatataatcggaaaaattaattgagaaattgattcataagcatttttatgcttcgtgtggataaattagaatctcataataccaattacaacaaaatgatggtgaacatatacaatgaatttgatataaaaaaaattttcgtttcatggtcgaacggtgaatagtcgaagatgatgaattttttattaatcttaaaatcataataaataataaagtaatgtaaatttaaattaaggtttaaaatgttagcaaaattatattagtggtttataatgttagtggaattctttagaggtttaaaatgttaccaactgacattttgaaggttttttttttgtaaccctggtatgatgattttatttctcaaaggacttgacacttgactagtgaaggaaaaaacaaaaatgaaaaaaaataataacaaatcgcccaccgtggggctcgaacccacgaccacaaggttaagagccttgcgctctaccaactgagctagacgggcttcttgaaaatatttctacattacgctattaattaacttggtgtacctattaacaacattttacagctatcataaaaaaaaaaaaatcctatcatatcagtttggtagttatatgtgggttttctgttattgggctcctgaacgaacgagtaaaactccaatgggccaataatagattgatagtagtaagccctgtaagaagtaacaaacttcttcttcttcttctcttactccaaagagtaaagagaaatccgagctagtgaagatg

SEQ ID NO: 35278 - DNA, 3003 bp, Unknown; identical to SEQ ID NO: 35277
  misc_feature (1)..( 3003): 2750-1469P.txt file - cDNA_ID_3085837; gDNA_ID_2926273; Annot_ID_205208

SEQ ID NO: 35279 - DNA, 3003 bp, Unknown; identical to SEQ ID NO: 28476
  misc_feature (1)..( 3003): 2750-1469P.txt file - cDNA_ID_3085853; gDNA_ID_2926273; Annot_ID_205202

SEQ ID NO: 35280 - DNA, 3000 bp, Unknown
  misc_feature (1)..( 3000): 2750-1469P.txt file - cDNA_ID_3085877; gDNA_ID_2926273; Annot_ID_143467
ccactaacaatattctaaattatatctcgaagatcaagataattgtacaaaatctttaaaaatatatcaaacaagtttgatttttttatttttattttgtcatattcaagagttgccgcataagctaaatagagagtccatgtatttgtgtgttaggtgagtggtatagtcaaagaaagtacaaatgggagaacaacacatttgaaaaaaaaagatttgatcgacaatcctgaacaagcctcacggtcgaaaacgccataagactatcaaaggtatctaaaagatttaatagtatcaagtaactttcaaaatttgcgttgtcagcttaataaagaccagtatcagtggtttgtgttcaaaaccgatgagaataaccagactatgttcgaactgttaccattaaatttatcaaatattaatgtctagatgtttttttgtacaaactactgacaatttaaacttcaatgatatttattatcacttttttacttcacctaatctatttagatattgtataattgctaaatcatatttacaatcaccctgaatttattacattagatttactttagtgaaatattcatatatataataatatatttaagttaatttatatatagaacaaattttaatgtaccttttcattacatttgatattttatgaccatttgtatcatgaagtctcttatattattggttaaaaaaaataaaaaattagattatagtttttgatataaataaataaatcttaaaatatgtaagtatcctatattttttaagagaggaagtagtgaattagtgatgcaccttacatttaccgtgttcgagtatatgctgaaagtgaaaggtttttaagttaataatttgtgtaactttttgtaatctgatcccgctaaaaaaaaaataacattttacattgatacatttgtttattatatcattctgtctaaattccacaatgacatatagaaatagttatcttttttattacattgtgggacataaaatcaaatacaaagacaaaattgagggtcgtatgtcactttcccttgatttcatttgaccgtttggttaccaacgatttcggttgttagatcaaagtttgttcttcaacgacgtcggttttgactaaatcaataacaccaatcgtgctgttgtgatcaggaccaccccagatgttttaaattcgattaaggagaaatgtggatcaaccataacaaacaatcgtaagtagcccaaataaaggataaaagccccagcccatgtagatatcgtaaattgactaaaatacccctgatgatcaatagtaactaaaaggctaacgagaaaaggggacagctggatcgaaatcgaatcggatcagatcaaaagaaagcagtggcgtcgcattctttctctgcctgaggctgctgctgctgctcctccgtaccaactctgatccacctctctgtccctctctctctctctctttctatacatacactcatattctttttttttcatttttaaaaatttgtatgcaaaaattgagagattattttacttataataataaaatgaaaataataataggtggtctagtgaggtacgtaggtaagtttagtagtataagcaataactaataaatcccatcaactttgcactggttttcgagaacagtctacagctgtgacaatgggtcttagggttcttggaatttgctctctatttcttcctctattcaatgtatcaatcatatacttcatttagctattacaattatgttttcttaattattaatgaagcttatttttatttttttgtgtggatggtaatgtttttaattataaaacggtgcttagctttaatttgggtatttattctcacatttttactgaacgaaatacacgtagtagtaaaaagagaaatttgtttttagtaggttatattgggtttacgaaatcgccacttagaaatgatcaaatgaaaagtagactgttggggagagtcttgtcatttagcactttttcacagtgaaccagacagaccttctaaacaaaaacaacacatacaattatatcatgaagagacgatacaggaaaatcaaattggttgtataaagaaatctcgttttactttctttttaaaaacccaactcatattgttataagaaagagagttttttttttctgtctaaagaaagagagattaaaactctgaatttggctttaaaattttgatattgacgactgtcacataccagaggactgaattttttttaatactatttctgaagaaaatgctttcttaaatttaattattaattataatataaagttcatattcacacggtatataaaaaaaaggttttttcatatgacagtaaatataaaatttattattattgccaagctgaattctaataaatatacacttctgtttgtcaagttggaactgtatctgtcaatgaaaaggtacttaataatgataaataacccaaaattgttacttttcaacactcataatcgaattctgctatctagtagtagtcattacgtagtaagttagtaacgtatctaagtgaaccacttctctaactaatggataaaactaaatgagagtaaataatcaacaaaacaaattaattaacgaatactaaagattacaacacatcattaaggagagaaagaagagaagactcatttgaatttaagctagtggtcactctctccaggcgccgctctctctttccttctttctttctctctctctctctgagaatggtcagtcaatttcaccactgagagagctcaaaatcgcctgaccttgaccttactctctctatctcttccccgagaaaaccacctcccagtgtagataaccagaagaagataagccaaggtgggtcttctcaattttacctttttagtccaaaaaacatgaaattgaaacatgggtcttgattcatgtatgggtttcgtctttaaagtttactgttttttttttggtattttgcagatg

SEQ ID NO: 35281 - DNA, 3000 bp, Unknown
  misc_feature (1)..( 3000): 2750-1469P.txt file - cDNA_ID_3085877; gDNA_ID_2926273; Annot_ID_205195
tttagtggttaattgtttataattaattatgtcctatattccttttcgtgtaatcataacgcaaattaagggttgtatctttttcacatataccactagaaagaaacgatacttgtgttttttttcatctttcatcttttctatttttcttgtttaacaaatgtctttcgaaactcatctctcaaattcttgctttaattctttcttttttcttgacaatactttgtgatccttttaaccactaacaatattctaaattatatctcgaagatcaagataattgtacaaaatctttaaaaatatatcaaacaagtttgatttttttatttttattttgtcatattcaagagttgccgcataagctaaatagagagtccatgtatttgtgtgttaggtgagtggtatagtcaaagaaagtacaaatgggagaacaacacatttgaaaaaaaaagatttgatcgacaatcctgaacaagcctcacggtcgaaaacgccataagactatcaaaggtatctaaaagatttaatagtatcaagtaactttcaaaatttgcgttgtcagcttaataaagaccagtatcagtggtttgtgttcaaaaccgatgagaataaccagactatgttcgaactgttaccattaaatttatcaaatattaatgtctagatgtttttttgtacaaactactgacaatttaaacttcaatgatatttattatcacttttttacttcacctaatctatttagatattgtataattgctaaatcatatttacaatcaccctgaatttattacattagatttactttagtgaaatattcatatatataataatatatttaagttaatttatatatagaacaaattttaatgtaccttttcattacatttgatattttatgaccatttgtatcatgaagtctcttatattattggttaaaaaaaataaaaaattagattatagtttttgatataaataaataaatcttaaaatatgtaagtatcctatattttttaagagaggaagtagtgaattagtgatgcaccttacatttaccgtgttcgagtatatgctgaaagtgaaaggtttttaagttaataatttgtgtaactttttgtaatctgatcccgctaaaaaaaaaataacattttacattgatacatttgtttattatatcattctgtctaaattccacaatgacatatagaaatagttatcttttttattacattgtgggacataaaatcaaatacaaagacaaaattgagggtcgtatgtcactttcccttgatttcatttgaccgtttggttaccaacgatttcggttgttagatcaaagtttgttcttcaacgacgtcggttttgactaaatcaataacaccaatcgtgctgttgtgatcaggaccaccccagatgttttaaattcgattaaggagaaatgtggatcaaccataacaaacaatcgtaagtagcccaaataaaggataaaagccccagcccatgtagatatcgtaaattgactaaaatacccctgatgatcaatagtaactaaaaggctaacgagaaaaggggacagctggatcgaaatcgaatcggatcagatcaaaagaaagcagtggcgtcgcattctttctctgcctgaggctgctgctgctgctcctccgtaccaactctgatccacctctctgtccctctctctctctctctttctatacatacactcatattctttttttttcatttttaaaaatttgtatgcaaaaattgagagattattttacttataataataaaatgaaaataataataggtggtctagtgaggtacgtaggtaagtttagtagtataagcaataactaataaatcccatcaactttgcactggttttcgagaacagtctacagctgtgacaatgggtcttagggttcttggaatttgctctctatttcttcctctattcaatgtatcaatcatatacttcatttagctattacaattatgttttcttaattattaatgaagcttatttttatttttttgtgtggatggtaatgtttttaattataaaacggtgcttagctttaatttgggtatttattctcacatttttactgaacgaaatacacgtagtagtaaaaagagaaatttgtttttagtaggttatattgggtttacgaaatcgccacttagaaatgatcaaatgaaaagtagactgttggggagagtcttgtcatttagcactttttcacagtgaaccagacagaccttctaaacaaaaacaacacatacaattatatcatgaagagacgatacaggaaaatcaaattggttgtataaagaaatctcgttttactttctttttaaaaacccaactcatattgttataagaaagagagttttttttttctgtctaaagaaagagagattaaaactctgaatttggctttaaaattttgatattgacgactgtcacataccagaggactgaattttttttaatactatttctgaagaaaatgctttcttaaatttaattattaattataatataaagttcatattcacacggtatataaaaaaaaggttttttcatatgacagtaaatataaaatttattattattgccaagctgaattctaataaatatacacttctgtttgtcaagttggaactgtatctgtcaatgaaaaggtacttaataatgataaataacccaaaattgttacttttcaacactcataatcgaattctgctatctagtagtagtcattacgtagtaagttagtaacgtatctaagtgaaccacttctctaactaatggataaaactaaatgagagtaaataatcaacaaaacaaattaattaacgaatactaaagattacaacacatcattaaggagagaaagaagagaagactcatttgaatttaagctagtggtcactctctccaggcgccgctctctctttccttctttctttctctctctctctctgagaatg

SEQ ID NO: 35282 - DNA, 3003 bp, Unknown
  misc_feature (1)..( 3003): 2750-1469P.txt file - cDNA_ID_3085881; gDNA_ID_2926273; Annot_ID_143466
aagcaatatggaaaagagatctgcttttactgcacattccatgaatacaaattcaacgacaaaatggatttataacctaatgtccattatacagatgatcatgacgatatataggaaatatttttatttgttcctgtcaggaatggaacaatccgttttgaagaatgtttggttgaaaatgtatgcttactttttgttacgcaattaaaaatattgatcgttacgcggatgttaagcttcccgagaaacacacacatgtaaatagaaaaacgaggagacaaagttagaaaggtagcgtaaaaccatgcaaagtgtttaaaggcctcaacgtagagacaaagagttaagagatttaaaacctcttcttaagataaacaaataagcatatgcatcaaaaaccctaattctcccttttgctcgtttcgatgactagctagattttcgctccatttttaatgtaaattacataaaaaaatatatagataaaatcagtgagcggggtcaatctgagaatgctataactacgagagagaagacataagtttggtcttttctctttcgttaggtttctctagtttgggtcggtggattcctcagagacagaagagggggccactcaacaccatatctgaccttcactgctcttttcttcttcacacccatacatttgcatgttctctccttctcttctaccatcaacgactcattctctctctatctatatctgcatttattacacaatctctcttcctttagcatttataacaatcacgatacctttaaaccgccatatctttctctatctctctatatatatctacaaccgtctcggttataatctaagtcatctctttgatcgatactactcgtatggatatgttgaggagtgcttgtttctacttcctattaatagtgtttgtcatcctttcttggtctcttttatgcgattctcgccatcttggacacatggagaagaagcttagtgtaaatcttgatcttttaaataaggtaagcccttcgcttgtgatgttaagagtcatggttaatatggtgttagttttttcataacacgggcaattattttttgatcattgatattaagatgcgtatggtatatagtcttttaatttgtttatatatatgtgtgtgattttcactttttaaatgtcttttacatagatatgtagaagaattgaatgcatatttttccttttcaaaatcaaatatacctctaatttaaatttgtaggggggctccaaatacttttaaatgattccgtatgtatgcatgtatataaacactagatatagtgcacaactaagaagttcgagggtaaacactagctagtttcacttattttcataaaacaattcccatgtaaaatgggtttgtattcaacatactccacttttagtgtaatacttattaataaatgacaaaaaaaaactaaaaaactaaaaaacttaagtcatgaatactaactcttattccatggcacaggacaatgaagagattacaaaactagaagctccatcaacaaacaagacgaacaccttattgagccaatcacatgcggtagttaatcatggtgataatggtcagatcaacgggaagaagacgaaggaaattcacagagtaaaacgagcttcagacaaaaaggtgtcgtctaaaagagtctcaagaacttggaaaatccctaagtatccaaagaagcagcctaaatcagatcaagaacatccgggtttcaatcttgattatatgcagcccactacacacccgcctcatcataattgaactcttaatgatcatgtaataactccatgcataaacaaatttcatatcgtggtttatcaaatatcataactcaagtcacgaagaatttccactttttactcgtttgatatatcatgatgtatggtcagaaacgacctagttataataagcttttatatttaaaattaatacatatacgaattagattatagtgaaactgttatcggtattaattgttcaatactactccgttgggtttcttgatgttgctaccatatcacacttgcaagttgaatgcatatcatcatgatgtacaatatatactttactcctctttatatgcacatgcatgtgtatgatcatttcgttgctaaattactatatcaatatgtatttttgttgttgttcacaattgtgttatagtattagctaaggttaacaaatgtaatttaaaaagacttgcaggttaatagtaatacatgtggttttctgctaatcataaatcttttaagttagtctgttaattttcgtttctaatgttgacaaaactgatactaaatatgtatgtatataatatacatagtatcttgaacttggtggaccttaaaaatagtaatacagtacttgcaaatttgcaatattttcatccgattaaagaatagtaatactaccactagtcaaatgcattatttatagtttgtatatatagatgagtccgcgtgcaaagtcactgttaacgatgtccaaaaaggacgaagatcccgcgtatggttccaatgcaatcagatgtcccaaatccacgtatcttaaatttaaaattgacttgtacaaaacaatatactactaataattaatcaaagacaaaattgtctatctcatttcttatcaaaacgttctgttattttattttccataatttcttctttctcatatgtcataacgtaattttgttacatcgagaggataaaattcaaattttgcggaaaaatatataaggcccgtttagatatattagtacgttgaaaagagcgaacttattagtataaggcccatttagatataatagtgggtcataagcccataacatatcctgcaacagagaacaaagaagctgcgatctggctaataaaactttcccgccggaaaaagtttctgcagtttccaacttcttaaacctaagcgaagcagatagtctttgattgggagattgagagaggttagtgaagaatg

SEQ ID NO: 35283 - DNA, 3003 bp, Unknown; identical to SEQ ID NO: 35282
  misc_feature (1)..( 3003): 2750-1469P.txt file - cDNA_ID_3085881; gDNA_ID_2926273; Annot_ID_205194

SEQ ID NO: 35284 - DNA, 3000 bp, Unknown; identical to SEQ ID NO: 28475
  misc_feature (1)..( 3000): 2750-1469P.txt file - cDNA_ID_3085895; gDNA_ID_2926273; Annot_ID_205188

SEQ ID NO: 35285 - DNA, 1797 bp, Unknown; identical to SEQ ID NO: 28474
  misc_feature (1)..( 1797): 2750-1469P.txt file - cDNA_ID_3085899; gDNA_ID_2926273; Annot_ID_205187

SEQ ID NO: 35286 - DNA, 3003 bp, Unknown
  misc_feature (1)..( 3003): 2750-1469P.txt file - cDNA_ID_3085930; gDNA_ID_2926274; Annot_ID_143519
gactcaagtttttcttgttaatggcttcgtggttgaatttaccacttacattatatatacaaccgactcttattccataattcataaaatgttaaacatgctcacatcgaaagtattcagtatgaactctcacataaaatgttaaacatgcttacattattattatttcttggattttttaacatgtattattcgaatttgaacagagtgtttgatacaacaacaaaactatcaaacaatatgctacatttcattgtcttctctttactttttttttcctttcattttaatgtatatcggaccttcttcatctataaaaacaagcctatatgatactgttctacataatccttgagcaaattttatacatcaaagagaaaatttatatagaacatgaagaatactcgagtacacttctttgtattaaaatattatgcagttctttacaatcaccctccataataatatgttgaaagaccatgctatctggagggtatgaaagaaggttcaaaactataaatccgatcctctgccatcaatgtgctttatgttccttctaatgtcgaggaacctggaaatagatactaatttgatttctatatattttaaacagaaaaaaaacatagttaaaaaaataaatcaaacctaaactgaactagactgtagactctattgggttgagtttctcttacttttctctgtgtcattctcctactttatattatttttatagaatttatcgtttatgttaacacgattttcccgtgtaaatttatataaattgaagatttaaaggcgtgcaaaagatatggataaaaaatgaagagaaacataaaataaagtttagattccaccggccaatactttggaattatgggatgtgaaaagcgaaatgggcctcttttgcttctgcagctctctttcgtttgtctcttcctccgctaaaagatatagtaacaatcgtataaattgattcattcaagtaaaggttcacaatgttgtacgttcacgttacagtttatattttgatgagaatttatatatgtgaacattgatcgtattggctaaaaagcctaaaatatatacaacccttttttccagcagctagaaaaatctttgtgccaaataataatcggcaacgtacagcgtgatatatatttgcatgctctcgtttgttacattcaaaccaaagtgaaagtaactgaaattaacaatccaattttgattgtttcggttttgttagagagtcaattctgtagtgaataataccaaataattattaggaaactgttcaaagtatcgtaacacaaactattgatgatttgatggtcaaagattaagctcaaataagatatatgcatatatatattgtttttcacgaaaaagctaaggaagtaaaagaaaacaagtatattaattagttttacaaaagtgttcaaaaagagaattgctttcataaataatgaagtttgactgattcatactaatacaatgcacgtagatcaatcatagataacatattcataagcatttatatcatcaaaagttttgatttctactttttccaagcaaagcaacaacggtgcacccttctttttctcgtcgtctttgctcttttctgtgacgaaaatattattattcttctttttcttttccttttttaaattggtaataggacatataacaacttctagctttaatttttttagtgtaacgtttcggtagcaaacacattcccatattatagaaaaaggtgtatgctcacgcactttttctccatctttttcataatataatattactcttttgaagaaaagatatgttagatctttgatatttgtttgtatccatgaccagttctagtatatcatctcatctccaatacattcatatctctattttatataattggatcttcagaaaacatttatgtctacttgtctagtggtcaaaacattttatgcaccactggttttaaaacaaaataaggtatcaagtctcaaactcgatagaccaaggttattaaacctctttacagaatacagatgagttatgagatatatatggatcgtcaactttagttctgatattggaattatctatgaatctaatgaaatatctaatggatattactcttaatcaaaagataaatatctaatggaggtgtattaagatattgacatgtaacgtaaagtttatgagatgattgaagacaaagattcatgcgtgtgttaagaaaacacttgacgataaagagcaaaatctccattcttcataaaaaactgtattatggaaaccaatttgtccatttcatggttgtaacatcagtttctttactactgcagatgatcgatggaaaagtgttttggtcaaagaatccttttaaaaacataactatctgaaaatagcataagcatcggactcttttgtaagtgcacaacgaaaaaataaaattccaataatttgggcaatcttgtcgactatatatcattcaaataattgaagtatatcttatgttatagtaaattttaaaagatgaatgatagacaggttaattaggcattcaaaatcaaaagatttttacattgtctgatcaaagtataatcacatgtcataatctttaggtttgtctcaactctcaagggttcaaaacttgttgagtcgctcacgctagagatgtcgaatacgtacatacgatctaattatgaacgtctaaatctgaaacggtgtcgtttaggtatagaagatcacaaagtttgcgtgggcttatgtgtaagtcttatttggattttaagttatctagacttataatctactaaaccgactattttgggccttaaagaaacccacaagtaaattattgatgtgaactgcgttttggtttcaccttattctcgatattatttcattggttcggttcacggtatggtttacaccgtaccggaatacttaccactaaaaactctgtagtgcgacgaagaagaagaagataaaaaaaaaatg

SEQ ID NO: 35287 - DNA, 3003 bp, Unknown; identical to SEQ ID NO: 35286
  misc_feature (1)..( 3003): 2750-1469P.txt file - cDNA_ID_3085930; gDNA_ID_2926274; Annot_ID_205267

SEQ ID NO: 35288 - DNA, 3000 bp, Unknown; identical to SEQ ID NO: 28542
  misc_feature (1)..( 3000): 2750-1469P.txt file - cDNA_ID_3085975; gDNA_ID_2926274; Annot_ID_205252

SEQ ID NO: 35289 - DNA, 3003 bp, Unknown; identical to SEQ ID NO: 28485
  misc_feature (1)..( 3003): 2750-1469P.txt file - cDNA_ID_3085983; gDNA_ID_2926274; Annot_ID_205249

SEQ ID NO: 35290 - DNA, 3000 bp, Unknown; identical to SEQ ID NO: 28484
  misc_feature (1)..( 3000): 2750-1469P.txt file - cDNA_ID_3085995; gDNA_ID_2926274; Annot_ID_205245

SEQ ID NO: 35291 - DNA, 3000 bp, Unknown
  misc_feature (1)..( 3000): 2750-1469P.txt file - cDNA_ID_3086011; gDNA_ID_2926274; Annot_ID_205237
taagttaaaaatccatttcaatattgtacatgatagcattaaagtgagatggcatctaacgttttgactttctaagccaaatatgctaacactttttttttccatttgaaatggaacctgaaaaaataagttacttaagggacattttccatttataatttttttctttttccatatacagcttattattatattaccgatcaattcttcggtttataactaggttggagaaaaaaataattcatctttctatacacattttttcatgtcattaatatatacagcttattaatatatgagttaattcctctaggttagcttatacagtatatatgtcattttcatttattggattatttccaaaaaaatcccaaaaaggaaccttgtataaaccaaaaaaataaaaaaataagattgtgaaatgttaaaaaaaaaatatatataatggtgatcataattaagccataacttaagagtcttagatggtgatgccaataatttagaggtggttgattaagtgtaatcattcacttccgtaagtccgatcgtgaaatgtcttgtgctgctaaatgtgtatcgcttgtcaaagtcataaacaatgaaactccttggcccctttagattagcttattgtatgtcatttcaatttattggattctttcagagaattcataaaaaagaagaaaataaacattggatcattcatagcccataggaacaaaggcctataccttccatatatttacgggccttaaaatctaaatccaatatccaaatccatataaatgatccaatcaaacaatccataattttccatcacgaccatgttttattcattttctctcttttccatctccggagatcgactccggaattttccgacggaggttatgaactctaatgcaacttctggcagtatcagctataggctttgcactatgatcactaacagaagttttaaatccacctacacttttgcttattgtggtgttaatgaatgcataattgcatatagatcttacacggattaagttgtctacttgtcttgattcaaatcctctatactacaatagcaacaaaactaacaatgttctttgattaaacaaatcactataaccaaccaactttgaccattttatttacatttatatcaccaatccaaattcctaaaaaatgttctgtattaataacaaatgtaatttgatcatccataagggtttcataatcaaaacccaaagagtataaataatttacagtgcaaatcctttgacaatcactgctcattgaccagtctgcaccaaccacgaattattcaactgtgacatagccgtttccctaaaactcttgaccttaaccaaacagaaatgggtgcaaaccgtacccatacccgaccggacccgggtcgttttcaatagataacaaaccggcccagtatccgatcctcttccttgcgccacaatcccccacgcgcttgtatcttccccacacgcgccaccatcgtgatcatcatcatctgctatgtcaccgtctgcgagcttctccaccaatataactccttccggcgtcctctcttctcctctaccccactttccttccatctctgtccaatcctccgcctttggattcgttgccgtcgtcgtcaaaccaccattagcctccgcgtataaatgcatcaataacggcgactctctaagattcttcacgatctcaaccaccgaatctctcaaccacacatctagcttctccctcgacacaacagatccaccgcgtttccttccaccgatcctttcaatcttcaccgccgcagacggtggtgacaaatcctccatcgacatcgaaatcttcccgatcgcacacatattccgtcgattcgtcactggaacaacacatgacgatcgagaattcaaatttaacgtgcgacgatcacaacgaacggcgcatgcacttcctcctccgcaacaaatcctcgcagacgtcgccatcttcgcctaccggaagattcaattgcagagacgaataggaatcggagaagatatgctgcgattagattggagattgcttcacgctgacgaattctcttatagagtcaatcacaccaatggttgcttttaagaatacgttttactgacgcagccacacacaatccaatggcaatgatgaattattaaatacctaatttttttatttctccagcacggaagttgtgtaagttgtttgatcggacggttgagatttagagatggtagaaatcgcgtttatcttattcttcacgttatcctcaaaagtctgaggtggcttaagtaggtgattattccctgtaaagtgttgacgatatagactaattagatatcagatatggaccgttcgatgtaaatctaacggttgctattacgtgaagccggtacgagatggagaacgtggcgacgcggtttagctgtgtgcatggcttgggcgggcacacgctggtactggatttaaattgtggtgaacacgtgttatctctgttatttataatctagaccataagatacgccacgtcagattccacggtggacaatgtcttttagaatagattgggcccgtcgttttttatttttgaggaaagtttcggccttttcggtatggcccagaccactaaactattgttatacttatgtgcgttgatctttcgcatataaggattggatcattggactgaggtttggaatgttaggtgcgttttacgtttctcctgccataaactacacaaagacaaaagcacatgcaaaaacaacataaatatgcatcaacctaaggttgcgacacaaatcgagcaactatgcaaaacgcttaaagccatgaagccttagagattgacaagtagatcagtcaaagtttacgtggcttagtaaaattatatacttttgtttgctaagaaaatacttttatatacttatctgaataaatccacctctcgctttatttctattttctagtgtctacatatataaaaagatcatg

SEQ ID NO: 35292 - DNA, 3003 bp, Unknown
  misc_feature (1)..( 3003): 2750-1469P.txt file - cDNA_ID_3086037; gDNA_ID_2926275; Annot_ID_205299
ttatgactgagaaacagatcaacaaaagttgccaccaccagagcaacgaaagattactctaaagccctaaaaggttaaagttaatcacttaacgagttactttgaagctaactgaaacaaagtttgaagaaatgagacaaacagaatttcatgttctatatgaagatataaggtagcatttgattatctgttaaccatatggtttggtatataaatttttggtttaatgagacacagaaaacttccccaagtctattactctaagaaacatgaattagccatgaagttataacagaattagttgttgtgactaatgaaacagagtaaacagaaaagaaaaaaaatcgaatggtaagattttaaacctgcaggcgttctcaatcggaagccgtaggagagctttcatggtcccatcccttgatttgttctctactctacttgaaagaacatatatatatcttggcctacaaggctacaatgcaagacattaaaccatcagatcaaataattatagctgtcaaatggacgggtccgtccagggaccattgggcgtgtccgtatggacagttttttttatgggccaagttggacggttcataatggacaatggtccgaaaaatgtccatgcctaataaagaccatgtccatatgggcaagcccatgtatagcccattttattattgataaatcaaaaatcatgattttaaagaattgtgtttttgcattttgcatttttccgacaaaacggtaaaattgtgtttttccctcaattcatgcccatgggcagcccattgtccatatggtcaaacccatattatccgcggacaaaactggtcatatgcccaattggaccatttgttttatggtctggaatatagcccgtccatatgcatttggactgggcaagcctatgggccgcctgtccagttgacagttctacaaataatgtacctactaacagaacattgtaagaagctacagatatagtaattagtacatgtccaatgtaaatccactcatacatttcttctctctttgttttactttaaaatatcgattgagcaatttcgatctctagggatttaaagaagtgaaaccaaaattgtttctgacgagcgattaagaacccctcttttaccgcaattgacaatagataaacattatacatctcagagaaaccttctccattttcataaacccttttctacagtgatcgtctcgaagcagaaacactgttcacgattttttcaacgcgggaaaatttatttatcttagggatcatctaaatacagtgaacctcatcagattgggtccaaaaccaggttttagactgagtcaacgacaacgactgtattagcgtgttgatgacacatgtctctccgttgtcacgtataatcaccgttcatttatgaatttaagtacgttatttctattcgaattacccaaattaacctacgtacgtagcttgctccgcaagtgaatagaattggtctatagacaataaatatatatacttttaataataaagggtttgtaattgttgaaacatatgttaactaattatcttcagataaatttactaattcgttcgtaacatgttacaaatttctatcgttgttgtctacaaaatttcttacaaatttctgacgagaataataccaaatataccctccagcttctcccacacgttcttcgtataaccatgccctgaccaaaataaatgttagcgtaggggaaaaaaacaaaacagaacagctctgctctgtctctataaaaagctttctcactttctcgttctcattcagacactttttcattcagacactcattcagacacttttgtcacctcacttactctctctgtctctcccccctctccctctctcatatttctcttttttctataaacatatttcagaaatggagttattgtctcccaacaattccaggagaaccaaacaatggcttcctccgagaagaggacaggtcaagatcatgatcgtccgcaaactcctcaaatcgacggcctcgatcgtttcactgtggaagaggcgagattgtaaataactgtgtacatactttttgttgttgttttaatgttaattatgtacatactttgtaagatgtaatctcatgtatcacgtatgaaaaaaaaagtttttgttagaagatattttttgcttattaatctctatattatgtagacaaattttcttttcttccttgtaaatatttacaagttgttccatatattacatgccataacttaaaaatgatactaacgggtcttggaccaaaactgatatctgttgggacatgcataaagcctaacataacaattaacaagtgtcataaattttggattcacttgtagcgatgatacaacgaaagtaaaactacttattacatttgtcaaatgatactatataggtagctcataactatgtatagatctctaaaattcatctaaacccgaattctgccgtgtggaattaacaaaaaaaaaaaaaagaagagtaaatcatttgaacaattacgtgtgttacattcctgttaatcatatttatatatgtataggttaaagcttgcttatctactatggaacaaagaggatctataataacccttcagcaagtcagcgacaaagactgtagtagcgcgttacgatagtgataacgttcacacgtgtctccattgccacatctactcagacaccaaccaaaaaaaccttgtagatcacacatgttactgaattaattacgttatctctaataagaattaccaaagtaaccttacgtagcttgctctgcaagtgaaagaattggtcttcaaaagacttggtctgtgactttgtgagtgttgtgtgtctcaaagccttatttaataacctctctctcaactttatgttactcgcatttaaatttgtttctctgcttcactcttttgatttctttctacttctttttttcacacagatcttaagatactacaactgcgaccatg

SEQ ID NO: 35293 - DNA, 3003 bp, Unknown; identical to SEQ ID NO: 28546
  misc_feature (1)..( 3003): 2750-1469P.txt file - cDNA_ID_3086044; gDNA_ID_2926275; Annot_ID_205297

SEQ ID NO: 35294 - DNA, 3003 bp, Unknown
  misc_feature (1)..( 3003): 2750-1469P.txt file - cDNA_ID_3086048; gDNA_ID_2926275; Annot_ID_143526
agtgtgtcgtttctaaattatgttaatgatctaaacactattaatgtgttgtttctaaattaaatttgagttttaattattattttatgcttatccttaaatgatttttaacataattaaattcaatttaaatgaattttatacacattaaatagttggacacatgttaataagttaatcttttatttgctctcacataataagatgtcaaatccttaaagaactcccttcatcttttatataatgggcagatttggacagatttctcagttatggaactttaattgtgtaattaagagagatccttgtttaataaatgagagtgccaagtagttcaaaaaggtaagagaaaaactaaacttttaaacatataattataacaacatttagtgtaaatcttaataacaagtttaccaaacaagatcattaacaaatcattgcacaacataattattccgtacttgcttatatttagtgttcctctgcttcatctgttctctgtcatggctcgttcagtcgacacagaagcaatgaccactcgcgatccaagcagcaagcgcggtggctggaaaacgtttccattcatgatcggttagtgtattttatgactgttttggtttatgtttttgagcacacaacatagacaactgatagtgattattgtaaggctctatatggtgcagctacattgttaggactttccatagcttcattcggatgggtgatgaacttggtcgtcttcctaattaaagaattcaacatcaagagcatcgctgctacgcagaattctaatattgttaatggatgtgtgagcatgttgcctgttgttgcagccattctagctgattcttttttcggaaacattcccgtcatctccgtctctgccttcatttctttgcttgtaagtctgagacttaaatattctattgtcttgtgtgactcacaaagcttactagttgttaaacgtttccagggcatcattctattgaccatgattacatctttggaccacttgagacctccaccgtgtgaaacagggtcaattctatgcgaatcgccatcaaaactccagctcgggatcttgtatatagccttagctctagtgatcattggatcagctggtacgcggtttaccttagcatccgcgggtgcaaaccaatatgagaaacctaaagaacaaggaagctttttcaactggtacttcctcacactctacactggagctattactggtgcaacagcaattgtatatacacaggaaaatgctagctggaaacttgggttcggtctttgcgccgtcgctaatttgatcagtttcatagttttcgtctctggcaagagatactacaagcatgacaaaccaatgggaagtcccttcacaaatctgatccgcgttgtagtcgctgctacaagaaaaaggaaagctgtgatttcatctagagaagaagactatcaccatgggcttggaagagaaggcaagacatcttctgcaatgccctccaagagctttaggtgaaaaaacaaaaaaaacttgcttcattcatcaaacttaaaacagaacttaaaagagcttttacatgtgcaggttctttaaccgtgcagcattgaaaaccgaagatgactcagttaataacaactggaggctatgttctgttcaagaagtagaagattttaaagccgttttccgagttctccctctgttactagccatcatcttcgttagtactcccatggtgacgcaaacaagcttgattatattacaagctctagtcacagaccgcggtctcgggcctcacttcaaaatcccggccgggtccctccaagtcatagtaatcatcactgcatgtattgttatcttaatgaacaattgccttgtctatcccatgtaccagaagctagcccataagccattgacaccgcttcaaaaagtcggtataggccacgttttcatcattttaagcatggcgatatccgccattgtggaagcaaagaggctgaaaacagttactaatggccattccatgtcagtgctatggctggttcctccccttgtgatagtaggaataggagaaacgttccaatttccggcgaatattgaattattctatagagaattccccgagtctctgagtagcaccgcgacttcattgcctcagtggtgattggaatatctttctacctgagcacagctctgatcactctgatccagaagaccaccaagtggttaccaaatgatattaaccatggaagagttgacaatgtttactggcttttagtcattgtaggagtcttgaactatttccttgtctgcgcttggttttacagatatagaaacctgaatgatgatgatgatcaggaacaagatccaaaagacgatacaacctaagacacaacgtgttctgttcttgtggtttttgttgttttgatcatcttgaaagacccttttttatgacaataatcagacaacaaaaactctttcaacaactacataaccactctcactatcttgcttaattctaacagagtttgaaatgtgagaaacgtggtttggtttttttttttgttggagaaaaaggaaatcatttctgtatttcctgattcataattaataattttaaggtcttatcatacaaaagtgactcaatgattggtcgagagtatattaaattttaataaaatttatttaaagttcttgaatctttgtctatttatacttttcttatgcttgtggagtggtttactgctactgaagataaggcaagatatgggcgattgctttttagttgtttattacattcaccaacctgatattggcaaacgacactaggagatgaactgtcagaatctgatatgaaatttttgccaccaaaaaagatcactaccaacatataataattgatatggatttgcttatatatataggttacggttgttatctaaactgcattataacactcaaacacaagtcaaagtacctcctgcttccacttgttctctgccatg

SEQ ID NO: 35295 - DNA, 3003 bp, Unknown; identical to SEQ ID NO: 35294
  misc_feature (1)..( 3003): 2750-1469P.txt file - cDNA_ID_3086048; gDNA_ID_2926275; Annot_ID_205296

SEQ ID NO: 35296 - DNA, 3003 bp, Unknown
  misc_feature (1)..( 3003): 2750-1469P.txt file - cDNA_ID_3086056; gDNA_ID_2926275; Annot_ID_143524
tggtcgacgtaatccaaagaaccaccgcgtggttaccaaatgacataaaccatggaagagttgacaatgtttactgggttttagtcataggaggagtcttgaaccttggctacttccttgtctgttcttggttttacaaacctcaaggatgatgaatgatgatcatgaacaagaagctgcggtatctcactcatcatcttaaaagtaaactgtcctttgttatcgtttgaagtcttgagctttctcatgatcctaacgagcatattctaacctcaaagtattattcactctctagtcattgaaagctagtatttttcagttttttgaaactgtttctttcttgttctttccttttatatatcttacacaaatgacacatatatattgtataaatgatcaaacttctattcaatagataaagtcttctgaaattcgtaacaatctcactcgtaaacaccaaatcaaatcgtattttaatttaccttgtccaagaattcaatccatctctgacaaatttggttttggccaaatcatcaaaatccgtaattaaatttagattatgacaatttaaatgaagattccttaaaactttgtagtattctatgtttttctgatgattagtgcgtgctgctgttgaagatccggccaaatcatttattacattcgccaacttaaagttgacaaacgacaacagaggataagttttctttattcggttatatattgtacataaattggataagttaacatatcattacaccaacagtcataaaagcaagggggttgcatgagttggtgttttcattacatgtagattatgactcatgcaatccacaaaacgttagtggagactagggtccatttgatctctccctctctcgttaatcatgagagctagtactgtaccatttgatgaagaaggtgcaacctccaatattagattttgtgtcaacggtcttcttcctgtttaaatcatgggattgttgaatctattcttttaaaggtatattatcattactctgaatatcttaatatagaaagaaaaaaaaagaatatcttaatatagaagaattttctataaacggaaattttcatgtacgtttgtcttgaaaatattgtcatgaatatgtagttaatgaacgactacataatgactaatatcaaatagaatttgtcgattattcgttttagtttaagacgaattaaccactaatttgaattgctatttgacatattatatttatatttttttattaaattaaaataagaaataattctttaaaaatatattaaactcaaaattaaaatactaaattaagaaaaaaatgtctacaaattaaaaacccacacaagtgacagtaactcctgatccgtcttgttctctgtcatggctagtttagaggtctggtgattttgcaaacgtggtggctagatcattttttgcggccaagatgattattgtttatatttttgaacacaaaacacagacactgagacaaatgttgattattttgggtgttatatatgtttggtgcaactaccttgttaggtctttcagaatcataactttttttctctccatattttatttgaaaaaagtgatgtactattttacaaaatttcttcaaactaaatccttcagaagctaaactcatatgtcatgaaacaaattacaaattttgtttgatagactttaaaatcaccgagataagtttgtatgaggtaccgtaagttcttttgtgagttgacttatcgagagtggtttatgagaccatctaaagcgctactgttctggctacagtaagtaatatatacaacattggcgttggtaaaattagcaaagatcattaacttctaaaggtcatcatatgatcagaggctacggaatctaaagtccatttgctaatcttttttttttttgttaaacaacaagaaatatggagattctcacatagaaagttgtggtgacttgactaacaagataaaagaaacaaggtttcatggggttgctgttttcattgattgatcatgcagtccactaaatcttagtggagactccattttatctctacctttctcgttaatcaaaccaaccactctaccatctggtgaagaaggtgacccaccattagagagcttgtgagttgtgaccgttaagcatagtagctcccattgaaccacctgtaaattcagaagaagaagtgtcgttgttagttgttacttattcgctggaagaagataaaataggtttgttgtatacacgtatggtgtttagacctcctcttcatagttcgtatcataattttggaagcttttttacgtatcttgttattcatccatatagaggaagatatgatgagcctcaaaaaaatccctaatagcaaaagtaaaaccaaaagtaaaaccaagtgtcgttagctcaattggtaaagatcctaggcgaagtttaaaggttgtcggttcgactgacgcttgggacgaaactaatattacatgctgtggtttcggttctggaggattacgggcttcagtccagaacttcatgatattcaaaaaaaaaaaaaaaaagtaaaaacaaaaataaaataaaatttcacagtaactaataagcttcttctctctgatcaatgaaatagaatgcgtaaagacaaattttgatcataagatatgaatgtatagtgggcaaagtatactctctggccactattgatgaattagtggatactaaggaaaagtggtaggtctggcaaaatccttttctacatgtttattattacattcaccacgtgatttgggaacacgacaatagttgatgagatatcagaattcggttaggtaatattatataattggactaaacaagatcattagcaaatcattgcacaacataactactctgtacttgcttatatatacctatttagtgttatttatttctaactgcatcataacacataaaacacagtggacgtaactcctctgtttcctctgttctctgtcatg

SEQ ID NO: 35297 - DNA, 3003 bp, Unknown; identical to SEQ ID NO: 35296
  misc_feature (1)..( 3003): 2750-1469P.txt file - cDNA_ID_3086056; gDNA_ID_2926275; Annot_ID_205294

SEQ ID NO: 35298 - DNA, 3003 bp, Unknown
  misc_feature (1)..( 3003): 2750-1469P.txt file - cDNA_ID_3086066; gDNA_ID_2684116; Annot_ID_190815
aagaagagaataaaaaaattctgatcgaaaatagcttacttaaaaatcataattgaatagtatcttttgtttttaaactaatttagtctatataataataatattattaaccatcgtaaaccacacatgatattcaatacttataataaattaatcgcataaaatacaatacttaaaacgagtgttatataattttacgtaacgtaaaacaatacaaaattttaattcctgaacgaataaaacgagtatattaattaatttattgatcgtattaaaacgaatatgatccaattaagattacaattactaaaatccccacactattattgtcattatttaactatggcagatagatagatacagaaccgtaaaggacgttaggaagaggaagaacgttgacgaagtcaacaacgaacagaaaccgtcgatttgaggcggctctaatctcaaccacacgatcttctctgcctttccctcttctctcttcttcttcttcttcatcttcttcctcgcaattaccgcgaaaactcatctctgctcaatcctcaatctcagtctctctgttgactccgactgttatataaaaccatacaaataccttcagattcactacttcaaacctcaaagcaaccactgaatctcgactttgatcaattgagagagaaatgaacaccggcggtggccaatacacggattttccggcggtggaaactcacggaggacagttcataagttacgatatcttcggtagtttattcgagatcacatctaagtatcgtcctccgattataccaattggtcgtggagcttatggaatcgtttggtatgtttccttctctgagctttttcttaagttttattctttgagatcggagtttttaatttctggattttgattttgtgaagctctgtgttggatacggagacgaacgagctagtagcgatgaagaagatagctaatgcttttgataatcatatggatgctaagcgtacgcttcgtgagatcaagcttcttcgtcatcttgatcatgaaaacgttagtgtttttgttcgattttgtgaaatatctgtagaaattagtaaataaatcatgattagggttttttgatttggtattgcaacagattatagctataagagatgttgttccaccaccactaagaagacagttcagtgatgtttatatctctactgaattaatggatactgatcttcatcaaatcatcagatctaaccagagtttatcagaagaacactgtcaggtaaactaaaaactgttcttggcttttttctgggatttatatttgatagaagagacatgaaactgatacttgatttggtgtttttgttgtcatggaaacagtacttcttgtaccagctacttcgaggactgaagtatatccactcagctaacattattcatagggatttaaagccgagcaatcttctgttgaacgcgaattgcgatttaaagatttgtgatttcggtcttgctagacctacttcagagaatgattttatgactgagtatgttgttacgagatggtatagagcacctgagcttctgttgaactcttcagattacacagctgctattgatgtttggtctgttggttgtatctttatggagcttatgaatagaaagcctttgttccctggtaaagaccatgttcatcaaatgcgcttattgacagaggtaaaatattttagagagttatgtaattttagcatggtttaaagattctgccttttcacggaatatgtgatgaatttgtttgaatcttgcagttgcttggcacaccgacagaatctgatctcggttttactcacaatgaggatgcgaaaagatacatccggcaacttcccaacttcccacgtcagcccttagctaaacttttctctcatgttaacccaatggccattgatcttgttgacagaatgttgacgtttgaccccaacagaagaatcactggtaagtttcatacatgttctctgttggtttttcttaccatcactatgttttgattaaaaactgaaaataccatcttgtgcagttgaacaagctctgaatcaccagtaccttgctaaattgcacgacccgaatgatgagccaatctgtcaaaagccattctcttttgagttcgaacaacagcctctggatgaggaacagataaaagagatgatctaccaagaagccatagcactcaatccaacatacggttagaagtgcagcagccccgtgaatgcctggtattacccaataaccatccgaatggctacttagtatctttgcctgttcttttattcatgtacttcttccacatatgtaatcttgtaacttttatttgtttgttcatgttatttactgctagtgattaagtgtagctccaatgtaaagtactccagttattaaagaatatctatagacttttttacttcacatactcttgagtcttccctagtaaacaaagagaagagagaatataattttgtaatgtacagagcctcaatatttgtgggagacattatagagctagagccagagtcaatgctgtcgccgtgagttgtctattctcattcaatgactttcaatagattttagtgggattggctttaggtagcttgcattattgaagtagaaatggtcaattccttagcaataattaggcacaaatgtgtctttctttagtaatattgtaatatcctttgtctgacaatttagagttgacttctaaaacgttgggttggaaataatgttgtcttcacacaggctgttacgaagcagacagtgatggctcaacttgcatcaacggaaacctttgagtttttgttttactttcttaatgtttctttatttgaagctgctgcgcatggagaataaaatatcgtggacccgagaaagtcatcattgctgtattattacttatactgtatatatgtttcagaatttcaggccattgttgacaaaaatagtgaaagatttctgcttgattttgagacatg

SEQ ID NO: 35299 - DNA, 3003 bp, Unknown; identical to SEQ ID NO: 35298
  misc_feature (1)..( 3003): 2750-1469P.txt file - cDNA_ID_3086066; gDNA_ID_2926275; Annot_ID_205290

SEQ ID NO: 35300 - DNA, 3003 bp, Unknown; identical to SEQ ID NO: 28564
  misc_feature (1)..( 3003): 2750-1469P.txt file - cDNA_ID_3086111; gDNA_ID_2926276; Annot_ID_205335

SEQ ID NO: 35301 - DNA, 3003 bp, Unknown; identical to SEQ ID NO: 28563
  misc_feature (1)..( 3003): 2750-1469P.txt file - cDNA_ID_3086119; gDNA_ID_2926276; Annot_ID_205333

SEQ ID NO: 35302 - DNA, 3000 bp, Unknown
  misc_feature (1)..( 3000): 2750-1469P.txt file - cDNA_ID_3086121; gDNA_ID_2926276; Annot_ID_143555
taaggaggtatttgggaacattcttgacaaattatcactcatcatgattatgtattccacacaagatgcctacagaaaaaaattcaaagttaggacctcaatttcttcaatcatgatatgaaacatgaaagagagtttggtacttacgtataactctacgtagagaagtatctgaaatgtaattccaaacccaagttaagttaggatcacaattcacacacaaacaaagttaagattgattatttgaaaaataatcttacagagacgaggatgcgtccagtggttccgaatgcagcttgaccgatgtccgggtaagtgtggattccaggggagttctcgagacatctcttgaggagaatgccggtgtagaaagtgataatgccaaaggagaagagtatgaaaagccctaaccatcctccttctttaactgcgtaaggcattgtaagtaaagctactccacatagaacgttaattcctgcaaaaagagaatgttaagaatctcaatctaaatagaaaagataatcgtaaactcagtactctcgcactaatgctatactaaacgtaaactcagttcatcaatatatatcagatttggtttcagtttgattatttgactaatcttggaaaacagagaaaacctaaccaaaactcagattgaacattcctaatgcaattattaccgttgagaacggattgagagaatgtgcaactgcggttttcttggggagttaaaagatcccctgggactgatagctggagatgagaagcaagaaatgatttgatggaggacacaacagagctttggatctcgtctttgtctatgagaagttgctgtttgcttggtgaagaagtaaacgaaccgaaaacagagctttgtcgtctctggcgaaatgaagagacaaaacttgtactagtcggaggtgtaactccagtcaacaaatccatagattgtctgaaaatatccccaagaacaccaaaattattctctaaagaataatttcttcagatctcttacaaaaacagagcacttaaaaagaaaatgatttaccgataacttcgaggccacggaacgggaacgtcttcggatctgttacgagataaaggagttgagggaacggagctctctgtttggctttcttcatcttcctcatcgaacgtgtgatacaaatcttccctttcttgatcgaatgtctcgttttgcttcatctactttgtttgtattcttctactgtgctctgtttcaaaaaccaacaaaaggtctaaaaagaagaagaagaagattgagaagaagcaactaggggacgcaacgaaacgtgttctgttttcaagttctaaattattgtcacgtttctttatattctttaattagcagtctccttacctatgatgatgtctccctgaatttgtttttccccataatttaaatgtattaatgaacaaattcacgattttcccattattccaccaataagataaatttaataatgtcccattatcctatcactactaaatctaagaaacttcaagaacaattcaaagaatcttctactctgacgcgtaaggttcatttacaaaaaatttagtttttatacaataatactatttgcttgaaaaaatataaaaacgtttctggcgaggttatttataaaacacagaaatagacacgtaatgaagattagttgatatgcatgtgatgtaagaagccaatgacagttgggtcattaattggccattaaatgttcatctctaattacttatgcagcagttaaatttattttttgttcgttttattttggtagctgagcaccttcgtctataactgcttaaaaacttacaataatactcagacaatttcttacagaacaagaaagcaaagaaacttacacataaaaaagcaattgtatatatatatatatatatatatatccacccatctccaagcaaccattgatcattccaagctatctacttttgcagaggtatattgtagagaagaagaggaatgagaaatggagctttttacatatatatgaagaagacttatgatttatcaatctggttaagctttccgagtccattgcagttagcacaaacgatctgaggaagatccttccgtgcggcgttggctctcagagtcactcctcctttcctcacaaatcctgctccgtcacattccggacacctaaaccacacacatttcagagcttaaactcacaatgtacaatctctgattcagtttactacatcggctaagagtttatgtacgttttcaaaatccataacagaggatttagtccggttaagataattcgaatgttgaaccggacaataaactatgataatctgcaattgatcagtcaaaatttggtttaacgagcattaaaaccggtttaagtcacaaggtaaaaagatgagagtggtttacgggtcctttgcgtttgaagaggatcgggaatgcagttccgacgagtgcaacggcgatggctccgccgattaagtagattgttccgtcagaagagacatcaccgacggcggcgacaactacggaggaagaagatctcttgtttttgggaagaatcacattgttcggtgatggtgatccccacgaagaagaatgtttcaggaagttggttgatgacacgaacgtcgtctgcaatgccggtgcgatcgtcataatttagggttttaagtgactgatttcgatttgggggaagtaataagaagaagtgatttgatttttatggaaaggttttgaatttggatttgcttcgtgacgtgtcactctctcgaagtggataacgttttcacttgggatttttggggttcttcagttttcttttgtgtgtggataaggtaggccccttcaagatatttcgagttaacaattgggcctgttaagcccattattaagttagcgtgaacataaggcccaaactatttgtcattgtctctgactctctgaccttcgcagagtctttctcttcttccgttgcttcaatg

SEQ ID NO: 35303 - DNA, 3000 bp, Unknown; identical to SEQ ID NO: 35302
  misc_feature (1)..( 3000): 2750-1469P.txt file - cDNA_ID_3086121; gDNA_ID_2926276; Annot_ID_205332

SEQ ID NO: 35304 - DNA, 3000 bp, Unknown; identical to SEQ ID NO: 28562
  misc_feature (1)..( 3000): 2750-1469P.txt file - cDNA_ID_3086129; gDNA_ID_2926276; Annot_ID_205330

SEQ ID NO: 35305 - DNA, 3003 bp, Unknown; identical to SEQ ID NO: 28561
  misc_feature (1)..( 3003): 2750-1469P.txt file - cDNA_ID_3086133; gDNA_ID_2926276; Annot_ID_205329

SEQ ID NO: 35306 - DNA, 3003 bp, Unknown
  misc_feature (1)..( 3003): 2750-1469P.txt file - cDNA_ID_3086136; gDNA_ID_2926276; Annot_ID_143550
ttgttattgaattcgttcacggaaaatgctgagaactcttttcagttttgttgtgtaataaccttgcaaattaacattgcaggcagtagcagaaggcagcttactaaaactcccattctcaaccatatatgagtatcttcaggttcttcgatcttacaccaagctaatctttgttttttgtcttgaggcatatagtaactgcaaaagaaactgccataaagcgtagtgagaattcttcaacagagctgccatggctgaaattactttctttttgtgaatgtttctggttacagatgttgcggttgattgcagaggcattgaaagatgttggtccatgttcaatgttttatcttgctgctgctgtatctgacttctatgtgccatggaagagcatggtacgagtctcatgtccctaagactatgctacacaattcttgtatctgaaagatgttttttgtatatatttggtgaaaccagacagagcacaaaatagaatcaggatctggtcctttagacataagactagctcaagtccctaaaatgctatcagtcttgagatcaaattgggctccaaaggccttctgcatatcattcaaggtcaatctctctctctattctctattctttcttgtattgattctccgaaatccgatgatgtatatgcaaattcttgattcagcttgagacagactcaaagattctgatggagaaggctacaaaggctctaagaaaatacaaagtgcacgcagttgtagccaatgagctatcaacccgtaaggaagaagttgtggttgtttcaagcagcggtaatgttgtggttagacgcgaatgcgataagcctgaatcttttgttgaagataatctcattcgtctcatcgtagatcgacattcaacatacatcaaagaatctcacaactgattgctcaagtgtgcttctaaaggcaaagaaaagtttaaatctttcctccacataaaatagaatcatagagcatcttgttatgtgtatgagtgatgattaagtttaaccataatttaaacaatatttcagatttgttgttagatcttttagaatttaacacattttgaaatgtttgaatttataaataggtaaatcacccaaaacttcacgaattaaaatatttagcgttcaatcttttagttaatggattggaacgaaataatttgaaagtattatcataatttgcaccctgttcaagtcaaacacgtattctctagattaaaatatagttttagtcatgaaaatgtttagcatttttttttttataggtttaatcatctgtattgactgcgacaaagcaacttcgtcgttgacgaaaaagaatgcgtaaatgacaagaaatccattatgatatgatttttgcaaagaaaaaagaaaatccataagataacacacttgactttcttttttggttttacaattacacaatgaacaaagccactaatcaatacatatatgatcgatccaccgtaaattaaaaaaaaaacagtaaattacatatttgtttaatttcttcatcaaaattatggacaaattatatttacagtttaaccataatttcgatgattttaacaaaccttagttttactagcaagtataataatttaaggtggaccgtacgtatataacaatatttaatttacaattaccacaatcatatctttacgtatgtatatcgatcatcagtcgtccttacgtacgtttggtgatgttcctagtggaaacacgagaaggcgaagatgacggcgtcgtttcgagcattccaaaacggtccgtcccaaatcgtcggagatcggacgttcgaaacctactagacgagtcgccaggaagtcgcatgtaataaccggcgttagaaggagagtgatgatcgctgagcaaaaccgacgaaaagcttccttctcttttatacataacaatggctttgtacaaaaatggaatcaaaccctccattttctttttaaatctctgcaatccttaagaaactttttttttcttccttttgatgagatttttttttttgtggttttgtgatttgatcaatgcgagagagggcttctggtgtataatataagagggaagagggttgcgatagtgacgtggcgtgatgcttatgttgccacgtatgcttaaacgtgacggtaaataatgttcttgagaggatatgcatcgaaagataaattaaataaagatgttttttatgagacgatagataatatgtgaaagggaagtctcaacttacataaagaaatcttcatcttctcaagcaatcttgagtttaacatttttatataaatgaaagtatcctcacaaacaaatttgttttggtatatgaaaagagtctctactcaaaattgaataacaaattctcgtatgaagtataaaataatttattcaaaattcattcgtatcaaattacccaccgcactatcctcaaaatcttgaatgaagtcatagtttacatcatagattgggaaaagtttgatcccatagtcattatattttatatattatccaaaaagattagttaaaatgatataattataaaattttgacttcaatacagatataattggctctctcactcaaaaagcaatgacaatactttcttagttttgaagatcgtgttaggtgagggaaaataagaacaaacacatatatagccgttaaaattgaacataattctattttgggccgttatataaagcccaacatgtagaatgtgagcttatattgggcctcacgtggtttatgtcgacatcttctcaaatctgcttgctttcaaatatcaaggaatccggtttggttcggttaatgcttcaattttcaaatgtgatataagaaacaaaatcatttagtggctttttgacttcaaatcggagaaccgccaacgaagaatcgtcgtcttcttcgtcatctccgtcgctgatcgatctcattctttcttaaggtagagctggtggtttctgtaatcgccggtggtgatg

SEQ ID NO: 35307 - DNA, 3003 bp, Unknown; identical to SEQ ID NO: 35306
  misc_feature (1)..( 3003): 2750-1469P.txt file - cDNA_ID_3086136; gDNA_ID_2926276; Annot_ID_205327

SEQ ID NO: 35308 - DNA, 3000 bp, Unknown
  misc_feature (1)..( 3000): 2750-1469P.txt file - cDNA_ID_3086148; gDNA_ID_2926276; Annot_ID_143547
ggcctttggagcccaatttgatctcaagactgatagcattttagggacttgagctagtcttatgtctaaaggaccagatcctgattctattttgtgctctgtctggtttcaccaaatatatacaaaaaacatctttcagatacaagaattgtgtagcatagtcttagggacatgagactcgtaccatgctcttccatggcacatagaagtcagatacagcagcagcaagataaaacattgaacatggaccaacatctttcaatgcctctgcaatcaaccgcaacatctgtaaccagaaacattcacaaaaagaaagtaatttcagccatggcagctctgttgaagaattctcactacgctttatggcagtttcttttgcagttactatatgcctcaagacaaaaaacaaagattagcttggtgtaagatcgaagaacctgaagatactcatatatggttgagaatgggagttttagtaagctgccttctgctactgcctgcaatgttaatttgcaaggttattacacaacaaaactgaaaagagttctcagcattttccgtgaacgaattcaataacaataaaaaaatggtctaatgcatacagtttgctgatccataacagccattttcacagcttccaaatgtgagtatgaactgaaaaccaacaaagtgatgtataaagacacataatttgcaaccatagagagcagaaacacacacttaatatccataaaccatgaactacatttgaataaacatgaatctatctatatagattgagaaagagatgttctaagaaaaaaccttgaatgttagtcttatcagaaaactcaaaacattcaaggaatggatcatcgggaagagatcgacaatacggttggcaagttcccctaaagattcacataataaaccgatattaaaaaccaccataaccattaccaacaaaaacaaaaatctcacttatctttcaactacacacaattgagaaacacatgacaaggccaacgttacctcctatacagaaatatcacagcatatccagccttgacgaaattccttatgcaccaaatcaaaaccaatttagatcaaagagtgatcataaaaacagagaaaaaccacaactttattagggtttctataagagaaacaaaacttactcagtagaagcagcacctctgtttccggagctgaaattatcgatatacctaacacatcgttgctccaatggaaccgttgttccccctgaagtcacacatacaatcctccttccccctgaaatttaaaaaccctttgaatcattttcaataattcaataatgtcacgtatataatcaacagctatgatcttgccttgtgacgatgaattcagtttgatgaactcattaagattctctagaatctcctccatgttcttctgaggtggggatgattcgaaaaacgaactaatttcatcttccataacttttccaaatccagagaaagtgattcagattgacgaagcttgcttcagaggagtgtgagagcgaggaagaagaacaaaacttgttgggcttttgatgatcaagctattctaattgggccttagaaacggcccatataatcacaaagtttatattcttgcaactatggacatttgtttctgataaactcacacttgtacgcttttagttttatttgtatcaagaaagtacctgagatagtgagttttggattgctgttttgccagattgtgtcgatgtcttttgtgtcacttatgcattatctttttctttttgtcaagtgttatcaaccaacacttgtgcattcatttttaacctacgaagttgattccgagaatctataactgatctttttgcgatcatgatgattacatcttttgttgacttgaaaatgtatgatataactatataagtatagatgaaatagttgagaagtgtgaacaataataatcattcgttattttttcttgagaaaatggcgatactattctatctaaacacaatttcaatatcatatacttcacatttctatgtaatttgacgtatgcaattacctttaattgataagtatatagctataggggtaattaaggggttattgtggctttccagtggtgtgggaagtgggaacggtatcttaaacttggttacataactccgtaatgggaccggacgcttctcgtgttaaagtttgtaacaacgaatacaaacaaaataaaatatgtgatgaacttaaaatctttgcatgtgcaaaactttggatcttgaatacattgttcatgccttattcttcttcttcttcttcttcttttttttgttccttagtgtttgttaaagttcgtaatatatcttggaagatgtatacgattacggaaaaaaaaccttataatagatttactaaaaacatgttctagaaaactctatactgtcacacgactcccatttaaattcttaagtttttgtatctatacggataaatagtgaaagatgtgatacaacaattactaaaattctttttacaaatcagaaaatctaccagaattttttctgaataggcaattactcgtcctcaaccaaaatgaataagagatgtagtgaaaattatacttgtcgaaaacggtccagtctaaattgataacgcaaaatcgagtaaaaaatgaacagtcaataatacttgtcgttgaatagtaaataaaagtagaaaacttaggaaacatgaaaatgtcgggatgatcatgacagacaatgaatctgcacaatcttccttagaaaatacaaacatgattttgagaaaatccaaaccaatcctcacattttctcgtttcaaaacaactcgggaattgcttttgtttactttactaagatatacgtaacaaatgtataaccacagcaataacataaataaataataatgacctttcattagtacataaacctaaacttttactcacatcttttgatcactaattgtccacactcttaattagttatacaacaaaatg

SEQ ID NO: 35309 - DNA, 3000 bp, Unknown; identical to SEQ ID NO: 35308
  misc_feature (1)..( 3000): 2750-1469P.txt file - cDNA_ID_3086148; gDNA_ID_2926276; Annot_ID_205324

SEQ ID NO: 35310 - DNA, 3000 bp, Unknown
  misc_feature (1)..( 3000): 2750-1469P.txt file - cDNA_ID_3086156; gDNA_ID_2926276; Annot_ID_205322
cgattaaaatgtaatggaacccggttttcaggactgaccaagagattttggggtctgcaggcgccaatagattgtagtcctaccagcttatgttacagctacatcaagaacaatgcatcaccttgttctaaggctcccttgtgttgcaccttcagaaccgacgggtctcaaaccgcttacacgatcaggatcaacggtgggggatgcctcgcgtaccaaagcttcgtggggctgaatccaaacaaagaggttcctcctcccgggaaaaaatggcctgacacggggctcgagttgcaatgggcattgcctaaagaaccagtttgcaaaactgatgtagattgtaacctcttgttgggtaaatcaaaatgcttgcctgatccaacgagtctcggcctgaaacgatgctcctgcaaaaaaggtttggaatgggatccggttaacgcaatatgtaagtaaactgcataacaagtgaactattcaaaacaaatttcttgaatcagatcattgtgattgattagttcttggcatacatgtattaggtggtaaatgtcgccatgggaaacactgcaaaaagaagaagaagaccgttgttttcgcaggtacagaggatgaaccgaaaaaccaaaaatatattcaaatgcccatatgattgtactccattttaacttctttgctcttgaaggtgcggctgttgcggttgtgggagttacgctagcgattgcggtagcagtaattggaaccaaacatagccaccaaaaggttaaaaaggatatccacaagaacattgttaaggagcgagaagagatgcttagcgcaaattccactggaaaatcatcaagaatcttcactggcagagaaatcacgaaagcaaccaacaatttctcaaaagacaatctcataggcactggaggttttggagaagtgtttaaagctgttcttgaggatggaaccataaccgcgatcaaacgagcaaagcttaacaacaccaaaggcactgatcagatcctaaacgaagtccggattctctgccaagtcaatcatagaagcttagttaggcttctcggttgctgtgttgatcttgaattgcctctcttgatctacgagtttattcccaacggaacgctgttcgaacatctccatggcagttcagaccgtacttggaaaccgctgacttggcggcgcagactgcagattgcataccaaaccgctgaaggattagcttatctccactccgcagcacagccacccatttaccaccgcgacgtaaagtcaagcaatattttgcttgacgagaagctaaacgccaaggtttcagactttgggctgtcaagacttgtggatttgacagaaaccgctaataacgagagccatatcttcacgggtgcgcaaggtacattgggatacctcgatccagaatactaccggaatttccagctaactgataagagcgatgtgtacagcttcggggttgtgcttctggagatggttacatcgaagaaggcgatagatttcactagagaagaggaagatgtgaacctggtgatgtatattaacaagatgatggatcaagagagattgactgaatgcatcgatccactgctgaagaagacagctaacaagattgacatgcagacgatacagcagctcgggaatttagcatctgcgtgccttaacgaacggagacaaaaccgaccttcgatgaaagaggttgctgatgagattgaatacatcatcaatattctgtcacaagaggttactgagacatagctgtcttagaaaattaccaaaatgacttgtacccttgccctgtttccggttatggattggagaaaaacaattcatagaaatggatttttgtaaaatcattgagatgggttttgtttgatatcatatcaagatccaaaacatggtatgagacgatatagcagctaaaaaccaattaaagaaagataaaccaacagaaatctgaaacctatcgcaagagagagcgggttgctgcctgcaaaactcagtgtctttagtgaataaaacagtaactcctgcagaggaacacgcggctgcaagagcgagaagtgcagtgacctgcagaattccaaaagaaacctatcaaacaaataacctttaaaacaacaagacaccaacagtgaataagcatataatgaaatggaagataagtttaatacccaatcaccaacagtgaaaaggctcaataagatagggcttcgtaaatcactttttctccttatcgcatatacatcaagacacgcaagtccaaagctccatatcaattgaagacccatagatgcgactaagaagctgaaatcattggcaaaagcaatctatcatcattttgtatcttttgagataaccccatacagtaatcgaaatatagaaataattccatttccacatattttttaccaaacaaagaaaaaaatcttgtcaaagtttcaggcaaatgttaatcatacacaattactagttcagttagctctatcttcaaaagtttatccaagaaaaaactacaaagtcaagatttttgatacatcagtgtccaatgtcttcaactaaactaaactaaaccaaaacaccaagaccaatgagattgaagatggacaattaccagaaagcagtgtaattggaaaagtcgtaagaagaaaccataacaccaatggaagcagcagcagttgcacattgccctagtctcagtatcaacccactcattgttccaggactcccaatcatcttcttcattgatcagaacccaaaaacaaacacaataaacagaacaaaaccaagactttctatcctgttcctcaccaaaatccccgggagaaaaaaatcgctactttacaggaaattgatcataaaaaccctaaacccataattttattcaggaaaatttcacaaacccaaatctcaaaagttgacttatgatcataaatcgtacggaattgggtaattaagagcatcgccaccagaaaaccaacattaaaaatg

SEQ ID NO: 35311 - DNA, 3000 bp, Unknown; identical to SEQ ID NO: 28553
  misc_feature (1)..( 3000): 2750-1469P.txt file - cDNA_ID_3086160; gDNA_ID_2926276; Annot_ID_205319

SEQ ID NO: 35312 - DNA, 3003 bp, Unknown
  misc_feature (1)..( 3003): 2750-1469P.txt file - cDNA_ID_3086162; gDNA_ID_2926276; Annot_ID_143541
ctgtggttctgactgctttgttgatttgtatttcaatgaaagattcaccattgttgctgctatccttcgacgcttcattcatccatcccacctcgttctccatactattagttaccgggtcacttcccaaaactccatctactacgactagttatagatatataagatttgatctcttgctcctaattttttaacaataatcaagtagattctaattgatatacagctagcagctcatgtgagctcttagtgcaataatataagagaatgaatacacgattattgtctgatcaaattaaatctctcgatgggatcgggggattggtggtataaatcaaatttttaataatatatagtttggacactagtccctgataatatcataatgtagctaactgagttgtatttatcgccaagctcttgggatatcacatgcatatatcacatgtcacattttatttgctttctcgttttgaattgtattttggtttctcatttttgatggagtcaaattccgaaaagccggaaagaacagctaatggattaagtcttgaaatgtatcttttgtatacgtgtttcggtttttgttgtgagattttattggatcacgcttgaagatattatttcaagggataaaaggataaagaaaaaagattcttgataaaatattatgttagcttagcttggtgtacgtacaataatatgagaagagcgattttgatctcaccgtaaagtactttttccaaacgggtttgcactagatggcccataatgaagttttattaggcccatggatgatagtccaatgaaatgatgtaatcaaacgtaagcaataagtaagaacttatgaagaaccaactggtttgcttcggtccatcaatgaacgttatgcaccgtggtccgtggtaattagacttttctagttcgtatttgaaaattttcaatagttcttattttgtaattatcataatctctaaacttttgtagtgcagttgggaagtaaacaaataaatataaaaataacatggtttatatagctcaaagaaatgggatatgttttttggagaactttttgattaaggatattgggtagtgtaagttgaaagtaatgttcttgttaaaaataatgatatagcattatagcgtaaggagaaattgaaagttgatgaaatatttgtaagaatattatgagtacgtagagtagataatattcttttatatatgattaattaactatcactttagtattgtgtaaaactcaaactctcggtatgattatagacgcaatgacaaaatcatgatacttaagtcgttcaagtattattaaatagatacttttgtcatcgtgttgcgtttgttatacaaaaggtggaacagttttgagttttgaccttatttttagggttgttttgtaagggaaacaacgacgtgcaatacgacaactgatagagaacaaaggacaaaacattatctttgtttgaaatgctcgacaacatctacatattcctatttaatcacgacattacgttacttgaaaaattccataattcaactatggctatatcttatatatttgaaaagaagttatagaattggaaaaaacaagaaaaatgagaaatttttggcaaacatatagtataaattatgcaatcaagaagaaaagtttagggattttgaaaatgttaaaatcttctcctagtttctaagcaaaaagtataggttgaaactattttcacaagtaaatttttttaaaaaaatctatgaaattcgagataaataaagataattatgaagctacagttcatattaaaaaatcgtgttgtgaccactcgatcgtaatacacacgcaaagacaaggaaaacgttggagatttgggttgggttagaaccaaagacaaagcatcactttctacctttatccttaagaatggaccaaattgtggtcattatggaagcctatacggctaataccattcatttatcaaacttgttaaatgtaaatgaaaacatagaagaaaatttttattgatacttattgagttattgaatttcacttcacgtattgaatgtgtgtgttatctttgaagagaggacgcattcattgttagggagtgaatgctttacggagtaacatttttgaaatttgtaaacttttttagaaatttaaactatcttcgatccgatccgctgcactatataaacaaaaattgtatatagtaatattgaaccgtaaaaaaaagtagaggaattttcaaggttgtgtgttaatataaatgaacaaaatttaaaatactgacaccaaatatatcttgtggaagttgtaaaaatagacaataaatgggataagtaatagtaatacaaactgttatagaggtattgtaccgttgcatacttgcatatcatttgatgaatacgactttatttttatttttatacttctttagttccaaattcctaatttaatatggttacgtaatttgtaaaaaatatataatcttattgaatacgtcattttatgattttatagttatcaaatctcatcgtagatggatccgtcaattacacgattcccataatagaaaaagaaacagttaattagtaaactatagtataaatttaaatcttgtcgtcattgatttggattagtttagaattaaacccgttgattaaaataatcacctggttactgagagaagataaagttggtgtttttaaatcttatgttgaagatgcagagagatcgaggaagacagagcaagagaacctcttcactcacagacccactcactgcattttctcttcttttctcagaaaatacttttttcccccgagaaaatgttccacaagaatcagatcgaacaataagggttctcataaatgtaatgcgattcaagcacgagaatatccacagagagagatacagaaggctccttttgagtatttgagcaagtttcagaactcgaagactgtgtttgaaagagagattcaggcgtagtaataatg

SEQ ID NO: 35313 - DNA, 3003 bp, Unknown; identical to SEQ ID NO: 35312
  misc_feature (1)..( 3003): 2750-1469P.txt file - cDNA_ID_3086162; gDNA_ID_2926276; Annot_ID_205318

SEQ ID NO: 35314 - DNA, 3003 bp, Unknown
  misc_feature (1)..( 3003): 2750-1469P.txt file - cDNA_ID_3086173; gDNA_ID_2926257; Annot_ID_204612
tagaaaaattagaggaaggtataggtcctgtgagttcattccagctaagatccctgtagcgaacaagaagcacaaacacattcacaacactggaaagagaatacatgcattgagattgatcagaacttacaagtatttgagatgacgtatcttgctaaaatcaggaagtgcccctttcaaactacaatttctaagactcctgtaagtacaaaaagacgaacaaacataataagttctctctataatcttctaaatgaaacaatcaaacaaggactttaaagataacagtggcctgaaacttacagctttagaatattcgaaaagtttccataggaagctgggatatcggatccactgaagttgttattatcaagttgcctgaaattgaggacaataaccataaatcaaacaaattacttgtagaacgaggtaaaacacacaatcgagaaacatacaggatttgcaggtttggcaatgcagagagttgtggtggaagatttccagataatttattgttgtctagcagcctgtaaaattagtttgacccctttaaccatcatgatgtaacaaatcatgggaacagtggcaacatcgtggcaatgactcacacatgaaagatgttagtaagattggaaagctcaactggaatctggccggtcaacgaattattgttgaagtgactgtacaaggccaaaagaaaaatatatgagatgatattgaaaaagctgcgtctcagtttgatatcactgtctggcttgatgttcagactcacagatgtttcacttttttcaagttggaaaaggactttggtattggtcctgtgatgttattctcatctatctggaacctgttcaagttcgaaagatacccgagttcgcttggtaaagtccctgaaagtttgtttccattcagcagcctgcccacaggttacagaatcagaagataaagaaaaggaacacacatgcttataaaaaattgttccatctagagcaatgattatttatcaggtaggtccaacttacaagagtaccagggatgatatctgtcctatctcgtttggaattgaaccacttatattattccacatgaaatctcttcatagatgccacacgaaagaaatattagacagtcagtagtgtaaccaaaatatagggcgttccaaaataaacactttgcaaagctttacatgttgaaacttacaatatttcgagatgagctaatttttggagctctggtgacaaagtcccggagagattcatattcatcagcaggctgcttggcaataaaaggaaggatcagggaaggaatatctggtcatgtaagcaactgttccgagaaaagagaaaaaaaaaagacaactgaaccagcttctcccaaaagtaaagccttttagttaactccagcatatatacaagcagactaacagcgaaagcaagaaggtacataagaagaaaaaaaagaagcaaattcatacagttctcggacatgcaggtagtcgtcagtaccaatctcattaaagcagataactccagtccaatttgatctgcaagggtcgcctctattccagtttctcaaataatctttagggtcaagtagacttcttttaacagatcgtaaagcagtgacttctgaagggtgggttctttgagcatcggcaagcagaaggacgcaacaacaggcaacaaggagcgcatgtagatagagtctttgagggaacaccatggtgcctttggaaagcgtaacagcgtaagaagcagataaatatagactgagaccaaatatccaagcgcacaaggagctcgtatttaagacagaaatagacacagcaggtctaaaattcaaccccacgcaattcaatagctcaaagacaagatcattacctcactattgagatcagcaatactagtactagttccctaagagaattttccaaaaaggcaagcggataagagaaagcttctgggatggcaaaatccctgaaacgggcgagagaagtcaaaatatgcagacggcaatgcagatcaaatcaaaacatcgggaaaatgatgcaattaatcgagagagaaaaggggggaagaaatgaccttgatgggtgtttgctaggtttgatcttgacttgtctgccattttaaaaagcttaaaccttcttccgtggtcataattcggaactgggttgactctacctacctgctccacaagtaccctcgtgtgtgtgagcctttttgaccaatagtaaagtagaaagtagaaagaaagaaacccctttagccattagcctgcatttattagtatcagcaacccaacattgacggcgtttcgagacgcgctcttgtccctttcttctcatgtcagtcaacttctttctttcttctcagtcagagtctcagagagagagagagatattttattcctccccaatggctgggggctgtagtcacgcatgttattttagtaggcttgcattaaagcccatttaggttataaggcccataatgtatttaataggctgcccatttagagaagactgtcgtcgcttcctttaagtcaaccaaccctttggattaaatccacaatgcaattcgtccaactaaaaaactctcaaccgttgatttgattcacacacagacgagacaagacaattccgtcccctctctctctctctttccgcagctcgccggatctcctttgtcttcttcccctgggttccgtttagctcaatccctttttaggaaagactccgtggctcgatcctagtcttggcgatcgcctctaccctttttgactctattcttcttcttcttcattcatttcccctcttattcattgcctttagggtttcttacacgatatgagctaaatacgattttgatttcaccctaagctttcttctattgcttctcgtcgttgcaggtactctttttttttgttttttggaaaacgcgttttctttccaccactgttagctaatcatcttcatatatgcttttagggttttcttaaatg

SEQ ID NO: 35315 - DNA, 1826 bp, Unknown; identical to SEQ ID NO: 28550
  misc_feature (1)..( 1826): 2750-1469P.txt file - cDNA_ID_3086173; gDNA_ID_2926276; Annot_ID_205313

SEQ ID NO: 35316 - DNA, 3003 bp, Unknown
  misc_feature (1)..( 3003): 2750-1469P.txt file - cDNA_ID_3086199; gDNA_ID_2926277; Annot_ID_205387
ctctcaaagtctcctttcccaaaccctaaattcttagtgtaccaagcgcaaaatcgtttcaaaataccctttttgtaataaaaaaaaaatgtatgcataaatgaaaaataaaataatacaaaatcatgaattaaatcatagtaagagattccaaattaaaagaaaacaaaaactcataagtaactttttacatgatccattctgattgtaaatctcgattatgaattagtgcaatacaaaagttggtagccaaacaaatggtttcaataagtctggtttttggatagtgtcgtgacttggtaaagtaacatttcactagatttgcttgtccgaagccaatgagaatgactcacttttacatttctgttcacaccatcattattatcaaaatctcgttatcattgttactaccattccatacgtacctttaatccatacgaccaaaataatgcataaactccctgcagggacaaagagacgtcggaaagtacgagattagaccactccaactgccaaaagaactacgcgggctaagacgtttcatttggcagtgacaaaaacaacgtcaacggtgaacagtgccaccatggccatcgtcttagctttttgaagacacgtaaatcctccttatcaaaaattataacaaaatataaacataagctaccgatctatagtgggctttttaaaaaggatgggccgactattcaagttatcaacacgtcgtcgtataatcatagtagctctttgtatttttgttccggacatgattatcttagtatccaaacacgtcacattcaagtttattctaaagatttttctctccggagacgttaagagaagaaacagccaacggattagggatcttaccgttctgcgattcgccggtgagtgtttttattttatttttccgatttcatatcggcttcttactctttaattcgatttccttatatgttatcgtgattaccttcccgagaattcatggtaaaattgatcggtatatattttgataatcgacttcaatttggtttatccctccttatgcttaattgcttcacttaccggttttgattctgacttgtattgatttgatatcgattatccggtttagtagcttcaagtgtttcccctgtgtccatgtatcgtcttggtcctgatgattttgaaatgttctgttttgtttgtttatgttaagaacagagtttgaagctttttttagagacttcaatggtgagccaaggaatggtatctcttacaaagtctctatgcactatgactccaagagtccgtctcaagaatccgaatatgttgcagaaactaaagactggatcttgtaatttccgtttcagaaatctccgtgtcttatgcacaccaaagctgtctcagtgggaaccgtcacctttcattcatgcttctgcagaagaagctgctgatatagtattggacaaaaccgcgaatgtgttcgaatctattgtctccgagagtgcagaggaagagaaagtagatatgtcagcgcaacaacgaactaattctcaagttcaggtacttaaatggccaatatggcttttgggtccatctgttctcctcacaagcggtatggcgcctactttatggcttccgttgtcatcggtttttctcggttccaacgtggttagtctactttctttgatcggtctagattgcattttcaatcttggagcaacccttttcctcttaatggctgattcttgcgcacgtcctaaagacccatcacagtcctgcaacagcaaaccaccatttagctataagttctggaacatgttttcactcataatcgggtttctagtcccaatgttacttctcttcggatcccaatctggccttctcgcttctctccagccccagattcctttcctctcgtccgctgttatcctcttcccgtacttcattctccttgctgttcagacattaacagagatcctcacatggcactggcaatcaccggtctggctagtcacaccagttgtctacgaggcttaccgaatcttgcaactgatgagagggttgacacttagtgcagaggtcaacgcaccggtttgggtggttcatatgcttcgtgggcttgtctcttggtgggtattgatcttgggaatgcaactcatgagagttgcttggtttgctggttttgcatctagaacaacaacaggtcagcaaccacaatctgttgcttctaagtaaagacagataaatgtttcttcgtttagtttttaaagtcatgtcaaagatttgtaactctttcttcactgtatagcttttattattcgtgggttggtgataaggattaaaaaaaaacacatattctttatgatcatattcgctcttttagttaggtatgtgatgttattcatttcaatattaaaggctgataggttgacgttaaggttgagaatatgcaaaggttgacacagattcctgtcaaagaaagacatttaagaatttacgaaaaatgatgaaaatgtttctcttaagaaagtagagcataatgtcgaataagactagtttatatggttttgtatttttactaagtcatgtcagaaagaagaagaaaaatatatgtactgtgttatagccttataagtaataggtttttgcatttggtgagtacttggtaacagtaaaaaaaagaaagttatacgttacgttgtgaaatatgatcagattataatgtatattctttactttagttgaattgttgttgttgtaattcatctccacgcgtttgcgattagggcgcgtttgcgtttttatcaattttaaatgaattgacagtattacccttgagaaatgaacaagacaaatagcgatgtcccactctattcattagctctgtctaatctctctcgatcgacgactgctctctctctgaaccggagacggtgtcacgggacgaatctaatcgccgggaaaccgttttttttttctctcggaaaatcgatttgaatctccggcgatctgatcgggatg

SEQ ID NO: 35317 - DNA, 3003 bp, Unknown; identical to SEQ ID NO: 28575
  misc_feature (1)..( 3003): 2750-1469P.txt file - cDNA_ID_3086207; gDNA_ID_2926277; Annot_ID_205384

SEQ ID NO: 35318 - DNA, 3000 bp, Unknown
  misc_feature (1)..( 3000): 2750-1469P.txt file - cDNA_ID_3086211; gDNA_ID_2926277; Annot_ID_205383
tcatatttgtgtttagctaataaaaacgcgtttttaatttttaacttcaacaaatttacgtagttaggtagtttaccacaaattaagagactttatgagtgaacttaataagtctttatttaccaaacttgtgaagaacagtccatcaatgctttgtgcaagtactttcttccctcacatacaaaataaattaaacgcctctcataaaccgatctgatccggtctatgactctattatgttccacatcgaatggtaaaccaaaccgaattccatttattaatcatgggcttttttaagccgagcgacaacaactctaggcccatatgaagaacaagagtagataagaaaaaaaattcaaattagtttactatccgttacaagtttaacccctctttctttaaaacgttacaattcgtttatgaggggaagaaaaattaaatcatttctgcttcctttgaacggggaagttaaccttagaatggtaaatagcaccaggactccacttttccgggataacgcctttcgcaatgatcttcttaccggacacggcggaggtaagcctgatgttgaacggacctttcaaaggaacaccagggcttagtctccaaacagcggatctcatttcctccattttcatatactgtcctccggccggttggacctcaatgcaggcgaagttcccatcaccgtttgcaaacttaaccgcgaatgacatgtagtaaggatttgctccggcgtcgacatggatagcgatcatagtcttcgggtgtttgcaacatgcactaaatatacgtatgatattgattagaatttagtatatggttttacaatccaacatcaatgtaagtttattagaatttattggttgaacaaaataagtcactaaaattttatatttcaaattaactctagtaaattaatataacattagtttaaaatgactatttatatttgtgaatattttctatccaaaaaacccgacctaaccgaaccaaattggtttttgactatacgtaccgtttgtaactaacttttagttctccaaggttgcgtagttgatctcccttgccacgtttggccaatgcaccaaaggccttaccgctaagatcaaaatggacagactccttcgtgcagccgggacactcatccgatatcatcaccttgatcggctttttcgtgcacaacggatggtcgcatttaagctataacatataaacatggttagtatatagttctacattacaaatatcatattcaatgaactgatattgttatatataaatacccaccctgtaacaagccccacaaccctttccgtctttgaacaatgaaggtcctccggctgaaaccatacatctgtacgggtgttttgccactgcatcaccatatccacaagctcctcctgtgtacatattttacgaaccgtgcatatataggtaaatatgggaaaatgttttcgagttttataagtgtattggaacaattaaaggtttgattaatacctgtggtgccaggaccttctcggtcgccataccacgtgatgccggcggtgttccagtgggttttattgtggcaataacatggcttcaatgagattgcaaagaaagttgtaagaacaacgataaaagaaaaacatttgagagatgaggaagccatgtttgatttagaatcttgaatgggtagagattttttagagcttatatatatatttttgtttttagctttcaaggttttaattagtttctggttgttagaatttaacaaactgaaatagctttaggtttctactaaaaagacaattatagacttctagttgtttttttttttttttaagacttatagttatcctagatttgaggaaataaaaaactttaaaaagcttattggaaactatgattgtttttctttttctttttagaaaccaaaaactataactaaaaccgctaccgttcaaacaaaggttaattttgattagtttcttatattcactttctaaattctatattacttattttggattatatatgtaacgtaatattaaggatcaattagagtaaatgatttgatcaatcatgtctcctaattatgtattcttcttactctctcttttatgtaaagtataatattgtaattaacttctctacaatactctagctactctctgtcatcttgctatacaataaagattatcaattacataaacattcatatcatcgggtggtatcaaaggaactcgatctctaaacctaaaattttctttctcaaaccaagcacacagtcgttgtcatgtacaatcctccgactatgcaaaacaccatcactacaaacaaccaaacacttcttttttatgtttttgaatatgattttaaattatactcaaaagaaaaagttacggggtattacatatgaatgtaaaaaacttgtcagaatatatacaagaagttagggattctaagttctaaccaaacacttcttaatctaaatatgactaatgtaaggtgttagaaattataatgaagttgtcatattttcaatgttttaatagtttcttatgacatcaggcttggttgatgtgtggctatatggaagctgaatttggcaaattcttcatatatacaacatcataagatgggaattcaagccttaactcataaaacgtatagtgtaagcaacaaacaagtaaccggcccaacaacaacaaaaggcccatctcagcccagtcaaatagaagaagacaaaatagactccagctcaaaacagagcaacgatcgtacagaggaggggcgttttgcctgatgactcaccatagccagctacacagcatctgccatattctagactgttccatatctacctccttctacaatgtctataaaagagtagtgtaaaaccctaatgtaattattgagaaagaaacgattttttaccaaaagcttgaaactttctctaatcgtttcatggtatcagagcctttgtagccttaacaggtatttcaaatg

SEQ ID NO: 35319 - DNA, 3003 bp, Unknown
  misc_feature (1)..( 3003): 2750-1469P.txt file - cDNA_ID_3086230; gDNA_ID_2926277; Annot_ID_143583
tactatagaaagaacgttcataggactatcataagaagaagtggatttgttgcttttggactagcatcattcttaaggtttatgttagcttgctaatgttcttagatttggatttcgagctttcttgatatcggcttgaactttatgctttgtatttttagtgtatcttgattccattttagtttccggagaattcactgtttcttccggcttatgactttggggacttttagttgtccgctgacttagtttccttcttttgggcgtttggtttcttgtaaggttccatctcaagttctaataaaatttctagtgacaaaaaaaagaaaaaagaaagaacgtttgtggaacagaccaaacacttcaacacgttgcgccacgctattctgcgaaccttcaatcagtttatatacaattttgttattttatgaattatgatgatatatgtgacttaatgtattattttgtattaaattttaacaaattcatgtattgcagttgtaaaagagaaaagaaaaaggagtcactgttctcacatcaaagccctgcagagatatttctgtgtactctttaaaactgatgcctccatccaaagtacaatattggaatatgtttttactgcatatacacgcaatgtatttacctaaattctaattcaattgtaccttgtaattagatggttaagacataagaaatcagatacatctgcccgaattagagccttatgatgattggcggtgccacataaaaattgaacacaagatagtgatgcatatgaatgtttatattttagccgaatatgaacacaatgttcgcaacaattggttccccattctttatatcatatgcatgtgccgtgcgtgtttgtacatatatgagtagtttctgtatagttgaaaaactgaataaattaatgaaggagcaatgcatgaaagagacataagaagataaatgatagggaaaaaatatgtatatataaacctaaaaagagggccataggaatttatagaaccaaagtgcaatgcacttcggatcgtcggtcgactcatctccttcattgtctccatccattttcccattccccactacatttttatagttatctcttcaatgtttaaaataatatgtcaaaacaactctttatcaaaactaaattttcgttacttctggtagtaaggatatttctaaacgttatcacattagttattaatcaaacctgtgaaagacatgctaggttactgaagaatgatattagatacttgtgtacactctattctacaacgatcgaagctagtcccacttctgtgtctctttctttttctgtaagtgtgattgcaaaatgcgaaatattcatgtaagcacaagaaacaagatagttatacattcgcatcactttgtattaataaattgttgagccaattttgttctctatttccttgttttggtcatgttgaaattcaactctatgattgattacacattccggagaatattattttattttctttgaacaagaaaacataaaaaaaaaaaaaaactcaacgggatactaaatgatccaactcacaaatttcaacaaaattaagaaaaaaaatcggaaaacctttttaggagatggcagaagaatttaattaacaaaagggagagaggcttattgaaaaaaataaaattagtaaccttgcatttatttaatttccccttcattacttgtttaaattaataaaactatagactatgatctataatgagtttattgcaaataaggcatttgtcttagatatatattttattttaggcacttttgaaatgatctttagatttaggcacttctttcctggggaaagtcgtttttacccttacagagagatgatgttgttctttctttgttgatgaacttttacgttttacactagaaatcaaaaatacttgcgaccaacaccaacaactttggagtcattgattacagagtgatgtcagcgacgattggaaattcagacgactaacaatcggtcctcatgagatgtgaatgcgatctagatttttaacatcccacattttgagatctggaaaaaaaaaacaagaaacaaaaaagtcccacgatttagtattacgatttgcacgtttttttgttcagtgatttttgtgcaggttaaggaattcaagaagtgattgatactttgttgattgctcaattgatgttcataatcatgtctacaagtacattgatttttgttcatgttaatggtgtttgatgataatgaggatggttgtagtgttgtgttattgtgtgtatgtaagaattgcatactctatatttgacggtttgggtttacaagtctaattctagggtatagcgtttaccattgacgccgttcgttacccctcgttgtcaaagccgtgaaccaccaccaaatctttgtgctatcgtcaaagcttcatgcctaccgtcgaagctgcaagtccactatctaagccatatatctttggatgtcaaaagaaacttaaaattgaatcagagatggggatacaatttttagaagataaacacattcttttcacctcattctcaactccagttcatagtttaagggcaaaaatgtccgtaacaataaaaattgaagtattatatgcttttactgtttagagtgtctgttttgaaagaaatgttttcaaaatgcttgtttagaatataagctcgatctataatatatgcgtttttaaaaaaagactagtatatgcattatgtaattcatggttaattaatcctctggtaagtaaattaaatagcacatgcatgttcaaagaaaaatgtagacaaatatattaaagtggataaataaatagaaaaaaagggagtggtcaggtcagtctcggtgcatgctaactctatgcacgttctcatcttcgtctctttcctcacttacactaattctctctctctatattaaacctctgaaccagtgaccacatacatactcagtaagcgagtccgagtcaacaatg

SEQ ID NO: 35320 - DNA, 3003 bp, Unknown; identical to SEQ ID NO: 35319
  misc_feature (1)..( 3003): 2750-1469P.txt file - cDNA_ID_3086230; gDNA_ID_2926277; Annot_ID_205378

SEQ ID NO: 35321 - DNA, 3000 bp, Unknown
  misc_feature (1)..( 3000): 2750-1469P.txt file - cDNA_ID_3086234; gDNA_ID_2926277; Annot_ID_143581
tgctatttgtaaaattatgagccttctaaccaaacgggagtgtctatcacgctctcaacggagataaagtcaaagatatgcatcccacaagtttctctctttctcaaattcctaaaaaagacagaaaaaagctacgaaagtaacatcccaaacaaaaaaacaagggcaaaatagtcatttacaaatagtcgatttttataatttaaggttctttgtttctccacctcccaagctccaactgaaaacgactgcaaagcaacctgcggtctctacctgccttattacgctattatacttttttattatttatttaacatatttcttggttttttaaatattattattatttatggaccgacttgcgaatataataagttttccataaccaatttatatatctttttttctccttctttatagaatcaattcttcccttttttattttgtttatctctctctctctctcattctcttccaactcttcctctccttcatattctccgtctgtcttctgctaatttaaggaaacaaaaatggtggatcttgaaagaagagtgtgttgcatgtgtggtgatgtgggattcttcgacaagctctttcactgcagcaagtgccttaatcgctttcaacactcgtatgttcttacatatttctttatctctataccacatgtacttatgtgtgtaatttactcatcatcatgcatatttacagcatataatacagatttagatcgcagtagacggtgagatcttgtgccacgtgctttatatctatgtagctgatgatcattcatcatcatattaaatcaaaagcatgcatatatcatatacatatatgtgtgtatatattgtcaaactagacaagaaatgtctcaacaactaccatatatacatatacatgataaatatacatggattatcatcatcaattcatgaccatgatcataatcttgatacaggtactgtagtagctattacaaagagcaagctgatccaatcaagatctgtgattggtgtcagtgtgaagcaaaaagtcgaaccggagcaaaacacggtgttaatggtggatcgtctaagagatcgtaccggtcggaatattcttcacctcatcaccaaatcaaacagcaagagattaaccaaaccactagtagtagtattcctccagcagccgacaagggaaaaactggcgtgccttctcctagaccggccactcgtaggtacaagcttctcaaggatgttatgtgttagtaatgttttcgaaataaccaaaagttaagagagacatagagagtttattaggatctgggatgatgataataagacacatgtctgtaagatatataaaactagctagggctatgatagctgttgttatggtttgagaagcaatgtaatatacctgcggagttatttcatggattagtaagtgtttgagataaattaattaagtatatctataacaaatgaaatctctctctttttttttgggttgggtgattgattttactagataagcgatgaattttgtgtgtgagttttgttgttgctatccttcatgatcagcatatgatgacactattctctcgctattcaaaagccacacatatagttaacaatcatttaaacactttttttttagttttttaaaaacaagttaatcaatggagccactattattagatttgagttttaacatgattgagtcattcctagctagttttaagaagtgtgtttattggattaagaattcgtgcaaatacatgtaaaatgtgtgtcatgactcatacattagtacatgttttgaatgctttaggtattccatgtggccctctagtaaataagggttttgttttgatgcaaacgttactagctaaacttagtttcaaatcatcaaagcgatatgttcgtcgtcatagtcacacaaatattgagatactaacaaagtagttgttgtatacgattagtcgagtagtcatcaatagttttgttgaaaaagacatttgaccactaaaaggcttacacatatacagtatatatagtgtagtagattaaatccaccgcgatgagaaattcgcatggcgattgctttacatataacttgactcagatccaaaaacatatctaatgatgcaccctcattcatatttatagctgttcatggtctcaccgtgtgcaggacccaaatatgaaaatatcacaaattatatgaattgagtcacaggcaaagcagtgtcacgaacatcgatccacatatattgctgagattcttcaggagaaattaatacatttttagtccttcgtcttgtttcctcttttggacccaaaataaaaaataatactataacaaaaactaaaagctgccaccttctttctctgccactcaaattcgttccatgtcttttctctttttaatttccttttgtcactaaactattttcgcttaaacaaagtgataaaacatgtgaccaaaccgcatcatttctaatcctttttagaataatgcatacatcaccataatcacatgaaaacatttggttttatttgctaaaagagatcgtccttgctttaccaaaaaaaaagatgagaggtcgtcactacgtctccactccaaaacgacgacgttgttatgttcaatgtgaaatatcaaaattagggttttattagacaaaagggaatcacaaacagacgattgaaatttgagagcaaacacgtatataggaaagggtactatggtaaattagttattggtaatataggaagcccagtaaactaaatttaggttcgggatcagcccattatccccaaaagaaggaacacgtcatcaggagtgagagacgagtcagaaacctctgtctgggctagaggttcttccgtggcatcggagctgataaactcgccacgacacgaaaacggaaaatcgatccgccatgtttgattttgccaaataagagagtagagttctctagttttgaacgaagaagaagacgaaagaagaatg

SEQ ID NO: 35322 - DNA, 3000 bp, Unknown; identical to SEQ ID NO: 35321
  misc_feature (1)..( 3000): 2750-1469P.txt file - cDNA_ID_3086234; gDNA_ID_2926277; Annot_ID_205375

SEQ ID NO: 35323 - DNA, 3003 bp, Unknown
  misc_feature (1)..( 3003): 2750-1469P.txt file - cDNA_ID_3086238; gDNA_ID_2926277; Annot_ID_143580
tgactcacatgttcatcattgtttctttctttttcttttaaagttacaataagttaataacctttcactttctttattttcatttgtccatttctttaatttgcgtaaaaggtgaaaggatatatgctataacaatgggaatgcttttgcccaacatcttactttgtccactgtgtgaggcataacacgactgttatggattcccaaacacattcattggatccattaagcatattagtaataataataactggatatttcgaataaattagtaaaattctaacaaattgcaaaatcaaactttttgtatattaaagaccacatttttatcttattttatattttattaatccagaccattaatgaaacatttagaagaaggaaaaaaattagtaattatataaatataaattacataaaccaaatgtcattcgaagtttcatgggtatataactttgattgaaaacggaatttgactccggaacaggacaaatcttggtgaaaaatatttcaataaagcaattttaggcaatacatgtacattcttttggttgactttatgaatgttttttttcttgtgtgtgtagttaagtagactcatgaattacgactgaggccactgatttaaaaaaaacatataaagatagtggatgtggtagtgagctcactatcacattagttttacgtacatgtattattaaacatgccgagcaattagtgtgtacttattctatattctcatgatgttaggatttgaattgaatgtgtgtgtgtgtgagcctccatagaaattaacaggaagacataaagagtcttctttttttcattggtttagtggtggcatgagtatctacttgatagcagccaatctttttatactattcttatctaagtaattaatagatatatatccttttttataatgggttcctcagccgtgagtaatatacttagctcccacacttacctaatcttttgtattttttttttcatttttgggggaaatgattatgattattgctgatacattacaatatccatatccgtttccacacgaatacctttagactttggacaatactataaattaaaagcttacaaattacaaggagctgaattcttcttttggcgccttccattatgcacatagactagtccaagtataattgtacacataattaatttatcaaataaaacataattaaaataaaagtgtatatatatatatatatatatatatattaaaacatgcgatctttatctttggaataaagtgggggaaaagaaaaaataagcaaacagaaagaagaaaaatgaaagcaacagcagaagaagaaaacaatggagattcatattgttcactcttactaaacattttttcttacatctcaatcaaaagaaatgaaaaaaagaagaaggaaatttggagagcatgtggggaaagctgaaattgttataccaaaattagcgaaacgtacaattgaaaaccaatcggaaataatgaaagtaaaccttaactaatttcattcaaataagttaagagagttacttataatgtaatttcaaaatttaaaaaaaaattgggcaaacaatatcaaagatttaagctgtctccggctcgttcatgtagactacatgatgtagtttgtgtgtgcgtgaagcaaacataaacatggttctatcagtttctagattcatcccaacatgtttcttgttcataattaagtaatagtaaacaatccaaattaagatgatcataaagatacaaccatatcttcttgacccttaccaaataagcagttttttttttcttttctctttttaaagaattcgatgtggttccaagtttaggaaagaggacggaacttaagaagagacactaattaagtgacttaaaccaagacatggtgacgaaaagatccacaagaggcaaggcatctcgcggaatctgtaaactttttttggctgctcataacagacttttacgcttgatagtttctttagaaatatagttctcgttgaagactttaaatagctgatgattcttgaaatagagatcgaaggattgaaagcttgctcaaaattctctcattgttaataaataatcgtttaaagtcttaattagtccaaatgttgaagaaagtacagaaaacgatatatttgagtggtgctgctggaacaagtaggataaaatacgtacaagcaatacaaatctagtaagtgtacatgcatgatcttcaattcttgaggattttgtgggaaagattctgaaaactgtactggcttgttgaatattctaaatctaaaatacaatttatcagtaagtaagcaaacatgtgcgtcaaagttaatctttccaagctgaaacaacaattgctgagatattaaaaagttcaacatactactcattgactttcttaacatttacaccaaaaagataaaataaaaaactcattgacgtttttccctttgaagttagtagcccaaaaagcatcaagataatgtctgtaagcccatgggcttatatccattataattttttttgtcaaataacaaataatatatgaaacgacgtcggtaacagctgaaacgacgccggtgtttgttgatccagaacgacagcgtttttagttattcaccctctcgaatttttccgaaacctgtgttttcccatcaccaagctttctctgaatcgccgccgtgtttacatttactgttgttaaggccgagagatagatagaaaaaaacatctgtgcgattttgccgcctctccctaaaatctttggagctccttcgtagttagccggaggtgaagtacaataaaagaaagaagaaagtccaagtgtctcttctcatctcttttctccagtaggtacgttttggtttaatttacagagttgattctaagcctaagagaaggttttctatcgattagagtgtttgatttgctgtaagggttgctcaaagttttgatttttagtttactagtgatagcagataatg

SEQ ID NO: 35324 - DNA, 3003 bp, Unknown; identical to SEQ ID NO: 35323
  misc_feature (1)..( 3003): 2750-1469P.txt file - cDNA_ID_3086238; gDNA_ID_2926277; Annot_ID_205374

SEQ ID NO: 35325 - DNA, 3003 bp, Unknown
  misc_feature (1)..( 3003): 2750-1469P.txt file - cDNA_ID_3086256; gDNA_ID_2926277; Annot_ID_143574
tattgtggactatggaaatttttaatgattctctaagcaaaattctgttatgttgttcttataaccatgctgatcattttgattgaagcatttgagatgttttatgcttatatatgtcttgtctcgtctgctttaggtggctattgaatttggattgtccgagataccgcacccaatctttattaagagtgaagttgctcccaaagatgggaaatttgatttcaagatttcagatcttgaagctatgtttcctgaaggaacagtggattctaatgtggatatggtttataaagaggtgctctatatgacttgttttgtcgtgtcttcgttcttaatgttttgttttgtgtgactatatctaaactttatttcgataattctcgattccttgtttgtactgtttaggtgccagaatggggagaatctgcacaagcctttgaggatcgatattataagacagtgaagattcttgcggagaagtatccttctgagaacttgctcttagtcactcattgtaagcaaaacagttatggcttttttagtttttaaccaaaattgatgttttcctaatcttgtagttcgtttttttttttgggatgggaaattgcagggggagcagtaagtgttgcattttacaactacttcaaagacgcaactaagtacgtggtagattattgtggtagtgttgaaatgagaaggcagattttgaatggtgatgggtttggtaaatttgaggtagttactagtcatggagtatcttataagtacaccaaaatcccagtccatgatcatgtagttgtaagccgccaatctcccctttaaccggtttatatgtgaatatctggtttaacgggttgcttcaataaaaaaaaatatataagaataatggttcagttattttccttttcttccacaaattttacaaaaatatgtaaagctaaagggttgtaatttttctaacacaaaattgttgttcaacaagaatttgtcagaacgtatttaaattaccattgctataagcaagagaacagtcttagcaaactgctgaaacgacaaaaaaaattgttctttagtattcaaaaaaaaactttgaactatacgtagtcttcctcatgtctgatgcctattgacgagtttattacaatagtaaaaaacaaatgaaaatacaataaaaagtcaatggtcttcttaattgcatgtaatatactatacttgcatcacgccatgaagcagcaagaaacagagcaaatgaagtctaaatcaaacatggatggccaccaacatgttttcatgatgcgccatggcgatcgcattgataagtttgagccacaatgggtctcgactgctgctcggccttgggatccaccgcttattcaaggcggcatgtttcgagcgtttcgaaccggtcagatgatccgatctcagatccattttcccattcaccgtgtctttgtctcccctttcctccgctgcatccaaaccgcttccgaagttatcgccgccctttctgaccccgacgcaaattcgtctgattccttcgacaaacctaagctcaaggtcaaatgaccatctacgtatatatgtgtttatgttaaactatggaagattttcagattttttcatagatcttaagaacagttaatcgtcgtgcatgttgtctctatgtcattgaaagtcctatgcatttgtttttcgttacaacgtgtttgaatgttctagttacattatgctaagagacttgttgtttgtagtgttatagtgtacgtactgtataagtcaatttaagaagcttgatcgtgtgcttcaggtttctattgaatttggcttgagcgagatgctgaactcaatcgcttttaagcctgaagttgctccaaaagatggcaaatttgatttcaagatttcagaacttgaagctatgtttcctgatggaatggtggatcataatgtagacccggtttacaaagaggttggtctctaagaaatctttgcgtgtattctttagtttgaacacaagtctataagtacaagaatttgacatgttctgtatatatacatacagatgccacaatgggaagagactttggaaagttgcaacaatcgatatgttaatttggtcaagactcttgctgataagtatccttgtgagaatctgttgttagtcactcacagtaagtgactctcacattctgtttttttttttttttcttgttttatagtgtttttgagtatcatagtctttttaaaaaactcgtccatggaaatgtaggagaaggagtaagctttacatatgccacattctataaagaggcaacgcacaggttagatttttgtgcttgtgttgaactacaaagacagatctcctctagtgaagttggagattttgaagtcgttacaagtcatggtcaagatggtatcatgtaccctccctctaactccggttaattttgtcattgtcttcgtatgatccctacgaaccggataaaaccggcgttagccgtcgcttgactgattcagtctatattgaaatctctgattttttttattttggttcagaatttgccttcacttagtaattttaaattcaaataaaagatattatcatcaccattatttatctattctcaattgtttcaaatttttgattgcggtttggttttgttgtcgattaacctctgattttctaaatttatttacatcaacatacttttaaatacataaactggttagctaagtctcaatcaattaagcaatgtggttattagtcatggagtatctttcaaattcaaggaccacaaaaatccccaatccatgatcttgtagtttccggtttagccggttttgtccattacgatgatgttaaaaaaaagttgtttttataaaacatagaaaagagaaggaacagaaattaaaaaaaataaataaaaaagcgccatgtatacaacaatcacttccaacgtagtctcaaaggtcacagcagcagcagcaacaatcagagcaacaatg

SEQ ID NO: 35326 - DNA, 3003 bp, Unknown; identical to SEQ ID NO: 35325
  misc_feature (1)..( 3003): 2750-1469P.txt file - cDNA_ID_3086256; gDNA_ID_2926277; Annot_ID_205368

SEQ ID NO: 35327 - DNA, 3000 bp, Unknown
  misc_feature (1)..( 3000): 2750-1469P.txt file - cDNA_ID_3086274; gDNA_ID_2926277; Annot_ID_143569
aaccaaaaagccctagttgatcctcatcgtttttttcatgtcatataacgtactagcgtgccacggccggtgtcacactgcctcatcgctacgaactataagtagccaaattcaacaaatatgaaagaaagaaaaaaagtaaaaaaaaaactcaacaaatatgaaaactttgaatttctttcaacaaaaaaaaaaagtgttgaagttttgtacttctatcaaaaaaaggtaacctaatatgatagtattttgaaatttctctatcactttctacttgatatataaaatggtaagatgagctaaagaaatgtttgagcaacaaaagaaaaaaaatgaaaaacattaaagaaattatactttttctttgttttcaaaattataattatacaaagcaggacactagtgacaggtccttttctcgtctcttctagtataaaactaagagaggttattagtttattacgtaatggaagtcacatgcttaaataacaacgatttctcgagatctggtccatctgcaccgttcaatttcagatcaatctgcgaatttaaacacatcataaactattagctaggtttatgacctgacttacttttatccgtgcttttgtttatgattacttcactaggttcttttagcatttgtcttttttggtttattggctcattgtaaacacaatttaagcccgatagtccgataccacaatatatctattcggtcgataaaaataatttattttattttgtataacaatacaaattgtcaacaaaaaatctactacaatttttacattccataaaatacaaacaaaacttgaatttccatagacttcagagcttgaaagtctctcgtataacaaagaggtaaaacaaataaactttggctatgttttttttttttttgcgttgaataagtgtgttaataataaaaggaaaacttgatcaaatatattttgtctttctattttcacaaatgcttttttttttggtgttttctaaaaatctaagtaacagtgttattaatggagaaaataaatgagaagaagggttatgtttagattgtttcctgtgtaaatgtaaaatcaaacatataaattaaacacgagcaggaaattaaataaatagagctgacctgtcttgtctgtgtaactgctgaaagttttgaagagactgaaggcagaagtaatgatggcaatatcaataacatatatggagtcatcattaattaaatagtaatttaattactctcttattagtcataaaaatcagccaacaccacttgtcgtgcgtttttatttatgtttgactgacagatgaaattaatgagaaagttaattatcttttggtatcacattgggaaaaaggaacaataaatgaaggagggaggcatggaatgggaatgcatgttggattcgcagacaactcaaaatccatgcagtgtttagggcttttaggttctctgtaacctatctatacgacaccgtatctctgccccctcctgattccatacccattttgagcccaccgccttattctccccccacctcacactcgcccattcgcgcgtatctattctttcacgcttacctattattccaacatcctcataatcacattttaacaataacccattgaagaataataattcatttcattctttaagaaagtttggtttgtaactaggttatataattttacccaataaaggttatagaatggtttaaaactactaagaaaaacataatttagctgatcttttctcaaaaaaaaaaaaatagttgtcataatcgaatgccaatgatgaaacatattcaccataaagctaacttaaagaaccttttctaaccaacaagttaacaagtgatggtgaatttggagagtgggtgagatttgttttaaggatataattccatgttaaaatgggaagtacaattatatggtttgatatacagtactacaaattatgctttaagagtactaatattaaagcgaagctgcattatttttgagatacgtaggaccccaatggtcagagggagaagtaaagttatgatgataacaataaggcatgatatgatgatgatgttcataatgatactgatgatgatgatgatttattaattattatgatatgatatcattatttgatcaccctcacgagcgcgtggattttaccgtctggtcgctgcttttttaatcctctcaatcagtcaacggtcaacgagcgagaaagccgctttcgtaatgaaagccacattacaaaaagccaattatgcttgtttgtgtgtttttgaaaaagagcttcttttacattttctttactttgaaactcgggtacacaaaatctctactcaattatattgtcaactactaatctttagtatcttttaaagtagaaactcagcttttatctatatttagtaaaacctcacatgaatggatttgggtgaatgagtttatcatatgtataagaatctaatataatatttgaaaaacgctcataggttattttgtaattaagaatagtgacaacttacaatataccaaacggaaaatgatagagaaagaacaagagacttggacttttttttttcttataataaatcaattaaccatggttgaaaagggatgtgaggtgaaagtaataactcctggttttaattttaaccatggttaagttaaaataaagagagaaggaagcaggtttttatgcagtatatatcatcattgaggtaacagaggtctctctgacacaagtcatcattgaaaccctaagcctccccacaaccccatatctctttgtctgaaaaaactcttttgcatatataaataaatataagccatatcttttgaaactgtactgctgcacaagtgtagaggcagtggcacaacatctttaagaaagagagagagaaagagtcatttattcatttcctcgcttaaaaatcttgagcacccagacagaattcttctttcttctttctggggttgagaaaaatg

SEQ ID NO: 35328 - DNA, 3000 bp, Unknown; identical to SEQ ID NO: 35327
  misc_feature (1)..( 3000): 2750-1469P.txt file - cDNA_ID_3086274; gDNA_ID_2926277; Annot_ID_205363

SEQ ID NO: 35329 - DNA, 3000 bp, Unknown
  misc_feature (1)..( 3000): 2750-1469P.txt file - cDNA_ID_3086278; gDNA_ID_2926277; Annot_ID_205362
atgtctaagattataggtttctttgttttagatccgatctttttattacactttatcctataatagataaaattttcttgatatgtttgtgatttttaatcatttggcgtgattaacgtaacgtgcagagagaaactcggacatgagatcgtttctccggggaatagacgtgaacagagctccatcgacggtggtggttgacgtggaggatgaaggcgccggagtttcgtctccgaacagcaccgtctcaagcgtgatgagcgggaagaagagcgagcgagagctaatggctgcggcaggtgcagttggaggaggtagagtagaagataatgagattgagagagcttcttgctcgctcggcggtggtagcgacgatgaagacggtagcgggaacggagatgacagttcgaggaagaaactccgattgtctaaagaacaagctttggttcttgaagaaacttttaaagaacatagtacactcaatccggtcagtggcatttccgtagttttcttcaataggttgactttttatatgtttttcattgactttttttgttgttgttggatgcagaagcaaaagatggctttggctaagcaattgaatctgaggacgagacaagttgaagtgtggttccaaaaccgaagggcaaggtagaaatttttattctattttaaggggttactttcgtaaattttatatagtccaacaaataaaacattagtagttattgctatgatggtgatatgtgtaatggtccattttatgacccataagattatcctaaaggattttaatgggtctctcatgtcttaaattaggaggtttggtttaagctattcagttttcccggtttaagaattaaaaccgccaatgttgtttttgagtcaaattttggttaaagtgttttcagttttccggttcaagaacaataaccgccagtttcgaatacaagaaacaaatgtacttcgggttttctctttcccggatagttaaaccggatatcggattttaatgttttggactgtttgtgtgtgtgtttataggacgaagctgaagcaaacggaagtagactgtgaatatcttaagagatgttgcgagaatctaacggatgagaatcggagattgcaaaaggaagtgagtgagcttagggctttaaagctttctccacacttatacatgcacatgaaacctcccactactctcacaatgtgtccttcttgcgagcgagtcgctgttacgtcatcttcgtcatcggtggctcctcctgtgatgaattcatcgtctccgatgggtccgatgagtccgtgggctgccatgcctctacggcaacgacctgctgctggttctcattagagtttaattagtctaaagataataggtttggtgatttgtttttattatattgttgaacggacttggaagttcttttcaagagttggtcccatgctcttctttcctttgttttattcagtttctatttatagctgaattctggataatggaaaatctactaatattattgtccaattattagtttggggaaagataagaggttctatcattctttattgttatatattttgattacatcatatctgtttttcaccaaatccagagttctattttaaggccatcgaatcataataacgaatggtgcataaactaattttcaagagcgtcatttattaaagttgtaattgtttaattggggttttctttcttttgcttggaacttaagaaagggatttgtaaagatgattattaattacagtagaagattagttagaagtataaagtaaaaagaagcaatgaaaggtgttatgattgatggagcaagcgtgtgttgtttgcatatgtaataagtaaatgttagccaatacgaatatcgagacatgtacgtgacataacatagcatttggtatgtatatggagatatttgggtccacatagacgaagtcagaccattagaatctcttgcagaacactgaagatacgatatttttttcttcccttatgtcaaaagatctcaaccgacagagaaagagaaaatgagaggtacgaccaagatatctctcggtgtttcaatttttggcagaggcaaaaatagagaaaattatacagaaactaataaatgggcctttgaaggcatgccacttcccacatgtggctatcgagtataggctttaggtggacagttaaatcaaaatgagcgttaaccaatttgtatataagccctggttggttctatacgctccataccaatcaaacttaatcacaaccaaattagtttctaccaaatcgaactggattttttttaatatattattttattaaatattaatactacaaggtaaaattaatactatataaagtgtggtgaaaccatgaaagcgtcataccaattaccaaccgttacttcaaatttttggaaaaaatgaaatgttgatgcaatgattcttatgttgaagcgattacaaaatagcactgtctcaaacttgtgaagtaggattagtgcatcatgtggctagtggtcccatagctaaaaaatctctgaagcttgcaagttggagattcgatttcaaatagatcgaaaattttagagatgttctaaccaaattttattaacacaattttttattcaaaacccaggaggcaggaacaatggacagcctaaacgtctagaactgatacgacggcgtttaggaaggggtcaaacgatacgacgtcgtataattctggattgaataatgccaaggtcaattccgtaaatctcggcaacggtctttgtgagcggcttcgtctttttgctttatggtggtggtctgctgctgcagatagtttccattctcactctttctctctcaatggttagatctgtcttttacgtcgcttcgaagtcttctttcttcccttcacatacccaacgaatcctctcaaatccctaattatccaatttcacactcgagatctcgaattggagtctctcatcatcaccaatg

SEQ ID NO: 35330 - DNA, 3003 bp, Unknown; identical to SEQ ID NO: 28626
  misc_feature (1)..( 3003): 2750-1469P.txt file - cDNA_ID_3086282; gDNA_ID_2926277; Annot_ID_205358

SEQ ID NO: 35331 - DNA, 312 bp, Unknown
  misc_feature (1)..( 312): 2750-1469P.txt file - cDNA_ID_3086286; gDNA_ID_2926277; Annot_ID_205357
aagctttgaagggctaacgggtgatgctttggtgaaggttttttctggtccaggtttgtgcttattttgcattgcttctctttgattcacgtctgcataaacatcaaataattcatttatgtttgagttgattatgtagaaaaaattattaggggagatgctttatgataagaaaaaaaagtggtcttgtggtatcttaaggcagaaggaaaatatttagtgtcttaatgagtaatagatttatctgtctatccagattttataactgagttttagtaacttccggctcaagcaaaaaggaagttcgatatg

SEQ ID NO: 35332 - DNA, 3000 bp, Unknown; identical to SEQ ID NO: 28576
  misc_feature (1)..( 3000): 2750-1469P.txt file - cDNA_ID_3086294; gDNA_ID_2926278; Annot_ID_205402

SEQ ID NO: 35333 - DNA, 1646 bp, Unknown
  misc_feature (1)..( 1646): 2750-1469P.txt file - cDNA_ID_3086299; gDNA_ID_2926279; Annot_ID_205413
ataaagtttaaatttatcaagcataatataatatgaagtcagcttgccgccaccagttgatgcatggcttctaattattggagcattgtacgtgatataggtgttaatggagatggtttgtagttctttatcaatacggatctttatcttaccaagtcatttctaagtgttgcatctatgtataaactaatattggagacttcaacaaaaagtagtatatatatacatggtttgcacattgtgctatatatatgtttagatatataactcaaaaacacctttattgcttaacagtctttggtcggaggggggtttggtgaggaagacaatgaaaattattattattaagagaaaagggaatctttctggtttcaacacaaactaatctcccaaaaaaaataaaaaataaagctagcaatatttagaagacctaaaagagttaattagtgactttaatgtgaaactttttcataaaaaatgaatgcagcgatttgttggaggccaggattgcaaattgtttttaaacttcgaaagcaacaaagataaaacatcttagaaccctaaagtaaatccttgacgttagagaaacaagcttacttaaaatctaacttggagatgaaaataaagatttactgatttatgtaggaatacgaaaccctaatttcttgatttaaatcaaaatggaagataaatgtgcatcaaaactctgttttgtgtgtaagattcttcttacaggtttcatcttccatgggatataaaagaatttgtgaacgtcaatgtagcaaatgaattcacatcaagtagtatttccattgatgtctcaggacgtcctttcaatatctcatctcttactacatcaagaagattttctggaagctgcacaacaccattcaatatctgcataaccacactcatatccggtcttattgactcagattgatgtgaacacaacacacctagcttcaaaaccagctcaatctctcccctgttttgttcttgacgtatacattcctctgccgcatcgaaaatgttcccatttacccaaagctctaagatccaatccactagaacttcttcattttccgcttcacgtcgctcaatcaaccttctaccacaaacaacttcaagcataaccaacccaaaggcgaaaacatctgtgcttgtagttgctcttgttgaaagttaaacttgattttgaatcaagtttaattattggatcaattatccaataattaattatggccaaatccaagttctagagttttctctagaaatatcatcatttccacctccttaaaggattctagaaattttctagaatcatcttccacctccttaaacataaaaatctagatactctaatagaataatctagataatttgaataatgtaatctagatcttatgtaagaactctctagacttaagattaaaatattttagatattttgtagtttggaggctataaatacctcctccccctctcaaatgttgtaatgttgtgaagttgtattcaagtttaaagcaaagtaataaaagttctatttcctaaaaaactctctcaaaacacttaaacactttctccattacctctaaaagaattttactctaacaaagtggtatcagagcttgaagatcctaaagatg

SEQ ID NO: 35334 - DNA, 100 bp, Unknown
  misc_feature (1)..( 100): 2750-1469P.txt file - cDNA_ID_3086310; gDNA_ID_2926279; Annot_ID_205410
gaattcttttatactcttacttaactctcaatgagatgataaaaatatctcatatgatcaatttcttcccataagcaaaaacaaaaaaaatcctaacatg

SEQ ID NO: 35335 - DNA, 1099 bp, Unknown; identical to SEQ ID NO: 28577
  misc_feature (1)..( 1099): 2750-1469P.txt file - cDNA_ID_3086318; gDNA_ID_2926280; Annot_ID_205418

SEQ ID NO: 35336 - DNA, 3003 bp, Unknown
  misc_feature (1)..( 3003): 2750-1469P.txt file - cDNA_ID_3086322; gDNA_ID_2926139; Annot_ID_197359
agctcttcatactatctaaagcagtaaatcccaattcatgctagtatattctcatactattcctctaagatcgtgtatagatactactagaatcagatatgcatgatcttatatctcttgtaaagaatcttacttgtatcattttcttaattcgtgaaaaagagatttctctttctctctacatggaagatagcttattcaaacatatgaaaacataaaataatcaatttacgcgtctttctgatttttgtcatattaggttaaccgtggcgttggctataataatagcaactgcaaatatctttcaatctttttggaaattgaattccactttttataagacagtactcacacacacaacactagtccacattccatattgtacaacgttgtaataaattccgtcgaagccattcacgtgctacgcgtctccggagcgtcgcttgggatagtaatcatctgaacaaaatactttagtatcaccatcatggatggacccatagtatcactaatcagttgcaaagtaaatttagatttctattttaagagtatctctttaaatggtatcaatttatgacgatacccaaaaaaatagaacaattcaatagagattttctatttaatagtacttaataattatggattaacttccaaagcagtgccaactatacaataataaccaaagaccattttttcaaaataacattgttaaattaatagatcgatttatggaaaattagcaaatttcgataaaataaatatacttaaataatcaatgtaggtggaacaatatatagactagatcataacccgtgctatacagcacgggcattaatattttatataaattaaattatatattttatttgaattacataagaaatagtatagtataaaagtgatgtcataatattttttaatgtttttactatttggatataatgctgcattggattgactttgtttaaaaatgttatttttataataaatacaacatatgtagtttttaagtaaatgtaaaatttgtatacgagttgttttggtaagaaacatgtttcctttgtattagaagatttaatttttggcctaacttagaattattctttgtataatattttggttatatttgtggatctaattggatcctatattagattatctttgatagggctcacgaaaaaacggacccgataaccaatccaatatccgaaccaaaaaaccgggttagagcgggttagaattttaggaaatttccttattgggtagagttttattaaacccgtggatatccgattggtccagaaattacccgttacccaaaaagggtattcaaaaacccaaacattaatttaatatctaaaatattaattatatttaatcttaatagattattatctaagattataattataaatctaaatatgtcaattaattttgtacctaaatatccaaaacaactaaactattcaaaaattatttgttatgtttgtcaaaatttagtaaaatatattcaaatataattaaatatattaaaacttaacaaattttaaagtttttttttttggagacccgctatctacatagaaaatacccgtttctatttttttgagtatttttaggacctgaaactttttatccaaactgacccaaatccaaatggacccgacccgaaccagaaccaaatatttcgaattattctattgggtagtaaatcatatacccattaatcccaaacccgaacaggttctacccgacgttactcatatgtccagctctattctctgatttaattatctaaaaactccccaaaaatcatatgttttgctgactactttttattcgaaaaattttacattctcttctaccaaaattatttcgtaagacatcccaaaacccttggaataatgatttcatgaatgaagaatcctaatttgaatataccaagaggttttgaaaggttttaagtttttgataggtgtgtatgtgagaaggtacagacatcgtgctgataatctgcttatttataattttaacctccagtatatcgcaggtaggcttatattttagtgaaactaaaaacttttattgtaaagatgattataaatatatgatattattttatttgattttaaatgtatagtaaactgcgagttgtatatgttttgttgatattatttatattgtttagtgtttaaaattatacacttgtattttgattgttaattttagagtttcacttgtagtataccatcttgtattaatatcgatctaaacccgtcaattatagaattttccagcttgtattaaaaattaaatcacatcatacacataaaaaaatctaatatattattaattattgtagtatataagattataaattttcaaaataatatatatgaaattgaatataaatattcaaattttgacccagtactcagtagaaagttttcttaaatctatttttgacccgttataatattttttcatgtattgaatagtttatattcgtttttaaaaatttaaattatggcatattcgaaaaaactctaattatttttttataacgatgatattatttttctcaaaaatagaatcatataaagatgagaggtgaactataataattaataaaaattaatatgataatttagatattaaatctaatttgttgattttaattggttacttttttggaaattaataatgtattttgttttttaattaagtctaattaattaaattagtatttgactttttagaattaatttactctttaaaattttatttctaatggcatacctatgtaattacttacaaaaaataaagttatatttaaaatgtacttcccaaataatataataggataaacctcactcactcacatttgtataaataaaagcattcatcttacttacacatgcaaccaagaatataacaaaagggaacaaatcacatattttgtgaaatcccaaagaaagtttttgctttcaccggccagtcatg

SEQ ID NO: 35337 - DNA, 3003 bp, Unknown; identical to SEQ ID NO: 35336
  misc_feature (1)..( 3003): 2750-1469P.txt file - cDNA_ID_3086322; gDNA_ID_2926139; Annot_ID_138961

SEQ ID NO: 35338 - DNA, 3003 bp, Unknown; identical to SEQ ID NO: 35336
  misc_feature (1)..( 3003): 2750-1469P.txt file - cDNA_ID_3086322; gDNA_ID_2926280; Annot_ID_143596

SEQ ID NO: 35339 - DNA, 3003 bp, Unknown; identical to SEQ ID NO: 35336
  misc_feature (1)..( 3003): 2750-1469P.txt file - cDNA_ID_3086322; gDNA_ID_2926280; Annot_ID_205417

SEQ ID NO: 35340 - DNA, 3000 bp, Unknown; identical to SEQ ID NO: 28505
  misc_feature (1)..( 3000): 2750-1469P.txt file - cDNA_ID_3086326; gDNA_ID_2926139; Annot_ID_197358

SEQ ID NO: 35341 - DNA, 3000 bp, Unknown; identical to SEQ ID NO: 28505
  misc_feature (1)..( 3000): 2750-1469P.txt file - cDNA_ID_3086326; gDNA_ID_2926280; Annot_ID_205416

SEQ ID NO: 35342 - DNA, 3000 bp, Unknown
  misc_feature (1)..( 3000): 2750-1469P.txt file - cDNA_ID_3086330; gDNA_ID_2926139; Annot_ID_138959
tcatgtttttcaaacaaacttgacgtaaaaggttcaattctttgtttgcaacgacgaactcatgatcacttctcgaccgaatctacaacgaaacccatatgtttcttctacccaaaaaaaagtaaaaagagatcttcgagtcatgttgacctttacgacttcaactcatatttgtcctttcaaaatttgtcatggccatattgttgtctcatggagaaacacttttgagccaacagtcggaaaacaaccatcacttagcatttttttatttttaatactactatttttttttttgtaattagtcgagtgtaccaatcccaaatttaatgggtatctttcataaccaaaaagaaaaaagcacaaaaacaaaatactactactatactataatggtgaaacacacattacattagcattaaccgctattccttaaaagatatatgagcagactacaaggaagtacatttaaatcagtgtgctaagttttctcaattatcaatctaataattgtacttacataaatttaccaaatcatctcaccatttagggcatacaatttttgctcaataatggagcttgaaaagactaattatagaatgtctttttggttgacacaagctcgcttcttcatgtcgtttactttaaaaattgtagattctttcacaacttataagattctatagcctatttgattatcctttaggatgatgagtataatatctcaaactataaaataaaaatgttcacatcaataattgaaaaaaaatgcatgtatgaattcacgaaaatatggttacggttgtgtgttgctgctagacaaaagtctttcatatattcagttatatttcttaaaactaatcaaaattgttttatgcaattttggcgagtagagagaaaaagcgcgtgggataaataaagaaaggcgttataaaaaaagagaaaaagtcaaccgagtagttctggtaagagagtctcgtgcattcgtaaggtttccaagagtccacatatctatttcatcatcctcttaacgtttttctcacttacttttttccccactcttaattgattccgttgataaaatttgttcgttatatagaaataatcagaatataattagggttaattttggagtaaagaccattcaatcaatggtttggcttgattcttgtttgaaattctatgtttaaaaagggtaatacttacaaacttgactttattagtattttaaaaaatgacaaaacttaaaatggatttgaaatctagcatatttaactttaatacagttttggtttaagtttcactctcttttctatcaaaaatataattttaaaatttgaaagatgttaaaatagacaaatgtcattagtttgttcagatttagttatgtttttaatatacagacaattatattaaaataataataaaaaagtcagatcagttataaaagaaagtcagttcagttttaagacttaagtttgagtcttttggatttgaatttaatagattcacttttattaaaaattgttgaaacactttttaaaaactaaaacatttgtcaaaaaatgcatttaaccaaaaaaatgaaaatgaaaggtagtaagtaataaaagaagaaaacaaaatctaaaaaagtgtctttaaaatctcaaaattaaaatatacaaaaaagtacaagaaaataaaagaaaagggggaaaaagagagtcaatatcaacatgcaagtgtgaatattagactcttcttctctcatcagttaccccaaaactagggtttacccattttcatcatcttcttcttccccacatcactctctgaaagacaataagagagagagacacacacaccaaaaaaaaaaccccattgatttttaagagagagagagagactgagaacgaagagcaaatgagagagaagttgaatcaaatttccgctttcgttctctttctctctcctccatttcagtaataaacactccttcctctttaatttttctgggtttcttcttcttccctcttttgttgtttctgtgtgattcagttctcgatccatcttttcgtgaaaagtatcaatcttttaattctctagttgtttgtcaaatctggttagtttcttctcttgtatttatttgatgaacttcggtagtctcttcgataacacacccggtggtggctctaccggagcaagacttctctccggtttaagttatggcaaccacaccgccgcaactaacgtcttacccggtggtgctatggctcaagcggcagcggctgctagtctcttctctcctcctctaacgaaatctgtttacgcttcttctggcctctctctagccctcgtacgacgtcgtcttcctctactactaatacttatctttttatacttaaacctaatttgtgttttggataggagcaaccggagagaggaaccaaccgtggagaagcatcgatgaggaacaataataacgtcggaggaggaggcgatactttcgatgggagtgtgaacagaagaagccgagaagaagaacatgagagtagatctggtagtgataacgttgaaggtatctccggtgaagatcaagacgctgctgataagcctcctcggaagaaacgttatcaccgacacactcctcaacaaatccaagaactcgaatcgtaattatacctttcgatccaatatccatattgttattaccatcatctcttttattcgatctaatgaatctgagtttttgctttcagtatgttcaaagagtgtccgcatccagacgagaaacaaagattagaactaagtaagagactttgcttagagacaagacaagtcaagttctggttccagaatcgtcgcactcagatgaaggtatgtggagattaaatcacatctttaatcccaaaaaatgaattcttttgtaataaaatcatattgtggcgcagactcaattagagaggcatgagaacgcgttattgagacaagagaacgataagttaagagctgagaacaatg

SEQ ID NO: 35343 - DNA, 53 bp, Unknown; identical to SEQ ID NO: 9526
  misc_feature (1)..( 53): 2750-1469P.txt file - cDNA_ID_3086330; gDNA_ID_1972140; Annot_ID_179276

SEQ ID NO: 35344 - DNA, 3000 bp, Unknown
  misc_feature (1)..( 3000): 2750-1469P.txt file - cDNA_ID_3086330; gDNA_ID_2926280; Annot_ID_205415
tattgttaattcttggtcacacgtggttgtgtcagtgatttatgtgaggggtctaccttttagaagcaacttgtgacctacatgagtaaagtatgcatgtgactctgcgtatagttttgtactagagaccatgtattagtaggtacacgtcctggatacgtatttatgtattgaaaaactcccaacttactgacaattcctatgattcaatgttttagtaaaaaaacaaggttgtggtcttatggattttgggtgagaaacggacactatagaagacttctctttttcagtacttgttttcaggtgggggaagacatattttggtaaaaaacctgagagagaaagaagtctccaattggattggaaaaaacgttgaggacattaatgcaacaaaggtttggtcgttcgtcctcttttgaaccatatttgttgtctcaataaatgttcttatgctttataacgtccaagacaatctgatcgttttattcatctgtttgaacataacatcatcgacacactagaggattcaattagatgtgactcttgatggaattgtctttgtagaaaagtctagtctttgctatgtttctaacggtctttggtttgtttctcaatgttcaataatgttatgtaatggtaaatatttagcagcggtatagttcattctcttgatatcggtttcaaatttttatttgaggttgaaaccacatgaacatggtcgatagtctggtcttttttgatgttaacattcatataacaattagtttagattgagctgtggtagaattttgagccagtgctgctaattggagtttgtggtaatctagtaattaccaaatttaaccaaacaatgaaaatgacgttgtcctttatatcatcaatcaggggaatgggaatgaatattcctctttacttttcaacctttttttattcaccaaactaatttcttcatgactctgtcataccaataagagaagccatacgacattttttttattttgtggcagactcttatgtgtaaattattttgtgaccaactcttgctggtcggttattctgtggaaccgacattcccatgtgctccaaaccgaaccaaaccaatatgttccactacttcctttcttcttcttatgaaattgttttccatgattttgttattattcagttctttttaagtgcgatgatccataaattcggttcaattaattctcactttataaacactctaaatatcatcaacactatataacctcagtttttgtatgtcgttttaattctgtcatcagctttgatatgtttaaccaacatgattttgtatataacaatagtttagcgatttggttgttctccttaaatagagatccaccaagtcatatgtgatgtggacaccgttttgaccggaaaagtcgacgaattatcatgtttttcaaacaaacttgacgtaaaaggttcaattctttgtttgcaacgacgaactcatgatcacttctcgaccgaatctacaacgaaacccatatgtttcttctacccaaaaaaaagtaaaaagagatcttcgagtcatgttgacctttacgacttcaactcatatttgtcctttcaaaatttgtcatggccatattgttgtctcatggagaaacacttttgagccaacagtcggaaaacaaccatcacttagcatttttttatttttaatactactatttttttttttgtaattagtcgagtgtaccaatcccaaatttaatgggtatctttcataaccaaaaagaaaaaagcacaaaaacaaaatactactactatactataatggtgaaacacacattacattagcattaaccgctattccttaaaagatatatgagcagactacaaggaagtacatttaaatcagtgtgctaagttttctcaattatcaatctaataattgtacttacataaatttaccaaatcatctcaccatttagggcatacaatttttgctcaataatggagcttgaaaagactaattatagaatgtctttttggttgacacaagctcgcttcttcatgtcgtttactttaaaaattgtagattctttcacaacttataagattctatagcctatttgattatcctttaggatgatgagtataatatctcaaactataaaataaaaatgttcacatcaataattgaaaaaaaatgcatgtatgaattcacgaaaatatggttacggttgtgtgttgctgctagacaaaagtctttcatatattcagttatatttcttaaaactaatcaaaattgttttatgcaattttggcgagtagagagaaaaagcgcgtgggataaataaagaaaggcgttataaaaaaagagaaaaagtcaaccgagtagttctggtaagagagtctcgtgcattcgtaaggtttccaagagtccacatatctatttcatcatcctcttaacgtttttctcacttacttttttccccactcttaattgattccgttgataaaatttgttcgttatatagaaataatcagaatataattagggttaattttggagtaaagaccattcaatcaatggtttggcttgattcttgtttgaaattctatgtttaaaaagggtaatacttacaaacttgactttattagtattttaaaaaatgacaaaacttaaaatggatttgaaatctagcatatttaactttaatacagttttggtttaagtttcactctcttttctatcaaaaatataattttaaaatttgaaagatgttaaaatagacaaatgtcattagtttgttcagatttagttatgtttttaatatacagacaattatattaaaataataataaaaaagtcagatcagttataaaagaaagtcagttcagttttaagacttaagtttgagtcttttggatttgaatttaatagattcacttttattaaaaattgttgaaacactttttaaaaactaaaacatttgtcaaaaaatgcatttaaccaaaaaaatg

SEQ ID NO: 35345 - DNA, 2472 bp, Unknown; identical to SEQ ID NO: 28578
  misc_feature (1)..( 2472): 2750-1469P.txt file - cDNA_ID_3086352; gDNA_ID_2926285; Annot_ID_205421

SEQ ID NO: 35346 - DNA, 59 bp, Unknown; identical to SEQ ID NO: 28579
  misc_feature (1)..( 59): 2750-1469P.txt file - cDNA_ID_3086371; gDNA_ID_2926286; Annot_ID_205433

SEQ ID NO: 35347 - DNA, 3003 bp, Unknown
  misc_feature (1)..( 3003): 2750-1469P.txt file - cDNA_ID_3086406; gDNA_ID_2926287; Annot_ID_205465
gatcatgtccacaataaatgtatgtgatacttcttttgataagaaagatatattttataagttggcttgagattgcaacaaaaaagagaataagatgcatgctccatgtaatgttttcataaggtaaataacaaacttcactacttttcaaatatattaaatgagattcaaacaaataaagaaacataaatgtccatcgtcatgtgttagttctccctattcaatcaccaaaattaagaccccattatgagtcatatgacacatgcatcgtgaaccatcttctttactttttctctacttattatatttttctgtcggttatttttatttttattttatatataatgaataaaaaattatgatttagttatcctcagaacatattcccatattctcttttgatgtataaacaatgcttctaaaattggacctaacatgcggcacaagtaaaaaatatcttagttggcaagaagaaaatattgtcgtacccttcaagaaataattttctcctaaagtttctattaaacatgatcttctgatgccccctcaaaaactgaatttgattcaaagtattaaattcaattcaagtggttaattattacgcatacaaacagtataagcagaagcagaagaaatacaacttttgtatgcatgcatatagatagtttaagttatagctgtctaaaactatttgaaggtcaatttatgaaacttacatttgatgttttaacctgttttattttttattttttattgaatgtgtaattgattaatatgagtaaaattatgtatgagagtgttttgctttgtctaaaaaaaacatcagtactatgaaaccaaaaaagaaagaaaaaactgatacaagacttagtaataaactggaaaatagtgtacaagcctctttagctccttcccgccctcgaagatgagaccgagaaccagcgttgcataaggtaccgtaaccttggtttaatagtatagttcagagatgttatcatgtatcgaatcatctttcctatgcttctggtaagttcagaggctgatgaaaaaccgatgtggtggatgcgagtgttcctttaccacacaagataaatagttgtttgaaaatagagctccaggaggatatcttctagataattccctgagcaggcgataattaagactggtaagaatcagctcccaatcggatctagaatttgtttgaacctgtttttcttttttcttctaatagttccaatttatgtatatgtttataattttttcatagtaattttctgaaagagagattgagataatatttgaatacatcccttgcacatgtaaaacgatggtctttataatatttataaattccctataagatagatgatagatccgatgatttggtttgttattacaaattttgcttgcaaggatgaattttcacattggacagacaatgattctgttgcggagagattagtaaataaatagacgatatatatccaaatgaaagatgaatacttcagccagtgcgtaaactttggtatgtgatatatatttaaatattaataagtttatatttatgatgataaactattagtagcttatgataagcttagtactgtagtaattaagtgctagtgcatgaccgtctcaaactattcaaagaccttagcttgtgcaaaagtttgtaataaacgtataaaatttacatagaaactttaaaatttaaatatcgaaccatgtgcgaatgcatgctaaaatgatcatgcttaccttaacataatggcctagtgggaaaagaaacaacataagtagcaaagaattaataaatcttaccagctccttttatgctcaacacttaatcacctaagaattcatgcaccctagctaacaactcaacaaaacctaaccaattagcattaaaccctaattatcaaatgtaagaaatcagtgtccgtacttggtttgttgtggccatcaataatattgtcaacaatgtgaagaggaagcatgggattgttctcttaaatcagccatgcagtagccagtagacaatgacgacgaagtatattgggtatataaaatgttgttattatatcacataatgtgctacatatgtattctacatacttaatctatacatgtatatcagctttctttctttcactagatagatgatcttttcaaagttgaattcgcgtactcctaacattgatgaagtcatgaagatgtccagaatgtaaatgttggaattgtacctttgattgaaactgcaaaagagagaagaagaatccatgagaagaagaagatgaagaacagagaaagaagcattagcaaaaggaagaagaagacgttgtcgcataagagacgtcgtgaagagaagagtcaaaggaagagaagaaagtcaacaaaccaaatgggtttgtgttttgtgagttgggcccataggtgatgagataagacccatacgaaataaaataagtgttttgtggttgtttagttaaggtccaacaagaagaggttgtaataactaaaagtaaactaaggcctagttagagtctaaaagtgtgaatcaaggaactagtgttccattgtgtagggtggctacttgtcttgtcttgtgtaagagtcatgattaggcctaagtgaaaatgtgtaagtgtgttgcaagtagaaaagtagtagtatatttatgagagtgttgtgttgtgtaagatgatccagtgtagtcattaaaattcttaaaacgtgttcttgtttctcaaagcaaaagagcgagaaagaaagtgaacagagatacaagagagtgagagaatgatggaagaggtcagaattacaacagtaaaacatcgtcctgttgagtaatagtaagccttaaatgccattatgaataattaaacgttaattattcatcacaaaacgacgtcgtgttgagtgtaggtgacgaaacagttgttttcttctcccttccattgttggtctttgaagagaagcagaaagttttgagaagaaaagatg

SEQ ID NO: 35348 - DNA, 3000 bp, Unknown
  misc_feature (1)..( 3000): 2750-1469P.txt file - cDNA_ID_3086412; gDNA_ID_2926287; Annot_ID_205463
cacatggttcgatatttaaattttaaagtttctatgtaaattttatacgtttattacaaacttttgcacaagctaaggtctttgaatagtttgagacggtcatgcactagcacttaattactacagtactaagcttatcataagctactaatagtttatcatcataaatataaacttattaatatttaaatatatatcacataccaaagtttacgcactggctgaagtattcatctttcatttggatatatatcgtctatttatttactaatctctccgcaacagaatcattgtctgtccaatgtgaaaattcatccttgcaagcaaaatttgtaataacaaaccaaatcatcggatctatcatctatcttatagggaatttataaatattataaagaccatcgttttacatgtgcaagggatgtattcaaatattatctcaatctctctttcagaaaattactatgaaaaaattataaacatatacataaattggaactattagaagaaaaaagaaaaacaggttcaaacaaattctagatccgattgggagctgattcttaccagtcttaattatcgcctgctcagggaattatctagaagatatcctcctggagctctattttcaaacaactatttatcttgtgtggtaaaggaacactcgcatccaccacatcggtttttcatcagcctctgaacttaccagaagcataggaaagatgattcgatacatgataacatctctgaactatactattaaaccaaggttacggtaccttatgcaacgctggttctcggtctcatcttcgagggcgggaaggagctaaagaggcttgtacactattttccagtttattactaagtcttgtatcagttttttctttcttttttggtttcatagtactgatgttttttttagacaaagcaaaacactctcatacataattttactcatattaatcaattacacattcaataaaaaataaaaaataaaacaggttaaaacatcaaatgtaagtttcataaattgaccttcaaatagttttagacagctataacttaaactatctatatgcatgcatacaaaagttgtatttcttctgcttctgcttatactgtttgtatgcgtaataattaaccacttgaattgaatttaatactttgaatcaaattcagtttttgagggggcatcagaagatcatgtttaatagaaactttaggagaaaattatttcttgaagggtacgacaatattttcttcttgccaactaagatattttttacttgtgccgcatgttaggtccaattttagaagcattgtttatacatcaaaagagaatatgggaatatgttctgaggataactaaatcataattttttattcattatatataaaataaaaataaaaataaccgacagaaaaatataataagtagagaaaaagtaaagaagatggttcacgatgcatgtgtcatatgactcataatggggtcttaattttggtgattgaatagggagaactaacacatgacgatggacatttatgtttctttatttgtttgaatctcatttaatatatttgaaaagtagtgaagtttgttatttaccttatgaaaacattacatggagcatgcatcttattctcttttttgttgcaatctcaagccaacttataaaatatatctttcttatcaaaagaagtatcacatacatttattgtggacatgatctaattttattttttggtagtgcgtatgtattggattatcaacaatcacattcgaaagaattagattccattatggcatattatttaggagcatgtgcttcaatttaggctctaattaaaattagtctacgaaataattacctttagtgattaagcatgcaaaagtcatttttgttttggaaataatatatactattatacaaaaatgcgaagaaattagtaaagtttgagaggaaaatagtgctaaaaatagattcttgcttgacttttcttcaatggtggagatttcctaataaatccaattaaattacgaaaatggtaaaaagaagcatgttcgaaatacgataatgtgtaaaatcggaaatctatatctctggttcaattttattacaaggaaagaaacatcatgatatgatatttttctcaagtcttttggtgttggagaagaagagagaagaagaacttggtttctctctctaaaagtttattgcttggctccataaaaagtgcacctttttctctcttttctttctctctctctctctctctctctctctctctcacttctcctcggatgcactattgtccgtgagatcagagattcaccctctttagattttgcgcagaaacttttgcccacaattttgtattcgtcaaatctgagctgagatctctagagtgagaaaatgagcatcactaatgaagaagcagtgaagcaattgcgtgctttaatggaagatggtgtgtctttatttgggttttcaatgttttaacttttaagcttgctttgtttgaagatcgctgacgaaatctcaaattttgagctaattttacttacttttggtattgacagttgatgattcactcagagagtcgtatcgggttagtaaattcacttgttttttagatgctttgaaagattcaactcccaagtctttgcttattgaaccaaagatcgatactttcgattttctataaataggtttctgggaaaaccgggaaaaaaatatccccttttttcgtgtcctgtgtaatttgatcggcatgtatattggtttcagtgatctggatctaaatttgaatcaaagtctctctctttgcattagttatttaagattcagtattgttggatctgtggagttgttgtttaaaacatatactgatctagagttggttgagtgtcatatgtaacatggatcttattgttgttcttggctatagaaaagcccattttgtgatgtagatggtggatttacaaatgcttgtgttatg

SEQ ID NO: 35349 - DNA, 3000 bp, Unknown
  misc_feature (1)..( 3000): 2750-1469P.txt file - cDNA_ID_3086416; gDNA_ID_2926287; Annot_ID_205462
tctctctctctcacttctcctcggatgcactattgtccgtgagatcagagattcaccctctttagattttgcgcagaaacttttgcccacaattttgtattcgtcaaatctgagctgagatctctagagtgagaaaatgagcatcactaatgaagaagcagtgaagcaattgcgtgctttaatggaagatggtgtgtctttatttgggttttcaatgttttaacttttaagcttgctttgtttgaagatcgctgacgaaatctcaaattttgagctaattttacttacttttggtattgacagttgatgattcactcagagagtcgtatcgggttagtaaattcacttgttttttagatgctttgaaagattcaactcccaagtctttgcttattgaaccaaagatcgatactttcgattttctataaataggtttctgggaaaaccgggaaaaaaatatccccttttttcgtgtcctgtgtaatttgatcggcatgtatattggtttcagtgatctggatctaaatttgaatcaaagtctctctctttgcattagttatttaagattcagtattgttggatctgtggagttgttgtttaaaacatatactgatctagagttggttgagtgtcatatgtaacatggatcttattgttgttcttggctatagaaaagcccattttgtgatgtagatggtggatttacaaatgcttgtgttatgctgcagaacattcatcaagggtatccgacagagaatttgttacgctttcttaaagccagggatgggaatgtccagaaagctcataaaatggtttaaatctgtttgctttcacctaatttagattgtctttgatgctttgtttcttgttttagctttgttttggggtttaaaactaatgactgcaagtgttacagttgctcgagtgtttggaatggaggactcaaaacgagattgacaagatactaactgtgagttttctttcagcttttggtgtccagttctgcgattttctgtggccctttgatctcatttggttattgatttttgcagaaacccattgttcctgttgacctgtacagaggaatcagagacacacaacttgtcggtgtgtctggttactctaaagaggtactactattttgagtccctttctttctttaactttttttttaattttaaaagcagatgtttgatccaactaaaaactttgttgaatcatttgacttttagggtctccctgtcattgccattggtgtggggcttagcacatatgataaagcctccgtaagcatctctattcatcttccactcagagacttgttgtgaagttgaaactctctgaccgtagctttcttatccttcattcaggttcactactatgtacagtctcacattcaaatgaatgagtaccgggatcgtgttgtattggtaagaccaaaactctatttgggtttagccttttcctccctacttttattttcctatcttgattttgtgattttctcttctgtagccatctgcttcaaagaaacagggacgaccaatttgcacttgtttgaaaattttggatatgtctggtttaaagctttcagctttaagtcaaattaaggtattaataattgcattaccttgtgtgattttatgactttgattcttgtcttcaccacatgttttgtttttttccttttttcatttctgtgtgcagttaatgactgctataacaacaatagatgatttgaactatccagagaagacagagacatactatgttgtcaatgtcccgtacatattctctgcttgttggaaaaccataaagcctctgttgcaagagagaacaaagaagaagattcaagttctgaaaggttgcgggaaagatgagttgctaaaggtaagcaattcagtttccccatgaagaagaagtagtcttactcttgtgcaagaagactgaaagttcttataacctttttgatattgcagataatggactatgagtctctcccacatttctgtagaagagaagggtctggatctggtaggcatatctcaaatggaacagtagacaattgtttctctctggatcactctttccaccaagacctttatgattatgtcaagcagcaggctctggttaaaggatcaggtgcaccgatcagacatggttcagtccacgttaagttccctgagccagacaccgaaggcaacaagatcttcgataccttagaaaatgagttccagaagcttggaaatgaccagaagatctgagtgatctacaacccttataacacgaattgcccataagaaaccggaatttgtctctggttgatgagcagtatttaagataagaatcaatcacctttacttgtattactagtttcgcttgcatcagctcgatgcaggttttgtttaaaaagaagatggaacacaatttcctcggaatggatcttttgatctagtaccattatatatatagaactcatttctatttatgtccttttgcaattctctgcattcttctttagtcactagagtgttctttaatatcaccattgttgcagacccttttatctcaattgtgaaaccaagatctctgcaacatcattggtcatacactgagtggatttgattcaatgataatacaataaagaaatagagattaacatagctactctctgacttttcatcaccaaccattagtctttttggttgttgataagataaataaataattgtactctcaaacaagatgatcgtcgacgctatctatctgtccttatttgactgaaatagaaagtagaaacatagtagctgacagttccaatgacgtaagagagtgtctcgagatccacacttgttcttgacaatgtccagagttatagccgccactaaattcggttcttcttgtataaaaggcttaacctttccacttgtctgagagaccacttctcttatccctctcaccttctcacttggcaccgttgcagagagagaaccaaacatg

SEQ ID NO: 35350 - DNA, 3003 bp, Unknown
  misc_feature (1)..( 3003): 2750-1469P.txt file - cDNA_ID_3086420; gDNA_ID_2926287; Annot_ID_205461
aactctaaggagtctcgccacggagcgcttgtcacgccagtcatctcaaggtcaatcgccacgaaatctgcagcctttacgagtgagcgtagatcattcagcgtcgtctcgaagttcgaccttgtcacatgcttcaacggaaaagccgccgtcgctgaagctgccgttgaagtagtaactgtctccgccgcagaggagctgaagctgcagacaagagacctcaaaggccatcgcttgtgccggcgcatttttgaacggagagagagagagagaatcaaacgaccatttttaggttttgctctcggtggaaggaaagagggaaagatgatgattccgaggaaacggtaccgttttgtgaatttcagtctttcgaaatatacacttgcacagcctgccgtttctaggttaataaatactgcaaacatttgtcttaacatgacttgaaacagcgtgatgtattttattttcccgatgaacaacaacaggaaccaaattctcgccactgctctctcacacaatggctattgcagaagaagttactgtctttgctgagactagcttgggaactcgaatcgtcatggcggttcctctggatatcacagcagcagatttcaagagtaagctcgataccaccctctaaagaaattcccttttggtcttctctttcgaatgttgtttcccgtagcctactgttcttattaagtttttggtcttcctcggtttctcaatttcgaaacttagcttataggtgaactgataggattctctaattgaatctttctggatgtataatgtgttggtctgtgaggaaactgatttgcatgcgcattttgggatgaaaattttcaaggttgtgaattcctatggtgagcactaaaagaaatgttcttttcacattgccttctgcatcattggtgtttgttttcttttgaagttctgtctattacacacttaaggactggcagggcacagtgcattgctcatttcctttgaatgtgaatcattgcttatatgttacttcatgacatcttgagatgagattggacatgtattgtttttctttttcttccttttgccttaaatttgaaggttaatgatctttcgtttgtgttacactttttatttaagaattcagagcatgtatcaatgcaaaatgctttctttttttttgcaggaaaactcgagaagacgcatgcaagttgcttatcgagcgtaggggagatagaagttcatggtctgatggtaatgaaaatgagctagcaattttattttctttctactcctgtgcttttgattttgttaacctcaaaccattgcagcaaactcattctaacttctccttctctcttagtataggttaaacgaaagtctcgcttttaccaccttgtggagtctgtgcctataaggtacatcttcctggataaccaaaagccttggtttatccatgcagaagctagagttgtaagcagatcacaagagtcaagcgtatctaacagtattgataaaacccacattagacattgtcacggttctgataactccatcgaaagagtcactgcattgatccaaggtaaagacaagaagataaagaaatctcgggccaaatctgattccagaaatgttgcatctggacaagaaacttgccttgacaagagggaatatcttggtccttccacatctgaacctgaaaccataaagtctttgccgtcaatagcaagagttgctgagatgaaaaactctgaatgtttcaaaagcttcacaccaaaaccgccggagaggaaacctgtagactctgaaagcgaatcgataggcaagagaataactgtggctgcaaacaacatcagaatgcaaggaaagactcataattcatcgtcactatcatcatctattttcagaagtaattcttgcagaaacagatctttagatggtaagataatcacctctcttgcaaaatttatggtctttgaggtacctgaaaatgaggattgagtctttaagcaagctctcctataatgcctcaatgcacaagaagtagcattgtgtagatgtgcaaatgatcatgattctttttgacaaatacgtagtgaatgtaagatatatcatatatattagtaagttttgtatcactctgtttcataaaaactataatcatgagaaagaaagaaaaaagcactaagaagtgaagaaaagaatcacagaatttgtctttagcttttgcttctactctttttctcaaggattctcttttatactttctaatctaactcgtttaagaattaataaagatgctttatataataaaacaagacataactttggctatatctaagatcaaacaaaaatatttgtcatattgattttataataattttagttagtcatgttaatcatctattgtgtatgaactactctaaaattgataaaaaaaatattacaagatatatgttaagatttaatatgtattttaaaaaatattcaatatattttgcctcgaatattaccttagtcaattaattaataaaattgcaaaattgcaaaagaaataaaataaatgttttagttaaaccggcactggaaaaaaaaaccgggcattggaacaaaatatatcgtcatgtataaaacacaaagcgccttagcttgttagaaatcttctccacttctctttctctctcacaccgtctttctctctccctatcaaatcccttctcttctaatacgcgatcctcttttaaaccctagtttcggatcgctcttacacttggcgattatctccaggatcgtcaattcttctctccttctctttttcttcttctcgttcgtcttcctcaacgatcgccatcaatccaaagtattggaccagatcacccctcgttgatatttgtgattcgatatccacaagtgattactgatcaattctctatcgtctcgaggatttgatcactgcttaatcctttagtgtttgctttaggatatgccctgtctgactgtctctaaatcatcatg

SEQ ID NO: 35351 - DNA, 3000 bp, Unknown
  misc_feature (1)..( 3000): 2750-1469P.txt file - cDNA_ID_3086428; gDNA_ID_2926287; Annot_ID_205459
ataccaatcaatgatcacaacaataaccatgcaccaagacatcagaaacagacaaacgaaacaaaaagataaatcttttgagtgagattaaaaaactgaattccaaatgataaatgaataacaagtagcagatattaaaaagagtaatgcaaagagacagatagttatacaattgattaaaaggtttaattacgtggtttagtaacactaaccacttccgaagctcttctccttctaagcttcatgatgatttagagacagtcagacagggcatatcctaaagcaaacactaaaggattaagcagtgatcaaatcctcgagacgatagagaattgatcagtaatcacttgtggatatcgaatcacaaatatcaacgaggggtgatctggtccaatactttggattgatggcgatcgttgaggaagacgaacgagaagaagaaaaagagaaggagagaagaattgacgatcctggagataatcgccaagtgtaagagcgatccgaaactagggtttaaaagaggatcgcgtattagaagagaagggatttgatagggagagagaaagacggtgtgagagagaaagagaagtggagaagatttctaacaagctaaggcgctttgtgttttatacatgacgatatattttgttccaatgcccggtttttttttccagtgccggtttaactaaaacatttattttatttcttttgcaattttgcaattttattaattaattgactaaggtaatattcgaggcaaaatatattgaatattttttaaaatacatattaaatcttaacatatatcttgtaatattttttttatcaattttagagtagttcatacacaatagatgattaacatgactaactaaaattattataaaatcaatatgacaaatatttttgtttgatcttagatatagccaaagttatgtcttgttttattatataaagcatctttattaattcttaaacgagttagattagaaagtataaaagagaatccttgagaaaaagagtagaagcaaaagctaaagacaaattctgtgattcttttcttcacttcttagtgcttttttctttctttctcatgattatagtttttatgaaacagagtgatacaaaacttactaatatatatgatatatcttacattcactacgtatttgtcaaaaagaatcatgatcatttgcacatctacacaatgctacttcttgtgcattgaggcattataggagagcttgcttaaagactcaatcctcattttcaggtacctcaaagaccataaattttgcaagagaggtgattatcttaccatctaaagatctgtttctgcaagaattacttctgaaaatagatgatgatagtgacgatgaattatgagtctttccttgcattctgatgttgtttgcagccacagttattctcttgcctatcgattcgctttcagagtctacaggtttcctctccggcggttttggtgtgaagcttttgaaacattcagagtttttcatctcagcaactcttgctattgacggcaaagactttatggtttcaggttcagatgtggaaggaccaagatattccctcttgtcaaggcaagtttcttgtccagatgcaacatttctggaatcagatttggcccgagatttctttatcttcttgtctttaccttggatcaatgcagtgactctttcgatggagttatcagaaccgtgacaatgtctaatgtgggttttatcaatactgttagatacgcttgactcttgtgatctgcttacaactctagcttctgcatggataaaccaaggcttttggttatccaggaagatgtaccttataggcacagactccacaaggtggtaaaagcgagactttcgtttaacctatactaagagagaaggagaagttagaatgagtttgctgcaatggtttgaggttaacaaaatcaaaagcacaggagtagaaagaaaataaaattgctagctcattttcattaccatcagaccatgaacttctatctcccctacgctcgataagcaacttgcatgcgtcttctcgagttttcctgcaaaaaaaaagaaagcattttgcattgatacatgctctgaattcttaaataaaaagtgtaacacaaacgaaagatcattaaccttcaaatttaaggcaaaaggaagaaaaagaaaaacaatacatgtccaatctcatctcaagatgtcatgaagtaacatataagcaatgattcacattcaaaggaaatgagcaatgcactgtgccctgccagtccttaagtgtgtaatagacagaacttcaaaagaaaacaaacaccaatgatgcagaaggcaatgtgaaaagaacatttcttttagtgctcaccataggaattcacaaccttgaaaattttcatcccaaaatgcgcatgcaaatcagtttcctcacagaccaacacattatacatccagaaagattcaattagagaatcctatcagttcacctataagctaagtttcgaaattgagaaaccgaggaagaccaaaaacttaataagaacagtaggctacgggaaacaacattcgaaagagaagaccaaaagggaatttctttagagggtggtatcgagcttactcttgaaatctgctgctgtgatatccagaggaaccgccatgacgattcgagttcccaagctagtctcagcaaagacagtaacttcttctgcaatagccattgtgtgagagagcagtggcgagaatttggttcctgttgttgttcatcgggaaaataaaatacatcacgctgtttcaagtcatgttaagacaaatgtttgcagtatttattaacctagaaacggcaggctgtgcaagtgtatatttcgaaagactgaaattcacaaaacggtaccgtttcctcggaatcatcatctttccctctttccttccaccgagagcaaaacctaaaaatggtcgtttgattctctctctctctctccgttcaaaaatg

SEQ ID NO: 35352 - DNA, 3003 bp, Unknown
  misc_feature (1)..( 3003): 2750-1469P.txt file - cDNA_ID_3086435; gDNA_ID_2926287; Annot_ID_205457
ctaaatacttatcaatggctctagcagaacctgatcaaaattcaagcaaaccaactcatgctatgcttaattaaagacatactattagttatgatgacagaggcgcaagaactatacctgtcattgcagcagagtacaacttagtctgatatttctgcagaaagatgagtataaagggtattaattcagagaagcttataaacaataccttgaagcagagaaacatggcagcacgcatttgaaagccagagactaaagaaagtcaactaatacagaagcaagttatgatcaacattaatttgacagcgactcaaggctaccaagcttactcacatcaatcacatcaatgccagaagatttaataactggtgtcttcgtagctgattctcggaacgccttagtcttttcattcacttcatctatcgtgtaagctgcataacgaaacaaacaagtataatcagaactaaaaagagtcaacataacgaagaaagacacagttctaccaagtgaagaacactgaattcaaaagactgatatgtgaaaatgtaatgcaatgccacgattaagcaaaccataacacatttttactcgcatttcacagcaaaaacaactttgtactagaaatctacgagagggaaaaaagataattcatgaatgcaagtacataccaaaacttgcgtaaccagtagcagcggtagcaccagtgagtgcccagaggagtgcgtaaccaagatacttaagacctttcctctcctttcccgtcgcagccgcggcagcagcttccacttgaggaggaggaggaggtggcggctgatttggcggtggaaaatcagaaaacatcgactgggtagaggtgactcccgaatacctagatgtagaattcgtcgaagatgcttccgcagagaaacatctcagattacgagatctgagctttgctaatcttggcaacaggcgagatcgaagaacaatagacgccatttccgatttcggcgttttcttcaaactctgtgaatgatgaatgaatcgcagggttgaagtagggttttggaattgatcggagaaaaggaaaattaacagatggactgtttggaaacaggttttatgggctcgttttaactctcttatccactgtttggtagtcggtttatttctactccgatatttttctattttttttgctgttttttttacttgtttaccaagaagagaatctattttattttatttttgcatttcgggcttttaataactaattaatgaagttattttacactatttatttaccaaataaaatgaaaatatttttccaacaaaaataataaattcattcgtgtcaaaaagagaaaacaaataaccaaaatttattaaatttgtagggtttcttctgcctaaacctcgactacatgctgttttttgcaccagtgaaataagcgaaactacatagaaagaaacaagtcttacttccacagaggaaagtttagagaagtagaaaagccacaaagcaacaccagcaaatacatatagcttaagctgctcagacacaattcaacgagacacttagtgagagagtagcaaatgacttactcttcctgggacggcaaatttagcttcaactttaagaaatcattggtctttgcaatcttcacaatctcctcagcttcttctctcttagaccctttcaccaattcatcaactaactgctgcaacgttgtttgaccgacaagataccgcttactgaatgtctccttgaagagctcaatcgcagactcaaagtcacctgctttacacatagcaggaagcaataaagcaaaggtagctttatcaggacgataaccatgcttcacaatttctttgtaccacgcttcagcttcgtccatttttccttcgttgatagatcctctaatcatagcattgaaactgaaaacatcaggtttgagcccactagccttaagttctccaaagagatttactagctctttcgatttcgcctcattggctaatccaagcagcctagcattgtaagtcctgatgtctattgctacattcttctccaccattttagcccatatctcttcccctagctcaaactgtccctttagatacgaagacagtaaaagtgtgttgaatgtaactatatcaggttttagtcccttgttctcaatctcatcaagcaatgcaacagcttcaggtaaagaatccttctcacacaatgccttaatcaaagtattgtaagatacaatatctggtttgattgataactttccaggtaactcattgaaaagttcttcaaccacatcgaatttcttggaaagtctatatgcactaagcaaggcattgaaggacaacactgacctcttgcagtctctgtttggcatttcttcgaacaccttctgtgcattttcaaacatgccggcttttccatacagagaaatgatcctcgccgcgaatccctcttttgacatgtcgcggtacttcttctgctcctccaaaatctcttcgacatagtgtaatctctttgcggctacgagacggcgcacggttctatcgtacacggctatgttggtccggaaccgctccgactcacatgccttcttgaatttctccacgatccgtttggggtttcgttcgccattcacgagactggttagtgacttttgaggaggcgagattgcggcagtgactgcggtgggttcggagactacggtggcggcggaggaaaaacggcggatcgggcaagtgttgaaggtgccacggagaacgcgagatagagacgacatcgttttgggagtgagagcaaagggtttcagccttcaggagacgagtttaagaacaaatcaaatgaaggacgcatctgataatttaaaaaatgttagtgccttatttttaactaaaggaaatattgggggctagaataacaaataatagaaatagtgttgttttgccgacgacctaattttacttcaccggtttgattacgggagaaggcgagcttgagcttcaatg

SEQ ID NO: 35353 - DNA, 3000 bp, Unknown
  misc_feature (1)..( 3000): 2750-1469P.txt file - cDNA_ID_3086455; gDNA_ID_2926287; Annot_ID_205451
ctcgtatggagcaccattgtcaactggtgctcctaatgtcggcacttgagggagttaccagtcttccacaaggactaaatgtcaaactcttagccatttttggtagccaacggacatgattctccaagttctataaacagtgtccaaacttggacttgtggctacgttgtgttatgtagagtagtaggctttttaactttattaggtggaaatagtattttcattttgcaaacactcaaacaaagttagatgagtaaactcaatgatgtgaaaaattggaaaaggttttcttttttcctttgaataacgatttttgaggaagctgaatgaaaataagattctttgttggtattctgatggtggttttctaattttgacgtcgtcggcgtcttgttctacacagagagtctctttgttctcgttgcttccatcttctatctatggctgtttcagcttctggtcctgtaaacactccctttcgtctaccaagtcttgaaaccttagacccattgcctgaagtcaaatgagaaactcgtctctgaggcttccgaggtatgctcttcttcttaaccattctcagagcctctattgtttgatttctagaatgctatacttttttctaatcctgctttgcagaatctttagctaacctgatagaattgtgcttttctatccttggtattagatcaagcggtctaaacttcccagttagactttgaggtttttgtctgctcttgtgaacaatcatttacatacattgtgtgtgtgtgtgtctgcgcgtgtgaattcaggtacctagctctttcttaaatcaattcagacatgattcgtggctgttaaaacaagctacaataacacaaatgaagaattgttcaaatatcatgtgcgttaatgtccacgctcctgaaatagattacgtatgtttcactaggacttgttagaattgtgaaacttataaaactgttctttttgttaggcaatggtgaggctattttactttcaggtttaaaaaacctgttgaagcattagagtgttgatgaatatgagtttccctaaagtagatagtatcttcagtctgaagtatatatgcatgtgttgtttctgatcatagtgtgcatcaaatgggatggttctgaagatcttttgacaaactctttgtctatcaattgatgtttaaggttcaacagcgattcagtttcataaaaggtgatgtttttgcttttgcttttgttagcagatggtaccaaatcaaaaagcttaggatcatatcgagtgccccttatctgatagaggactcaaggaagcagatacttaacctcattaagcatcatgctcaatcttagctccttattgtgctactaaagttccagtctattggtatcctcttccaatcttattatttgtgttgtttttttgtgtgtcctgacgtttcacagtgtccattcttcatcatgtcattctccattcttcaacacatcacaattatattttagctaaatagataaaatttattcatatgatttattctaagagatattcgacatttttcaatataaattttagaaaccaaaaaattgtgtaactcgaaagggaaagttcatatattctttgtgaaccaaatcgaattctctaactgaatagtattttgtgttttcatgattttgaagagccaaatctacttgactactggttgaaaattgaaagaaaccctaataagggacaatgataacgaaagattgggtcctcaaacaatggacaccactattctactgccatttaaaaaaaaaagtttaatatttttgaattttattgttgttgttttctcatttcaaaacatccaaaattccaactaagataagataacttatttgcagtaagaaaaacggataattttatttatttgaatccatccatcaacataaaggtgtgcacaaaggacaatattaggcaaatgacaatgtcacgtaatctacgttgcccaattgaataatttgattatcataaaagttacacaagtttcattattgagtattgagtactgaatagagatatcttcaaccataatgtagctttcacaatttccatacgcgaaaaaaagatatacacaaatggagtgtgtagagtaaactaaactcactctattatgactaacagtcaataacacgtacgtagttatcaaattattaatgagtaaaaaagttccaagttaaattatgtataaattaatcatgtattagcattagattattaaagtgtgaaaaaatgattagattcagacaaccttgaaaataaggagttaaagtcaaagggcgactgcttcacgtaactttagacttacgtcattactaacgtcacctttctttgaaaacctcctccttttgaaaacctcctccttttggcaactttaataatagatccaattttcttggtttttccccccattatttggaaattataaccattttactacaagtgccttctaaattctacaacccaacaaaaaaaaaaaaattatattacatatcatacaaaatagctagataataagtagttgatgttattgttatgaaaaagttggtggcactaaaaacatgtgatggctaatgacccttagatatgtgtagataagcagactaatcatgcaaaaataaatacaaaattgtaaacatcgtaattgtctggacaataaatcataaaattaaaaacataaaaccatttccaaaataaaattgtgtatggaaaaaaatatatattaatctcacttactatataattcattacctccttaatctgcagaaaaatgtgtataattaaagaataaaatatttagagagcgctaattaaactgtaattactttttgagatttttttgggtcagagtcaaaggtcgccgccatctctctctgtgtatataagctatgttcatcttcttcactcaacaaccattctctcttctcttctttatctcaaactctttcttcttccaaatcataaaccatg

SEQ ID NO: 35354 - DNA, 3000 bp, Unknown
  misc_feature (1)..( 3000): 2750-1469P.txt file - cDNA_ID_3086458; gDNA_ID_2926287; Annot_ID_205450
catgttcgggcatattttgagagtgaacaagtacggcttttacaaaaacgatgtgtccaacgacaagatcaagaaactcttcctccatctacttcatttggataatatttcgactatcttggcggatccacaagcaatttaccggactattaaatcactagttaatttgatgttttagtttttttatgttgtttattttaaattaggtacttgtttcttgttaagtttataaaattattttaaatttaatacttaattgtttgttaagtttataaaattatgtgttgtagttgttgtttgtaaaataattatatgtattaaataaaaagtttaaatttgagggactaaagtataaataaaaaaattgaactcaaaaatagagtagagaatagagttgctctatatatagagtcaatctgcataaatctctatttttgagtcaattatagagtggggttggagaaggcttttgtatttttactctaaaatagagtagggttggagatgccctaagagattgtaacttgtatctttattctcatgagagtctaatataattcatcatctaaacacttttgtgttctttactttcatcaaatttatcgagagtcacctttgaaagtagatacactatcatctttgtccatgagaacgtccggatgagtatgatagtgtatctatttcaaaagtgactctttataatctcagttctatatttttgagtttttcatttcttttctaacaaaaccaatgttttttttggttgtttatttacagcgaaaatttgcaaagagtatgaatagtgtttcccaagttttcgaaacatcactatctctgctttgaaggtaacaatgttttcttcatacacaccgacattttttttgtttaagaaacaacaactcaaggaagatttgttttttgttttataggttaactgtggtggtcaatttttttacttagttggttcgctggctttgaacacggctttccggagcaacgaatcgtttctatttgtggatgtgctgagagttgaggagaatggtaagatgctgactggagaaactgctttgtcaaatcctaatttacttgagagaccaatgatctgactattaagaaagctccggtaacccaagctggtgataataaaactaaaaagttcggatagtgccaaaagaagtcgtaagaaacgatctcttggggatctttcaagtgggaaaggagaggttgaaccttttgcaatgtcaccaacaggaacaataggaaaaagtaacctctatctttttctttctctattgttgtctatggagtatatagttgatgttattggagagtattagtcaagttacattcgattgtatgatctgattttattaagacattaaaaggggtgatgttattcttgaagtaacggtcgaaactgaattagttgtgaggcgtgagagtgcccttaatctgtataatctttctatgttccatagatcttgaaaagggagaaaaaagtgctgctacgactgaccaagagaatgatcttgcacttgtggatgatgagaacgagagtcacaaagatgatgttcgtttaggagcaatagtacaaggtaaacttttttgtgtttactgattttcatatctagacattcttacaatattataccttgattaggtccaagtgctgcaaataaacttttaactgctgaatttttagacatcaatcaatctgctgatgtagagaacgaagggctaaacaaagatggtgttgatgcaactcccgaatcttttcccaaactcgacaggagaaaagccagttaccaatattcttgtattaatggcgcctgttccaaacaataatttcagtatttttcgaatattcattttcttacgagggacgttctattaactcgtaaattgtttaatctgtgtagagaaaaagattggtacaaagaacaatggtggaaaagatgctgatcatgaggctactacatctttaaaggttgctaagaaaggaaggacaaagaaggagaaggccccggctaaaaaagatactaaagtggcttctagttcttggaacgttgaccacgatgttgttatcggagacccgcaggagaatgtggacaaagttgtaaggaaatcaagcaagaagtcgaagaagaaacaatcttcggacgttgtggagtaggcttaagtatctctcatctgagataaacaatgctctactatgagcatcattgacctcgtttctgtctttcttttttctctacgttgctgatctttaatgctttttctagtttaagaaacttgtttcctcgtgtggtttttgtttttctaatgcatgatgacatttaggctttaacatttcaccatctatgttgagatgaatgtttagtatgtggattaatatcgcttgtacttggtattacctataggattttcttaacgtcaatgcatctagctaatacttatttgtcatgtgaagttgtaaagttgatcccatgaagcacagcctcacccactttgtctacactcaccaaattattcttaaaagcccaattaagttttctaggtccagttaatatttggtaagaatattattgggctttgatctacttaatgggctccgttttgggaaattgcttcaggttccatttttttggttctatatcaaaacacacgaatgagagagaggttcgaatttctcttctctcattcaaaggttactaatttcgctcgtagaattttgccctatttgcattagctgtcgacaacgtctaaggcaagaaaacttgatttggaaccctaatcgattctagctccattgtatcaagatcaagcccccctacgccggatattatagcgtttttgggtcatattttctcttaattaggatttgctcatcgttgtagctttagcggatcgatttcgaggtgccctaattttctgatttcgtagaaattggttgttctgggaaagatgacgactttatccaaaaaagaaacattgaatatg

SEQ ID NO: 35355 - DNA, 3003 bp, Unknown
  misc_feature (1)..( 3003): 2750-1469P.txt file - cDNA_ID_3086476; gDNA_ID_2926287; Annot_ID_205445
ctctacacagtgccaatatcaaggttgtcgtaagagtaagatgctcttcagacattgtatagactgtacgactggagattgccccatttgtaagggattgtggagtctcctcaaactccatgcccgcaactgtagagattccaagtgcactgtccccaaatgcaggtacatagagtttttttcacatgcttttacactgattaaacaacttgtcatatatagatagatagctaactctttggtgttgcatctccgttgaacagcggtttgagagcgattagtagaaggaagcagcagcaggcagacaaaaggcgtagagctgctgtaatggagatgatgcgggaaagggccgctgaagccacccgcactggctgactcatctgatcaattacatgccagctgcattctcaacaaaaacaagagactattttgtagactattattgcatagaattaaaggaagactagaagcaaaaggaggagctttttcgtctcttcagcaggtagctaattataagttaagattagaggaggcacataggatggtacatatttgccaaatataagatgtcggttgtggtggattttttatttgaagtctctttcatattctttgttgattgattcttttgtaaataactaaaggaatttgacaatctatttcttttataggatcatatagtaaacacaagtacacaatggaccttatttacaacagatagacctcaaaagtgactacttactactaccttgaaggatgttcagttttcaattcttggacgtttcggggaagtttcacatttgtcggcgttaacttcagatgcattggttttacaagattagtgttgtacttacaagatcttttccaagtacttagtatatatgttcttctatccgtagttgtagtgacatctgtacctactcacccagcagtaacatgtacatgaattggttgagagcaaatcttgaatgaaaccttatcaccaatgttagagttttacctcgagctgttcatgcaattgcttctgtacttccatctgcagacggagcttctgctaactgtacggctctgcacaaaaagtaaacagaaaaacttttaagaaaatgtttgaaaacatatcccacaatccaaaagttattcgaagctgctttcttctcttctcaataaaaaaaaacaatgaatcaataaataaactttctcagatgatcatatatgaactagaagcagatgagggaacaagttaccttgttttctctctggcatatacttggctagtctatacttctgcaaggaaaaaatacagcttcaaagataattcagcttatgtagttgaaatttctgtcagggtcagatggcttttcacttgatagatggtcaaactctcaacattcattagcttcatagcagccttaggagttgtctctacatactatgaattttgacttcgccgttttccgtccccgtttctagttcccgtacccgttttggtgctacttagtcttttaggcccttgaagcttgttcactgcctctagaaaatgctcatggagctcaggactctatcttattcttggcttgtggttaatcgctgatcctagagaaggctctgcggtgacagacaacgctgcaggaacagagttttggtcaggattcacttggtagctagcaagttaaaggagagaaaccaacaaactctttatagatgaaaaagaactaaactcacatcacgcctgtgggtttcagcacggtctgtgatggccaactcaagctcatcagacagaaactgcaattccatttgctctcgagaatgaaccttttgagaaatctcgagtttctaatggcatatttgtggtttctgtaggaccgcgcaaaaatgagttccaacagtttcaggtggcacaatgtggagaaagttatgcaatggagatagagacagataggatgaacgataaacattgtttcatccatccatggataataagcagctatggctgttcatcaagcgacagggaaaatactatgatctaagaaagagtgtattaatgtttgtttgttcataatttcatacactagactagagtgttcaattgcttgaattaccatgggcctgaccattgtgtatatataccataggcccaataaagtaagctcaaactaacgtccaggggattcaataaacggagaagacaattaagcccaccggttagaggcagaatatccactctgaaccgactcaaaccaaaatcacctgtggaattcaaaccaaatcaacattttttttaagaaccaagatttgcagtagccgatatatttgatgcaagaaactattgaataatgaagttggatagatttcaactacaaaatacattttctgttaaattttgaaggtataactttaaagaggaaattgatagtccggtttattactggccatatatcaaattggatcagctattggtactggtgtatccggtcctccttagtcatgaaccattagtctctctatagtatcagaatatttgtttctttgtggttttctccacatatttgctattagaacaagtattgtgtgattgtgattgtcacagaatcaatagagtcaatcgttgccttatggcccttatccattttctctgacacttcatttcttccatatcttttacatgaattaaaacgacaggttctttcgatttcattatgtggcttgcctcaatttatggttctagatcacaaatcgagtctgacctgtcaatagtttggtcatgttcttgttgtatataaacacccattgatttaacacaaagagggcaaagttgtaagaaaataaaaaaaggggtcaaaaagaacaaaaaatcaaattttgggggggcgacaccataaaataaagagaaaaagcagagtccagaatccgttgccttgcccgcatctgcaactggaaaacacaaaaacagacgccacgatggatgaatgatttcgcaaatcgtcgagattttggaattcgatg

SEQ ID NO: 35356 - DNA, 3000 bp, Unknown; identical to SEQ ID NO: 28587
  misc_feature (1)..( 3000): 2750-1469P.txt file - cDNA_ID_3086522; gDNA_ID_2926288; Annot_ID_205509

SEQ ID NO: 35357 - DNA, 3000 bp, Unknown; identical to SEQ ID NO: 28586
  misc_feature (1)..( 3000): 2750-1469P.txt file - cDNA_ID_3086530; gDNA_ID_2926288; Annot_ID_205506

SEQ ID NO: 35358 - DNA, 3003 bp, Unknown
  misc_feature (1)..( 3003): 2750-1469P.txt file - cDNA_ID_3086552; gDNA_ID_2926288; Annot_ID_205499
gcgggtttatgtttttttgtggaaaaattacgagtttactttttctcaattcatcgcttgtatatttaagaaatttggaaaaatattgattttattagattggtttagatgtgttggttaaacttaaattggcattgatttagagattttagttggtttaattcaattttacaaaacttgatgggttaattgggtaaaccattgaaaccattaaccattacaacccaactcattttacattaaagataacatttattttaaacataaataatcgtaaataagttttaaacaatgtaattaaaaaacatacaaaatagaatgaatcattttgtcgagtgttagagaaataaataaaaacgataattagaaaaagcaccaaaattatttatcaaattaatttgaccaatataaattgttataactaacaaattatggataaataaaaccaaacattgtgcaagtgttggcctagtatgactccgattggttacattgcatgataggataatggtataagttgcagaataaaaatttgtagaatgaaaatttgtaaaatggaaaaccgtataatgaaattatgtttaaaatatgttgattgaatacattttgcataatggcaaaataaaatattatatacttaataaacaaaataatgtttaatatattttaagtaatatttgataaaaaaaaaaataagaaaattaaaatttattttaaagttgtgaatttttttatatattattaattatataattttgtgtaaacaattatattttttttcttttacaattaataatatttagtatgcttataagaataacaatttattatgcacataagcaactatatacccactttctttcataatgaatttttacttgtaattttagggtgcaaattctgcgtttttgcgtttgttaatgtaattatgcagattttttcttgattgacaaacttcttgcataatcgcattagaaaacaccgttatgtcattatgcgtgttaccaatcaaaaaacaccttaagtaatagtatcataagtgttcgtaatactgtaagaatatgtgagattttctagtttaagattggaaatatctaagtgttgggtgaaaatcacaagaggaattattgtattagattgtgataataagtggaattattaatttgcatttgacatgatatatggatataaattgtaagacgacagattttttaaaaagttattctaatcaaacaagtcaccttcaataacaattgattagaacataccgcgtcatatagtaaaaaacctttaaatcatatgttaacattctcttcttctataaagtaacatcaaatagttactacaatgagatatacaacaatcaagtatggtatttagggtttaacgtaagatttgagagatatgatttatgcaatgacatccaaatttgatagatattgagaagatatagaaaaagccaataaaatattgatagtggctaaaatatttgatcattttcatataatgatatttgcattgtttagctttaaacttatacgtggataaggtaatctaaagtgtgagaaataataatttgctgataaatattttgtagagataatttgagtatagtgtttgatagaccagtttaagtctacaatcttctttctgtaaatgagttggaaacatatcaaaaagacgagtcagatatactcaaccatgttttaaggtagtaaaaataaatagatcaaaatattcaaccatgtttccaatggcaggagaagttcttgcaataccaatatctttggctatatatgagtctgtttttttaaccattagtgattgtaatttaaatcaatataaaagctatttggtttgtggtgttgttaaaccgggtgaagcactctctcaactctttatacatattttttctttttgttgactaataaatttaacattttaacacacaaaaaaatgcttttgacttaaaattggttacatgcattattaggttcagaaaaaatgaggtatttaagatttatattcagcaatggttcatatatatgctctcatgtctgattttttcttttaaatatatttatgttagaaaatgatctgcaacacatcagactaaaaaactgaattattttttttatatattttctaatattaatagaaaacggtttattaaacaaatgaatatgcaaatactctaaaccgtgagaattccttgtggagtttcatttgtatataatatttattttctttgctttataactttaaaataccatcatgattattatagttcagcttctatgtaatgaaaccatgtagacaataaaataaagaaaataagaagcagtttttattatctaaaaagcgtagacaaaaataattaagaaaacttgaacaaaagaaaaaagatagaaagttgagacgaaaaagaatatataaggggaatgggaaaaaaaaatcatctaagcaagggatgaagatcaaactcgagttgtttaatctcatacataaatccgctttcaaattaattttatgttgtcgttccataattatattttttcttaaaaatagtcttgttttccattctctctctcaaaccaaatttacacatttaaataaactttaaacagaaaaaccactattaatgtagtaatatattaaatattgatatatttctatatcaaatttaaaactaaaaccaaaaaaagaaagaaaaatttctatatcaaatttagaactaaaaacaaataaaaatagtgtcatttccattatgttcttttaaaccaaactttacattctaagaaaaaacactattgatgtgtatattaaacttttgatatctttctaaatcaaacttttcttaaggtatttaaaagtgatagtattctgaatggaaaaataacaatttaacactaaaaccaataaaataaagagaaaaatgtttgtggctaacaaaaaaaaaaaatccagattgtgattacaaaaaaaaaacatttctagggcatg

SEQ ID NO: 35359 - DNA, 3003 bp, Unknown; identical to SEQ ID NO: 28580
  misc_feature (1)..( 3003): 2750-1469P.txt file - cDNA_ID_3086602; gDNA_ID_2926288; Annot_ID_205484

SEQ ID NO: 35360 - DNA, 3003 bp, Unknown; identical to SEQ ID NO: 28580
  misc_feature (1)..( 3003): 2750-1469P.txt file - cDNA_ID_3086602; gDNA_ID_2926305; Annot_ID_205852

SEQ ID NO: 35361 - DNA, 2460 bp, Unknown; identical to SEQ ID NO: 28588
  misc_feature (1)..( 2460): 2750-1469P.txt file - cDNA_ID_3086642; gDNA_ID_2926290; Annot_ID_205526

SEQ ID NO: 35362 - DNA, 3003 bp, Unknown
  misc_feature (1)..( 3003): 2750-1469P.txt file - cDNA_ID_3086682; gDNA_ID_2926292; Annot_ID_143674
ctctttgcggaaacggatccatttgttggctcctgctggacgatctcccatcactctcagcttcctcgtggtggttacttgcaccttaagctgctctttcctaaaacctgtttatttcaagaaccgttacacaattcaagaaccgattaataaaccaaaatcaaaacgagaacaatgctagagtttgttgagaaatcaaacctggaaggtaaatagtgagagcttcgaatccttgttcagttttccaatttgagagtggctcaaattcatcgtagatgcgattagcattagcatgatcagaaattctttccatcttttataattttcttggtttgatgtagaataagaggattttgtgtgtatgttgatacaagagagtatctaagcgatttcattatataccaaagaaaagatgaattttctaagttgttttctttgatattgggttattccttaactttgcctatctattatgattcctttctataaagttctttcctttttatatgcatttttacaactttattttccaattctcaaaaaagtgaagtaaatgaaattttaaaaataggagaaatgctttgctttgtggagatggcttcatgtagagaacaaataacaagtttatgttgttgttaatgtatctcctaagtttattagacaacgtgcaaaaaacatctacaacaacaaacccaatttcacgtctctcccaagcattttactattaagaagatattgttaagtttttttttttaaatgaatgttaaatttaatcaaccaaaaaaaaaccattgtacaatatatgcatccttaatttgaatgtttataaaaatttaactagactttagagcaaaaagaagaagacacttagagattagcttcttaagtcgaaccaaacccgcagaccatcttcaagcttgcgtgagccataccgtaatagttttttattccaaaaatatagtattcaaattagtccttatttcactagaaggcagaagcaatatatattcttcatattcaaagttggaatcattacaaatttccaagttacgtatttctatcataaagatatatcttcttctttttttgataagataaagatatatttttttttgttaaaccactacttaaacacgcatattacaatgtttaaaatcaatgctatagcttcacaacttctcaaacgtatattcttattgttaattaaataaaaatcaagttttatcataaatagaaacaaattaagagcaaaaatgatagcagcggcaggtcttaggaggcaggcaaagactagccacgggcttcttcaacttctcacatgcagatttacattccgtaaaaatacattttccagatttgttaggaataacagtatggcattgttctcgtttcacttgttgcacatttcccattactcctgtttgtgtcatatttagaacatgtcttagtaaatgttaccatcacataattatgtatcgaaaagcaattgttacatagattttacataacatatatagactatagctgaattgatatttttaacaaaattgtatagttgacagaatgaccttttgaagaagtatcacaatactgtcaatatatatatatcacaatattcgttattatttacagttgaaatatatatttttaatatattaaggcgaatttcaaatgtaaatacaaacctaactcaagaaggatgaaaaacgttagaatgatgagtgaaagttgaaattggttcttcatcataggtgttatgaatgaattgatggtgttttgaaagtgataaacaacttacatagtgtactcctcctatatatacttttttttaagaagttctatgtaccttaaaccaaaaaaaaaaggttctatgtacctcacattcaagcttatctaacttgagctatctatctccttaaatttcggttttacacaatttctatatttttctcattctttatgtgaaagctgtagactcgttcgttgttgtaacacaatttcctatttaaataaaaacattgaaatttcacaaagaaggaaaaaaacaaatatagccacacattcatacaatatcaaatctcatatgttatttttaaaataatgtacatgaatagccgtgagtgaaaattatcattgaagaatcggtgttagtcaacttgtagtttatgcacggagtcagatgtcacatgtccagactctagagtgttaacgagactaaaataaaaagtgttaacgagacgactttacacaagtaaaacaacgttattttgattatacaaaatcaagactattgttttagatatttttttgtttactagttaagaaaaatcaagtctctatctcactagtagtagttttttttttgtcggcatcactagtagttttttttttttttttttttttgtcgacgcatcactagtagttaaatacaagttatataggccatggtaagcttgatcaataaaagactacattagtttttgctatagatttgagcaaaaaaaaaaaaaggtttttaaaatagatttctaatttttttttaacttaatagatttctaattttttttctacaaatttgcgttttatcttctttccccacttgaacagaaaaatttatttgtttagcaataaattcaaattaaaaaaaaaaaaaacatttcatttcaatttagtaagattttgattggatcaggttgagatttcttccaaagtcaaatattcttttcccataagactgactcgtggcgcacagtcaatgacttatgacttatgacttatgagttatgtctgaaactcaaacttatagatgtgcgtgaaagaggcgcaactataagagaagctgatatgaaactcttcatcacatctccctcaaacttatttctctctttaattggttaaatctccacacccacttcgtgttttcttgattcgtttcctgggtttctcaaaaatctaaccttataattggaaaaattctggtgtcactgctctgggaaaaaaatg

SEQ ID NO: 35363 - DNA, 3003 bp, Unknown; identical to SEQ ID NO: 35362
  misc_feature (1)..( 3003): 2750-1469P.txt file - cDNA_ID_3086682; gDNA_ID_2926292; Annot_ID_205544

SEQ ID NO: 35364 - DNA, 3000 bp, Unknown; identical to SEQ ID NO: 28591
  misc_feature (1)..( 3000): 2750-1469P.txt file - cDNA_ID_3086712; gDNA_ID_2926295; Annot_ID_205562

SEQ ID NO: 35365 - DNA, 3003 bp, Unknown
  misc_feature (1)..( 3003): 2750-1469P.txt file - cDNA_ID_3086791; gDNA_ID_2926298; Annot_ID_205609
tgtgtcttcctctgaatggacttttgaggaactgattagagtcgggtctggtcggacgtagcagaaggagtgacctaaaccttcgtctaaaggatccggaagaagaacggagatgtcttttggccggagacgttctcctccaccgcctgtgaaacatatactcagttttgttactccgttacccatcaaaaacgttattaatttcagttttttcttagattcgcaaagtcaatagaggatttgggagaactcaaagctgagattgattgttcatcaatggaagaaaatccaaagagagggcaaagagaagaagaagtaaaagagagagagagagagagttgacttatgtgcaaagagaaaatgatttttctaaccaattgttattaattaccagagaaaggaataaaagaaaagaaactgtaagagatattattcgggttttgtctgatttaaatctgcgagaagaaaaattggtgtcaaacagaaaataaatactagtagatgaaaagtgtgacgtcaaaaacaagtaaatgacttttggttcgcatagatttgttgtaagaacgcgagagaggcgttgactaaaagagtctttaactcaggggtttctatttaaatggggaaagatgctataaggaccactctcaactaagtgcgtgaattgcacgcgactctgctggttagtaccgtatgagaggagtcgaagacatgcgtgtgtgagaaggatcaatatacgttctttaatttatagagatgtaatctatacgttagtaaaaactatctaatcctgttagagaatggatattccaaaatattgaattgtggaatctaattgatcatcaacgttgtgaaaaccttatgatgagttatcgtatgtatgacatatgatgattactataatcatatactaaacggagcttctaatgtgagaacaggggcaaagaagttactagtgcaaataattcaaaaggaaaacatggtgtcaaacgacatgaccggtcattgaaaatacccggtacacgcctcagatcgagcgtgggcttacgcgtgaactccaatagcaaataaagacttgcttataaacttagctgcggaaaactaggaaaggctaattaaagaagttgttgatatgttgatatagatcttattatgggctaagacaaaaaaaactctattaaaagtcaaaagagtgtgccacaaattctcatttgttttcgtttcggccgtcgccgttggatctcgtgtaaggatcaaatgggctatgagcctaccacgtgtcatattatcactgaaggcctcgttttcttcaatctctcgacaactttcataattccctttctcccccaccactctctccctctcttacctcattcatattataaaatttggacttttattcttttgttaacaatgtgttaatgggggggttttctagttcatttttatgagtttggtggcaatattcatttactttggttggggcagttgtgatcattactattcttaatcacgccaatccaactaaagtctttgacttcctttttcttattacgttttgtttaagattaatatgataggaacatactgcttattagaatatcagaaaagtaacaatctaatatacatataaatcgtttggtagcggccacttgctaacgaaatgatataaatcttctctctttctcatttgccttttgaatatatttggttgtctaagttttccttctagtcggttaaatatgaagcgtgattagggttttaatcttccaagtcaaccttagcttccaagtcaattctggcttgcatagtactatttatatataactagatatacaacattctgttatcatttgacagaattaatatttacagaaaacctaagcagccaaaaagatggcctacctcccatacaaagagtgtcaacaatttgccacaaacacaagtagcctaacaactaacgtaactactcatccctcttgggttgttcacatactttaccagcgcaattttagaaaccgttaatatatttaaatttggttacgcacaagatatttgatatgacgacaatttactggatcacaacttttgcttcttctttaaaaagaaaagaaagaatcagcaacaatttactggatcatatttgcatagaaaatatcaaatataatgaaaaaatcattaatcatataaagaaacaaagcggatggagtacttaaattattcaatatttacaacagaacattattttaaataataaatctatgaaatctaccttataaacgtgcactaacaaaagaaatgatacgtacgtatattcgtagcaataaatataagggaaactattttattaaattctgaattacaagttgaaaagtactagatattgaatttagtttagaaaaatacaagtgtttcaatgaggaaaaaacaaattattcatgtatatttctcgtggcgtgtgagcgttatatatatagatgaaacagacattttgacagttttctacaagtagaccgggccatagttggcgggtaaagactaaagtagaaccacataggagaacgaaaagtctcagtttcatcgtccttgttcatggtcttcctcgtttttcttccagacaccttccgttgcatcaacccctattgaggtttttgttgttcttgttccttatgttcttcggtttgtataataccaaacaatttggttgtctcagtcacttccttcttcttgttcttgaatattgatcaggtcagtttctaccgtataactttttaacggcttttatatattcttcttttgcttaggtttatcaaaattatggaacaagaaagattatttgtttctttgacttgattatatttgattggattttgaagatttcagactgctactaagtctctcgtctgactaaatttgtgttttttttaatacgtcgctgttatcatcctctgtctttcaaattgatcaaaaacgtaatttaatttgtagatcataagattcgaaatg

SEQ ID NO: 35366 - DNA, 3000 bp, Unknown
  misc_feature (1)..( 3000): 2750-1469P.txt file - cDNA_ID_3086797; gDNA_ID_2926298; Annot_ID_205607
caatcttttaaaattgaaaattactttacaatattttatgagatggagcttacagattggtcggttcttagttctccaatggtggaagtcaagcacatgaagcattccagctaaccatcctagtttgtgattgtatttgccatggtttggacttgaactctcgtttttcaaatgcttgcccatttcgaatcttatgatctacaaattaaattacgtttttgatcaatttgaaagacagaggatgataacagcgacgtattaaaaaaaacacaaatttagtcagacgagagacttagtagcagtctgaaatcttcaaaatccaatcaaatataatcaagtcaaagaaacaaataatctttcttgttccataattttgataaacctaagcaaaagaagaatatataaaagccgttaaaaagttatacggtagaaactgacctgatcaatattcaagaacaagaagaaggaagtgactgagacaaccaaattgtttggtattatacaaaccgaagaacataaggaacaagaacaacaaaaacctcaataggggttgatgcaacggaaggtgtctggaagaaaaacgaggaagaccatgaacaaggacgatgaaactgagacttttcgttctcctatgtggttctactttagtctttacccgccaactatggcccggtctacttgtagaaaactgtcaaaatgtctgtttcatctatatatataacgctcacacgccacgagaaatatacatgaataatttgttttttcctcattgaaacacttgtatttttctaaactaaattcaatatctagtacttttcaacttgtaattcagaatttaataaaatagtttcccttatatttattgctacgaatatacgtacgtatcatttcttttgttagtgcacgtttataaggtagatttcatagatttattatttaaaataatgttctgttgtaaatattgaataatttaagtactccatccgctttgtttctttatatgattaatgattttttcattatatttgatattttctatgcaaatatgatccagtaaattgttgctgattctttcttttctttttaaagaagaagcaaaagttgtgatccagtaaattgtcgtcatatcaaatatcttgtgcgtaaccaaatttaaatatattaacggtttctaaaattgcgctggtaaagtatgtgaacaacccaagagggatgagtagttacgttagttgttaggctacttgtgtttgtggcaaattgttgacactctttgtatgggaggtaggccatctttttggctgcttaggttttctgtaaatattaattctgtcaaatgataacagaatgttgtatatctagttatatataaatagtactatgcaagccagaattgacttggaagctaaggttgacttggaagattaaaaccctaatcacgcttcatatttaaccgactagaaggaaaacttagacaaccaaatatattcaaaaggcaaatgagaaagagagaagatttatatcatttcgttagcaagtggccgctaccaaacgatttatatgtatattagattgttacttttctgatattctaataagcagtatgttcctatcatattaatcttaaacaaaacgtaataagaaaaaggaagtcaaagactttagttggattggcgtgattaagaatagtaatgatcacaactgccccaaccaaagtaaatgaatattgccaccaaactcataaaaatgaactagaaaacccccccattaacacattgttaacaaaagaataaaagtccaaattttataatatgaatgaggtaagagagggagagagtggtgggggagaaagggaattatgaaagttgtcgagagattgaagaaaacgaggccttcagtgataatatgacacgtggtaggctcatagcccatttgatccttacacgagatccaacggcgacggccgaaacgaaaacaaatgagaatttgtggcacactcttttgacttttaatagagttttttttgtcttagcccataataagatctatatcaacatatcaacaacttctttaattagcctttcctagttttccgcagctaagtttataagcaagtctttatttgctattggagttcacgcgtaagcccacgctcgatctgaggcgtgtaccgggtattttcaatgaccggtcatgtcgtttgacaccatgttttccttttgaattatttgcactagtaacttctttgcccctgttctcacattagaagctccgtttagtatatgattatagtaatcatcatatgtcatacatacgataactcatcataaggttttcacaacgttgatgatcaattagattccacaattcaatattttggaatatccattctctaacaggattagatagtttttactaacgtatagattacatctctataaattaaagaacgtatattgatccttctcacacacgcatgtcttcgactcctctcatacggtactaaccagcagagtcgcgtgcaattcacgcacttagttgagagtggtccttatagcatctttccccatttaaatagaaacccctgagttaaagactcttttagtcaacgcctctctcgcgttcttacaacaaatctatgcgaaccaaaagtcatttacttgtttttgacgtcacacttttcatctactagtatttattttctgtttgacaccaatttttcttctcgcagatttaaatcagacaaaacccgaataatatctcttacagtttcttttcttttattcctttctctggtaattaataacaattggttagaaaaatcattttctctttgcacataagtcaactctctctctctctctcttttacttcttcttctctttgccctctctttggattttcttccattgatgaacaatcaatctcagctttgagttctcccaaatcctctattgactttgcgaatctaagaaaaaactgaaattaataacgtttttgatg

SEQ ID NO: 35367 - DNA, 3003 bp, Unknown
  misc_feature (1)..( 3003): 2750-1469P.txt file - cDNA_ID_3086805; gDNA_ID_2926298; Annot_ID_205605
acggcgtcacggataacattctcgaggaagatcttgaggacacctctggtctcttcgtagatgagaccactgatacgcttgacaccacctctacgagcaagacgacgaatagcaggcttggtgattccttgaatgttatccctcagaaccttcctgtgcctcttcgctcctccctttcccaatccttttcctccctttcctcttcctgacatctctttacttgatacacaaagatctgtgaaaaataacagaaggaaactattcagaaaccctagatttccagatcaatcaattgaattgagaatcgaaacatttaaactcttcgaaaatgtgacaaatcgagaaaaactttgaagaaattaagctaacattaaattgaaatctacgcctaagcaaggcagaaatatatgaattacctgtagatttatggaatgaaagttcttcaaaaatgtgattgtaaaaagtatgttacttcgagtacaaagtggtgggattaacttgtatctttctttctgttgtattatcgtagcttgtatcaactttcctctcttgaggctttgaggccttaatgaatgaaagttgtgttttgacaaaaaaaaaaaaaaaaaaaaaaaaagtggtgggattaacattttataaaggaagtgactacccaggacatatattttcggccgtaacgattcatcttctttcaacggtccaagattgcgatccgcgtgaaatctgtaagaagaatatggatcgttggttcttaaagatcaacggtagtagatggctttcgacttttcgtcattctctgtgtaaactccattaaacaactaaaaaaagcctccaacataacagataacccaagacttttttctaatctaaaggcccatatgtgagtagtaggcccaaattgacccaaaaaagggagcaaaaagctcacgtggcagcaagtaccctacacacgaaggtgcatgttgtcgaccacgtgttgagctcaccgtaaagagagatcctatgtgaggtttgatgatgagcatttccaaggatttcatcggatcgaaatcagaatcataagactgggaaaaaatggcagctaatatgatgagaccggcgtttgcttacactgttgtgtacgtgaaggacgtagctaaatctgtagaattctactctagagcttttggtcacaacgtccgtcgtcttgacgaatcccacaggtttgtattatgaattgttactattctctacgttggattgtcttaggtgttgttggatacgatcataggaatgtaaacgacagaatcgtattaggtcatgaaacaaaactctcgggtttgagattctattggtgcgatgtcctataatcaggtccgatccgctggctaacatgctaagcaaacacaccaaatatatatgtttgatgaatgaaagaaactgatacatacaggtggggggagctagagagcgggcaaaccacgatagcgttcacaccgcttcaccagcatgagaccgacgacctaaccgggaaggttcaggctacgcagtcagcacgtgaaagagcacccatcgaagtctgcttctgttaccctgatgttgatgccgctttcaaggtagaaatcaattattatatacttatgtctatatttgcctgttactcttcaattcgtacgtgttgataaaccagtgagatgctgcgttgtgcagagagcggtggagaacggtgcggaggcagtgagcaagccggaagataaagaatgggggcagaaggttggatacgtgcgagacattgacggcattgttgtacgcatcggaagccacgttaagtgaattcaaaataaagactcgtaaaatatgatcattaactagtctatatacatatgaataaatattacaagatactttggtacctttgttaattatggttgatgtcttgatgaatatatttacttaaagcaacatgtaaagtaaaaagatatacaaagtgtccagcctagtccccacactcccctctctcaattcgttttttctttgttagtatcgttacacaaagtaggaaacgatgttatgatcaaaatcataatagttggatttttctcctatcctagttatcttaaacatttatcaaatgattccgcgacccaacaaaataacaaacgaaagagagtgtaaagttccttttaccttttttctttttatcttttgtcgtagtcgtagtttcgtatgtttgtgagtactttggctttccaaattaatacgactggctgtctatcaaagtagctaaaccaataatgtaaagatctgtcgtatgtggtctttgaaacccaaatcaattgtttgttttataacaataattgattcttgatttttgtcaaatagaacttatcaacaataattgatgagactcgattatccgctgaaaatatttttataattattttaggaggaaggtatcatatatatactacttttcattgtttgccggctaaataattttaggaattgctgacacttagtataaaacattgaacataagataagaaacttgtttaatatttaaaattctttacttcctatttcttaatataatacagaaatatttgtatctttttaacaaccaaataaatctttaaccaaaacatagactagtactcttaaagcaaaacatagactaatctcatacaaggactaatcccaaaatcgcttggggatataatttctgaagggtctctgtcaaaccttaagaaaagatatttaaaagtagcactgggtcctgatataatatacataatgtttacattacagtattacacacacacatattagaatgggctgaagaccaaaatagttaagagaacatgacaaagtacagcaaaccttattaaatcctgacgactaaagtggtcaataagctctagcttctcatccatcaccacttcctaaatgtttctctctctatatctcttgcaagctttctcgcagaagtgataccatattttattattttgtatagaaaaaatg

SEQ ID NO: 35368 - DNA, 3000 bp, Unknown
  misc_feature (1)..( 3000): 2750-1469P.txt file - cDNA_ID_3086813; gDNA_ID_2926298; Annot_ID_205603
catcatcatcaaagataaaaaaagtgctttgatttgcaaatcatagagatgcacacacatatacagacgagagacaggactagaggaagaatctttatagtagtaccttcggcctcgtgaagtttattgttgtcggaaaaaccaagacgcccatggaaaattagtgtgaagaggacgatgatgaaatatatgcgatgtaaatatatcattttttctatacaaaataataaaatatggtatcacttctgcgagaaagcttgcaagagatatagagagagaaacatttaggaagtggtgatggatgagaagctagagcttattgaccactttagtcgtcaggatttaataaggtttgctgtactttgtcatgttctcttaactattttggtcttcagcccattctaatatgtgtgtgtgtaatactgtaatgtaaacattatgtatattatatcaggacccagtgctacttttaaatatcttttcttaaggtttgacagagacccttcagaaattatatccccaagcgattttgggattagtccttgtatgagattagtctatgttttgctttaagagtactagtctatgttttggttaaagatttatttggttgttaaaaagatacaaatatttctgtattatattaagaaataggaagtaaagaattttaaatattaaacaagtttcttatcttatgttcaatgttttatactaagtgtcagcaattcctaaaattatttagccggcaaacaatgaaaagtagtatatatatgataccttcctcctaaaataattataaaaatattttcagcggataatcgagtctcatcaattattgttgataagttctatttgacaaaaatcaagaatcaattattgttataaaacaaacaattgatttgggtttcaaagaccacatacgacagatctttacattattggtttagctactttgatagacagccagtcgtattaatttggaaagccaaagtactcacaaacatacgaaactacgactacgacaaaagataaaaagaaaaaaggtaaaaggaactttacactctctttcgtttgttattttgttgggtcgcggaatcatttgataaatgtttaagataactaggataggagaaaaatccaactattatgattttgatcataacatcgtttcctactttgtgtaacgatactaacaaagaaaaaacgaattgagagaggggagtgtggggactaggctggacactttgtatatctttttactttacatgttgctttaagtaaatatattcatcaagacatcaaccataattaacaaaggtaccaaagtatcttgtaatatttattcatatgtatatagactagttaatgatcatattttacgagtctttattttgaattcacttaacgtggcttccgatgcgtacaacaatgccgtcaatgtctcgcacgtatccaaccttctgcccccattctttatcttccggcttgctcactgcctccgcaccgttctccaccgctctctgcacaacgcagcatctcactggtttatcaacacgtacgaattgaagagtaacaggcaaatatagacataagtatataataattgatttctaccttgaaagcggcatcaacatcagggtaacagaagcagacttcgatgggtgctctttcacgtgctgactgcgtagcctgaaccttcccggttaggtcgtcggtctcatgctggtgaagcggtgtgaacgctatcgtggtttgcccgctctctagctccccccacctgtatgtatcagtttctttcattcatcaaacatatatatttggtgtgtttgcttagcatgttagccagcggatcggacctgattataggacatcgcaccaatagaatctcaaacccgagagttttgtttcatgacctaatacgattctgtcgtttacattcctatgatcgtatccaacaacacctaagacaatccaacgtagagaatagtaacaattcataatacaaacctgtgggattcgtcaagacgacggacgttgtgaccaaaagctctagagtagaattctacagatttagctacgtccttcacgtacacaacagtgtaagcaaacgccggtctcatcatattagctgccattttttcccagtcttatgattctgatttcgatccgatgaaatccttggaaatgctcatcatcaaacctcacataggatctctctttacggtgagctcaacacgtggtcgacaacatgcaccttcgtgtgtagggtacttgctgccacgtgagctttttgctcccttttttgggtcaatttgggcctactactcacatatgggcctttagattagaaaaaagtcttgggttatctgttatgttggaggctttttttagttgtttaatggagtttacacagagaatgacgaaaagtcgaaagccatctactaccgttgatctttaagaaccaacgatccatattcttcttacagatttcacgcggatcgcaatcttggaccgttgaaagaagatgaatcgttacggccgaaaatatatgtcctgggtagtcacttcctttataaaatgttaatcccaccactttttttttttttttttttttttttgtcaaaacacaactttcattcattaaggcctcaaagcctcaagagaggaaagttgatacaagctacgataatacaacagaaagaaagatacaagttaatcccaccactttgtactcgaagtaacatactttttacaatcacatttttgaagaactttcattccataaatctacaggtaattcatatatttctgccttgcttaggcgtagatttcaatttaatgttagcttaatttcttcaaagtttttctcgatttgtcacattttcgaagagtttaaatgtttcgattctcaattcaattgattgatctggaaatctagggtttctgaatagtttccttctgttatttttcacagatctttgtgtatcaagtaaagagatg

SEQ ID NO: 35369 - DNA, 3003 bp, Unknown
  misc_feature (1)..( 3003): 2750-1469P.txt file - cDNA_ID_3086815; gDNA_ID_2926298; Annot_ID_205602
gaagtcgtcttcttgtgttttgtcaatgtaggaaatgtacgtataaacatgagaaaagactttgctatatataggaatttctctatttgcatatctctctaaatgctcacctttttttattaccaactgataattgtataactcagatagttgttggatgtgctttatggaccgattggtaggctgtctttttttttttttctgattatatcgtttgactagaaaaactcctctaattttaaaaatgtaatggaaatattttattttttaatatatcaagtagctagtaacagatttccaggaaaaaaggcaggaagtttcaattttctacaacaataattcaaaaaaaaatcttataatttacacaaactatttttttagagtttgacaataccaatacgtttggggcattaagatcctatatctatatctatctatctatatatatatatatatatatatatgtatatccaattcctgattaaattgattgctgcatttaagggtattggattaagatttttgaagagtttgatcttttaaaaaaaacttttgttattcaattgatgattcatagttatcttctcttttttttttttttttacatcatagttatcttctcaaatctgatgttattgaataaatcaacttcaattttagtaaatatgtttataaaagtttttgaaatgtgaaactttatgtacatctttagttaacaaaaactgacacctatcaatcttctttctaaaatccacccttcttggatatagaattcttaaaaacaaatatcaaaatcttgttttactggatatataattatttctaaccaacacgtaataatttaaaatcccccattatttcaattgttgaataagttctatcttttttaaaatgtaaaattttaaagatatcaaagtatttagttacaagcttttgaaattgtgtgtaatgtaacgacgacaacaacagagattaaagatcatcatatcacttatagcaaaaacaaaatcttgacaaggaaaaaaaaaatcaagagaatttaattattgtttcaaacatttttgtttgatcaattattgtttcaaacattggtgtcaccatttgaaagctttcctgctggagcactcatggtcatggcaactgttttcgtcttcccgtccattccatagcccatctctttagctcccaattgtcctattaaattacatacactcttcatatattaataagattctttagttatcctaattaatctcgataatcactacgatatttaattatttacatacgtccgttgcatgttctaactggggttagtgtttaaatttcctggacagatcctacctataattaggcccaattatatataattcggcccaactatatggttcgattaaaccaggaaaaacaaatcttaacgaaatcaatgttccgacaaaactctgcaattaatccagctggtttgcgagtgaaatggtgattgaatttatttgtttggtttggttggaattataatgttgcatcatattacctggataggattggacaatagctgcgttcataaccttttgtcttctgacgcagcaaaaccagattccaatggcgacaagaataagaaagaagagaccaacggctaagtctataatcgtcacgaaaccgttgtttccaccgttgcctccaccaacagtagtttcacaattaagagtgatcctaccaaacttatctgcattgtctagactttgtcgtgcttgttcgtcgtgcaagtcttcccaggtgggagatgatgatgaatcacaccccggttctcctaattcgtgaacgtaggttaatttataatcaaatgaattcatttcagtaatatacacggatataccacatataataaggtacaagtgcatatatttttgttgtagatgtatatctaagtgtgataagaataataccattgatggatccaacaatagctatcaaagtgaagagaagtagaacaacaagggtacggagcgagaacattgttgggtctagaaaagatgattgatcagtctttttacgttaaccggagtgtgtgtccatatgtatacagtatatatatatataaaaagtttaaagtaatgtgtgctataatgggctgcaagtcatcaacttaccctattttatccattttaaagtttgatccaactatgattttatacatatttaaacttttgtgttataaataacgctctgtagaactagtccaatatacagtactcttttcggttagaagttttgaaaaggcaagatgagattttgatttatgaagtagtccaatatatatgcacctactttgtgaagttttcatgtttagtctttaggttgcatgtaaatatgtattgtttgttgagtgcctaataaatgatatatactcattgaacaagttgtagaagctcacgactgcgaaattacaatttatacctgaacaacactatagatggagaagttgtgtgttgttctttaacaaatgcatatatatggtggtgtgtagaataatgggatgcaagttatcaaccttgcctattttatttctaactacacaattagaattttttatgataatcttatagctttcattactgactccgtccaaaactaatattttttattactatggttcattttatttttgaaaaaaaactagtgaatgaatgaattaaatgtaagtgaaagagataaaaaaacaaatgagtgaaatataagtgaaagagatataaaaaaatataagaataattttgtattgctcattcttcagcataaaaagagagagatatttttctttaaaatttgcctatttttagtagtatattaaacataaatagatattagcaaaatatagataattgctttattttacatcttatctttctaaatgggcaactatatacttttcatatatatatttttaaaaatcaacataaattttttatttttcactagtattatatttgtcgatcaacttgggaaatg

SEQ ID NO: 35370 - DNA, 3000 bp, Unknown
  misc_feature (1)..( 3000): 2750-1469P.txt file - cDNA_ID_3086821; gDNA_ID_2926298; Annot_ID_205600
caagttgatcgacaaatataatactagtgaaaaataaaaaatttatgttgatttttaaaaatatatatatgaaaagtatatagttgcccatttagaaagataagatgtaaaataaagcaattatctatattttgctaatatctatttatgtttaatatactactaaaaataggcaaattttaaagaaaaatatctctctctttttatgctgaagaatgagcaatacaaaattattcttatatttttttatatctctttcacttatatttcactcatttgtttttttatctctttcacttacatttaattcattcattcactagttttttttcaaaaataaaatgaaccatagtaataaaaaatattagttttggacggagtcagtaatgaaagctataagattatcataaaaaattctaattgtgtagttagaaataaaataggcaaggttgataacttgcatcccattattctacacaccaccatatatatgcatttgttaaagaacaacacacaacttctccatctatagtgttgttcaggtataaattgtaatttcgcagtcgtgagcttctacaacttgttcaatgagtatatatcatttattaggcactcaacaaacaatacatatttacatgcaacctaaagactaaacatgaaaacttcacaaagtaggtgcatatatattggactacttcataaatcaaaatctcatcttgccttttcaaaacttctaaccgaaaagagtactgtatattggactagttctacagagcgttatttataacacaaaagtttaaatatgtataaaatcatagttggatcaaactttaaaatggataaaatagggtaagttgatgacttgcagcccattatagcacacattactttaaactttttatatatatatatactgtatacatatggacacacactccggttaacgtaaaaagactgatcaatcatcttttctagacccaacaatgttctcgctccgtacccttgttgttctacttctcttcactttgatagctattgttggatccatcaatggtattattcttatcacacttagatatacatctacaacaaaaatatatgcacttgtaccttattatatgtggtatatccgtgtatattactgaaatgaattcatttgattataaattaacctacgttcacgaattaggagaaccggggtgtgattcatcatcatctcccacctgggaagacttgcacgacgaacaagcacgacaaagtctagacaatgcagataagtttggtaggatcactcttaattgtgaaactactgttggtggaggcaacggtggaaacaacggtttcgtgacgattatagacttagccgttggtctcttctttcttattcttgtcgccattggaatctggttttgctgcgtcagaagacaaaaggttatgaacgcagctattgtccaatcctatccaggtaatatgatgcaacattataattccaaccaaaccaaacaaataaattcaatcaccatttcactcgcaaaccagctggattaattgcagagttttgtcggaacattgatttcgttaagatttgtttttcctggtttaatcgaaccatatagttgggccgaattatatataattgggcctaattataggtaggatctgtccaggaaatttaaacactaaccccagttagaacatgcaacggacgtatgtaaataattaaatatcgtagtgattatcgagattaattaggataactaaagaatcttattaatatatgaagagtgtatgtaatttaataggacaattgggagctaaagagatgggctatggaatggacgggaagacgaaaacagttgccatgaccatgagtgctccagcaggaaagctttcaaatggtgacaccaatgtttgaaacaataattgatcaaacaaaaatgtttgaaacaataattaaattctcttgattttttttttccttgtcaagattttgtttttgctataagtgatatgatgatctttaatctctgttgttgtcgtcgttacattacacacaatttcaaaagcttgtaactaaatactttgatatctttaaaattttacattttaaaaaagatagaacttattcaacaattgaaataatgggggattttaaattattacgtgttggttagaaataattatatatccagtaaaacaagattttgatatttgtttttaagaattctatatccaagaagggtggattttagaaagaagattgataggtgtcagtttttgttaactaaagatgtacataaagtttcacatttcaaaaacttttataaacatatttactaaaattgaagttgatttattcaataacatcagatttgagaagataactatgatgtaaaaaaaaaaaaaaaagagaagataactatgaatcatcaattgaataacaaaagttttttttaaaagatcaaactcttcaaaaatcttaatccaatacccttaaatgcagcaatcaatttaatcaggaattggatatacatatatatatatatatatatatatagatagatagatatagatataggatcttaatgccccaaacgtattggtattgtcaaactctaaaaaaatagtttgtgtaaattataagatttttttttgaattattgttgtagaaaattgaaacttcctgccttttttcctggaaatctgttactagctacttgatatattaaaaaataaaatatttccattacatttttaaaattagaggagtttttctagtcaaacgatataatcagaaaaaaaaaaaaagacagcctaccaatcggtccataaagcacatccaacaactatctgagttatacaattatcagttggtaataaaaaaaggtgagcatttagagagatatgcaaatagagaaattcctatatatagcaaagtcttttctcatgtttatacgtacatttcctacattgacaaaacacaagaagacgacttcaatg

SEQ ID NO: 35371 - DNA, 3000 bp, Unknown
  misc_feature (1)..( 3000): 2750-1469P.txt file - cDNA_ID_3086825; gDNA_ID_2926298; Annot_ID_205599
ttgattctgtgttatgtcttttgaatttgcgatgtgtacatattgattatttctcttacggatcttgattgtaaggacagtatcaaactcaataatgaaattggttaaaacaaacttggtttgatgatgagtttaattacagtgaaactgactttttataatttttatcttttgatgagatcaaaattatgaaacatgaatactgagaaagtgagaaggatgtaaaatatcttaattttaaaatatttacattaatctctgaaatattatttagatttatcttaaatttaattgaggagataagatttagttatctttatatccaaactcaatatttattttctgaaaatagaagtcttattagattcattatcaaataaaatctaaatatatatattctccacaaattatttactgcctctacataaatgtaattattcaaaataataagggtcgtagtagcgccatttgttgcatgggcccatctaatctaactaagatacgaaattttgatttgtggttgaaaataggtcaacaggttctttcaatgtcatggctgacaaagtcgataccaagttcgtctgggttccgatttccgtcccaagtaggacggttcaagcgcatctacagaaaaacggtttgtactttcaaaagaacgcaacttttatttcgaaagttcgatcctttgggtccatagtattgacgggtgagtagattacaattctgattgctttagggtttttgccgatttggggatggttgatctttcagttgaatccttaatctgatttgctgacattagaaggttcattccatgttttgtcttaatccccatctagttgccgaaagggtttagattttggggtcattgcttgaaatttatgcttcagatgcgttgatcttgtaccgtttagaactctgtgttgtactcggattcaaagttgttccctttacatgtcatatctctgttttggttattttcatgcctcaccattgaattcttcgtttcaggccactcaaccaactacgagtgctatctttcacccctgagttcactgaaagtgttcctgcttggtttgctgatgagctattgcttgtggagttagtttaaatatctgcaaatgtcaagtcttcttaatgtactgccacatatcctttatatcactattacctatgtaacttctaggattatttcaatgcaaagatgacccccctgctttggttctgcttcaaaattttgatttttgattctaatttgcagatatctcactgtagctatcatggatactcaggactcactagtaggggaggcataaacactgttgaaaaccatagatgggtctggcacaacaacggagtcaggttgtcgtttccaagagccgagtcttctataaacatcactatgggttgtacgcttcagcgtgggatagcaaaaagcttaagtcaggaaaacctagtggagttatctgatgaaaatgatgatctatgtcctgtggagtgtgtcactgagttcaagacagatgatgaattgcttagcgttcttgaaaagtcgaaagaaactaattctttggttgtggttgatttttatcgcactgcatgtgggagttgtaaatacatagagcagggcttctcaaaactgtgcaagcaatctggtgaccaagaagctcctgttatcttccttaagcataatgtgagtttctgatctctcatctttgatgtataaacaataaagaagtagagaaaaaatccattaatagctctaatgctgctatttgcaggtggtagatgaatatgatgaacaatctgaagtcgcagaaaggctccgtatcaaggtaatccctctttagaattttggtactaacaacactcaaaaattaactgaacagcgtagtaaagagtttgatatactacaatcttacaggcggttcctctcttccacttctacaaaaacggagttctcttagaatcatttgcaactagagacaaggagaggatcgacgcagctattctcaaatatacatcctcggaatcttgaagaacattcgacaaaaccgcactctttgggttacctttcccaaatcattgaatatgatgtaacttatattgaacaacacagcatcatccttcttcttgtaagatgtcatactgaataagacagatgcaacattttgatctctttcttttgtttgtttgcctttatgtcttcataacccacatacttatagtatatatgtgcaaaatctgcagtgacagcttactagttttggttacttgataagtatttttggtccccgcaagatctttaaaccagattgcaacttgtctcatatggtatgatgatcaattaagaaactatctcattcggatatagtcaacctaattttattagtcactataattattgataatttaccttaataacatggttaattactagtaaaccctgaaagtaaataaaattactatgtagagaaaaaaaaggtccctttaatttgttcgcctccgaggacggggtcctaaacacataagactaaaaacggtcagtagtacaaaaagatcagatttttttattccgatttcttctccatcttcgagaatttcgttccttggagcttcgagattgagtttctttgttcatcctttgggtccatattcttatcaggttctaatttcgtttgactgctgattataaatctgagtgctttagggtttttgtttattttccgatttcgcaatggttaaactttctcttgaacccttgatcggttgttgaaagggttttgattgtttgtaatgtatgattcagatacgttgaagttttactgtttatagttctgtgatgaatccaaagtttgttcctttccatgtatttactgtctcaccatataatccttcttttcaggtcacgactgcaatctcacattcctgagctcactgaagggttcctgcttggtttgcttatgaacttttgcttctggagttgattaatctctgcaaatg

SEQ ID NO: 35372 - DNA, 3003 bp, Unknown
  misc_feature (1)..( 3003): 2750-1469P.txt file - cDNA_ID_3086845; gDNA_ID_2926298; Annot_ID_205593
aagttgcccaagaaggtttacggaggagatggtggatcttactctgcctggtgcccagaggagttgccgatgctcaaacagggtaacattggagccgctaagcttgctcttgagaagaatggcttcgctgtccctcgttactctgattcctctaaggtcgcttatgttcttcaaggttcgtttttttctataaaagttttctactttattgcgatccatgcgtttttgtataatgggtttgttcgatttcatcactctgcttcttcttttgagggtttttgatcttttctatgttctgatcttctttattgctttaaaagttgtcaactttatggtaattcatgcactttgaccactgtgattaggtttattgtgatgctgattctatgatctgatttttgttgtagaaagtgaaaaatatgatagtcaaatagatcacgactactgtgtgcaagaaaaaaaagtagtctttagctgtttttgttttgcttaatcacgtcttaatcgttgatctgatcaacctcgcgtgtaaggaattgaaagcttgtttatttgactctttttcaaatttctgtttcaggatctggaactgctggaattgttctcccagagaaggaggagaaggtgatcgcaatcaagcaaggtgattcgattgctcttccctttggtgtggtcacatggtggttcaacaacgaggatcctgagcttgttatcctcttccttggtgaaacccacaagggtcacaaagcagggcagttcactgagttctatcttactggcacaaacggtatcttcactggtttctccactgagtttgttggcagagcctgggaccttgatgagaacaccgtgaagaaacttgttggttctcaaaccggtaatggcattgtgaagcttgatgcgggctttaagatgccacagcccaaggaggagaaccgtgctgggtttgtcttgaactgtttggaggctcctcttgatgtagacatcaaggatggaggcagggtcgttgtcttgaacaccaagaaccttcctttggttggagaggttggctttggagctgatcttgttcggatcgatgcacactccatgtgttcgcctggtttctcttgtgactctgctcttcaggtgacttacattgtgggtggaagtggaagagtccaggtggttggtggtgatgggaaaagagttcttgagacccatatcaaagctggttctctcttcattgttccaaggttctttgtggtttctaagattgctgatgctgatggcatgtcttggttctccattgtcaccactcctgagtaagaacttttctctgcactttcctttttgaggtttgaaattgaaagaaactaatatgtttgaaacttttttcttgtgtgtttgtagtccgatcttcacacatttggccgggaatacatcggtgtggaagtctttgtcccctgaggttttgcaggcagcgtttaaggtggctccggaggtggagaagtccttccgatccacgaggacttcatcagccattttcttccctccttccaactgaagaaggagaagaatgagaacaagaaccagcttttatcttttatcgtttgttgctttccctcagagatttttgagggtttttacttttcttgtgattcaaggaagtttcttagtctagttgtttaattctcttcctgccttttccccctggaccggttcttgttctcgttgttttaaaatattaaaaaatcaacctttcctatattttacagtcttccttcttttcaacttttggaaaaattgaatcaaaagaaatttgtcttccttcaaattctcactttcatattaaacttcagaattttgatggttcaaaaagaaattccaattactgtaaacaaaaattccaatcaaacgaacactatattgaaaagtaagttcatgtaacgatgactgataaaacattacaacatgtgattttgatgacatgaaaagtaagaatggtttgataactactattaaaacctttgacaaacaggaacaggtacaccacacgcttctaaaacttgtttagcagatgtcatatatggagcaatcaatgggtttttcaagtactcacaaaaacacgactttttatctttcaattttgtgcaacattttgtcgatggtggggtttcgcctattatatctggtaggcatgctttgagatctgtcacgacgcatgccgctttctcctctgctttggtcggagccattgacgagagaacaaacgcaacgaaaactaatgtagtgaacttcatcttcatgtcttgtaagttgtaaccttaagtttctccttctatctaatttctagtcttgcttagaaaatgcttgaaataatcgattacgagatttgtttaagaatggagtaatgttttgcagtataggctgatgtgtgtgttttaggtatatatatagtgtcgactgtctttaattgttgattactggaattaagctaacaaatttgaaagcactgccttttatagaaactggaaagatttaattataggaaatgaatcaatcagttcacatgtgtatatacagtttggaaatgttcgaaaatacatatagaagtttgatattaacaaatgatttcaatcaatgaaaatcttcaaagatttaatataaataaaatttctttggaaagtaattaaataggaaaaaaaaaataagagatctggaaatttataaatttatttggtttaggttaactgagtatcggtttaaaattgaggtgaccaaggatgttaaaatgggctaaaagtttagggccggtccggatccgttgaaaaatataagctctgggcctgataaaattgaatgagagattttcgggctaaaacaaggctggccctatttgcggttttcagattggggtaaaccgggattaagagtctgggtcgtgaaaacgaaccggaggctaattggatttgttcttccttctccacattccaatttgagggcagtggaggtgtaacaacaatg

SEQ ID NO: 35373 - DNA, 3003 bp, Unknown
  misc_feature (1)..( 3003): 2750-1469P.txt file - cDNA_ID_3086848; gDNA_ID_2926298; Annot_ID_205592
tgtggttaccaatcaaatgcaggttacattggtgagtttgagtatgtcgatgaccacagatctggcaagatcgtcgttgaattgaacggaaggttgaacaagtgtggtgttatcagcccacgttttgatgttggtgtcaaggaaattgaaggttggactgcccgtttgctcccttctagacaggttcgctcttcttataaactttctagttacagtggccttatgaattataagatcaagatttggaaatgtttttgaatcactttgcatactgtcccgaaacatcaatagtagtagctttgtttaatgctcgctaatggtattaatggattgaagctattaaattgtgcagtttggttacatcgtgctgactacatctgctggcattatggaccatgaagaagctagaaggaagaatgttggaggcaaggttctcggcttcttctattgaagttttattttatggggaaacagattttcattgagttatttttaacttttgtcctccattttctctgaaactacctttctctttctttcgaattttgtgataactttgatggatagtgttctgaaatcactctttttggtttggagcccttttttagacttcggatgcactcgtaaaattattctaaaaatctctgatttggctagtctcttaccttctctttaccggctataatctctaagttgcggataatgctctaattagtcatacgagttcatgtatcaaacgacgtcgtaataactcggaacaaaatcattgttgatctacatcatatcatctacattgaggcttaaaacatcatatcaataccttaggatcatttagaattcttagaactgattaactgtagatgaaatcacagcaacggattaatacaatatgcggttataagtaaaaagaaataagaagcaaaaaatactgacaaatcatagttgttatatcatcaagaaacgtggaaaacaaaagaagaagaaaaaaactcttcaagaaccaaatgccaaaggaacatagttgcccaatttctaactctagttttcacccataaaatggatcacaccttattagaaaatggtcttacggatcacacttccttctccagccaaatatggcccccgtctcatctcatctccggcgatgggagctcgaaagtaccttcatgtatttagatatgtaagagataagagaggagagaggaaggtttgatgaggagcatccattgttgatggtcttttcgaccttatcaaaggagaagccaagtgagagagacgtttcattttgggtttatagaccaaaaaagtggtcatttgtgagagtatcttcgaaagcatatgctttgaaccattaactaagctgacctgagtcccattattactacttttgattttcttcttcttttttctcttttgttagtatattaaaatctatttaaattattgaggcgagtaacatgggttgcttcgccacaaatcaaaagtagaaaaaaagtgaggtcctcttttcttcgcctagttgtttctcattggactgcttccaactcttgttggttctgtcaattttacgaggttaccaaatttggttcagttttgtgaatcacttgggaattaggttacgttggtattcttctgcgtttataaaacgtgcctatgatctaagtaactacccaagtcattgtctccagctagtggaaagcgacacgttactgatgttagagttgatatgatttgcatattttcttgttttaaagcacattttgtgtttgtgtttacaattttacatgaaacgaaattaacattccaccaaccatcaattatacaagtgctattaaatacaagatttaggtcagctgtctaatgcaatggaacttagcagcaattttgaaaaaaaaaatatggtactaatagcatattgttgtgataaatattactatctgatcatcacagtcattcaagtggctgtagtttagtggtaagaattccacgttgtggccgtggagacctgggctcgaatcccagcagccacacttgttttggttattttttcatttttattttacatgggcatgtgattagctttctgctaaagccccttaagataaatgacactgatgggcctaagtattttctctcggggggatataactaagcgttatgatatatatttttttgtttttgtcatctaagcgttatgaatatgcaagttagatataataataattaggccaaaattaattacatatttatccatgttaaactaatccttaataacagcaattctttcaacttatccatcacgttgctcgttggattaaattaaaattataacagtctgttgctacttatatttctggataaatcctttacaaaattagagaatatacaatcctgtcagcagatcccatccttaaaaaattagcaaaagaaatataaaatcagcgattaccttagataaaaaaaacatacgatttttgaattcatcctttaattttatctttaaggtaacaaaaaaaggaaaacataatcttaaaatcaccaaattggaaagaaatatggtgacataattgagaaaatatttacaacaaatattctgatgattcgatttgaccaaataatacagcacttttagtagatttatttaaatgtctcaattagtatttgtttatgaaaaaaaaacgaagaacgtgatggattaacaaaaattatctcctcacaaaggaatctttatttggtaggcaaaatataaattatatcgtgggcataaagaaatggataaaatttggattaaaaacgttaaacaagaattatccacaagtaaatcgtaacgcaatcaaaacgccgaatcagtctctctattagtaacggattcaccctaagcctctcctatataaatacgtgtcgcatctctttcacatttcacatcaaaacttactacttcttcttcttcttcctttaccaaatcttttcttctttactctttttcatcgtcgagaaaaaatg

SEQ ID NO: 35374 - DNA, 3003 bp, Unknown
  misc_feature (1)..( 3003): 2750-1469P.txt file - cDNA_ID_3086852; gDNA_ID_2926298; Annot_ID_205591
agcaaacggttaattcggttttacaaagaccaaacagaaaattcaataattcggtttggttcggtttaattacaccgaacaaaaaagttggtacattcgtttttatttttccgccattcttgtcgatcttcttcagtcgtaaaaccgccgcgtctctgctgaccctcctcttctcatttcatcgacgggagaaaatcccataccatctgagatttccaacagtgaaattaagatgtcaacaggtattattcttctggtttagctcattgggagaaatgcagataacttgttcgatgtatttactcaatgagcttgattttgttttctagtagtgattttgctgctatcaatctgctttagtgatgatccattttcatattatattgtttgcttgacatgttcatgcactaataggaatctcgattgtataattgtcttgtaaattcagagtttgtgttgttttgttaatagtgagctttattctaagatcagttgatgaagcaagctttcttatttttcctcaggaatatccactgatctccatgtccattttggagctctaaatttctcaaaaacctacaaatctggtaacttttcttgacttttagtttttcttcagatttcactagaccttctgtgtgtgtgattctctttgtttccggctaattactgaagcttgccattgatctcttttttcctactggatttgtccaggtttaagcaatcgaacggtgtctttttcgagagtcgggtatgctcagaacaggaaattgagctgcagtgtttccaacacagagaatgtagctcctaaggatgatgaaagaggaaaggatagacctttggttaagatgtgtggcatcacatcagccagagatgcagctatggcagttgaggctggtgccgattttattgggatgattatttggccacattcaaaacgatctatttctctttctgtcgcaaaggatatctccaaagtggccagggaaggtggggccaaacctgttggtgtttttgttgaagatgatgagaacacgatactgagagcagctgattcctctgaccttgagcttgtgcaggttctctacattcttatcgatttttattttgctctcaccaaagtgattttctcaactttattaacggttgatagttatggtttcttacagcttcatggtaatggttcgcgtgctgctttctcgaggttagtacgcaagaggagagtcatatatgtccttaatgcaaatcaggatggaaagctcttgaatgaagttcctgaagaggattgtcatcttgctgattggattcttgtggatagtgcaacgggtgggaggtaccaagaacaacttttcaatttctttcgcattgtaatgtactccttagaagaaaaatttaagcaatcactctagtacataaaaccatttgtctttcacgaggtgattgaaatatcaagagtgtgataggttcaatcataacaatttgctgcagtggacacggatttaactgggctcaattcaagttgccttccgtcagaagcagaaatgggtggctcttagctgggggaatcaatccaacaaatgtttcagaagctctttctatccttcaacctgatggaattgatgttagtagcggtatttgcggtacagacggtatccagaaggataagtctaagataagctcctttataactgcagttcgctctgtacactactaatggcaagcaatataaaccacggtaatttatcttgtaactatagttttgagcatcaacctgttgtttccaatccatgtcattaagttttgaattgtaactggctgataataataataatgcccttttttttcatcagtagtagatttaaattaaaagcgttgggttgtcaccgtaataatgtcgttgggctctcaagaacaagatccttgtatgaaatgtattctactgatcatatattatttcatttgatcgagagttttaccacaggtttctacaaattaatgcttttttaatctcgaaaaggctttacaccaaaacaaaaagaacataatgaatgggccaagatgaatttatgtaacttgtctgcctggttcactgcagtatgtcctcatgttctttgtccattgagttttggatctgcctcatagtacacgacatctcctgtatcgcttacgaaatggtcttgtttcgcattgcttaaatggtgataataggtttactcgaggcttttagattttatagagaaggaacaaacgtattctattggatagaaatcttcacgaggatcattgacgtgtatatttctcattcgttaaatttatcaatgctcaaattagatctgacggctgagagaaacatcattcatttttacaggttcaagttatagctttgataggcttcaatggtcgtgacaaagaagcccattgggcctgaaatgaagcttgagacgcagcgcataacacatgtcaattggtttctttgattttccctagtataaaaagcgataagaaaaccctagctcaccttctcttcttcctctaattgcttttctccgtcactgagtaccttgcctctcgagctcccaatcttaaggtacaattgatcttcactatagtcgttcagaatctgatctgcttatagaaatattcagaagtgtgagatagctgctaattggtctttactttgtttttttctcttgcttcacatcagaaaatttaggatcttagagcttttcatagtgaacttaagaacgcttttcgaattagtcagtcttagctctattttgtctgtgtgtgtattttctggacacaagacctttgtttcaatttctataagtgatttcggtttacattttaaaagcttgatttattcccattgaaataaatattcatgatgagtaaatctgtgcatttgtatcaaatttttagtgctttgcagattttattttaacgcaagctcttgtttgttgtttgacttgtttagtagaggattgagcttaaggcaagatg

SEQ ID NO: 35375 - DNA, 3003 bp, Unknown
  misc_feature (1)..( 3003): 2750-1469P.txt file - cDNA_ID_3086856; gDNA_ID_2926298; Annot_ID_205590
aactgaatacaagattattaattaatttacaagtgtttattaaaaatcatccacattctccgtgccaatacatgatcggatcaaacaagccgaagcagtgaccataaccgccgcgaaaatcgaaggcacaaacaaatcaaaacgcgatctcttcaccatattagacggcacgcatatactctcccctgcaaaatccatcggaatcttcacgaaaccatctcctcctccgcacgaagacgacaccgtagacacaaaagccatctccggagcaaacgaagcgacggccaccgtgaacattagaagcaccgtccacgtggcagcctgagcgatgaccggccaacggtcagagacactccgtagaaacggctccattagcgatggaagacggtgatacatcttgatcagaagaaatggggattgttttagcgtggatcaaaagaaattaggtgttggtttgcgaggaaacgaaaagattgtgagatcgatgagcaaaaaccagagcttgtttgattggtgcggtttatgtgtttggaaacggaaatgaaaatggaaaggctgcttctttgcacgtttaactaactactcttctttcccatacacacacagagagttgttaattacgaatttgcccttccctttgaactcttctcttcttcttttgcccttccgggtcgtctccgtcccctttgacactcccacgttttcagcaatatcaatttttgtttaatcgacggctgtattagttggttgttaagaaatttcagactcgttcctccataattcagatataggaggagaacataaactatattatatgattatggagtaatgacagtgatttatgctttatgttgttcaccaaaaactattcattaaaattaagcgggttcacctaaatctgatgcttatagcctgcttgtggcacaacgataacgataggtaattcaactactaatcttcaattttatctatttcaatgactccaatcatatcataattagactctgttcgttataagaaggtaagaaagcaacatcattcaaggaaaagtaggccaatttcgcgtatcaaataatataaacacacacatataacatatacttcaatagagacacatttcaatatagtgattaggtaaatgaaattgaaatggaaaaaaaaatcgttaaaaatatataatccaacattgaaattcataaaaggaaggaacaatcttctctacttcctagagttacaaagccacaaaatacgaagttaagcgaataatgcatctaatttcctacaagtactaaaaaccaaaccgaaattgaaatccctaaaaaccctaaccgggtctcttcaagagctagtaaacttggtaaccgccttggtaccttcagagacggcgtgtttagcgagttcaccggggaggacgagtctcacagccgtctggatctcgcgagatgtaatggtcggcttcttgttgtacctagcgagtttcgaagattcctgagctagcttctcgaatatgtcgttgatgaaactgttcataatccccatggctttgcttgaaattccgatatctggatgaacctgcttcagcaccttgaagatgtagatcttgtaggtttcgacgtttttcttagatcgcttcttcttcttgtcaccggcttcctttggtggcaatttcttccccgccttgggtttcttctccgccggagccttttcagcagccttgttctcttccaccggtctctcagcggcggtttttttctcggcgggcttcttctcggctcttggtgccatcgtgaattttctttctgattttctcgggaaaaggaagttgattgaagtagtttagtggtgaatggtgataatagtttagattttatagagaaggaacaaacgtattctattggatagaaatcttcacgaggatcattgacgtgtatatttctcattcgttaaatttatcaatgctcaaattagatctgacggctgagagaaacatcattcatttttacaggttcaagttatagctttgataggcttcaatggtcgtgacaaagaagcccattgggcctgaaatgaagcttgagacgcagcgcataacacatgtcaattggtttctttgattttccctagtataaaaagcgataagaaaactctagctcaccttctcttcttcctctaattgcttttctccgtcactgagtaccttgcctctcgagctcccaatcttaaggtacaattgatcttcactatagtcgttcagaatctgatctgcttatagaaatattcagaagtgtgagatagctgctaattggtctttactttgtttttttctcttgcttcacatcagaaaatttaggatcttagagcttttcatagtgaacttaagaacgcttttcgaattagtcagtcttagctctattttgtctgtgtgtgtattttctggacacgagacctttgtttcaatttctataagtgatttcggtttacattttaaaagcttgatttattcccattgaaataaatattcatgatgagtaaatctgtgcatttgtatcaaatttttagtgctttgcagattttattttaacgcaagctcttgtttgttgtttgacttgtttagtagaggattgagcttaaggcaagatggtaagaaacttaaatatttattttgaatatttgatcaattatctatctttatgaattattgatcaagaaacaaaatttaaagaacatccgggacttgaaaaagtagtggaaatttcacaaaaccgaaaagcaaacggttaattcggttttacaaagaccaaacagaaaattcaataattcggtttggttcggtttaattacaccgaacaaaaaagttggtacattcgtttttatttttccgccattcttgtcgatcttcttcagtcgtaaaaccgccgcgtctctgctgaccctcctcttctcatttcatcgacgggagaaaatcccataccatctgagatttccaacagtgaaattaagatg

SEQ ID NO: 35376 - DNA, 3000 bp, Unknown
  misc_feature (1)..( 3000): 2750-1469P.txt file - cDNA_ID_3086867; gDNA_ID_2926298; Annot_ID_205586
tttcaatttcatttacctaatcactatattgaaatgtgtctctattgaagtatatgttatatgtgtgtgtttatattatttgatacgcgaaattggcctacttttccttgaatgatgttgctttcttaccttcttataacgaacagagtctaattatgatatgattggagtcattgaaatagataaaattgaagattagtagttgaattacctatcgttatcgttgtgccacaagcaggctataagcatcagatttaggtgaacccgcttaattttaatgaatagtttttggtgaacaacataaagcataaatcactgtcattactccataatcatataatatagtttatgttctcctcctatatctgaattatggaggaacgagtctgaaatttcttaacaaccaactaatacagccgtcgattaaacaaaaattgatattgctgaaaacgtgggagtgtcaaaggggacggagacgacccggaagggcaaaagaagaagagaagagttcaaagggaagggcaaattcgtaattaacaactctctgtgtgtgtatgggaaagaagagtagttagttaaacgtgcaaagaagcagcctttccattttcatttccgtttccaaacacataaaccgcaccaatcaaacaagctctggtttttgctcatcgatctcacaatcttttcgtttcctcgcaaaccaacacctaatttcttttgatccacgctaaaacaatccccatttcttctgatcaagatgtatcaccgtcttccatcgctaatggagccgtttctacggagtgtctctgaccgttggccggtcatcgctcaggctgccacgtggacggtgcttctaatgttcacggtggccgtcgcttcgtttgctccggagatggcttttgtgtctacggtgtcgtcttcgtgcggaggaggagatggtttcgtgaagattccgatggattttgcaggggagagtatatgcgtgccgtctaatatggtgaagagatcgcgttttgatttgtttgtgccttcgattttcgcggcggttatggtcactgcttcggcttgtttgatccgatcatgtattggcacggagaatgtggatgatttttaataaacacttgtaaattaattaataatcttgtattcagttactacataacatccaccattttgttattccaaatcacgacattatattaagctgcgtcgtagaatagttgacatttgtcagtgttaacccaacaatttgatctgttatgttatccacgacccaaaatcacaactaaacaatttgacattccgttttgccatcgtccggttttaaatcaccatcaaattagtaattagtcaagtgatcatgacaaatgccgagagatacaggagacatttgtgtgattctgaggtttgtcaggtttgcaaagggggagtggagactatcttgcatgttcttagagactgcccttcgatgtcgggaatatggagcaggattgttcctaggaggaaacaacaagcgttctttacgaagtcattatttgagtggctctttgagaatctctgtgagcaggttaacgtggaagaggggccttggtccacgatgtttgcactagcagtttggtgggggtggaagtggaggtgcggtaatatttttggtgagaatagaaggtgtcgggacagggtacgctttgtgagggatttggcgaaggaggtttcagcagctaatcaacagttggtcactcagggaggtcgacgctcgcgcgtagagattctggtagggtgggagaaaccgttgcttggctggttgacagttaatacggatggggattcgcgtgggaatccgggtttagctgctgcaggaggagtattacgagatcatgagggaaggtggtgcggaggtttttctttgaatatagggagatgttcggcaccaatggcggaattatggggagtttattacggactccatttcgcatgggagaggaaagcaccgcaggtagtgttggaggtggattctgcgatagttgtggagttcttgaggacagggataagtgatcatcacccgttgtctttcctggtacgattgtgccatggctttttatcgaaggactggatagtccgaattgttcacgtgtatagggaggctaatcgtcttgcggatagattagcaaactatgctttttctttagcttttggtttgcactttttttactctattccgaatgttgttgagttactttggcgagaggatgaccttgggatagtttgcccaagacagatcccagaacggtaatttttagttttaagtttgaataaaaacggggggctctttgccgcccggtcacttaccaaaaaaaaaaataacctactttataaacattttaaccaaaacgttttgtgacctatcatgataatttggtctgcaacatatgtcaacgtaaagtttataggcccaaagacgatcaatattagaatgagtagtagcacttatacttgaaacagtgacccattgggcttaaacagcatctttttgaatcactggtttttttaattaataagaggagttatcagagagacgtcagagaacgtccctgcgattgcttgcagcgggaagtttctttctctctagctccggatttgctttggtatgttactacttcacaatcttcaactccattgattgtatccttgattgcgatttgctcctactatgtaatcgttctcttgtctcagatctaaatttaagctcatctttgaattttagtctgggactgagattctctctatagattcgtcgatccagtcttattcctttgtaatttgtttgagatgatgatgattatgttgctacagttttataattgagtatcttagagtgaagtttttctaatttctcagctattcagaggatctaattttttaataatttgcagtcgaaaaccgtaagctttggcgagtttccgggagaatttgacgaatctgttttgcaacgagtgagaattcatg

SEQ ID NO: 35377 - DNA, 3003 bp, Unknown
  misc_feature (1)..( 3003): 2750-1469P.txt file - cDNA_ID_3086871; gDNA_ID_2926298; Annot_ID_205585
gacaattaaagtgattcaacgattcattattcaagctgtattctttttttctttatggctaaaacagagaacaatttcatgatgggtaagaataactcacttcttaactattccaacaaggaccggtttggtgatctcctccatgattcttgttcagtacttgacagaagataagtctgtgaaaaaaggaaaacaaacatgaaagttcagagactaacccttgaatttgaataccacattaagatactcagataaactaaaccatagtaactgagaacgaaaagaatttaattcatgttgagattttggaacagagattatggtttggtccaacaacgtttgaatatctaagtaagcagccaaagagtagctaaataaaagtttcatcttcaatccttacgttttcctacaaatactgtctaccaatttactaattcatagaaacaaacattcacgataacccaatgctaaccaaaattgatgaattcccaacagagcaactatctctccgttttgactcgattaattgagctcagtggttgtcggtacaccaaatctagaagcggaaaagacacgaagaagaaagcactcaccggagatagtgaacttgaaggtgacagagagcgacgctaagaaaaaggtcacggcggccacaaagtaaaattaatcgaaagcctctctctactgattttccgacaattaaaacaaaaaaaaaaaggttttaaggagacgcatgattctaacatatttcaggccccatttagctttagggcccaataagggtggctaagtttaattatcgcaagacgcaagcaaataatttagcgcaatctatggttttggtggtttaatcattttggttattcagtttcgacaatatgattcttttcttttataatcaaataatcagattttattttaatttttgctgtgtcgttagtcacaataatcagttgagtttgagaacgaacactgagttctgattccttcagtctcctccatatagcccatataggactcgactaaaccaccaaatctttcatctgccaaaatctacttcatcagtgtcgttgccttgccattaccgtttatgttggttttaagagaaagacaaagctctgaatcaacactgaccaacatgtgtctcaaaaagaaacatcaaccataagttacagaaatgtgcgtacagataccaaccaaacgtttttctactgccgacactactacagtcacaatcattggaccagttccaaagtcttgaaagctatgcgttatttcttactccgaaaaactcaacacctctgcggattgactcgtgcttactgctaggttgccaaaacaagagccaatgggatcacataccatttaccattctcttcatctcggctgatcttctagaatctggttcttcaatcgctctctcggtcagcacatgcttaatgcggcacattgatctcctcacctatatttgtgagaggcaaacaaagttgacattcattaaaaaataatcataatctccctcggtaacaaagaacataaccattccttgaagaaaggattcatgtttcttctcgtagtatctattattttgtcaacaacttaattggatagagagtcaaagccaaattagtatcgattacctttggaatgcgttcagggttaggaaactgcatgttctgagcctgaagcatctgacgctgagtcatcaacatgtttttctctttgagaagaacgtaccacagcttctgaagatcatcccatgacttgagacgcagctctgaagctttccaacctcgacctaacaccagaagtttacaaattttcccccattaacaaaactaaacaatcctaattccaaaaactccatgggaggataacaaagttaagaagaaaaacgaacgattagcaagcttgactacagtcctaagctacagtgaattactttacttcttcactgtacattctatgaacaatcccactagtaaactagtattaagcagatgagtggcagaaaacagagagaagctaccatagacaacaggtttatcttcgtcttggcttctgtcgaactcaaagaactcttcgagtggatttgttggcgtccgaatcgtcgaggcagctgctgctgctgtagtggactccgatcgcgccgatgcagccgccaagaatctcctcccgacaaatcgcgtaagaaacattttaacaacaaacaattcctttgagcttgcagttatataatctgatcatcaacaacaatcagaaagagaaatcgagattggataacaaaatggtaaatggttaatgaaagtcgtacaaaatatttcaggcttccgaagaagtgagagatcgtgtacacagaaaagcacatctcgcagaggaataaataagaactcaccggagatagagagaggagagctatttcacggcgacggtgacggccacagagaatggaaaaccctctctcaacgtttctccgagaataacaggtttacggagacggaaacttttagggcccaatactagctctgttagtattgatactattattgggccaggtttcattttctcttttaaggcctaataagacccaacacttgcaaattattggaagacgaatgctgtttttgttttgtttttcaataaaacaacatctttcaattaaattgggagcaatccacgtcatcgatccgtcaagtattgttaacgatgtataaccattggatcagtaatcaacggttgatatgaaaaatcacacggatcaacgcagttttatatattaagacattagttagccacttcatatccgtcaaattcaattgatcctctctccaaatcatcttaaaagtatcttcttcttctccatctggtttattgttcgatcgtcaattcaattgattgatttggaaatctagcgtttctgttcgttaccattcactgaataatttttcttctgttcttcacagtcacagatctttgggtatcaagtaaaactgtgaagtgatg

SEQ ID NO: 35378 - DNA, 2923 bp, Unknown
  misc_feature (1)..( 2923): 2750-1469P.txt file - cDNA_ID_3086906; gDNA_ID_2926299; Annot_ID_205640
gagggttgttgatgggtcatcggaggaagcaatgaaggcggcgccggaaccaccgcataaggcggtaccaacaacgaggagcttcgtacgggttctccatagggatcgtgccgccattgaggaagcacgtaatgaacgcacgcctcagcagatcggaggagaaatagaaagcgagcgagcgaaaacaagtggtttattccgacaaggctaaatttgcgttcaatttgttcggaagatgcggattcggatcttgtttgatgtgggccttacttattgggcttgtaatgggtctggcgttggactattctttgaaaactacgagtgtgtgtatttacgaattatgaattcatagagttaggctaaattactaattatgattttggtgtggttttaacaattgtttcaggataaacagttttaaacatgaaaataaagataaaatttgaattttttgtttctttttctaattatttttgatatttatacattgctagttatacattacatttgtctaatatcacatatattaacaaaagatgtaatatataattagaaatgattgtgagaaaaatggagattattgtattttgataaaatattctctcttttctagttattttgatataaaactcgtaatatagcctcaatatttttctaatataaacaattctagcaataatgtaatatcaaatttattttattttttgacaaatgtaaaatatttttgtgaggttttaggtttataattgtgccactattttggtggagtataatcaaaggagaaagctttataagcgacgagtgcatgtttttggtgagctgatatgtcttgactcttgacttgagaagtttcttcaacttccggtcagtttcgtaggcctataaactcttgactttcagctcctccctctttattttggatggtcctactctaattattgatatgcaaatctgaccgttgctatcacaagaaacaaaacaagcaaagagacacatatttgttgttcggttaattaattctcatcatcggagtttggtgacaatttgtaattatatattccaggtaagaataatctgtcactaaatctaatttagaatgttcagctggaaaacaacaaaaacgaaataagtttggaaaaattctattagaacatatcctgatttccgaaatttcctaaggttttgcttaacagtcaatatatacatatatcattccatttacgagacaaattgtaaatgatcaacaattgactagtacatacactcacgcaaagatatacgcgtacaaagtaaagagttacgacttttttattagtttgtttgtgtaataacttggcaatgctttctttataacaaacaagtaaattaaattcctatcgaatgttttgaaaagtttgataagaaaaggcaatcatttcctatctttatatttggtagcattagacgagaaaacaatgaaagatcacaatcaaacacaaaatagttattaaaaaaattggatacgatagttcactgtttcttttagtacaatgaaacaaaaaaaaaataaaaaaaaataacaccgtaagatataagttagggtaacaaacggcatgcatgtggtcacatggctgaaatcggtcggttcctccattcccgtatatgtttgtgttaacgaataaacgagtctcggttcatttcttcggcgggagaggatgggtctaacattattttactagtaacaatttaataaaacgataaacatatattgtgatgattttaaaatattccaatccattatatattatatacaaatgaaatcaagaaagaaagaaaaaatgttccaattatcgagttttgtttatgcttcacgttatttaggttttaccgttattacacggaggctgaaatctgaagactccgaacactattttgttttaatttaatacaccagtcaaaggattcaaagagctggaagtttctctcaacatttttttttctagaatgtttcagtttccaattactatttaagatttttcagttggctaatttttattttattttagtgtgaatgagagaaataaataattttacaaaaaaaattattaagaaagtaatacaaataaaaattcaaatatgaatagcctcatttttgtgtgattatgattaacattacatgtatccttaattttaagagggttgagagcgttttatctattaacgagacatttaggagattcagatgatggaagatcagagcatctaccaaaaaactttgcttactaaaaagtatttaggaagcaatgttttggaagttttacctcaacaatatttacgaaaaagctttcttttgatgtttttaagtattattactcagcatataaagaaacaactgaaatttataaatagaaagtggaaaataattaactaacccacaaatcctatattcatcaaaattatgtatgaggatgtaatttcataacatataaattgtggatctgtatcaatcgtcaatatcaataaaaaaattaggatagatcgacgaatgaattgactttcattcatcttacgattcttttaaaaattaatcaaacatgatttacatacaagaaaattaaatcaacaacgaaaacatttatagaaaagaaatattcaaaagatttttatagaaagaataaaatttaataattatattatatagaagaaatccataggtaaaaagatatagacagataaaaattaccaaactaatccaaaattctatattcatataaatattccaagtccaacaaggaaaaatcataatagtataaattaatcccttagtatttatcttagcatcatcatcgccgtcatcgtcactttgtctcgtccaccttttaaaaaccctctctaaagtctccgaaacatcttctctcttaaacaaatcctctctgattcgatg

SEQ ID NO: 35379 - DNA, 3000 bp, Unknown
  misc_feature (1)..( 3000): 2750-1469P.txt file - cDNA_ID_3086937; gDNA_ID_2926300; Annot_ID_205686
caaaactgattttataatataagtgaaatatatggaaattaatttatcttattttaaattaactgaaattatttggaaattagttttatctttgtgtatacatagaaggaagttttagttccagttcaaatattggctttcaaattgaatataatcaaaattctaattcagtctaattcggcaaagcttttgtaaaaccaaaatttttgatgttctaaaccaaatcaagatatccgaatattgaagctttagattgttcggcatggatcttaacgcttgagtggttaattttgttttttctaattaattgaattatttcttctgcattgtcaatcaatattggtagtggaaaatgtagtaaggggcatgttcaatcccgtattttaaattatttgagttttatttttttatatgattttggatgaattaggaaagttgatatgatttataatttattataaaatcctacaaaattccacttaaaattatgggatttagttttgtgtgttttttacttgggaacattttttaaaaatctcttgaagttatcaagaatactgttcttggacaaatttaaaaataattttaaatttaaacatgttttgcctccgcaaagaaaagacacaaagaactactatgaggcacacaaaccaatccaatgaccaccataatggacgagcaaatggtaaagctaaaacaaccaaaataactcaaaggatgcatgataatagggagctaacaagctcaaccaagaagcatccaaacaaagacaatcaagagaaaaaatatcgaaaaatttattatttaataatatagaactagttaaaacaaacaaaaatgtttgattgaatacacccctataaaacgtattaaattgaaaatgctaaaaagaagatttttttttcggatccaacataaaaatccaaaagtcggctggataaaacgatataacttggtaatgccttaatatccctatacaaaaaggcaatgtatattgggaaataaaacattaattgtcatagtaaaaataatacatattacaaaaagtgattcgatatgaatagttataaagtgatgaaacatcaaaaacgtttgaaatgaatataatttattcagaatatatattttttatttatttattcagaatattcaatatgatacgttaaaaacttgattttaatagattactaaaatgtaaaaaaaaaactgatttgaatagaggctactaacatttaaattttactacccatgttatttgaatagaggctagcatgtaatggatttagcggaataaaaatgtgaaagtttgacgaatgctatgaatacaaaaagaaacactatgccattcataccatcatgaacaaatgctctgattcaaaaggaggcaatatgggtatgtcgatttgacaaaatggtcgaagttcttagggaacaaagagatttgaggtcacaatgcaaaatccaaatatctttatttttatttatttatttttttgttaaaagggttttaaaatccaaacatcttgtctaaagaaattgtaaaagacacttcaacagaagatgccttccagaagcaagcaaacagagttgagtttctcaatctcgttccatcatgaccactaagccaatacatgtatgtatgcatctacgtaacgtatgcgtgtatatgtatgtgcatgtatgtgtgtgggatttggaggaatgggagagaaagaataaaaggacaaaggaaagagtcatgtaagaacattttggacattgacgtctctagagacgcttggatagccattaaagtgcggctatggagttgtccacgtcttacttcaaactatgatggctcagcttaagaagatgcatacaaaaacctcttttgtttccattcgttttttcttatatgagaatgtggtaaattctatagacgatgtaacacaagctatagagaatgtatataattacaactggaattagcacactatttgtttattaatgccaatggtatcccaactctacataaaaaaagctttatagcaaaaaaaaaactctacatccaaaacgcagatgcatggactgatggacattggttaattacccaaaggaacaacatttacgtaccactgggcatccaaacatataagcgaatatcaccaaaatccaaaatctaagaaatttcaaaaagcaagaagttatatatatgtgtccattgctttgccaaaatctaagaagttatagattagggtttctagaatagataagcatcgaagggatcacaaaactgtaaaccaaactgaaataaatgtttataccaaaaacaaaatttgcttcttaaccaattggttttataaaaagaataagaatttgaaaccgagtttaatgtaaccagtcgatcggactaaactaattgagataaatataatcataatgtacattttaatttattaatacaatagatgttagtataactatattaaaatattattagttcaaacattatatttatataatataaagttaatttcctaactaaaaccaaaccgaatcaaaaccataatcaaactgaaccaaactaatctgttttcacattctatataaccgaaaccaaacaaacagatcggattttaacccatacctataataaaacgctgtcggtttgaattcggatatatgggcccaaataagttcagtcaagtaatgggctcaaagcccataaatatattctctggcgccgccagaaatggaagaaaccgaaacaaagtttctctctctctctctctctctcgcataaccttttcgccgaaactctcatcttctcttagccgagaaaattcagccaccaccaccgatcagtaagttcttcgtattcctccgtctctatcatcgaatcattatttattcaataaattaattccatttcttcaaacccatgttttttggttggtaaagttttcatttttatcgtctctctgtttttcaatctctctttcagtttcagattttggcatg

SEQ ID NO: 35380 - DNA, 3000 bp, Unknown
  misc_feature (1)..( 3000): 2750-1469P.txt file - cDNA_ID_3086949; gDNA_ID_2926300; Annot_ID_205682
aatcgttttcggaccaaaatatccttaattgggagcaatcaaaccgtacaacagttggtttcggtttagcttctatagttcagttttgaaaaaaaaaaaaaaactgaagcaaagaaaccgaagaagaagaaaaagaaaaagagacggaaagatttgagagagaagtagaaagaagtttaaaaatcattatcgactccttcatatttcgacatctctccattgaactccaaaattgaggaacaaatttcttgttttcagagatcaacaaaatgcaaaaaaaaaactcatagattcaaacactttagttttttaaactaaagatactctaggtttacaagatttatttataaatagtaatcaaaacgtaaaaaaaaatgagattttgagaaaactggtaaagacgaccgcaaaattaggtttgtagaaaaggatacataggttaaagatgactggaaaattacaattatacccttcatctaattttttctgtgtacgtacacaaaatcatttattggaacgtatatgatacgatttctaataacttaaaatattttattatgtattattatatctcaataatctccatacatacataataattaaataaaaatagatggtgaaataatgtttgttcctcatattgaaaagttatgtacgtatatgtgtaatattgttggtaaattaatgtatatacatgtgaaataatatacgtacatatttgtttgtgaattaaattataaagaaaaatttattaatacaatattaaactaatattggcagtagctgagatatattttaaaacgttcatacgatgtgattttgaaacattttaaattcatggacaaatgtcagtggcttgagctgtcaaatgtcatggacaagtatcatcaacgcaaaccatctccaatcttgtaggacatgacctaggttgcttgtagcaaaaagattgtttgattgcaagataagacattgtttgttgtatgacttttctgtttttaaaaacacttcccaatctatagtgtacgtacaatggtacaaaccatgttgacacatacttcttggagtcacaactggtgtatggtcacccgagtgagaaatgttatcttcgccaggtacacgctgacttgtgtacgtacactctgccaacaaacgactgaatttccctggatgttgaatagtcagttgtgtgagaatgacgttctcctcaacattccatattccatattcttttacaattatatcgttccacttgttgtaatcataatcttcgccagtactttcattaccatcaatagtaggatcgagggtactttcccccatagatccatcgtcaccctgataatcatcatacccatcaccatctttgttgtccccctcctcttcatcctcatctgttttatcgtcttcaacgtcgtcttgctcatctacggtctcattattttcatcaacatttgaaacactatcacacacacggtcactttcagcatcgtcaccatgagtcctaaagacattattcccgagtgtcttgacggacaaacaagttgagagaaggataccgaccacgaatcaaaaagaacgtatccaaccccacttgactgtcaatgtagacaggaagacgtttagtatctatcatcactaacatctctcctggcatccagtaactaattatgggattgatctctgtggacttcaaactgaaagcctcgcttagtgtacgtacaaattccgtgtacgtcatgttttccttaacacgtacacagtgacgaaacatgtcttcctttgattcaaattttcatttttcttctttgcatctccactcaccgaccatagtaaatacggaaatatccattacccaagtgcatcataaattcaggaaaaactcattaaatgcaactgaaaacatgattatatctacaaaaacaaatagaattttgatatacacacttataaacataaatatttatacatttagaattttcaaccaacaaaattggaaataaaaatttctgggtttctatataaaaaacaaagttgatttcgaacatactgaagatcatagtgtgttatagcaaaaaaattctttaaaacttcattacttatacgataatgcttatattggttccaaacttcgtgaataaacaagatcaacacttcttgagcatcaatgtacgttagcaattaatgtttgttcctgggttcatctttaactcaataatttaatcaaaaaagaaagaagatgagttcttctttacttttatcacttaggagccgtgcgagatgaaagtcgatctagtattgcggcttacgctagattgacacctttccttgaatacgaataaaattattatcaataattttattatattataacatgtaatgatgattttgcattaattatgacaagagtcacgtctaaactttttgggccattaaatgttgatgtcacttcatttttaataaaaaaaaatctcccttctaactgtacagccgcactcctcaccgtgaaacaaaaatatcttcaactaaaccggaacagtgtatctaactaaacctgactaactaaaccgtacatttaacagtttttcagctgtagcagcaagggcaaaaggatcaaattttagctaaatagacaaaacgtgaaaaccatctttcactttgccaatccctgaaaataaaacatggtcaaaaggtatgcctcgcaaattaccgagacttaactaaatggttcacacttttttgctaactttcacactttcacagtttctttccaaaacaattgagtaataataatgtattaaggccggtcctaagttaaaatgagtctatcatagaagcccatttagcccaaactaaacaacattacaaatacaataaaatagagacggaaaacaaaaaaaaaagagaagagagacaagaaaaaaaacacactctatttgagaaagtacttgtgggaatcgcggcgaaaagcaaagagagagagaaggaaggaatccattaatg

SEQ ID NO: 35381 - DNA, 3000 bp, Unknown
  misc_feature (1)..( 3000): 2750-1469P.txt file - cDNA_ID_3086953; gDNA_ID_2926300; Annot_ID_205681
gagacttaactaaatggttcacacttttttgctaactttcacactttcacagtttctttccaaaacaattgagtaataataatgtattaaggccggtcctaagttaaaatgagtctatcatagaagcccatttagcccaaactaaacaacattacaaatacaataaaatagagacggaaaacaaaaaaaaaagagaagagagacaagaaaaaaaacacactctatttgagaaagtacttgtgggaatcgcggcgaaaagcaaagagagagagaaggaaggaatccattaatggcggctgccacagttctcggtcgcttatcactgataccaaatctatcatctaaaccaaaattgaaatctaacagaagaacaacttccacaagtgtttctgttcgtgcacaagcttcgttctctgacccttttgtacttcaattagctgaatctctcgaagattctctctcagcttctccttcttcttctttacctcttcaaagaatccgtgattcttccgctgagactcttttatctacgccatggccgtcacgaaaagacgaacctttccgattcaccgatacatctttaatccgatcttctcaaatcgaaccaatttcgacccagcaacgaaattcggaaattttggataatctgacggaaacccagttcacaaacgctgtgattattgatgggttcgtgtcgaatttgacgattggtccatcggatttgcccgatggggtttacttcgggaaatattctggtttaccggatgagttaacgaaccggatttctgagtttatcgggaattttgattctggtgatttgttttggtcgattaatggtatgggagcaccggatttgatggtgatttatgttcctgaaggatgtaaggtcgagaatccgatttatttgaggtacttttctggtgaaactggtgaccgggaatcgaaacggttaccggtatcgaatcctagggtttttgtgttagtggaggaaggaggagagattggtatcgttgaggaatttgttggtaaagatgaagaagggttttattggacgaatcctgttttggaagttgttgttcaaaagaatgcgaaattgaagcattcttatttgcagaaagaatccatggcttctgctcatatcaagtggacttttgtccgacaggttcaatctttgctcattctcttattgtctttccagtaactaattggcttggtattagtagaattcttgaattgttgaatcagtagtttagcctattactgtttggtagtactctctcgtggcttagattagtgttggatgttttgatatcaatttgagtacgaaagtaggaatcttattgctgtctgaggagagtgtcttagtttagttttgttgctgctgattgctgaacttggaaaagttgtaatctttatgattgaattgttgatgaggatgaatagtttagtttcagcctcatgtgagttttgattttgtcttctcctctttgtagtataaaggtttatagaataggatgttttggtatggcttcggaatgttttatgctgaattgttcatgtggtgaactctgtaggaggcagagagtgaatatgagcttgtggaagtgagtactggtgggaaacttgggaggcacaatgttcatgtgcagcagcttgggcctgatacgctcacagagctaaccacgtttcatatgtgtgtcaacgagcagactcttgatctccatagcaaaattatcttagaccatccacgaggcgcttcacgacagcttcacaagtgtattgttgctcattcctctggtcaagctgttttcgatggcaatgtccgagttaacaggtaaacttttcagtttggtttggtgtgcttagcatcggtttaacttctgtgtggtaatatgcagattcgctcaacagaccaacgcgggacaactaacacggagcctccttctgaaaccccgagccaccgtgaacataaaaccgaatcttcagatcattgcagatgatgtcaaatgctctcatggagctgctatcagtgatcttgaagaagaccagctcttctatttccaagctcgtgggatcgacttggagactgcaagaagagctctcatatcgtcttttggatcagaggttatcgagaagtttccaaatcgggaaatcagagaccaagccaggaatcacgtcaaaggcttgctctgatgtgtttcacagaaaccgatcgtgatactcacgcgccggttttgcgcttacgattcgtcaattatcctttgttcattactgctcaaaggcttgggaggcccatatagtccagtttggcccatttaattaaaaactaagaagaacaacaaacagttggcttctatatgagttaaatagcgtgcagtttctctttaaatttgggaaaaggtttctattcgcatctgtataagtaaaacgacgcgatgtttatggatttaagtaaaacttgaaaacaacacgctttttatttgaaatctgataaaacaacaaacacttgtttttcaccgcctcccttttctccatcgttggcctccttcaacgtcggagactctcaccgccttttctatccacccactcgggtgaaatacttcgatagactccgatatatatattcgcgcccaccggtagcttcgaaaacagagatcctcactctcgaaatcttctcactctcgagaaacctgaacccttagtttaccgaaatctagggtttgtaacttgttccattagttcgatgattaggataatttgtgtcagtttataaattaggttttgttactttcgatttttcggagatattgctgcctacggttgatttgatagctatgagaattcaagctgcgaagtgaattttaaaattgagaatcttgtatagtttcactaattattgttttgattcgtatatcaatgaaataatgtgaaatggttagagaatggattttgatttgaaattcttggtgttgctttgtttattcaaatacagtaagaatg

SEQ ID NO: 35382 - DNA, 3000 bp, Unknown
  misc_feature (1)..( 3000): 2750-1469P.txt file - cDNA_ID_3086961; gDNA_ID_2926300; Annot_ID_205679
tcagatcacatgtggatccaattgacctttgttttgggttaaacatgtgttcaggtccggagcatgaaaagagccagagatatccgtgatcaattggagggacttctcgaaagggtggaaatagatatcagctcaaacctgaatgaattggattcagttagaaaatccatcgtagccggtaattgccaatctcattctcctttttgttgatttgaaatgtataattctttacaattatgcctctgctaatgaacttcttacttatatactcagggttttttccgcacactgcaaagctacagaagaatggatcgtaccgaacagtgaaacatccccagacagtgcacatacatcccaattcgggcttatctcaggttaatgaattctcactctacataaaccacaaatatctgatttgacagaatctcaaaactttgaatactgataagtttttctcaatgcgtgttgtaggtattgccgagatgggttgtatatcacgaactagtacttacgtccaaggaatacatgcgacaggtaattaatatgtttgatactgcaaggtttagccataattgtatttctgttcttaattacttttggtttaacttattggtttcattcatcggtttgtctgtatgctactaaaactcccatacccgaaaatgcaggtaacagagttgaaaccagagtggttgattgagttagctcctcactactaccagctcaaggacgttgaagacggtatgaaccttttttctcaaatccagttatactttttagttattactgtcctttgtagaatcgactctttcagtctctaaagacaaaaccgatctttcagctgcatcaaagaaaatgcccaaaggagctggaaaagctgcaatgtaagaactcagatgggattggcaaaagaataatggaaacagatgcgagtacatacgactttgacagattgttagaaaagctctcttcactacattaactcatttttggtcagcctcctgagtttttgttagaaaatacttaaaatgttatgaacagttcaatgtagtgccatttattcccattgttatatattgtaaggtcgagctacattatgtctgaatcagtaacttcttttccgctgcatggagcagttgtgaaaacttttacaaagagaacccaaataaagtatcaagcaaacttatttggaaaacatttcgaagttactttggaaaaaatgtggttagaaaactcagaaaccctgtgttaagtcaatccaagtttgcaattacagaatcaacaacctcttgtgtagttgtattactgttcccacactttccttcagagataacacgtgtcacggcggttttaagccggtcggcaaataaaggaagcagaagatgtctcagcatcataaccgaagagaacagtaacgccacaggatttttatggtttcctactgatccaacttgctcaaagattgcatagtcatcaccaaaacttcctccagcaacaccagaagcaatgtttgcaattatagcccatagagatttggagttactatgacgtcgaatcgctctggtttctctactagctgcaaacagcagttattaataccgatttcgttgtaggtgatgtttggatacattttagcaacttcttgacaagactccaagaaaaacgcatcagctagtttttcgtattttccattgttgtgaactgctgtaactttcttccttttgctgaagtgagcatattcaaaagcatacttagcaatacgatctgaccagaactttgtcattgtcacctgaaaactctctatgacaccgggaacaacttcgtgctcccgacctgcatattcgccttccgtgttctctctgatcaccacgatgtcaacattctcatggcgactcggttgaccattaagattaaagcagtcgacaagagatgcaaagagatcaagctctttccttgcaccaccacacaaggagttattgactctgccattcaagcacactttgttcttccgtatcgagtccaccacttcccacgtcaaatgattcatatttttcccctttatgatgtatgtctcgaagtagaccggcgcttgcattgcatccatcacctggtgcaccgcgtttgtcacattgctgtcgataaccgtaacaggcctaggcatatatgttgcggatcgggtctgaatttcagacctggcagagattctactgagattatttcaggagagatattgatttgtgagacatcccccgcctgcaattttgcgtggaagatgatcacttgaatcagtaatggttgtaagaaatcacaaaacattacgccgatccatgacattgctctttgaaaagttaaaacaactagttttaatatatatcatgtaatatatagttttgagacagattgcaaggagttgacacagcttttggacacttctgatgagtgacccgctttttcttctgagttagaaaattttattctttaaagtctagctttcctcgtttttctttatcttttattccacgtttaaacaatgtccgtgctgattgtcttgctaaaagccaattgttaattaatgcactaactcatgcttcttatatactagattagatccttaaagttctccgatgtgggattaattactcattaccttctaaatttcaatttctggccgacactataaggtaccgtaaacctcaagttattgtgtttatcagctttgtgggccgaaataaccccgtttaagttttttttttttttggtttctttattcattttcattttactttttgttcaaattcaaaaccttctgactggtcgagaaagtttgggtcacacttttttcgacgacaacattaagatgaggcctttgttttctgccatacatctaaagatagaacacaaacgtcaataaaagcaattaagatctctctttactgttttcccacttttcctttgagaaaactcaaaacaaagtaaacaaacaaaccagaaaaaggaatg

SEQ ID NO: 35383 - DNA, 3000 bp, Unknown
  misc_feature (1)..( 3000): 2750-1469P.txt file - cDNA_ID_3086966; gDNA_ID_2926300; Annot_ID_205676
ttttgtaactaaaaattcgaattttaagttatagttgttttgtaaatattgtttcttttgtttagtgtttaagattgtataattgtgttaaaattgttaattctaagattacactcgtagattatcatcccgtatgagtatcaacccaaactcgttccaccagataacttcatttcgtaaaattaaataatatttttattattttaaatattcttattgtaatatattaaaaatcaagggattgacctgtggtagatcttggattaatatatttaaaaataatttgtgatttataaatttatgatattgaagtatataaaaccgatatttaatgtatacctttcaataattatataaagtatattttaaaagtcaaaatttgtataaattgatattgcaacctcatgaaatcgtagtgatttacacgtagggtaccacaagctaatttttattttatttttaataaactgataaatttgttgattttagttaaaattaaaacataaattaagttatatttgttttgtttattgtttcagattgtataactatattttgattgttaattccataattttatctgttgtataatattgaccaacacccggctagttttttgtaatctaatgttgaccctgaaagaaaaatctataagcatacgcataaatggatagtaaaattaggagataaatatcattagaacatgaagtaatttacatatgaatctctatctatttttttaaggaatcaatattctagattgattgtgaggcaatatgaatgtatgcataacatttataagagatagattgtacataaaattagattttaatttggattcaattttagctttactggaaaaaaactaatctgaattacatattttaaatttaggataacgaaaatatttttttttaaagctaaaattagatctcaacgattttggtatgtttttaaattaaacttatccttatacattatcgcaaatatggtagtcattattgttcgaatacaattaatgatctgccaaaaaaatcatattagtgatggttctcattttgaatatttgcattaaaatttttaaatattggtatttaaactttgttttactatttaaaaataaataaataatttaatctagtataatgaatatttcaaaagcttgtaactattataatacgtttaaaaatatattttcttttatataattcaaatttagcttagtgatatatttttaaaataatgaaaattacttgttttaaaaaaaaagtactttaaacgtttatatcatttaaattctaattaaaatattaaatatatactgaaaccattttctagataattacaaatctaaaatccaaaaattttcttaatttattgatttaaatcattttttaaaaaagaaaaattgaagatatttatttagttggagtagttgttaatttactaaattacccatgcaaaaatattcatttagttagttttaaactacccttacaatgttgtagttcacacaatgcttcccaattaatagtatacatgtgtgatcacgagtgttcaacataaaatataatgtaacttcaggaatagaaagatattcttttttcttttagaatttgaaatctaaattggatataagaaattattcgaaccttcaattttttcagtctatacgtacttatttaatttaatgtggtacctcttttttctaacaacaaatattttgggattttccgttgtagtgaaatttatagaatcattaattaaatctatttctaccaaacgtttaagttttgctacgaaaataaataaataaatatcctccgaccatcagcctcagccacatccccaagtttcgaaagcacaagaagcctttcagcgccagagaaaacaaaattattgggtggaaaatgcaaatattgatttcctaaataattaaaattgtgcttttgagctttttttttcatcgtgctaaagtattttttcagaaacaaaacaattaaaaatagatattgggcatgtgagtgtcccatgtaaaatcagaaccgttcaaatcatcttccaaacttctatttattctcaacattctcttctctacaacacccaagcttgaacttgctttctgcttcttccttcttcgtcctttgttttaattctctcatatcacttacgaaaagaagaaagaaaaaaaacaccaaaactaaagagaaatttcgttatcactctcttgccaaaactcacatacatataatcatatatcatcgcaaaatgtcttgcctagagatttataacaaagacgtaagtaatatttaagcttgtcccttcaattgtttctttattttctttgatatattaatcagagtttgaagtaatggacctttgcttttcttccttataagattttgattatctgattaaggctcttgtttcttgaatttcatatgtgactacaaaaggaaatattttctttttaagttactcattgttatagtaaaaactttctaagcttttggtggctcaagaagagcatgatcaaaaggacatgcttagtgcaatggaaagtcacgatctttatgtgcaaaaacttagctcaacatcttttctttttcttcaaatttctttttaatacaccatactttttaattaattagctctattatatctaatcttcttaatttaaatatatagatgtaagtatttttccgtttagtgctgtcattgaaagttgagaatgattccaaatgatcttgaaaattgtgtatacgaaacgagaattacgtgccaatacaaaaagtaagagttaaaaaaaaaaaacgtttttagtttttggttaagttccggaaaatacaaaactatcgaactcatgaatcttctccatatcaagagcacaaaaggttgtagagactagtagataattaggcatataaagcatctttctatatatttatagataaattgatgtgtgtgtatcagttaattaaatttaactaaatgaaaatg

SEQ ID NO: 35384 - DNA, 3003 bp, Unknown
  misc_feature (1)..( 3003): 2750-1469P.txt file - cDNA_ID_3086970; gDNA_ID_2926300; Annot_ID_205675
aacagcatgtgatgcttttgctgacgctcgaccttgttgatgaaccgggacacgtctgtgcgacatgtatgcgagtttagagcatctcctatggtattcaatatcttgttccaaactttatatttggtgaaaaatcactccaatgatgctctatattttgttctaaaaacatatatgaacaataatttggagcaacactaatcatatcatacgaacggttcatatcactatttttatagcacaatttttgtttcacaaagtacacctcaattttatatattactttttatacattaaaaattatatatttaaatcagtatctacttatttttataaaatgtcaattttcacactaattatatctacaaagtaaacaccactctttcacattgtttgatgtatgcatgttaaatttcgtatagccttttcaatagtttatattgttttgaacgttctctccaaaatggactttcttatagccttctcaatagtttgctctaagatgatgatacttaaataaaaatgtattaatcatttgatctctgatttatgtattgtaatgaaattttattagatatttgttttaaaataaactatctatgtagaatttgtaaacttcaaaaataaaggactatgtgaaaaatttaaatataatatacttagaatatttgttttagagcaaaaaaaataaagcgaactaacaaactatatatagagatctctagatttagagttaaaaataaagtcagccataggaaatggtattaaggaggtatatataagatggagacggagatgaggaacgagatggggttaggagtgaagaagagaccaggattttagttggatcgtggttatgatggaagctcatgtgtttctatctggtaataagtcagcttgtgaaattgctcggttgattttgccaatcttttgtggtagtgaaattaggaagatgtgaaaccgttgactatctgtcatcattgctgaactgaagtgaagcacatattttttttctctttatttttttttgtggagaactgaagcacaacgttacatttgtctagttgtatttgtttactaatttttttttatagcattcaaatacaaattatttttattattcttgtttttgtttggaaaattgccgacaagaaaaagtttaaattatcaccacaattgcattttttcttttaatctgggtagagaattggagttgtatgtaaaaactaatttcagttaccctatttcttactaataagattaaaaatatactaatcgatagattaataattgttaattatcgatttcgttaggaaatcacaaattcaatcaaataacaaaggaactaataaaatctgttatagaagggacatattttcttggtttaacaccaaatgggcttataaacaaagtagacattttttcaaaaataatttgagaaataggtagtttttttagaaatttgtgaaataaacattctttttactttttgtgagatagagtttatgtgtaataagctaaaagacaaaaattttgtcaaataccactttaccctttactttatatgagaaagttttattgtgtttccaattttatagtatttaaatatttagactaattattatattatagttaaaaaaaaatttcatctttatttttttgtattaatatttgttaacttccaaaacaagatgatttctatatattcaattatcaatctcgtacactagcattaaacatagttttgtacactaacacttgtataccaaattattttatccaacaatatttatataatatatcctaaatcgttaaatgcaccgactttgactcatatttattaattaaagtaatgattgttcataaatttatattaatatgatgttgtacaccatcatgtacatcattaaataaccatgatagtgtactaatatttgtatacttttatgtacactaatctcgtatactattatttaaactttgttttgtacattatcacttgacaaaaatggttctattttttgtatatggggtgtacaaagtaggtgaaggtatacggtattgtagatggtgtacgaggtgatatatggtatgactcattatctcatcatttcatatatactattaatattatgtacaccatattttatatcatctccgtataccattgtattatatagttgtacaccgctatatattgtcgtttgtacaccactttatacattgtcatatatcgtattacgtgtattacttcttagatcaatattattcattttctacatacactattatttgtacaccacttttttataatatcgcgtacaccacgaggttgagattaaataaaagaaaatgttacatatttatgatagataacaaaattagattttttagattcatataaatcttttaaagattatatgtttttatggtaattattttaaaaaaaaattatagcaaaacaaactaaatatgtataagtaaaaataagaaaaagaaaaagtaagttttgtctttatttgattacatgacaaaacaagagaaggttataaaggtcatttacaaattagagaagaaaaagaaatgtgtctattctccatatttataaaaaaaactacctactttacaaattatttttgtaaaaagtatctacttcacaaaatatctcaatcatttaatctgattttagaccgacattataatcttacctttcacacaacaaattcgttcatttgttgaaattttgtacatttccatttcattaaaactttatagtatatactataaacagacaaaagaagatataatataaacttttgtatatgcgaatttaggtgagaaaatattcactggttctctctgactcagagggttcagtgtaactgtctaccaaacaaacaaaccaatagaagaaaccaaaaccctctctctctctctttctccgcccctccttctctgtctctcctctgcatctcctctgttcctcaggtttctctgctcatg

SEQ ID NO: 35385 - DNA, 3003 bp, Unknown
  misc_feature (1)..( 3003): 2750-1469P.txt file - cDNA_ID_3086987; gDNA_ID_2926300; Annot_ID_205670
cgcgatggttttgagtttttttgtgttgttgttgttcttgtcgccgagaggaaggggatgaaaaatccaaggatgggaaaatatttgtttggaattttgctgtgtcatacaaatgccagctggcaatttaaatttgaagatgaagtgacaagtccaatgggtagataggccattttagtttttcaggagcccaactacgaatacgtgtgtcgttgaataatttcagtttacagattctttatcctttctgatttctgtcggcaattaaaattagttttgtgtggaatggaatgtactacacatgtctatatgtcctaaagactccaagacattacaaaatacaaagctttagttttatttttttgaagttaaatttacaagcacttttaatatttacgtataaaatcttttctgaaaataattgaagatttgtgtagtccgttcgatttgtttacaaaaggaagctatgatagagcgaaattaacacgaaaatgaaaatgctttgttcatcgcctaaaaggcagcttaaaggatttgtctatcctacgaaattgtcacgagctttcacgaaccaagactgttctgtgggttaaacaatatttttatcgagaaaacgtattttgtatgtttatgatctgcgttaaatatcttatcaattttttattaccttgtccgtcaaaatatccaaaaaataatttagaaattcggtttataaaaatgttgttttcaaagtttaattgttagaattgataatctcataatgatcatttcgaaaaaccaaaaaaattatcacattgtatgaaggattttgacaaaattttattcggaaaatcactctcaacaacataaataaacaaaaaaagtttgttttatataaaaaaaatcagtataaataggtaaatgggattactttacacactaaaaagtaccaatttgagttaatactaagattttgggttggacattaatacatcaaagtcaccgattctcatttgaacaacttcacttctccgatcaacgatcaataaacgtaacaatcactccgatgttcctaaaacaccaaaatgataaagcgttagctctcgagatgagagaacttagttatgaattgtttttgggtttttagatttttacaaaaaattagtagtcagattagtagtcggaaaatcactctcaacaacataaataaacaaaaaaagtttgttttatataaaaaaaatcagtagtcagattactttacacgcagtcagattagtagtcggaaaatcactctcaacaacataaataaacaaaaaaagtttgttttatataaaaaaaatcagtagtcagattactttacacgcagtcagattagtagtcggaaaatcactctcaacaacataaataaacaaaaaaagtttgttttatataaaaaaaatcagtataaataggtaaatgggattactttacacactaaaaagtaccaatttgagttaatactaagattttgggttggacattaatacatcaaagtcaccgattctcatttgaacaacttcacttctccgatcaacgatcaataaacgtaacaatcactccgatgttcctaaaacaccaaaatgataaagcgttagctctcgagatgagagaacttagttatgaattgtttttgggtttttagatttttacaaaaaattagtagtcagattagtagtcggaaaatcactctcaacaacataaataaacaaaaaaagtttgttttatataaaaaaaatcagtagtcagattactttacacgcagtcagattagtagtcggaaaatcactctcaacaacataaataaacaaaaaaagtttgttttatataaaaaaaatcagtataaataggtaaatgggattactttacacactaaaaagtaccaatttgagttaatactaagattttgggttggacattaatacatcaaagtcaccgattctcatttgaacaacttcacttctccgatcaacgatcaataaacgtaacaatcactccgatgttcctaaaacaccaaaatgataaagcgttagctctcgagatgagagaacttagttatgaattgtttttgggtttttagatttttacaaatgattcttgatgatgatggaaataatctgctcatgactcttagtctcttatagcttctaacggccttctcacatctgcccgttattagcctccatgcgtcatttctaaatcttttttattggtcacttgattccacacttgccaactcacacctgctgtggttctgcaacagacatgactggaccggactaaataaggtcaaaccgtatcgggtttggtacacacgtggccgatcatcatcaaagggcttaccaatattacgatggactcgaccacagctgatagaagttccgatattacaaaaacagaaagacagaagggtttacctatgattaatgtctgaaaaatttgatatttgaagcgaatcaacaacaacagtcgggttcgtgaaaaaaaaagatttgatcggctaaacttggtcggtatgattctcatctatctggttgaaattcttcaaattgttgctattgttgtgtgattttcccctttttctttgaactttggatccgtgtgaaatcaattctggcgattgggattggtatcactgtatcagtaatatcagattttcttcgaatttcttggaagtagttgagctttgtcgaattcaaaccttcttcaaaaaagaaaagaatagaagaatgagaagttttctcaaatttttggaaaataattatttttgtcacagttagttagcgaatggagaagtagaaaaatcagatatttagtgatactttcttggggattcttttgatgtttaattgaagattggctcactgattttatctttgaaggtcttagtaaacgttaatagcttgacgttatcattagaaactcaaaaaacttaagtctctctctaattattagctttcaggtttatcgtggaaggacttgtcaatg

SEQ ID NO: 35386 - DNA, 3000 bp, Unknown
  misc_feature (1)..( 3000): 2750-1469P.txt file - cDNA_ID_3086991; gDNA_ID_2926300; Annot_ID_205669
gattcgcttcaaatatcaaatttttcagacattaatcataggtaaacccttctgtctttctgtttttgtaatatcggaacttctatcagctgtggtcgagtccatcgtaatattggtaagccctttgatgatgatcggccacgtgtgtaccaaacccgatacggtttgaccttatttagtccggtccagtcatgtctgttgcagaaccacagcaggtgtgagttggcaagtgtggaatcaagtgaccaataaaaaagatttagaaatgacgcatggaggctaataacgggcagatgtgagaaggccgttagaagctataagagactaagagtcatgagcagattatttccatcatcatcaagaatcatttgtaaaaatctaaaaacccaaaaacaattcataactaagttctctcatctcgagagctaacgctttatcattttggtgttttaggaacatcggagtgattgttacgtttattgatcgttgatcggagaagtgaagttgttcaaatgagaatcggtgactttgatgtattaatgtccaacccaaaatcttagtattaactcaaattggtactttttagtgtgtaaagtaatcccatttacctatttatactgattttttttatataaaacaaactttttttgtttatttatgttgttgagagtgattttccgactactaatctgactgcgtgtaaagtaatctgactactgattttttttatataaaacaaactttttttgtttatttatgttgttgagagtgattttccgactactaatctgactactaattttttgtaaaaatctaaaaacccaaaaacaattcataactaagttctctcatctcgagagctaacgctttatcattttggtgttttaggaacatcggagtgattgttacgtttattgatcgttgatcggagaagtgaagttgttcaaatgagaatcggtgactttgatgtattaatgtccaacccaaaatcttagtattaactcaaattggtactttttagtgtgtaaagtaatcccatttacctatttatactgattttttttatataaaacaaactttttttgtttatttatgttgttgagagtgattttccgactactaatctgactgcgtgtaaagtaatctgactactgattttttttatataaaacaaactttttttgtttatttatgttgttgagagtgattttccgactactaatctgactgcgtgtaaagtaatctgactactgattttttttatataaaacaaactttttttgtttatttatgttgttgagagtgattttccgactactaatctgactactaattttttgtaaaaatctaaaaacccaaaaacaattcataactaagttctctcatctcgagagctaacgctttatcattttggtgttttaggaacatcggagtgattgttacgtttattgatcgttgatcggagaagtgaagttgttcaaatgagaatcggtgactttgatgtattaatgtccaacccaaaatcttagtattaactcaaattggtactttttagtgtgtaaagtaatcccatttacctatttatactgattttttttatataaaacaaactttttttgtttatttatgttgttgagagtgattttccgaataaaattttgtcaaaatccttcatacaatgtgataatttttttggtttttcgaaatgatcattatgagattatcaattctaacaattaaactttgaaaacaacatttttataaaccgaatttctaaattattttttggatattttgacggacaaggtaataaaaaattgataagatatttaacgcagatcataaacatacaaaatacgttttctcgataaaaatattgtttaacccacagaacagtcttggttcgtgaaagctcgtgacaatttcgtaggatagacaaatcctttaagctgccttttaggcgatgaacaaagcattttcattttcgtgttaatttcgctctatcatagcttccttttgtaaacaaatcgaacggactacacaaatcttcaattattttcagaaaagattttatacgtaaatattaaaagtgcttgtaaatttaacttcaaaaaaataaaactaaagctttgtattttgtaatgtcttggagtctttaggacatatagacatgtgtagtacattccattccacacaaaactaattttaattgccgacagaaatcagaaaggataaagaatctgtaaactgaaattattcaacgacacacgtattcgtagttgggctcctgaaaaactaaaatggcctatctacccattggacttgtcacttcatcttcaaatttaaattgccagctggcatttgtatgacacagcaaaattccaaacaaatattttcccatccttggatttttcatccccttcctctcggcgacaagaacaacaacaacacaaaaaaactcaaaaccatcgcgaacatcgaagaatcatctctcaacaattctccgtaagtttccatcatcttcttcttccactctctcaatctcgtgcttcgattgcgtaatttcgattttgttctcccgatctgaacttattcgttcgtaattttgttcacggaaaaaaaaattggtggaatcatttctcttagattacgagatatctctgtgatttggtcgttttttatgtcgattagagaaaattaattggtgtatctctcattctcagctctatgagaggcttgattcgtgtgtatagcaattgaatttgggcaggacatcacaatttcattgaagtttgatttttagtcaaaattcatttcttagttttgatgatattttagatagaatctttatcattgatctatctttgggattgttattatgaactcattgaaatttagttttttgttcttttaggataattctttggactgatgaattaaagggaaacgctgagtgtaaatcatacaacagttctaagtcgtgaaaacaaaaaaaagatg

SEQ ID NO: 35387 - DNA, 3003 bp, Unknown
  misc_feature (1)..( 3003): 2750-1469P.txt file - cDNA_ID_3087012; gDNA_ID_2926300; Annot_ID_205663
atacaaatatttggcgatgtccatatactagcacctaagaagtaaagtccttgtattcgtattacgttaatatttcaatttttaatgttaatttgaaatcatcccgaagaatccagagatcttgaacgttgagtatgtggtttttaatttttaatcagtggtaaatatttgtgaaccacaaaaagtaaaaagtccatgtctagtttttgaattgttaactgttcatattacgaagttgtttatataaaataccaaaaaaaggagatattttagaatatctcatatggtttttgttcacatacattttctttgtttttgcttgttctatctctctgtctttaatgccgttctcgactctcgaaccgatcaagcgttgcactaacatgtgccttcgctgaccgatagagctacaagagttaggcaccacaatctcatcttttaacactaaactaacaatacaagataaagtaacatatatctgaataaagacaatttatatgtataataaactagtgtactggaaagaaacgtttaacataagtacataacatatgattatatttaatgatgctgagaacaaaagatacttaggaataaatctaatgttcatcgttataagttataacacaaagcattaaaaaaaaacgttatacttaagtcccaaattttggatctaaccattaaggttgctcttagaacacataatattctctgttgttaccttgttctctatctgctttgatcaagcttcgtcatcacgttgcgcactaatgtgcaatcgtagaccaacgggctacaaaagccaggtgcctcaattgctaaattagatgaatctgaacatttttgtcaaggaatttaggaaaagtgacaagaaaagcaatattaaatcctatccatatccattgaattgaatgcatttaaaaatttagaagttttaagatttcaattctccaatgacgaatctataaactatctcctttctttatatgtaatgtttataaactatcttctttattttattactttgtttttgttaaagatatattaccaattttagttattattgtctgcttctcagctacaaaattgttttcctaataaagaattaaagatcttatccaatgtccacacgtttagtatttttctccatctacacaaaaaaaagaaaagaaaagaaaaagatattttagaatatctcacatgtgaaatgatcatgatcaacttctctctctgtctcttccatgccttgctcgagcatcgaacctaccaagcgttgcacattaatgtgccttcgctggccaggagagctacaagagcttggcgctgtctctgcagcacatagctaatttaaagttgattcgtcaaatccagcaaacttagttatagaataaaacattttttggcgttttgccaaggaaaaaaaaggggattagttggcttcaaataaaccaaaattagctaaatgttcatagagtaaataagtgaatgatcaacagataatatcattatgcatggagtatgatcaagaatacagactgaaaatttatatttactcaaaatgaaacaataaataatactgtcgaaatgaaatttgatgctaaactaagaagtatataatgaagaaaacaagtattatcgctagttaatttttatatgattatggtgttaaaaaataaaaataaaagtatataaacacaaatattgtatattttcgtgaaaattttaaaagaaaaatgttctaaattctagatttcttaggttgtctgctaaaataatgttagcaggtttcttaaaaccaaaaaaaaattcataaaatttacttgaaagcatgatgatagctactaaaaaaaattcataaaaagatatttaaaaataccttaaatgtttatctttatataacaacaagacctctgctgctgctatgctttcactggctctctcttttctcttttcgcccagctcgagcttcgaactaatcacacgttgcacattaatgtaccatcgcagaccagtgcgctacaagagccgggcgccaaagttacaactttttactaacttaaaaacctttggtcacctatataataacttcaataattcttttctatttttgagtcaaaaacataattcactccaacagtagtagtaattactagagtttctttgagttttttttaataatacaacaattaactttaccattttatctttttgaaaaaaggtttaccattttttacttcttgtagagttgtagtagtattatcatagtatggtgcatgtgtgttactgtgttaggtgtgtattgttttgtatatacgaaataaatgtttggaggcttggaaaatttttcaaggaaaaaaaaatcacatccatatgaccatatctattaatgagcaacactcatttcatcatatagatgccgagtgatcatttaatacactgtaagaaaatttaaagctttctgattccaaaattctcaaatctttttattacagtgtctttcatattcactttcttacaaagattattattaccaaatttagttacatgtctgctgctgagtttcaaataaattattgtcttaataaagatcttatcctatctccacacacgtttcctcctttttatttctcactttcaagcttagaaagaatattcttgttcgattttttttctcccgaacatgatctttcaatctcaacgacgatttctcagtgactaatactacatttgtatacattcttcatcatcatcatcatcatcatctgtgtttttgttcatattcatttttcagttatcgttttcaatttttaaaactttttttcttgggtttcacaaaatttgtcgttaatcgatgaatttgattgttttcaagatcacccatctctcgaattcacgaaatctctcagcttttccgtgattcttggtaaaaattcacaaaatcgaaattggagaaagaaagaaaaaattagggtttgaggaaaagcttcgatttttcacacgatg

SEQ ID NO: 35388 - DNA, 3000 bp, Unknown
  misc_feature (1)..( 3000): 2750-1469P.txt file - cDNA_ID_3087016; gDNA_ID_2926300; Annot_ID_205662
tggaagagacagagagagaagttgatcatgatcatttcacatgtgagatattctaaaatatctttttcttttcttttcttttttttgtgtagatggagaaaaatactaaacgtgtggacattggataagatctttaattctttattaggaaaacaattttgtagctgagaagcagacaataataactaaaattggtaatatatctttaacaaaaacaaagtaataaaataaagaagatagtttataaacattacatataaagaaaggagatagtttatagattcgtcattggagaattgaaatcttaaaacttctaaatttttaaatgcattcaattcaatggatatggataggatttaatattgcttttcttgtcacttttcctaaattccttgacaaaaatgttcagattcatctaatttagcaattgaggcacctggcttttgtagcccgttggtctacgattgcacattagtgcgcaacgtgatgacgaagcttgatcaaagcagatagagaacaaggtaacaacagagaatattatgtgttctaagagcaaccttaatggttagatccaaaatttgggacttaagtataacgtttttttttaatgctttgtgttataacttataacgatgaacattagatttattcctaagtatcttttgttctcagcatcattaaatataatcatatgttatgtacttatgttaaacgtttctttccagtacactagtttattatacatataaattgtctttattcagatatatgttactttatcttgtattgttagtttagtgttaaaagatgagattgtggtgcctaactcttgtagctctatcggtcagcgaaggcacatgttagtgcaacgcttgatcggttcgagagtcgagaacggcattaaagacagagagatagaacaagcaaaaacaaagaaaatgtatgtgaacaaaaaccatatgagatattctaaaatatctcctttttttggtattttatataaacaacttcgtaatatgaacagttaacaattcaaaaactagacatggactttttactttttgtggttcacaaatatttaccactgattaaaaattaaaaaccacatactcaacgttcaagatctctggattcttcgggatgatttcaaattaacattaaaaattgaaatattaacgtaatacgaatacaaggactttacttcttaggtgctagtatatggacatcgccaaatatttgtatttgctcaattaacgtaatctactagtgcgatttatgagtcacttatctttacaaaaatattaaagaaatagatgaacaaatctatatatacatttttacagctattttagcaaataaatcatgaacttggacttatttacaatctaatgtcattagcattaaatctttttttaaaaataattaattttattttaaatttttgatttaaattgtcaatcacattatcaatcaaatttaatcccaccaaacttcaaatcaatcctttaaaattagcataaacatatttgctaacaatattttaaaacaaatttttttgttaaataaatattatttttactgaacgttttttgtttaaataaataaattttgtatttgaacttatttaatatgtcatgtcactgacattaattatttattaatgaaaatatttaattaaagatttaaatcttctaaatccttgcttttagagttattatgtcattaccttataagcaaaaatattaatttttttaaatattattatttatatatttaaaatttataaaacattattaatatttaaacttataaaaagttcgatatattacaattttttaacatcattatataatatatagaattttaaaaaaatcttaattttttccgtcatattttataattcaaaattttaaaaataaacatatattaacaaattagcaaaaaatgtgtgggttcaacgtcccgcatcgacaaaaatatttagacaatgatttataaacatatcataaataagatcaacattaatataaataaatagtttttttacgggacgggtttggcgggacgggtttggcaggacgttacttaataacaattgtaaactataaaataaaaatatattatatatagattcaatttgcaaaaaaaaaattatactaactttaaaaagttaaattgtcaccgcggtataccgcgggataaaatctagtacaacataatttcagaaaaatatacaatagtccttttctatctcaacatcttttttggatcaaaaccaaaacaaacttaaaacaacttatcattttttaacacagtagcaattcattctttctttctatctttcttttttttttttttttgtgtgtgtgtgtgtgtgtttgagtggtaaaagtagcaattcattctgattcgagagaaccacatttttttctatattataaactcttcttaatttttctatttatcaaatatagtatagattctaaattaacatttgtttaagaaaatataacaaggtatatacgaaatataggaaaaatttaagcgtctttgtatattatgatagtaacatgatctgagtttgtaatttcatgatgtgtaataatatagttggtgtgtctatctcgtgataaactgtagtacttttttgaatatatgaattattgaacaataagataataatataatatgatggtgacaaacacaatccttaagtaatttcacatgttcttttacttttccacaaacataaaatgtaacaaaacgtgtcaaacatttcctccattcttattcatcctccaagaaactttgaacttgaccgagattagtaataatcactcgtgtatataaattcatctcttcataatttatctgccacatatgaacataacccaatctgaagatcaatcataaccttaaaccatctctcataattttagtatttctattctcaccaccaaaactcgttgatacatcacaccccaactgttgttactcatg

SEQ ID NO: 35389 - DNA, 3000 bp, Unknown
  misc_feature (1)..( 3000): 2750-1469P.txt file - cDNA_ID_3087020; gDNA_ID_2926300; Annot_ID_205661
ggaaaaatttaagcgtctttgtatattatgatagtaacatgatctgagtttgtaatttcatgatgtgtaataatatagttggtgtgtctatctcgtgataaactgtagtacttttttgaatatatgaattattgaacaataagataataatataatatgatggtgacaaacacaatccttaagtaatttcacatgttcttttacttttccacaaacataaaatgtaacaaaacgtgtcaaacatttcctccattcttattcatcctccaagaaactttgaacttgaccgagattagtaataatcactcgtgtatataaattcatctcttcataatttatctgccacatatgaacataacccaatctgaagatcaatcataaccttaaaccatctctcataattttagtatttctattctcaccaccaaaactcgttgatacatcacaccccaactgttgttactcatgtcctacagatcgatttaccgcactcttcgaccggtactatcatcttcggtacaatcctccggtttaggaattggaggattcaggggacatctcattagccacttgcccaatgttcggctattgagctctgacacgtcatctccggtaagtgggaataaccagccagaaaatcctatccgaacggccgatggtaaagttatatccacttattggggtatacctcctactaagatcactaaaccggacggttcagcttggaagtggaattgttttcagccatgggattcatacaaaccggatgtgtccattgatgtaactaaacatcataaaccctccaatttcactgacaaattcgcatattggaccgttcaaactctgaaaataccggttcaactattttttcaggtaatttaatcagaaattttaaatcttcttcatttgttcttttatttttaacatgattttgttttttcaaaaattgaataatttgatttttgagtatagaggaagcacatgtgccatgcgatgttgctagagacggtggctgcggtgccgggaatggtcggggggatgcttttgcacttgaaatctctccggaggttcgaacatagcgggggatggatcaaagctttgctcgaagaggctgagaacgagcgtatgcatctcatgactttcatcgaactttcacaacccaaatggtatgtatatatgcatgcatgtacctttttagtttattaccttttctaaataacacgtaacttgtattacatttctaatcaagtttggtttgacctagatcggttatctaatagaaacagttctaacctaaaacttttggaattgtgtaattcatttatcatttgaaccggtgtttgaaggtacgaacgagcgattgtgttcacggtccaaggcgttttcttcaacgcatatttcctggcttatgtaatttcacccaaacttgctcatcgtatcactggatacttagaagaagaggctgtaaattcttacactgaatttctcaaagacattgatgccggaaaattcgaaaactcgccagctccagccatcgcaatcgattactggcggttgcctaaagatgcaacgcttagggatgtggtttatgttatacgagctgacgaagctcaccaccgtgatattaaccactatgcttcggtaaggagttgtatagtttatttgtcaaaatgataaaacaatgtgatattggtataaaatgtaaatttcgttacaatatggaattttatgtgtgcaggatatacaattcaaaggacatgaactcaaggaagctccggctcctattggatatcattaaagattatgtgacaaagtcacaaagctgtgtatacatctatgaacatatgttgttgtggatctccatgatatttttattttatgttttcgatttatttaaaactgttattcgtttttattagctcaatatggatatttaaaccatattattttgttacgatttatgaacatagtactactcatgtgtgtgtaaaagatcatactgcctggacacgaagcggatatccggaaaaattataatatttgttttttgattcgttttaaccgaatacttgattttgtgatttgcttcgattcgaaaatttccggatatccggaaattcgaatatccgattttttttgtgatatttgcggatatctgctttgatacatataaataataaaaaaaatctgtaaactatacaagcatatcaaatattcaatgtttttatttaacatcctttcaaaataagttctaaataccaaacataactgttgttgttatcaccagtcaacaaaatgttatcaaattaattaaaacaaaaacaaaaaccgatagtttaagatgccattaatcaaaacataacataaaagaaaaatgatcaaacaaacatcttaacataaaaacagaagataacaacaatacacaaactatttatgatatttatatatagacataattatatattctaatatatatatatatatatatatatatatatatatatatatatataaatacggatcgaagcggatattcgattttttaaaaaacaatatttgttatttgcttcgatttttatgaataccatattttcttatttgctttgctccaaaatcttacggatgttcggatttttcaaatcgaatcaaatcgaataccgagtcaaagtggatcgaacgaatattttgtccagcaatcgatcaatgatactaaaaatatggaaccataattatgcaaatgtgaacatgaaacgtaattattcttttctctttgaccaagtcttctccggttcaatcatggtatttaagattcggtttcctctatcgaaccggtaaataaaccaaacttggaatttttcggacacaatccataaaaacccaaaaaacataagtagaaaaaagtacatttttttttgttttcgtcaagtagagaaagtgcattaacatttaacagagtttgtttgtctctctggacccaaacttggctgcaagaccgccatg

SEQ ID NO: 35390 - DNA, 3000 bp, Unknown
  misc_feature (1)..( 3000): 2750-1469P.txt file - cDNA_ID_3087079; gDNA_ID_2926301; Annot_ID_205721
atacgtctcttttctttagttgcttttgatatgtcattgccaaatatctgctttgatgtcatgtgaaaattctctatgttatggaatttgtgctattagttgttgttgatctctttctgttataggaattgctcgttgctttacatttggtggaagcaggaacagagtgcttcatgatcctgagatcaagccccggacagagctaaccaaagagcagtacattaagagagaggagcaaactactattaatcactttcatgagaaactcctcaagctaaagaagctgatgaaaactgaggtaagtttaaccgcaactctattttgacgcgaaaaatttgtttcgatttgagatttaatgtggattgaaaacatatcaggcgggtaaaaggagggcagagaaaaggcacaagttcatggaagagtatcttaaggagttctatgaagagtgggatgggtcaacttgaaaagttaaaaatgataaatgaagcagaaaagcagaggatttgttcaaccggattttattgagtaagcagtacctaccaaaccaatatgtggtttaggttttaaacagagtggcaactctctctctctttttattttttgtttaaggcaactctatttaaatagctcgtaataactatacatttataaatgttaaaattgctttgtttttaaaaaaagaaaactctattattttgtcaatgccaatgattgtggaagaaatcaagcaaggattacacgatagagccaatcgttttcttttcataatttttttttttacgccaaagtcagttgttgtctttttcgtaaagggttttataaagtccagtggctttttgtttgtcaactggtttaaatattgacttgctattttcgtttttaagtcttctttaaattttattagtggaagatgataagatgtcttctggatgttttagtggatcaagtcattgcgaggctatcttcggtcggccataatataacatttacctggtttgaatatcagaatatgtatattcttataccaaactgacgtgatttaaaaacgtataatgacgaaaatttagtattagtgacatttgtttgtcttttgatacctagataatagttttcgttcgttgggtaatcttcatcttatgtgttggcagttaagattcttcttttacaatttaagtctggttttgcaacaacatacacaaaatacaaaatcaggttcttggtgggtatataaaaaaaaaaacagtttcatgtgaagaacttacgttgggagttttaccaaaaaaaaaacttacgttgggagtattcgaatacaattttactaattaaaagacatagttgtttacttgtttagattataaatagaaaataaatcctttacgataattataatacgacactcctttttttacatacaattattcccttcttctatttttgtacttttgtttgaaaaccaattaatatttggaaagagtttgcttcgtacacaaggaaattttgttgaatttaataaaaatatataataatcgagtggactgttcatgtttagccaagtcgtttggtttgtagtattaaaaaagactaattaatcgcgtatagaatacataatctattaccattcaacataacacatgtccaacatccattgagttagacactttcgtcattcaattcatcgattaggtcggccattacgtgttcgatttgtgttttaattaagaaaattagagttatcaaaattaaaacgtttaaatttaaatatacaattacctacgtaaacaagggagtttcagaactaccatacggttaatttttgtcggagggaagaagacatcatgataacttttgatgtaaggtcggagtcggagtgcctttaagcgtgagatcatctcattctcactgagatgcgtgtgcatgcgttatgtggtcatttctgcatggcctaacataccttagaacggaaagtgagatatgttggcacagtagaaattgcccatgaggtttaatagtaattttgacatttccatacgtaagattaatcagcaatctacatacttacgagttacgaataaataataaatgtcgacattcctattgattttagaattagtcgttttttatggaagccggagccggaccaagaataactaatatatattcgattcgatcatatcgtgaattatttatactgctcctaagaaaaaatcatcatcgtgaattatattatatgggtttaatgtggacccaatatctccctccatgtgtttaacgtgcatctctacgagactacgacattccatcgtaaggaaaaaaaagaggcactagtcgatttactagtaattttactatagatacagtttttatccggttaaaaactaatactatagtcttcatttaaagaaacatatgtagaatttagaaaattaattctcaaagtttccgacagaaaggaaaaagaggaaattgccttttacagaatttaaaatcatttgacaattagaaaaggtgaaaagtaaaactttacatagtttgatgttatatattaatcttaaagaaaaaatcaaaagacgcaaaaggtaagagcctttcttaacgagtaacgaacgaggtactccagaaacgaccgcgtatcagaaaggctataaataaaaggcaaattagcgcccaaaaggttaacaaaataaaagcgagaagctaaaacaaaataaatttaccatatattaacataacaataacaaacgggtctccgacttggtcacatccttcgacggctccactcttcttctctatcttcttctccgaaatcgtctttgtcgtcgttacctccacctccagaattccgaaatttctgggaatatcgattttgatttctatttcttcacgctctaatttactcgtctgctcggctgtttctctgtattggctgattcgaaatccggggtcaaaccgggtctgagctatctccaggttcggaatttacagattttatctggtctgatg

SEQ ID NO: 35391 - DNA, 3003 bp, Unknown
  misc_feature (1)..( 3003): 2750-1469P.txt file - cDNA_ID_3087096; gDNA_ID_2926301; Annot_ID_205713
cctattaacaacataataaattttattttatatatatttccagccacctaaaagaaatacatatgcttctaaaatggagtaaaattaaagaatttagatgcttaacacgtgtactgtttgaaaatcacaaagacaacttaagaactccctagattttgtgttaaatgacaattcacaagagtttaggcaacgtcttaagtctatgaaccacatattaatcactgtttaaagtggtccctaatcctaattcttgtcccaatgtccccacttattcttaattaactacacttttaatcaattctgtgtgcgtgtcagtgttttgtcgctagaaacattcggatttatgtgtaactttacatttagttagtctcgatcttgttaaagatacttgtaagtaattatcaaatggtttaagatagtgatcagaaagaaaaaagaggagaaggtgggagagcaagttggagtaaatgacaaagtttcatggagaccaagaaaatgtttgctatccaatgatgtcacttcattcggtaacatgaaattctattggtaagtgatgatcattttatattttattttacttacacatcttgtacttgtaagcaagttgaccgatccatagaggtgggatgaattttttactatggatattgcgaagatgtattatctattaattgattacaaaaatgaaacactaaaattaatatctggaatcagaatccactagatccgaatatatatatatatatgttcgcagaaaactgaaagtatttcgatgctaaactaaatgagagttttcaaatacataaaattttatgttaacgaaaaatgatctactgtatatcgttcatgagtataatgagacaactacgtttatatataagattatttcacgagacaactccgtttaaacatatcgtcatgtattcaatcaatatatcaatttaaacacacatttttgcttactacaaataataatatcttttcttaaaaatacattttgaatgcgatttcgctactaaacaaccccttttgaaaccataagaaaatgtgcttcttaaccattgactatcaaaatgtaaaatccggaactccttaaaactaagagaatctgaatctcttggatttgttacgttatttgatagtgatacttgtctaataaattttaacaaaaaaaaagatacttgtctactaaatagatactagatatatatcatatacactaattttttttaaaaaatgttttttaaacttttatactcgcatctaaaatatggtaatggcctttaaaagtcaacccgacctatttggaccgacagaagattgccaaaatagcctctgttctcagacacgtgtacatattattcctctgccatttacgtgtgtatgacatggcgatctttggttggatattgtacgtgatttggagtggtgtaggttggcccacaacgttttcttcataaacgaaaaagcgttcagtggtttagtttttttactcttatttataaaatttcactttccatctgtctactgtctacttctcaactcttttttcagtacgtaaaaatgtatactttaatacgtttaaatatacacttagatctcatagtctagataatcgagagtagaaaaagaactcaagaattcgagagttttaaaaaaactcaatagcttttgtttttacgttgggttttcaaacttcatgcaagtttgagtggcgattagctaagcaatggatattagtcaatagtttgtattttttttttgatgtaagttacaagattgaaaaactatttgccctaatatataagggttaaagacttaaggggacatcgacacgagatcttttcgtggattttccttatttttttcgttctttctttctgactcttttcctttggattttctattcattctttgaaaagaacatagcttctatattaattttccaattttaataatttttcccatattctataagactatagtggatacataattggcgagcaataatacattgcatagtcgatcttcctaaacttggatttaaccggcttgtctatactctactatctttgacgtttagtttgtatcattgtatgttatgagttatgacactgaattgacataaatgttatccgtctaggttaaatgcattctccaaaaccaatattacacaatgttacagaataattattctccaactttctcgattacagattaagaagagactaaagccttataaatataagaattttggattagaatcagataacacaatttcatttattcaatcgacaataaattgagttactaattaatatctgaccgaacaaaataaaagtgaaaaaaagaaagagaagagcaaacgaaaaaaggaatgtgaatactagtcccaacaagttcatattatatatgtaattaacaaaattcatgagaaccctctccgtgtccgtgtgtcaccatagtaaccattgaatgtaatgaatttctagggattcaactagtaaaaacagatcaaactttagtctatatatcgttgagttggctccactgtgtatgagccgagatcaaagccgtgacgttctctccgatacatgggttaacaattaattaactaagttttttggggcttaaacttttaatggtaatacaattaatttatgggccatagaagaatgttggtggactcgtttgcttacgtggggatgtgtgcattaatgtgggtttgtgagttgtataaagaagcaactgtgagataacatctgaacacaaacttacaagaacagtttaaaagtttttttcttacttaaaattctctcttttaagtagtcaaagtttggaacttgaacaccataaaattcatcaattttactccaacttgtctaaaaatctaatcttttttgatcactataataaccaatcttgattcatcaataactcgagttgagaaatatatacattgatctctctgttacagtcaattgtcagaaaaaaagaaacatg

SEQ ID NO: 35392 - DNA, 3000 bp, Unknown
  misc_feature (1)..( 3000): 2750-1469P.txt file - cDNA_ID_3087100; gDNA_ID_2936558; Annot_ID_194314
gcctctttgcttcattatcccttcctctttctcaatcatcatttgcttcatatgccatgataataattcttttggattaagcttaagtagatctcttaaagcttcacttgtcaataggcaaaaatcttctgtatttagtcaatggaagacccatgagagttttaaccacacgtatagaaaatagagaatatgataacttctcactataggtatgcatgtaaaaccatgacgtcaatgatataactatgacatacttcacatcccacaatgagaaaactaatctgccacaaatatattatggtttttggttaacaacagcaattatacgagcttgaatgttttctatttgtattgttgtattctttgttacagttggtaattgtatcaatcgatatacatgaagtcactttttgtttttatttaagtgtttttttcttcacattttgcttatgttttgcttatattttgcttattttattttataattaaagagtttatgtatatgaacgccaaatatattactccgcctaattccagcagtgggattgagaatgctaatatcaaaccccctaaaaatatgttaaagatggtctcaattatcgtggacgcatcgtccatgtcactcagcgacaagagaagggacctctctcgtttgtacacaacatataaaaatccatcagagtatctaaatagcttgtggagaactctaacgatgattccaactacaactgcactaacaagtctgtcacctattaccattagtagaaacacctcggacttcaacaaagacattcccaaaactagcttactgcgcaaggaacaaattgaaatggttatgattatcacagcagtgactgcaaccataagaaaccattcaataaacttccaataaacaaagaattttttttcttctccatcgttgaatatgttttcatccaacggttctcttgaaatccaagaaaacaatctcattctttctattcggtacaaatggaagttttcccgataaacgggaacgattcctcaatgttaaaaagctaaattgtccttcagtttgatttccagttgtagcattctcaatatccatcactgttgtccaatactattccaattcaactattcgaagaagaagttttctaacctaagtggagggaggggtttgatgttccaagaagtaaagtgtgtaccttaatttttctcttatcttgcactgagcctgagattgctttgcaccaagcaatctgttttccaattttctttcttctttgctttgttttcttttcttttctttgttgtaaacgtttcgtactgtgcattccaagttctttttttttttgtaggcttccaagttcttttttgtaggcaaccaagttttatttgattgcttagctactatttctttttctggtaactgtgagtaactacttctcttaaatgcaaattttcaaatgttcgcttatgagataccattttcatagcgcttactatttaaagaaattttcaccttagtgatgaattttctcttcaccagttggcaaagtcaagttagactctcaccaattagccattaatatattttaggacaaaatacccttatcagtgaactaagtgtacaacagacgtgtaccgactagtttaataatcaagtttgggaagatgtatgcaagagggattcaagtgtgtttgcttcaaggcaagatcaaaatcaaggatagataaaatatatttatgattcggtttaagaaaagtttacattcatatgtataagtttttttttctttcttaaccaggcatcgtggtctggtggtaaaggaacctcgactgaggcgcccgccacccgggttcgattcctggccaccagggaattaacatgcggacttgctcaggcgccttagaccaccagtttcagggggcccttaagtagaggctcaaaaatccctgatcgcgggtttcggcccaatggactagtcagatcactgtgtggtctggacactgagttataaaaaaaaaaaaaaaaaaatttctttcaatataatttgttagattcaaaaaacgagttttgcagcatttaaacttgagtaatgtcttaatctcaaatagaaaataatatttattatagcgtaactaactaataaatgaaatgtcttgttatgtttatgtcttagataggcactttgaatatgaagttgaatttgttcaaaactagatccattttgatagaatgtgaaaaataaatcaaatcaaaactcgatccatttctttaaatgggtaatttacggccagaccttaagatcatgttttatctttaccatttggcaaaatcatccacatttccatgttttagccataaaagcattttctaactaaaaatatctttgccagcgtaatcgatgtacaatatctgtgtacgaaatcagtgagacgttttagttaagtacaatatctagttggttaattaaaaattaataataataaccaaactgtatctttatatgattttttttttctttttatttgctgaaattatttactacagtatttctttatttatgaatttaaatttttttgaaaactttcttattaacaaatttattttgcccctatattaccaaacatatttattttttagcataatttatatttttaaaaaaaaatatataataaaaataagagtgtttgtctctacagcctaacagttattatcaatcgggccctaatattttttttaaaaatgttgataggcccaaacttaaatatatatatatatatttttttttttgtcaaaaatggctttgattatataagattataagattcgggttttagcccttttaagtcgacgttaaacgcgcgtttcagagttttccggcaggaggagcaaactcgacgacattagcttctccgaacacaattttcctccggctttcataaatttcggggttacatcgtcctaattcgtctgataggttgccgaatttgtgttctccggtcaagtcaatg

SEQ ID NO: 35393 - DNA, 3003 bp, Unknown
  misc_feature (1)..( 3003): 2750-1469P.txt file - cDNA_ID_3087100; gDNA_ID_2926301; Annot_ID_205712
tcggcctctttgcttcattatcccttcctctttctcaatcatcatttgcttcatatgccatgataataattcttttggattaagcttaagtagatctcttaaagcttcacttgtcaataggcaaaaatcttctgtatttagtcaatggaagacccatgagagttttaaccacacgtatagaaaatagagaatatgataacttctcactataggtatgcatgtaaaaccatgacgtcaatgatataactatgacatacttcacatcccacaatgagaaaactaatctgccacaaatatattatggtttttggttaacaacagcaattatacgagcttgaatgttttctatttgtattgttgtattctttgttacagttggtaattgtatcaatcgatatacatgaagtcactttttgtttttatttaagtgtttttttcttcacattttgcttatgttttgcttatattttgcttattttattttataattaaagagtttatgtatatgaacgccaaatatattactccgcctaattccagcagtgggattgagaatgctaatatcaaaccccctaaaaatatgttaaagatggtctcaattatcgtggacgcatcgtccatgtcactcagcgacaagagaagggacctctctcgtttgtacacaacatataaaaatccatcagagtatctaaatagcttgtggagaactctaacgatgattccaactacaactgcactaacaagtctgtcacctattaccattagtagaaacacctcggacttcaacaaagacattcccaaaactagcttactgcgcaaggaacaaattgaaatggttatgattatcacagcagtgactgcaaccataagaaaccattcaataaacttccaataaacaaagaattttttttcttctccatcgttgaatatgttttcatccaacggttctcttgaaatccaagaaaacaatctcattctttctattcggtacaaatggaagttttcccgataaacgggaacgattcctcaatgttaaaaagctaaattgtccttcagtttgatttccagttgtagcattctcaatatccatcactgttgtccaatactattccaattcaactattcgaagaagaagttttctaacctaagtggagggaggggtttgatgttccaagaagtaaagtgtgtaccttaatttttctcttatcttgcactgagcctgagattgctttgcaccaagcaatctgttttccaattttctttcttctttgctttgttttcttttcttttctttgttgtaaacgtttcgtactgtgcattccaagttctttttttttttgtaggcttccaagttcttttttgtaggcaaccaagttttatttgattgcttagctactatttctttttctggtaactgtgagtaactacttctcttaaatgcaaattttcaaatgttcgcttatgagataccattttcatagcgcttactatttaaagaaattttcaccttagtgatgaattttctcttcaccagttggcaaagtcaagttagactctcaccaattagccattaatatattttaggacaaaatacccttatcagtgaactaagtgtacaacagacgtgtaccgactagtttaataatcaagtttgggaagatgtatgcaagagggattcaagtgtgtttgcttcaaggcaagatcaaaatcaaggatagataaaatatatttatgattcggtttaagaaaagtttacattcatatgtataagtttttttttctttcttaaccaggcatcgtggtctggtggtaaaggaacctcgactgaggcgcccgccacccgggttcgattcctggccaccagggaattaacatgcggacttgctcaggcgccttagaccaccagtttcagggggcccttaagtagaggctcaaaaatccctgatcgcgggtttcggcccaatggactagtcagatcactgtgtggtctggacactgagttataaaaaaaaaaaaaaaaaaatttctttcaatataatttgttagattcaaaaaacgagttttgcagcatttaaacttgagtaatgtcttaatctcaaatagaaaataatatttattatagcgtaactaactaataaatgaaatgtcttgttatgtttatgtcttagataggcactttgaatatgaagttgaatttgttcaaaactagatccattttgatagaatgtgaaaaataaatcaaatcaaaactcgatccatttctttaaatgggtaatttacggccagaccttaagatcatgttttatctttaccatttggcaaaatcatccacatttccatgttttagccataaaagcattttctaactaaaaatatctttgccagcgtaatcgatgtacaatatctgtgtacgaaatcagtgagacgttttagttaagtacaatatctagttggttaattaaaaattaataataataaccaaactgtatctttatatgattttttttttctttttatttgctgaaattatttactacagtatttctttatttatgaatttaaatttttttgaaaactttcttattaacaaatttattttgcccctatattaccaaacatatttattttttagcataatttatatttttaaaaaaaaatatataataaaaataagagtgtttgtctctacagcctaacagttattatcaatcgggccctaatattttttttaaaaatgttgataggcccaaacttaaatatatatatatatatttttttttttgtcaaaaatggctttgattatataagattataagattcgggttttagcccttttaagtcgacgttaaacgcgcgtttcagagttttccggcaggaggagcaaactcgacgacattagcttctccgaacacaattttcctccggctttcataaatttcggggttacatcgtcctaattcgtctgataggttgccgaatttgtgttctccggtcaagtcaatg

SEQ ID NO: 35394 - DNA, 3003 bp, Unknown
  misc_feature (1)..( 3003): 2750-1469P.txt file - cDNA_ID_3087109; gDNA_ID_2936558; Annot_ID_194316
gtcataaattttaaatttagatgattaatgacacatgatgtgtgtagatatcaatgccccgcggttgttttgacaaaaccttgatacgcgataatcttacaagcccacgttgaaagtggaccaagtgatcaattatttgtgaaaacacgaatcaaaagtcttagtactagttaattatacatttaaattatgttgaatatctgtttgactttgttcattctacttttagtttaatttcatggaccagtttaacgtgctgttaattggaaaagaagctgggaaccagttaaagcactaaatttcgagttaccaacttaaaccaattattcatttaatcgtttgcagatgagagtgtcttgggctttcaaactatactactctaaaaccatcgagctagagctgtcaaagcgggttgtccatgtccattagcccagtccaataatgtccatttcgatatttgacaaatagtgttcatgtccattaaagcccatgtccattaatgtccatgcccattaatgcccatgtccaaatgggttgtccaatgggcataacagaaccaaattttaacacaatagtatttgctttatattccaatcaaattatcaaatcgagaagcaaatttaaataacaaagtattagttgatttaaatatcaaatccaaaagcaaatttaaacacaattcaagtattcaacaaagtatcaaatccaaaaacaaattaacagcaaatttaaacttcttcctcttctccctcgccatctttgtcttcattaaggaactcgatattatcacctaagtacaacagtgacagaaacccattattgagtaatcaaaaacagaaacccaaatcgaattgagtaaaaaggatgagaatttgcttacttgaatagattaggattctcaggaggatccatgatgtgatggagatgagttgttgaaggaactcgccggagaaatcgccggagagaagaaatcgccgaataagcgccggagaaatgtttcccgacaaaaccaagaaatgttttttgcccaaatctatttttgcccaaatcgacttaaacctaatatttttgaccattgggccgcccatgtccattacgtccagtccgctaatgtccatgtccgttaacgcccatatccattaatgtccacttcataatgggcttgtccatgcccggtccattaagcgttggacacgggcagcccacgggccgcccgtccattttgacagctatacatcgagcttttggattggagaccttaatcattatatttgaattcatatatatttttcgctaacctgttaaactaatcacatttggtgtccacacttatattttgaccctatgttactatatatatatatatatatatatatatgcatgtgcaattccattgtaaataaccaaatcgatataataaggaatgaacctcggtatgagcttgagtcttgatgttaggaagtgacgatagtctatagtgacctgttttgttatgcggttagaagagattgtggttcaaaatggtcagaatcttttggtaagattaattaagaagttgtagcattttcataaataataaagggtttatttgtataccataatactattttaagcatcaagtacatttatgtcacatctatttccggttagtttaattttattaatttcgtctgtaaaactattcataactaccaaaccccattttcttatttttttctcaaaagaactaccaacagatcttcaacggtcttgttgtcgaattatttatttactttctcggggcctttgttactttataattagaaaaaggcgatggtcaacattctccggttaacccccataatgcaaaatcttattttgggcaaatgagagggtaaaatagtcatttaaagaattccgaccggagtttctcctttgattcctcgcccctatactacgcgtcgtgtcagactcgtaactccgtttgactcaattaccccacatttttcattccatcatttcctttttcattgttttcattgtttttggctagttaacatagccaaactatgttcattatgcaactcacgaaacttaatacaaagatgaatctaataactctggttaacgaagtatattctccgttgacaaaaaaaaaaaaaaacacaaacagagaaaagtgaaatctgttgtattaagaactttgtagctcctacaagccttttcatatattgaaaattcacatatttagcaaaagaaaaaaaagaaaattgaaaaatcattcccgttttcatgtactaaaaagttttaacagtaaatatgcatatatttaggaaatgtatagttgccttgataaattggtaagtttgatttaatatgcatttaaatataaaactctttttacatatacttaatcttcaactatcattctaaagtcatacccttttaacactttatttatcctctcttttttttttttggacaactaactttattttatccaatcagcttttaaaatcttaattaacatggtttggattggacaagctaagtaataatactataatacgccacgtatatatacgacgtatccttcttctcttcacgtataaaataaaaatagtgtgttattgccataacatacgtgttttctaaaatttaaaagaaagtcatttatcatgaaaaggtatcataatcagaataagagtaatcagtttgaaaactagctagttgactaaaacagaaagaaaaatatctttacttgaaacatgtgttgagaattcacattatataaaaggaaaaaaaataaaacatgacttttgcgtagacaatccatagtccaatcaacaaaacgtgtggacggcaagggttccttctagctctctctatttatatctctcactcgccgatttttactagtaattaaccagaacgttcatctaccaacaaatcctcaactccttcttcttcactaatagtataccacaaaacctcaaaattgtaatttattagattatcgtgatg

SEQ ID NO: 35395 - DNA, 3000 bp, Unknown
  misc_feature (1)..( 3000): 2750-1469P.txt file - cDNA_ID_3087109; gDNA_ID_2926301; Annot_ID_205709
ataaattttaaatttagatgattaatgacacatgatgtgtgtagatatcaatgccccgcggttgttttgacaaaaccttgatacgcgataatcttacaagcccacgttgaaagtggaccaagtgatcaattatttgtgaaaacacgaatcaaaagtcttagtactagttaattatacatttaaattatgttgaatatctgtttgactttgttcattctacttttagtttaatttcatggaccagtttaacgtgctgttaattggaaaagaagctgggaaccagttaaagcactaaatttcgagttaccaacttaaaccaattattcatttaatcgtttgcagatgagagtgtcttgggctttcaaactatactactctaaaaccatcgagctagagctgtcaaagcgggttgtccatgtccattagcccagtccaataatgtccatttcgatatttgacaaatagtgttcatgtccattaaagcccatgtccattaatgtccatgcccattaatgcccatgtccaaatgggttgtccaatgggcataacagaaccaaattttaacacaatagtatttgctttatattccaatcaaattatcaaatcgagaagcaaatttaaataacaaagtattagttgatttaaatatcaaatccaaaagcaaatttaaacacaattcaagtattcaacaaagtatcaaatccaaaaacaaattaacagcaaatttaaacttcttcctcttctccctcgccatctttgtcttcattaaggaactcgatattatcacctaagtacaacagtgacagaaacccattattgagtaatcaaaaacagaaacccaaatcgaattgagtaaaaaggatgagaatttgcttacttgaatagattaggattctcaggaggatccatgatgtgatggagatgagttgttgaaggaactcgccggagaaatcgccggagagaagaaatcgccgaataagcgccggagaaatgtttcccgacaaaaccaagaaatgttttttgcccaaatctatttttgcccaaatcgacttaaacctaatatttttgaccattgggccgcccatgtccattacgtccagtccgctaatgtccatgtccgttaacgcccatatccattaatgtccacttcataatgggcttgtccatgcccggtccattaagcgttggacacgggcagcccacgggccgcccgtccattttgacagctatacatcgagcttttggattggagaccttaatcattatatttgaattcatatatatttttcgctaacctgttaaactaatcacatttggtgtccacacttatattttgaccctatgttactatatatatatatatatatatatatatgcatgtgcaattccattgtaaataaccaaatcgatataataaggaatgaacctcggtatgagcttgagtcttgatgttaggaagtgacgatagtctatagtgacctgttttgttatgcggttagaagagattgtggttcaaaatggtcagaatcttttggtaagattaattaagaagttgtagcattttcataaataataaagggtttatttgtataccataatactattttaagcatcaagtacatttatgtcacatctatttccggttagtttaattttattaatttcgtctgtaaaactattcataactaccaaaccccattttcttatttttttctcaaaagaactaccaacagatcttcaacggtcttgttgtcgaattatttatttactttctcggggcctttgttactttataattagaaaaaggcgatggtcaacattctccggttaacccccataatgcaaaatcttattttgggcaaatgagagggtaaaatagtcatttaaagaattccgaccggagtttctcctttgattcctcgcccctatactacgcgtcgtgtcagactcgtaactccgtttgactcaattaccccacatttttcattccatcatttcctttttcattgttttcattgtttttggctagttaacatagccaaactatgttcattatgcaactcacgaaacttaatacaaagatgaatctaataactctggttaacgaagtatattctccgttgacaaaaaaaaaaaaaaacacaaacagagaaaagtgaaatctgttgtattaagaactttgtagctcctacaagccttttcatatattgaaaattcacatatttagcaaaagaaaaaaaagaaaattgaaaaatcattcccgttttcatgtactaaaaagttttaacagtaaatatgcatatatttaggaaatgtatagttgccttgataaattggtaagtttgatttaatatgcatttaaatataaaactctttttacatatacttaatcttcaactatcattctaaagtcatacccttttaacactttatttatcctctcttttttttttttggacaactaactttattttatccaatcagcttttaaaatcttaattaacatggtttggattggacaagctaagtaataatactataatacgccacgtatatatacgacgtatccttcttctcttcacgtataaaataaaaatagtgtgttattgccataacatacgtgttttctaaaatttaaaagaaagtcatttatcatgaaaaggtatcataatcagaataagagtaatcagtttgaaaactagctagttgactaaaacagaaagaaaaatatctttacttgaaacatgtgttgagaattcacattatataaaaggaaaaaaaataaaacatgacttttgcgtagacaatccatagtccaatcaacaaaacgtgtggacggcaagggttccttctagctctctctatttatatctctcactcgccgatttttactagtaattaaccagaacgttcatctaccaacaaatcctcaactccttcttcttcactaatagtataccacaaaacctcaaaattgtaatttattagattatcgtgatg

SEQ ID NO: 35396 - DNA, 3000 bp, Unknown
  misc_feature (1)..( 3000): 2750-1469P.txt file - cDNA_ID_3087115; gDNA_ID_2936558; Annot_ID_194319
tcaatcaagtttatttgcttgtatagataaacttaatgattgtatttgtcaaagaaaactgaaaagtcattgaattatgggaacgttccaggttggtggaagtggtggacagccatttgtgctttctcaaaacttcttgcacagtatttcaaagtctccattcccagttaatactgggacaagagcagccaagttctccagttggcttttcgaacatgaaagagaccttatggctgggggtgtcactcttacttcggatttgcaatgtggtgatattttaaatttcttttcattggtttcttctggtgaactctctatatctgtatccttgcctgaagaaggtgttggagagcctggagatcgaagaggtttgaaacgtagagctgatgacatagaagaatctgaagctgagagttctaagaaattgaagctactaggcgaaggtgaaatcaacttccgaaaggaaaagggtttccctggtatagcagtatctgttcgtcgtgcaactataccaacagctaatgcaatagagttgtttaaggatgatgactctcgcactggtgaatttcatttgaagtggggagaagcgaatagtggctgtgattctgatgacatgaaagaacttttcaactctacagattctactgtcataccaagcagtctaggtgattctccctggcaagcgatggccagttttactagtagcattatgtccgaatcaacagatgaggaagttagtttattcagtcccagggtttttgaaaccgtttccaatgcccttcagaaggctggtgaccaaggtctgagcattgaagaagtccacagtcttattgatatcccaagtaagcatcaggcaaacctttttaacaggcttttatttttgcatgtgctggcgacttccttcagtgtttttatttaacctttgtgtattcatcaggccaagaaacttgtgactgcattgtagatgtacttcaaacatttggggtagctttgaaggtttgtctgattatctcttattttacaaaccctgttgcctttattaagatgaaagttgcagtgcttggtttactagttttacttacctggattgtgaactcagttcatgttacatcgttttacaagcaacttgttaaccatacaatatcttattcaggtaaatggctataataatttccgtgttgtccattccttctaccgatcaaagtacttcttgacattggaggaagatggaacttcccaaaaaagtcaacagtctctaccagtgaactacctagagagagctgttggggaacataggtccaaagatatcattgctagcagctacagtacttcacaggacatgcgagagcatgtcgctgggaatagcgttcacaaggttacaattcttaaccttcctgaaacggctcaaacgagcggtttgcatgaagcatctatcaaagctccatctgttacttttggaacgggtattgaaggtgaaacaaaggaatcaacttctgaaaagtcacctgtgcctatatatccatgggtaaacgcagatgggtcaataaataaaattgtctttgatggactagttcgccgtgttcttggtaccgtgatgcaaaatcccggtataccagaggtaaatacttctccattttccacccaataagtttttgccatcatggtttcgaactctatgaaaatactaatcgaaacattcatttgtggcaggacgagataataaacctaatggacatactaaatcctcaggtaataacaatcataaaccctaaaaacctcttctcctatggtttcatttactgaaactgatcaaaacttcttaaagctctttgtctgttgtctctatatacggtggttgctctctgataacattctgtaaaaaaatttcaatatcagagctgtagaaagcttctggagttgatgacactcgacggctatatgaaagtgagggaaatggtgcaaaccaaattcaccggtcctccgtctctgttagccggtctcgtctcaacaggtcctagaaaaccggaacttattcgccgcaaacacttgtttgcaaactccaagggactctttgccttgtaatgtctgtaaaatctctctcagtctctctagttcagtccaaaactcgatgcaataaattattaatgtttatgtgggaaattattatagttttgtgatttaaagtccacaagatcttgtatttgtatagctgtaggtgtgatgattaattctctttatagattcatagtgttggattcatatccctattataggtgagttttggaaggttttattcagttaaaaagagagcttattttttattcaactaaaaggtctcctacaagttacaagttataactaaataaagatttctatttaatttgtagacggaaaaatctccaaataagaatgaattaaatgatcaacaggatgttgtttccatctagttagtgtagtttacttagttaatcaataaaggtttgaatcatacagaatcaagaggcagaaaaaacattgtgctgaataaatttaaaaacataattctgaaacaccaaaaacgtgaaaatagtgcacactagtttcatcacctgagtaacgaaacagtttgactttttgttgacgtatttgatgtaataaatggtgaagagaaaaaaatgtaaaatattgattgcattggtctatgagataatcctacaaaaagtgttagagcagttgtgcgagagtctggaataatgaaacacagttcagtacaagtatcttttcgatcatcttccgctaaatctactgacgtgtacggctcagattcttttttccccagaactgattcaacaaacaaaacaaaaaaaatagaagaccatattttatcggtcaataaacttctgggaaaaaaataaaacacgatttcatgagagaaaatcgacaaaacccctctcaaccaaataatacaccttcttcttcttcttcttcttcttcttcttcacagctgggtttcttctaatg

SEQ ID NO: 35397 - DNA, 3003 bp, Unknown
  misc_feature (1)..( 3003): 2750-1469P.txt file - cDNA_ID_3087115; gDNA_ID_2926301; Annot_ID_205706
ttttcaatcaagtttatttgcttgtatagataaacttaatgattgtatttgtcaaagaaaactgaaaagtcattgaattatgggaacgttccaggttggtggaagtggtggacagccatttgtgctttctcaaaacttcttgcacagtatttcaaagtctccattcccagttaatactgggacaagagcagccaagttctccagttggcttttcgaacatgaaagagaccttatggctgggggtgtcactcttacttcggatttgcaatgtggtgatattttaaatttcttttcattggtttcttctggtgaactctctatatctgtatccttgcctgaagaaggtgttggagagcctggagatcgaagaggtttgaaacgtagagctgatgacatagaagaatctgaagctgagagttctaagaaattgaagctactaggcgaaggtgaaatcaacttccgaaaggaaaagggtttccctggtatagcagtatctgttcgtcgtgcaactataccaacagctaatgcaatagagttgtttaaggatgatgactctcgcactggtgaatttcatttgaagtggggagaagcgaatagtggctgtgattctgatgacatgaaagaacttttcaactctacagattctactgtcataccaagcagtctaggtgattctccctggcaagcgatggccagttttactagtagcattatgtccgaatcaacagatgaggaagttagtttattcagtcccagggtttttgaaaccgtttccaatgcccttcagaaggctggtgaccaaggtctgagcattgaagaagtccacagtcttattgatatcccaagtaagcatcaggcaaacctttttaacaggcttttatttttgcatgtgctggcgacttccttcagtgtttttatttaacctttgtgtattcatcaggccaagaaacttgtgactgcattgtagatgtacttcaaacatttggggtagctttgaaggtttgtctgattatctcttattttacaaaccctgttgcctttattaagatgaaagttgcagtgcttggtttactagttttacttacctggattgtgaactcagttcatgttacatcgttttacaagcaacttgttaaccatacaatatcttattcaggtaaatggctataataatttccgtgttgtccattccttctaccgatcaaagtacttcttgacattggaggaagatggaacttcccaaaaaagtcaacagtctctaccagtgaactacctagagagagctgttggggaacataggtccaaagatatcattgctagcagctacagtacttcacaggacatgcgagagcatgtcgctgggaatagcgttcacaaggttacaattcttaaccttcctgaaacggctcaaacgagcggtttgcatgaagcatctatcaaagctccatctgttacttttggaacgggtattgaaggtgaaacaaaggaatcaacttctgaaaagtcacctgtgcctatatatccatgggtaaacgcagatgggtcaataaataaaattgtctttgatggactagttcgccgtgttcttggtaccgtgatgcaaaatcccggtataccagaggtaaatacttctccattttccacccaataagtttttgccatcatggtttcgaactctatgaaaatactaatcgaaacattcatttgtggcaggacgagataataaacctaatggacatactaaatcctcaggtaataacaatcataaaccctaaaaacctcttctcctatggtttcatttactgaaactgatcaaaacttcttaaagctctttgtctgttgtctctatatacggtggttgctctctgataacattctgtaaaaaaatttcaatatcagagctgtagaaagcttctggagttgatgacactcgacggctatatgaaagtgagggaaatggtgcaaaccaaattcaccggtcctccgtctctgttagccggtctcgtctcaacaggtcctagaaaaccggaacttattcgccgcaaacacttgtttgcaaactccaagggactctttgccttgtaatgtctgtaaaatctctctcagtctctctagttcagtccaaaactcgatgcaataaattattaatgtttatgtgggaaattattatagttttgtgatttaaagtccacaagatcttgtatttgtatagctgtaggtgtgatgattaattctctttatagattcatagtgttggattcatatccctattataggtgagttttggaaggttttattcagttaaaaagagagcttattttttattcaactaaaaggtctcctacaagttacaagttataactaaataaagatttctatttaatttgtagacggaaaaatctccaaataagaatgaattaaatgatcaacaggatgttgtttccatctagttagtgtagtttacttagttaatcaataaaggtttgaatcatacagaatcaagaggcagaaaaaacattgtgctgaataaatttaaaaacataattctgaaacaccaaaaacgtgaaaatagtgcacactagtttcatcacctgagtaacgaaacagtttgactttttgttgacgtatttgatgtaataaatggtgaagagaaaaaaatgtaaaatattgattgcattggtctatgagataatcctacaaaaagtgttagagcagttgtgcgagagtctggaataatgaaacacagttcagtacaagtatcttttcgatcatcttccgctaaatctactgacgtgtacggctcagattcttttttccccagaactgattcaacaaacaaaacaaaaaaaatagaagaccatattttatcggtcaataaacttctgggaaaaaaataaaacacgatttcatgagagaaaatcgacaaaacccctctcaaccaaataatacaccttcttcttcttcttcttcttcttcttcttcacagctgggtttcttctaatg

SEQ ID NO: 35398 - DNA, 3003 bp, Unknown
  misc_feature (1)..( 3003): 2750-1469P.txt file - cDNA_ID_3087119; gDNA_ID_2926301; Annot_ID_205705
ggaacagcaaaaacattatgttctataaatcagagatacacatttatgaacatacccgcacaagcttgtacgtaacagggtttccaatttgatttgttgaggaaagtgatccgtttcttgtctgaaaaatactgtcttgaaacgtctctccatagtctttcacatttccaaacattgttaccctattttaacctaccaaatgcaacttcaagcatacaaaaaggcataagcaaatatacctatatgcttaataaatttttcagtcatgcaaaaaactcttacacaatacaatcactgatactcaaaaatcctagctttaccctttcatagagagaaaaatattggggatagagtataatcttattaggattattactatatatcttgtgatagagtttaggtcctatatatctctaatccctcaaatataggacctaaactctatcacaagatatatagtaataatcctaataagattatactctatccccaataaaaaacaccactgcatcttcagaataataaaaaagctttcaactttaagctaccatttatcaaatttcaatggaatttgcgtgttgcagttctcacatcaagtttttggtagattccactcagtttaactcgcatcaaacaaacccactacttaattttcaggatagaaatatgaaaagtcacgaggaaagcagttaaccgagcaacaagtacacaagagagttaccagagaaagtagaacgggaacggagaagaaaaaaatcagactttccagtgagctcgtagtttcatcggcgagaaatctcggaggagaggcttcttgactaagctaaaaaccttggatatttgcaaacttttttgttctgctttatttttttttgttttggctcgctttcggctttttttttccctaatacagtgccatacaggtccggattccaaagctttttattcactcgatttcagaatgccaattgggatccgtatagttatgcgggaagctcctagaggttgccacgtcagcgaatagcgaaatatctgccgaaaaagagccaactacgttccgtcccgactctcgtgcaccacaactgcgtgccgtcttacacttcaggattcgaatacgtgtcgtcttagtctagagttcaaaatactgcactcatgtaaaactcgcacaggctatacaacaacaaacaaacatgcaatgataacactggagaccaaaggtaagaaaaacagaagaatccttaaaccgaaatgtgtaaactttacaacaagtttcttgtaaagactcttaatcatttcaatagagatattacatttgtaaaactctcctttctcctttctcctcaatcaattagctctgaatctgaatatgaatctatgataatcaactttgatggtcttggacctcttggttacaatactaaccggatctaaatctcttctggttagctttcccatcagatttcaaagttccactagattcaccttctgatgaagcatccactgatcttgcaaaagaatgagagagatcaccataaaggctagctactcttctgatattgttgttgagctctttgatcaaccccacgtttcgacccaagttatctggttgtttcgattcatggttctgattgatctcgttgatcaataatcggttttggtccaaaatgtcttgaacatccacaaagctcttctggaaactctgcaacaatttcccatccatattgtgtctgtctccaaatcctgacaacacatctccttccattatcggctattctaacaagatcaaactcttgattgatcctttactcctgtttcaatacaatcatgtcaaaaacatggaaacaaagccaagaaagggattcaatttaacagaaaacgttgactagaaaagtagttacaataacacaatttattctctatgcgttgacctgaccctatcttgattttagagctctaatccttaaagctcacataagattccattagtacagacatttccagtaataatccaatcttaaaacactcaaattcagacaagaacccaacacgattcagctgaatagtcatgaatcgtacaaagtagggaagaggattttgttcttatgaacccaagagggaaagagatctataaagggacaagtaaaagctgttccacaaatagctttaaaacatcacaatagtagtagacacagattcagataagattcgcaatccttaacaatgcaataagacccagaaaccctaagcaaatacacagtacagaattcaaaagagttccgatccagtttccttaccttcggaagtagaaagctccgatgacagataggagatggaaatcgaggatattttctcgggaaacaaacaaagaatccttctttttcaccgattatttatatgattacaaattattggatactgtaaaaaaaaggaatctacttgtcttttgagacagagatatttgagcgaagctaatatgttctaaaaaatgccatttataaaaacgatatatttttctgtatttactctgaatcacgctttttgcagagagagatacggaggttagagaagccagacatctggatcgaacaaacccgacccgcaaaagattcgtgttgtttgtgcctaattcgcataaacagcatgtcgtttcgattggaagtaaaaacggcccgtagtttagaagcgtgaggaatcaatgttttaacttgctgacgtatggccattctcgtcacttactttgtctcaccccctaattaaattacctcgtaattatttcgcagttccttgagatcgatcccgtcaccaagaactcgaatatctctttctcttcgatcgtttcctcttctgatcccgccatcttcgcctaactcccaaatctatataaattattccgacacctctccggcgagaatttccggttaatcggctgactaactaatttatcggcggaagattttccgttgacctaaacctaaccgagtaccttttggatgatgagaaatg

SEQ ID NO: 35399 - DNA, 3000 bp, Unknown
  misc_feature (1)..( 3000): 2750-1469P.txt file - cDNA_ID_3087123; gDNA_ID_2926301; Annot_ID_205704
acgattttcagctttctcaggaaaccgatcagaacattcggacccagcattaccagaagtccaaactcgaaatactctagtcttcttgtgactttctgcctgtaaatgcatcccgacttttaaacaaatactataaagccgagagtagctcttcttcttgtcaattccaagtctttcacatacctggtggaaataatatttaatgccttttcaaaaaaattcagccaaatacataaggtaataccaaaaactgtaaggcaaacccatcaaatgaatacctccatcacagccaagcctttagatccttcagcatcaaccatatcataaatttgattatctattggaagctccaaagtttgttctgttttttgaatactccttccgaattttaggagttgctttttcccagagtagttaaaatcttttgctgaaaatctttttaacaaacggaggcatcgttcaacctgcagaaaagacaatccaaatattttatagccaaataaaacagatcagaaatgctaaataaaggcaattggccaccatatgtggtgaaatgtattcgcatgatggaatgtgatgcagattatagttcaccttattgttcaccacagcatcaaactcctctactacatgagaatctgtcaaccggcgacaaacctgatgtaatccaaaatgcacacgtattaatttttcaaagatatatctaccaaaaagaaattggcaaagtgttgaaagtctctttcctcttgctctataagagaaaaaagaaatatatacttacacttctccaagctctatgccttgaatgtgatcccagataaccgaggtcttgcttaatgtccgagacgactagaacctgcactacaacaaatgagtatagagaaagaatgctccagcttgataaaaaaagaaagaaatgatttgcacttactaaccttctcattagtttcttcaagcttatcacaaattgcctgcattgctggtagaaaatctttaatgagcgtatcctcttttgtactttctgattgtaaactatctccggcgggagtagcctcttgctccaataaagagtcctctttgcaaatctcaaatctctgctgggaacccaaaggcttggcgtaacgacttaaatatatcatattggtgctaatgcatgaggtggttttggaatccccttcaccatcaacttcctttgttctcactatcgctggttgtttaacaactaaacctcgagactcaaggtgcttcacaatatagaagaagtttctaccttcgataccaaactctttagcaagcagattttgtgcaactccattggctctgcatcaaacacatacaacataatattatacgagctcgaactcttaagagtagctagaagagaatacagaatttgcacttaccgagcaacagcaagccgctcgagaacgcgacgctgaatagcggaaatagtcgtgttattggactgagcatcgtacaagccaacgaagttacctcggagcttctcattcgcgaagatcctcaaatcgagtcttagtgcctcttccagctgttgaatcgaagcatcagatggttcgtacacagtgtttttcgccttgaactggagctgagggacggcgagaagatttctccagacatgagccttgacggaaggagaaagaggaggaggagagagccttgaccagagagaaacgagtgggatccctgtatttccttgacaacagatttcctccagtgctgtgcatacaatcgaatccatttctcatcatccaaaaggtactcggttaggtttaggtcaacggaaaatcttccgccgataaattagttagtcagccgattaaccggaaattctcgccggagaggtgtcggaataatttatatagatttgggagttaggcgaagatggcgggatcagaagaggaaacgatcgaagagaaagagatattcgagttcttggtgacgggatcgatctcaaggaactgcgaaataattacgaggtaatttaattagggggtgagacaaagtaagtgacgagaatggccatacgtcagcaagttaaaacattgattcctcacgcttctaaactacgggccgtttttacttccaatcgaaacgacatgctgtttatgcgaattaggcacaaacaacacgaatcttttgcgggtcgggtttgttcgatccagatgtctggcttctctaacctccgtatctctctctgcaaaaagcgtgattcagagtaaatacagaaaaatatatcgtttttataaatggcattttttagaacatattagcttcgctcaaatatctctgtctcaaaagacaagtagattccttttttttacagtatccaataatttgtaatcatataaataatcggtgaaaaagaaggattctttgtttgtttcccgagaaaatatcctcgatttccatctcctatctgtcatcggagctttctacttccgaaggtaaggaaactggatcggaactcttttgaattctgtactgtgtatttgcttagggtttctgggtcttattgcattgttaaggattgcgaatcttatctgaatctgtgtctactactattgtgatgttttaaagctatttgtggaacagcttttacttgtccctttatagatctctttccctcttgggttcataagaacaaaatcctcttccctactttgtacgattcatgactattcagctgaatcgtgttgggttcttgtctgaatttgagtgttttaagattggattattactggaaatgtctgtactaatggaatcttatgtgagctttaaggattagagctctaaaatcaagatagggtcaggtcaacgcatagagaataaattgtgttattgtaactacttttctagtcaacgttttctgttaaattgaatccctttcttggctttgtttccatgtttttgacatgattgtattgaaacaggagtaaaggatcaatcaagagtttgatcttgttagaatagccgataatg

SEQ ID NO: 35400 - DNA, 3003 bp, Unknown
  misc_feature (1)..( 3003): 2750-1469P.txt file - cDNA_ID_3087127; gDNA_ID_2936558; Annot_ID_194322
tttactccacctttgaaacttttgcagtctaaagaggaattgatgaatggatctcagatgctttttgttcttccggataccaaatttcagatttctactgagctgtctgggaatgtggagctagtcccatccaaagttttgctgcaggaaccaattcttttttcatcaaatggatgcagtattaatcaatctacggatgtcttaaatgctacagctagtcctaaagaacctgcattgtcaactgctgcctcaaaacctgatttttctagagtaccaggcgagataagcttggctaatctttcaattaaagaattacaagaaactttcagagccacgtttggtcgtgaaactacttctaaggacaaacgatggctcaaaagaagaatcaaaatgggactgattaattcatgtgtagttccaacaactaccctgacaattaatgatagcaaactgattggtggagatcaagatgcaattgatgcttttagcaagggtacagtagatgaagaaacagctactgaaagcatagatacaccagctagtcctgacggcataaaggggcattcaaatgattttgggcatagtcctgttgaaacttttgtggaccattattctggaaacgaagattttgaaggtgaagatgggtctgcaaaaagagtgaggaagcctacaaggagatatattgaagaaaccaatgaaaaacaacaaattgacgggtcaatgatcccttcaaaagatccaagctctattcaagccgtttcttcagaagggagagttgttgtcaccaggatggtatcccttgctggttccagaattcaggttccctatgtttctcatgtaaggagaagtcgtccaagagaaaacataatggctcttggggtatgtctctattgttcatgctcttcaatatctttattaaccccattccttatcatatgagctatcaaaatatttttacttatctggcacatgctaaatttatgtctattgttacacactggaaaaaggaatatagaagtattcatcttttaaattgtgtttgctgcaatcaaggtaatagaggataatgttgtttacctgtacattttgtaggaatttcgttctaagtcatgggaggtgaaagctgctccagaggagggtaacctgaatctaagcccacctcagttgagcaatgatgtgaaccgagttccaggtgtcaaatctgcatctagatgtgtccagaaagaagtaagatcactctggcatttctgtataacttggtcatttctataatagtggagagcattttgtaaatgtaaaatccattttactttgattctatctatccaacgaagtctcaattgctctgaactttatggtttttagttgagatggtatgtaaaaagactgtttctaatcatctagcagtatattttttatttctggtatgagacagttgctcattgctttatctattttggttatcagagtgacaaagaccatttaaaaccaattttcactgatgtggatcaagagatgatggagccagagctcttagactcatctggagatagctcagatgataatttcgttgatgcaccaatcacgcaaagtgcaagtggaaggaagcttcatcgagcttggactatctctgaagttgaaaaactagtcgaaggtgtgtccaaatatggagtagggaaatggactgagatcaaaaagctttcattttcaccatacacgcatcgtaccactgtggatctcaaggttggttcaacataactaattaactgtctcatctcaatattcttaatccttttgtttaatcacaagtgtctcttgtgataggacaaatggcgaaatctacaaaaagcaagttcttcaaacagaatggttagcacttgccacatgttttaaccaattaaccaataacttgggtttaagattaaagtggtgaatggtttgtgtatttgcaggaaggaggtctgaagaaacacgggtcgatggccattcctactcacattatgttgcaggtaagagagcttgctcaaaaacaatcaccgatttcacgtgtagtgagcaaggctagagtggtgaagagatcgagatcaagaaacggtttcttgtagcgtttctactctcgtataaatttgtagttttctgtgaggttaacttctctgtttttacttttcgagtttgtagttttaaggtaggttcatgatttaaacagaatcactaaagtctaaaggtaaactgactggtgtttggaaatttctagatgatatgaacacttctctccatattactgaaccaaaccaaaccagattatcaaattcgcacaacaagacacatactactaagaattcactttcacataaatgaaacgcagcgtttcatacccttttgttaaacgcagcgtttcacgaaaacaagataataataagcatcgagatggaaaaaggcctttgggctttaagatacagtaaatgggactgtaatcctttttgggcgccctattacaggcgtgctctctctcctctctccatctatctccctctcttcgccggagatcgcccttcaccaattccactgtgagtcgcacatcaaatattcctactttttcatgctaagattttgatttattgttaaatcagttatatttaaatgattcctgcatttcgagctcgtctaatggaattcatgtttggaatcgatgtctcgacatacgtttttttgttcgattagacgtaaagagctcagctttcgccttttggcattcaaatttgtttactgagtggatatatatggtttgataaatttaagctaaatatgaatcttaaagctttatattcttcgggtttgattttagctcttttattagcaatctgaagttttttgtttgagttattgataaaatttttatgttattatctatgaactctctgattctgagtctattgataagtaacaatctttgtcctttactctctctccacagatagtagcaaaaacaagtgaagcacaatg

SEQ ID NO: 35401 - DNA, 3000 bp, Unknown
  misc_feature (1)..( 3000): 2750-1469P.txt file - cDNA_ID_3087127; gDNA_ID_2926301; Annot_ID_205703
actccacctttgaaacttttgcagtctaaagaggaattgatgaatggatctcagatgctttttgttcttccggataccaaatttcagatttctactgagctgtctgggaatgtggagctagtcccatccaaagttttgctgcaggaaccaattcttttttcatcaaatggatgcagtattaatcaatctacggatgtcttaaatgctacagctagtcctaaagaacctgcattgtcaactgctgcctcaaaacctgatttttctagagtaccaggcgagataagcttggctaatctttcaattaaagaattacaagaaactttcagagccacgtttggtcgtgaaactacttctaaggacaaacgatggctcaaaagaagaatcaaaatgggactgattaattcatgtgtagttccaacaactaccctgacaattaatgatagcaaactgattggtggagatcaagatgcaattgatgcttttagcaagggtacagtagatgaagaaacagctactgaaagcatagatacaccagctagtcctgacggcataaaggggcattcaaatgattttgggcatagtcctgttgaaacttttgtggaccattattctggaaacgaagattttgaaggtgaagatgggtctgcaaaaagagtgaggaagcctacaaggagatatattgaagaaaccaatgaaaaacaacaaattgacgggtcaatgatcccttcaaaagatccaagctctattcaagccgtttcttcagaagggagagttgttgtcaccaggatggtatcccttgctggttccagaattcaggttccctatgtttctcatgtaaggagaagtcgtccaagagaaaacataatggctcttggggtatgtctctattgttcatgctcttcaatatctttattaaccccattccttatcatatgagctatcaaaatatttttacttatctggcacatgctaaatttatgtctattgttacacactggaaaaaggaatatagaagtattcatcttttaaattgtgtttgctgcaatcaaggtaatagaggataatgttgtttacctgtacattttgtaggaatttcgttctaagtcatgggaggtgaaagctgctccagaggagggtaacctgaatctaagcccacctcagttgagcaatgatgtgaaccgagttccaggtgtcaaatctgcatctagatgtgtccagaaagaagtaagatcactctggcatttctgtataacttggtcatttctataatagtggagagcattttgtaaatgtaaaatccattttactttgattctatctatccaacgaagtctcaattgctctgaactttatggtttttagttgagatggtatgtaaaaagactgtttctaatcatctagcagtatattttttatttctggtatgagacagttgctcattgctttatctattttggttatcagagtgacaaagaccatttaaaaccaattttcactgatgtggatcaagagatgatggagccagagctcttagactcatctggagatagctcagatgataatttcgttgatgcaccaatcacgcaaagtgcaagtggaaggaagcttcatcgagcttggactatctctgaagttgaaaaactagtcgaaggtgtgtccaaatatggagtagggaaatggactgagatcaaaaagctttcattttcaccatacacgcatcgtaccactgtggatctcaaggttggttcaacataactaattaactgtctcatctcaatattcttaatccttttgtttaatcacaagtgtctcttgtgataggacaaatggcgaaatctacaaaaagcaagttcttcaaacagaatggttagcacttgccacatgttttaaccaattaaccaataacttgggtttaagattaaagtggtgaatggtttgtgtatttgcaggaaggaggtctgaagaaacacgggtcgatggccattcctactcacattatgttgcaggtaagagagcttgctcaaaaacaatcaccgatttcacgtgtagtgagcaaggctagagtggtgaagagatcgagatcaagaaacggtttcttgtagcgtttctactctcgtataaatttgtagttttctgtgaggttaacttctctgtttttacttttcgagtttgtagttttaaggtaggttcatgatttaaacagaatcactaaagtctaaaggtaaactgactggtgtttggaaatttctagatgatatgaacacttctctccatattactgaaccaaaccaaaccagattatcaaattcgcacaacaagacacatactactaagaattcactttcacataaatgaaacgcagcgtttcatacccttttgttaaacgcagcgtttcacgaaaacaagataataataagcatcgagatggaaaaaggcctttgggctttaagatacagtaaatgggactgtaatcctttttgggcgccctattacaggcgtgctctctctcctctctccatctatctccctctcttcgccggagatcgcccttcaccaattccactgtgagtcgcacatcaaatattcctactttttcatgctaagattttgatttattgttaaatcagttatatttaaatgattcctgcatttcgagctcgtctaatggaattcatgtttggaatcgatgtctcgacatacgtttttttgttcgattagacgtaaagagctcagctttcgccttttggcattcaaatttgtttactgagtggatatatatggtttgataaatttaagctaaatatgaatcttaaagctttatattcttcgggtttgattttagctcttttattagcaatctgaagttttttgtttgagttattgataaaatttttatgttattatctatgaactctctgattctgagtctattgataagtaacaatctttgtcctttactctctctccacagatagtagcaaaaacaagtgaagcacaatg

SEQ ID NO: 35402 - DNA, 3000 bp, Unknown
  misc_feature (1)..( 3000): 2750-1469P.txt file - cDNA_ID_3087131; gDNA_ID_2936558; Annot_ID_194323
aggggacataagaagtgggtgcaggcatgtgaagaagaaataaactccatcgaaaagctaaaacgtgggaactagttgagctaccaattggcgccaaaccaataggccttaaatgggtttttaaactcaaaaggaattcagatggaagtattaacaaacataaagctcgacttgttgccaaagggtatgtacaacaatatggagttgactttgaagaagtctttgccccagtagcacgaattgaaactatcagacttcttattgaccttgctgcatcacacggatgggagattcatcacttagatgtcaaaacagcctttttgcatggtgaactcaaagaaacagtttatgtctgtcagctagagggattcgagaaacagggaagagaagagaaagtgtatagactcaacaaagccttgtatggactgagacaagcaccaagggcatggaataacaaactgaataatattctcatggaacttggatataacaagtgttcaaaggagccatctgtgtatcgaaaacaggttagcaaccatgttatgatagtagctgtatacgttgatgatttattcgtcacaggaacaagcttggaactcattctcaaattcaagaaagaaatgtcatccaaatttgagatgagtgaccttggtctactatcatactatctcggtatagaagtgattcaacacagtaagggcataactttgaatcaaagtcgttatgcaatcaagattctggaagaaactggaatgaaagactgtaacttagtccatacaccaatggatccaagctacaagccatcaaaagttgaaactgaaaaggaagtagatgcaacagtttacagaaggaatataggctgccttagatatctgcttcatacaagaccagatttgtcatatagtgtaggagtcctgagcagatatatgcagagtccaagagaatcacacgctgcagcaatgaaacactgtctccgatatctgaaaggaacaatttcacttggtttactctacaacagatgtgataaagcaaagttaaatggatatagtgacagtagtcataacgttgatccagatgatggaagaagtacaacaggaaatgtattctatctaggtgagagtccaatatcatggtggtcaaagaaacatgatactgtggcaatgtcatcctgtgaagctgagtttatggctggaacagaagcggcaaaacaagccatttggcttcaggacttgttaagtgaaatcacaggaaactcaagtgagaaagtcaccatattcattgacaacaaatcagcaatagccctcacaaagaatccagtgtttcatggcagaagtaaacatatcaatagacgttaccactttataagggaatgcgtctagaatgatcaaatagaggttacacatgttcccggtgaagaacagaaggctgatattctaaccaaagctcttgaaaggattaagttcaaagagatgcgagatctcatcggtgtaagagatatggagaaagaagactttgagcttaaaggagagattgttggagtaagctcaaagacttgaagaagaagaaagtctaaaccaagactaaaccgaattatggctaaaccgagatatggtttaatgtgaagataagattagtgagatttaggagatatctaaatcatgtaatcctattaggtttaggattagaatcttatataaaggacatgttggttgtaacatagcctttgagagagctgtagaatacattgagagtttaggttttgaggaattttcctagactaataaaaagagattcattcttttgattttgtgttcttaatctcttcattgaaatctatagatatggtgttgtcaagaatctaaaagctcgtgtctttattaagcaaagggggtggttacagttcttacaacagaagtatatagtttgtgaccggatcttaggaactagaaacgatactaatcattttacttgtcagaacttttgttaggagtaacagcgtcaacaatggcttccatttcttccatcatacgcccgagaacaccaggtcctttaacatcatcaacccttgtcttctcatcaatgtcttcacttcttccatgagtctctttcccatgaaacatcgattccttctcttcttttctgcttccaatcacatttgtcttcacctctaaaaaaacaacaaaaaccaaaacccagaaacgatcaatgagattaaaacaaaagagttgtcttttcgcccaaattaaccatctcctagataaacctaaataacccaaaaggtccctgattcgattacatatagaaaccctaaattcgataaatcagggggaatctctaggaggaattagacaaattaataagtgatgaaactttattaaaaaaaagggcgcaaaattcgtgaaattgatcaaatcggagaatttgtcttaccagaaagagagctttgttttggttccgccattaatgatcttccttctttgatcttgtttttgagttcttcaaatgtagacgagtttgtttagtttggtctgagcttgaaatagtgtgtacaaatgtgaaccatccaatgtaataataacagattaacgagtagatcgaaccgactcgggtattgtgcaaacccgacactaaaatggattgagttgcccagtctaataacttatgggttaaaaattgagaatacaaaagtagaggggttctcagggaatttctggaacaaataatataaaagagaaaacctaaagtttaaccgttattttaagaaaattgctttcgtaccccaacaatttcaaaattcaaaagttctctctctgcttcttctttttaacacttgcgaacttttgtcaacatcaatctcaatcaacacaaccaaattcccagaaacaatctttttgcttttcccacatttcaagctccaaagcttcgaatttttgaatcaatagcttccgaagttgtgatttttgtagaattcgaaaaccaaggtctcgatttgagaagatg

SEQ ID NO: 35403 - DNA, 3003 bp, Unknown
  misc_feature (1)..( 3003): 2750-1469P.txt file - cDNA_ID_3087131; gDNA_ID_2926301; Annot_ID_205702
gcaaggggacataagaagtgggtgcaggcatgtgaagaagaaataaactccatcgaaaagctaaaacgtgggaactagttgagctaccaattggcgccaaaccaataggccttaaatgggtttttaaactcaaaaggaattcagatggaagtattaacaaacataaagctcgacttgttgccaaagggtatgtacaacaatatggagttgactttgaagaagtctttgccccagtagcacgaattgaaactatcagacttcttattgaccttgctgcatcacacggatgggagattcatcacttagatgtcaaaacagcctttttgcatggtgaactcaaagaaacagtttatgtctgtcagctagagggattcgagaaacagggaagagaagagaaagtgtatagactcaacaaagccttgtatggactgagacaagcaccaagggcatggaataacaaactgaataatattctcatggaacttggatataacaagtgttcaaaggagccatctgtgtatcgaaaacaggttagcaaccatgttatgatagtagctgtatacgttgatgatttattcgtcacaggaacaagcttggaactcattctcaaattcaagaaagaaatgtcatccaaatttgagatgagtgaccttggtctactatcatactatctcggtatagaagtgattcaacacagtaagggcataactttgaatcaaagtcgttatgcaatcaagattctggaagaaactggaatgaaagactgtaacttagtccatacaccaatggatccaagctacaagccatcaaaagttgaaactgaaaaggaagtagatgcaacagtttacagaaggaatataggctgccttagatatctgcttcatacaagaccagatttgtcatatagtgtaggagtcctgagcagatatatgcagagtccaagagaatcacacgctgcagcaatgaaacactgtctccgatatctgaaaggaacaatttcacttggtttactctacaacagatgtgataaagcaaagttaaatggatatagtgacagtagtcataacgttgatccagatgatggaagaagtacaacaggaaatgtattctatctaggtgagagtccaatatcatggtggtcaaagaaacatgatactgtggcaatgtcatcctgtgaagctgagtttatggctggaacagaagcggcaaaacaagccatttggcttcaggacttgttaagtgaaatcacaggaaactcaagtgagaaagtcaccatattcattgacaacaaatcagcaatagccctcacaaagaatccagtgtttcatggcagaagtaaacatatcaatagacgttaccactttataagggaatgcgtctagaatgatcaaatagaggttacacatgttcccggtgaagaacagaaggctgatattctaaccaaagctcttgaaaggattaagttcaaagagatgcgagatctcatcggtgtaagagatatggagaaagaagactttgagcttaaaggagagattgttggagtaagctcaaagacttgaagaagaagaaagtctaaaccaagactaaaccgaattatggctaaaccgagatatggtttaatgtgaagataagattagtgagatttaggagatatctaaatcatgtaatcctattaggtttaggattagaatcttatataaaggacatgttggttgtaacatagcctttgagagagctgtagaatacattgagagtttaggttttgaggaattttcctagactaataaaaagagattcattcttttgattttgtgttcttaatctcttcattgaaatctatagatatggtgttgtcaagaatctaaaagctcgtgtctttattaagcaaagggggtggttacagttcttacaacagaagtatatagtttgtgaccggatcttaggaactagaaacgatactaatcattttacttgtcagaacttttgttaggagtaacagcgtcaacaatggcttccatttcttccatcatacgcccgagaacaccaggtcctttaacatcatcaacccttgtcttctcatcaatgtcttcacttcttccatgagtctctttcccatgaaacatcgattccttctcttcttttctgcttccaatcacatttgtcttcacctctaaaaaaacaacaaaaaccaaaacccagaaacgatcaatgagattaaaacaaaagagttgtcttttcgcccaaattaaccatctcctagataaacctaaataacccaaaaggtccctgattcgattacatatagaaaccctaaattcgataaatcagggggaatctctaggaggaattagacaaattaataagtgatgaaactttattaaaaaaaagggcgcaaaattcgtgaaattgatcaaatcggagaatttgtcttaccagaaagagagctttgttttggttccgccattaatgatcttccttctttgatcttgtttttgagttcttcaaatgtagacgagtttgtttagtttggtctgagcttgaaatagtgtgtacaaatgtgaaccatccaatgtaataataacagattaacgagtagatcgaaccgactcgggtattgtgcaaacccgacactaaaatggattgagttgcccagtctaataacttatgggttaaaaattgagaatacaaaagtagaggggttctcagggaatttctggaacaaataatataaaagagaaaacctaaagtttaaccgttattttaagaaaattgctttcgtaccccaacaatttcaaaattcaaaagttctctctctgcttcttctttttaacacttgcgaacttttgtcaacatcaatctcaatcaacacaaccaaattcccagaaacaatctttttgcttttcccacatttcaagctccaaagcttcgaatttttgaatcaatagcttccgaagttgtgatttttgtagaattcgaaaaccaaggtctcgatttgagaagatg

SEQ ID NO: 35404 - DNA, 3000 bp, Unknown
  misc_feature (1)..( 3000): 2750-1469P.txt file - cDNA_ID_3087176; gDNA_ID_2926302; Annot_ID_205756
ccctttcataataacacttggaattttgtttgcatatatctgattgaacaatagtagctatgtctttttggcaaaagattctctgaattatattgagctgagttataaacaaaatctagtttccaatgggtgtacaattcatcacagattgacctttttaattttgctgtacagaaaatatttgacaacatcctcaatggtaaaatgccctggccagatgttcctggtgaaatgtcttatgaagctcaggatttgattaacaggtctgttttgaggattctgctcccgttttcatatcatccgtctttcccacagtcccattcatgtttctctaagcagaattactatatttccagctaatgaattaacatttatcctagtttctgcatattggttacctacaacatcagctgatttttagactttatgctggtcaccgttaaggagatgttaagtttgacagaaatattataaacactttataggtttgacgtttactactttttctcatattcatatagattcattttctctccgtaataggcttcttgtccatgagccggaaaagcgactgggggcgaacggtgctgcagaggttacttcaattttccctttactttttattaaagccgcacaattgagaaacaaatgcctattagatgctgttgttgtggtcattactaaaattttcagtaacatcgctggtctcattttcaggtaaagtcgcatcccttttttcaaggagttgactgggagaatcttgctttgcaaaaggtaagtactccactcggaacctctttttacattcaagacaaattatgcaaataaatacatgttacttactggatgaagaaagaaaatagaaaataaagcagaagctgtttgatcaaatcgagcttagtcttcacaaatgcatattatgaatgtgaagagtgaaaggttctttaaagccttagctgcctttccttttatttctttttggtaggctgcttttgttccgcaacctgagagtataaatgacacaagctatttcgtatcacgctttagtgaaagcagttgcagcgatactgaaactggtaacaacagtgggtcaaatccagattcaggagacgaggtaggcatttggaaactccatccttttctctctaggtactctatttgcaatcatcgtatctatcgcaaattatttttcctgcttttgtgtgttttttagttggatgaatgcaccaacctggagaagtttgattctccgccttattatctctcgctcattaacttttctttcaaggtaaatttggctgctaaaagctgaaatatgaatcccagtttacgttgattggagttgttgggtagttctgtcttgggataattattattgaagtacaggatattaacagcatgttatgatgatgcagaatttgtcacaattggcttcaatcaatcatgatgtgctattgcaaaaggatccagctaaaggaggaggagactcaccctttaaaagccatggaacgtagagctctcctacaaccgtcaaaggtggccttagtccgctgttttctctggtttgcgccctgctttgaccgttgtagctgctgctgctactatgctgaaattgttacctcaaggtctttgggtaattattttcagttttgtcataaattgatttggaaccatttcaaatgcaaatccaagtatttattgcgtggcaacaacacacatatacatgtgtataagcttgtgtgtattgaggctgatggaaataagagagcgctttggttactgaattatgggcatcccacttccataacttttattctcgaaagaagtcttcatcactctatcagaagacaagaccaaaacttgcatcaatcccaccaaggtcaccgtcaatgaaaaaaaaaaagcggtttctgattattggcaaaaaaagatttgagaaagttatttcataatgagatcacactaatctttcgaatcagtccaaagactacaaaggacttaagagactaacacaccttaggcaaataacagcttatgatgatgacgcaacatactgtacatgctttcagtattcttcatgttatgaaaaactacccctactagattatggggtgattaattaaggcttttcttttattttaagttttaattgtaaaaactttggtggaagggttcattaatggttctacactaagaggtatgaggttgagtcccaatactaccatttattagaagatttgcagattaatgaactacaagagatctccaacgatgtataattatagccgttcgccaggattctacgcagagaagatcattgaaggtgtgcatgaagagcatggagaaggagtaaaatgcatcgtcttatcataatttgtaataaataataaatttaagacgacaatttttttttttgtaaaaactgactataaataattagtgttacttagaaaaccaaattagcttcaaaaattaaaaaggtataaaaaaaataagaagattaaaatctgtaaatttaattagataaaacatggcttaaaagatttttgtattttaatagtgaacaaattaataatcaaataacatatgattttggttataaaatcaactaatcaataagaaatcttctaaaaatatgtaaaaaaatttctatagttgacaaatttaaagtgtttttttttttttaaacaaaatttagggtggataaaaaaaaatttaactctcttttatttcataaaccattttgttgcaaattcccaaaagaatattgcagcaaaaaagcttcaatgagttaaagcctgcaagctactttttcagtttagccacgacggctaagaaaaacaaaacaaaacaaaaagcttgaaattgaactcccttacgtgttctttggcttcctttcacaaatctctcgcaaaacgcgatcgtctctcctccttcttcaagccctgaaagaatctccagattctctgcgactttctcggaaaaccaaaaaaaaaaatg

SEQ ID NO: 35405 - DNA, 3003 bp, Unknown
  misc_feature (1)..( 3003): 2750-1469P.txt file - cDNA_ID_3087184; gDNA_ID_2926302; Annot_ID_205752
gtataatgcaaaggataaaataaaagaattgtaaatctggatcacgatcacatgcaatggagcccagcaaacccatcaccgtgttgcttcttcttctgcttctccttgttgtcgttttcgcacatgtttctatggtccggttcctattaagctattataaatcatgatttcaacatcaaacctaattcattatctcatcgactttaaatttcattagtcggtgtgggtgttgccagttttatttggtctatattgtttattggattataatgtccggttttctttagtcaaacatgaacttttttgttgcaaagtttttatttggtatgcttttgttaacatgaacttgtagtccggttttcaatatagttttaaaaggtaattagccaaatagctttatttgattaacgaaaataaaaaatgtcgtgagaactattcttttgcgtttttctcaaatgaaattatatctgatatttaaaagactatataatcaagaatcatttgtttcttttagaaactttcacaatttttcaaaataatgctaattaacaaactgttcataatgtccgtgtcttcccgtattatatattatgtatgtaaacaagatttctcctaattggctttctaaaccttcaattaatacaatactggacaaaacgaaaaagaataccgatcatggctcgtaatctttctaaaatactctgcatgctataattattcttcccataattaatagtaactttataaatgacataatatacaactccttctgtttcattatatttgtagtttaaggaattttgtttttctgcaaaatgttatttttattcatctatgcaaaaattaatatatttaataatttttgaccaattatattttacagtatattttcttattggttgaattaaatgtagttaatgatatttttatagaaaaaaagataaattaaataagatttttgtgttttcttaatctttgtgaaaaaaccttaaactacaaatatagtgaatcagaaggagtactaattaaatagtaagtatagccaattcatttatgataacatttaatttaattatgtactaaaccaatatagttgatatagttgttacttgttagagatattttttccaaataaacataaacgttattagcatagggccccctacttaactatatgcgtttgtcatgcgagatatgaccaaaaaatatggctcacattcgtttggtaagattagcgttagtcagaaaaagcgaaacacaaattaatccaattcactacccgtacatgtataatctgagaaacttgttactattttagatttattgtaattgtatctcatctcatgtatattttgcctaaatactcataaggaataaatagtagatgtgatgtgacgttgttgcttttttgcctcggcccttcttccatgtggagccatttcctaactttaaacttttgtctcttgtttctctcattaaaaatgattcaatattaacaaaatttcttttgcaagttacattttatgatatgaaaataacactaatatcaataagcaaaaatacgttaaagcaaggatattatcaagatatttttttctatagtaattctctaagactataagtctaaacctataaatataacgaaaatgtgtagaataaattatttatttttgtatttaaatggtttcgaaatcttgagaattcactttgtcaagatgaaacatacaaatttaaactaatatttagaaataagttctactttcactttcgagtttctacatttttaacttgcaaactacaaaatttatgaaaattcagtctataataaaattaaatattgaaactctaaaacttgcaacaaaaaaaactctgaactacctcaagattaaaatctaaaataatttatttttaaaaaatatgaaaaattgaaatataagtaacacataattccaaccacaataaaacctctataaattaataatgttgggatgagaaaattaataatttagagaggtattaatttatcgataaattaataattattaatttataaagagattttacaaattttgtattttttttacaaaaatttgatataaaagtagttttttctttaaaattaattatttttctaaaactaattacaaagaaaaaataattattaaatttcaaaaaataatacaaagtttttttcgacgtaataaaaatattagaattaaactctacaaataattaatggaaatcgaagaaaaaataatactaagtcatattttaataaatattgatatatatatatatatatatatatgtgtatatattagtaaatttacataattattaatttataatattgatgagaccatatatttatataagattttcgaaaaagttattatcttattaatttatcgatttgtatcaatttttacactggtcccaactcgggaccggaagaatttattaatttatagatgttactaatttatcgaatattaatttatggaggttatactgtagtattaacaaatcatcaaatacgatttcacacaaaattttgaaaaaaaaacaaaattagtaatctaacaacacaagattataattgcatttccaatacacaaatcaacaactcttcattctcaacaaccattcaatatctaaatcaaaattttctacaaaacccatagaaaagcaatcacttttccaccacaataaaatcgaaaacaaacattttgtatgtatatgtaaaagttaatgcaaacattaatttaaaactatatggaaagctccattaatttatttttaatctcccaactaattcactacaccaattttgtatgagagtaggcgacgaaaccacaagtacctatatcagagaatcagagaccaacgtcacttatttacacactctgttttcttttttttggttgcttcttctctgatctttctttctttttttttttttgaaagaatcaatttccctctcaaatcagaaatctaaaaatg

SEQ ID NO: 35406 - DNA, 3003 bp, Unknown
  misc_feature (1)..( 3003): 2750-1469P.txt file - cDNA_ID_3087192; gDNA_ID_2926302; Annot_ID_205750
tacttttaaatcttcaaactttttatccaaaagttgtgtttgcctcttgaagaaactcctcaattcgcccgcatacttatcgaacgcttcgtctccaacttcaccatcagcaccattgggtccaccttcaccatcagcaccattgggtccaccttcaccatcaccaccacttggtccaccttcaccatcaccaccacttggtccaccttcaccatcaccaccacttggtccaccttcaccatcaccaccactgggtccaccttcaccatcatcagagtgactaattttcctttttttgttttcaacaggatctgacacccgtctttgcctcttcaaaataactatattaaacggttaaatcatgcattactactcttagaggaacctaattctgatataagttatacgatgaaaagatatggttacctctctctccagttgctgagggccggacttgcttcttaggcgcatcatcgcctccaacccacattttttcattccactcctgctcagatttcaacatccttaaaatgttatcaactcttgggtcctctttttctttcctccatacaaaagattttgggcaattactgtctgctgggtccacaatatatgtgatatccacctacatagacgatcattgttaatttcagagtgtatgtacttcatttttttataccaatgtacgtacaacaacaactgcacaaacctgttcagcagactcgcacgccaatatggtggatgtcttgattggacgcaatttggaaaggtttttaatagtcctctctgtaaacacggcggtatctccttcagaaggtaggagactagcaatagacggtatagttgcgaatgcaaggagttggagtccaagtgggaagccatggagtgcataagaatgttgcttgcaaccactccggagttttttaacgtcggtgtctcctttgaaacttgcgatacgctccaaagtaagcagaaatgatgtccttccccagggatatttacagaagaaatcaaggttcttcgtcagctcaactgtcatctcatttggtctcaaaggaggagacttgtcacatattagcacaccatccacaatgataattagggcgagagctaatttcttccatgcaggcatgtcagtttcagaaatcaatctatcccttaattcttcaactgttggcttagctttatcatctccaaacagagtagcccacactgtattttcaccttcctcacgctgcataacactttctacatccttatctttaggataggttccacattccaaaccagttataagtgcccattctcttaatccgagcctaataggatgaccagcgaataccatccacatctcataacgtttatttgtaactaactgacggcatattaatccaagaacaagtttaccagaaaaggatgccttgttagtagggatcctaaagaggtcaccaaatggagaatctagaaggaacgtcatttctggtgtgtccttaagcgcagctgctatttgaccaatgtactccgctctggagtacgcatttatcttcgccttgctagggtagtgatcgagtgcaaacaacctctgtggtaattcacccggatcattagaagtacttcctgaaagttgagcaagacgaagaagttcttaacacgtacactatatccaaataccaactaaacataaactcgattttcatatacacgtacaccgaaaccttttatactcaatcaactgtttttggcggaaaaaaacaaaatccctttgtcaattgaaaatttatgagttgaaatctctaaaattaacctagattttgaatcaatcattctccaaacgaagttagggaaaactaacccagatttgtcgtcgccgccgatgcctcatcaatatccgaaactcctcgccgccgactactcttcctcgtcgccgccattagagctcttctatgaacagttaatcgataaacccaaaaagcgtattattgttccacactttaacacgaaccctatcgaaattttctccactttagcaacgactagaactcgaacagagcctcaatcggaattgtgattcagttttgtcggaatttctctggttcttcgaaaccactcttcgtttcgacggaactgttctgctttctcgaagaagacagtttttgatttattttcagttttaaaattaataattttaaatatttaaattattttgaaaccagaaaacggttaaggaaactgaaccggttccacgaaacgaaaccgcctccgtcagtttctcgttggagggcaaattcggccattttgggcctaatggctaaaacgtggttgacccagcccactttgcctatttgtgaaagaaaaagtcacaagggtgttataacgtgaaattttcttttgtttatataatgctttgtgaaccctaatccctttatgattttgttttgtttatttccttttttccagatttaccgaagattcggattaagattatttttggttagatttatcttttcttattcttattaattaatttaatataaacaattatcctatttttcaccactgatttaaacaaaaataaaaaaaaatactttcaactgaaaaattgtattattttctaaaatattgaaatttacactacaataaagagcaagtacgtttaaatacatacaaactagaatatcaacaaagaatttaatatttgatcaatatatttgcaagttaattttgaaaaatatcacattgaaatatatatatatatatatatatatatatatatatatataaataaataaatggcgagtttatatagtaaacatgagtgtaagggaaatatatgaaaattggtttcatggatttctttgaaagaaaaaaaaaaattgagaattacataaatcttgctaaccaaatattattttttttaacaaaaagagtatttaaactttaactttgaacaaaccctagctccccggaaaataagccgtcgccgttttcatcttcttctccatg

SEQ ID NO: 35407 - DNA, 3003 bp, Unknown
  misc_feature (1)..( 3003): 2750-1469P.txt file - cDNA_ID_3087203; gDNA_ID_2926302; Annot_ID_205747
gcaacgccctgcggataacgatcgttatgtgaagaactgtaagaatgggaggtctcctaaggagacgaggtggtggttccatgacgacaaggtttgatgcacgaccaagattaaagagaagccttaatatgttaatgatgacatttaaaaatgtcaaaacctaactttttgtctcactcttactatggaatatgtcaagtgaagagctctgaattacataagagaacactgagagcgggaatctatatttcgtactgaacatgtccacaaaaagatcaattaatgctaaacaataagttgtcattaatgccaatagttattacacaaatgtttttttcatccaaatgtctctaaaaatgtatatatacatttattaggatttttgattttctgatttgggtctgtctattcaataaatttcctctctggtggagaggtgactgtcaccaacttcttccctaagcctaagggaaagatttgttagagttgagccgaatatttctctctcgccaaatatggtaaactgaggcttggtacgctaatttgagaatgaaagccacctttttatcccggcaaggatgtctaagccatcttgcactatctttaaacatccttggaggggtaacacgtgcgttagagcagaaaaacgaccatacctcgtgcgagaaaggacaatcaaagaacacatgctgccttgtctcatcaagcgcattgcagagcaggcaaagtgaagggacctgaatcccccaactaataaacctatcacaaatatgcaaacgatttctattggccacccaaacaatgaaagcatgaggggaaatatttcaagagaaccacacctaatcataccagtccactttaggaccagtagggtggagatggtgccaagtatcacaggaccaaaagttgtttaaaattgatcacctctaaaactcaattgatggagtttcaagatattttcaaaattgatcacctctaaatattctcaccaatctacttcaataaaaaaatatttattaaaataacaatgggaagaaactccatatacagttacatcgatgaaaaatcagaactaacaaataaacaaaactatgaaaaaaaataagaaagaagagacttttaactagtaattagttagcaaatcttaaaccaatcgaaaacgaaagtagcatatggttgagtagatgacacagacgcttagtggtgtcttaaaatgtctaaccaccttgtgagacgctctaaaggtgacaactttggaacattgagtgttgttccgaccacgacttggagcttaagaccagccccacagtgacccggttctgagctaatgaaataatggattcctggtttggtgagcttgatgatatcgtggcctgtcttatgcacggctattggagaagtcgggtcgcagtttaagaattcaaggtcaccgctgatctcgtagacaccgttgacttcattgttgtattcgaaaaggagaccgtctccgacattgaactgtttctctttactccagttgtaatagaaatcactgtcgtaaacgccccaacttttggagtcaccaaccttgtagacatgtctagaaggaataatcttgctcggtagtggtagaggactcggactcgacgggtcatggacgacaaaaacgccaagcctctgtcccgatgtacattgagtatggtttgaggtgatgaagtagtaagaccctggttccgtgaaggttacgacatcatgtcctgtgttgtagacggctttaggaaaagaagagtcgcagaattcgtattccaaaccaccggagacttgtgtgacgtcattgaggttgtgatcgtattcgaagatcaaagaatctcccacgtggatctctttatcctcggtccaatggtaatagaggtggtccttggcagtccatccatcggagtctcccactttgtagacggtggccgaacaacaaccgaagagaagtgtaaatatcacaatcacgaagctgaagatcttcttcattcttgctgtggccatgattcgttggtatacacaaaacaaaaaggaaggaagaaagatgaacaaaagctgagaggcgaagaagaaaaaggttatgagatattgaagaggctgaatcaaagagagagagagttgtgttgttgttgaacgatataatgagttgtgaagagatgacctaacctatcattgtttatagggtaaattgcacacagtagccattgatccacttttaatttcagattttgacaaagtgggcagggcctttcagctattagccattaagccaaaaactgaccaaaatgcccctgacgacctgacgaaactgaacccggtttgtacgtacggaccgcgtcgttggaatccaaaagaaccgggttcgtacgtacgctgttcatcgacgagaaatgcattaaatgatttctgggtttcggcgaagttgacacttgagattggaataaaaaaaatttaaaattcgttgggctcagaagtttttaatgctaaatagttttgacaagactaaaactcatgattacctattataatagagattatattgtaagatattttgataatttagattagaattctgggtaaaaaacgtaaatcgaaattctgttaaggtgaagaaacgaaaatcgaaattgtgttacggtgaagaatctgaagttttcagttgctgttttacaaagtttgaaggattgaaggggagacaatctgtgttctgggtaagaaattcgtgttaatcctaattacacttgagaacgtgatttgaatgatacgtttttaaaaatttctgggttcatacattgttttgttggagattctatttgtatttgtagatataaatgaaagctctatgttttgtttagttaaatttataagtacataaattgttttgttaagattctttttgtcttcgttgacataaatgaaatccttcaaaaaagatctgatttttttttatttaatgttggtctgacctgagaaatttatgttgcaggtatg

SEQ ID NO: 35408 - DNA, 3003 bp, Unknown
  misc_feature (1)..( 3003): 2750-1469P.txt file - cDNA_ID_3087210; gDNA_ID_2926302; Annot_ID_205745
catcagttatcctgagtattgcaagagctgctggcagatcctcatcttggtagctgttgttgaaccgatgccaacacttcaaagcatgatgaccaggtttgccacagatctgacaaatgactctttctccatttgagttttgtgaaatttgttgatgaaaacctctaccacgtgtggagaatgaatctttgctttttccactcccaaatctttagttgccttttcctcggttgttgttgttgttgtagtaaccagaggagtctgatcttgaagcattgaaagccatgtgaggtgaagtttcagtatcaggaccatagctgttcagcctatcagcaaatcctgtcagccttgaaatcacactctcaaaggtaggtggtggctgagtatccattgaaccttctacagatgttttgataggctcatactctctacctaacccatgaagtgcagcaaatatcttcatctgttcactaacaggactgcctatggaagctagctgttcacaaaccctctttatctccttaaggtaagtttccatggatttatcctgtttatctatggtttgaagctttctctgtagctcaaagagtcgtgatgaagataccttattgcagtgttgagccaaagcattccagacttgataggaggtggcacagttgacaacttcctgcatgatgtcttcattcagagatcccaacagccaggctcggactacttggtcagatctgttccaggtatgatactctggatttggtacctcaatagtaagaccatcgatgttgttgaatggagttgttgcaggaggaggcttgagtgacccattgacaaagcctagaaggttttggccagaaagaaaggactcaaactgtgtcttcttaagagagtagttttgctcattgagcttaacagtgacacagttggagatgtgaagaacaggaggtgagtagagttggatagattgatccatcatagaccgctgtgctctgataccatgaaagtaagagcaagacggctactttaggtaatgtttgagtgactttccttttgatattatttcacttgagttctaggttacatcacaagttcccttttatagctaaacaatgctagggtttcaatcattgtgaactgacagatgtctcaatcttgttatgctacgcaggtcatcaagcaatcaaatctgttttctgtgatgattggagccgtacaacaagcgctcctcttctctgtcattattctggctttgttctcttgcacaggtggacttagccgttgagaagatgaagaagacttgttgggcttctcagacttgctaggcttctcattttagttgacattaggcttgttaggtgagtggcccaatatccctttctctttgcttactgcaacgacatcgtcttgactccttaactcttcagctacatctgagttcttcttcgatcttgtttcagattcaggagctgaaggcggagcagtagagctcttgctaatactttgctcacaaacacgtatgatcatgtaacagtctccatcctacctttgtcacaagcgatgtgttcaaatcctttccagaccaccctctgtccgtggacgacaaaccctatcccaagcaaccaaatgttgttttctcttttctggtgtacttccccataaaaagcctcttgaaactttatccaaaccatcgccaatcgattttggtaaagatattgtgctcatggtatgaatcaatatagatgccaacactgatttggtcaatgttagtcttcttgcaaactcaaagagcagcctttccatcccggtagctttgatgacactttttcgaacaaaatagtattagcgcggagaagatgagaattctttaaggatacttttgggatggttgtatggaaacttgggctgtatggaaaaaatggcggaaagcacttggtcgaccaatgtttgccatgggagtttggtggagcttgaaatagaggtgtggttatgtgtttggcgaattggaaaaatgtcgggaaagagtaaagtttaccagagaattgggacaagaagtaagccgtgcacataactcacttcgggagagtataggtacgggtgtgagagttgagcgaatggtaacgtggagaccaccgcgggacgagtagttaaagctagatacgactggtcctttcacaagaatccagttttgactacagcggggggactcatacgggatgcaacaggtagttggtgtggaggatttgctctcaatatcggtgtttgttcagctcctttagcggaactgtggggagtttactatggactttacctaacttgggagagacatatcacaagattagaggtcgaggttgattcggagttggtggttggattcttaagcaaggggattagtgattctcatcccttgtctttcgtggtacatatgtgtcatgactttttatctaggaactagatagtctggacttcacatgtatatagggaggctaaccgcctagcggatgagttagaaaactatgcttttactttaccattaacctttcatatgttaaaggttgttccacatgttgagacgatttttcaggatgatgaccgcgaaattgcgtttctgaggcatgtccgtctttagttttttttgttttttggggggggggggcggaagttgttctcccgggttgcacagaaattagcgagtaacaccttaaacacataaaacgacaccaaacccgagcacattatctatgaaatataccaagccaagttagaagaagagaaacactttgaggattatagtgatgcttccttgatagcaggtcaagtcggcatctaatagagttattaatatcctgaattagagctgagcttggcctcgaaaagttattgtgaggtctagagattctttccctccaaatgagataaatagacgcttgaaaagccaacttaagaatcaaagcaatgttcttcttcctgctaggatttttaagcatctgactcctgcatcaaacaaagatg

SEQ ID NO: 35409 - DNA, 3003 bp, Unknown
  misc_feature (1)..( 3003): 2750-1469P.txt file - cDNA_ID_3087225; gDNA_ID_2926302; Annot_ID_205740
actaaatcaatttaccttttaaataattgtattcaataaacgacaatagttaggaaaaaaacttaattttgagatcaatctaaacagttcagtgcaatgtgaattgaagctataattcagtgaagtttggtttaattatctacaaagagcaattcttaattgcgttgtattagtttcaagagcattccatttgaaagattattatggtcatcttttcacatgcataaagtcataaactaatgaaaatttcttagcagtcaaagaaacaattatgcatgtgcaagtgaaataaatgtcttaactaaaacaaattggtagatgattgtaactttgttttatcttttcttgtttatagatagtttttgtttgtatctttctgaaaatagtataaagactaaagttgtatttaatgtatggtcttagagccatgagggtggagagagagaagtagattttgacaaattaaataaatatatatatatatatatatatatatatatataaatttggatttgtccaatataatacagatcaaaataattaaaaaaaaaaaaatctttgatccttgcaaatgaaagttttgcaatatgtttagtttaaaaactatttaacctgttaaaaactaattctctttttctttctttttcaattagaaataaactcattaaatccaagaaaaaaattatttttgtaatttttgaattgttcaataagaatccaaattttaggcgctaaaatcaacattgaatcttaaaggtgtgattggtgggaagtgagaactaaaaaaaaaatagaaaatgaaaaactgaaaaagttaagaaaaaaatagaaaagtggtccaaaaatttcaactaataaaagatagaaagaaaaattgtcttactttatcctttttaagagaaatttagcttgaatacttgttttccatgtactttaaatggctaaaaatgaatttggtagaaattggtttcatccattttagtttaggctaacaacaatgcaatatattctcaaccttaatctcttgcgtgtgaggacaatatattttagtttacgctaacaacaagacaatatattctcaaccttaatctctcgtgtgtgaagacaagacatagccattattattctagtactaaataagacaatatatgcctaataaatagaaaacccgtaggtgttttttggagtaaaaaaacattaagtgaaatttgtaaaactaaccaacaaataaattataattaagaaacaaaagaggtatgatattctgtgtataaactacaatataaactaaaatacccttattttttcttgttttttagtcattactctagtacactataattaccatcaccaccatgcgctgcaaccatcaccatcatcgcaattcgcaaccaccatcgccatgtcgtcaccagcactaccactgcaactgtcgccaccataccaacaaccatagcgctgtcactactacaaccatcaccatcatcaccaccgaaactgctacaccaccgcaaccaccttaatcacgatcattattaccatattgctactaccccgaccaccgtaaccatcaccaccgcaatcaccatcaccactatcaaaacaaccagcacgtcgttaccactaccaccaccatcgtcagtccgtcaccaccactatcaccaatttttgaatagttaataactttttcttttttttttatctagaacactttgtcctatactatttattctattctatataccgtttttcatttgaaaatatacatcattttcaatttttgagtttatacaagttttacacatataattatggtttgggtataagtttttttggtttagcatttagtatattaaattaaaattgatttatgaatgagttatgaaaaatagtacaatatattcttgttctattcctatacatcctaaatagtacaacatatttttacttacacatactattcaccatttcacaaatttacatctaattttaaaattttaaactatgcaatatgtagaaaaatatggtttttgtgcaaaaaatcctacaatacaatttttttttaacccttcaattaaaaaaaaatgcaggtcaatactaccaacttgaaaagtgagccgcaatataaactacgtcgttttggatattttaaaataaaaaggaatgtttcaagagtgttttgaactcaggacctctagaagatataaaaccttacctaaccaattgtgccacataaaatttataaactcttaacaataaataaatatatatatatatatatatatatagacagcctttatgttcaacctgaccaatgcaaccaacgatctcatcagaatcacgcccctacatatcgcatgattcaattttgtaggctctacaaccttccattgagatggcaaaccgccattggttgtttaaaatcttatgtagacgctctagaagaaaatagtctcgacttttttttttttttaaaagagcagttatgtatttgagaatgtgccggagaaaaaaaacaatactattatatatcagaattgaataatacatatgataaatcatatatataatggataaggctaatgtgagtgtataagtctccaatgcttcaagctgattgtaccaccaaatctttttcaaaaaactaaaaattaaaaattaaaaataattaaaattttcaaaaaatcagaatttaggcagaacaaattgcaataaagtttttatttcttgtttctacaaattaaaatatttctggacgtattttttaatcttaagaagataggtttctttaattaattttttattctttattttaatttttggaattgaacagaagctgatgaagtgaatgataacggatccacccagccggacccaaatagccccaaaagcccttaattcatagctaacttaacccattcctcaagaaaacaaaattactttaaaacagaaaaaaagttgataaattgcttcagtgtcaaattctgagatctgtaaaagatg

SEQ ID NO: 35410 - DNA, 3003 bp, Unknown
  misc_feature (1)..( 3003): 2750-1469P.txt file - cDNA_ID_3087245; gDNA_ID_2936551; Annot_ID_194061
tgcaactaatgatagttacttttctgaaggaaatggtgctgacgatataagtttttgtaaccagggtgagtatccatgaagccatggaacaacagagtattagtatatcgaaggcaggaatagttacttctcttcaagctcgttgctctgttattgctgcagctaatccagttggtggaaggtaagctagaaactaatgcccttcattgacctaaaatttgtaattttgatcttgctaatttgtttgtgacattgcaacttcaggtatgattcatcgaaatcatttgcacaaaatgtcgagttgacagatccgatcctttctcgttttgatatcttgtgtgttgtcaaggtattttttcaaacctctgctcttgttcttgcatatcattgattgtattaattttttggctattgaccaattatatggctgcaggatgtggttgacccagttacagatgaaatgctagctgaatttgttgtcaatagccacttcaagtcacaacccaaaggtggtaagatggaagatagcgatcccgaagatggcattcagggatctagcgggtcaactgatccggaggtttgtgattttcatgtgtagctgcttctttgaagtttccatgtttacaggtcttgatctatatgttattttctatacaggtccttcctcagaacctgctgaagaaatacttaacatactcgaagttgtatgtattcccaaaactgggtgaactagatgccaagaagttagagactgtttatgctaatctaagacgagaatcaatggtaggtttgaattcatgattttgagtgtactgatgggttaccatctttcctaaacatcatgtggcttaatctcctgacctgcttaaacttttgtttcagaacggacaaggagtttctatagcgacaaggcaccttgagtccatgatccgaatgtctgaagcacatgctaggatgcaccttaggcaatatgtcacagaagaggatgttaatatggccattcgagtcctacttgactctttcatatcaacccagaaatttggtgtccagagaactctaagagaggtattaaagaacatttgagtcagttgttttgtgagcttgtatctatggaattctgatgtctgaattgatgaaaactcggttattcctgtgcagagtttcaaacggtacattacatacaaaaaggacttcaactcattgctgctcgttcttctcaaagagctcgtaaagaacgccttgaagtttgaagaaatcatttcaggatcgaactcaggactacctacaatcgaggttaagatagaggaactgcagacaaaggtaagttatcatatggttaggctaaatttagaagtatgattcttaatacctttttaacaactcttatgtcttacatttgcaggccaaggaatacgacattgcagatctacgacccttcttttcaagcacagatttttccaaagctcacttcgagttggatcatggccgaggaatgatcaagtgtccaaaaaggctgatcacttggtaaaacaagaagacgagcttcaagttactatcaacttaggtttatttatcattgcatgaaaaaaatgttggatatttaggaagatagtttcgttttgtgttaagattattaaagagctgctcaaagatttgctgttaggattatgcaatactcatcttaagatattaacgaagcattcctcttcctcaatactttgaccgttgaatctgagtaaaactcaggtggcgatttttcaatcggtatgtgagaaagaatttcggatgctagcttttgataccgcaagttgttaccaatcaaagtggcagtgtgaaaaacaatggaaaaatgtcattaaaatccttctcttatgttgacttttcaaaaaataaccaacttttgttgacatgaccatattgagcattctgttatgtagattaatagattccgataaatgagagtaattttttgttaacagtgacacctgttaattcaaaacgttatcattttcaacaacagaacgacgtcgttttgttgtaatgactgaactaaaatcccaaatttaatatacgattcctaaatcgagcaaaatccctaatcctaaatccccatacgatttgaaatccttatcccaaagttaatatacgattcctaaatcgaacaaaattcctaatcctaaatctccatacgatttgaaactaaggatttcattgagccgttatgacaaacgatgacgttttattgttagagggaacgttgtcattttcaaataacgagtctattaacacacaataaatttatgataacatggtctaacctacttaatgttatgcctgatatgaccaggtcaacgaaaatttggtatttatttaaaaaatcaacaaaaattgaatatttatttggaaaataatcctaagtttgatatttatttcgtttcgagaattgaagatttaaatcaacgttttcaataggtcgaagattttagtgacatttttctcgaaaaacaatgtaatacttgttgatctggctttatcatcaccattgtactaagtattctaacatttgaaagttaatgaaaaatatttggatacataagaactacatgccgtttttactttgacaatgtgaactccttgctgtttaaaataccaaggcacatttgtcgactgattcgtgtgttcgtcgagatttttttttgtttattgcaattcggagaagtttgggtcgttaaagttcgagtagggttcataaatatagtgaaaaccaccgtttggtgatacttcgtcgtcctcgacactctcagattcatcatcgaacctggtatgagctctctttcgtctttggtgctctactagttagggtttcgccattactatctccatcctctgttcccagagttagaatttttcttctgaaaacgcgaattaagctcgacgttgaaatgttttgctcttcagattaagacgcgaatttgagaggaagctttattttgtgtgtagatg

SEQ ID NO: 35411 - DNA, 1891 bp, Unknown
  misc_feature (1)..( 1891): 2750-1469P.txt file - cDNA_ID_3087245; gDNA_ID_2926302; Annot_ID_205731
gaattctgatgtctgaattgatgaaaactcggttattcctgtgcagagtttcaaacggtacattacatacaaaaaggacttcaactcattgctgctcgttcttctcaaagagctcgtaaagaacgccttgaagtttgaagaaatcatttcaggatcgaactcaggactacctacaatcgaggttaagatagaggaactgcagacaaaggtaagttatcatatggttaggctaaatttagaagtatgattcttaatacctttttaacaactcttatgtcttacatttgcaggccaaggaatacgacattgcagatctacgacccttcttttcaagcacagatttttccaaagctcacttcgagttggatcatggccgaggaatgatcaagtgtccaaaaaggctgatcacttggtaaaacaagaagacgagcttcaagttactatcaacttaggtttatttatcattgcatgaaaaaaatgttggatatttaggaagatagtttcgttttgtgttaagattattaaagagctgctcaaagatttgctgttaggattatgcaatactcatcttaagatattaacgaagcattcctcttcctcaatactttgaccgttgaatctgagtaaaactcaggtggcgatttttcaatcggtatgtgagaaagaatttcggatgctagcttttgataccgcaagttgttaccaatcaaagtggcagtgtgaaaaacaatggaaaaatgtcattaaaatccttctcttatgttgacttttcaaaaaataaccaacttttgttgacatgaccatattgagcattctgttatgtagattaatagattccgataaatgagagtaattttttgttaacagtgacacctgttaattcaaaacgttatcattttcaacaacagaacgacgtcgttttgttgtaatgactgaactaaaatcccaaatttaatatacgattcctaaatcgagcaaaatccctaatcctaaatccccatacgatttgaaatccttatcccaaagttaatatacgattcctaaatcgaacaaaattcctaatcctaaatctccatacgatttgaaactaaggatttcattgagccgttatgacaaacgatgacgttttattgttagagggaacgttgtcattttcaaataacgagtctattaacacacaataaatttatgataacatggtctaacctacttaatgttatgcctgatatgaccaggtcaacgaaaatttggtatttatttaaaaaatcaacaaaaattgaatatttatttggaaaataatcctaagtttgatatttatttcgtttcgagaattgaagatttaaatcaacgttttcaataggtcgaagattttagtgacatttttctcgaaaaacaatgtaatacttgttgatctggctttatcatcaccattgtactaagtattctaacatttgaaagttaatgaaaaatatttggatacataagaactacatgccgtttttactttgacaatgtgaactccttgctgtttaaaataccaaggcacatttgtcgactgattcgtgtgttcgtcgagatttttttttgtttattgcaattcggagaagtttgggtcgttaaagttcgagtagggttcataaatatagtgaaaaccaccgtttggtgatacttcgtcgtcctcgacactctcagattcatcatcgaacctggtatgagctctctttcgtctttggtgctctactagttagggtttcgccattactatctccatcctctgttcccagagttagaatttttcttctgaaaacgcgaattaagctcgacgttgaaatgttttgctcttcagattaagacgcgaatttgagaggaagctttattttgtgtgtagatg

SEQ ID NO: 35412 - DNA, 3003 bp, Unknown
  misc_feature (1)..( 3003): 2750-1469P.txt file - cDNA_ID_3087254; gDNA_ID_2926303; Annot_ID_205798
aaaggcgcttccaacttctacatttagaaagcatgttcaaagtattggaatgcttcatctacgagacctgtgaagtctcttcgagggggagctcacgtcactgtactctttttcccttgtcatggtttctatcccaatgggttttccatgataaggtttttaacgaggcagtacgtaactcatcaaaagtgatggatactcaagggggagtattataaaccggataagtatggatgtgattatccatcactcatctctatccataagatatggatgatgtttatccattacttcctccctaagatatgaatgatgtttatccattactttatccctaagatatggatgatgtttatcaattacttcttctctaaataatttacttcctagctaagtaagctctactatatatagctcatttcattcatttgtaagttatagagaaaacagaaaaaaaaaaggagaaagagaaagcaataaaaaaactcttgtttcgagttttattctctctagtatttattcttctttcttattttaatcttttataacaatccgatttttatagacaaattacttattttgttcttataaccatgatatcaggtatgcgccgcaataaacaaaaaatacctaatctactatttttcttcaattgaaacgtaggctaatttttgaaatgagaaattattattcaaaataacctcttttctaagttgaatttgtcaacattcactgtgtctcaagctacacatcacgaatatataaactgtaatagcatggtaaaaagataatcaaatatataacgtacgagatgttgttgtagcgagcgattacaataaatatatggattagttagacttagataaataataaaattttggttcaaatttgaccaaaaaagaagagagtagtaaatttgtaattaagcgagataattttattgcgagtgatatatatatattgtgttatatttggagataaaatgtactattgaaatatatagagttgtaaaatataatgtcatcgaataaaaacaactttgttttgacgggctataaacgacactgttttgataaaaaagaataagcacaaattatatttctttttttttgttaaagggttaagcaaaaaatatatttctctaaaataaaaattcgtaaatttgaagatagagtgtttaaagcttacatattgtgttatttcatgtgaatatattagtttgatatatcaatacatttaggttacaactacaaataaaaggaaatcgtaagaggattgcaacgaaagacaaaagatttcagatacaagaaaagagaaaattagaatgagaatatatatcgacacaaaagataagcaaaccctttaaacgtagcagagtcttttaattattttccagatatgatttcaccaaaccaagtcctcttgcttcttttgacttcaaccgacgttaatcactgaacgaatattaaaccaactaaaccaagtcgacatcacggtaaaccagtaaaattggatcactccattaacaatacctataaatattactatgtgtttagacagatttgattctggttagttgcccttcacggagtagaaattaagtcaccgttattttaataacaatgcagatatgtatttaacctatgtagaaagcacatgctcaaattcacgagactcaaaccatttaaatccaccgactagtaactaatgctctcaactttaaaaaataattttcacagaataataaacgaaattttttggtcttgactttaatttatagaatatttttaaataaatagatcaagtaacacgaggacgtcaaacaaaacaagcctacatatgaagaaataaaagcagccaacgaaaccacatgggaaacagatccacccggaagctcaccaatttccaccgacactaattttttcttaaaataaaacagattgtttaagattagatttggcaaatataaattgctaagaaagttttagccgtaagaaatatcgacagaaaattcgtacatatacttttttgttagaaaatacgtacataatcaaaaaggtaaaattacaaaaataataaatttactacgatgtttaatatgaaacagatgaaataagtgatagtaattatatactttttatttttttattctcttaactcttttgtttctgattagtaacaaaatttatttcatatcaattatgtaaataatatttttcaaaattggcttttttaagctgtaaataaaacctgattacaataaaaaaagattagtaagaaaattaacactgtttaattttatttttttgggtgattaatgttggaaaagtttttatacttttgataataatgttgtagccatttgtcctttctttttactcttagacacccttgtagcattaataacagtccgtgtttataatgaaaaacatcaataattttaatttgtaatttaaagttcaaaccacttacctactcaaattgctcactaactataagatgaaaaggaaatttattcaaatcaagaaaacacgtagaacagggtaacaaagtttgatttcctaattataagatgaaagaaagtttggtaatacaaaaaaactgctaaattacaaaaattaaataccaaaaatctgaacgatggttgtgaaaacagtcaatgcggttttacgacgaaattaactaatattacttcgattaattagattattttcttgaaaaaataagaattcaaattattcttcacaatttaagtcaacgcagtaatttttttttaacttgtatcaatgtatttaaatactcaaatatttatactactattttttttttgttggggccaagtctatgaactccactcgtctctccctcgacgcacttaaatttacataactaagtgtgtgtctattcatatcactcactctctctcttcctcacacttacattctccctctatttttttttctctctctccacaagaaacgccgtcgttcattaaaaatgatg

SEQ ID NO: 35413 - DNA, 3003 bp, Unknown
  misc_feature (1)..( 3003): 2750-1469P.txt file - cDNA_ID_3087301; gDNA_ID_2926303; Annot_ID_205784
cactattattcagcagccgtttttcattcctgcaactttgtatttcgatttttcttctaagttattcagattttgctttcatttgcttgttcatctttgtttcattccctttaatatttttagtatgcaatcttcaatcgtttctatgttattgtctttaagcatgttgtctgagtagtgattaagatttctgaggatgggatagagtagttgtggaacccctcgtcgaatctgttggttaagtgtatatttattgaatcccttctggattaattgtgtttactgcttattcctttctgatcaacaggaatccgatcccagacgttccagcactcagaaggcgtttaatggaacgttggatctactaattccagtgataatcgtctctatcccaagggattggccgtttagagcggttattggctttaacagtcgattcttattgtctgcttagttagagatcgctaatggaaattaggtcagtgtctagctatgcttgaggatttatatcacgggagtgaattaatctgttgttgaacctgttgtctagggatagcttaattgagatttgttaaccaactgaattgattacggagaccacactattcgataaccccatccttaggagtttctcatccatatgatttctctgtttacttacctgcttcattcacttgccattgaattttagtatttttctgttttcaaccattctactcgatcacaccagtctactaacagtgagactgcgtgatagagtaaagtggtctatttctgcattttcactctttgtcatcctgttgtactcgatcacagggtcccttctggcagtcgatcctgcgatcgagtatatcagtcatttctgtgactttttactgttttctgcatcaacactaggactgttagaaaaccaaccaaattctgcttggcttgacttagcaacttctgatcatatctcatatgtctgcatcacacccatttggattgacacctaaaatattacaacgacaggattagtgttttaggattaattgatctcaaaaacctattatcaactcttatcgccaagcttcatgagtttggtggcaaaagacacattcgttatagagatctcgcaggcttcatctatggtaaattctccatcactctctcgcaatatcaaaaaacacacttaactagaattgtatttgcttgattgattcaggtaaaaagatgtatcgtgttacatggggattgcaatatgtctatcttttcatgattaattgtgccttcatcttacttgctggttcgaccttaaaggtacaacaaccgaaacaaaccgttttgttgcgaaaatccgaaaattagctcatatggctctgcttttgcattgtgtgcaggctgtttatgtactttttagagataattgtctcatgaaactgcctcactttatcgccatcgcgggtgttgtatgtgcgattttggccatcggtattcctcatttatcagctcttggaatctggctaggagtttcaacaatccttagcataatctacattattgttgcaatagttctagcagctaaagatggtaaactttcatgttaaatcaaacctcgaaaatgatttcaaataaccacaaaaaaactactcgccattttgtttttggttcaataggagtaaacaagcctgaaagagattacaacatacaaggatcatcaataaacaaactcttaaccataacaggagcagtttgcattcaacacgggaatgctaccggaaatacaggcaagtctcatcgatctatttatggtcaatcaaatatttctctgttttgtgacttacactaatcttttgtgcaaatgattaggcgacagtgaagcaaccggtcgttaaaaacatgatgaaagctctgtattttcagttcactgttggtgttttaccgatgtatgcggttacattcatcggatattgggcttacgggtcctcgacatcgacttatctgtttaatagcgtcagtggacctctttgggtcaaagcactcgctaatatttcagcttttctccaatctgttatctctttacatgtaagtctctatctagacctcaatgatgagtctttgtgtcttaatcctaaccttaaccgtttaaattcttgtgtttttcttacgtaaatttttgcaagtccgacttatgagtatatggacacaaagtatggagtcaaatgaagaccattaggaataaaaaatctgttgtttagaacagtagcaagaggaagctacatcgcggtgagcactcttctctcggctcttttaccgtttctcggagatttcatgagcctcactggagcaataagcacgttccctctcacattcatattagcgaatcacatgtatcttgttgctatgaacgataagcttagtcttgtgcaaaagctttggcattggcttaatgtttgcttctttggattaatgtctcttgctgctgctattgctgctgttagactcatctctgtggactcccaagaacttccatgtttttgctgatgtttgattaaaatgtcttcgacattgttaacgatgtaaaaattataccaagaagaaaaaaattgtaatccttttgttgttacttttattatttcaaatgacataaattttttataacattatatataaaaatttttctgttcaacacaaatttttacttttaacaaaacaattcaagagacaaatagaagaaacaaagtaaagtgaagtcatattcttaagcaaagccatattgattaagaaaataaataatcattttcttatgcaaagccatatttgggccaagccgtattaaagtttgggccaacttgtttgagatagccacatataagcccaatagagttttgttgctgagcttatttatgaatccatataaagtcttgacctaatagcgaaaactagggtttttctctgtgaattcgctcggcggcataaaagagagtaagaagaggaagacgagagttacaaggattgaaaatg

SEQ ID NO: 35414 - DNA, 3003 bp, Unknown
  misc_feature (1)..( 3003): 2750-1469P.txt file - cDNA_ID_3087303; gDNA_ID_2926303; Annot_ID_205783
tgaaatatatgcatttgtcacattcattaatggtaaaaccattagacatcataacactgtcaaacttctcatgccactacttaggagcctgtttgagtccgtatagtgacttcacaagtttatacattttgtgttcttgtcttaggataacaaacccttcatgttgtttcatgtagatttcctcttccaaactccatttaagaaagctgtttttacatccatttgatgtatttcaagatctcgtaaggttgcaatgcttatgagcatcctgattaaagttaatctcgttactggagaatatgtattcaaagaaatctaaaccttttttttgtcgaaatccttgtatcacaagcctagccttgtacctatcaatatcaccattcgtttccttttaatagtaaaaatccatttactccccaatggtttagaaccttggggtagatctgctatctcgtaagtatgatgttgcaagatagagtctatctcaatattgactacttccttccaataagatgcatcagggatagacatggcttctgaataagttcttggtatgttttcagctaaaaacaccatcaagaaatcatcaccgaaagatttctctttgcgagctcttttgctccgcctaggttgttcttcaggttcctttactgtttcttcaacagtaatagtacccaaactattttcctcagcctccgaggttgttgaatctcgttgttcacgagtttgttttttgagttctcctacaaggaaaaatatcttcaaagaacgatgcatttcttgattccataaatgtattttcatggatatctggaatattcgattttttaacaagaaatcgataagcactgctgttgtgcgcatatccgatgaagatacaatctacggtcttaggcccaattgtgacctctttgggaggtggtacatccacttttgctagacacccccacacttttaggtatttgtacgagggtactgtacctttccaaagttcatgtggtgcctttgcagtcaccttatgtggtatcctgttgaggatgtagttagtggtaagcaaaacttcccccacatgttttgggctaacccaagttcatgcaacagtgcattcatcatttctttcagagtttgattctttcgttccgcaactccgttagattctggtgaatacggagcagttgttttgtgtataatgtctttttctctacaaaatacattgaatggctcattatattctcctcctctatcacttcaaactatttcagtagttctctgaagttggttttctacttcgagtgtaaattctttgaattttaccaaagcttcatctttgttatgcaatagatatacataacaatatcttgtgcaatcatctaggaaggtaacaaagtatttcttaccgcctctagtttgcacatattttaaatcacataagtctgtgtgaattaaacctagaggttcagttgttctttcaactcgtggtgacggagtttttgtgagttttgcccgtacgcatacttcacatttttcttggttagttttgaatatcggaattaaattcatgttttgcatttttctcattgttttataattgacatgtcctaaacgttcatgccaagtagtaaactcaacaaagtaagcaataggattttcatttatttcaacaacataagctacagttttaggaaagactgtcattacagacattttgaccagtccacccttaacaaaaccctttctcagatacaccccatgtttctaaagaactagcttatcagactcaaagttaactgcacatttttaatcctctaaaaattaattaagtaagaaaaaattttagtactatttgtgtcaatcccctagataaaaatgagagcaaacactaatttaatattaaattgaatcaatttttgaaaatatagtggaaatatataccctaaattggaaataaagaactcaaatataatactacaaactaattttaaaataaaaaaatttcttttaaatagtgaaaatatataccctaaattggaaatagaaaacccaaatataataccataaactaatattaaaaaaaatcgaaatttcttttaaatgattgaaatatataccctaaattggaaatagagaacacaaatttaatattttaaatttattttaaaattattttggttgaaaatattttatataaaattatgatattattgaaaaaataaattagtgataatacttttaggaaaaaaacttcataataaatcaaataatgctatttttggaagtttatggagggtgtgctattattgtccataaaacttgatttagtgctatttttaggaatttatattttttgtttgttgctgctcgtttttggtgaatctacttgtcgtttattgcataatctcgagctgtttctagaagaaaactcttctattattggggaatttatgccccttttcgtcattaaagttttcttaagaaataatacacagaccgggaattgaaagggtcgtttagctttttgtcttctttgttagtttcaatgatactctgttacttgcttttacccgacaagctgttgatgcatgtttcagctgctaaaatatgaagcatcaagggactaaaatgatgttactttccaaaacatgttgtctttgatgattttggcggtgccctatagtggaaactggaaactgttgtctttgatgattcaagaatgtgaactttcaataagtttcttgatcagtttttgtcttccgcaaatttttagctatgaaaactctatttttcttttgttttatattactctgaatttacattgggatgaaaaatgagtggctgaggaatatagaaatagttgacaaaggatatatatactctattcagtgttgcatgtgtgtgaaagcttaagtgttgaagaacttgtacaattcatggtttcaggtagcatttgttataacaaccggtataaacagtgcctatgtgttgggatattccaagacagtcatg

SEQ ID NO: 35415 - DNA, 3003 bp, Unknown
  misc_feature (1)..( 3003): 2750-1469P.txt file - cDNA_ID_3087382; gDNA_ID_2926304; Annot_ID_205815
taaccgtatggagatttatgttttagctttatctcagcatcgtggagttaaagaagttactgaatggatgtcaaaggtgtgacttttttctactatagtgttcttcttgtggtactttggtgggtgactaatgctttagaacatgttaagagtggtcttgtatttatatgtttaattctgtggtgtctactacagattgatcataccatatgcagagaatctatatataatctgttcatatactattgagtgtttaacgtggctgttttacagtcggtatcaagggctaactaacgagtcttatctcttttttcagacgagtgggatcccagtttcagagatttgtcaacaccgttttctgttgtacaacaaggatgctacacagcatatatttgaagtctcagctggtcttgactctcttgtcctaggagaaggtcagatccttgcacaggtgaaacaagttgtgaaagttggtcaaggagtgaatggctttgggaggaatatcagcgggctgtttaaacacgcgataactgttggtaagcgtgttagaacagagacaaatattgcttctggtgcggtttcggttagctcagctgctgttgaacttgctctgatgaagcttccgcagtcttcaaacgtatctgctaggatgtgtgtaattggcgctggaaaaatggggaagcttgtgattaagcatttgatggctaagggttgcacaaaagtggtggtagtcaacagaagtgaagagagggtttcagctatccgtgaggagatgcctggtattgagattatatatcgacctcttgatgagatgctagcttgtgcttcagaagcggatgttgtgtttaccagcacagcctctgagacgccattgttcttaaaggagcatgtagagaatctccctcaagcttctccagaggttggaggactgaggcattttgttgacatctctgttccgagaaatgttggatcttgtgttggtgaagtagaaacagcacgggtttacaatgtggacgatctcaaagaagttgttgctgccaacaaagaagacaggatgaggaaagcaatggaagctcaaaccataatcacagaggaatccacacagtttgaagcatggagggattcattggagacggttccaacgatcaagaagttaagagcttatgcagagagaatcagagtggcagagctcgagaagtgcatgtccaaaatgggagatgatatcaacaagaaaacaacgagagcggttgatgacttaagccgaggtatcgtgaacagattcttacatggtccaatgcagcatttgagatgtgacggaagtgacagtagaacgctgagcgagacccttgagaatatgcatgctttgaacagaatgtacggtcttgagaaagacattttggaggaaaagcttaaggcaatggcggaacaacaacagaagtaaaagagaaaaataagaagatgttcatctcttttgacatataagattagcttccccacaaactctgagtaaattgcatagatcctatagcgatggatctatttgattcatttaatttgtgtgcaagagactaacaattctatcgtcaagtgtaagtgttgtgaagctataagcgagcttgttgcatgtttgttgcttcatagactcgagtgtaatggtattggtcccagtatcgttacatatatgtaataatgtataaactttggttcttgcaatatagagaaatgtttttttctttctaatcttataaactttggttcatggaatttaatggatttgaaaatccaaacaaaaattatgtgttatttaatcattgattttagtgttattggttctatgatttacaaataatagttaaaatattgagtttacgtatagagcaaataataaaaaccatttttcgttcatagttgtctttaagatcacatgccatgtgcatcattttgctgtcacgtctccaagattgttaatttgtatgtgtaatatgttttcgacctgtttcagtacctaagtagcaattcaatcatttcaccaaaacacacacacaaaaataaaacttcatctctaaaaatctaaacgacacctatgtcattttcatagcttaacttatgaatattcattgaaactatttccttacattaaccgaaatatatataactgaaactaacgatatatgatctattcgtagagatgaagaagaagaaattatccaaatcagaaatatgggggaaaattcgcaatttcatctgaagcgggctgatcaaacttggttaagattaatttggtttaattccaatttccccggtatggaatttaatttggtccactttcctagaatttttttgaactgtcttattgtacattttttgttatgtatttgtcaataataatatttaataatattttgaactgctaaaaattgtttcaaaagatagtgtttctaatcataattcttcttgtttacaattttattcataaatagtttttaaaatcttttggaaaatattaacggtataacattaaacattgatataatttatgtaataattcaaatattagaatatatcattacaataatttaataaacataataatttctgtttttataatttaatatataaatacaaaattttattgaaaatgagtttcctgcgatgcgggattcataacctatatgtaaaaactaacgtaaaaatttcattgcgtacatggaaactatttgattagttttataagtggtgtatgagtgtgcatgactaatagttcagtcgggcttaaaactatttcttagaatttctcattattagtttcttttcttttagtcatcacattaattcaagtcaaacagaaccacaacaaatggtgcttgccgcttggacaccactagttggaatttcgaatattccaaaggttctactcatgtaataaacaaaagttataataggaaagttagtaaacattaacaattaaagaaaagcagaaaaagttaaactcggatctctatg

SEQ ID NO: 35416 - DNA, 3003 bp, Unknown
  misc_feature (1)..( 3003): 2750-1469P.txt file - cDNA_ID_3087386; gDNA_ID_2926304; Annot_ID_205814
aaagggcagagaatttgagtagggatttggagtggttcaaggaacaaggttacgagattccagagtcaatggttcctggtaaagcatattctcagtatttaaagaatatagcagagaaagatcctccagcattcatctgtcacttctacaacattaactttgcacatagcgctggtggtcgaatgattgggacaaaggtagaaaatagtacaacttaattctctaagaaagtcacttaatgttttttataagtttacaatttgtttaggtagctgagaagatactcgacaataaagaactcgagttctacaaatgggacggccaactttccgaattgttgcagaacgtgagtgaagaattgaacaaagtggctgaggtatagaacataaaatcaatgtgaagaaagaaaattaatgtttggtgcattctaattctaaagcatattttatgatgaatgggcagttgtggacgagagaagagaagaatcattgtttggaagagacagagaaatcgttcaagttttattgggagatttttcgttacttattgtcctaatttgtgatgagcttccggtggcaacaaaaagtggcgggaaggccatcaagtgtacgtatgaaaacaaaatctaaaataattggactaagtctccaagcacatgtctttactctatggcataataataataataggaagtctatgtggttaccgaaatgtaggaatcccacttccttagttgttcacttgtttcttttccacttccacgtttatatgagctaaacttcgattctagtttaattaatcttttggctctacaatttggtcaattggttagcatccagctaatgccgtcaactattaagaaaactccaacaaagagaaatcaaaagagatgataccaaagaaacataagagaagaaagagagagacatcgtgatgagaaagattggagattccaaaggaatcgaaagaacaacaactatttggtcagagcctttttttttttttttgatcagatttgatcagtggcttaaaaaacaacaacttctacggtctctcttcgctgttctagatttgtttatctgttgaattatattcggtattgattaataggatctcttcgtttcatgccactttcctaattttactacggtcaaaagtgtcgagtatgaattttatgtttctaatggcaatatgttgtatgagtgttagcgatctgtctactagctagtttattgtttcagagttatctgagttaatgacatattatttatgccactatattttgacatattatttatgccagaaaaaaaaaatatatgccactagcttgttttctctaatttaatactgttttaagttctcaaaaatttcaaaaactacaagtcaaacttttctgtaatgcatgttacatacataatattttactaattaattttatttttatagtacgtcttaggtacataatcttttgcttattagttggactatcttactataataattattcgtgaaagttattccacaaatctatccatcggttgcttcatgagattaaatatctccgctttcgttttaaatatattagccggactcaacatatgtaagaaacaaatataattacatgttaagaagttagtaaacaataaattaaaaaataataattaattttaaagattaattttaagctcatatattttgatatatgtataaacttcgcatattataatcaatatattcataggttgacgcatttacaatgttaaaataagagaaattttgaaaaatcctaataacatttaattattttattcagaacttttcatataattctccttaaatctacatagattcctttcagatatcatttacaatttttttttttgttaaagcagatatcatttacaatgttcaaatataagatatcatttacaatgttcaaatataagaagaattttgagaataccaacaatatttaattattttattcagaagttttcatatttttcatatggttctcctaaatcaacatagattcttttcagatatccggataattcctatgcacacatatttttccaatttatttcctcatcagaaacaaattaattaatttcaccataaaatctcataactcataagagtcacaagtctactaagaaacaaataaataaatacttatatgttgccgtgtaagaacaaatgccaccaaatacgcaaaaacgagtgtggataaaacgtgttctccacccgccaatcaaattccatcaaaatctcaatgcattcctcattacatatctttagattaccatccaatcataatcctcaatttccagttctactaaaccggttttgacccgatttgatttttcagcctcaaatctgacaaatcatattcacagcgatctccttcttccacatcgcaacccaatccctctctgtctcttcctcaattcttattctctctcgcaaaggtttggttttttgaagacagagaggagatttgagattttgggtttcaatggcggtttcaagtgctttcgttggttgtccaaagcttgagactttattgaatcaccataatctatctccttcttcttcttcttcgtcctctgtttcacagacaccattgggtcttaatggggttcgtgttcttccgaagaacaatagaaccagacgaggtttgatccaaaaagctcgttgtgagctctctgcttcttctgattctgcgtctaatgcagctagcatctctgctcttgaacaactcaagaactctgcagctgatcgtatgagtctctatctcttaatctactcaaatttgaatcttttgtttgatcaaagttataaagtttgaatctttgtttagtgatgtcgtgattatactgaagacagtttttgttatgaattgttgttctgacttttcatttgtggttgttaggatatacaaaggaaagaagcagtattgttgtgattggacttagtattcacacagctcctgttgagatg

SEQ ID NO: 35417 - DNA, 3000 bp, Unknown
  misc_feature (1)..( 3000): 2750-1469P.txt file - cDNA_ID_3087404; gDNA_ID_2926304; Annot_ID_205809
ttgtccctcaaagcaccaagagatacttcaccgtgtgtgttttttcacttacgttgtactgaaaatcatagttcatccatcctataatactacagtttagacacaattaacaaaggaacaggttatgaaaaaaaaaattgcgatcaaaaaaaataccaattgtttagacatccacatgcaaacgtcaattttaaaaaagtcttacaatcacttcactcataaaacgtattgcatattgcaaaaaaatgttactattaccctcaaacgatgtgagcatacaatgcttgacgctcatctaagtttggttatgatatcacttggaaagatccgactacaattatttgtggacctttctgttcactcctagcccgtaggcttcatccacgtctgaccaccgatgtcaaacttttgaaacctctaagaaacttgttattggtcatatatttcaccacaaacgtaaaaatacgtgtttttacatctcatgatattaataatcatttataataggtcattttctttagatatctctaacttagacacacttaatgtgtaggtttttcaaaatgagtcacgaaaaagttaattacactttggtgatacatgaaaaatcaaattaataattttgatcatctcaacacgcacaactatttttcaaattcaagttagtacaaatactatacgatcctcatttactagacaaaggttatattcttaaaaccaaattaactccggaaaaactttgccccctccaaaaccaaattatagcttcagatcatgtattatgtatatgaatcacaaaatgtgcaggtcaactagttgttctccgttgccttaatttctcttcttctccacatgtcgttccctcaccatcagactcccaacacatgttaccatatagatattaagccataaataactcgtcatacaattgtacaaagtatttatagttacgttgtacaagaaaagtatttagaattggttaatttgcgataagacctttagtctacttgatatatttttgcatacacgtgagaaatttggtcaatagaaatgctgatctaccgataacggttttgatccttttcacgccaaattttatagaaaatgatcatatgccaaaaacatatacaacaaatgaaattgcatgttgtggtaaaatattgatacaacgttttaattaattgtaatcatttgatagaaaacaagctattttaacattaataagttatatataataaataagttactattaatattttacatttacttttataaagatttatttattttaaatagtttttaggtttcatggtatggtggcaatgaacatgctttcaagccattttctgcataatagtgtttaacattacattacattacatatattcattaaacctaaatgttaaaattatatatgctaaagttgcaatagacatgcaatttgaaattggaagaaaatgctaaattaaatctcatgccattttacagcataatttgatattttagacataggaaaaacttaaattttatcttgattgactaggaaaacttaaattaaccgttagtgcaaaaaaagaaaggattatcttcacagaaagtatatagactaatctagtgcagtttcctgtttgacatcattacacctaaccttaaaattttcggagttataaaataggaccgacctctgtttctaaatgtttcagcggaattaaagaaaaacaaaatggcataaaatttgtaattgtgtcacaaatcacaaatgatataaaatttcattttttatcaaaaaaaaagaaaaaaaaagaaaaaagaaggaaaaaaaaaaagagagaggcaaaattggcatattaataggaccgaccttagttggttttgtttgtttttaatatttgctatggagtatgtgttttagcaaaaacaaatcataaatgtatatacattgttaagtgtataaaaattgtaaatccgtaaaatttgagtcaaatagcatacaatatctataaatgccataaaaatgtaaaattcatttaattataaatctaaatcctaactactattatataaatccaaaccgatatataatctcgtttaattagaaaatttaaaacctttattatcttttataaacctaaatcaatatttaaacttgtttaattgtaaaatttaaatctgtttataaactcaaaccgatattcaatctcatcaatcataaaattgaaatcttaactttttcttataactgatatataatttttttatggcaaattatattttctaattaaattaatttaatattatttattaggtggtagattttgattggctagaataaaaaagttcacccaagtatttttcaaaacaagtactaaccccatcaacttatgtgaccaaccgttattgaataaatgctttttatcctctcagcctaagaggtaacaacagcctgatattctagcacttaggacgactgtgaattcgccagccgacataaccgaaagagttcaatatatagtgaagcccaaagttgagttaaagattaggaaagagatttgctattattaaaggtaatgcgatgtattttaaaatagttaactaaaccaatttttatgtctttcttcaaaagtgaactcttgagctatcctaaacctgtgtgtcgttcttctcacagacttatttggtggacacacgatttgtttagtcaaagcaaacaaaaaaagtcccacttccctattagaaaatcaattctttgttaaaaagaaattaaaactaattttcgccacgtgtagaaacgatatcgcttctttacaactataaatagtcagcctttctcctccaaaaggcccaaccaattccatattaaaaatattagttcctctcggttccttttatcatttgcataaaatcgttttgcctccaaaagactaaaagctctagactttgtctctttgtccttttatctctactcccaacaaaaccagtttactcctcttaagaatcatg

SEQ ID NO: 35418 - DNA, 3003 bp, Unknown
  misc_feature (1)..( 3003): 2750-1469P.txt file - cDNA_ID_3087408; gDNA_ID_2926304; Annot_ID_205808
gagtatggagaaaagtactttgaatttgtatgacaatttgtttggggaacccaaattctcatagtccacctcccaaaaagaacttttgaatttgtaactgacaaaaaaacactcaataaaataatgaattcagagagacagcaacaacaaatctaaaataaatgtaaacatagactgttatgtatttgttgagacaattaactctgaataaaatggacggtgtatcgttaagtaactttagtgccgacttctacgattaataatagtcacaaaataataaaataagtttagtttaaaactttaaataataaacttggtgttacaaatatcactaaagctcgggatcttattttcaggtcatatcaccagcactcagaccctatcgactggagtagttcaaacacgactcaaataatactttagttcattgttagacttgtctagtctttgatattgattgatttaatgtttgttacatttatttcaaatgatttatgaaaagtttcaatgtcgttgacaaacaaatttcaaactgtttggttgactaagaaaaataaaattcaaagtaattaagaaaacaatttatattcaattcaatttatgaatgttaaaacgtttggatattcatcatagtgaaattttcttttgtgtactacatcatagtgtacagatattcatatgtccagtaccgtctctcgatttatacatatttttttgtactactaaatatagtattcaacaaaaacaattgcattaaaagtggaaattatatgtttcttttttttaaagggtttattatatgtttctatatggtcatgatataacatgcgaagatatttttcattagaattatatccatttatttaagttttaatagtgaatcaaaaatagttgatattcgtaaaatatattaataagaacattctccgacctccgttatgctttacaaaatgtaatgttggagtagcatggtctaaaaggaaagggaaactactagtggggcttattgggtgctccatgatcacatgtgtaaggttttgatgcatgatttgctcggcccgttatactttatttgtttaccacatctttgctaattaaccataagttccgaatgtaactctcgaccgctatttttaatactacggccaaaaactcgtgttattacattataggtattaaaacgtttccagggttttatcattccgagataagggaaggatataattttctgaaatgctgcaacaaaaccaaactacgtactaggattttagaagctgaactaaattgaacgttggtaaatttttctttgattgccattatcaaaatcgtcacgaaattaacttcaaccttactcctcacatttttcacaactcttttccttataccaaattttctaagaagactcttgggattcatctgtagacccattataaacatatggcaaatatttggaattatgttgttgaagggaacatagtaaggccctgactcctgagaatgtctctcgaaactttggaaactacttagaatcagcctatatatggcaaagtcggaggtgaataagattggctaaaggcttcatgccatgacagaggagagttcgaatgaagaaaatggcgacgaatttaagaaaaaattcaaagcctctttaggttaatttgtctaagttaaggtaccatttgtgtccacatatgacatatacgatttttgttctagttgtatatatatacaaaataaatcttatgggctgaatacacattcttatctactaaattaataaaatgacaaaataagcaaattaaagaatcctaatggaatgttagattctacatttgaaaataacattaaaatttaatcttgctaaacaaatttgataagaaatagatgaagatgccactcgtgatgctaacgatattcttcatttagctttacaaaaagatgtgtctctttctaacactttgttctttaaatctgaaggaatctacaataatggtccatgattccatatacaatttaattcatttagtactactacattatcaagtccatgtacaattttaggataaaacggaatttgaagataggatacatctaatcttttggccttttgaagatgccgtgaatatattttagcatcaaatgaagatatatcgacttgataaaaccgatacatcaatacaaatgaagaaatattagttttcgtagttggaggaaggtttaatttgatcatatgatttgggcctaagataatagcccattaagtataaccaaaggcttaaaactaacttagtcaaataatccgaaatttggcgggtcaaatcttttaccgtacgaatcgaaaaaacaagacagcttggatcaaaggtgaacattcatccttccttacccgacaaatttactcaaaaatccgacctaaagttttgatttttataatcaaatttcctcgaattgctcgacaaaagtttattcctttaccatcacaatttgtagtttacccagatccttttctcctctgttttttctttcgcattgttatcttcagtgtctgtctcattgttcccttttcccagaagctgaaacaaatctgttttttttttttttgttttgtttctgtgaatcttcagatcttgatctgagagaccctacaggttctgtttctgctctgcgattgatttaattacatttttgattgatgattataactaacaaatcatgggtctacatttttcaagaaaaaaattatgttaaagaaatgtttttgctaaatctgaaatgtttgtgaatatgtttctctaagtgtgcttattgctttatctgcagattctcttagtgttttggttcactggaatgatcaaggatctagttatgtagaaatttcttagtttgggagatttcatgagattgctaagagttgagtgatactaagttcaggattaatattgtttttgagaagaacacagtcaaagatttagaaagtgatgtgattttttgggttcacatatg

SEQ ID NO: 35419 - DNA, 3000 bp, Unknown
  misc_feature (1)..( 3000): 2750-1469P.txt file - cDNA_ID_3087413; gDNA_ID_2926304; Annot_ID_205805
cttctttttttttttttttttttttctttttttttggtaaaccaagtagaaatctcttcagaaaactataaatgatgctaattattggtttcccgattcgcttactcacaatttgctgctttattagaattttagtacaatgtttctctaaaagtaagtttttttcgtccgggatatattttcataattatagttttttttttgggataaaatgtaaatattattaccaaaaggaacaatttctttacaagagcttggcgtagctagtggttacaattagactaaaaaaagaagattaaaaagcctaattatgaaaagaagttgtgaaaaagcagagattactcatgcgcaaaccattgttgaagcagatttgcaaaagatggatgtttacgacgagctaaaattgtgtctctaatgtctatcgacgtctttgaaaaccttgaggatcgtggatgagacatagttgtgcaaacggttgttcctctccttccaagtcatgttgaggaaccgtttattttttattttattgaaacaacaagttaaaccgaactactatttattgttatttgttaatagagatgaaatttcaaatcacatttttttcttcttcttatttaactaacaagtaataaatcacgatttgtttataagaagcatcatgaatataaacgagagcaaaaagacgatgatcttcatatatacaatttcaatgatttgctgctcattcgttgaaagagttaaattatattaaacactcgacacaacttgacttttcaaacgtggttagagttagatgaaaaatgagaagtcttttgagaaaactataaatgtttttaattattggtttccaaattcgcttactcacaatttaattctttattagacttaagtaccatgtttctctataactaagctttttcatatttagataaatttttttttttttttcgtaattaaaacaactagttaaaccgaactatttttgattgctaataaagatgatactttgttttttgagaaagaatgaacatgatatttcaactcgatttttcttcttcttatattaaacaagtaaataaatcaccatttgtttctaaagaagcaacatgaatatatatataaattaaagaacgatggacatctatgtcacggtctaacatttttactggcaaagggcatttgcattatttgacctgattgagcatgattaacctttataagataatgtaatctcttaatagccaaaacctacgtttacgcttttacccttcatccgtttttttgttcaactttttactttttgtttcagtcaacacacgtttactcttcatcaaactcaaaccttaaatttgtttattttttagttttattttggtagaacattgaaaaccaaaatttgaagatcaaataaatcaaagttatttatggtagataagtagcttctctcgtcgtttcaagatgcttaaataagtagtatcttctgactttctgattccctcaattaactgaaagaatggttcaaggatttgttagctcttaggatacattatatataagccgtttgaaaaacaactaggtatgttcgaccaagtagtacgaaaaactaactcctaactaaacgagaaaaaaacattaagagaatgagagttccaacatgatttctattattcttgtatgaatgagtttatgagaatttggaataattcatgaatctacccaaattttcattatatatggatttatgaaacttggtaattgatacgaaagtattttgttattttattctcgatatattaacattttttttttttttttaaaaatagtgtttttttttaacatgggagagcacttaacaggacgggttctcgcagaaacgatatatatttaggtcaaatctgttttatcggggttattagattctcttggcccaactgtagtgtcaaatatcaaaccgatgttatcttattaaaaaattatattaacatcaacttaaattgttaaatgatctacatacatgaattttaccccattatttatttttatttgtcgtcttcgattgtccataatttctaatctgtaatgccaaatttgatgatcttcaactcgttaaaaaaaccaaaccatagagattttgtatatccaatttagggaattcattagagttcaagaagtcttcataattaggttgcatctttgaatacctttttctcatttaggcataacaatataataatttgttttttgttttcattttcttttggtgtcatcttcaaaaatctgtaaacccaaaagtttgtataacttgtttattaagatatttttaattaaatttttttttttgacatttttaaaaaattataaagtgttttatgaatttaaggagtaaataatatttatttagaacactataaattagttttacaagttcttagaaatgtatctgtaaatttcaaaaaggaaaaatatagcatttaattttgaagatttttttctacattatatatatgataaaaatattgtattttgtactttgtagttacaaaaagtcattatatcaacaaatctaaatataaaatatttttctatatattactccaaattaactgtcagaataaaaaagaagaataattattacagaatctgaacattaaaatcgtccctccatatgtggtctctgtctagtccaaaagcaatttacacatcccaagccgaaactatattaaataaacatttttttttctttaactaaaacatttataacatttaacaataaaagttaaaaatcgaacacgtataacgtatttttttacgtatacgtcttgttggcatatatgcttaaaaacttcattacatacatatacaagtatgtctatatatatgatattatgcaaacacaaatctgttgactataattagacttcttcatttactctctctctgacttaaaacatttattttatcttcttcttgttctctctttctctttctctcatcactatg

SEQ ID NO: 35420 - DNA, 3000 bp, Unknown
  misc_feature (1)..( 3000): 2750-1469P.txt file - cDNA_ID_3087417; gDNA_ID_2926304; Annot_ID_205804
aaatgggtcaaaattcatgggtcaactcaacttaactcaacccatgaatcctaatgagttaaagtttttgactcaaatgagttgatgggtcaaatgggttattgggtcaattggtttgatgagttaaatgagttgggttgtaatgtttaatggtttcaatggtttacccaattaacccatcaagttttgtaaaattgaattaaaccaagtaaaatctctaaaccaatgccaatttaagcttaaccaacacatctaaaccaatttaataaaattaatatttttccaaatttcttaaatatacaagcgatgaaattgagaaaaagtaaactcgtaatttttctaccaaaaaacataaacccatgattttcccgccaaaaacgtaaacccgtgattttcccgccaaaaacgtaaacccgtaattttctcgccaaaaacgtaaacctgtaattttttcgccaaaaacgtaaacccatgattttcccgccgaaaacgtaaatccgtaattttccgccaaaaacgtaaaccgtaattttcgcgccaaaaacgtaaacccgtgattttcccgccaaaaacgtaaacctgtaattttccctccaaaaatgtaaacccgtgatttttccgctaaaaacataaacccgtgattttctcgccaaaaacgtaaacctgtaattttcctgccaaaaacgtaaacccgtgatttttccgccaaaaacgtaaactcgtaattttcccgccaaaaacgtaaatccgtaaaaagtggaatccgtaaatattctaagtttgatgataataaattaataatttattaataatgataattatttattattatttcataataataattaattaaattattacttagttgggtcaacccataactcatttaaccctaaactcatttgattatgagttgagttgagttgggttacccattttgacatccttatgcatgtcgcaccattagacaacaacctaccaccgtcagaaggcaactagtctatcgaaatgacttctttgcatctagttgtagcatctaaacgtctaaaagaacagtaccaaaatgaatgaacacgtcgaggaaagcattgtagaagtccgttactcctaatctataaaagatcgacacaattatgaagactatttgtatgatgtttattacttatatttttttttcttgaagataactcattttgtaaccaactagctcttaatttagtggcgcttcctaggaccttgttagtacccttagttcaagtacccattggaagagatttaagaaaaacttgcatttcgacagagatatttaagtaaaacttgggtccttggctcacaattacttgaaagttaacctaaactgctaaaccaaaaaagaaaagaaaaaaaaatacttattttgtagataaagcttcaaaaggttgagtcaatgtactaatatactagccatttgaataaagatctttcgaaactaacgttcctcgaatgattagagtacaaagcaatagtttgcttctaatccaagctatccaagtataatcaattagaagaaattagcaagttgggagatcaaaccaatctttgaagttttgttcttcctcaagatgataacctcttaccttccttttccccttttgtttctcgcaaattgttaacagattttactttaagtcatcaacaaaactaacaacttggccggtcctaaagttttatgggttttagtcaataataaaacataaccaagtatcgttaattatatcaacttgttaagattctaggcgaagcttagagttcgctggttcgaattattaagactctaaacgaagcttagagttcgctggttcgaatgatgcttgtgacgaaactaatattacatgctttaatttcgaatctcgaaggattatggatttcggcgcaaaacctcctagtattaaaaaaataaaaataaataataaaataagtccattataatactgtaagtccgtccgcttttactttttgtctttttacccataatcttttaattctaggactcgagcatgttaagttattatgtccaaagttgaggttttcttataaaagaatcatctagtacattagttcagctagtgggtgttgggtttgttaattgtgtatacttaacaaataaataatctttaccttttgtaattaggtaatacttaacaaacaatgtttcccttttgtaacttgttattttttcaagggttaatgattttccaaagaaaaagaaaaacgattactacccatggatatggcttaaagtaatcagctatccactttcttcttctttttccaatgcgtgaacggttatgtaaaatatgacatcttgaactcgaactcaagcgtatttctgacaattttaaattatggttgaatatttgtatggctatgtataagtttcatagcttgcagtatttagctgtagaactcaccttaattagttaaatatttagaccatcaagcaaatatcaatttttaaaaaatatattgttgatgacatttcatttttctataatgaaaaatgaaataatttatttcaccaatatgatcaaattattttccaaaacttgaattaattatgaacagacggagtaggaaatttaatagtaaaaggaaataatttattgttttgcaaaaaagtaataaatataattaaattatacttaagtactactaaaaatatgaaaaaaacaaaagacaaaattaagacttaaaaattatataatgtctgccgtatttaaatagctttaccgactttttcagagcacaacctccaagagacaacatcaaaacccagaaaactgaacgctttatctgctcttcaggtttaagaggtttagaaagaaaaagaaaaaaataaaaaaatttggttggttagctggtcccgcgagtttttcttggagttcacttaaatccttgcgatcaatttgaaaaatccaccaagaatcacacaaaaactgatctctgtgcgtctatataatg

SEQ ID NO: 35421 - DNA, 3000 bp, Unknown
  misc_feature (1)..( 3000): 2750-1469P.txt file - cDNA_ID_3087421; gDNA_ID_2926304; Annot_ID_205803
acaaagagtggatacatttgaaagggaagttcctcctcaacggttctgcatcgcgggtagtcatttacatcgaaggtccacctccaggaaccgatattcttctcaatagcttaactgtaaaacacgccgagaaaattcctccttcaccacccccgtctattgaggtaagtccaaagatccagttcacattttcaccgccgtaaaattataggtgaacaaaatattctaaacaaatataacattttctaaagaataaacaatttagcaaaataattttgttctgaagactgttgtttaatttggaaaacgtaaacaaataatcgatgtcttaatccgtgttgttttgtttttttctcgtagaatcctgcatttggagtaaacatactcacaaatagtcatttaagtgatgatacgaccaacggatggttttcattagggaactgcacgctaagtgtggcggaagggtcacctcggatccttcctccgatggcaagagactcgcttggagcacacgagcgtctaagtggccgctatatacttgtgactaaccgaacacagacatggatgggtccagcacaaatgatcactgataaacttaagcttttcttgacgtaccaaatatcagtttgggtcaaagttggttctggcattaatagtccgcaaaatgttaatgtcgcacttggtatcgatagccaatgggtaaatggaggacaggtagagatcaacgatgatagatggcatgaaattggcggttcttttcgaattgagaagaacccatctaaggctttggtttacgttcaaggcccttcttccggcattgatctcatggtcgcgggattgcagatttttcccgtcgatcgactcgcgagaataaaacatttgaaaagacaatgtgacaaggtaacacaaaaactctgctttcaaacaagcaatgagacttaatagtaactttcttgaaatgcagatccgtaagcgtgacgttatcctcaagtttgctggtgttgattctagcaaattttctggagctagtgttagagttcgacagataagaaatagcttcccggtggggacttgcattagcagatcaaatatagataacgaagatttcgtcgatttcttcttaaagaactttaattgggcggttttcgctaacgaattgaaatggtactggacggaaccagaacaagggaagcttaattaccaagacgcagatgatatgctcaacttgtgcagtagcaacaacatagaaacaagaggacattgtatcttttgggaagttcaagcaactgttcagcaatggatccaaaatatgaaccaaaccgacttaaacaacgcggtgcaaaaccgcctaaccgatcttctaaaccggtacaagggaaaattcaaacattacgacgtgaacaatgagatgttacatggatcattctaccaagataagctaggcaaagacattagagtcaacatgttcaaaaccgcgcaccaactagacccatctgcgacattgtttgtgaacgactaccacatagaagacgggtgtgacccaaaatcctgccccgaaaagtacacggaacagattcttgacttgcaagaaaagggtgcgccggtaggaggaatcgggattcaaggccatatcgacagtccggtgggtccaattgtatgttcagccctagacaaactaggaattctcggtttaccaatatggttcacagaattggatgtctcctcggtcaatgagcacataagggcagatgatttggaagtaatgatgtgggaagcttttggacatcccgcggtggaaggtataatgttatggggattttgggagttgtttatgagcagagacaactctcatttggtgaatgcagaaggagatgttaatgaagctggtaaaaggtttttggctgtgaaaaaagattggctctctcatgctaatggacatattgatcaaaacggtgcgtttccgtttagagggtatagtggaaattatgccgttgaagtgattactacttcatctagtaaggttctgaagacgtttggtgttgataaggaagattcgtctcaggttattactgttgatcttcaaggtttgtgattgtgacgcttgtacatgtgctaatgtatgtctagatttccagtttgctgaaactgtggtgtttatttattgaaaacaaaataaaagtctctcttgatagtttcattgttctaaatagaaaacaagaaacgttttttactttaatcttctacattgataatattggatcaaaggactgtttctgcaagacacaacacaacataaatatacttatactagtttacttatactaacttcattatacatacacacacttgcacttacacctataccttacttctagacatcattaccccgtagaaccaagtttacaagcaagtttaccaacaactctagtctttagcctttaacttggacttactaactagtcattagttgtttaaattttttaatttccatccatatgtttttgttatagattcaaattaaagtcggttgcatttaataaatgtcacttcgttctcttgagataaaatttctctatagtattgtgtttttttgttgtaaaattttcgagtctttttcctaatttgataccatgttttttttctgcacaaattcactcactgttttaacttactatccacttattaatgattttaccattaggcgtcagctagccctgtcaaattggtaaacaagccaagctatctacataattagagatatcattaacgttaatcgtcgtcaattcgaatttgaaagcatagatagctttagcagtacaatgggcaatggtaagaagaatagcaaaaggcccaatatttggtttgcagaaattaaagccttaaaaaagcccacagatatttgtcaaagaatcttaataacctttttgttgctcaagcgccgttcctagggtttttctctgaggaagaagcgtttcatttctctgaatttcatcgaaaatg

SEQ ID NO: 35422 - DNA, 3000 bp, Unknown
  misc_feature (1)..( 3000): 2750-1469P.txt file - cDNA_ID_3087464; gDNA_ID_2926305; Annot_ID_143696
ttcttctttaagtgttgcaggcacacaggcttctccgtttgtttgcagtgaaatccgatcaagtaccacacctttgttccctgctactgattttcctccattgtcttcagtgaagaactctttagtgttgtccactgttgctagtgaaaagagttctgagtgtacggagagcactgatctcttacctataggcaacaactcttctttgcttagtaacaggacgaatcacactgatacttcttctgcttcaagctctacagcatcctcaccaagtgtaccagttgtttctgagtcagaaactagctctaccatgccagcagctcctgcaactcagtctacacatccgatggtaacaagatcaaagaaaggcatcatcaagcctaatccccggtatggacttcttacacataaagtcaagaatgcagagcctaagactgttacagaagctcttaaacatccggggtggactgctgcaatgcatgaagagtatgacaactgtcaagaggcacaaacatggagtctagtcccttacactccagatatgaatgtacttggcagtaaatgggtattccagaccaaactgaatgcagatggatccttagacaagctaaaagctcgtttggttgcaaaaggttttgatcaagaagagggtatcgattacttggagacttatagtcctgtggtaagatctgcaacagtttgaatggtgcttcatgttgctacagtcatgggttgggatgtgaaacaaatggatgttaaaaatgcgtttctgcatggagatcttacagagactgtgtacatgcttcaacctgctggctttgtggacaagaacaaacccactcatgtctgtcatctacacaaagcgttatatggtctcaagcaggctcctcgtgcttggtttgataaattcagcaactatctgcttgagtttggttttagttgcagtgttaaagatctctctttattcatctatatcaaagggaatgatcttatacttttgcttctctatgttgatgacatggtgttgacaggaaacagctctgcaacattggctaaacttctagaggatttgaacattcacttccggatgaaagatctcgggcaaatgcactatttcctgggaatacaagctcatttccatgaaaatggtttgttcctctctcaacaaaagtatgctgaggatcttctcactattgcagcaatggaggactgctccccaatgcctactcctctgccacttcaactcaacaaggttcctcatcaagaagaacttttctctagtcctacttattttcgaagtcttgtagggaaactgcagtatttgaccttgataagaccggatcttcagttctctgtcaactatgtgtgtctaaagatgcatcaacctacagtttcagattacaaccttcttaaacggatccttcgatatgtcaagggtactctagccatgggaattcacttctccaaaaactctgactttcagcttcgtgcttacaatgaaaaggagcctgaaacggagtctgatttcaatcttcaagcttacactgacagtgattgggtggctgtaaagaaacttgtcgctctacaggaggctattgtacgttccttggcactaacctcatttcctggtcttctaagaagcagccgactgtctctcgcagctctactgaagcagagaacagatcactttcagaaactgctcaagaaatgacttggatttgtcatgttctccgagagttagggatacctcttaccgttacgcctgagctttatggtgacaacctttcttctgtctacttaacagcaaatcatgtgtttcatgtccgaagcaaacactttgaatttgattaccactatgttcgtgaaagagttgctttggggtctttggttgtcaaacacattcctgctcaccaacagatagttgatatgttcaccaagtcattgtcatttaaagctttatgtgatctcaggttcaaacttgacgtggatttgccacccacaccgcgtttgagggggagtatcagacaacctcttcaaaacgacagcattttgtcaacttcatcagttgggcctgcgacagaaacaaatgaattgggccacagaacacttaaggccaaaacagaaacatcgtcgtgcactgtgcaacggtcttctccactctcgcttaaagacaaaagaaacagaacagaggtgacgaaagcttgtaaggagaagatacagcttgctaatcaattctcagcccttgatgacttagagactacaggatgaagaaatctggagagttacctatgatttagaagcttataatgtctcttatataaataccaaaatgtaagccgcatgaaaccttaagggaaatgaatgaaatctaaagttcaagtttaaaactttctcaaagattcataaaactcttcaaattggagataaaaaaatattgcatagtgtaattatatcgattaatataatttttattaagaaatataaaatgtttttcgttattcaattttttttttttttttttgttgttaccataaactaaaatcctaaacgttcatatctaatcaaactaaacgtacattaatttcaaatcactagttttgaaatttggaccaaagttttaattattgttaaacaaaaaactcttctcgatttagttttagtaattaattaaaaaaataatcatgtatgaatctcatggcaagttggtaaccttttaatttatttacataaagaaataaatcaaatctcatgactacctttaaaaaacattattataaaaaaagaaaaatataaaaatctcacgaacaacaacaacaacacacacaagtgactacgaaagggcaaaaaccaaaaagagaatcaaattttgcctcttctatataaatcaaatcaacgacgaagcgtcgctctcgttttctgtgtgtctctctctttgtcccaccattttcaccgcttctcctccaatcactcagatctacagattcctttaaaacaacaatg

SEQ ID NO: 35423 - DNA, 3000 bp, Unknown; identical to SEQ ID NO: 35422
  misc_feature (1)..( 3000): 2750-1469P.txt file - cDNA_ID_3087464; gDNA_ID_2926305; Annot_ID_205840

SEQ ID NO: 35424 - DNA, 729 bp, Unknown
  misc_feature (1)..( 729): 2750-1469P.txt file - cDNA_ID_3087514; gDNA_ID_2926306; Annot_ID_205879
ttcatatataaatgtcattatttcattggtactagagtatagtttgctgagttccatgaaaagaacggtagaggcgagagcaggtgattaaaacccatcccctgtgaacggagtgagtgtaggtgtagccataaagttgtcgtcgctcctctgtaaaagtttcttctattcgacgattcctctcgacgttatcatatttcctctccaggttggtactatcatcatccttgttctctttgtttgcatccctccttccttccttgcttccttgtagatctgccattgccttttttaatccaaatcttatatttctgatttacattgcttccgtcagatccgacgatctcactttctcatcatctgtcgtcagcttttttgtttcttcttttatctctttttatttttaaaataaatatattgttgattctggaattttcctagtagctcacgtcacgttacgtcatgtgtgtgctttgaattttaaattgactcgcaaggctggttttgattatgtgtaagtgatcgctggacttcacacacactaacaagtagcacttgaatgaagctttcctttaatggattgattatttaataaattgcgactttgacgtctttgagcatccatccatgttgaagaatcccattattcgtatgcttttcttctatggccttgcatcagtcagcactcaacttgtttgaatgtgcaggagcgtgtttccagaggggatg

SEQ ID NO: 35425 - DNA, 3000 bp, Unknown
  misc_feature (1)..( 3000): 2750-1469P.txt file - cDNA_ID_3087518; gDNA_ID_1974091; Annot_ID_180609
tgcaatacatttaagatgatgcgttgtgatgaaattacaatcataatttgggtacagagacgttgatccctagatctgagagatccttagcgagcgaatctgcattctcaaagcataacccacccatccctatctctatagcacacttgacgttggttggcctgcgtatcagacactccttcagatcaaaatggtttctttcttttaagttataaaggcattgagttcatgttataacctgtcatcaatgaatatacagtcgcaaggttcaactccgaggtgtcccacaacctcgaggtagaactctggatcaggctttctcttccctgaaagatataacacatgaggagctttgtatgtagtaggaatggtttggatctgacaagcaataagtagtaaaaagaggcaagagatgtgtgatgtaccagcaatacaggagcaaaacgtccatgataagtaggcagaaagctttaacttgtcttcgataatgttgtacctatggaaacacgacaagagtaaacaaagagacatgaagctccgtttcaaagagtgaaaggcaagggatggaaaccagatgggatagttagtgaaagcatgaatctcgaagtcgtcagctgccaaagtttgaaggagctcttgcatgccatctaagtaggagtaacctgacctcatgcactccttaagccctgcaataaagaggattgaaataggtacgaggaaaccctctctctgtgtatttacctatctatctatatggcaatctcaccttccaaatcaaaatccctcccatctataaagaagtttctagcaagctcctcctaaaaccaaaagtcagaggagataatatgaagaaaaaaagaaagaaagagtggtggtacctcacctcatcaatcaaacccttttcaaattcgatccagaccatcgggtgcttgcactctagtagttgcttcattggcattctgatccacaacctcagtttatcattgatgaatcgagaaataaattcgaggatttcactttctcacccgaagaaggccggaacgtcctggtaaaaggggtcacggacgatggtgtccatgacgtcgaagaggagaatcggaagcttccttttccgagagatttcatcaccactgctgctgcccagacagcaagaacccgaggcccgaacaggattcttcttccacatgttgggtttcagattgatgaattccgccgatgtgtgcatcgccgccgccgccatcagaaactacctagtttctagttccgatcatcatcatttgtaaatgacaacaggggagtcgaaacgcagcgtttagagagaaaatcgcagaggagaaggtgattggtccacgtcagtaattaggatgacgtggtgaagaagaagtggcccatgacttgcagcacgaaggagaatgaatgaattaaataaaaaccgtttcaaattcatctccacgactcctcggcctcggagagctcaaccgccactttccttctccttgtttatataaagcagagccagccaccttcatttttacacacaaccatcaaagctacgtacgaattcctctcaaacatactatatacttacaaaagaacaagaagatgatgatgatgatgatgagatctacttgtaatctaacactaatgctctgcatttgtgcccttgtggtggcttccatggcggcggaaggtcctagggatttcaaggttggagacgagttcgggtggagagtcccactccagaatgattcagcggtttacagccactgggccagcagcaaccgcttccacatcggtgattcactctgtgagctagcttgttcccaacttgtgttttcttttttttatcattcatgatcggtaataattgattggtttctaatcaaaaatatgtcagcgtttgtgtacgacaaggactcggtgatggaggtagacaaatggggtttctaccactgcaacggcagcgatcccattacagcctttgacaatggaaacagcacattcgaccttgatcgtcctggtctcttctacttcatcagcggctccaaccagcactgcaccagcggccagcgtctcatcgtagaagtcatgcatatccaccaacaccatgaccatgacgcttccatgcctccatccatgtcgcctctttctaattctgcctctccctacgcatccgcatccgcatcttctgctgcctcctccctgcctacggcttgtcttcttattcctcttttcttaaccattgctagctttcgtttcatttcttattagtcaaattgtttcccttatagttcttctcctcttttacttttcttcatctttttgtttcattcatcgaacccttatggtataatccaatttatgttcttctctgacatttattataagttttacttttcactgttcaaaacaaatcaatcaacaaactgtggaaaaaaaataaaaaatctatcaacaaactacacaagagcatcgttattaatagtttcttaaaacaattcttaagttaagagacagtcttataatagcttataattaacaaagtctcataaataagagactttaatacaattttgttagatataagacatatctcttaactaagagtaatgttaagagatcatcaataaggataattttatgtcgttagtactaatagaaccgggccctagagtttgtaacagatatgggcctttttattgctatgggcctatttttggtgatatgggtctttaataccatatgagccttttaagacaaaataataatctgataaaagtggtgaatcaagaagactaaacaattttgaaagaagaagaagaaaggaggagacatggatgaatctctgtgggtgtgagtgtgagacaaagagagaaaacaaacaacgtagctgtagattggaaaagacggtaagaccctcgtcgggcttcatcaataaacaactttgccttgttgtctatcgccggaattacaaaccctagccctgctacaccgccaatg

SEQ ID NO: 35426 - DNA, 3003 bp, Unknown
  misc_feature (1)..( 3003): 2750-1469P.txt file - cDNA_ID_3087518; gDNA_ID_2926306; Annot_ID_205878
tgatgcaatacatttaagatgatgcgttgtgatgaaattacaatcataatttgggtacagagacgttgatccctagatctgagagatccttagcgagcgaatctgcattctcaaagcataacccacccatccctatctctatagcacacttgacgttggttggcctgcgtatcagacactccttcagatcaaaatggtttctttcttttaagttataaaggcattgagttcatgttataacctgtcatcaatgaatatacagtcgcaaggttcaactccgaggtgtcccacaacctcgaggtagaactctggatcaggctttctcttccctgaaagatataacacatgaggagctttgtatgtagtaggaatggtttggatctgacaagcaataagtagtaaaaagaggcaagagatgtgtgatgtaccagcaatacaggagcaaaacgtccatgataagtaggcagaaagctttaacttgtcttcgataatgttgtacctatggaaacacgacaagagtaaacaaagagacatgaagctccgtttcaaagagtgaaaggcaagggatggaaaccagatgggatagttagtgaaagcatgaatctcgaagtcgtcagctgccaaagtttgaaggagctcttgcatgccatctaagtaggagtaacctgacctcatgcactccttaagccctgcaataaagaggattgaaataggtacgaggaaaccctctctctgtgtatttacctatctatctatatggcaatctcaccttccaaatcaaaatccctcccatctataaagaagtttctagcaagctcctcctaaaaccaaaagtcagaggagataatatgaagaaaaaaagaaagaaagagtggtggtacctcacctcatcaatcaaacccttttcaaattcgatccagaccatcgggtgcttgcactctagtagttgcttcattggcattctgatccacaacctcagtttatcattgatgaatcgagaaataaattcgaggatttcactttctcacccgaagaaggccggaacgtcctggtaaaaggggtcacggacgatggtgtccatgacgtcgaagaggagaatcggaagcttccttttccgagagatttcatcaccactgctgctgcccagacagcaagaacccgaggcccgaacaggattcttcttccacatgttgggtttcagattgatgaattccgccgatgtgtgcatcgccgccgccgccatcagaaactacctagtttctagttccgatcatcatcatttgtaaatgacaacaggggagtcgaaacgcagcgtttagagagaaaatcgcagaggagaaggtgattggtccacgtcagtaattaggatgacgtggtgaagaagaagtggcccatgacttgcagcacgaaggagaatgaatgaattaaataaaaaccgtttcaaattcatctccacgactcctcggcctcggagagctcaaccgccactttccttctccttgtttatataaagcagagccagccaccttcatttttacacacaaccatcaaagctacgtacgaattcctctcaaacatactatatacttacaaaagaacaagaagatgatgatgatgatgatgagatctacttgtaatctaacactaatgctctgcatttgtgcccttgtggtggcttccatggcggcggaaggtcctagggatttcaaggttggagacgagttcgggtggagagtcccactccagaatgattcagcggtttacagccactgggccagcagcaaccgcttccacatcggtgattcactctgtgagctagcttgttcccaacttgtgttttcttttttttatcattcatgatcggtaataattgattggtttctaatcaaaaatatgtcagcgtttgtgtacgacaaggactcggtgatggaggtagacaaatggggtttctaccactgcaacggcagcgatcccattacagcctttgacaatggaaacagcacattcgaccttgatcgtcctggtctcttctacttcatcagcggctccaaccagcactgcaccagcggccagcgtctcatcgtagaagtcatgcatatccaccaacaccatgaccatgacgcttccatgcctccatccatgtcgcctctttctaattctgcctctccctacgcatccgcatccgcatcttctgctgcctcctccctgcctacggcttgtcttcttattcctcttttcttaaccattgctagctttcgtttcatttcttattagtcaaattgtttcccttatagttcttctcctcttttacttttcttcatctttttgtttcattcatcgaacccttatggtataatccaatttatgttcttctctgacatttattataagttttacttttcactgttcaaaacaaatcaatcaacaaactgtggaaaaaaaataaaaaatctatcaacaaactacacaagagcatcgttattaatagtttcttaaaacaattcttaagttaagagacagtcttataatagcttataattaacaaagtctcataaataagagactttaatacaattttgttagatataagacatatctcttaactaagagtaatgttaagagatcatcaataaggataattttatgtcgttagtactaatagaaccgggccctagagtttgtaacagatatgggcctttttattgctatgggcctatttttggtgatatgggtctttaataccatatgagccttttaagacaaaataataatctgataaaagtggtgaatcaagaagactaaacaattttgaaagaagaagaagaaaggaggagacatggatgaatctctgtgggtgtgagtgtgagacaaagagagaaaacaaacaacgtagctgtagattggaaaagacggtaagaccctcgtcgggcttcatcaataaacaactttgccttgttgtctatcgccggaattacaaaccctagccctgctacaccgccaatg

SEQ ID NO: 35427 - DNA, 3000 bp, Unknown
  misc_feature (1)..( 3000): 2750-1469P.txt file - cDNA_ID_3087525; gDNA_ID_2926306; Annot_ID_205872
ttcaccgcctctgagcacagtccgcatatccacttcccaaagaacttctccctcaccctctctatgtactccatcgtgcactcctccctcatcccgcagcactcgcactttgccttctctacctccactatcgtccccagtcctttctcttcttctctgtgataatccagcgatatgtctgacagggacctatgcagtgactttttccctacctttggcgggggcggcttcaccaagcttccgctcacgctcttccttctcccgtttgctgccatatccaatcttctttttttcacctagagcgtctgcgctaagctttggtatttataagcggtgctgtctgtgttgacatattcatgtgtattgtgtggttcagcattgccatctcacgtacgtgctcacgctatagcgacctagctctttacttactctttgttttacttttcacaacaatactaattaatgaagccactaattcacgtgctacattgcaactggatcctagcctttaatacaactcttctaaattggtatatctctctctgtattgagttcatgcatatatggggatatatacaaacaaaaacattatttattttttgtctgccgtcactaatcgatctcaactaaacttttgtcatttttttaatgaactgtaaacttggtgttcatttcgttctcattaatgtagtttccttagagattgcaaaaattagatacattttgtagcatgaaatctgaattatagaaggaaatcagataagcaagtgtgcaaatatacaaaaatgtgctattcgagctaaaagtgaagatacaaacaattacgtaccaaaagcaagccctcaagaattgtgtggaggtaagtaaaaggaactatatggatcgcagagacaacgatatataggtcacgtgtgtgggagttttgtctaaccacacatataagagaggaacaacatggactcgaggaagaccactcgtaatgaagttaaaagttgaaacttgtaaatattatcaatcccaacaaaaagaagaagaagaaaaaatatatattggttgttttaaactcacttttgcgataacttggaaagtgggaggacgctcacgtgcatgcatacatttcttgtctattatatgtagctgattcaacataactctatatatcttgttgtctatattgcattatagttacacttacattacatacgtagtgtgaaaacgatgcatagcattactatacatcaaatctgtgcatatatatacacgttacgtttcttgcagtgaaatactcgaaggtggatatgtgctcttgcaccacctaattaatctcgggttatgtaagaattacttcagagttcagagtatatatctatgtgattcttgcgcagtgtcaagtggattgggcatgagattgataaccgaatgggtgaggggtcaaatatcgttatttggatatagcgggattttaaactgaatgattgggccatgcattgcttgggaaaaaggctaaaattaaacaagattgagatacacattacccacttgtattttagtttccaaagaaaaaaaggaaaaaaggagcaacaaggcaacaagtatgtaatgatcaaggaagtaaaaaagggaagaggagtgtgagaaagagagcaaagaggagctgttggaagagggaaatggtcttcttcttcgtccttttggtaatttttctgcttgtgttgtggagagtggtagtactagtgtagagaaaggatatggaaatcagattgtgatgaagatctgatttgtaaagaaggggcctccccacaacgcccttgaatcttccgctccagccttgatctccgattgtgacgatcaccgcatcgggacgtggggagaaggagacccaacctcttttggagtagacgtggaactctgcatggcagaagttgagacatagagaatgtctttcgtcatagcctcttagcagcatccttatggcttcttcctttgattcgtttttaatattatgcctcttcacgtagcaaacccctaccccttccttttggcttcttcctcctgctcctagcttttctctcaccgccttccctatcctctctgcctcacccatcaactccctgcatcttcaaatcattacttactactttattttaaacaatatatattcctaatcaattactatatatagtaaattttgctgccttacctcaaatctgaataacaagccgtgtgatcatcagcattaatatctttattaaacacgaactcctccgtctcatcgtggaaaatggttttgtccatggcggctttcaccatagcctctggaacaccgtggttaacgagctgaaaacaaccgatggtggcgatggcatcaagcagagccgagagggagtccaaccggtggaaatcgaaggtgggagggttgagaaggaatgtgtgcttggggaagactttatcgggcaatacaagatttgggactcgaccacacttgtccaggaactccgagaggacgtcttcgttggccgtgaaggaggcacggcggctggatgctaccggggacggaggaggggctcggaagtcgggagaggaaactcccatttttgtttggggtcttactcgtgataatacttgtatatatgtagagcaaggatcgatcattggccaaagaaaaagtttttgttaaataaagcgagagcataatgatgagatgcaattctcttgtttgcttttattcattgcaacttttccttttccaaaaaccagagaggatgacactattcatcatattatggatggacccaagttgggccttaagcggccttttgtttacccaattgacgtggatcctcacaggatgggcatcgagtgtgacacaagtccaagttggaagagtccttttctgtcacataaataaaaaaataaatgtcaagtagagagggcaagtggtgaatctctctcataccaattccaaaccaactaaatctacttagtaccagtacattgatg

SEQ ID NO: 35428 - DNA, 3000 bp, Unknown
  misc_feature (1)..( 3000): 2750-1469P.txt file - cDNA_ID_3087529; gDNA_ID_2926306; Annot_ID_205871
cttatcccaattactcttctttatcccaaattctctttgatttcttgctacttggtcttctccgattagatcttcgaatctgtttctctcctctccgggaaccggtggctacgtcatgtgtctttctcatattccggcaatcctcaagaggaaatctagaatcctccatacatttcttatttccttactagggttttgtgtgtgttggcaggtggaagctgacgaagaacaacatcatatatcattcaccaagtaagtaatgtaaagtaaagtagcagctctatttattttctttcctatgattgagatgaaaaattcgattgttgttgtgtgagacagtggtacgagaaaaagatatctgctgggaatacgcagagaaactagatggtaacaaggttaaatgcaagttttgctctagagttcttaatggcggcattagtagattgaagcatcatctctctcgccttcccagtaaaggggttaatccatgtgccaaggttagggacgatgttactgatagagttcgttccattttatctgccaaggatgatccccccattaccaacaagtacaagcctccaccacctttatctcctccgtttgatgctcctgcgtccaaactagtctttcctagttctcctcctaatgcgcaggacattgcagagaggagtatttctctcttcttctttgagaacaagattgacttcgctgttgcccgctcaccctcttatcaccatatgctcgacgccgttgccaagtgtggtcctggatttgttgctccttctcccaagactgaatggctggacagggttaagtcagatattagcttacaactgaaagacactgaaaaggagtgggtcaccaccggctgtactatcatcgctgaggcatggaccgacaacaaatcacgagcactgattaacttctccgtctcttcaccttccagaatcttttttcacaagtctgtcgacgcctcctcatatttcaagaactcaaaatgccttgctgatctctttgattctgtcatccaagatattggtcaggagcatattgtgcaaatcattatggacaacagcttctgctacactggtatctcaaaccatctcttgcaaaactatgcaaccattttcgtctccccctgtgcatctcagtgtttgaacatcatcttagaagaattctccaaggttgattgggtcaatcaatgtatatcgcaagcgcaggtcatatctaagtttgtctacaacaatagccccgtgctagatttattgagaaagttaacaggcgggcaagatattatccgaagcggtgtcacaaggtctgtctccaattttctatcattacagtcaatgatgaaacaaaaggcaaggctaaaacacatgttcaattgcccagagtataccacaaatactaacaaaccacagagcatttcatgcgtgaatatcctagaggataatgatttctggagagctgtggaagaaagtgtggctatttccgagcctatcctgaaagtgttgagggaagtttctactggaaagcccgctgtaggttctatatacgagttaatgtccaaggccaaggagtcaatacggacatactacatcatggatgagaataagcataaggtcttttctgacatagttgatactaactggtgtgagcatttgcattcacctcttcatgcagcagcagcattcttgaaccccagtattcagtataacccagagataaagttcctcacttccttgaaagaagattttttcaaagtgttggagaaacttcttcctactagcgatctacggcgtgatattacaaatcagatattcactttcactagggcaaagggaatgttcggctgtaacctggccatggaggcgagggattcagtttcaccaggtatggacaataaatacatttatattttctttaagtcatgactagtgaacagagatgtataggtagtctgagtcgggagaaaaataatccacttatctatgaccgcaattaaagctatggtcttattacacaactaaataagtccaggttgatatagcctggcacgtagtaaaccgaattgcaaaactagtagatatcttcccctcaccaggctattaggggtatggtctgggatctttagaattggtaacgaagcactagaagactagaagttgatgtctaataatggtttgcttagtaatgcaggtctctggtgggagcagtttggtgactcagcacctgttttgcagcgggtggccatcagaatactaagccaagtttgcagcggttacaacttggaacgccaatggagcacattccagcagatgcactgggaaaggcgaaacaagattgacagagaaatattgaacaagttggcgtacgtgaatcagaatctaaagttagggaggatgataaccttggagacagacccaattgccctggaggacattgacatgatgtcggagtgggtggaagaggcagagaatcccagtcctgcccagtggcttgaccgttttgggaccgcccttgatggaggcgacttgaacaccaggcagtttggcggtgctattttcagtgccaacgaccataacatcttcggcttgtgaagtcctggtaagaggttttcataagttggtccagcgtgttgagtgtttaaccacacacctcggttcgctatactgtacataatgtttgagtaattatcaatgtagaaaataaatattttgtgttcctcacacagtcacacgtcgatgagcttggtggtacaaagcatgtttcgttcatatttgggattcataaaacggtgagcttaagattgtttttgtttgtattgaagccgtaattatcagaacccatatgatagtagcggttattgggccgctagtgaggcccaaattaaagtaaaaaggaaaaatcagtctgaccggagctatataattaatatatatcaagaagactcgttttagttggtttaggtgattcagatcacaaagtacaccgagaatg

SEQ ID NO: 35429 - DNA, 3003 bp, Unknown
  misc_feature (1)..( 3003): 2750-1469P.txt file - cDNA_ID_3087533; gDNA_ID_1974091; Annot_ID_180618
gaattttgatggtgctcctatagctgattctgaattctttggcaagttggacccttcaattcgtgatgcacatgagtcacgggtgagttatgagttaccgatatccatgagtatggtccaattatctctggtctctatcatagggatactttgttcctgagagaaaagatgactgtatcaactatatcgtttttgttgcttacataagtgtacttgaatgaggataggatatatgatatatggggctgaatcttaactatggttgattgccttattttcatattgatgacgagctctgacctcatactccacaggccattttgaaaagctatgtggtggctggatcagacactgccaatccagaaaaatttctggcgtacatggttccttccttggatgaggtagacatgcctctccataaactgatctctcttttacacaaattttgacaagtcaagaaaagttcagtttgattgatgtgttatcaatttatgttgctgtgccagttgtctaaggatatccatgatgaaaacgaagaaatctcttacacttgggttcgcgaatacctctgggatgtatgtactatagccaatgtggtttaagtgaaattttgattgtttgagttgcagattgaaataaatatgtcacctgatgttataacaggtacaacccaatgcaaacgatcctggcacatacctggtatcatttgacaatgggaccgctagctatctggtattgcatcggtttttgttacatattccagttgtgtatcttttttttcttctgtctataatactttgggatgaccgttgagaatttggcagcccctacccatgaggttgaacttgaggaagaaaagggccagggaaggaagatcttctgatgagattgaacactttccagtaccttcaagggtaactgtaaggcggagatcaactgtatcagtgatagaacataaagattcaggggtatagtaaatccatacatttagcctttaaaagagtaacacgtggaaagttctagttctcttaccaattcctttggactttggggctttggatgtaggtttactcttctagggttggtgcttcgagctccaagatgagaagattagaggacgaaggcggccttggtagatcttggaaacacgagccggaacaagatgccaatcaatatagtgatggtaatgaggatgattattctgaatgaacgtttcgtgtacctcaaactattgaatcggttttgcaatggttttcctgcaaggctattgtaggctaatttaaaagcgtaatatggcctccaccacagctttgtagtttggcaagtaaagaaattttgatttggatagctggcgaagttgaaaaacgattttacatgtacacgtccataattaatgaattggccatttacgactttgatcctatctaatgtggcagctccgttcatcttcagtggctatgttcatgagaacacatccctgagagaattccttgtacagagaagccttcttagatacttacttacactgtctttctaccagagctgattagaatctgtaataatattatacaggttctactaccagtaattaattaggatggattagagcaaatcttgtactgtagtagatcccagtgttgcaattgtggttattttacaggttcccgaaaatatgacattttcaaaatttcttgtacaaatgaaattattatggtccactatgttttcttttacgaagggctttttctattaggtgggcctattattatatgaaactgggtttcctcttgtgtagcccagtgggcagtataaaaatcagcccaaaacataactgcgaaattcaaattcttacccactcgcacaattagcgcgtcgacgccacctcctcaaaatctgtggaccgtttttggctgtttttggtaaaattaaaaaattgggcgcgtgagggagttttctattgaggaaaaaagcaaccgtttttgactaaataatgtaacgttttatttgtgatttgtttgactgggaagctctgcaatgtgaatatattttatttacaactttcttctttcgatatgttttttacattatttttaaacaagtttacattcttattgtttcatttattatttatttatttagttatttgctttttataagtatcttaatgtagagattttataaaaatttaaaatgtcaattactgaaatgaccaatcacatgtggacttcgaatatagatttaatattttcctttcctaataatatggataataatatatattttaataacaaaattttgcatttttcttcttttcatatgattttttttttcttttaaaattacattttctctttgtatgtctattaatttttttctcttataaatatcttgatatggaaattttattaagttttaaaatgttaattgctaaaatcagttgtgttgatttgtgattggctgaaaaaaaatataaaaacagaaaaaaaaaaaaaagagacaatgccttgtttttagttatgcttaaatctaatcattattcaagctattgttgatacatacaaatttccttaatcactgctatcaatttcaaacgtttatagattttaaaaaatctgtataataacatcaaagattaaaataaaatggtgagaattttagcactagcggccaacacttaacatcagtagcaccaccatctcacgttgaattttatttttgtaacaaaagaaaattaacatatactaaaaaaacaaccaaaagacattgcaagtttttagtaatttggtaacaaaattgcagtaattcacgtgaatccccaataatttgatctcatgcacacatagtggggtccaatcttttttgttcatttgccacttctcgccagcctctcctcttttgttctcttcactacctccaaacttcccaagaatctctctttctctcctctcttctctctcgcctcttctttaatttcctctgaagagaatcctccttacgaaaatg

SEQ ID NO: 35430 - DNA, 3000 bp, Unknown
  misc_feature (1)..( 3000): 2750-1469P.txt file - cDNA_ID_3087533; gDNA_ID_2926306; Annot_ID_205870
ttttgatggtgctcctatagctgattctgaattctttggcaagttggacccttcaattcgtgatgcacatgagtcacgggtgagttatgagttaccgatatccatgagtatggtccaattatctctggtctctatcatagggatactttgttcctgagagaaaagatgactgtatcaactatatcgtttttgttgcttacataagtgtacttgaatgaggataggatatatgatatatggggctgaatcttaactatggttgattgccttattttcatattgatgacgagctctgacctcatactccacaggccattttgaaaagctatgtggtggctggatcagacactgccaatccagaaaaatttctggcgtacatggttccttccttggatgaggtagacatgcctctccataaactgatctctcttttacacaaattttgacaagtcaagaaaagttcagtttgattgatgtgttatcaatttatgttgctgtgccagttgtctaaggatatccatgatgaaaacgaagaaatctcttacacttgggttcgcgaatacctctgggatgtatgtactatagccaatgtggtttaagtgaaattttgattgtttgagttgcagattgaaataaatatgtcacctgatgttataacaggtacaacccaatgcaaacgatcctggcacatacctggtatcatttgacaatgggaccgctagctatctggtattgcatcggtttttgttacatattccagttgtgtatcttttttttcttctgtctataatactttgggatgaccgttgagaatttggcagcccctacccatgaggttgaacttgaggaagaaaagggccagggaaggaagatcttctgatgagattgaacactttccagtaccttcaagggtaactgtaaggcggagatcaactgtatcagtgatagaacataaagattcaggggtatagtaaatccatacatttagcctttaaaagagtaacacgtggaaagttctagttctcttaccaattcctttggactttggggctttggatgtaggtttactcttctagggttggtgcttcgagctccaagatgagaagattagaggacgaaggcggccttggtagatcttggaaacacgagccggaacaagatgccaatcaatatagtgatggtaatgaggatgattattctgaatgaacgtttcgtgtacctcaaactattgaatcggttttgcaatggttttcctgcaaggctattgtaggctaatttaaaagcgtaatatggcctccaccacagctttgtagtttggcaagtaaagaaattttgatttggatagctggcgaagttgaaaaacgattttacatgtacacgtccataattaatgaattggccatttacgactttgatcctatctaatgtggcagctccgttcatcttcagtggctatgttcatgagaacacatccctgagagaattccttgtacagagaagccttcttagatacttacttacactgtctttctaccagagctgattagaatctgtaataatattatacaggttctactaccagtaattaattaggatggattagagcaaatcttgtactgtagtagatcccagtgttgcaattgtggttattttacaggttcccgaaaatatgacattttcaaaatttcttgtacaaatgaaattattatggtccactatgttttcttttacgaagggctttttctattaggtgggcctattattatatgaaactgggtttcctcttgtgtagcccagtgggcagtataaaaatcagcccaaaacataactgcgaaattcaaattcttacccactcgcacaattagcgcgtcgacgccacctcctcaaaatctgtggaccgtttttggctgtttttggtaaaattaaaaaattgggcgcgtgagggagttttctattgaggaaaaaagcaaccgtttttgactaaataatgtaacgttttatttgtgatttgtttgactgggaagctctgcaatgtgaatatattttatttacaactttcttctttcgatatgttttttacattatttttaaacaagtttacattcttattgtttcatttattatttatttatttagttatttgctttttataagtatcttaatgtagagattttataaaaatttaaaatgtcaattactgaaatgaccaatcacatgtggacttcgaatatagatttaatattttcctttcctaataatatggataataatatatattttaataacaaaattttgcatttttcttcttttcatatgattttttttttcttttaaaattacattttctctttgtatgtctattaatttttttctcttataaatatcttgatatggaaattttattaagttttaaaatgttaattgctaaaatcagttgtgttgatttgtgattggctgaaaaaaaatataaaaacagaaaaaaaaaaaaaagagacaatgccttgtttttagttatgcttaaatctaatcattattcaagctattgttgatacatacaaatttccttaatcactgctatcaatttcaaacgtttatagattttaaaaaatctgtataataacatcaaagattaaaataaaatggtgagaattttagcactagcggccaacacttaacatcagtagcaccaccatctcacgttgaattttatttttgtaacaaaagaaaattaacatatactaaaaaaacaaccaaaagacattgcaagtttttagtaatttggtaacaaaattgcagtaattcacgtgaatccccaataatttgatctcatgcacacatagtggggtccaatcttttttgttcatttgccacttctcgccagcctctcctcttttgttctcttcactacctccaaacttcccaagaatctctctttctctcctctcttctctctcgcctcttctttaatttcctctgaagagaatcctccttacgaaaatg

SEQ ID NO: 35431 - DNA, 3003 bp, Unknown
  misc_feature (1)..( 3003): 2750-1469P.txt file - cDNA_ID_3087537; gDNA_ID_2926306; Annot_ID_205869
ttgacgtcttcgtcataactcggcaactaaaagattcaccaaacaacacgaaattatctttaatgaataaattattgcaagtatacgcatgtattttgtttttgttcttttgttctaaaaactagtaggcgagaaccgagaagattgtgtagctaattacaaagatcatgagagaagtagttcattaaaaattaagttttaccaaaagtaatactccctctgtttctatgtaaatatagtttaagggttttattttttttttcaatttaagtgttgttttcaactttttatgcaaataataaatgtatttaatattctttaactaattatatttaattatttatttttttattagttaaattggttataataaatgatattattatataaaagagatagattaaatgagatttttatgattttttaatttatgtttaaaacccttaaactacaactaatatgaaacagagagagagtaatatggattgggagaaacattacagggaagttcaagagtgtgtctcgtccccagtacttcaatgctgctaagtcgtaggcacgtgctgctgcttcttcttcgtcgtaagccccttatccataaaaccatatattaatttaataagaattatacaatattgtttgaattatatttatataagtcgaaaaggacatatacgaattgcattggatttggacccaaaaaagaacagctaataataaacaggttctaccaatttcggtggaattcattctttaatttacagccatatcacacatgtatatatggacttttttcatcactttgtcgaagagtatttaaaagaaaaagtgacaggaaaaaaaaaagaaaaagaaggaaaagtacaatactttatcaaaatgtgtatttttttgcaacttatataaaaaaataggatattggcaagaaaaaaaaaaaactcacctagataaactgcacttgatgagtcagcattcatcatccattgcacatcaccatcatcaaaaataccaaattaaaaaaatatatgaaaaagatcaagaatcaaatcaagaacagtcgaaggacaaagtctggtccgaagaaaaaggagtctccgagttcatcggaatccaatctaagaccaaaaagatctaacaaattcttgttagttgttaccaacatatacgtgttaagtgtagacaaaccttgacgtcctttcttggtctgtgtatcgttccagctgttcttatcccacaaatgcgcttcgtatctcccagtccatctatgcctattattattcaacaatcggaacaattaaattacctgataaagaacgatgtcgtttatggtattatgagaggagagagaccttgtgacgcctctgtaaggggagctgcgttgaagaggagcgtttcgaggcggcgacttacgtttgcgtttggatgttaaggcaatggacgcagactcagacgcagacgctgttttatcgctgatttcatcgtcaacgattgttttcttgctcctcccagagacttttgccattaccggtgaatgagaagaataaaagattgagagacaatcctgaaaatggaattatgaaaatgagagacagatagttggaaatggttgagtatatttatattaaatccgtcacatcttttttttcgtttatatatatatatatatatatgttaaaattttagaacaattttttggtttaaatacagattctcagccgaatattttaaattgtactgatcatatgataaagtcactaagattatggcactaattatcttgtatttttttttaatagattttatttccggtgatataaccgtgtctagtccactgtcacgttttcttaattagattcatatatgctaccatttttgcacttttcttagtcagattgattattaaacaccacggttaagaatttctcaaatcagaattaatgaaccattttctaaattgattatgactagcaaaaaagatccatatctgtattattgtttttatctgctcatttttgtcgaagaacctaattagccaaagaaaaaaatggagtgcctcaagttttatcgattcttggttgatctacttcttggtcggcccatgagagatgtgatgccgaactagcaagaaactttgttatattttttcattttttttgtacatatttacctgttctcccaataatttagcacttggtaaacaaatatgacgttttgatcataacagcacacacacacacacacaaacaggagaaattttatcacacaataaatttcataacttccaaaccattatctgttttattaatgtttgtatgaataaaagtcataatttattaaatataatgtgtctactacctgccctcatttttatgcaggtggaaggagttgtcaacaattatggtaaaagtttgccaattagagtccaataagcacccttcaaatcaaatgtatttggtagtgacaggtgaggaatctatgtgattgtgaaatttggccatctgaaatcataagtaagcatttaaataaatactttgtttattttcgcatgaaattattaggtattaacattgattctagaatgacaaagatgaacctatgacaaagtatcaacattaaagaccctcttactaagacagaggctttgcctagtttggaacagacaggacatgagccaaatgaagcccacaagacgtctacagaaacaatgggcccaaataagcctaccgaacgactaaagaactaatgggccacaaaaagcccatctactctaatgttctatatctttagaataagtaatttgaaaagattggaaccaaagtcccattgatcttgagtttgaaattccaagacatttttgtgtgcgtgcgtgatttcgtcatccgtgacgtcttcaaacattggttatttaacaagattctctgatttttgattcgtgtgctttctatatagttgggtaccaattcattagtcagatcgcttgttcgtcaacttctctctctaatg

SEQ ID NO: 35432 - DNA, 3003 bp, Unknown
  misc_feature (1)..( 3003): 2750-1469P.txt file - cDNA_ID_3087544; gDNA_ID_2926306; Annot_ID_205867
cgctatgagcatattgttgtcgccaaggtaaaaagggtaacctgtcatatttaaaagtgatccaaactcttgtccgccacttgagcatccctttgaagctattgggtttcttatgcgaattgacccgtagcctacgttaaagaaccggcgatacatatccgaaaaagagatactcacaacttccctgttaatgatggaaagaaaaggaacagagttgttgacacaaataatctcgtaccatttctcgagatagcaacccgttccgattccaaacgggtacgggatgtcgattcctccacatgtcttaggacaagagctagcaacggtgagatcaatgatcagaaggagagagaagagactcaaaagagaacaactacaattagagctcatattaatgttttctgtttatgatctgctcaagaaaagctaaaagcagagacgggttttgtaaggatgagcgaaggaaaaatcttgtgtttagtttgacccagcaatgaatcataagtcttcatctttgaatttcgctttcatattttcttctctggtcagtctttgtttctctagtcctcctagtgaaagcttttcttgctttcagtgagcctccttgtttgaatttcaatattttatattcctccatttatttacgagaaaaaagaaaaatatcaaaacgtgactggtttaggtcgcgaggagaaatttccactgtaactatcacaatccgactctagattaaaacgtggctaattaaatatcaaaaagagaacaagtatctgtagagctcatgcatgtttattatgtgttatgatctgctgaaacattagtcagagttgcgttttttggattttcttttgtaaggtcacacgcatgaacgcaagaaacatagagaagtgaatctagctcagcttattgttttaggcttattagaatagtagacactttttaaaaagtaatttgagaagtaggtagtttttttagaaatttgtgaaatagacactttttttactttttttgtgaaatagaggttatgtgtaataagctaaaagacaaaaaatatgtcaaataccattttaccttttactttatatgaaaaaatatgggtcaaactttttatattatttaactatttagaactatttttattatattatagttattttttttttcatattcatctttttgaattttataaaaataaattatttttaaaaaataatttcttcttccaaaaacaagatgatttatatgtttttaattataattctcgtacaccagcattaaaacatagttttgtacactaacacttatacaccaaatcattttatacatatcttctaaaatatttctatttatctcatatttataaaataaaataataattgttcataaattaataaaaatataatggtgtacaccatcatgtatactattaaattaaccataatggtgtataccattaaatgaaagtaatgattatacatttttacttatgtacactaacatttgtacacttttatgtacactaatctcatattattattatttaaactttgttttgtatattatcacttgacaaaaatggttttatcttttgaatatgaggtgtacacaataggtgaaggtgtacgatattatatacggtgtacaaggtgatttatggtttgatttattatctcattattgcatgtatactattaatatcatgtacaccatattttacattttcgtacaccatcttattatgtagttatacatcattgtatattatcgtttgtacatcactttgtacactgtctataccgtataccacttcttagatcattaagaaacaaaagttatttttgactttatttgactatatgacaaaacaacagaaggctataaaggtcattcactaaaatctctattagatagaaaattgtattagaaaggaaagagaaaagtgtctattctccctatttctaaaaaaactacttactttgcaaattatttgtgaaaaaagtgtctagtttccaacttatctctattgttttctgctacaatatttaataaatcgtactttctcctatacctaaatcaacacggcctttatttgttagagtatctccatgggatagatacccttgctagtttctcaacaaaagaaaaaattattattttaattatataatatattttgtttcaattataatacttaaactaatatttgattgacatgccgcgatttaggctgagaatcgtttctccttgattctcaagtgagaaactcttcttccactctctcttacttttttacttttgggttattattttattattaagtttctcattcagaaatgatgaagatggccttacgtttacattttaaaacaaagaagcatgtagtacttttgaatattgtttctcaccattattgtacttgtggaaaacacaaaagtagttgttgttactttcatcactctatgagcaataaaaatgcagtcctcgatgaaaatgtggctaagaaatgttagggaaatgatccaaaaacctttttgactaactcgttttgacctgtcattactattattacatagttatctcatttttggtctctattgcaagaatcatgaaatcttcttataagagactttggtattacccacaaaacaacttaataattttaccttttgatattatataatccacacaactaacatgaactaactgctgacataatcgtcttaacattaaaaaaaaatgaaatgaatgcatgcattgcatataaatgtacaaatgttggcttgatctcttgacccctacctaagacgtaagaaggtattttagagctgtgaaatgtgtcaagctgagtctcggagtgaaaagggtccggtttagtgaagccaagtaagcaaagccccttgtttttgacggacattatatctcctcctcttctcttctataaattgggcacctttttccaattttacgcacagtcacggagatagatagtaagagagagctatg

SEQ ID NO: 35433 - DNA, 3000 bp, Unknown
  misc_feature (1)..( 3000): 2750-1469P.txt file - cDNA_ID_3087548; gDNA_ID_2926306; Annot_ID_205866
attgaggttaattcactggaaaaacaactccaaagaagagctgatcatgaagaaaaaaatcccaaatttttcagcttaaactttttttaaaaccaaaatcgaattgaaatttctccgattgacctaaaactctttggtcgagtttgttgtgtagttgatagggtcaacgaagcatcaaatcaaaccccaaacctaagaaaaggatgactttttccaacaaagacgtaaaatttcaatgtgcaaacatctcagcgtacgaattcgatttccgagtacttttcatcaaacaagaaaagggaaaacacatgaacaataaacatgcctgggtttggacacaccggtcttctcaccggatttagtcagaacgtcgaagtgctcctccgccatagctctctcttactatctatctccgtgactgtgcgtaaaattggaaaaaggtgcccaatttatagaagagaagaggaggagatataatgtccgtcaaaaacaaggggctttgcttacttggcttcactaaaccggacccttttcactccgagactcagcttgacacatttcacagctctaaaataccttcttacgtcttaggtaggggtcaagagatcaagccaacatttgtacatttatatgcaatgcatgcattcatttcatttttttttaatgttaagacgattatgtcagcagttagttcatgttagttgtgtggattatataatatcaaaaggtaaaattattaagttgttttgtgggtaataccaaagtctcttataagaagatttcatgattcttgcaatagagaccaaaaatgagataactatgtaataatagtaatgacaggtcaaaacgagttagtcaaaaaggtttttggatcatttccctaacatttcttagccacattttcatcgaggactgcatttttattgctcatagagtgatgaaagtaacaacaactacttttgtgttttccacaagtacaataatggtgagaaacaatattcaaaagtactacatgcttctttgttttaaaatgtaaacgtaaggccatcttcatcatttctgaatgagaaacttaataataaaataataacccaaaagtaaaaaagtaagagagagtggaagaagagtttctcacttgagaatcaaggagaaacgattctcagcctaaatcgcggcatgtcaatcaaatattagtttaagtattataattgaaacaaaatatattatataattaaaataataattttttcttttgttgagaaactagcaagggtatctatcccatggagatactctaacaaataaaggccgtgttgatttaggtataggagaaagtacgatttattaaatattgtagcagaaaacaatagagataagttggaaactagacacttttttcacaaataatttgcaaagtaagtagtttttttagaaatagggagaatagacacttttctctttcctttctaatacaattttctatctaatagagattttagtgaatgacctttatagccttctgttgttttgtcatatagtcaaataaagtcaaaaataacttttgtttcttaatgatctaagaagtggtatacggtatagacagtgtacaaagtgatgtacaaacgataatatacaatgatgtataactacataataagatggtgtacgaaaatgtaaaatatggtgtacatgatattaatagtatacatgcaataatgagataataaatcaaaccataaatcaccttgtacaccgtatataatatcgtacaccttcacctattgtgtacacctcatattcaaaagataaaaccatttttgtcaagtgataatatacaaaacaaagtttaaataataataatatgagattagtgtacataaaagtgtacaaatgttagtgtacataagtaaaaatgtataatcattactttcatttaatggtatacaccattatggttaatttaatagtatacatgatggtgtacaccattatatttttattaatttatgaacaattattattttattttataaatatgagataaatagaaatattttagaagatatgtataaaatgatttggtgtataagtgttagtgtacaaaactatgttttaatgctggtgtacgagaattataattaaaaacatataaatcatcttgtttttggaagaagaaattattttttaaaaataatttatttttataaaattcaaaaagatgaatatgaaaaaaaaaataactataatataataaaaatagttctaaatagttaaataatataaaaagtttgacccatattttttcatataaagtaaaaggtaaaatggtatttgacatattttttgtcttttagcttattacacataacctctatttcacaaaaaaagtaaaaaaagtgtctatttcacaaatttctaaaaaaactacctacttctcaaattactttttaaaaagtgtctactattctaataagcctaaaacaataagctgagctagattcacttctctatgtttcttgcgttcatgcgtgtgaccttacaaaagaaaatccaaaaaacgcaactctgactaatgtttcagcagatcataacacataataaacatgcatgagctctacagatacttgttctctttttgatatttaattagccacgttttaatctagagtcggattgtgatagttacagtggaaatttctcctcgcgacctaaaccagtcacgttttgatatttttcttttttctcgtaaataaatggaggaatataaaatattgaaattcaaacaaggaggctcactgaaagcaagaaaagctttcactaggaggactagagaaacaaagactgaccagagaagaaaatatgaaagcgaaattcaaagatgaagacttatgattcattgctgggtcaaactaaacacaagatttttccttcgctcatccttacaaaacccgtctctgcttttagcttttcttgagcagatcataaacagaaaacattaatatg

SEQ ID NO: 35434 - DNA, 3000 bp, Unknown
  misc_feature (1)..( 3000): 2750-1469P.txt file - cDNA_ID_3087552; gDNA_ID_2926306; Annot_ID_205865
tgacaaatgtcgagccaagtattgtgggatgcgagtctacttgcagcacaaatcaagatatacctataaatgattatctcggggtactctactgtaatgctaggtatggcgattccgagtattgtaaaaatatttccattatgaatgatacaagctgcaacggtattggatgctgcaaggcaagtttgcccgctaggtatcaacagattattggtgtggaaatagatgatagtaacacagaatccaagggatgcaaagttgccttcataacagacgaggaatactttttgtcaaatggatctgacccggagaggcttcatgctaatggatatgatacggttgacctaagatggttcatccatacggcgaatcattccttcataggctctctaggatgcaaaagtatagacgagtacacaattctaagaagagacaatcgtgaatacggaataggttgcctttgcgactataactctacaactacaggctatgcaacatgttcatgcgctagtggtttcgaaggcaacccatatattcctggcgaatgcaaaggtatataagtaattgcgctaattatcctagttttctatgaccatgcatgataaaaatattccaacgagatcattgtttgataacatgttaattttaataaaatcagatattaatgaatgcgtaagaggcattgatggaaacccagtctgtacggcaggcaagtgtgtcaatttgctgggcggttatacgtgtgagtacacaaatcatcgaccacttgttataggtaagtcatgaaaattttcatctcaagtacactcacatctatctaaagttttcttttatatatacatatataagattgtgtacaaatagtgttgagccatatagaaaatgtattttgcttttcatttttcttttgtgggtttgtagggcttagcactagtttcagcacattggtattcattggtggaatatactggttatacaaatttattagaagacaaaggaggttaaaccaaaagaagaaattctttaagcgtaatgggggtttattgttgcaacaacaattgactacaactgaaggcaacgtggacagtacaagagtgttcaactcaagagagttggagaaagccaccgaaaactttagcttaaccagaatactaggcgaaggaggtcaaggtacagtgtacaagggaatgcttgtagacggtagaatagtagcagtaaagaagtccaaagtcgtagacgaagacaagctagaagagttcatcaacgaagtcgtcattctctcacaaatcaaccataggaacatcgtaaaactcttggggtgttgcctagagacagatgtccctattctagtctacgaattcattcctaatggtaacctttttgagcatcttcatgatgattccgatgattatacgatgactacttgggaagtgcgtcttcgtattgctgtagatattgcaggagcgctttcatatttgcactcggctgcatcatctccaatctatcacagagacatcaagtctacaaacataatgttagatgagaaacatcgagccaaagtgtccgattttggtacttcaagaacggtgaccgtggatcatacccacctcactacagtagtttcaggcacggtgggatatatggatccagagtatttccagtcgagccaattcacagacaaaagtgatgtttatagctttggagtcgtgctagcggagctaatcactggagaaaaatcagtctcttttctgcgatctcaggaatataggacattggcaacttatttcactcttgcaatgaaagagaacagactctccgacattattgatgctcgaataagagatggttgtaagttgaatcaagtgacagcagccgcaaaaattgcaaggaaatgtttgaatatgaagggaaggaaacgaccaagtatgagacaagtatcgatggaattggagaagattcgttcatattctgaagatatgcagccgtatgagtatgctagcgaaaacgaagaagaaaaaaaagaaacattagtggacgttaacgtagagtcgagaaactacgtgagtgttaccgccgcatcatctcaatacagcattgctacaacatcttcgtcgcggtcagatgttgaaccattgtttcctcggtaatatattaaccatgcatgcaaacaaatttattactacctcatatctttgcatttacgttctgttttggtctttacgtgtgaagttatttctataaatgtcgtcactcgtcaatttgtgttattaaccatacagatctgtttgtaaccactttgtagtttgtactttgtactatacacttcccaatacataagaataatttcatagtttacttctttaaatattttggcaataattattacagaatttactcaagtatttgttatctggacatgggctctcttacataattatacatgtccaaaacataaaaccgttgagactgtttttaaaaaaaaatttatactacaattatatgagaattttgtgaatccggtcagatcatggatcatgttgaaccttaatccgattcgactcaatgaccaattcatttcggtttaacagaaattatgttaattgacaatgtgatggaaccttaaccaacataatttagaaatttcgactgatgaaaaggatcctttagtttaagaattaagatagtcaacttttccattgcacacatatgaatgatttgcgttggtgaatagtcaatttcctgatattaataatctatgtgaataatcaactttgttatatcatctgggaaaaaaaatgatagtaaaatcgtataactaaaattaagattctaattatgaaaaattacaaaattgatttggacaataagttgtgtaaacttgtaatgataattgatcccttgaccgttgacaaaatagaacttccaaattccaacgagacggctcaataatttctaaaatagaactttcatacataaaagtcattagagaaaaaaaaaatg

SEQ ID NO: 35435 - DNA, 3000 bp, Unknown
  misc_feature (1)..( 3000): 2750-1469P.txt file - cDNA_ID_3087558; gDNA_ID_2926306; Annot_ID_205861
tacagtgggaggagatgacgtaccaacggagatggctgttaaaccacccaaagcagcatgtaagcatttacagaaatttctttatacttgaaatccattctaaacatccatgtggatcaatgcatttctgattaaataaatttgtcccggtatcagcaagcctagatgaatctgatgacaaatcaaagccgccagttgtgcagcaaagagggcgttttaaagtaacttctgaaaatctcgacatcgagaaggtaacttttttttttttttttttggttttaagaggaaaaaagagctttcttgtatcaatcacgtttgtgaggttttcctttgtattcgctatctctttatcaggtggtggcgccttcgccaatactgcaaaagagtcacagcatgcaggtttgtaattgttttgagttcaacttgatcagctgcagacgaacaatcaaatgtgttttaccacaactattcatctcaagttttcttaatgaaaacaaataatatttttacttgcggttatgtaggtgctctgccaacattcctctgcttctctacctcactctgatgtcacattgccaaacctaaccagctcatatgtttacccgctggtgtatccagttctgcaaactaatattttggaaagggtatggcttttgcttcttagacgctacttcctttctttatatatctcataacaatatgaaagttcattgcataattgaaattgtcccttaaacaggataacattttgcatatgatgaaagtactcaccaacagagagttgacaggtttatttcgtgcaacttcactccttttccatctcaattttcccttttgattacatttttccttgccactggattgaaatttcctttatttctttgatgtagatggacgtgcagttgaacaaggaagtatacaacaacctactgtgcccccaactgagaaatccatggtatgcaattgtttgcaagaaaaaaatgtattgaatcacattccttcagacttttgagcttaatggaactgttcttctgttgaatcatagcttgaagcagcacacgaaagagagaaagaactgctccatgacataaccgacctgcaatggaggtaactatcgaaaccatctccttgtatagtttagattaaaatccatcattctcacttgtttttgtgtgtgttcataggctcatttgtgcagaagaagagcttcagaaatacaaaaccgaacacgcccaagtaagtatgagtaactaaacacaatcgttcttatatgcaatcttttcaattccactatatgtcaaagatcagtaaaactcatcacttgcctgttaaaattccaggtttgatttcctaagaagcctgagaagatatgtgcttaagtaaagaagtttgatttcatcatcaacaataagtatttttaataagataatacatctaatgaaggtaagatttgctttcagatgttttgtcatttgattcataaaatacatcactccctagtccctactatcattctgtgttatcttttttttttttttttttagttttttaggtttgtttaaggaatatgtattatgtaccatggtagctatttataaccatggttacataaggatttgtgtaatattgatgatacaaaaagcgttattgagaaacattttcgtgagatggtgattaaaaacatagcatcttgataaactaatggggtgtatgtgtttttggatgcgtgtgaatgaatgcatctctctctctcaacaagtcagtgggacaactaaaacttgtcgtcgtgtcgcattggccagcacacaatccgtgaattctattacagtcataattgcttctcttttaatgctgctcatatgtgtacatctttatttatattttgtgttatagattagatgcttataccatatatatgaagatgtgattaacataggttgttcaatctgtataaattaaaacgatttaattcataccaaaattgaaaaccccaattggttagtaattatgtacttcccaaaaggccaaatcaagtaaacaacacattagatattatcaacatttatttgattttaaaatttgttaaaggttaacacaagtggatacttcaattatatcattttttggaagaaagacaaaacggagttattatatttttttccaaaacttggctggcttcagaaatcagaatttaggtttaataaaggcagaaaaggacttgtggctgatcaattgtgaatacttaactaaccattaattaacaatcaaattcgaaccattacacacagacagacgacaactttgacacgtggcaaaacgtaattgggttattttcgggtgaaatggatgatacgatgcagccaagaaccaaattttcccacaattattattgttcagaaaagaaaagaaaaaacactcaaatgaaagatctcacgtgcggaaccaaactatgacctttgtctgaccattgcgtttctctctctctctcaattgttctatgaactttttttggtaattctctctatccagaagtggagttagtagtaaacgttggtctttgttgtgggtctgaaagtattagcgtcgctgtttccaagtaatcctaaatcagttcacaagaatctgatttgaacagattgtgatgttctgttttctttctcttttttccttttaattctcgcaatatgcaaaagtatgagtctttttacccgagaaaatagcagttttcccgagaaaataaaccagaggtccctaaagctaaagctaaaactaaaagctaaagtagtgtggattttctagatgccaagtttcgttttttgagccttttaagctcttttctggatttcgtttttctcgtttcgctctattcttcgccgagcaagtaatcattgccgacaacccccagaaaaatcgtagatttcttcaatcggcgatttaaaaaatttgaactttttctttaaaagctttgagctcttttttcttcggattattttcaaaatg

SEQ ID NO: 35436 - DNA, 3000 bp, Unknown
  misc_feature (1)..( 3000): 2750-1469P.txt file - cDNA_ID_3087562; gDNA_ID_2926306; Annot_ID_205859
tttcttcaacaatgatgattatcttcagatacagttggcacttttcccacctatgggcaagtattttaacagaactgaagttcagagaattggatttgacttgagtaaccaaacatataaacctcctcctttgtttggaccttactacttcattgcatctccctacacattcccaggtaacattacatacgaagcttatacacctttttggagttaaacacatcgtctaacaatcgaataatttttggcagctgatggtaacggacattccttgagctctcggatggtcactgggataataactggttgcagtgctttggtcctgtgccttgttgcgttaggaatatacgcaatgtggcagaagagacgtgcagagcaagctatcggtttgagtagaccatttggtaagtccgatgttctaacaggtgaagttatcttagaaacactaccattttagattctctgaggttcacctgaaaaaaaagaaactctacattaacttacatgatagatttactgttaagtagaagactgacaatgatattttgattcactcagtttcatgggcatcaagtggaaaagacagcggtggcgcaccgcagctgaaaggggcacgatggttctcctacgaagaactcaagaagatcacgaacaatttctctgtgagcagtgagctgggttatggaggttatggaaaggtgggtttttgaaagatcgatcttgaaactatctagggcttcactttcagggtttgacaagtaacgctcctctgtttctctctgtaatctccgcaggtgtataaaggaatgcttcaagatgggcacatggtggcgatcaaaagagcacaacaaggatcaacacaaggagggctcgagttcaaaacagagattgagttgctttctcgagttcatcacaagaacctagttgggcttgtcgggttctgcttcgagcaaggcgagcagattctagtctacgaatacatgtccaacggatcactaaaagatagcttaaccggtactgaaaaatctggcctttaggtgctcaataaatcacaaacacaaaacttgaccattacgtattgtttttagggcgatccggaattacgctggattggaaaagaaggctgagagtggctctaggatcggcaagaggactcgcatacctccatgaactggcggatcctccgatcatccacagggacgtgaaatcaactaacattcttttggatgagaatctgacagccaaggttgctgattttggtttgtccaagctggtttcagactgcaccaaaggccatgtttcaacacaagttaaaggaacattggtaagttttagataaatcaacgagtcatattgctttcaatttttaggaacttttgtttctgatgattcaatggcagggatatttggacccagagtactacacaacacagaaacttacagagaagagtgatgtgtacagcttcggtgttgtaatgatggagctgatcacagcgaaacagccgatagagaaaggcaagtacattgttagagagatcaagcttgtaatgaacaagagcgacgatgacttctacggactgagagataagatggatcgttcgttaagagacgtcggaactctgccagagctcggccggtatatggaactagccctgaaatgcgtagatgagacggcagatgagaggccaacgatgagtgaagtggtcaaggagattgagattatcatccagaatagtggggcgagtagtagctcctctgcatctgcgtcgtcatccgctacagattttggtgagaagcttttgtacggaggtactttgaagaagaaagaagcaagagacggagatggaggcggagcgtttgattatagtggtggctactctgttccgaccaaaattgagcccaagtaaatatcaacatctcttgtgagattatttgtcgttactttttgtatgaatgaatggaaaagtcatattgatgaaaacttgtgcgagtattgttgacctgaaacactgtgaggctaggcccattagtaaatcgtgattactaaaagaaaatcttagtagttgggccaaataaattagaactgtaaactgtccatgtatagacgtcatttgccttttcagcccaaaaacggtagcgtattaacatgagccaccactgccactggacatatacacatttagcccatgtttttagtaatcgtgtttattagtaattgggctcaagtaaatcagagtagttgatattattaggcccataaaagcccaaaacggaaagccacctgagaagcagtggggacgcagattcctataaaaagcaaaatgcgtcctcggaaaggaagaagaagaagaagtctatctcacgagttcccgtttcgtgaatttctctctctctgtgtgaacaaagacgaagaagacgaagtaacactgatagaaaccctagttttttttttaaatccgtcgaggcgtaatgtcgtcggagctgcagatttcgccggcgattcacgacccgcaaggtcaagagaagcagcagcaagccgccggagtcgggattttgcttcagatcatgatgcttgtcctctcttttgtactcggtcatgtccttcgccgtcataagttctattatctacctgaagctagtgcttctcttctaattggtttgtcttcttcttactcctcctttgcattgcgatcgtccttttcgttttccatcgattgttttgtttgattccttgtgaaatttgtggaattgtagggctgatcgttggtggtttagcgaacatctcgaacacggagactagcataaggttcgttgaactttttctcatcagtttttttagtattttctcaattatttattactatttttatgtcctttcctccattgacctggaaactcaaacgattgtaaattactcactgattacatacacgaatacatgtttatatgtgtgtaagtgttcttcaatgctaatctattttgtttcttctgcaggacatg

SEQ ID NO: 35437 - DNA, 3003 bp, Unknown
  misc_feature (1)..( 3003): 2750-1469P.txt file - cDNA_ID_3087566; gDNA_ID_2926306; Annot_ID_205858
atctttttcttcgacactatgtttcgttttttgtttctaattaatatcaagttcttcgatttacatatttgtacaaatcatcgagtataaatacctagatatacatctaaagaattgtgtatactatctttgacaaaaaaaaagaagaagagaattgtgtatatattacgtattagatagctacaatattattattttctactgtgacgtaagtatgattatgaggattaactatactaatcagtaatcactatggattacagctgttatatagtaaggctgactaatttgctttgaaaacaagtaggaatcgattaatgagaatgaacttcgaatactatatagtacatggtaaatataatataatacaagatctggtttatgtatcccaaggacaaaacaaaacaggaattgaagcttctatgccctcaaaattgcagtcaaatgttgggaagaaaaatgatgtatcgtaccttgaattatgctcccacttacttttttaatgcatcaatttcagtgcagtttcgttggaaatttagaaataagattttctacaaatgatcttaatccttaaagttccatatttgctccttacttaccatattagttatatgaataacgttagagtgttcatcaaaaaaaaaaaaaacgttagagaaactatgggatttaaatgaacagctaattatactatatgattgaacgtgcaagtaatattggcgcatttccactagcgtttttttttcttaacattttgtaagacaattttcatgtaattttcttctgctaatttttttttagtttaaactttaaagttgaaatattaatacataataacgtacgttcagttcacagacgttcttaaggttctgcaaatagcaggattactattaatgtttccctataatgtgtatacacatgatttatctgcagttgcgtcaaacaatcataactgaatttgtatatataaaaaggcatgggggatcgatcttcaaaactgtggatatgatttcctgaaatataactcttacaagtttatgaaataatccatttgatataaataaaaaagttcactaaacgaacaaatagatatagagactttagagcctttgacaaaaagaataagaagaagaattggaatgcaaagaagaaaaaagcaataatggaaaccggtacgtaggaggaggagtgtggcacgtgcggtagaagaagcaaaatcctgaaaggccgtggaggagagcacgtgatggtccaacaccaaatccacaattcaaggtccctcgtttgacttcactctctcttcttgagattcgcctcaaaatttatcttcttctcacttttttccccaaacgaattacataaaactattaaagataaaaacgaatatgatatgaatggtaacttttaatttcctaaattccatgtaagatacacgaaacacataaaaacattggattctcacggtaaataatctcttcgtaaaacaatttatgaaacttacaagtttctgttggcccaatattatcttattgagatgtgccgttgccttcacgaagacgtcatgcattaaaccccttattaatgagcgtttaatcatatagagataccaacatgttctgaaacttataatcttattttagaatccccattatggctaattaagtgtacgtataaaattcaaagtgatacgcaattacctttagtatacaatatatatatatgtgttgtacaccgtttggttcaggtgaattactgaatcacctggctattttataacaaggagggaaattaaatactaccatttttcgggtatttattatataaaacattttatgaaaatttatattagccaaacaatctaagagatttcatttaaattaattacaagtgttcattgttgatggataaattgcatattgaggatgaataccaaaaaggtaggtagatgccaactagaccaatcttgtgcacggcgtcgtttcatgagtatattaaatgggccttaaaagtattaccctttttatgacgacccatttaatttaggaagcccaaagatgaataaacctattattattgtttatgtgtttatacttttgaacccataatttatttctgttatgtcatctcaaccctaactttatataatcagtattaaatccaggcatcttcaacgagccgtcaacaaagataggaaaacgtagtcgtttgatacagctggtataaaatctgaattcattcttcaaataaattaaaatcttcgttggcgttgttgttggttgcgttacagattttggactaatcattattttcgtgcctgcaaagtcagcacgacgatcgcgtttcgatcttcaaagtagaagaagacccgccacaatcacaaatcgcggtgcatatagtctaaagggtaagcttttcgattcctttcaccatgtaaatttaggtcaattccgtcgcttctttgatttggggtgtttttcctggcgcgaaatctttccgattttccctgattatgaatttataaataatgggtatcgcagattttgggtctcagtggctgattcttttcgactctagtttctgcttccgccgtctcatttttttttctacgcaacagtaaagtttttatttttccacctgaattttcggatgatggccgaagattttgtgtctatgctgatacctaatttttccatctgaaattgattttattcactgctattttcattttgttttcatatcattgtgactcgctactaaaagcttctaaatttgttgcctttttgtgaaaagctctttacacggtctatggtaattgtgttaagattcttgttcatcatgtacgagattttcattgggtcacaagagtttcgttgttgaagctactagtttttttcatgatcaaatacttctttgagctacttgtgattctctttacatgatctttatgtagaagataagtattgctgtgttttaattagttaggtacttgttttcaggtcaatg

SEQ ID NO: 35438 - DNA, 3003 bp, Unknown
  misc_feature (1)..( 3003): 2750-1469P.txt file - cDNA_ID_3087578; gDNA_ID_2926307; Annot_ID_205909
agaactcaaacaggtataattaactaatatgttatgattcacaatagtaatacagttattttactatttattttcttgttatgacgtttgtttatttttcggataagggttttaaatcgagaatcgaagatgtaagagaagagataatgaggaagagaagggctgggaaattgccaggagacacaactactgtcttgaaaaattggtggcaacaacattgcaaatggccttaccctacggtgagtactctctatattttacgaacaacaaatatagtttccgtctaattgtttgtttgggtttacgttttcatgaaataatatgataatcattataacatgaaacaacaaatgaagatagatatgtaaatgcaaagaaacaatcaagacccattttggttacactcaaagtcacaacatgcattttttttctattcttcaaacatactgaatttgttactaatactcaaaaacactatacatctctctcccgttcaatatttggcacaagccaaaaaggtggactacagtctaaagttgcatgctatagtggaaaagaaatagcctttgacgctatcagatctgcacatgcattggcctctcttcgttgaaactgaaactgattgtttttgttttctttcctaaaatgtcattaacaacaacaaatttataatgtaaaaaaatatgtgtcttgaacaggaagatgacaaggcaaaattggtggaggagacaggattgcagttgaagcaaatcaacaattggttcattaaccaacgcaagaggaattggcacaacaactctcactccctcacttccttgaagtccaagcgcaaacactaatctcttcttactatattagttactacctctacatatattcatactaattacactgctaagacatgcatgatacatacgtaattcatgttactgataataacgaggtgtgatcattaatatcatgtacttacttagcttattagatccaccgactactatatgatttgtgcgttgcgtgattactggttgttactagattgtaattcattttgtttgtattgtgcattcaaatttatctttttggtaagaacactgattttgtaacgtgttttccgtggatgactagaccatcatttggaaatataaagtaatgatgccgacaaaaaaggcagtgttttataaaatataagccatatcataatatctttggaccgatcaatgaaagaaatcgtccataaaaatggattagtttaattccagtttagattattggtattctcaaaaactaattaacgtatagttttctagttctttatttgataccaagatttgtgtaacttaatattttcaaacgagtttacaaacacaactagaccgagaaatagatatatgatgtattcattaaaaaagaaaaaatagctcttgagattgagaacttgggatcttactatcttagaaaagtcaccacatgccgccatcatttgtccactacgattcagacagaagatccgatctgtttatatatatatatataaaagtaaagacattactttatgccttatggtaacccccgattactataacattaaactactaattaatttgacaaaagaagttggactgactgcttaataaatgaatgttagtgacatacgtatatattttcgataacgtgtatggtatttaagggcagggggatttgtacatttggagttttatatgcttaatatatcaaatgttgtatagatccagatctttggtttaaacctcattagtttcgatgtcaaatcaattacaatatatatagaaactttgcaattacaatatttagtaccaaaaatcggtggaattatgtacatatgaatatgatataaatcactacattaatttgtaattgagatgtatctgtatatttattgaaatgatactatgtttaaagggttaccgattcgttaacgggttcttttgctaagttagctctttgatctcataagattcggatgcttaatataatatacgcatttatagtcgataattgtgaattgtaaattcaaaacagtaacgtgttttaagtgtttttttctttttcttcgaactttttaattttcactattaaaaaatagtatgagtagtagttgaccagaaaaagggtggtaaaaagaaaaaaaagagattctttaattaaaattgcaacgaataatacatattttaaattcagacacccaatgaagtggaatctcctttgtgtttaactaataatttctcacgccaccgctttcacagatctctgtctaaaattcagacaacaataaactattttaaacacacaaaaccactacgaaacacaataattcatgtttagggtgatctgtcacatattatattcatatattgaaataattttttgttattcctactaacacatttttttcaatgacatttccacgaaataaaatttataaagtcttcttatatttactgaataaaagttctacattatgctattaaaagtgtataaagtaacaacaaatttatacataataacaagttttcttataaaaatattaatagcatttttttttatccatagaactatttttatcatataattttaaaaacgggataacttgtttattttatgttaaatttaagttaactagttgtataagtactaatgaaaacattttcttaaattcaataacaaaaatttatcactactccaattatctacacatgttttgcttaatttttggtaatgtcacctaaatttaacaatttcctaaaatattcatgaaaaaaaactcatgggtcacaaatctcaaataagaaacgatgggtggtcaaaagaaaaaaactaaaaagattattgcttccccgagaaattgggataaaaagaagcaacaccgatcacaacgtctccctataccatctccttcagatccacacactctctcttatatctctccggcgaaaactttccgatcaccgacaaaaaaaaaaaatg

SEQ ID NO: 35439 - DNA, 3000 bp, Unknown
  misc_feature (1)..( 3000): 2750-1469P.txt file - cDNA_ID_3087591; gDNA_ID_2926307; Annot_ID_205910
ttgtgtacttctattaaatcaggagaatatctgactgacaccatacataatcatataactgcagataaaatatcggtttttttttgttaaagtgtcgttaagttacttttggttctatagtttgatcaagtgagtatttaaacactactaagtaagttactattggtactagataaaattttggaaatatgtatgtgctgccaattaaattatctgtctcagtggagtgttgcaaatctacaaagtactattgggtattaattagtacacaatagtactttgtagatttacacgtattcatttatttttaacaccagtaattttttttggttacatacttagatgcaacacactaattgaaaaagaaacatgcaaaatacacatgtaatagcaccatgacgaaagtagcatatatgcatcaatagctataatacatgtataaattgataaggaaacaaaagaaatgattggcctagcaaatttaacgagtatcaactttggtcatattttgaaaaacgagtatcacgtgaaatcacggttgtgaatattttaggtaacttatactaaaagcattgtattgtaggtggccaaatatgtgtatataattttctctttattcttggtaactttttttgtccaaccctatttttcattataattttgtccacattctcatcatactaaattactaacgcacatacgcaataagaaaaaaatgtctgccagattattaaatattccactttccaactaaaattgtgtcgctatcttttgtaattatgtaaaaataaaataaaaaaaaacaacgatacaaattgtatacctacacatatgacatgtccattacaataccaataaactgaaggcaaattgaatacgattccatgactttcatttattatacatataaaattagggaagttgtaaataatttaggatttttctcaaaaacaaataatatttcgggttatgtgcttaattagatcatgtgtaattagaacacgtataatatcactatcggaataacgttataaattagtagctatcaacttattatacacataaaattaaggaggttgtaaataatttaggatgtttcataagaataaaataatatttcggatcatgtgcgtaattagatcatgtgtaattctataacaacacgtataatatccctatcataataacgctacatgagtagttttctttattaatatgcagccgtcttaaataatttattcctctttgaccccaaaacttacacattaaccaaaaaacaccccatagaagttttatagaatcacgcaaaaacccccttttacaaaaacgtgccaatttgaggacttaaagcatccacgatttgattgatatttcctcaatgattgggtccgagagtaaatgcgattgataaatgatcacattactcgcgataagagtctgcgatctactataagcaaactagtcgtcttttgattctcctcttcttcacctttttaccaatttcctcgcttacaagattcaaagggtttgtgattgagagaagctttaaaaaacccatctttggtgtttgattctctgtttatttaattcataaaggaaggctcttttttttttgtttatttcaggctcattacgttgatggtcatctaaatctcaagaagacaaagttgcgatttttgcaactgggtttctctcttcaggtactgagtttttgttgttgattgtgagaataaaaaggaaagtagacaaaagaagagaatctaggtttttgattgaactccattttagaaaaagttgaaaactttttggcgtttttcatttgtttttcaagttgtggaattttctgaattggcaaaaaaacaattttgtgactactaaagcaacttgtcttggctgcttctttttatcaatcatatatcattgactccactaagatctagtatttatataatattttgtgtaggccttattaccttcatgctaagctcgtgtcttctgatctatttgtaattattttaatctattttttttcagagatttaatctgtataagaagatctcaagatcagcttttgtgtattgaagaagaactaggaagaacgaggatagatacaggtattatttttatatatcaagatctctgcttttggcttatttgtttatcatctttttcacttgaaatgcacgagttttaaagtataaataagctttgtgttcttgttcttgaggctttgtgttgtgtgaagtagaaataagctgaatttggatttgatttgatttggtattaaattgtcctcactggttttgcgtgattatatcatctatgcacatggcttgtagcgctgacttgcttataagtatttttataaaacgtgttgcgttcttgttttggcttctataattgtagttttagaattgtgcttgagcactaatcagattcacagcaattcaaaaatccatttagaggtataattccttttagatgctctttgatcttttcgtgcttgagtcagtttgtacttttgtccttgactctttctaaaacaggttttgtgttaatcccttgaatctgctttatcgcttatgtctcttgaaatctatctatgttgctctctttgtgactgtctgatcattagttgcaaaatgtgaaattgtctgtgtaatgatcaggtcgagttttatgaaatgttgttagcttccattgagtaaggcttattgtggattggtggattgaaatcttcatgtaactataagtattgaggagctttgaatgtggatttaaaactgttctggagtgtcattgactttggatactattattatgtatttgtattaaattcatattatgtatgccacagacccattctctatttccttcaacaagttgacagagagcaaaatctttatatacgtgatatcaaagtgttctaatttccacattcttctcacttctcaggctttaatctaaactttgctctctgctttctgcgattaaaagatg

SEQ ID NO: 35440 - DNA, 3003 bp, Unknown
  misc_feature (1)..( 3003): 2750-1469P.txt file - cDNA_ID_3087595; gDNA_ID_2926307; Annot_ID_205908
gtgtgcgccgttaaaaccaatggacattttggtttagtggtgacggatgatccaaaatcgaatggtggaggagaaaaggagatgaagaaggagaagatcggacggtggaggaaggttgttggagggcttgttgggtctgtgacggtgggggtggtgcttttagggctggtggtggcggctgctgtagtgacggcaaagaaaaggagaagaagggcaaaaagggaagaaatggagagaaaagcttatgaagaagaagcttttagagtagtgtcaatggtggggcattctagggctttcgttgcttctgctacaaggacttctccaggtttcatggaatatgagtttgttcctaattaattaattatatttacgtgtgattccgtttttgtggattgttttcttttttttttcttttgtaaaaacggttttaatttatgttaaaatgcatgttgttgggggttttgggacatatatatatatttcgttggtgacaagtaaggtacgtatggtgatgattttttctttctttcacggtgatgaatttacaaggtaacaccgctagtggcctagtagtaagtagtaactattaaagaaaatcaaatgagcaaagttacattcaaagtcattgataaacaataaaacatggtcattttttacaccaaaaaaaacaacatgatcgttgcctacacgttaattaacgaggcatcaagaattataatttgatgaaatatgccgtctggcgtcttcataagaatacaatatgtttgatgaaaatctacctctaatcaaatggtagtttttttttttttttgaggagtcacatagctaggaaacgttttatgctagtaatatcacacacggaaacaattacgaacccatgtgtacaagtgtttaggctttgagaccttaatgaagtgcccaatgagaattatttttaggtccaccaaactcacaatattatatggcccgtacattaaatcactaaaacttagtatcgtgtcactaatagtatctcattgttctctgattaatggccgcattattataagtttttttttgtgtcaaaagcattattataagttgagaagtcgttttcataggaccacaaattgtttcagatgtgagatgtcttaaatcttaggcttaagagaacgacaattctgtccctcttttctttgttcgaccaactctgtctttgtccctctttattttgtttctttcatttttctatacgaacgaatatttttgatgtcattgcgtaaaacaaaagggaatttgtacataactacataaaaagggagaaatggaaagtagtttttccatattggtgaaggcgtgcattattctctttttcatttaataatatgcaaaatcctcttttaatttgtattttttatttttgtttatagaatatattatgtgctattattttagttttttttgtgtcatgtattattggcattattaaaaatatttgatctaatcctattacgatataaactacatgcaacatatgcaattacaacgaccaaggattccattgttatgatgaaatattattttagtttttgtaattaattgcagttttttttttgcaaaaacttaagactacttggatggctattggctccaatatgccaagccggaggaaaaccagaagatttaagaatatatttttttaaacgatgaagtggaaaaataatttttttaacgtccaacatgtatgttcagaagatttgtaattctgaacggaactattacatgacgttacaaaaaaccatgccacaagagtatccggacttaacaacgtttcacaacacatcaattttttttttttcagttttatggatatttctgaaattctagctaaaaactattagtatatattaaagttcatatatcaaactattgtttgtgtgctatattaacttcatatcaaactaggaaaaatatgaaagcatttttctatctatcaaataatactgcaattaaattatcagagtgttactgttttaaggttatatgactaagaaatggtgcatcaaagctgtatcacattttgtccaaaaaaatttaactgtatcacgtaattgagtatttaatattttaaaagaataactaattatatttgttctttaccaaaagaagaaaacaaatatactatatttctatactattaaatagtattatcaattaggtgttaatactatttgttaagtgggcgttagaggattaggtgtgtctaccggtcctgtcgttaaaggtgggaagatattttattttcctcattctttttcaaaatttcaactaatttttaagttcaagttgttgatcacttattaggtcttaaatcattgtcacgagaaggaaaataaaagtgtttttaatttttattttaagtttacattttatatacatacatatacacgtatttatgatttttgtaaagcacgttgttaacgtgcacttttttcataactttacgtcaaggtatatatcagcatattgtggaatcaaacatatatatagtagcagttttctagactaaagtaattcagattaattgtaaagataacaatcaccgtataaaacaatcaacgtccgtgtgtttgtattcacatatctgatgaaaattagtaattctagttttcagtctttcgattaacaatacaaaaataatactttcaatataatttgatctatgtaaaaataatatatggtatggccggaccagacccgtgtataacaaacattgttttaaatgtattttgtatacaaataagacaaaataatctataaacaaataatgtatatttttagaaaagaatggagtgaaaaacaattaaaggggaaagaaatcaggacagctttatataggttgatttcatctgacaattctctctctctctctttttctaatcatacgaacacaatctgcttcaagaattagggttttgatcagacacaaaaagtatctctctccggtcttgtgtcaaggttatg

SEQ ID NO: 35441 - DNA, 3003 bp, Unknown
  misc_feature (1)..( 3003): 2750-1469P.txt file - cDNA_ID_3087621; gDNA_ID_2926307; Annot_ID_205899
aagacaaaccgagatgaatcccaaaacgaatacggacttattgcgaggaaggaatcgagcatgagagatgacccaagaagagtcgaaagatgattaaattttctgataacttttttttatgcttaaccggatctaacattttgttaaaccaacctaaaccatgctcaattccgattccctaatctgataagcacgaatcacatctgttctctatttgcagagctcgaaatttaagagagaaattgagaagccaaatcgagagaatgcttgcaaaaatatcatcttcagcgaagagatttgttcatcggagtcttgtggtgagaggtaatgctgcaacttttcctctctctttttccttttgccggagaagagctttttctggtaagactagttatgattacagagaggtacttagaactgggctgagtgatattgaattagatgatgcaattggtttgttcggtgttatggcacagtctcgtcctttcccttcgattattgagttcagtaaactgttgagtgccattgctaagatgaacaagttcgatcttgtcatctccttcggggagaagatggagattttaggaatttcacataatctctatacttacaatattttgattaactgtttctgtcgatgttctcgactctctcttgctttagctcttcttggcaagatgatgaaactcggctatgagcccgatattgtcacgcttaactcgctgctcaatggtttctgtcacgggaataggatttctgatgccgtagctttggttgatcaaatggtcgaaatgggatataaacccgatacggtgacattcacaactctaattcatggactttttcttcacaacaaagcttcagaagcagtggctttaattgatcgaatggttcaaagaggctgtcaaccagatctggttacttatggtgcggtagttaatggattatgtaagagaggtgatactgatttggctttaaatctgctcaacaagatggaagctgcgaaaatagaggccaatgttgtgatctacagcacagtcatagatagtctctgcaaatatagacatgaggatgatgcactcaacttgttcactgaaatggaaaacaaaggagttagaccaaatgttatcacctacagctccctcataagttgcctttgtaattacggaagatggagtgatgcttctcgactactcagtgatatgattgagaggaaaatcaatccaaatttagtcactttcagcgcattgattgatgcatttgtgaagaaggggaagcttgtaaaggctgagaaattgtacgaggagatgatcaaaaggtccatagatcctaatattttcacttatagttcactgatcaatgggttttgtatgctcgatcgccttggtgaggctaagcagatgcttgagttgatgattaggaaggattgtctaccaaacgtagtcacttataatacgcttataaatggattttgtaaggctaagagagtagacaaaggtatggaactcttccgcgagatgtctcaaagaggattggttggcaacacagtcacttacaccactcttatccatggattttttcaagctagagattgtgataatgcccaaatggttttcaaacagatggtttctgttggtgtgcatcccaatattttgacatacaacattctgttagatggactttgtaaaaatgggaagctagcgaaagcaatggttgtattcgagtatctgcaaaggagtacaatggaacctgatatttacacatataatattatgattgaagggatgtgcaaggcagggaagtggaagatgggtgggatctattttgtagcctcagccttaaaggagtgaagcctaatgttgtaacctacacaacaatgatctcaggattttgtaggaaaggtttaaacaaagaagcagatgccttgtttagagatatgaaagaagatgggactcttccagatagcggttgctataagatgccatcttagagaatggtgacaaagcagcatcagctgaactcatcaaagaattgaggagttgcaggtttgctggagatgcttcaacctttggcttggtcactaatatgttgtatggggagattggacaaaagctttttggaaatgctttcctaaactatccttgaagtgagtaagccttttttaataagttattacttctcaatagtcaatacaatccttatgttcatgagtatgcctgattagctttctgtgaaccagcattgaagttttagtgaacattttgagttgtgatttggttttttatcttctgtatccaatattgttcatatcttataaacgagacattctcaattatgttaatcaaatttggaaacttttatctttgtttcgtgcattaggaaacttgcaaattgttaatttctcctatagaagaaaatggttctgatgcgaatcatgtatgtaccagaagctgtctttgaacaggtggagctgcatcgcactccatttcacatgggaactcttgttttgcaggctcaatgacggtttcagaagatgatatccaaactaatgtgagtatatgagagagtgtagcagctgtaatctcatcaaatgaaagatatttcagtgttcaagtattacttctcaatgcagtcagtatgttcccatggtgtagttcattgcacattggaacagttcgttcttttttgtgttgaacttgaattactatcgttgttttttgtagttcctagtggaattatgaacatgtgtgtggctggacaaacatacacgtagtaccaggtttagtacttgaattatgaacttgcagagatggttcaatggcatagttcccatcgtcaatttcattgattgaatttcccttgccagaaatttctgttttatcataaattttgagaagtagttttggttttacggggtttcttcatttctgaaattagggattttatttcagggtaagaaatcccaagaagaaatgaagaagaaagttagtacgcatgcatatg

SEQ ID NO: 35442 - DNA, 3003 bp, Unknown
  misc_feature (1)..( 3003): 2750-1469P.txt file - cDNA_ID_3087633; gDNA_ID_2926307; Annot_ID_205895
ttatagattggtttatggatatttaacttattcaattttttaaaaatagtaaaacttaaaatttaaatttgtttatcctctgtataaaaaatatagcagatggtaggaatgtaaaaaaagaaaaaataataattacagatataacaatagttaaagtatacaagtggagattagtaggagtctagatttaattggtcaatgtgttaatgtcagaacagccacacgtcacaactgtctcccaccttcttgagtacgatcgtataatgtacttatgattatacaataattttgtaagaaaatggaaaaattgtattatgttaaatagaccaacccaaatatgaaaagatgaatggtccttaatttgagaattatcctttgtggtataagttgtaacatatcacccgcaagcatccggaggttatctggtaagagttatttagattgtcttaaaacattcaactcaataatttggactaattattttattcaactaaaaaaagatactgttattgataataataataataagataatatttataaacggttatttgaattctaagttatttaactaatattttgaaaagaatagtattctaaatattacatttttggtgattttaaattatattgtggaggaagtgtttacaacaacatcaaagagactcaaattacgatattatcgacacctatcgatatcaagtactccaaaagtagaaaaaccccaacaaaacttaagctctatgttttttcttacaatttaacattcatatgaaaagtcattcgactaatatataaatataaacaaaacaaaagtcaagctttgtctcacgtgagagaagtcatattcttttctccaattaccccgcagcacgtaccaactcattttgtgccatcaaactttttaatagcgaaagttttcgtaagaaaccaaggattagctaacaaacaaacaaagaaggattacacaaaatttaataattgaagagaggagtaaaagtagacaagaaacactaactaaatttgactctcgtaactcgcatgattttgtccttacaaaagtcacatcaaaggcatgggtagttacatttgtatacaaaaaaaaaacgttttttccccataaattattcccactttaacaaaactatggtctatggttactaaatagtaaatactacttactactactggtattatagtaacccaatgatttcataagtttacgtgactagctctcttgaaggtaagttggatttagcaaaattagtaacaaaatataacataaagtctgtatttttcttagtaatactatatgtacagtttgaaaccaactatttaaaaatgaatttcagattagtttagatttgaatacatcattagattacatgcttaaaagttcttaacatcataagtttatgacccattgaaactaaactagcccttgttaagtgaaatatagcattgtaatttacttttttgtttaaatagatggttgtgtttttatgtatgtcggcatacgtgtattttagagagaaagttttgattgtaaaaaaaataaaaaataaataagaaaactatttaaaacatagaaagataactatatcagaataaaatactaagatgacaattaatttgcttcatttacaagcttgtattaggaattctctatgccaaccactccactacgtttgtgagtagagcttgcttgatcaatacaaacaacaaaaagatgaatttataattatatattatactatataataaaatacaagtcacaaaagcatatgtttggaataaattattgttatgaacttggatagtttcattctttttgacggcaaatagttatcattcattttttgtatcattcagtctttaatggttccaggtaagttgcaaaagaagtaagcaatattcatgtattctctagagatttttgacggcaaaatagtatcattcattttctttaaagactacaatttgattagatattaatagattaaatggagtagtagtttttttttcaaagatgattttaactaaagattattcttttcattttgattgttttatttgtatagctcaaaactttgtatataaaacatccttcttgattagtaaatttcgcatttcaacaaaaatggaataatgttgtgcgacgattaaatggaatagttaaaatgattaaagaaatgacactcgttgagccatgagattgatgattagttgattaccaccaacgtgtacggtgtggatctactgcatacgtgcaaaatgttttccatgatttttcataatggtgtttctttatgagtttatatatcagtaactagaattcacaacccaaaataaaattcatatggaaagtccatgttaaaatttttgttagtgaaatggtgaaaaaggtactactagtaaacttcatattttatttccctttttaaaaaagtagaataagttaactaaaacaacttttaaaagtggcaattacattaggccaatttttttaaaaatgtattgagacatatagctaaaacaaaatttgttacaaaaaaaacacactcacacatcgaaaaagctggattttttcaatcacatgattgaaggagctctgggttccacattcagtaaaatttttaaaaagataaaaagtaatttctgattcagtgttttcttaattgggcttaatttatgacccatgggcttaataattcggtacgatcataatatagaaccgtttagaaccgggaattgatttcatcggttcaacaaaacataaaaggtcaaaaaccaaaagaacgtaccttcttcttcgacactagttcctccgatcagcgaatctcgaagaaagagattgaaactaaactgttgaaattttccgacaataaacttatctcttttcctcattcaatcctagagaccaaaaagcttaaaagcaaaaaagaacacaaggaaatttactcagaggtaatcgtcgtcggagccaggaggaagaggagggatg

SEQ ID NO: 35443 - DNA, 3000 bp, Unknown
  misc_feature (1)..( 3000): 2750-1469P.txt file - cDNA_ID_3087643; gDNA_ID_2926307; Annot_ID_205892
taaattaactcaagtcaaaatagtataacaaataaataatgtaggaaatgtctcattatttatagaaaactacataaaatcaaaaaattactaatgtaaattacccattgatatgaagaatctaaaacgagtacatgtgttctaatttctaaggagcagcagatcacagcttcccacgtataaaaaaaaacactgtagataaaacggcgtcgcagagctgacaaggtctttttctatcgtgtggcacgtgcggtcagaagacctctctgaatgactgcaagattcaagaatctgaagtttgaagaacataaatgtaaatataatatttgtaggtaaatatttctttttttcccctgaattacctgataattaataggtaacgtaaagaatataattgttcatgtagagagattaattatgtcccttgtttttaaaatatttgtttaggagctagtggtgatttttttttgatgatattgctactacgaagaaaatacaaaaaagaagttacgttgatgtgaatatagttataatacaaaaaattagtagaatatatcacaccattgttaattttttttatttttttggaattttagaactaaatagttttctttcatgtgaatttattaattatagtaactatgtagcacatccatgtagcaagcattggttgtgaagagttttgaattgttcatttcgatctaagaagatataataaccaaaaaaatgattatagacttgtagttattattaatgttaagaggaatgttttctagcgatgctacaaagataatataaaaattggagttaatatctatttttcctatttcatctatttttagcagtatctatatttaggcagttatttggtaaacaaatataatatatatgtcgtatcttaatatacaatcgggtttcttatgagcctaattgttattccatgtttagttatataagagacagaaatatagaatatactatgtgaaaagatagaccattattacttacggagagttgatatgaactgtatgatgataacaactaaaaagagattgtgtctattttgaattatgacttcgagtaaaattataaatcttgtttttcttatggagcatgtgaaggaattatttcctataggtttccttgtttgtagcaaatcatgaatcaacactataggctaaacaatacatatttaaattttttattttcatctcattaatcaaataaaatagggttaatcaataatcacaattcacaaactttcttatttatttattaagagccacttttgatttatttttattttgttttcacataccaaaaaaagtgccatattttagctacttagttcaatataattgtttaaaataataaataaatatgtgaaaatagattaatctatatatatgtatatgtatgcataattgtataaaacgtgttgtgaagtttatgttaaagctaaaaacatggctgagaactctattccacaactgatatttttatgacaaatcacattcatcacttctagttttacaaatatatgaattagagttagctttaaaaaaagagttacatgattttctttcttccaaaagtagcacagttcctatagtcatatatagatttcatgcgatagctcacaacaagaaaaaattcacactaaaaatatgtatactgttttcgttactaacccggacaagaggtatagtaacagtagcaaatgtacttagattatagccttgttacaacggtttcaaaaagtagaatgatcaaattattttagttgctaaacacagtttattagctgataaagattttgtgtgttcactctgattgatgtcattttaaagttttaaaaattaggttcaggtagataagaacaataacataatttgagctctgatattctctaactatcttatttggatcatatatctaagaataactcatctgtatttagttacttaaaatttttgaacaatcttctgcaattatgttgtagaaagctcacttccatcttcataaaaacacaaagatcattatctattggttcatttggtttcgttgcatatgacaatgcttaagaaattaaagttttgctcttctcgtgtctaatttcttctgccatatttggagctaaaactttgaacatataattcaagaacttaaagttctgcctttgagaaattatccatcattaaggatctttattttatttgttttgttacacaatgctctgttaattttcttttggctaaatgttaacaaaaaaggttctaaacgaaatttgaagttgaaccggccactgtgccaatcaaattgaaccggtcactgtgccaatcaaattgaaccggtcgtcgtttactcttttaagggtttacactttacacagacttgttagctcctccatttgttgttgttagagtttagagacaacgaaaatcaggcgagtcgaaaatgttggctagggtttgcagatctgaatcatcttctggtaatgctgctgctgtttctgcgagattgttcagtacgagattagttcatcgccgcgtcgccaagaaaactagtaaggttgaaaagagtatgccttctctgaggagcttttgaaggagagagtttgaaattgagaagtggatctcattatatcagaagcttagatgatgcgatcgatttgttcgatgatatggttagatctcgtcccttgtactcagaaattgatttctgtaaattaatgggtgtcatcgtcagaatgaaacaacccgatattgcgatttctctctatcagaagatggaattgcggaggattccatttgatatctacagcttcaatattctgatgaagtgtttctgcagctgtcataaattgtcctttgctttgtctacatttggcaagatcaccaaacttggttttcatcccgatgttgttacgtttagcaccctaatccacgggttatgtctggaaggtaggatttctgaggccgtagctttttttattatatg

SEQ ID NO: 35444 - DNA, 3000 bp, Unknown
  misc_feature (1)..( 3000): 2750-1469P.txt file - cDNA_ID_3087686; gDNA_ID_2926308; Annot_ID_205930
tattgtccctacggaaagcacccaattcaatatttaattaagtatttcacataatactttagataaaacaaattacagagacaccttctttgatcgatatcttgagatacattcactgtaccagaatgttgatttgttttttctttttgttataaattattcatgaaggaaatatgataaattatatagaaagcccacgtcccagaaaatgacagaggcatgcaaaatcgtgaaatccagcaaggtatgtgagacttataatcttattgctatgttcttttgtcccctatttgtgtgaaatagtactgtcgtttgatttttcttgttctccattatagattctcaaaatctttaagattttatttttttgtaaggaggtatatatagaaatgggtgatgcacacgagggtacaattaaccctaacatagagacatagttggctccacaaccatctcctttagtctgattttcacgtgcattttcatccccacggttccctcttcttattgtttaaatgtaaatgttatgactattttacatgcaaacgatttggccatttctcataataacatcggatgtttaagagaagttttgagaaaattcagattatttccgatcataaatccatgattcatgaagctaatttagtcacacaattcaattattaaaaatgaaactaataaagttgcatgcacctattgatttttctaattaatcacatgtaggaagtttttctgaatggagtaccatcttaatcttaaatcctcgataaccatgaacaaatttgtgatacacaattttcaaattgcatggatcggttaaactatagcccaaagatcaagttccataaacgattgatatttgaaagaatgtatttgttcaagttactgtagattttatctaatacaataacaaaacgatattgataagattactttgttattaattacatcaattttatatcatgattgatagagatacgatataagaataatctaaattcttaaatggtgacggagaaaggcaatgtttggtccagcacggctaaccatttgctttgtcctatttgccggctctaaattattttaaaatatatccatcttacatgatacttacaaaaccacacatttgcttctcatagacatagtcaaagtctcaaaacgaaaatgaagtcaaataaagaatctgataaatatcaagaaaccaaatgaaatgcaatccgatttatggtcggagactcggagtgtaacctaatcagatactttgttaagaaagttattaaaaattttttgttcaaagaagaaagttattacattttccaagtaaacaaaacgttagcagagtagaaaatttagtacagtgactgacgcgatagaaagcccatttttagaatgggcctatttcagagctgaggcagtgaggcccggtttctttgactgagtaagattaggtggtgactgaaacataattgtttctttttttgtgaagaaagaaaaatgtatttccaattactcttttgacttttcttttttaataattgattatctttctgacattttgtgtaaatgattagcaaagtaattttacgtcttacttaactatttgtctttatattatcccaaaaaattaccctactgaagatcatattcaattctcttatgaatgctaaccattaaccaatatgaagtctaaaaaaagaaaagaaaaaaggaaatgatacatacccaaatttgatgaaattgcatagaaagctgcacctcttaaattcagtctaaattcaacattttgttcacattgatattaattgaagagtggtgccaaaaactggaggcatttattggtctgacccaacggaccacgtcgaaaatgaaactcgatttggaagtttgtatgatttgtaacaaaatttgcctcatcctcaccactctatttttattcatttagttgttcttatccaactatatatgtcttttacacaaaacgatccaaaaaaaataaacatgagacacctagtcgagtagtcccacttccaccatcttctatcaaatgtctcaacgtagaattcttttaattttcatacttctctctttaagactgttacttgttctgtgtccctttttttttttgtttaaatctaaatacatataatgctcaatcagtatcaatggtatttaaaatctctattaaaaaattatattcggagtcttataattttttttgtttgttttggaaatgttttttccaagcatattattgtgaatgaaatggtaaaaaagtgtccttaaaatttgtcattcgtgaccacaaaatattagttactactattttatgtctcattgtcaactcttttatggatggtgttaaattgtccccacttacctagttgttatgagatcgactgcattaactgcttgttttattatatttctccataatgcaatatataccatactataaaaatatatccttatgttttccataatctatgcaattcatattattatacatttcttatgattcattgcattatttcaaaagtacttgagtttgtgagcactgaacaagtatcagtgtattatgaatttttattaggagctaataaacgtcattaaagaggaaacaatattaagttttctgtggtctgacataaataaagactagtattaaatcttgatttgtatagaatgattaatactcgggatactagtgtatctggtctgaagtcccgggaaaaatgtcggtttcactttcctgattttctcgctcattttcccggaaagttatgaagaaaaaaacatcttctttttaacaatttttggagtcttataaacgacaagccaaaaagactggagcttttcgagatatgctcttgagacgtctcaaaggaagatactttgatgggatgtcttcttaattttattataattattcactcatactcataatattattctctgatgaatctctacaaacagacaagaaagtgcgagaaaatgatg

SEQ ID NO: 35445 - DNA, 3000 bp, Unknown
  misc_feature (1)..( 3000): 2750-1469P.txt file - cDNA_ID_3087688; gDNA_ID_2926308; Annot_ID_205929
cattatttcaaaagtacttgagtttgtgagcactgaacaagtatcagtgtattatgaatttttattaggagctaataaacgtcattaaagaggaaacaatattaagttttctgtggtctgacataaataaagactagtattaaatcttgatttgtatagaatgattaatactcgggatactagtgtatctggtctgaagtcccgggaaaaatgtcggtttcactttcctgattttctcgctcattttcccggaaagttatgaagaaaaaaacatcttctttttaacaatttttggagtcttataaacgacaagccaaaaagactggagcttttcgagatatgctcttgagacgtctcaaaggaagatactttgatgggatgtcttcttaattttattataattattcactcatactcataatattattctctgatgaatctctacaaacagacaagaaagtgcgagaaaatgatgggtctctgttctccttctccttcttctcacgattgttcttcatcttctccaaggtaaaccgatgattacattatctctttctgcaatttagtttcgttgaaatcaatttggggcaaataatgtgaaatgggtttggtcacaggaactcggagaagaagcagaatgtgattgttgcatcaccttcaagattctctacctacactaaaccggttagtttcttctgagcaaccaatttcatttctcttttaaaaagcaaaacttttgtggttctaaagtcatatttttcatggcagagtttatcaattgagaagagattacttacttaccaggattctaattgcaacgttacgccaaaggtttgatctttattatagctttgaatgttcatagattcttttggtaacaaatgtactgttagttctaatgttgtgtgttttttgcagtcttcagaagatttgaggaaagaaattgcttcacttgagtttgagattctgcgtacagaacaatatctgctctctctgtataggacagctttcgatgaacaagtttcttctttttctcctcacactgaaacaagcttagtttctaatcagtttttacccaaatccgagcaatcagatgttaccagtgtgttcagctaccattatcaagcttctccggcctctgaatgttcctctttgtgtcctcctcggagtttccaagccagcttaaaagctttgtctgcaagagtaagcaacccccatttgcattttcctcgaacaaaccttgtgatgaatctgacaagaattatacaatgcatttgtaggagaagagtagatatgtttctagtagtcacactactcttggagatcttctgggttctactcttatcgtagataacattgcgaatccgagtaggctctctgaagatatcttaagatgcatatgttctgtatattgtacactctccagcaaagccagaatcaattcttgtcttcaggcttctccttcttcaccttcatctgtctcttccaaagccacttttgatagcttgaactcgcgccatgaggaacgcaaagaagcaaatgtgccaggcgttgttgtaatagaatctctagaacttcacttggatgatggtagtttcaatcacgctgctgttatgctccaaaacttcaggtatataagatacttaaaacagtaacaatttgcttctgtgacattacaattaattaggttggtctaaaatgttactcaattgttgtgtataatagatcactagttcaaaaacttgagaaggttgatccgagtagaatgaaacgcgaagagaagctagcgttttggataaacattcacaatgccctcacaatgcatgtaagcaaacaagaactagtctcttattgattctgtctcttgtataaaagcttcaatctttttcttgattccctctgttgcaggcgtatctagcctacggaactcacaaccgtgccagaaacacctcggttttaaaggttttgatctttacatcttttagactgattgatttattatgtttttgctgttacttaagacactttttatatgtttcaggcagcttatgatgttggaggctatagcgtaaacccttacattatccaaagctcaatcttaggcattcgcccacatttttcacaacctgtatgcaacacacactctctttgtttcttttgcttcactttcactacgtttcataacttgtaactaggaattattgcaaaaacagttgttgcagacattgttttcgccatcaagaaagtcgaaaacttgtaatgtcaaacacatttacgccttggaatatcccgaggcattggctcattttgctctttcttcaggattttctactgatcctccggtaagagaactggctcatgattactatttttaacagattctttcttgaaactcttggattttaatcttttacagttatgttgtttatcaggttcgggtttacacggcagattgcgtattccgggatctaagaaaatccaaagaagagtttataagaaacaatgttcgtatacacaacgagacaaagatattgttgcccaagattgttcattactatgctaaagatatgtcactggaaccatctgccctcatggaaacaacggtgaagtgtttaccggactccacgaagagaacagctcagaaattgttgaagaagaagagcagaaacattgaatattcaccggaaaactcaagtttccgttatgtaatcatccaggaaccaacaacaagaagacatgattctactataatataaagcgaaatataacaacattaaaaaccggcatgtagtttttattttgagaaatgagaggtgaactacatgccgtttatagaaatcaattctaaggcccagaagcaaagtaaaatgagaaaaatgaatggtgatgatggtgaaagtgaaaggccttattgggaggttttggtttggagttggaggtgggattgtgttggccattgttgttgttattattgggcttagaggaacacaaaaagctatg

SEQ ID NO: 35446 - DNA, 3003 bp, Unknown
  misc_feature (1)..( 3003): 2750-1469P.txt file - cDNA_ID_3087691; gDNA_ID_2926308; Annot_ID_205927
ctagcaatttccccaaataaaagaaattcacaagttttgtaacgaattaagaaatgcgtaccgtgaaggaagtggaattaggtttagtaagaagagtggcttgagtaaagttgcagacattgaatgcatctttgtttctgaagatgtagagatcgtatccgtacttatgtctgaaaactaaagtaagatcacatcattaatattaattaagagaagaatttaacaaaaataggaaaataaaaggactggttttgtaattaacacttactaacagagtcgccggtatgaacagtgggggatttccagacagagacaccgtcgacgagaaacgtggcggaaagagaagggcgagagaaaagagagaggaagcaaaagaagtagaagaagagcattgaggtgagatgtttctgagagcaacccatgttttttagcttgaaatgaggagatgcgtaggtttaagggagattctgaaattaaaaagaagtaaagaagcttcaatgatgtctaccctttttatctttagcaggcctctctctcacacatttaggtcaaaagagaggtttagtgtctatggagcttagggagaagagaagaagaaaaaggggtgagagacagagacagagaaagaagtattttgagaagtgtgcagtgagtgtgcagtgagtgtctctgtcttttttactttttatgtgttgaagaaatggagaagattgagaattttgaggactgttttattttattaatttgttccatacctatacttgaaatcaagattggaatttcattttctttgaattatgagtaccagattactaggtacaagtttgcattttacatgacattttgactaatgtaagtctataataagttcttcttggatttattttcctagactacaaaattaggtattgaaaataacatttaatttacaatgttcatggttactaattactttcttggttcaaaactaagaaatggaagacaggtaatagtaatacacagaagagaagtaggcatctctctgcaagtaattttagtaaacggtaaaaaaaggtaccatcatttttatcacgggaaataatgctctggtagtaaaaatctgacgaacaaaagtgtaaccaacaaaaaataacatgtactccaaaaaggaaaagagaaaaagtaacaaagtgagaattatataacaagataatgatggtgattattattcttaaatcattacgcctgtgacttaaccccaacatgtttctgatgatccctactttacaatttagttttataattatgtaggagtagtatcttctatcgtttttgttaattacaaaactttttccatctttaatcaaacgaaaatagaaatactataaccgtaacttttcgactcgatctatatcgacactactttattggctggaagcaattatacacatatctttgttttatgccagaggagtcatcaatgctaatcttatcttttgttaatataatgactgtattattacattaacatttatataacacacacggtcgaattttcttgcccccatataatgttcaaatgatattcgtatcagcaagtaaaataagatattttgctaaaacctacttggttttttattgtcagtatatttccacggtagaagttaaattgtatcgatcaaaatcaataggttccaaacacaactgttgacaaaaccaaacatctgcttgaaaacaaacaaaataacaacattaattaagctcaaggggtttgtctttgcatgattttgtttgtatgttgtgtttgatacttctaagaaagggttttcaaaaaacaattgcagtcttcgaagaatttgtatagcaaataatcggagaaaacaaatggcagcggcacgagcatggtgcaccttttcctttttgtattgaaaaccacacgaaccacacagccttatgtgttacacgtctcgtcgtatttgtgtttagcttttttatgctaaaacgacaactactacatgacaaaacgcgagcttcggccaaacccccaaaaatctcttcccgttgcttttgatggacttcatagtctattaatctttgttaagttggactatataaaagaatagtttacgatactaaatagaggtttctgtaaacttacgtttaaatcaaataggcaaacgataacatggagtaatatatattaggtccacaatggttcaagacttgaagttattgaaaattgacctctcttggcttttatgtttacaagttcaaaacatgcctgccggtttctagccttgagttcaagtttcattaagatgtttatgataataaattctgaacggcataatgtctctgctacctccacagatttacggcacttgttctaacaagttattataaaccaatcaatgtatgattttgtattacaaacgatggtctttcactcttttgtaacagctaacaaatcttatataattagtcttcaactcaattaaatttgacttcttaaagagttaaaatcaatcactgattataaattaggtattgattgaccaattaaacttttagttttgtcacacggagaaaccagaaggtcgagaatataaattaatatctcaaaaattaccaaatgtgacccaaaaacaaaatctttaagataatgaattaacgattagactgaatttttttttgtttgagagaaaaggaatccaagcagagagatgctgacgaaaaaacgcgtggcgaataataatgtacgactggatatttcaaatgaagcgtcaattaaaagggaaaaataataataaaataaaaaaagaggaagaagaaaaaggagcggttgagttgaaatttgctggcgcgtactcgtcaacgtaacgcgcgtggagtgttttcgtgtccctcctcctcctcctcctcctcactaagacaaatattttgaggttctctttctcgtttgtgtgatctgtctgacaagctagaagaatcgtagatcgtgatcggattgatttgataattatg

SEQ ID NO: 35447 - DNA, 3000 bp, Unknown
  misc_feature (1)..( 3000): 2750-1469P.txt file - cDNA_ID_3087695; gDNA_ID_2926308; Annot_ID_205926
tggcgtgcctgtagaaaagagacaaaaaaaaagccaacactcagcagcaaattcgtaattgtctgaatcgatcaagctaactcatagtaaacattaaagaacttctgtccattagacaccattgcaaaactccacacacactgaaagctcttaagaattgagcttacctgtcatcagattcaatctttcacaaaactagggaaactaatcaaatctcgtgggtgggtacccccaaaatcgacacttttcagctaagaactcactgaaaattacaaaactttaaacaaaaaaaaaaacagaaccgtaagaatcagagagattggaaatgaaaccttgatgtaataagctttcttaatctcagcctccgtagcggtggggctaacgccgaggacatcgtaaaactccgtctccttcaccataattatcaaatcaatccgatcacgatctacgattcttctagcttgtcagacagatcacacaaacgagaaagagaacctcaaaatatttgtcttagtgaggaggaggaggaggaggagggacacgaaaacactccacgcgcgttacgttgacgagtacgcgccagcaaatttcaactcaaccgctcctttttcttcttcctctttttttattttattattatttttcccttttaattgacgcttcatttgaaatatccagtcgtacattattattcgccacgcgttttttcgtcagcatctctctgcttggattccttttctctcaaacaaaaaaaaattcagtctaatcgttaattcattatcttaaagattttgtttttgggtcacatttggtaatttttgagatattaatttatattctcgaccttctggtttctccgtgtgacaaaactaaaagtttaattggtcaatcaatacctaatttataatcagtgattgattttaactctttaagaagtcaaatttaattgagttgaagactaattatataagatttgttagctgttacaaaagagtgaaagaccatcgtttgtaatacaaaatcatacattgattggtttataataacttgttagaacaagtgccgtaaatctgtggaggtagcagagacattatgccgttcagaatttattatcataaacatcttaatgaaacttgaactcaaggctagaaaccggcaggcatgttttgaacttgtaaacataaaagccaagagaggtcaattttcaataacttcaagtcttgaaccattgtggacctaatatatattactccatgttatcgtttgcctatttgatttaaacgtaagtttacagaaacctctatttagtatcgtaaactattcttttatatagtccaacttaacaaagattaatagactatgaagtccatcaaaagcaacgggaagagatttttgggggtttggccgaagctcgcgttttgtcatgtagtagttgtcgttttagcataaaaaagctaaacacaaatacgacgagacgtgtaacacataaggctgtgtggttcgtgtggttttcaatacaaaaaggaaaaggtgcaccatgctcgtgccgctgccatttgttttctccgattatttgctatacaaattcttcgaagactgcaattgttttttgaaaaccctttcttagaagtatcaaacacaacatacaaacaaaatcatgcaaagacaaaccccttgagcttaattaatgttgttattttgtttgttttcaagcagatgtttggttttgtcaacagttgtgtttggaacctattgattttgatcgatacaatttaacttctaccgtggaaatatactgacaataaaaaaccaagtaggttttagcaaaatatcttattttacttgctgatacgaatatcatttgaacattatatgggggcaagaaaattcgaccgtgtgtgttatataaatgttaatgtaataatacagtcattatattaacaaaagataagattagcattgatgactcctctggcataaaacaaagatatgtgtataattgcttccagccaataaagtagtgtcgatatagatcgagtcgaaaagttacggttatagtatttctattttcgtttgattaaagatggaaaaagttttgtaattaacaaaaacgatagaagatactactcctacataattataaaactaaattgtaaagtagggatcatcagaaacatgttggggttaagtcacaggcgtaatgatttaagaataataatcaccatcattatcttgttatataattctcactttgttactttttctcttttcctttttggagtacatgttattttttgttggttacacttttgttcgtcagatttttactaccagagcattatttcccgtgataaaaatgatggtacctttttttaccgtttactaaaattacttgcagagagatgcctacttctcttctgtgtattactattacctgtcttccatttcttagttttgaaccaagaaagtaattagtaaccatgaacattgtaaattaaatgttattttcaatacctaattttgtagtctaggaaaataaatccaagaagaacttattatagacttacattagtcaaaatgtcatgtaaaatgcaaacttgtacctagtaatctggtactcataattcaaagaaaatgaaattccaatcttgatttcaagtataggtatggaacaaattaataaaataaaacagtcctcaaaattctcaatcttctccatttcttcaacacataaaaagtaaaaaagacagagacactcactgcacactcactgcacacttctcaaaatacttctttctctgtctctgtctctcacccctttttcttcttctcttctccctaagctccatagacactaaacctctcttttgacctaaatgtgtgagagagaggcctgctaaagataaaaagggtagacatcattgaagcttctttacttctttttaatttcagaatctcccttaaacctacgcatctcctcatttcaagctaaaaaacatg

SEQ ID NO: 35448 - DNA, 3003 bp, Unknown
  misc_feature (1)..( 3003): 2750-1469P.txt file - cDNA_ID_3087699; gDNA_ID_2926308; Annot_ID_205925
tgccgccgcctttccaatggttcttaaagcttccctcgagctcggtgtctttgacactctctacgcggaagcctctcgcaccgactcgttcctttcaccatctgagatagcgagtaagctaccaactacaccccgtaaccctggggctccggtcttgttggaccgcatgcttcgtttactcgctagctattccatggtcaagtgtgagaaggtctccgtaggaaaggagcagagggtctatcgagccgagccaatttgcaggtttttcttgaagaataacattcaggatattggatcccttgcttctcaagtcattgtcaatttcgacagtgtcttccttaatacctggtaattttcacaaatcatctttataacaaatctgtttgtcgtcaatgttagaatccttattattaaatcttactttatctatacgaaaatttcagggcacaattgaaagatgtggtgctagaaggaggagatgcgtttgggcgtgcacatggtggcatgaaactctttgactatatgggtacagatgagagattcagcaagctttttaaccagactggattcacaatcgcggtggtgaagaaggctcttgaagtttaccaaggcttcaaaggtgtgaatgtgttggttgatgtgggaggtggagttggtaacactcttggtgttgttacttctaaatatcccaatattaagggtatcaactttgatctaacttgtgccttggcacaagcacccacttatcccggtgtggagcatgttgccggagatatgtttgtggatgtcccaaccggaaatgctatgatcttgaaagtaagctcaatagaacttattacttatatgttttggaagtgtatacatgctagctagaactttatacttatgtgtttaaatatgtttttacagcgtatacttcatgattggaccgacgaagattgtgtcaagattcttaagaattgttggaaatcactaccacaaaacggtaaagtggttgttatagaattagtcactcctgatgaggcagagaatggtgacatcaacgcaaacattgcctttgacatggacatgttaatgttcacacaatgttccggaggaaaagagagatcaagagctgagtttgaagctttggctgcagcttctggcttctcccattgccagtttgtttgccaagcttatcactgctggattattgagttctgtaaataatatgtctaaaattataattaaaactaaatcctcataattgttaatttcatctgtatttcagttttttgtttgaaatggtcatgcctctctttgtctttcgagcaatatgaaataaaaatcttttctatttttgaattctaccctttaagaaccagtttcaattgattggtcatatgattccttttcaagatttgacgagtcacaagaccagctgctttcatttgcttccttattcatctctcttagttagttgtttgtccctatccacttacatatctctctaataacttttcttcggtaactatctttctagttactaaattgtttcatgttaagtaaattgcaaaggcttgtgagaatcttgctcatgggatatgattgtttatgttatcaatgtaacggacactataatatatttctaatcacccgttgttgaacactggttaatgtactattcgtctctttcactagctaaccccaaccctcctgaagccaccaaaacatgatctcatttattatttctattgcaaattgcaatctgtgtttaggtcaagaaaggctaatccactcggacttgatctaaaataattaatattttgacaaagaaaccttcaacccctaatgatgaaaacattaaaggaaaccctataacaattgagatgggaaacaataaaatatgatattgttcatacacacagattctagataatggaaaagttaatttatgatatgccatcgcaccagtgttgtttcttcccacaataattgcaacgaccaacaaatcgatataatcattcatatcacaaaaatagtgatgctagtaatgtccaaagtgattgtccggttgtggtcaatggaggaatatcgccgttgttgactcagacctactcatacacaatttgagatttctcgatgactgcatacagtaacattcgctcggatactcaattaacctaaggtggtccattatgtgttaaaattttcaaatctcataattataggactaattaaccctatagtatatactgattgagtccagttaatgaagtttgactccaaaaatttgtgaccttcctggaaggaaaattcaagatggggcacactaaggacaattgtgacgttgggtccaaattaaaatatgaaacgtttaaagcgtatttgatatttatcaagtagtataagtttaaagcatatttgatatttcttgccctgtttctttaaactcattcgtcctaatatacgtgtcgctgtatgtatgtataaacttattataatatcacgtcgataaaattgacgagaaaacaaaacaaatgaaaactgccgccaaaaaaagagtatataaataaacagacaattcgcgtgataccatttttctaatgatattaaactgcgaagataagatagactttatgtatgtatctatcaagcgataaaatcaagtgagtctcacctttgaaaattgacttttgctattgaaaaaaaaaaaaacaaacgacgtgaaacattctttagctgtttctttcaaccaaaaaaacaaaaattagctatttcagccggcacaagaggctcttacttttctactagaggcccattaggaccggcatgccaacaatataattaaataaagatggaggaggctaagtcttggctataaaacggagtaagatccatcaaacaatacaacaaaacacacacacactcactctcaatatctagtttttcccttgtttctgatcagtgtgatcacgtagagtgccttgaaggagaagaaagaaacaaaaacaaaggaaaatg

SEQ ID NO: 35449 - DNA, 3003 bp, Unknown
  misc_feature (1)..( 3003): 2750-1469P.txt file - cDNA_ID_3087703; gDNA_ID_2926308; Annot_ID_205924
aaaatatattctttacaagaacaatatttttaaatcttagaaccatcaaacagttatattgtatctaatcggatacgaaatttcttataggtttagacatgatagtacataaaaagtgaactaaaaatttcctagttaatggggttaagcgatccaaacaaaccctttgatctagttcaattaaagtttcataaacttctacacatataaatcataactttaaatttaacactttttatatagtcaaaatttcatacagataattttgtttataatggtcagacaaggactatatccgttcttgactcagacactactcatacacaatttgagatttctcgacgactgcataaagtaacatttggattttggttggagaaaaaatcactcgtcgtgtaaaaaaattaacaacactaattaaccaagaagataagtctcttttggatatattaattattaagattattttaagagtagcaacgatcgatacgatgatataactatttttgctaaatcaaaggttgtgaccgagaaacaaaaaggaacgttgtgactttcctggaacaaacctataaaccaattcaaacaagactaacggccgaaaaggcactggctgcctgaaggggccataatagagacaattgtgatgttacatgaatttggtccaaatctccaaataaacctattttatcacaacggacggctttaaaactattaaagattagcatgttttttcatatattgatgatgatgacaaaaaaaaataagatgtctccaaacttacttgaaagaatttggaattctataaatattcaaaaaaaagttgtgaaaaacaaatttgaaaatagaatatttgatttactgagaatctgagatagaaatagaaaaatgctcaaggtttatatttcgtaagaaattgagatgataattgttagggttaatttaaattaactactgataaaataatttatttaatttttttggtagaaggccttctataaaaataattacgtgaaatattaatgggtatatgcagtagatgaccatgaaatccataatattatacaaactaaccatggacgtatagtacctgtcggaaaccaactttaaattactctcatatccttataatagggttttggttgaggggacaaatagctttataggcaaatagctttactactaaagcttccataacctcctcttcccttacaacaataaccaccactagatctgtaacaccaccgcctcctccgtatttagtattactagatctgtaaacactaccgcctccgtattcaccaccatcatatccataacaccaccgcctcttccgtattcatcactatcgccgtttacttttgttgacatgtatttttattctaaaacattgtatttttcaaagtttcttttaaataatacttgttctttactaaaattacaatgatccgtgtgtctcaattcaaacgatagcatgtaatttttgaataattcatgctatttttttatttgatatgtatattttcctataacgtttgtattttttgataagataatattttttaaagataatgtgcattttactaataatccatgttttctactaaaatcacaagtaagttactgattcatgattcatgttttttttataatcacatgcaaatttgtacaatcacatgtaatctataaataacacatatgtggtttgcttatctctgttgaaaccatttaccatattgtcaaaacaataaacctacgttctaatgtaataaaaataaatagcatgtccttaaatatcttatgcaacacttctatactcaatcacaactgtttctaaatggctatcttttaactaagtttttttttacgtatacatttttaaggtataagagatattgcgtgtgattttaataagtagtggtctaatattgcatgattttttaagaagtagcggtgtaatcattacttcatattgtcttttgttccctacatgtagcagctattgtcggaaagaaagagtttctctcatctgtaaagggtaaaatagttattttgcaggctcaaaaaagttatttacccaacttttctgcacgaacgctattttcttaataatgctgtcaaatttggtcatcctctaatattacccaatattaatctcaaacgtaaaccctttaacaaaaaaaatattaatctcaaacgtatatgaaaaaaccgtaacatgttatttcacccaatcattttctttttatgatacgtcggcgtacagttttgtcattaaaattattttacatgtaaatcttaaaatctcaactatctaacaaatcaactattgttagtcttcggtcttccataaaagaaattgtttgtaaaatttgaaggaaagtgacaaagcaacaacaattgagagaatcaatttccttggcccagtcctggtcgacgtgatcgtcgtatcaagtgatacctatgcgtgactctgagtggccagtggcggatccacgtccctgtgaatggcacccttagaagattttattggttaattaagtaataaatataaatgctcttcaagctgcgacaaaaagatatactaatttagacacttggtcagactaatagagtaatagtgatgaaatattagtgaatctctcctttgaacattgacttttggtatatccactaacgtgaggcaagtttgagctatttcagccgtcaaaaatagctcttaccctttttctacacagagactactaactcagtcagcccccgaggtggaccggcaagccaacaataatttatatgaaaatattataaaataaagagaaatatcaaagcctttaactataaaaggagaaacaaggatgcatcaaaaatatactaactcatcatctcaacactacaaacaagaaacacatactctctctcaattcatatttcctcacttttgatcagtttgatcacgtagagtgccttgaaggagaagaaagaaacaaaaaagaaagagaaatg

SEQ ID NO: 35450 - DNA, 3003 bp, Unknown
  misc_feature (1)..( 3003): 2750-1469P.txt file - cDNA_ID_3087707; gDNA_ID_2926308; Annot_ID_205923
aagcaccttcttatcccggtgtggagcatgttgccggagatatgtttgtggatgtcccaaccggagatgccatgatcttgaaagtaagctcaatagaacttattacttatatgttttggaagtttatacatggtactagaactttatactaattttattatgtttttatagcgtatacttcatgattggaccgatgaagattgtgtcaagattcttaagaattgttggaaatcactaccagaaagcggtaaagtagttgttatagaattagtcactcctgatgaggcagagaatggagacatcaacgcaaacattgcctttgacatggacatgttaatgttcacacaatgttccggaggaaaagagagatcaagagctgagtttgaagctttggctgcagcttctggctttacccattgcaagttcgtttgccaagcttatcactgctggattattgagttctgtaaataaaatgtgtgaaatgtaaaacaaaatcgtcgttaattatatatttccatctttgttgccattctttcttgatatctttgtcttcgagtaataaaagtgttttaatatgtcatattgtctcttagaactagttttattcactcagacgaagttattcaccaacaacttacaaagtcacaagtgcatattcattgcccaatggtcggctgctttctcttcatgacttcattacctattgtatccctagcagaaaatatgactacctctctaacttatactgtaattgcaaaggtaaaagctagagagaaactttatcttggaaattttcataggaaataagatttttacaagtcaatggatttcttatcaaaaaaaaaaaaaaaaaaaagtcaatggatttagtcaaagttcaaagtatatatagattcgacttaatttcatcactattgatagaagttatttattgtaacaaaaaaaaaaagatacaggattcttatccactttttactcttgtaaacgtaacaacggctgtcatgtttaaaagcttttaaatatataaagctatatttcagttgaaaagaaagaggcaaatatgccaaaaagctaaattgtagtgatattatactgtttaatctttacagaaacaatattttttattccagaaccatcaaactgtcggactgtatctaatcggatacgaaattcttattgtttttttgttgttaaagacgaaatttcttgtaagttttagacagcaaagtacctaaaaagtcaactaaacttactaattaatgtgggttactcgatccaaacaaaccctttgatctagttcaattaagttttgtaaactcttacacatataaactcttaattttagttttagaaatatatatattatatagtcgtatttcataaagataatatatattgtttataatggtcagacaaggactatatattaaccgttcttgacttagacctactcattacatacacaagatttctcggcgactgcatagagtaacatttggattttggttaagtgaaaaaaacgtcactcgtcgtgtaaaagaattaatacagtaattaaccaggaagataagtctcttttggatgtatactaattattaagaactatttttaataagagtagcaaggatagtattaaataattataatatatgtgagtctactgaaattgataattactaaaattttgctaaattaaactttgtgactttcctggaatcaaaccgacgatgaacaaattcaaaatagactaacggccgaaaagggactggctgcggagcccataatgaagacaattgtgatgttacgtgaatttggtccaaatctccaaataaaccaactttatcaaaatggacgcctttaaaagaagatcaacaagttttttttaattaaatatgtgattaaattttgaaagaaataggaattctataaatatccaagaaaaaaaaatcatatttgattactgaaaaataaatgataaatattctatttgccttggttggagcacaaatgatgtattattcacttcgatacaaatttataaattacgtcgacgtacttgtcctcgatgtgaggagatacaaaaatgctcaaggcaatgatttatagtacttcattgaaaaattgagatgataattgttagggttatttattagatgaaaaaatctcgaggttaatttataaaataattacgttaaatattgattgaaaacttattttcattaaaaaaacatgttattttatcgataattttcaaattatccaattttcaaaatcttcaaattttcaaattttaactatctaacaaaacaactctaatttttagtagtctttccataaaagaaattgttcgtaaaaatttgaaggaaatgccaaaagcaacaataatagagagaatcattctccttggcccagtccttggtcgtcgtatcaagtgataccaatgcgtgactctgagtggcacccttataagaaattaatcttcatatctatcaagaaagacaaaaacatttaaaatacataaaatttcgattttattggatagtttagttatctatcaaactgagacaaaaagatatactaatttagatacttggtcagactaatagagtaatagtgatgaaatattagtgaatctctccgttgaacattgactttttggtatatccactaacgtgaaacaagtttgagctgtttcagccgcaaaaaatagctcttacctttctaaacagagacgactcagtcagcccccgagatggaccggcaagccaacaataatatatacgtgaaaataattttaaaataaataaaataaagagagaaatatcaaagcctttaactataaaaggagaaacaaggatgcatcaaaaatatactaactcatcatctcaacactacaaaaaagaaacaaatactctctctcgatacatatttcctcactttgatcagtttgatcacgtagagtgccttgaaggagaagaaagtaacaaaaaagaaagagaaatg

SEQ ID NO: 35451 - DNA, 3003 bp, Unknown
  misc_feature (1)..( 3003): 2750-1469P.txt file - cDNA_ID_3087711; gDNA_ID_2926308; Annot_ID_205922
gtggttggtagttacattttttagaagaaacgtaacttggaataatatatcaaaagctttctcaaagtgtcaaattttgtctttttttcttttacataacttgaaacaaatcagtagcgtatatgtcatatttattttatcctatccccttaattttagaacacgtaaactgtgaaagcatttttctagtaaataaaaatgaaacaacaatctcattcttttactttctgtttatttttgttggttaattataccttttttctcgacaaagaaacaatcccaaaacagaaggggggcgaatcaatcacacatagtgtttggatctctggattttcttagagtttgaccaaaagtgatcaacggataatctatttattgataagacactgttatattttggaattgtttgataagtgtaatcatattctacatcttcttttcattgaatttaataagagggattcattaattaggaagaaaaaataggtcaaaaaacatggattagttaatacagctccttgttgataaacggacacataatggacgattaaaatatgaaatagtagaatccaactatcttatatatgaaggggatcaaaattgaatcagatacttttcacactatagattctttgatccagcgcaattagagccgtatacaagtgaaaatcataaacaacaaattaatagtagataatgaacacattacacataaaagctagggttttttttggttatataaataaaaaaaaataaattttttgatggattggtgaattggaaagcacttagagatagatttatggtgagataaaataatagagagagatcataataatattaaagaaagagggacgagtgtggtttccacacgaatagcaccacatttcaccatcatcgtcacttgtttgcacacacactaacacacatacgtagacatctacgtattatgtttcttcatgtatatgcatgcatacgtagtcgcctacgtacatatatgccagcacattattaacattccagaatttacaatttatatagcgcatactaactataaggtaattctttttggttttttttccctatgattcacacactgcattcatataatggacagtccgaaataaatagacaatgaagacattagtcgaaattactaaaccgcttacgaattatgatcacgtatgttttcatgaattcaaagtgattgatttataattcgaatgttggagtacatgttataatgtctccaatatttttcaagcattgtatatattattactattagtagtatacactatagaatttgtagagcggcttgatcaaaagcaaaattcattaatttattatttaaatttgaaaatattgatcctaaatcaaaataatgcatggtaacatatatgttaattgtatattccttattatctccctatatatgtagtgaaaagtatgttattgtgccttttataatgataatgatggatatagacatgcatatggatttcaactttactattgtggtccaagtcctagtcctactgatcatgaaacgctaaatatcatgtaaactcggtatactttcagttattaacagttgaatacgacacgtaattttgctatgtcgatggtgaatctgtgcgtagcggtagcttagatgagactcgaatatataaattttgtagggcttgaaaataaagagttttgtgcaaatatttttaaaatgaaagccacaattcttgtctacgtaagtatatcaacaaaaaaaaaagaaatacaattctgataaatatatatcaacaaaaaaaaatgtttataatcaacataaaactttcaattcttgtctaaataaagttaagatagcagaaattttgaaacttaactgggccaagcataaatgggcttaacatgatgtggattaatgataaatgggcataacgtaacagaccaatgaagtatatgttaatccaacgacccgtttgcggtgtggtataattatggtcgcatatcttttggaaatataaaaataagtagagatagataagtggacaggtgttcattgtccgttctgatccaaaataagttcgtgtcttcgtggaactgaatctttatgaagagtttgccttggcatgggacaatgcttctccaatctgaaatagacaggtctttgtcgtcttggagctgtcttcactcttggccgagacacttgcgcagtcaagatggacacaccagaattaatatccacacctactaatatctttgtatgaatataattaccaaatcatttatgtaaagagatttcggactctctatgtcgatagaaattgtttattccggaaagtctttgagaggctcaaaaccaaaaaatgtttttgaacttatgattattttttgggggtatctgaaaaactaaatgatatgagaactgcaaatcttgtttcaaatagtaagtggatttacgaaaaaggtgaaaaattcaacaatagaggttcaatttaatttcttcactattagacggacaaagtgaatatataaatatatcttgatgtacatatcatttttgtgacattattgatatgtacatgaagatatatttatatattcaattggtccgacttggtccgtctaatagtgaggaaattaaatcaaatctctgctttgaattttgacttaaatatcgtctttacttcaaacagaattttagcagccacctcttacttttctacggtacattacatagagactattcagcaaccaagctggaccggcaacgctagccacaatgatttatgtgaaaattttataaagaaaaggaagaaatatctaagctttagctataaaaggagaaacaaggatatacatcaaaaacatactaaatcatcaacactacaaagaagaaacacactatctctctctctctctcaatacatctttcctcacttctgatcagtgtgatcacgtagagtgccttgaaggagaagaaagaaacaaaaagaaataaaaatg

SEQ ID NO: 35452 - DNA, 3000 bp, Unknown
  misc_feature (1)..( 3000): 2750-1469P.txt file - cDNA_ID_3087715; gDNA_ID_2926308; Annot_ID_205921
atgcgaccataattataccacaccgcaaacgggtcgttggattaacatatacttcattggtctgttacgttatgcccatttatcattaatccacatcatgttaagcccatttatgcttggcccagttaagtttcaaaatttctgctatcttaactttatttagacaagaattgaaagttttatgttgattataaacatttttttttgttgatatatatttatcagaattgtatttcttttttttttgttgatatacttacgtagacaagaattgtggctttcattttaaaaatatttgcacaaaactctttattttcaagccctacaaaatttatatattcgagtctcatctaagctaccgctacgcacagattcaccatcgacatagcaaaattacgtgtcgtattcaactgttaataactgaaagtataccgagtttacatgatatttagcgtttcatgatcagtaggactaggacttggaccacaatagtaaagttgaaatccatatgcatgtctatatccatcattatcattataaaaggcacaataacatacttttcactacatatatagggagataataaggaatatacaattaacatatatgttaccatgcattattttgatttaggatcaatattttcaaatttaaataataaattaatgaattttgcttttgatcaagccgctctacaaattctatagtgtatactactaatagtaataatatatacaatgcttgaaaaatattggagacattataacatgtactccaacattcgaattataaatcaatcactttgaattcatgaaaacatacgtgatcataattcgtaagcggtttagtaatttcgactaatgtcttcattgtctatttatttcggactgtccattatatgaatgcagtgtgtgaatcatagggaaaaaaaaccaaaaagaattaccttatagttagtatgcgctatataaattgtaaattctggaatgttaataatgtgctggcatatatgtacgtaggcgactacgtatgcatgcatatacatgaagaaacataatacgtagatgtctacgtatgtgtgttagtgtgtgtgcaaacaagtgacgatgatggtgaaatgtggtgctattcgtgtggaaaccacactcgtccctctttctttaatattattatgatctctctctattattttatctcaccataaatctatctctaagtgctttccaattcaccaatccatcaaaaaatttatttttttttatttatataaccaaaaaaaaccctagcttttatgtgtaatgtgttcattatctactattaatttgttgtttatgattttcacttgtatacggctctaattgcgctggatcaaagaatctatagtgtgaaaagtatctgattcaattttgatccccttcatatataagatagttggattctactatttcatattttaatcgtccattatgtgtccgtttatcaacaaggagctgtattaactaatccatgttttttgacctattttttcttcctaattaatgaatccctcttattaaattcaatgaaaagaagatgtagaatatgattacacttatcaaacaattccaaaatataacagtgtcttatcaataaatagattatccgttgatcacttttggtcaaactctaagaaaatccagagatccaaacactatgtgtgattgattcgccccccttctgttttgggattgtttctttgtcgagaaaaaaggtataattaaccaacaaaaataaacagaaagtaaaagaatgagattgttgtttcatttttatttactagaaaaatgctttcacagtttacgtgttctaaaattaaggggataggataaaataaatatgacatatacgctactgatttgtttcaagttatgtaaaagaaaaaaagacaaaatttgacactttgagaaagcttttgatatattattccaagttacgtttcttctaaaaaatgtaactaccaaccacactccgatcaaaaagttcattttttcaaagaaaaatacaatgtacatgaatacgaagacgttcctgaagatttcttttcccaattgattattcaagaaagtagattaaagcatttgccaaatttgaatatggtgttctctagtcaatatagtagtacagctgccaaaaggaatgttaatttggtaacttggtaataaaagtaaaaccaagaaaactaaagtattatatgtttataataaacttttggccaacacatttcgtgtaacattaggtaatcgtttgggaggttgagatttcatttttatatattaattttgtataattttttgccaagaagacatatatgcatattatggctttgatcttgacgacgacttaacaactccatagtgtaagtatgtaactgcatgcccctttcggtctctcaaattgatatttgttttttgtccttcacgaatcaaatgaaatgaaaaagacacataaatgtatactttcacatttcctttcttcttatatttgattatttgtaactttttttttgaaaagtattaagttccttttgaatttaattcaattgagatccatttttgggggtacagttataccaatcgttgtgctttatctttaccgatggtacgcggcaatcaacttttttttttttccttctaaagttcatttgttcgtttcaaacttataatcatagtgtaaaaacgattagatgtttgttaattcgatttcctaatctaaatttttgaaaaagacagaataaaaagtatttccgttagtggtgatgatgctccccatatattaatcgtcgactccaccacataaattattttaaaaagttaaataaaaaaagctaaaaactcacacaatctctccataaatagaacctaggcgtgtgttctccacacttcacctatattctctaccttcttatttcagcacaaaccaaaaacataaagacagaaagccaacccaaaagactttaccatg

SEQ ID NO: 35453 - DNA, 3003 bp, Unknown
  misc_feature (1)..( 3003): 2750-1469P.txt file - cDNA_ID_3087719; gDNA_ID_2926308; Annot_ID_205920
gctccagttccagcaaaagcctcacagtgttttccagctaaattaagcaaaaacaaatagcattaagcagaggaaaagaatggggagacaagatacatgaatgtttattataaacattaacttgtgactcatagtcttacaaaagggaagcatgaaaacttcaatcattctacacttgggaactgatgatgatattataacaaaagaaacaggatcccaaacatattacaatgatggaatgttcattcattccattagtaatccacattagaatagaagtggtaatagtgaacttacactcgtaaaatctattttcggatcttccatagacctgtaaagggtgcctttaaactcctgcatcactttctcaacctcctcgagtacgcgcttgagtaaatttacctgtaaccaaagtgttactctatgctttcaagagctttgtaatgcaagtgaataatatggtaacaaacaagcgaatactaggagaaacatgagtgctatctgtctgaagagttggataatcgggcatgcatacatgagaagggagagcaatagacttcgccttcttgtattcccgaacagccaaatcatactcgcctttgctaatactactacgaattatactgggtaaattgaagagtgtacggaatctctgaagcattccttgtacagacctgatcttctcagcttgggcctatgaataatggtgaaaacagtctaagcagatagcaagaggctaggaaaacaccaaaaaaacaatagtacgtgaccatacaaacctgtctctcaaaaagtggctcaaaagcacgattagcccgtgatgtcacactcttcatacaattaaacaaatgagtagttcccgatccgtctgggtcgtcttcaatccgtttcagttttgattcaatatctgtaaagaaaggcagtaatgttcacatcaacaagagagaagagtaaagttcaaaatagataattgagtgtaataatgcataccatcaattgttgttttacacgagacaaagcagtcaaaattatctttcaccaattgtttcctttgtagattacggccctttaagtcacttttcagggcaagggccccagattctaagtctgctgcacttgtctcttggtgaatgcgagaaataaatagcttgggatcgaaatggtcagaggtgtacaccaacttttctgcaaattctcagaccagttaaagttagaaaaccggaagttgtacatcgagtaatcccgcataaagttcaaatcaaactccaaattccaagtatggtcatgaagaaatacatacccctaagtgcattatccactttctcagcttttgaaagactttcagatgactcagtgattaatctcagtgtcttgttatctattatcctacaaggtacacaaaagccatatttagataccccctaacatacagtgttccccgagatagactaaggtattcgaatgacggtagaggtgagcagcacaaacgagaggaagtaccccaattttagcggatcaatgcattccatgccacgagggaatgattgcaaactggtaagaaccactttcttgtcagctccagatacctttctatcaaggttctgagtcacggatggtgctgttctcgactcccgcatatcacgaaccttgcgtgcaagctgccaaatgtcattagcatttcagtaaaaatgttcatatttccaactaaatttttcgtcatgccatgattctaaaataactaatggccttgagctgaggtcttctacacctcaattccatgaacagataattaaaggccatacaactaatatcacatatacgaattgattcaatttcaaatcttcaaatcgatcaaagaagcaaagattacttaagactacttcaaatcaaaacaatgcaattgaaattcgtaggtcgaaattgcacacataatctctccaaaatcaatttaaagccagataaatccaaacatgatagaaaccgtacctcagcttcattaacccgtttccagcaatctggctccactccatcccaagctctatcatcttccttccgcgctcgtcctctctccttaccacttccacctcttcctctacctccgccaccgtcaccaccaccacctcttccccgatcatttccctcatcttcatccccgctcgaaatgctaagcaattccacctccgattcatcatcctcatccatcgatggcttccttgacgccttcgcacctcccttagacggaggagctgccgccctcttttgtctccgtggctgctgcactaaattggtgactggcttacgggaattagcggaaggaggcttctgataggtaacatctctctgagattgctccttcaacgccatttgaagtagctcatcttcatctaaatcatcactgctagacattgttatctctgacttagatgatcgtctttgtcttcctcccttgagctaatcgcagagatctgtgcagttcttatttgaatttagttttgtgactttttcctttgaagaatttttcttctgttttcgactttttccaatttccatgtattaatgaaataaaaactggagactcacaaaacgcagtcgttgattattttaacctaaaagttataaattctccttactcaagctttcttcttcgatcgaaatttataaatacgacgcgacaaacctgaattgcgttcagaaaccctaaagctctcaaatatatctctgcaacgaaaagaaatcacctgcttactcttctcctgaaagacctgatcttctccggtgaattgttttttgttccgtcaatcttccgagtttgtttttgcctaatatgaagttaaacccattacagaaaaaggtaatcttctctatcgctctgaacattgtagttgattttgttgatttattgttgttgtttctagagttaatgatcggataccttattgtatgttttgttttcggtattgggggttaatcacaggctatattcatatttgatttctatcaatg

SEQ ID NO: 35454 - DNA, 1249 bp, Unknown
  misc_feature (1)..( 1249): 2750-1469P.txt file - cDNA_ID_3087727; gDNA_ID_2926121; Annot_ID_196692
tgaaaatttataaaagtgcaggaggaccagttattttttatctccccgtttgttgcgcaggttagatgttattgataggtgtttctcaaggagaacagtcgaagaaattatatctgcacttgtaagcttttcatttatatatagagatgttgacttgcgatcctgagttgactgatttacctttgacaacgcactctaccatcatatgtgttgcttaggagagagaggccactcaagaagcagatggttggatctcagctaccattcaagcattgaagaagggttcaccagcaagccttaaaatctctcttagatcggttagttcccagaatgtgcatcacaggcaatgttgacaaagagctgactgtgagtatatatttcagataagggaagggcgattgcagggggtggggcagtgtcttatccgcgagtatagaatggtgtgtcatgtgatgaagggagaaatcagcaaagattttgtggaggttttgcaagctttttccatctgaaaccgtctttgttgtagaccgtagttacaacagcgtgtctttacttatgcaggggtgcagagccatattggtagacaaagataagaacccaaaggtttaacaagtctctccatttgttatttgtggttggtaatatgtgacattgttgataacaatatctgaaattatagtgggagccaaggcgactggaggacatgaaggatagcatggtggagcagtacttcgagagagtggaacgggaggatgatctaaagcttccgccaaggaataacttgcctgctttagggatcgcaaagctgtgaagtggagaaggtgatggagcactattgtttacgtctgtgggaaagaaaaaagaaaataaatgtaacaacacttgtgttgaataggacttgcatacattacataaatcattattgtatttgagaattgacaccaaagcagcagagcagaattgtgttaagatttgttaatggtgttggaggcacaaccatggcaaacggacgtggaagcacgtctatagtcattgttcatttatttgattgagattcctccttggtctcatcttctgaaaacgaaaaataattagaaaatcaggtgaatcgtgaagtattgaatgagaagaggcaattaaaaatctcccgtgactctcgtctccccatctctctctctccctctgcccaaatttctggggcaaatttgttcatcagatctactacaatctctctttttcttcgggtatg

SEQ ID NO: 35455 - DNA, 1249 bp, Unknown; identical to SEQ ID NO: 35454
  misc_feature (1)..( 1249): 2750-1469P.txt file - cDNA_ID_3087727; gDNA_ID_2926121; Annot_ID_138620

SEQ ID NO: 35456 - DNA, 595 bp, Unknown; identical to SEQ ID NO: 15279
  misc_feature (1)..( 595): 2750-1469P.txt file - cDNA_ID_3087735; gDNA_ID_2926122; Annot_ID_196695

SEQ ID NO: 35457 - DNA, 595 bp, Unknown; identical to SEQ ID NO: 15279
  misc_feature (1)..( 595): 2750-1469P.txt file - cDNA_ID_3087735; gDNA_ID_2926122; Annot_ID_138621

SEQ ID NO: 35458 - DNA, 3003 bp, Unknown
  misc_feature (1)..( 3003): 2750-1469P.txt file - cDNA_ID_3087743; gDNA_ID_2926123; Annot_ID_196702
ccaattgtttatagattatctgtatacacaattacacactctactaatcaatgtactttagcatagaataatacttttacttctactaagcttgtttcactaattataatgtttagttagagataaaaccattgaaaaatctcaaaaagtaataatcaatataaacaaatagagagagcaatgataataataagatatataggtcatagtcttgtcaatcatgttaatgataaaaacgacaaggctacaaaagtagtagtagaagtagaagaagaagatgatgatagtgaagacaaacttgtgtcataagtggtcttacacaaatccgtcttggaaactggtgtttgcctaatggccctgctgggcttttgcttcagtcattaccgaatcctcttgtattggcagctttaatcccaaatctattcaactcatgcaatgattttggacgaagaaacttctcaatcccaaatgacccttacttcacctttcactttttgttccatcgtaaagatttgaaactttttagatcttatgaaaaggcaccacatcttcatcaagtattttctttaaaatgtaggggaaaaaaaaatctagttcttttgttcatagtcaacctggaccagtaggtcgttgggccttgggtcttcagtcacgtcggcaatcaacattcacttacccatttgaaacattggatcagcgtgaccaatgccaacccattaatctaaatggtttaaacaatcaagcgtgcaaggataaatgcattggacttgagagaacaagatatggaatttgaaatgttgccttaccagttaacaagtgtctctgtttcctcccaagttaatgtaccaaaactctttggtgcttaattgtgggggcttttataatattgggtacattttgggccataaattagagaaagagcacattatgattgagtttatgaagataggcagtttttgggaaataaattgacgaaattgcccctgcgatttcactcattctcctaaattgtttttgcagaatcttttcctgaattgtttttgcagagcctcatattggatcgattcctaacttgtttcaatggatgatgtattaagtacagagattgattatcctatttctctacttaatcaatgtttctttctacaagacaatatatacacaaaagatgtatttacggaaacaaaatcgatagagacaaaaattagaaaatctgttaataacatttcatcaccatccaattcagataaaccccaataaaatcagttaaaagctttttgatggaagaaagctaacccctaagaaaatattatataacgaacccaaatatactaatcttaaataattggaatcgattaaaattttcaattatttcttatccctctttgaaattgaagaaagagaggatgaaattaattcagatcaaacaattcaaattcaaaaaagctatggaggattaccacctgcatcgtcgaggaagaagattggccaggcatagactgaattttgtaaggtgatggagagcaatggacatcaatggtgagtttagaggcaatagattccatgccattagagaaagagaaagagagagaaataatcgcacatttctgagatcgattgatattgatgaattctcctcaattagattgaaggtacaaggagaagaaactcaattagattgaaggataaaacagtcatccatataatataaaagtatctaaatttgtaaggaacatgagatgttcctatatctacaaaagcacagactttaatatgctaatcccataattgatcccttaattgtgtgtgtattcaaaataagcccacttcttataggcaatgtaacacttgactcaaaagccaaagcagccacttaaatagttaagttacattaaacagagaagcagccttccctaagttaagcattcttaatctaaccaaatataattcatatctaacaatgttaacttctctttctattcttaataataacctaacaaattaacttgggtggtgtactattctgagtttgttacttgtcttgtccatgcacggctagctgtggtgctgtcttagaagggcttgaaggtacgtggctgttgatacagaaaatgtttaaagaggagacaagtctttgtcaaagtttgcggatgacggctatgaaatcgaaaacgaattttctttcagtttttcttaaaaatttttttttaccttaaaacaataagttaaataaataaaattaaatcggatttatcttctcggtcgtccgaaaatggcagagttgaatccaagaagttttgtgtgggagttgaggtgggaactacgaaattaaatataatctatgcgctattttacaaatttgttagtccaaatccactatgttgctaatatttaattacatgtttagatcctaattagtttgatgattatataatcaataccaaagaaagtgaagaaataacctaatttatcaacttgccagctagtgaagtagctccttggaggtttcagtaaaaaaataataaaagtcgataaaaaaatactacccaacttcatggtttattattaaatgcgatgtggtcgagacaaagtaccacttgagtaccgtactaggatatgctcaacatatttaaaattttgaccaagtcaaattaaccagccagagatgttaacagttaatgtagtagccaccggtccaatgaaattgcaaatgaacaaacgtagcacctgaaaactcgccaccgatcacgatcagcacacttttatgaattggtcaagatattatcttctatcattagatgaatacttgcatgttagtattctctactatcagacggtgtgtatttttttatttatagggttgaacgctttattgtcccatgcacacgtaaaagtcgacctccccatcattttttcactataaatagtggttgatttcaagcagatttcttcaaactaaaacatatatacatcgaaaacaactaagtataaacaatagtcatg

SEQ ID NO: 35459 - DNA, 3003 bp, Unknown; identical to SEQ ID NO: 35458
  misc_feature (1)..( 3003): 2750-1469P.txt file - cDNA_ID_3087743; gDNA_ID_2926123; Annot_ID_138626

SEQ ID NO: 35460 - DNA, 3003 bp, Unknown
  misc_feature (1)..( 3003): 2750-1469P.txt file - cDNA_ID_3087747; gDNA_ID_2926123; Annot_ID_196699
aaaaacagaggataaaaaacgaacaaacggttaaagctggcaaagatcccatcttccccacgctgtcaaattttgtcactacttcccaaaaaaaactctcccgcctctctctctccctctcccttcttattctcctccttcttctccttcaccatctccagatcccaaaatcttcatcgatcatcatcatcatgagagaaatcctccacgtccaaggcggccaatgcggtaaccaaatcggttccaaattctgggaagttatctgcgacgaacacggcgttgatcccaccggacgttacaacggtgattccgccgatcttcagctcgaacgtatcaatgtttattacaatgaagcttctggtggtcgttacgttcctcgtgctgttctcatggatctcgagcctggtactatggatagtatcagatctggtccctacggtcagattttccgtcctgataacttcgtctttggtcaatccggtgccggaaataattgggcgaaaggtcattatactgaaggtgctgaacttattgatgctgttctcgatgttgttcgtaaggaagctgagaactgtgattgccttcaaggtatatatatgaatcgatttctcccttttgatttatgaatctgctggtgctttgatcatattatctgattgatttgtgaatcaaaactgcaattatccgatggtttcgatcatttaaatctcgtctcgtgagtgttaatgtagttgcatatttagtaaccgatgatttcgatttcagtttgatttttgatcatcttcgcattgcactagtgaatctctcacatatcgtgttttgatatttgattaacgtttctcttcattgatctcttcatggtcatggttccaattacagtttatgaattacatgaacatgatccgtcgatgttcttgtgtttgatttgcgtttttatggtgtttctctcctgttgattactgtttaagagtgagctgttaacacttaatgattggctaggatttagattttgtctattctttatagtaaaaagttaacatcattgaaactaaggacaatatcctaatttggcggtagtgtattagtgtcccctaatgttttgttccagatttgtgactgtggatcaacaatatcacgtgaaaccttaaaaccatatcgaattttataataagaactttagggaatactcttgtgttgacactttcgaggtgaaacatatcactttgtggggatataattgaataagcaagtgggtcatgattggtttcagcaattgttaaataacatctcaatactttttggatctggtttaggtataagggacttctttagttttgtagtacattgtttcacacttgttcttaacatttctgtattacagggtttcaagtatgtcactctcttggaggaggcacgggttcaggaatgggaactctcttgatatcaaagatccgtgaggaatacccagacagaatgatgctcacattctctgttttcccatctccaaaggtctcagacacagtcgttgagccgtacaatgcaactctctcagtccaccaacttgtagagaatgctgatgaatgcatggtcctcgacaacgaagctctttacgatatctgtttccgcactctcaaactcagcactcctagctgtaagtaccatcaaaaccttaatgtttgttactttgttttcttggttcctaaattctaagagttcatatatatatatacattttgcagttggagacttgaaccacttgatctccgcaactatgagtggtgtgacttgctctttaagattccctggacaactcaactctgaccttaggaaactcgccgtgaaccttatcccattccctcgtctacatttcttcatggttggtttcgcccctctcacttcccgtggctctcaacagtacatctctctcacagtcccggagctgacacagcaaatgtgggacgctaagaacatgatgtgtgcagctgatccacgccacggacgttacctcacagcttcagccatgttccgaggaaaaatgagcacaaaggaagtggacgaacagatcctaaatgtccagaacaagaactcatcctactttgttgaatggatcccaaacaatgtgaagtccagcgtctgcgacattccaccaactggaatcaaaatggcttccacgtttgtcggaaactcgacttcgatccaggaaatgttcaggagagtaagcgaacagttcacggctatgttcaggcgtaaagctttcttgcattggtacacaggagaaggaatggacgagatggagttcactgaagcagagagcaacatgaatgatctggtctctgaataccaacaataccaagatgctaccgctgatgaagaagacgaatatgatgaagaagaagaacaagtttacgaatcttgatcttacaacacaaaccaaaagatgaaaaaacacagaagtcacatctctatctcttttattgaaatctctattcctactattaccactatatatatatatacatgtatcaagttgaagaatctgggaaatgtgtttgtttgtttgttactttatctttgtggttctctcttattgtattttgcaacttagtttcttctcattgcctttataataaagagtctgtccacgtatctccctctttagcctttatttcatagtattcaaaaaaacgattcttagaatcctttcagtttatagtatagacaaccaaaacattggaaacttggttgcatattcgttacaaaatcctgctatttctgctatataattatcaccccaaaaaaaggtttatcaaaaactacttaaattgataagaagagatgaatctattaaaaagcttctactataaagcacacatcttcttcttcatctctctttcgctctcagaatcctcttttaagtctctgtttcataaataaaactaataaagaagaagaagaaaacagagcaattaaagtccttaaatcttcttcttctccaattcaatg

SEQ ID NO: 35461 - DNA, 3003 bp, Unknown
  misc_feature (1)..( 3003): 2750-1469P.txt file - cDNA_ID_3087755; gDNA_ID_2926124; Annot_ID_196709
ttgtagcaagtttgttgaaggcggcgtgaactctctcttctgtgaacagtctatggttttcataggaatctaatatctccattgcaatattcttaacctgccaatatgttcacacattccgatgaccaactaagcaagaccatgccttctagtaacaacagagataacagtgcatggacttacaatgttcatgtcgacagaaagctcttcaaaccatgtctttatatctttctctttgtgtacagaagcaatgtaaatgcaagcgagtgtgatgagaaacggcggatgtattaggatgaggtccattctgtatatgtcgttgacaagacccctacagtttccacacaaaactttaagcatcaagagagcatttacttttttgcctgcaaatcaaaacctgtttagctctcttccaatttcagatttactgtgttgacttattgattacaacaacacttgatcaagaagcttaatgaaggacaaaagttttggacacttaccaagttaaatgggtcatactagtgtcattgattccagaattctgcaagaacctgtaagtaatgcaagaaggataattaaaacgaaacacatagtatagtcgcaaaaaacatttcgacatcgacatatgagatcctaagcaaacaacttactcaggcagggatcggtatgggtggaatacaacaagatagaagttcaatgcttccaaaaccttcatctccatttcccgaatatctttaatctcatatctaaacttttcatgaaactcagacaaaaaaaactcaacaaagtttgggaagcagaaaacaaaaaagaatttacaaagttttttcatgtagaagacaagaagtttggcatgcaccactctctcttctgccttgcaagccaaatacaagcatgtaggagcaacaagccgaggctcatattccgtcaaactctttctgccaaaacacagtacccataaatcaaatgaccaagcctcgtgctacacaacgattaccgaagaagccataccttgtgtaaacaagacgcatatacgttactgcagttgcaacaactctgaatcatttttattcaaaaaaaaaaaaaaaaactctgaatcatagaagtgctaaatcagtgagccttgttcaaattgccaatgcctaatcttaatatgtttagatatatccgaaatcgaacaacaacaagaccatgaatatgaattaatatcacatacatcaaaactaaaactaagaaaaactaacaaaaaaatggagactggttattgttccatttattagacctcagcttaagaaagtcaaagagcttaaactaagatttaaaacaattataagagataattgatggacacgtgagagtgaaaaggcaatcaaaagtcttctccacactttttttttttttttgattttgtaacagcttttaatttcttgtttacagatgagatttaccaacctcaattaggttccatgtcttcgtgtttggtgaggttagattggttttacaactaaatgggagagaacaaatttggtgttggctactccaatgatcaatgtagtgaaggtgttcgatgaaatgactaatagagactttggggaaattacttcacctgaagtgtgttcatttcatagaagagctagtgaggaaagaatctttgttgacttgatactgaattctagaagcgattatgttaccaagcgttgttgccaaggatgctactgatgatttgagtgagtaaagatcttcctgcaggctgcagctttactaaagctgttgaagaaaagatacacagtgacgtggtggtcttgtctcttaatggctttctcttccggctgaaacggtatcctctgatttccttttgatttgtatgtaatcatctgtatataatatatatagcttattaaccgatcaatatgttgctattttgccctgcttgctaactgctgtagtagacagttcatgtggtgttgtaataccctcttatgataattttgttaagagtatttataagctcgtggaatcctgatcaaggattgtttatgttcagttcaagtttgattttgcaaacaccaggtttcaactatgttttctgattacaaccccactaaactgtattcaagtttcgtgtgcatatatataatataagcctctcttgaaaatttagcctctgaagttaacaagctacacatgtaatttttgcagagttgaagcagcagtgcgaatgagctggaggatccaataggcaatgataggattgagtcatcagttcaagttacatttttgcaaacaggtttcaactatgtccttcaatacaatccgctaataattttcaacagtgcatggttttgtgctcttgaaaatttagcctctgaagttagcaagttttattgactgggggatcgaataggcaatgatagcaagaaaaattgttaccagaaataatcctcttttctttctaagctcacgatgcagattagcaatcacgacaacgagttggcctgaaccaaagaacatagctgattttagaggtgatgtttcttgagattaacaggttatgggaagaagatgcctgggagtgaataaaaggagtgtgtccgcggaaaagaggtgagatattatggtacatacatcaagtaattattttttgaatttcattagtgatgtaaaaaagagagatatgaaacccagtggtcacaaattacttttgttccttatcatgaaaatggatatgttgatgcagaattgcagatggtgttggcctgacagttgtagacaagttgaaataatttaatagtatctaacctataaaatcacttttatttaatcaaaatgaattactatatatcttttctttaatcaaaaccctcagccaatagactcgtagctacataaggttgacttggggtaagcttttagctgattcttgatctatttttccgagaatctgtaccattgacattcttgtactggttcatcgtaggtgattgtcgacaagtagttgttatg

SEQ ID NO: 35462 - DNA, 413 bp, Unknown; identical to SEQ ID NO: 15287
  misc_feature (1)..( 413): 2750-1469P.txt file - cDNA_ID_3087761; gDNA_ID_2926124; Annot_ID_196711

SEQ ID NO: 35463 - DNA, 681 bp, Unknown; identical to SEQ ID NO: 15286
  misc_feature (1)..( 681): 2750-1469P.txt file - cDNA_ID_3087770; gDNA_ID_2926124; Annot_ID_196705

SEQ ID NO: 35464 - DNA, 681 bp, Unknown; identical to SEQ ID NO: 15286
  misc_feature (1)..( 681): 2750-1469P.txt file - cDNA_ID_3087770; gDNA_ID_2926124; Annot_ID_138627

SEQ ID NO: 35465 - DNA, 3000 bp, Unknown; identical to SEQ ID NO: 9196
  misc_feature (1)..( 3000): 2750-1469P.txt file - cDNA_ID_3087806; gDNA_ID_2926128; Annot_ID_196769

SEQ ID NO: 35466 - DNA, 3003 bp, Unknown; identical to SEQ ID NO: 18602
  misc_feature (1)..( 3003): 2750-1469P.txt file - cDNA_ID_3087810; gDNA_ID_2926128; Annot_ID_196766

SEQ ID NO: 35467 - DNA, 3003 bp, Unknown; identical to SEQ ID NO: 18602
  misc_feature (1)..( 3003): 2750-1469P.txt file - cDNA_ID_3087810; gDNA_ID_1972020; Annot_ID_178036

SEQ ID NO: 35468 - DNA, 3000 bp, Unknown; identical to SEQ ID NO: 7693
  misc_feature (1)..( 3000): 2750-1469P.txt file - cDNA_ID_3087810; gDNA_ID_1621157; Annot_ID_173568

SEQ ID NO: 35469 - DNA, 3003 bp, Unknown; identical to SEQ ID NO: 18600
  misc_feature (1)..( 3003): 2750-1469P.txt file - cDNA_ID_3087814; gDNA_ID_2926128; Annot_ID_196765

SEQ ID NO: 35470 - DNA, 3003 bp, Unknown; identical to SEQ ID NO: 18600
  misc_feature (1)..( 3003): 2750-1469P.txt file - cDNA_ID_3087814; gDNA_ID_1972020; Annot_ID_178035

SEQ ID NO: 35471 - DNA, 3000 bp, Unknown; identical to SEQ ID NO: 9189
  misc_feature (1)..( 3000): 2750-1469P.txt file - cDNA_ID_3087818; gDNA_ID_2926128; Annot_ID_196763

SEQ ID NO: 35472 - DNA, 3000 bp, Unknown; identical to SEQ ID NO: 9189
  misc_feature (1)..( 3000): 2750-1469P.txt file - cDNA_ID_3087818; gDNA_ID_1972020; Annot_ID_178032

SEQ ID NO: 35473 - DNA, 3003 bp, Unknown
  misc_feature (1)..( 3003): 2750-1469P.txt file - cDNA_ID_3087818; gDNA_ID_1621157; Annot_ID_173573
tcacacgtcgctagcgtttcaaaactgcttccactcatccttcctttgatggactcagaatctgtgcattgtggtcgccccaaaagcaaatcatatggaagaggagcaggagcacaaaaggtgtcaggtatagatgtctccaaacctatatcaaccaagaggcctgtggtgaatgctgatcccacaccagcacgggttcctgaagggacaagctcttcaaaagattctggacactgcgtaacaaacttttaataaatagaaactttgtagagtgtcacaatcaaataactgtagataattcagaagacatttttcaaacacagctcactcacgacctctagtagtctactatcgaccactcaagcgagattgttacaagaaattgttgagattctaaaatcatgctcttgtcccgatttgttttaactaaaatcataatctatagatagtcagtagtgcaaagcaacacaaatgcaagatggtgaaaaggattactgacataatagtaaacaggtgttccaacaagatgtgacttcctcgaagaactacagcaacctcccattttcaccagctatagtaataattaagcaagagtagcgaacaacagtccttgaagcattttacagatgcactgccactgcaggaaaagagtgaactgaacaacgattacttgaatgcaacaagattaatcaaaagtactcttaagaaaccccaataaaaaaaaagtgattattacagtgttagtaagcaaaatgacaaaagaaaagttggtctgatggcaaagtcatccataagaaacacaaaggtatgggaagagtgaatagtgagaagaacattacgaaacaagattaatcaaagcagacttgagaaatcccaataacaagtgattattacagtgttaataagcaaaatgacaaaagaaaaagttgatctgatgccaaagttatccataagaaacacaaaggtatgggaatgttccttatgctctgttgtaatgtcccatcaatagctgaaacttgaatctatattctaaaacaacctctaggattcagtcaagttgcaatgaaaacagtgacgcgagcaaaagcatttcacacttgagccaattttaatcaaacacaacacaataaccttcaaaattggtaacatcattgatatgtaactctaccataagatcttctcataagaatagacgacaacatgaacacagtaagcacatctaaatcagaaactaaacaacactaaacagtacgcgaaccctaaaattgaagaagccgaaaagaccaaaaacaaaaagtacacgaaagccgactccgggaaacaaaaaaagagatggaataattaaccgatgagagcagtaaacgaagataacctgagatgtcgccggagaatttgatgttgtcgtgattctccggtgaagaaaagtgagaagaataaatgctggcgacggagggtttcgacacacagagctccttttctctagtcgaataacctcatcatagtaagtaattatactgtaatcctactttactttatttagtttgcctaattattctcaaatctcattaaataccttttaaatagtacgacgtcggttaaggatacgggctaatcattgggcttttgttttctgaaacatgggctataaacattttagaccatggtccattctacagaaggtcaaaccctctgtcgctatcagaggctattgaatattttgctggtaaggtctcaattctcatcatccttcacctgcctatgaatcttccttgttaaccgtaacctaatattgattgacttctaatcaaagtaatttaatctaccattttattatttcctctaatctaagcctttttcatataaaatgtatctaatagtaactttataagaaaaatattatacctttttcttggtatctttgttgtaaaaaaaaatacaaattaaatgcgagttcgattattgcattaatagagatagacccatctggcatttaatatggtggcggcggaataatcgctaacaagatattagttgaaaattttcaaatcattcggatagattacgtctggcattgaactaattatcctctataaattcaataatgacagaatttagtagatgttctaaatactaaaattatttaataatcttacatatgcaattttccatgtacgtgctgttttggagcgtttaaaccgaattaaagtactactgtaaataaattgaatcgaatttaccgaaccaaaattgaagaaaaaaaaaattaaatcgaaccgaaccaaaaattggaaactagtcgaataaatattaaattctataaccgaaatatctgaaataaaaccgaataaatacaaaccaaaatattttgggtaaaatatctaaagtataaatatatttttaaaagtgttaattatttctagactaaataactaaaaatacttgaaaatataaataaaatagtaaaaatatttggaaatatctaaaaatatttaaaaatattcaaaataaccgaaatattttaaatgaaataaccgaatggatactaaattttaaaatcgaaaccgaacagaactttcaaataaccgaatggatactaaactttaaaaccgaaaaaatcgataacggaatggataactgaacgccgagaactactattatatacaaagtatttagttattcaataaaatttgaaaccaatcgttttttttcaaaattaataattatcgaatttaaatctaaggaataaaaaagcttattacaaatcattagacaaaatgtaataaaaaaaaaggaaattatacacattaattatcttagcttgtcgagtttaaattttgttaatcagagaacgtcaagttgtacagctggcgtcaataaatacccaaaacagtcgtctttttcaacggagaagaaaaagttgaaaaaattgtaaagtcagtctctccgactcttccttccttccgtgttcaccattgctacacgttctccacgaactttccgatg

SEQ ID NO: 35474 - DNA, 3000 bp, Unknown; identical to SEQ ID NO: 9187
  misc_feature (1)..( 3000): 2750-1469P.txt file - cDNA_ID_3087830; gDNA_ID_2926128; Annot_ID_196756

SEQ ID NO: 35475 - DNA, 3003 bp, Unknown; identical to SEQ ID NO: 18595
  misc_feature (1)..( 3003): 2750-1469P.txt file - cDNA_ID_3087830; gDNA_ID_1621157; Annot_ID_173582

SEQ ID NO: 35476 - DNA, 3000 bp, Unknown; identical to SEQ ID NO: 9186
  misc_feature (1)..( 3000): 2750-1469P.txt file - cDNA_ID_3087836; gDNA_ID_2926128; Annot_ID_196749

SEQ ID NO: 35477 - DNA, 3003 bp, Unknown; identical to SEQ ID NO: 22034
  misc_feature (1)..( 3003): 2750-1469P.txt file - cDNA_ID_3087840; gDNA_ID_2926128; Annot_ID_196747

SEQ ID NO: 35478 - DNA, 3000 bp, Unknown
  misc_feature (1)..( 3000): 2750-1469P.txt file - cDNA_ID_3087848; gDNA_ID_2926128; Annot_ID_196740
tattccatccactatgtaaagtagttctggtttgttagaggtcttgaaaagatgtgatgtcaagtgaaatgcaaaacggtggcatggcgaagataagtggctagaaacgggaatgttaatgaaactaaagagagacatatacacgtgcatatatacactcagatgttgattgttttccaaggtgtttgtgtgagaaatgacatctctctctctcacccattcaggcggtggaaaaattcaataacacttttaaaaaagatttttgttcaataggttttgacctgaaaatacttagaacaaaaaataacacaagagggaaagtgccgtaaaagtaaaaaaagaaaaaaaaaaagagagagatcatgtcgctgacatactatacatgcctagctagctcggtacatttatatataatgtttgtgtgtaaggtagattgagatatatgaatggtcaaatcggaaataaaacagtatatgttcttaaataagcttctcctttgttcaacttttttgctttcatttccgttacatgatttcgcgattaattactttttataattagtcaacttcgacgccttgtgtcgtcctcgattttaatgttctgtctttctctgcattcatagtttatcttatttcatttcatatccttacttcttttttctacaaacaataatttctagacgaattgaaacaaatttccaaaactttatgagtatatataggatatttttagtggcaaaggacgacttaaattgtaacgaaaagaatttgaacttttttccattagtccctacgatgaatatttcatcctatagaacatcatatgaattgattacttaatgaagttaaatttttgaaaactctattagggacaatgtcccacatcggaagttgagtaggatcttaagtggtatatataagatatgagcctctccacctattgccaattagttttacgttggaagcccacagtctgatatggtatcagaccccgatccgcacatactcaacccgatccacatcggtccggcccaatacttggcccgccgatccatgcccaaacatatcgagatcaatggctagaagaaccatcatctcgagggggcgtattagggataatatcccacatcggaagttgaataagatcttaagtggtatatataagatatgggcctcttcacctattgccaattggttttaggttggaaacccacactctaatatggtatcagagcctgatccgcacatactcaacccgatccacatcggtccggcccaatacttggcccgccgatccatgcccaaacatatcgagatcaatggctagaagaaccatcatctcgagggggcgtattagggacaatgtcccacatcgaaagttgagtaggatcttaagtgatatatataagatatgagcctttccatctattgccaattggttttatgttggaagcccacactctaataaactcaatacaaatactaaagttgcaaacaactatactatatttgcttgaagttctattgtgataggattttgacttacaaaaatcatattctatgtctacactatatattgtgaaaccggatagccataatatttacaaaaacttaaactaatttcagatataaataaatttaaatttcactatgacctagtaattatcacgaacaattgggaagttaccacaaaatggtggtcctgtattatggaatttagcgaaaccacacacttgcgggtaaaaataatgatgacaaaatgatatacattggaatgtagagaaagtatatacaaatactaataaatagaaaagggcatggaattgacgaggatcgagggaaagtgtggtgtggcagaaatgttattaagtgtgaaaacaactgatgaatgagcctttgcttaatcacttccatgcacaagtccctttcctcttcctctctctcccacttcatcgaactttgcgtcctttaaagaaaagaaaaaacaaaacatttttcatccaattgaattcaaaccgtaaccagattagatttaacttcgtttattttacattatcttcttcttcttattttgcggagaagacttgtacaatgacctcaatacgctgaagagttggattcactgcgagtgtatatgtgcatatagaaacaaaatatctagctatatgaccacttttaactctaaatatgggtgtaatatgccaaggactttctggagatccaccacaacacacattcaagttcaagttctgctgcttttaggtctatgaaaacaacaccaaccttattttcatattgttctctctttatctcatgcataagtatattttcatattgttccctctttattttcatgcttttagttgatattttttttgttattgtattatcattagtgcgacgacacaaagtcacaaaccatgtaacaaaatgcttaaccaaaatagaaaaccttaacaattccaatatattttctgttattgcattatcaattatcatcaaatttttttccactgttgcattatcatcattgcgacgacacaaggtcacaaaccatgtaacaaaatgcataaccaaaatagaaaaccttaacaattccaactttaacatgtgaattaatattatcttaatttttggatgttcgacattcaaataaactcctaattaaaccctatagatatggttaatcttctatacatgtgtcacgtacgacacttattagccaaattgaagttttgttttttccgcaaatatataagcggtttaaatagttggtaaaaaaaaaaaaaagttagcatgtttgtcgtatgtacatgtttgatgctgcacaaatcttgtcgttataaaactttgaaatctttatatctattattcctcaccgatcggctactaattcaatggtacttgataatgataattagtcccaaagtagagtttttatctgattatatagaaacaaagactagttccggtttgatatatagaagaaagaaaaaggatg

SEQ ID NO: 35479 - DNA, 3000 bp, Unknown; identical to SEQ ID NO: 35478
  misc_feature (1)..( 3000): 2750-1469P.txt file - cDNA_ID_3087848; gDNA_ID_1621147; Annot_ID_173102

SEQ ID NO: 35480 - DNA, 3000 bp, Unknown; identical to SEQ ID NO: 7480
  misc_feature (1)..( 3000): 2750-1469P.txt file - cDNA_ID_3087852; gDNA_ID_2926128; Annot_ID_196739

SEQ ID NO: 35481 - DNA, 3000 bp, Unknown; identical to SEQ ID NO: 7480
  misc_feature (1)..( 3000): 2750-1469P.txt file - cDNA_ID_3087852; gDNA_ID_1621147; Annot_ID_173101

SEQ ID NO: 35482 - DNA, 3003 bp, Unknown
  misc_feature (1)..( 3003): 2750-1469P.txt file - cDNA_ID_3087862; gDNA_ID_2926128; Annot_ID_196732
ttgtctttcttctaaaccccacggtttcttcgacattttcttacaagccctttcaacggccttgatttgatcttagctaggaaatatgagctggatacgataaatgacttcttcaacgttctctttatgatttttggtgtcaatttctagttcttaagttgttttatttgacgatttaacaggatctctcccccataactcattacacgaagtggggacggcttctttcgacattaaggtattgcccattgtttaaattctcaagtggataagtaaacttataatcaccactaattatatatataagtatattactaattaatcggtctaattaagataccgtctaaatgtcgttgtccacatgaaatttctatatgttgcgttcatttcatagatttaaaatcgacaaagctagaagataaattttcaaaatgagacctcacatcttcttttcacattgcctttaatgagttcaagacaaaataccccgtttcatgcattaatgttcatacttgttatattcatcaacaatataccagtactatgcaacatcaattaattataagcttcctactttcgtcctttttattagttaatacaacacttgcaattggagtaactcttacaacgagagaatgtataatcttataataaaaatttaatatgatgagatattttttttgcctacggtgatattaacataaggttttttcttttacaaaattagaatgttcagttcaaacaaaagaaaaggatggatatggacatatggtatttgcattattctagtagtcttcaaaagctttaagggtcaacaaccggatagtagatggatatgtatttgatacaaagaaataatatattactatgacgatttcccaaatcttctattttcaaaagaatgaggatgagacttttctttttggaaataacatatattccgttaataatatttaactttgctcactaattatcattttgttacttctaaagcaaaaatcttcggcgagaaaatcgaaacaaccaaacgatttggattccaaatttccaaacagaatcatgcgtgtatttttactcgctcgcaacgatttggattacacactttccaaaacgataattttttaattgaattaacccctaattaaaattaataaccaatcagattaagataccatttacaaccaaatcttctattttccaaaattttagtatgatttttttttggaaataaataaatattccctatcccattagtggccatcagttgtcattttttgtttctccaaaatcataatcttcggcgacaaacaatgattagatcttcatttttacgatcatgttagtgatttaatggacttgttagtgattttgtcttcattttatattatgttagtgatttttatcgacttgttagtgatattttttttccatttttacgtgcatgttagtactttttgaggggacgggtagaaatcactaacataaacgaaaaatgaaaaaaagtttactaacaagtcggttaaaatcactaacataaacgtaaaatacagacacaattactaataagtcgattaaaattactaactttaacgtaataatgaataaataactgttttttgtttcgatttttgtcatcagaaattatgattttctattcgatttttgtcgtcggagattatgattttgtagacgcaaaaatgaaaactgatatacactaagctactaacaagattataaaattgtttatataataatttccttaaaacaaatctaactcaaaataatgcatattataatttttaatagttatttaaagtatatatataactaaccggaaaaataaccgtatatagttttacggaaatttacgataaaagatacaaccgaagaaaatcaaccgccaatattaatgaaaagtcacgacaaaaagtaaccattaatattttaataaaaaattgtgctaaaaaatacaacggatagataacagtcaataagataacagaaaataacgataaaaagacactaacaaaaaaagtgtcaattaatattttaacgaaaagttgcgatgaaaagactcaacaaaaaaaataaccatcaatattataaccgaaagttgcaatgaagagacacaaccgaggaaaaataaccatcaatattataaccgaaagttgcaatgaagagacacaaccgaggaaaaataaccatcaatatttttacaaaaagttgtgataacaacacaaacaaaaaataaccgataatattaacgaaacattacgatgataaacacgaaaaaaaaaaaccccatcaatattttaatggaaatttgcgataaaaagataaaaaaaaacaaaaataatcgtcaatattataacgtaaagttgcaataaagagacaaccgaggaaagtaatcatcaatatttttatgaaatttgtgatcaaaagatactaacagaaaaaataaccatagatgttaacgaaaagttattatgaaaatagaaaaatgaaaagttacgataaaaaacactaacaaaaaataaccgtaaatgtttacagaaagttacgatgaaaagacatgaatgaaaaaaataaccgtcaatattttttacggaaaattgcgattaaatacacaacctttcagagtacaaaatgcatttattgagattgttatttattatattttttttgtaaactagcgagattgttattattagtcgaatcaatattgtaggaagaagacctaaagacaaattcggaggtcaattaataacgcgttaaagtatgtgaggcacgttcgagtggaatagcgcgttggacagcccaacatgaatgaatgatcgacttttattgaaaaagcaaaactagggcaagaaaacgaaacgtccacattagcctataaaatcactaaacctaagagcaaagcacattcacggcgactggaaagtagaaaaccttattgcttcccgcagatctctctctctctctctcgtaactgtttgttcgatg

SEQ ID NO: 35483 - DNA, 3003 bp, Unknown
  misc_feature (1)..( 3003): 2750-1469P.txt file - cDNA_ID_3087862; gDNA_ID_2926128; Annot_ID_138662
ttctagttcttaagttgttttatttgacgatttaacaggatctctcccccataactcattacacgaagtggggacggcttctttcgacattaaggtattgcccattgtttaaattctcaagtggataagtaaacttataatcaccactaattatatatataagtatattactaattaatcggtctaattaagataccgtctaaatgtcgttgtccacatgaaatttctatatgttgcgttcatttcatagatttaaaatcgacaaagctagaagataaattttcaaaatgagacctcacatcttcttttcacattgcctttaatgagttcaagacaaaataccccgtttcatgcattaatgttcatacttgttatattcatcaacaatataccagtactatgcaacatcaattaattataagcttcctactttcgtcctttttattagttaatacaacacttgcaattggagtaactcttacaacgagagaatgtataatcttataataaaaatttaatatgatgagatattttttttgcctacggtgatattaacataaggttttttcttttacaaaattagaatgttcagttcaaacaaaagaaaaggatggatatggacatatggtatttgcattattctagtagtcttcaaaagctttaagggtcaacaaccggatagtagatggatatgtatttgatacaaagaaataatatattactatgacgatttcccaaatcttctattttcaaaagaatgaggatgagacttttctttttggaaataacatatattccgttaataatatttaactttgctcactaattatcattttgttacttctaaagcaaaaatcttcggcgagaaaatcgaaacaaccaaacgatttggattccaaatttccaaacagaatcatgcgtgtatttttactcgctcgcaacgatttggattacacactttccaaaacgataattttttaattgaattaacccctaattaaaattaataaccaatcagattaagataccatttacaaccaaatcttctattttccaaaattttagtatgatttttttttggaaataaataaatattccctatcccattagtggccatcagttgtcattttttgtttctccaaaatcataatcttcggcgacaaacaatgattagatcttcatttttacgatcatgttagtgatttaatggacttgttagtgattttgtcttcattttatattatgttagtgatttttatcgacttgttagtgatattttttttccatttttacgtgcatgttagtactttttgaggggacgggtagaaatcactaacataaacgaaaaatgaaaaaaagtttactaacaagtcggttaaaatcactaacataaacgtaaaatacagacacaattactaataagtcgattaaaattactaactttaacgtaataatgaataaataactgttttttgtttcgatttttgtcatcagaaattatgattttctattcgatttttgtcgtcggagattatgattttgtagacgcaaaaatgaaaactgatatacactaagctactaacaagattataaaattgtttatataataatttccttaaaacaaatctaactcaaaataatgcatattataatttttaatagttatttaaagtatatatataactaaccggaaaaataaccgtatatagttttacggaaatttacgataaaagatacaaccgaagaaaatcaaccgccaatattaatgaaaagtcacgacaaaaagtaaccattaatattttaataaaaaattgtgctaaaaaatacaacggatagataacagtcaataagataacagaaaataacgataaaaagacactaacaaaaaaagtgtcaattaatattttaacgaaaagttgcgatgaaaagactcaacaaaaaaaataaccatcaatattataaccgaaagttgcaatgaagagacacaaccgaggaaaaataaccatcaatattataaccgaaagttgcaatgaagagacacaaccgaggaaaaataaccatcaatatttttacaaaaagttgtgataacaacacaaacaaaaaataaccgataatattaacgaaacattacgatgataaacacgaaaaaaaaaaaccccatcaatattttaatggaaatttgcgataaaaagataaaaaaaaacaaaaataatcgtcaatattataacgtaaagttgcaataaagagacaaccgaggaaagtaatcatcaatatttttatgaaatttgtgatcaaaagatactaacagaaaaaataaccatagatgttaacgaaaagttattatgaaaatagaaaaatgaaaagttacgataaaaaacactaacaaaaaataaccgtaaatgtttacagaaagttacgatgaaaagacatgaatgaaaaaaataaccgtcaatattttttacggaaaattgcgattaaatacacaacctttcagagtacaaaatgcatttattgagattgttatttattatattttttttgtaaactagcgagattgttattattagtcgaatcaatattgtaggaagaagacctaaagacaaattcggaggtcaattaataacgcgttaaagtatgtgaggcacgttcgagtggaatagcgcgttggacagcccaacatgaatgaatgatcgacttttattgaaaaagcaaaactagggcaagaaaacgaaacgtccacattagcctataaaatcactaaacctaagagcaaagcacattcacggcgactggaaagtagaaaaccttattgcttcccgcagatctctctctctctctctcgtaactgtttgttcgatggcactgaagaaggcggaagaagtgatcgagagccctcctacttcaagtgaagaagaggaatctggctcataatctgagtctgaaggcgaaactgaatcggagcccgagcccgagtccgagcctgctaagacgatcaagccgatg

SEQ ID NO: 35484 - DNA, 3003 bp, Unknown; identical to SEQ ID NO: 35483
  misc_feature (1)..( 3003): 2750-1469P.txt file - cDNA_ID_3087862; gDNA_ID_1621147; Annot_ID_56783

SEQ ID NO: 35485 - DNA, 3003 bp, Unknown; identical to SEQ ID NO: 35482
  misc_feature (1)..( 3003): 2750-1469P.txt file - cDNA_ID_3087862; gDNA_ID_1621147; Annot_ID_173089

SEQ ID NO: 35486 - DNA, 3003 bp, Unknown; identical to SEQ ID NO: 21207
  misc_feature (1)..( 3003): 2750-1469P.txt file - cDNA_ID_3087872; gDNA_ID_2926128; Annot_ID_196728

SEQ ID NO: 35487 - DNA, 3003 bp, Unknown; identical to SEQ ID NO: 21207
  misc_feature (1)..( 3003): 2750-1469P.txt file - cDNA_ID_3087872; gDNA_ID_1621147; Annot_ID_173084

SEQ ID NO: 35488 - DNA, 3003 bp, Unknown; identical to SEQ ID NO: 32241
  misc_feature (1)..( 3003): 2750-1469P.txt file - cDNA_ID_3087875; gDNA_ID_2926128; Annot_ID_196727

SEQ ID NO: 35489 - DNA, 3003 bp, Unknown
  misc_feature (1)..( 3003): 2750-1469P.txt file - cDNA_ID_3087875; gDNA_ID_1621147; Annot_ID_173083
ctagaaaaggcatagcttaatacaaaaaacaaatacctgcaaaatcttcatcgctactgttaacagtttcttctcttggtgggattttatttaaatcaaacaaaaattcatctccatcatcactataaacagttttttctggaatttcatttaaatcaaacaaaaattcattctcttcacttagaagtgacatactcaaataaaaatttggaattgtgaagaaaattagaaatcatttttttttaaaaacttacataaacatgaatgattcagaaaagttttagtttggctccgatgtaaaatttttgaaattttttgtttaaaattaattatgtaatggttgcacaaaaaaaataatcaattatgtaaaaagttgctccattttttcaagtaatttgggttgtttgagagtttaatgcgtaacgtttaatattactctttaattgttttaattactttacttgattgtttttattaaataatagttttgttaattactgtgctaaacctcaaaacatctgatatattgagtaatttatatatccaaataacctaggagaccaaaagtctattaggttaaatgaagacgagttctagaactctcataaaacctttgaaaaaagctattaaaaaaaatctttttttttttgagttatatatcttgatactgtctagcctaattatcaatgcttaattttcgtacttaaatactatcatcaattcatcatggatttcagagcggatactccaatcttctttgcattttatcttttttttaccgtttaaggttaacataaaaaaaaatatattctaaattttttttttactgaaaaaagattctattagaaatctaagtgcaaaaaaaaatgttgattgatggaggttaagatcaaaatatgaattttgtcttcttgcatattaaaaatctaacctatattttacatgaacgtaaatagatgattttatgagtggcaaaaacgaactcaccataaaaccattagtaacacatgtagtacaaacccaatattgaataggaaccgtactacttttctaattatttaaaattgcaggagtggtatgtcttggagaatcgaggagacacgcatcgagtttaaatgtgtggtcggagagaataaaagtgtgtgcagatttgcttaaagagtgaagggaaggtgctataaaaaaggatcttgttggccacgagcttcttccttttcgtcttctccgccgcaccctttgggtcaacagttaaaccctctccattacgcgtgtgaatatacacatataatattcacattatataagattatgtttcataacgtagatcctgcctgttctatatacaacaggttttggtatgagacgttagatactttaattcatctggtcaaatgcctagctagaataaatatctttaatcacgttcaaaattgattttatacgaatacacttataattaatttaattatgatatatggtacttgctttaccggccttcttgtaaccttccttcaaactctagctgctcatcaattgaattaacaaacaaaaacaaatccaagtcaagtgatcttaaatccagctcattcttattcacgtgccatgcaaaatgatgcatacagtatatataagggacacacacaaagacatgtaaatattataccatccaccgattaagctacatatcctctcagttaattctctaattcgccatggcggctaacaacaaattgttctttgtattactctccctgttccctctcatcatcttctcggcaaccgccacgtcatcaaaagactacgacacgaaggcttacgtgcactcatggtgccgaacaaccttatacccgaaactatgcgtccggtcgatgtctcgttacgtgcgttcacgcgcggtgcaaaatccacgggatctggcccgatttgcgctcaaagccagcctatatagagctaagtacacaaaggcgttcttgttaaaagaggttaagaacttggagacgacgttgaggccccaatactacgcgtcggttcacgactgcttggaccaaataagagacagcgtgaaccagttgagtctagccatagcggagctagacagagtcagcaggagacagggaaagagccaaggggatctacactggcatataaataacctgcagacgtggacaagcacagctcttacagacgccgagacttgcgtgagccagttcccgggacgtaggatgagcaaacttaaggctacgattaaaggaaaagtgaagaatgtggaggaaacaactagtaatgcccttgccttcatcgagcactacgctgctgctaggtaccgagccagacgtccttaagctgagcctgtgtgtgtgttttgatcattttgccttaaatttcttcttacttcttgatatttgtgtgtgtaattgttaaccagtcgtgtaaatccaaaagttcatatatgaccgtaaattgatataattcaataacaaggaaagttctaagcctaaaacaagcaagaaaatacctttgccgtatacaaagattattaccattattatcgacatcacagaatgtagcccgtctagctcagttggtagagcgcaaggctcttaaccttgtggtcgtgggttcgagccccacggtgggcgatagtgttttttctgttgtttttgtaaagagctgaagttataaatgggctttgaaattaatgggttcgaacaccaacggtgggcctttttttctttctatttttgtaaagagctgaattttaaaatgggctttgaaattaatggatcagtgaggttaaggcccatatttctaataaaattagaagtagttacaaacccgacccgacccggttacgtgtatgcggagatcactctcctctccataagctaagctctagaaacaccgcctttaacgtctcgctgcaccatttttcatcgttgatcagtcgtcgatcctcttgagtgatttgattttagactttctagttatcaaactcgaaagatg

SEQ ID NO: 35490 - DNA, 3003 bp, Unknown; identical to SEQ ID NO: 27929
  misc_feature (1)..( 3003): 2750-1469P.txt file - cDNA_ID_3087887; gDNA_ID_2926128; Annot_ID_196724

SEQ ID NO: 35491 - DNA, 3003 bp, Unknown; identical to SEQ ID NO: 18492
  misc_feature (1)..( 3003): 2750-1469P.txt file - cDNA_ID_3087891; gDNA_ID_2926128; Annot_ID_196723

SEQ ID NO: 35492 - DNA, 3000 bp, Unknown; identical to SEQ ID NO: 15290
  misc_feature (1)..( 3000): 2750-1469P.txt file - cDNA_ID_3087903; gDNA_ID_2926128; Annot_ID_196720

SEQ ID NO: 35493 - DNA, 3003 bp, Unknown; identical to SEQ ID NO: 31948
  misc_feature (1)..( 3003): 2750-1469P.txt file - cDNA_ID_3087939; gDNA_ID_2926129; Annot_ID_196813

SEQ ID NO: 35494 - DNA, 3000 bp, Unknown; identical to SEQ ID NO: 28373
  misc_feature (1)..( 3000): 2750-1469P.txt file - cDNA_ID_3087957; gDNA_ID_2926129; Annot_ID_196805

SEQ ID NO: 35495 - DNA, 3003 bp, Unknown
  misc_feature (1)..( 3003): 2750-1469P.txt file - cDNA_ID_3088000; gDNA_ID_2926129; Annot_ID_196830
atcccttgtaaatctttcagaacacttttaaaccctttaaaaatctttaaaaaatctttaaaaaacctttctaaatcttttaaaatcctttaaaatctcttgtaaatcttttaaaatccttttaaaacaattttaaaccctttaaaaatcttttaaaaacctttgcaaatcttttaaaacccttaaaaatcccttgtaaatcttttaaaacctttttaaaatcccttgtaaatctttttaaaacgttttcaaatgccttgtaaatcttttaaaagccttttaaaatcctttgtaaattttttaaaacccttttaaaatctcttgtaaatcttttaaaaccttttaaaatcccttgtaaatcttttaaaaccttttaaaattccttgtaaatcttttaaaacccttttaaaatcccttgtacaacttgtaattcattaacgaccgtggaagttgtactcaagaacagtgatcattttgtctttcattgacaaccacattgacccggctggttggttcccatgggatggcgagtttgcgctctccacattgtattatggagagtatgcgaatactggtcctggagcggatacgagcaagagagtgaattgcaagggatttaaagttattaaagactcaaaagaggccgaacaattcactgtggcgaagcttattcaaggaggattatggttgaaacccataggagttactttccaagagtggctttgattttaatgtctacttgttcttgtactttgtgttgtgtcacctctgttttagtttaatgtattttctgttttgttttgtatgacttacccaataaataacatgctctgtttcgcaagtattaggttaatgcatataatattttgaataactttaacactaactaattgaatattttcaatatataatcatactcgcactcatcagtcataacaccatcaatttaatttttttttatggggttattatatgtactagatgactaaaactttgagaatattttcatgaataatatgaattttgtttaagttgattacattatttatcaggaacagtagttaccaaaaataatagtttcatattaaattttacacgttggtcatataggggatccttgcttattgcattctgcatggcatgtcagcacagtgtatcagcatgtgatataattttactataagtagagcattcatcggtcgtaaattttcggaatattcagtgtatttattttctatttttttccgttttctattatttctgtatttctcaatacaataaaaattcaaactaaccaaaaattcagaaaagatcactatattatatataaaatcaattgccgcccaaaaagaaatctgttttacaatgaatataactgaacaattatacatatatctagcaaatctatcttttggcatttctaaattaataatctccattgaagagctgcaactttgtgcttgctaaaactttttcacctgcaacaaaatgagtattatgggagatttaaaaatcaacataggcatacaaaaatattccagaaagaagagagagacaataaggacaacaaattttgagtcatatcatatttgttgtgatgggctccatcccattgataaataccttaatcaaccgattgtcagctgaattcctcatgctaatacctaactatacaatattataattgccatatactggaaaactagcagattgcacaacaatatagaaaagacacaagcataagaaagaagcctacgcgacaattactacaacatctccatattgaatggtcttctgatatacaataccattccatgcgcgcagactgagactttgtaagtatgtgaagcatctcacgagagttctcagtcaaatgcaactcaacaaagaaatcataagaaagcattaaatattgaaagcattgagaagcaaattagttcatgaaccacatcacatcagcatcctggagaccaaaaaaggaagacaatgaatcactcaatagaagaactgataagtttttgctttcactgccaagagtgtaagaaacataccgcaaaaacagactactaaacccttttcaagaacaatccgaaggaaattgattcttctccacatcatttagcatccaaagcaatgaccaccatctttagttgcagctctacgcagcacatctaaagctttcttgttcttttaccaattctaaaaatctcaaagaagagatcgattccagatacaatagctgcataagattcattcaaagttgtcaaaattacagtaccatttttttacggaggaatgacaagttatgagagtgcttttattatatcttttcgggtaaacattgtaacgtagtgaaagttgagagtgaattgcctaacaaccgatagaatcaaccaaaaagaaaaaaagaacatcttttctaacgaccaaaaaaaaaacctaggggttttctatttattaggtgtatattgtcttttctagtactaaaacaataatggctaagtctcatcctcacacgtaagagattaaggttgagaatatattgtattgttgttagcataacctaaaatggatgaaaccaatttctaccaaattcatttttttttagccatttagagtacagtggaaaacaagtatttcaactaaagtactctaagacaattcttcttctatcttttatgagctgaaaattttggaccacttttcttttctgttctttgtggataataaaaccaaacttcactgaattatagcttcaattcacattgcactgaatttttagattgatctcaaaataaagtttttttcctaaatattgtcatttattgaatacaattaattaaatgtaaattgattaagttgctttgctttgtatataagaccaccatcgctccctcctctttcatcagttaagataatataaattcagtaattaagagagaagaaataaacacaaaaatgttggttaaagttttctcttttttcatccttatgataacaatg

SEQ ID NO: 35496 - DNA, 3000 bp, Unknown; identical to SEQ ID NO: 7978
  misc_feature (1)..( 3000): 2750-1469P.txt file - cDNA_ID_3088000; gDNA_ID_1621178; Annot_ID_174223

SEQ ID NO: 35497 - DNA, 3000 bp, Unknown
  misc_feature (1)..( 3000): 2750-1469P.txt file - cDNA_ID_3088109; gDNA_ID_2926130; Annot_ID_196850
tttgaatttttttccaataaacaaagaatcagcatcacttagaccagttgaaaacgcagaactagaatactgttgatcaaaaatactagatgtttcagatacacacgcctgaataatcctagaggttaacctcggctgccaaaataaaaagcttaccttaaacatcaatctatctttaataatgattttacaaggatttttaaaaggggtttaaaaacgttaataatgattttacaagattttttaaaaggattagtacctgagtagtagatgtagaatgagaagcaaaatgatttgaagtcgtctaagcctgtaataaacacaatcactgacttaataatgattttacaaggatttttaaaaggggtttaaaaacgttaataatgaatttacaaggatttttaaaaggggtttaaaaacgttaataatgattttacaaggatttttaaaacgattagtacatgagcagtagggagagaatgagaaacaaaaggatttgaagtagtctcagcctgtaataagcacaatcactgacttaataatgattttacaaggatttttaaaattataacacaagaaggttattgaaaaatctgctcaactgtcacagaaatttgctctacagtcaaacataactgaagcaatcctccactctgtgagaatttgtgcataaaagttgcaagctgtctatcgtttctaatataaagaggatgagattgtatggttgtagatgtggagactaacttgtaactaagcttcaaagaattggttgaactatctatttgaaaatcctctacaagaatatccaccaacgcgtgataggtaatgtgctcatcaatgaccattaaagaagctcccaattcaatgtctaattcaaattcccaagtcatattgtttgtcaacttccacaagccacaaacaggatacaattctagcattataacctgataagataaataacaacaatatcaacacccataaaaacactgtcactacagagagaagcatggtttacaaatcgttttaaagcgtaagtaagtagcatagaataatttacaagggattttaaaagctttgaaaagtggttaacatggtttacaaatcgttttaaagcgtaagtaagtagcatagaatcatttacaagggattttaaaagctttgaaaagtggttaacatggtttacaaatcgttttaaagcgtaagtaagtagcataaaataatttacaagggatttaaaaagctttgaaaagtggttaacatggtttacaaatcgttttaaagcgtaagtggcatagatctatcacgaaagcatatgtaaaagaggtaaacactaaatcagaaccaaaatctattacgaaatagtataacgaattcacataagcaaatctatcacgaaacagtataacgaattcaaaaggtattaacgaatttacaaggattttataaacaaattcaatcatcaaatctcaaacaaaattcaaattcgaagctgaagcaaatgtcaaactgtcgattgaatcaggattcaaataacgaattcacataatcaacaacaaaaatcgaataaatcaattcgaaatcgaagatttaagctaacattataaaatcaaaccggggaaacgcaagagattcgacggcgacacacagctctacttccgacggcgaagatgggttttcacggcgagtaaactcactatttccgacggcatgggattcaacggcattcacaatttccgatggaggaagaagagagagagtgaagaaatgaattaggtctgtgggtagctcattaaaggtaatttggagagaaaagtattagaaagggtagaaatgaaaatgggaaaaagggtagagttgcaaaagggcattgagaaaagggcattacagtgaattattcttaaaaataagtatataactgtttgtttagcaagctaacatatataataacgtggtaaatttacatattatatgttaaataaatgtttatctacttaaaattatgaataaatatttttatttatatatatatcaacaaaataaaatacatcatgttacataattaacatgataacgattataacaacattttacatagaataataacatgctaacatactaaatatcgaaataatatttgtctcaacacggtaagataatcgatatatgaataataacatggtaacatactaaaaatcaaaataatatttgtcttaacacggtaagataatcgatatatggataatatttatttgaacgtactaatgttttagttaaggtactaatgtttcatccaactttttatttttagtttaattaatttaggggtataagtgtcataaaattaaaacagtagaagacaacaatgttttttttttgtcagttaattatcagttcttctgggtatagataatcatattacccaaaactataacattagttacttttattccaaatatatatgaattactaaataagtctagtatatttggatttataattttaagggtttgttacactatgaggcactttcggagaaacttaattcactttagacactttaaaaactagaggcactttgccttgcttttggagtgaaataagacatatatacccccactaattcgtttgagatatttctacaaaccggtttatggtttcgtttggtattggtctaaaatatacggttattatggtcggtttagaaaaaacagtttgggcgtgacgacgatcgtcggatttcagtaaattaaacggccgagattaatcattgtaacttcccttgcttttcgactttattcaaactgaaacacgagatccattgaaacacataagattctgggtttcaatcatcgatctttggccaactgtcgtgtccaaggaggtacgattgtagaaaactgatatcatgatattaaaacgaaatttcgtgcattctatttgttacgggaatcagaatataaccaaatttatttttttcgtttatctgtacagggatcgatg

SEQ ID NO: 35498 - DNA, 3000 bp, Unknown; identical to SEQ ID NO: 15372
  misc_feature (1)..( 3000): 2750-1469P.txt file - cDNA_ID_3088151; gDNA_ID_2926131; Annot_ID_196919

SEQ ID NO: 35499 - DNA, 3003 bp, Unknown
  misc_feature (1)..( 3003): 2750-1469P.txt file - cDNA_ID_3088168; gDNA_ID_2926132; Annot_ID_196999
cctcttttttttttcttttttttaatgaatattgaatttttatcataactctaaagaaacctaaactaatctctgataaatatattttctattttcataaaaaaaaatgggcatgcttgcatttaaaacgtctataataatcattttatgtatatttaaaaatattggtatgcttgtccgtattagtcacgtgtataggaaagtgcagacgggttagctaactatgcttttttttgtcattagagttttattctttggaggttgttcctattgattttgtttctgttgtaagcgatgatgtgcttaggttgggtctacgtgactaaggcaagtgtctatgtagtttttttttgaagttttaataaaatttagatagattttttcccggtgactagaagcttcatcgagataggagcgatactacgaataaggtatatggggcagagtgccctaccaaaaaaaaaacactaaaaaaataatgaagatatgtggagtttaatgtagttattttgaaaagaaatgtgattgaatcctaactatactcatctaaccaagcttataattcgtataattcgtataattcgtattgggctgcatgtttgagaaagactgaccatattttttagtatcataaagttcgatcagtaaaaataagaaatgatagcttagttagattctagtaatactatcatgttttaattgtttatatataacaattgtatcttacgtaatataattcatataacaattgcatgttgtaaaattataaaatatcttttcatttaaaagattcgactaaatacatatctcaaaaatgacatttttagtatttattaaataacaacaattgtttttaaaacacatgcaatttgaattgaatgaatgaaaataacacaacatcactagaatataaatcactactttagaaaatcatagtcaatgacatactttttaaacaatatttttgcaggaggagagagctggattaagatatgagataacttgcacaaaatgtgatggacatctaggtcatgtcttaaaaaatgaaggttttccaacaccaactgacgaacgccattgcgtcaacagcgttgctctcaagttctcttccgctatcacatctcagtgataaacggatccggtttagttctccggaatcaactctatctatctatgaacgttgattactaagagacctttctacttctgttagaatgagaacgttgtgttcttcaattcatcgcatttatgaactattataaaattgaatgttttgtgttttcattatttttagtaatgcttatgtacgtatcattgaaattgtttgtgtcatatattgtgccatttttctattgagtgttaatgtattatcgtatttaccaaaattatatatagttattgtctaagtctgcgaatcatttgccatttggatacacatgcatgtctaaacaaacgtacacatggggatgtgaccgaactatttttttgtttgtttgttcttttaatatcattgacgtttttaccttacttctcaattgttcttctttttccgtaatcgacaccgtagagtttcgacgatgacatgacgcggccaaattcaaagcaattttaatccattcagttcttgtctatgattagatgccttgagttccttcctgtcatcaaaacgaatttaactagatccattggattttcaatatgttggtggcggagatgtatttttttaatcgcaaacaaaagagataaagtttgtgaaattggtagagaatgtgttgatggagttgacagatatggtgatggagttgatggagaatgctttgatgaagaaatcacggtgttgatgaagtaatcgcggtaaaacaaagtgatggagacaggaaaaaaaatgacggaaacgatgatgaacggtgtttgagatagggtaaaattgtcaataaaattttaataagtatccaatcctgtaaacccaataagagagtgtcatttttcaaaatttttggccccaaatatatctgattgtataaaagtccctaccaatcacaccctatgttttccgttattgttttagtcatatataccatattcaaattttatgtaaattttatgtaaatatgttcttcaaattttttaaaaaatcctggctgacccggtccaagtatgtcagttagctaatagttgtgtttgttagtcggagaagtctatttagctatataccacctttcatgatactattactatcccctgttgttttttttactaatacgttattgggatgagatgccatctaaaaggggaacttctccaattctgttcgttgggaccactccagattttacaatcccggcttatgagttttgagaccactctcacttattttatctacattttgtaagagtgccgtgtttcatacttagttatttctctgataacaaacaaattggggttctgttcttaaaatatataaaagcccgtgaggcccaacaaacggaaagtttggcccgtgaaagaaagaaaaacaaaacttatttattgaaaaatgacacgtgcagaatcatttactaaaccagacaataaccggttaacggtttaatagttagcaacagaagaaccaaaggattgtcttcttccacaatcagaatctgtctgtgtggcttgtaacgcttcaatgtcagtgaagtctttagctatatccacaaaaataacataacaagattaaaaaaaagagagaatattttatctctctagacttgacaatttccctctctttctcactccctatacctgtatatgtatatagaatcgtatatatctggagaaatacacgaggtgttctcgtctctgacgacgtggtctattgtcttcctcagctttagtcaatttcttctttcggaaacttggttctgtgatattatccaaacttaaagtttgagtctttagggtttatgggtgacaacaaaagtacatgcctttaggctttagttttgtgggtttcatctcaaaatg

SEQ ID NO: 35500 - DNA, 3003 bp, Unknown; identical to SEQ ID NO: 35499
  misc_feature (1)..( 3003): 2750-1469P.txt file - cDNA_ID_3088168; gDNA_ID_1621196; Annot_ID_174747

SEQ ID NO: 35501 - DNA, 3003 bp, Unknown
  misc_feature (1)..( 3003): 2750-1469P.txt file - cDNA_ID_3088172; gDNA_ID_2926132; Annot_ID_196998
ccatgttttcaaaggagaaggttacggtaatccaaccgatgaacgtcattgcgttaacagtgtttcgatcagttttaacccggcaaaatcttcctctataatctgaggatatgattgatcgatcatacaacatcttctaatcagattgtgttgttaaaattgtcatcatgtagtgaatatgcactttctgtggtggtcaatataatgcaacaaataataagactcattagatattggatggttactggtttctcttaatatgttatagaacatttaataacgatttaattatctaagggatcattactagtgtttcttaattataactctttagaactgaaaaaaaatattatagagatttcgttttgacagaaaaaaactcaaaccgatccattttactttccattttgagtgtgttgattttaaaaaatatgatacgtttttattactaatgaaaatagaagatattatttccaatagtggatctcatatgtgtatccatatcattattttcataattgcgtaaaatatctcgtttcatatatatttgtgtgagataatgggttgagattaggagtgggcattcgagtaagcgggtcgggtttgggtaaaatccaatcgggtacgggtttttcgggtagataaatttaggacccaatagggtaaatataaaatatcggttcgggtttaatcgggtttggctataaatttttgggccttattttgaaactgatagccggatttccgggtaaatacccagatttttcgggtaaatacccggattttcgggtaaaatttcgtgtttcaggtaaaatttagatttttgattaaaatattcgggtatttttgggttcgggtttggatcgggttcggattcggtttttcggatagaggaatttaggacccaataaggtaaatcttcgggttcggtttcggttccaattttttgggtcagtttcggttctggttgttggttccgattttttcccagcccctaattgagacgttggtttgtttgccaataatttgtcatgtggaaaagtactcgaatgtgtttttgattcactataaatggttgtcccgttttgagtttgataattcattagcatgtgactatatcatatatctatttattacactagaagcattattctctttttaaagcaatattctctgttcgaattaaactctagctatcttttacatacctactaatggatattttcatttgggatatcgaccaatcaaaaccacaaattttagctgatcaagatgggatctcaagtttggtaggtatggaaaaatacatacgtacacatccagagagcgaagaatttgtgatgaatttctaataaatatatgagttgttgagaaaacaatatttcaactaatcttatatttataatggtcccatgcatgatacaaacgtggtcgttatctcgtccatatgaccagtgaccacatatgtttcaatacgtgtttcatctcaatgcttcacaacctccatttgtattgttccgcacaacttaatgttatgtacaagttgaatatgcttattatgtagtaaaatgtaaaagacataaatcaattcattagtagtaaaacaatatattctcgttgtcatcagtcattactcatcatttggcaccaaaatgcggaagccaagccagctgtgaatggtaagtatattaatctctattcacatgcaacatgcactagtgtgtcagtaatttggtccatgacaatacacatgtgtgatctagatgtccttgcttcttcaaaggttacagcacaaccatatctagtatattactagaaagagaaaagaaattttgttatagcattcatctaaaatgatcagagaaaagaaattttgttatagcattcacctaaaatgatcagaacaaatctgaatgaaaattcagtatatatatatttagacgtttagattgtgcagacaaaatgtatttagtgctacaactgatgtgtaatgtatggactactttcataaaaagtgcagaataatatgcacggaacaatattattacaagttctaagattattcatatctacaaagattgatatttttaataataaataattcgagtttccaaatcgatttttaccatttttattttaaattgaaaaagcaaaacattcatgcaagaaaagttaaaaacaagttagtggaaccaacaaaaaaaaaacagtgttaatgaatgtcccaagtccgaacttttataatggtatcttttcccatgatttattcatgatttagacaataatagggatttacggattttgccattttttgctataatttttacgaatttgttattttgttaaaattttacggatatactatttttctatatattaaaaaatgttcacatttatgagtctttttttgcttaaatacacattttataagttataacaaataataaattctataaacaaatagaaccgattaatttaaatataataggtaaaacacatgttaaatcgtatttttatattataaatttttttttattcataaaactttagacaaaaattgcaaaatccataaatatcactaagaaaatggcaaaatccgtaattgattccaaaaatatgacaaacttttgaatcttttaaccaaaaaaagaaaacagaggtttttataacaagttcagtttacaattttcaacgtgtggtttctctattagaaccaaaagaataatatatatccaaacgtgcacaacgtgtcaatttttttgttacaaaatgtgaagaacaaaaaaaagtgtgaaaagctggttatgagttatggatctgcgcctataaatatacaaacatttctccatccactccatagccaaaccatactctccaaagtccaagctcacaatgaacacttcgtaagtctctctccctctctcaaaatgttctttttgtctgaaatgtaaacacaattttttgttgctctcgttgctcagcccaaaaatggaaatggaaatg

SEQ ID NO: 35502 - DNA, 3003 bp, Unknown; identical to SEQ ID NO: 17643
  misc_feature (1)..( 3003): 2750-1469P.txt file - cDNA_ID_3088172; gDNA_ID_2926132; Annot_ID_138798

SEQ ID NO: 35503 - DNA, 3003 bp, Unknown; identical to SEQ ID NO: 35501
  misc_feature (1)..( 3003): 2750-1469P.txt file - cDNA_ID_3088172; gDNA_ID_1621196; Annot_ID_174746

SEQ ID NO: 35504 - DNA, 3000 bp, Unknown; identical to SEQ ID NO: 8151
  misc_feature (1)..( 3000): 2750-1469P.txt file - cDNA_ID_3088178; gDNA_ID_2926132; Annot_ID_196994

SEQ ID NO: 35505 - DNA, 3000 bp, Unknown; identical to SEQ ID NO: 8151
  misc_feature (1)..( 3000): 2750-1469P.txt file - cDNA_ID_3088178; gDNA_ID_1621196; Annot_ID_174741

SEQ ID NO: 35506 - DNA, 3003 bp, Unknown; identical to SEQ ID NO: 24393
  misc_feature (1)..( 3003): 2750-1469P.txt file - cDNA_ID_3088186; gDNA_ID_2926132; Annot_ID_196990

SEQ ID NO: 35507 - DNA, 3000 bp, Unknown; identical to SEQ ID NO: 15396
  misc_feature (1)..( 3000): 2750-1469P.txt file - cDNA_ID_3088190; gDNA_ID_2926132; Annot_ID_196988

SEQ ID NO: 35508 - DNA, 3003 bp, Unknown; identical to SEQ ID NO: 21606
  misc_feature (1)..( 3003): 2750-1469P.txt file - cDNA_ID_3088205; gDNA_ID_2926132; Annot_ID_196981

SEQ ID NO: 35509 - DNA, 3003 bp, Unknown; identical to SEQ ID NO: 21606
  misc_feature (1)..( 3003): 2750-1469P.txt file - cDNA_ID_3088205; gDNA_ID_1621168; Annot_ID_173901

SEQ ID NO: 35510 - DNA, 3003 bp, Unknown
  misc_feature (1)..( 3003): 2750-1469P.txt file - cDNA_ID_3088209; gDNA_ID_2926132; Annot_ID_196979
tgtccttcaagatagactcagtagaacgagagacgccggagtggagacgttggtttctttctctccaaattgcataaacacaagagtgaaaggccagcctgataatgagacaaatatttttttcccttgagggagataagagccagttaagacagtccattaattgggcaggaggattaaggttggttgaggctgtaaaaaacctccacacgacaccactaaactggcactcaaagaagagatgtgctctcgaatcgtcatgagcattgcaaagaagacactcagcagggatcgagagaccccaattctgaagcctatcccttgtgtgcaatctattccacgccacaacccaacaaatgaaggcgtgcttaggaacatggttcttaaaccagaccgccttatgccaggggacggtgtgagattgcggatgcagagcagaccaagttcttggagcggagaatctgtttgatggtgcatgaaggtccgttttccaaagaaaggagtcgtcatgctgacagtcaagcaaaccctgagcctccgggagaagatttttaagctgaacaatgattggattcctgctacggcttgatgcaatccaccaagacgtgccccttaacgcatccctaaccacagcatcaataggcaaaccaactgtacgagggcctagaggaccgattacctctataagggggccaaggccaatccaattatcatgccaaaacttagcggtgaccccggaaccaacctcacaaacaataaagggccttgccacaactctgagcttacacatcttccaccatcttggatatcatttcaacaccttcaaggacatcttcgtcctctacatgagaggaaaggttcttcacataagtggagtcgaatcctgtaattgtggagttaaaatagaaaataagacaaataatgaagtagttcattaaagagttttattaaaatgcgaggaaccaaaaagaaaaaatttatatttgttttagttcataaaagattgaatgtggctgcaccaataatcagctttggctacattaatttacacaacatatatatggacttatatatatgaacccatatatatatatttatatatatgaacccatatatatatatttatatatatgaaaaactcttattataaaacctaataacattgatttagatggactacactaatgataatatcttgggtttttatgtgtgctcttatactattgtcgattgtatgatttattcttcatcggatctaaagcaatactcaaaaaggtttatgtgtgctcactcaaaaccttaactaggggttcaacaaaacaaaacaaaaaaactcaaaggagatggatttcgagttgagaaaactttcaagaacattttcaaactctagaaaaaaggaaagcttcattctatgaatggagttaaatagaaaataagacatgaaataaagtgattcattaaaaagttttttttttctcataagtgttatactttattttaaaacttgtgttgtaaagatacaactgtggaaccttccacttacaaatcttgacagttgacacatattaaatcttacaacgttggatcaactaaagtatagtcatccatgttgcataaaaacaaacaagtctagcttataagcagatgcccataaagaaagcccagtccaggaaacaaaacccttagagaaagtaaatttaaagattgccttccacccaaaagccacgtgtgatgtgaagaaacaaagttgaaacacgtggactgaagaagccttagtcgtcgctgttcatcgccgaactggttagcaactcagagaactccaaaaccatggaaaccgccagagcttcaagagaagtctatcaatttttaattagagaaccccaccaaacttcatcagcaaatcaggaaaggaaagatctaccaaaggcaattgactcccgaaatccaaggaacatcgacgtagagtaagtctttgagctttcaacaacacctaaaaacaaacaaaaaagcactcgtctccataaaacggttagagaaatagccacaattgcattagattcaaccgagaggcgtaaaaaactttaatctgcaactcaatttgttcctaaaaaattgaaatcgataagcttggaaaacaaatcgagccctttaaacaaaggaggttcaaggaattatattccaaatggaaacacaaaagacctcaatcaaaccaaatataaagaaatcgagagatgaaaacataaatctaaaccggaaatcaatttggccaaaagctagacgagacaccgaagataggcggtgaaactctggaccttagctagcccaccgccgctaaagaagccaacggaagccagacgcaagcagaccaccgccgtaaaaaaccggacagtgtcagaacgaaaacagatcaaacgttgcccaaaacgtcgctggacaaaagccagacatccatactgaaaaagccataaattctggacagaaaaccggccaacaaacgttgaagaagcgattattgtcggaaaaagaagatccagtgcttcctctctctaaaagatgctgatgagagaagagagagaaccaccaagatttatttaaatgcaaggaacaaaaaaatgtttgccttcaaggataaaatagatatagatttaatctctttaaatttaatcttcgtcaataaatttgcttcatgagttaacgcgatcaaactaaaaaaatctttgttctctcacttagcagctcattttagaaattctcatcgccgttcgtttgccgtcccgtttctgttgggcttaagaacttctcctctgtagtatatcattatacttgagcggagcccttgtccgaagaattaccagttttttgttggagttctgattcagttggatttcatttgctactttcaaaagttggtttgctgtttcaattaggctcgattctctgtgaattgattgcgcttggtttcttatcgaagttgattcaagtggatttctcgtcatgaatatg

SEQ ID NO: 35511 - DNA, 3003 bp, Unknown; identical to SEQ ID NO: 35510
  misc_feature (1)..( 3003): 2750-1469P.txt file - cDNA_ID_3088209; gDNA_ID_1621168; Annot_ID_173899

SEQ ID NO: 35512 - DNA, 3000 bp, Unknown; identical to SEQ ID NO: 6114
  misc_feature (1)..( 3000): 2750-1469P.txt file - cDNA_ID_3088222; gDNA_ID_2926132; Annot_ID_196972

SEQ ID NO: 35513 - DNA, 3003 bp, Unknown; identical to SEQ ID NO: 28497
  misc_feature (1)..( 3003): 2750-1469P.txt file - cDNA_ID_3088238; gDNA_ID_2926133; Annot_ID_197066

SEQ ID NO: 35514 - DNA, 3000 bp, Unknown; identical to SEQ ID NO: 15415
  misc_feature (1)..( 3000): 2750-1469P.txt file - cDNA_ID_3088254; gDNA_ID_2926133; Annot_ID_197060

SEQ ID NO: 35515 - DNA, 3000 bp, Unknown; identical to SEQ ID NO: 15415
  misc_feature (1)..( 3000): 2750-1469P.txt file - cDNA_ID_3088254; gDNA_ID_2926133; Annot_ID_138827

SEQ ID NO: 35516 - DNA, 3003 bp, Unknown
  misc_feature (1)..( 3003): 2750-1469P.txt file - cDNA_ID_3088258; gDNA_ID_2926133; Annot_ID_197057
ttagaaaaattattgattgtagagaggaactaccttttggattaaatttttgtaaaaaattacaaattttttaaaatctctccataaattaataattattaatttatcgataaattaatacctctctaaattaataaatttttgtactattattacctagaaagtgaaaattgacctacaaatatatcttcaatttgattcacatatacgaagtcacgtatgtttctataaatttagatccaaaatgtgtgaaaacccatctgtttttgcaaattcttgcaattgcaattgcacatgtttctattacgtttaaatcaatcgagctctaagtgatttatccatagtgatatacagatccaatatccatgaaacatatttaattcatgaaaaggctcaaacattatcaacaaataagatatggtcaactatgtagtaactagtaacacgtaggctgctgctctttgtggcaaattcatgcgcaagcaaagcctctagatgtttgacaagttactaccctaatatagcatcactagctatcttctaatttttttttttagttattttaatcctgtattcttttatttatttatttgataaagtgatgaaattttattctcctttttcttatcaactaatatacttattcattcacataatttcgcactttgcggagttttcatttgtcgttaaacccgacagattcttgaaccgcaaggaacgagacattaacctaatgtacttatatttaactatagtattataatagcataaatgtgacaatgattcgatcactactaatatattaatcaccaatctatatcgtcgtccttcctgattatttgaagattttgtctataaactagctgcttttgtttatgtatttttattacttggatgcttttgtttgttggaatattcgaatgaatttttgtttgcctgaaactatgcatatataataaggccatatgcgccaataatatagaatccaaatattcattaactataattagtttgttctagagttttagctactcatatattcaaattcttaggagatcaaaaaagtacttaattagttaataaaatccatttttattagttgtaattaaatgtaaagtgtcgaaacacgaaagggaagatgagttgcacaactcgtggttcctataagagtgataatctatctgacgtcacgccatgcaaaatgtatcaatcaattttcttctcacatttatatttacttcaaaatgattataaagccacccaatgaataataagatatatatatatatatatataactcaaaatcaaaaatttcaaatggaatttggaagcatcacaaattcacaatcatgtattcaaaatctcacgtagaaaaagctaataagtccaaaagattggtcttcatttttttcttgagaaagtttgatgggatagagagagagacagagaggaacagctaaatttgctgtgtatgtatttaatacttgaacatttatttatctattttcttatacatcaaactcacgaatttataggttggtaatgtcgtttttataacattaataaaaattgcaattgtagtttttattgaaatttacccaaaaaaaactattatacgaaaatatgttatttatttaaaatttgatattagatgaatccagaatcttttataaaacttggtgtgtgtgaacctgcgttaatttgttaaatacttttcacgtaaaaatcaaaattaattttaaaagttatgttaccaaacagtattctgatagttttacaaattttatccattgtatatgttttgtttttgcaaaaaagtccaaaggaaaaaacaaagcagaagggttgaattgtgaggaaagagagagtacgtggcatcataactttggcgacagctaatgtgaaaacagccaaaagctacggagagcgacactcctcgacgacgtccatgtctctttagattgtgattgcattgttaattatcatatttatcaattgattagttaagtcttaagtatcatcacacaagtttatacattaatctatacagtgtttaacactacaaaactccccaaaatcacgtgtttcatatcatacgtacatttgtctaccgtctttattaacaatattaaaacagaatttatcaattttctagttgaatagactatatactattatagagactcttataaattatgaaactcctaatcaattaaaaatagttaatttgaaacatatcactcgaaactagggtattagttggattgacgatatttttcttattaatatcaacgagaagaatcaagtgtcgttagctcaattggtaaaaaatttaggcaaagcttagagatgtctatttgagtgacgcttggaacaaaaattacatgctatggtttcaggcctagagaaatgcttcgatccagaatctcttgatattcaaaaaaaaaaaaaaaatcaacaagaagaatgtataaatggtttctatactatctaagttatgaaaaatatttttggttacccaaattacaagatttgtaccgaagtgtcacactagattcacatgcatgcatagttataattaacttaaaacataaatgacttacaaaaatacttacaaacaaaaaccaaattaagttatttagtggccagctttgttactagagttttagccattatcataattcacaataaggtgtaggaaaaaacattaatatatagtatgtatacatccaaaaaaaactttttggaaaaaacaaattttgggattataaaggacacgtagcccaatcgatgaacagaggacggcaccgaatcaatttgacttcaccttttttccccatatgataagagtctcatctctttcctatatatatttcgtacctctctttaaggaccctacgtctctctctttctctctactctctgtttcctcataattcaatcactatatttttttaaaaacatttgacttcatcgatcggttaacaattaatcaaaaagatg

SEQ ID NO: 35517 - DNA, 3003 bp, Unknown; identical to SEQ ID NO: 35516
  misc_feature (1)..( 3003): 2750-1469P.txt file - cDNA_ID_3088258; gDNA_ID_2926133; Annot_ID_138824

SEQ ID NO: 35518 - DNA, 3003 bp, Unknown; identical to SEQ ID NO: 21613
  misc_feature (1)..( 3003): 2750-1469P.txt file - cDNA_ID_3088281; gDNA_ID_2926133; Annot_ID_197045

SEQ ID NO: 35519 - DNA, 3000 bp, Unknown
  misc_feature (1)..( 3000): 2750-1469P.txt file - cDNA_ID_3088281; gDNA_ID_1972068; Annot_ID_178497
ccaccactttgtctttctcttctccttctattcccacaaacgtcactcctgctccgttatttaaacatgagaatatgagatcattccatcaagcgaattagaacgaatataatttgctatccatagcatcagtgccggctctaggggggtgccagaggagcaaaagcacagggtcattaaatttttttccaattttacttgaggttttagggtccaaaattttcagtaattaaaaaacagtattaactaaagccaatttctataaatcagcacaaggtctttaagaagtttgagccggccctgcatagcatagtcaaatgccggttcgatatatatatttggattctaattgatatcttaccagtggttttggctccgatcttgagggcttctgaacgacatttgtcgcacctcatacttaccgacatcaagattttctgctcatgaaaattccaatattacaaataataatactgctacgtatatacttcatcctaaaaccttccgtatatatgttagacttttagaatacaaatgtttttagcgtaccttggccattttggaacctcttggagaaaatgaaaccttattttttttgtccttttggtataaatgattactataatttacgtgtgtaaatatagaagtgcttctgtctttgtctcattttcttatggcacattgcttaacatgtattaatatgcatattttatttgtactattatttgctacgaaatcgcagagtaattttcatgcaactgcttcgtagttaatattagtataaatgttgacgtttaagtggacaatataaggtattgcttgactcataagggttagatttggttaggtaaaggttagatttttatcatgcacatctaaaaagtcagtaccgtgaggaccacgaccggtcctgaattataaaaggcccgaaaggaaactagtcccttatttcgtgtttctgaataaaacaaattattaaccttaaaaccaaataaaatttagcaaactgaaaattgtaaacaaagaaacggcactacatcctacttgcaaagaggtgtcgaacggaccggcccacaatggccattagttttagatggactgcaacggagcagtccgctaggaccgcagacaaaataactttctccaggttcgccctgctaaacccaacaagtttatggaccgatccgtaggcttagtttttatatttaaaaaataataaatatatatattttaaatattaattttagttatttttaatttaatttaatttttaataaatactttttgtaaatattacaatttaaaaaatttaatttcttcatattgttacatattttacatattataataggattcataattaagtaaaattaattattcttacaaattatttatttatttttattgaatatttgtagtctgcaggtcaatccgccaaaccgtgggtcaagtccactaaaatccgtaatccgttttggccgatccgcaagacccgttatttttcggatatataatatagtgtccaaacccgctccatcatggtactagcccgtgagtctttggcccgcttgacactgatacatacatagtttaaaaaaaaaaaagtatattcgggtaggtccaaaaacgggttgatcagttcgcgggtaaaaccggttcaaccaccggttaatggtttaaccgtcgttttaagttggttttgtttttcctcctgaaacgacgtcgtgtctctctctctccctctatcttttgcgactctcctcgtcttctctgttcgtctgccatatgagtccttcccaagcccaacttttctgaaattgaagtgagtttcttcccgaatcccttaaagtttcaaacttttcaattaacttattcctctttctcttgtttctatccgaatcgtgtgagggttttcattttctatgctctgatttggtctcaatcgatgtacgtttataatgaatgtgtgttctaaattgtaataaaaaatgactagtaggtactagttgacagctctccacagttgaaaatctctcttttgtatgaggtaccaattgacagtctttgagtctttccttgttgttttgttatcaagggttctgagctttgtgtctttaggttaattttctatgttgtgttatggaaaattggtcagtgaatagccaaaccaaagattgtgaaatctgcattttgattttggtgaaaaaaactgtatagaaatgtcttaccctcaagaaacttttatattgcataaatgaatagcttagttgttatagggtttggttgtttcaataacaaagaatagaatttggtttcttatactttataaacttccttctttcagtcttttgggacagagatggcattaattcagaaaccagtggtgtgcaaagacactaataagatcttcatgaagcaaatacttgcgtttactgaacaggtataatatagaagtgttcatgtatatctttctaatagtgtgctttataacttgtaaatcaggtcttttctgaatctctcgctttccatatgaaacctctttgtgaattacatttctagtttgagacaatgtcatgtttgaggtggttaagacgataagaacgttgacattttctgattgaaaataaaagacctggcttccattaactctgcattggatgcttactctaattattttctgattaaagaaagacattcccttaatttataggtgaccattacacagaacagtaagctctcgccacgcacatggcacaaggaagtgatataaacggactaacttgtagtctctttcccctgtcaagaattagcaaatcatccttcttttacttggtatcattgacttttttttttggtggttggggaacttaaatatgtgttttttggtatctctctctctgccccctcttcttggtatcattgacttttttttttggtggttggggaacttaaatatgtgttttcaaacgatttttgtgtgatgattttaggattgtgatg

SEQ ID NO: 35520 - DNA, 3000 bp, Unknown
  misc_feature (1)..( 3000): 2750-1469P.txt file - cDNA_ID_3088305; gDNA_ID_2926133; Annot_ID_197028
taaaaggcatgttcatcttgatgatcctggaagaagtgaatgggaaggttttccttctggaactaaggctgctgctgctggtaatcaaatctgtttctcttactgagactgttctagttgcatgagtgtgttctgctttgtctcttcgcttacgtgctttattcagcttcttaagaatgtctttgtctggcagggggaataactacattggttgacatgcccttaaacagtttcccttcaactgtatctcctgaaactttgaaactcaaggtaaagccatccactttagttttccagttggtaagctcgacactattcttacagctttttgcctttacagattgaagctgcgaaaaacagaatacatgttgatgttggtaaacactttttgctatcaaaccttaccacatctgttgattcaagacaacacatggtgtgccctaaatctttgtttccatttttctccagggttctggggaggtctggtacctgacaatgcactcaactcaagtgctcttgagtctctcttagatgctggagttcttggtctcaaggtagatatcaatctatcatgtgtcctataaagctgtggcttgcttttctgtctataatgacttgtctcaatctttgttcagtcctttatgtgcccttcaggaatcaacgattttccaatgacaaacatcactcatataaaggttttgtttcttgagtcttatgatccttctctcatgattcaatagttattacaaaaacctcattggcccttgtctcgctgatactgtttgtttatgcaggaaggactatctgtattagctaaatacaaacgaccattgcttgtacacgcagagatcgagagagacttagagattgaagatggtagtgaaaatgatcctcgttcttatctgacttatttaaaaaccaggcctacttcatggtgagatattgcatcttttcactctatatatataagttcctacagagtcatcattgtacctgaaaggaatatttatttgagcaattagggaggagggagcaatcagaaacctattatcggttactgaaaacacaagaattggtggttctgcagaaggagctcatcttcatattgtacatttatctgatgccagttcttccttggatttgataaaggtattcaagagttcaagcagtagaagcactagaatttggttgtatctcattacatattttttttgtctttggatggagtaaaggaagcaaaaggcaaaggagacagtgttactgttgaaacatgtccacattacctagctttctcagccgaagagattccagaaggtgatactcgtttcaaatgctcccctcctatacgtgatgcggcaaatagagaaaaattgtgggaagctttgatggtataatatatattttacgcaatctttgttgtgataccttactcgttgattctgaggttttgatttgattaggaaggagacattgatatgctgagctctgatcattcacctacaaagcctgaactcaaacttatgagtgatggcaacttcttgaaagcttggggtgggatatcttctttacaggttcgtttagtcttaaaaatgtaatatgtagaaactgtgagagcacaaaaaaactcatggaagagccaattgcagtttgttcttcctatcacatggtcttatggaaaaaagtatggagtaacgctcgagcaggtaacttcttggtggagtgataggccttccaaactcgctggactacactctaaggttcgttattataaaaaaaaacgcagcttcagtattctcttttttgtccatacacagcacactggcataatatagacgtgtttttattaggattcggggtccatttatcgcagcttataagtaatggtttaattatagggagcggttacggttggaaaacacgcagatcttgttgtgtgggaacctgaagccgaatttgatgtagatgaagatcatccaattcacttcaaacaccctgtaagtacacagttttttctagaaagatagctaatggttaagctcgaataacacgaatgtgtaatctttatgttatgtttgcttcttgtggtgtacaatagagtatctcagcttatttgggaagaagattatcaggcaaagtggtttcgacatttgtgagagggaacttggtttttggagaaggcaagcatgcttctgatgcttgcgggtctctgcaacttgcaactacttaacttaaaaagggatttaaaagatcttgatctgcaccatttaaacaaatgtaaatatgcgattaagagttgctctcatgttgcaagatggttgatgtaatgagtgagtcttttttgccaattgtaagtttaagactctctaaatcttgttgttggctttaaggttagtggactcatgtatatattgttgatgcaaataatttatatcgcttaagtaaatgatgtatatattgttgatgcaaataatttaaaagtatacataatatttgcattgcttgttgtaactaatgttaatttgagtcaactaaaaaaaaagatgttatctttttaaatcactttttgtaagtgttctaagtatttgcatcagtttatcaaaatcatatatatgaaagttggtcaaaatcatatatatttgtcatgtgtctattaaataattaatgtaagctcttcaacttctaatttataggttaatgatacatttattatttatttttatattattttattttacatatttaatgtactattactaaatttattttaatattacatgatttttcaataaaaccattttaatagttttttcatactcgaatattttttttgtaatccaaactcaaagtatgagtatataataatcatggattagttagtgatttgagtaggttattctcttaaattgatatttatataataaatcaccgagggtgtagaatacgtacaaacctccatcatttcgtctgaaccctcattttgcgccgattctgtcaacaatg

SEQ ID NO: 35521 - DNA, 3000 bp, Unknown; identical to SEQ ID NO: 35520
  misc_feature (1)..( 3000): 2750-1469P.txt file - cDNA_ID_3088305; gDNA_ID_1621171; Annot_ID_173983

SEQ ID NO: 35522 - DNA, 3003 bp, Unknown; identical to SEQ ID NO: 17540
  misc_feature (1)..( 3003): 2750-1469P.txt file - cDNA_ID_3088309; gDNA_ID_2926133; Annot_ID_197025

SEQ ID NO: 35523 - DNA, 3003 bp, Unknown; identical to SEQ ID NO: 17641
  misc_feature (1)..( 3003): 2750-1469P.txt file - cDNA_ID_3088313; gDNA_ID_2926133; Annot_ID_197018

SEQ ID NO: 35524 - DNA, 3003 bp, Unknown
  misc_feature (1)..( 3003): 2750-1469P.txt file - cDNA_ID_3088380; gDNA_ID_2926134; Annot_ID_197098
tcccagacgtgttatccaagagaccagtaagattcaagattcgtctgtgacggttcaagtgcctcaaatggagcaatctccagcgtcaaactcagtcaaagagatcactgacccgaagaagaagattaaagtatatgtggtggcagcttcaagtgagtgtaaaggtctgaagagatttattgaggtggatgtgaactcgacggatcaagtgaaaatactgagaaccgagttggttgaaagtggtcggaggggtcatataagaatgcctcacgaaggatatttctttgtggacagaaagaaagagagagtattgaacgaagatcagtcattcgagtggaaccgtgttcttccagccgaaacagtttatatggttagtggacgtgatacacattttgcctcgtcttttactcgtggctctaaagtcacaatgctttgtgctcaaaaagttctgtagaaagtctgtatatatgacacagaagaaaccaaaaactatgatacattcagcaacagaaagttatgtggatctttaactctttgctaataggttttaatctttcttcaagttttcttctggcccttaagtcacaatgctttgaaatttttgagtatatgtagatacatagaagaaacaaaactatgatacatttagtaacagaaatttatgtggattttatcctatttgtaggtgtaactcttttcttctaggttttaatatttttcttcaagtaaacttgttgttattgaattccctttagtcgaaagcagcgatcaagcttctcttataagttacaaaccctaatttcagcaaacacaacttggaaacactagcagcaacaactttgttattttaaaacattagcaaaagaaatctcattgcaacatcaaatggcaaaactggaaggtaaaaaaagcagaacttatcaaacaagactaccaatatgatgaactgatgatttttttttttttttttttggctcaacaacaaactttccattcacccatttatggatacacagtctagctcaacagagcttttaacccaaattggtacaatagaatacaactttagatcataattctcaaaagaaagagattccttagctattctatctgccactccatttccttctcggcttgtatgcacaagcataaaatcctcaaacttgctaagtagatactttatgtcttggataattggattgagacttgacaagcataactttcatgtaaccaaagacacaagttgctgagaatccacctcaaaaatgatcttcctataattgaatcgggataatgacagcacagcccatctaagagcctccacttctacttccagcacgcttcttacttttaccacagctcttgcacctaaccataacaccttccctgtatgatcgcgaagcacccaccctaagccacattttaatccttctgttggccatgccccatcaaagttgcacttaacccaagattgtggtggagcttcccatgtttctcgtctgtcccgacggtgttgtggttggtgctttccttacattctgagcctctttccttctaatccactcatctgcatcttcttgtgtccttactaatacctcattggttccaaattccctccctttaagcaccagctcgtttctgttcttccacagcctcccaagtatccaagggactaaagcctccacattcttcagatcaggatattcttgtttaagatgttgaactctatggaggtttgtatgaactgatgatctaggaccggataagttcccttcttcatagcgaacttattcaaagaatgttttgtgtatcattcttgttacattgttattaatgaaaaaatattattggtcattggactgaacacgagtgttaaatatggaccaggccccaaataagatccattgatatatgaattaaataacaagaataaatcgagtcaccaaaccacttgccttttttaacgagacttgttcaccaacttgatacaaaagtcattatcctatgcaaatcaataatcatacaaaaatatccaataacactaaaaaattaaaagaaatggataatttcacaatatgttatacgataaagaagttacttttccaagaaattcactgattttataagcccacttgcattagataaatggcaaaaaaaaacaaaaaggaaaagaaataaagcacgaagaattctagaaaatacgaaatacgcttcaatgcagtgggacccacggttcaattattgccaattttcagctccaccgtatatttaaaaaataaaacgataatgctaaaaaaatataaatcgtaacgatcgttaaatctcaacggctggatcttatgacgaccgttagaaattgtggttgtcgacgagtcagtaataaacggcgtcaaagtggttgcagccggcacacacgagtcgtgtttatcaactcaaagcacaaatacttttcctcaacctaaaaataaggcaattagccaaaaacaactttgcgtgtaaacaacgctcaatacacgtgtcattttattattagctattgcttcaccgccttagctttctcgtgacctagtcgtcctcgtcttttcttcttcttcttctataaaacaatacccaaagagctcttcttcttcacaattcagatttcaatttctcaaaatcttaaaaactttctctcaattctctctaccgtgatcaaggtaaatttctgtgttccttattctctcaaaatcttcgattttgttttcgttcgatcccaatttcgtatatgttctttggtttagattctgttaatcttagatcgaagacgattttctgggtttgatcgttagatatcatcttaattctcgattagggtttcatagatatcatccgatttgttcaaataatttgagttttgtcgaataattactcttcgatttgtgatttctatctagatctggtgttagtttctagtttgtgcgatcgaatttgtcgattaatctgagtttttctgattaacagatg

SEQ ID NO: 35525 - DNA, 3000 bp, Unknown; identical to SEQ ID NO: 9304
  misc_feature (1)..( 3000): 2750-1469P.txt file - cDNA_ID_3088380; gDNA_ID_1972068; Annot_ID_178445

SEQ ID NO: 35526 - DNA, 3000 bp, Unknown; identical to SEQ ID NO: 15447
  misc_feature (1)..( 3000): 2750-1469P.txt file - cDNA_ID_3088384; gDNA_ID_2926134; Annot_ID_197095

SEQ ID NO: 35527 - DNA, 3003 bp, Unknown
  misc_feature (1)..( 3003): 2750-1469P.txt file - cDNA_ID_3088384; gDNA_ID_1972121; Annot_ID_178987
atgtaacaagaatgatacacaaaacattctttgaataagttcgctatgaagaagggaacttatccggtcctagatcatcagttcatacaaacctccatagagttcaacatcttaaacaagaatatcctgatctgaagaatgtggaggctttagtcccttggatacttgggaggctgtggaagaacagaaacgagctggtgcttaaagggagggaatttggaaccaatgaggtattagtaaggacacaagaagatgcagatgagtggattagaaggaaagaggctcagaatgtaaggaaagcaccaaccacaacaccgtcgggacagacgagaaacatgggaagctccaccacaatcttgggttaagtgcaactttgatggggcatggccaacagaaggattaaaatgtggcttagggtgggtgcttcgcgatcatacagggaaggtgttatggttaggtgcaagagctgtggtaaaagtaagaagcgtgctggaagtagaagtggaggctcttagatgggctgtgctgtcattatcccgattcaattataggaagatcatttttgaggtggattctcagcaacttgtgtctttggttacatgaaagttatgcttgtcaagtctcaatccaattatccaagacataaagtatctacttagcaagtttgaggattttatgcttgtgcatacaagccgagaaggaaatggagtggcagatagaatagctaaggaatctctttcttttgagaattatgatctaaagttgtattctattgtaccaatttgggttaaaagctctgttgagctagactgtgtatccataaatgggtgaatggaaagtttgttgttgagccaaaaaaaaaaaaaaaaaaatcatcagttcatcatattggtagtcttgtttgataagttctgctttttttaccttccagttttgccatttgatgttgcaatgagatttcttttgctaatgttttaaaataacaaagttgttgctgctagtgtttccaagttgtgtttgctgaaattagggtttgtaacttataagagaagcttgatcgctgctttcgactaaagggaattcaataacaacaagtttacttgaagaaaaatattaaaacctagaagaaaagagttacacctacaaataggataaaatccacataaatttctgttactaaatgtatcatagttttgtttcttctatgtatctacatatactcaaaaatttcaaagcattgtgacttaagggccagaagaaaacttgaagaaagattaaaacctattagcaaagagttaaagatccacataactttctgttgctgaatgtatcatagtttttggtttcttctgtgtcatatatacagactttctacagaactttttgagcacaaagcattgtgactttagagccacgagtaaaagacgaggcaaaatgtgtatcacgtccactaaccatataaactgtttcggctggaagaacacggttccactcgaatgactgatcttcgttcaatactctctctttctttctgtccacaaagaaatatccttcgtgaggcattcttatatgacccctccgaccactttcaaccaactcggttctcagtattttcacttgatccgtcgagttcacatccacctcaataaatctcttcagacctttacactcacttgaagctgccaccacatatactttaatcttcttcttcgggtcagtgatctctttgactgagtttgacgctggagattgctccatttgaggcacttgaaccgtcacagacgaatcttgaatcttactggtctcttggataacacgtctgggaacaatcacaattgtatccaagggtttaacactgttacactcgtatgactgatcttcgttcaatacttgattattgtgcgtaaagatgtacccttcttgagccagtttcataagacctctcagtgttttcacctcatccgtaactttcacttgcaccagaatattcgttgggacttcattcataccaggatatggcgacacatatactagcatctgccggactcttttttttccgttagtgatctttttgactaagtttgactgtggaaattgcttcgttggaggcacttgatcgttgttgttcttactcgcaaacttcacagacgaatcttgaatgttaacggtctctttgactgagtttgacggtggagattcctctgtttgatgcgcatcttgaatcttactgatgtcttgggttgtctcaggccgataactgtaaatctttctgatctcttcctctgtcaaaggccaatcttgctccgcaaagtactcttcaactgaaatccacggtgctggaggagattgctctgtttgcgggatttgatcgtcgttgttgtgaatagggttcacgtcaggagagacttcgagttggatttgagaatcgtggaagatctggcattggtcgaggttaagatcttctcgaagaataaaaatgccgtcgacgataagggtttgtttcgaaactgggacacgttgagacttctcgatcttctgtttgaccactaacaatgtatctgtgcgttccacttcaatctcgaacgatgaaccacccagaatctcgaccacaaacttcatgactctatcaatggtgtttcaagatcaatggagactaatgaagaagagagtcaagaaacagagagagcgagagagaaagtgattgttttgtaaagatagttcacgatagaatttggttttaatatcattcattcacatatcaaatgaaccgcatttgggcttgacccatttttattgggttacgtggctcttaagtcaatgaaagcctcacataaaatcatcagtatctatgctacagtatattcttacttatattatccaacggtaatgttataaaaagattgattaaaactatctagatccgacccattaaaccgtaaatctacaaatccgacccattaaagattcttgccggagacgaaaggtattccgattgaggagatg

SEQ ID NO: 35528 - DNA, 3003 bp, Unknown
  misc_feature (1)..( 3003): 2750-1469P.txt file - cDNA_ID_3088388; gDNA_ID_2926134; Annot_ID_197094
tacactgcatattaactttataacataactcaagtgataaattgatttgacagccaacgcttactaacacaagtatgacattcatttcaaccgtaattgccccaaccaaattcacagtagtggttattaaagtgaagaaattactgacgatctctgactatctcatttcaaacatggttaacccgactcttcccgacgatttactctcgaagatagctaagaacctggctaaccaatgctggtccgaccttggtccactggtacgatccggcactcgtggaagagacattgtctaccgtccggatgtcctcaaagatgccaatattctcaccttgtgtaactcgcccgatgacttccaagcttgagggggccacaatccctccggatccgctgatgaaggccgacatcgaccattttttttacggtgttttgcagctaataatcccacggcagtgtattacgaaggtattcgtgttctaacgcatgaacgaaacatcaatggagccatcaggctcttacagcgtcatgctccagtacgagcaaatgcaacagttacatgcgccattgtattcatatgtgctgggtatgattatatgggcgacttgtttctacagctcttcacccgcaaccattatccattggactcggttgccactcgaatttgggtgatgagtttcttcaaggaaataaagaagtttgaccctgcatacaacaatacatatggtcctacgttctcttatcctaccagccatggaattagtatgcctccttgcgccttatattgttacatggtatcaggagctttccaaaacgtttgcaaccgctgttacctctgatcgtgtgccaggcgtgttagtcaaatgctatagttaaaatctaaagttgaatatttttcagccaaattcgcatatgatatttagttcccgaagtaaatgtaaatttggatattaaaatctaagcgtccacaactacgtacacgtgcatctaccaaataatacttaaaggttttttgtttgtctcggaaaactagatatgtacgtacactagcatgagatatcaactctaacgtacactaaaaaataacacattcaaacatatgaggtctttggtttgtctcataaatggtgatatttatgaatggacgtacactgatagtacactacagcgtacactgtttgttgggtaaatgtagaaatgtaaatgtggacgtacactacaacgtacactgtttgttgggcaaatgtagaaatgtaaatgtggacgtacactaaaacgcacactaaaacgtacacgtctagttttaagctgttattaaaaagtggttgctcataacaacaataacaaattatatatggaatactattacgttgatttgacaatatgaatacacatcatcacttaatacctttgcaataaatacaaccataacttacccaaccatatcttcaatgatgcttatttaagtgttggaatttcattttgttaaaacaccttactcctaaatataacaaacccaaatattcatgatgatttgcttgcgaagatagccaagaaaatggctgacaaatgttggtggtacctcggacctatgttgaaatccggtcctcgtggaagagacattgtctaccgtccggatgtcctcaaggatgcaaacattttcagcatgtgcgacgatcccgatgacttctacgcggtaggccacgatccaaatgacatcaactccgaaggtcgctatagacccttcttcaaacggtgcttacaagctggtaaccccacggctatttaccatgaaggactgcgtctcgttacacatgagtctgacattcagggagctatcctacacttagagcgaatctccccaaggaacgccgctgcaacccttgcatgcgcaattctttacatatgtgctggtaatgctcacatgggtggtgtctaccttcggctcttcggaagcaaccattatgctttggaatcggaggaggcacgtgacatttgtgaggaggtgctagaagatataaagaaatatggtaatactttaaaatacacatacgctaacagtttttcgtacccggaatgtggtgacttaagcactcctgaatgcgcagagatgtgttacatgagatcgagactcttcaataatctttgcaaccaatgttacatctggttgtgtgctaaacggattagccagatcctgtagagctcacattcgccacgatcctgtcatatttataagtttttcatgcaacaatatgtgagctttttacgttgattatcagtaatggaagtttgtttttaataattatcactttgtaattgattcaaacatactagctcaaactactctaatatgagacatcattaacacaaaataataataaaataataaaatatctacgtacacggtatatgataatgtacatgtggtatagtttaattccaactataaagattacatagtgagcgacggtatagtttgtaaatgaagacgaaagaaaatttgatttgacgtcgtataacacatatctagaagatttcgctccatattaattactcgctgtcaaatacacactagaagtgacctccatcacactctcattaatatctctattagacatacacggttcccgagcaacgtactcaattgatttggcagataaaataagtaagttaatgtttatttgaaaagattgttagtaaatgcgttgacccctaatatagcactatacatgaagccatattgttccacttatatgcaatacaaacagacgttaactcaaccttctgtaagaaaacgtaatgagtattttatagacatacacggcgcgattatgagaggtacacagtagtttgtttaaattaaaagttactaatatgatgcactaaatatacatccacgtcacccacccacttacattgatgattattcccctctttaaaactcatgtcaaacacacttagttgaatacacgaatccgtctaaacctcctcgtttgaaaaacaatg

SEQ ID NO: 35529 - DNA, 3003 bp, Unknown; identical to SEQ ID NO: 27972
  misc_feature (1)..( 3003): 2750-1469P.txt file - cDNA_ID_3088392; gDNA_ID_2926134; Annot_ID_197092

SEQ ID NO: 35530 - DNA, 3000 bp, Unknown; identical to SEQ ID NO: 7278
  misc_feature (1)..( 3000): 2750-1469P.txt file - cDNA_ID_3088491; gDNA_ID_2926136; Annot_ID_197205

SEQ ID NO: 35531 - DNA, 3000 bp, Unknown; identical to SEQ ID NO: 7278
  misc_feature (1)..( 3000): 2750-1469P.txt file - cDNA_ID_3088491; gDNA_ID_1621136; Annot_ID_172670

SEQ ID NO: 35532 - DNA, 3003 bp, Unknown; identical to SEQ ID NO: 21624
  misc_feature (1)..( 3003): 2750-1469P.txt file - cDNA_ID_3088495; gDNA_ID_2926136; Annot_ID_197202

SEQ ID NO: 35533 - DNA, 3000 bp, Unknown; identical to SEQ ID NO: 24102
  misc_feature (1)..( 3000): 2750-1469P.txt file - cDNA_ID_3088510; gDNA_ID_2926136; Annot_ID_197198

SEQ ID NO: 35534 - DNA, 3000 bp, Unknown
  misc_feature (1)..( 3000): 2750-1469P.txt file - cDNA_ID_3088527; gDNA_ID_2926136; Annot_ID_197177
ctagaaaaaaattacttggtagacgtggggttttccgtttgtcacaattaaattttactttaacaaatccaaaacccttattagacaaaagaataatgtgatcgtctctgatatgcattttgaagatgtagtttagcataatagtactgaatacaccaaattgtgtgaacaatacataaaacattctgtgatttagaacaggttatgtaagaactttggattatgaatagtagaagttgagccaaaaataaagtaaaataatatgttctatagatattgttttaaaaaagacgttttcattaaagtcattgtgtcaaagttttatcttttggttaaaaagctttgcatttagtcaagttacatttttttgttatgtttgcttaacttttgcttatttttcttcttatgttttgcttaatttttgcttatttttcatcttatgttttgcttaaatatatatagatatatgtatttataaaatagccacttacatcaaaattgaaactacagaaaaattgaaaggttaattttaaatttattattttggtattttagaaataacaagaaaaatatgcactttcaagtttagaataccatcgtgacatagagagtaattcagaatgatgaattggttcaattcatatactttagtaaaatggaaaaaatatagtcggatacttgtgtccatgggtgattctggtccagccccagaatttgtagtcccgttctcgtgagaaacctccctccgtatcgcaatagttgcttcgagacatgtcaatcctatacaaagccacgtctgtcaggtaagttcatctccattttttggctagattaggaagattctttgactttcctgtattatatgcgtattcataaaaccaaaaacattatgatctttgaggagaggatgacggaatgccggctaagctaaaatgtctgtgcaatcatccatattgcaattagaactttattacattttgatagacgaaaatcagataaaaacaaaactgctgacgaatcatgaaagtaatacactaagaggagagttagctagatgttggcgttgtgcttttttttgttaaaaatgatgttgacgttgttgcatgtatatatatcctcatttatttcctctttctcctttaaatcttaattcttaagtacatataaatatatatatatatatatatatatatatatatatatatttcctttggtaatcacaccaaactccagaaccctttatatattatcgttacatgaacttttagaatatattcttttatacctttcttcttaacaaaaaaagagagctgtagatagggtgtttaggaggtcaaatcgacagttcaataattaattaaaagaggttaaaacaattcagcaaccttagtttatatgttttttttatataatcaatttcttaagatttatcataaaggattggatagtccgagttactcatatgtataggaaagttaatcgtcttgcagatgagttagcaaactatgctttttcgttggcagtagaccctcattcttttgatcgttgtctagagagtgttagctcggtgatattaaaggacacaagtggaactctgttttcacgtagtttttgaaattagtttttgttttattttgttcgaataaatagtaggggacaatgtcgccttcctttaccgaaaaaagaaaactttttgggatttatatgtcctaaaagagtttaaaacaattctaattgtttattagaatttgatcaaaatatgagatagaagattagttgcacacattcaaaataataaaataaaggattttgtttttcttcaacaaataaagaaaaactatgaaacattacataccaaacaaccattgctagcttaaccaaagatccctatggtcccagggatttttcccacgtattctatttatgcaaatttggatcacttattctcaagaatccctttagaatttgattcattcgcatatccatggataatttggtatatttggaaagcaagtaatgaaaacatatttgaaaatgtcgagaaagatcagttatatgtgttatgtctagcagaaaaagaggctcatttgtggcacctagctcaagttgagttcaatactgaaaactatgtctctttacaagctgaaaaacaaattcaagtgagagatatctgttattcaaatttagattcagttatatatgttactactaataaagaatgtatttaaaatatataattctacaaatatcaaagtacacatgatagtagtatttgtgataaaaagatagtttctcactacacggtttaagctgatattagattggttggtaataaaaaaaaacgatacaaagtatgtttggttatgaaaaagagcaatatataatttcttacacaaccatacgtgaatcagcttaattctacatatctaatatttgaaaatcggtggtgttaacaaaacaataaaataattatttttcatcttatgacaccgtattaatgtcaattaaactcattttaccatacaacctgagtcttgtaatattttttaaaaatattacaataattatatttttaactttttaagaatttaaaatttattatatctagtataattaacgatttgactaaagaaccaaactaaactaacaaaaacttttaaaatttggatgcttgtcaagttaagcttcatatgcactcggattttgaattcaattggttttatttataatatgattttcatccattgtgtaaacattttagtcgatgtgagaacatatatatttcttttataattgagtaatacatattggcaccggatatttttttctggtggtactagtcctgaggaggccgatagttggcagtcgtaggttgagcggaacttcggttcgagcagatgcccggtggagtatcaggtggatatgatagtatattttctagagggggatgtacatttgtggtggcagagtgtgaatgtcaggaggaggcaggcggatatg

SEQ ID NO: 35535 - DNA, 3000 bp, Unknown; identical to SEQ ID NO: 35534
  misc_feature (1)..( 3000): 2750-1469P.txt file - cDNA_ID_3088527; gDNA_ID_1621120; Annot_ID_172041

SEQ ID NO: 35536 - DNA, 3000 bp, Unknown
  misc_feature (1)..( 3000): 2750-1469P.txt file - cDNA_ID_3088531; gDNA_ID_2926137; Annot_ID_197241
tttgaaaaacctctcaaatggatacatccacctatattggacagggccacccaattcagcttcgtatgggagatggataggtaagtgttccataacatcaaaaaatgatggtggaaaaatcttttccaagttacagatgattaaaactatgttctctttgagaatttgaacgcgactcgtctgtaaagttctcgaacataggtcccggaaaaatgctcaaattcctaaaatatatgtgcaagttaaataattagataaaaaaatgttggcaaataaaatagtaagtactgtacctgataaggcaaggtggacattccgatcaaggagttcagcaaagataaatggaagtagtcgctccataaaaacatgacaatcatgactcttcatgcctgaaaactttccattctctagatctacacaactagccaaatcgctagaataaccatctggaaatctaacatcatgtttcacacattgaaataaactctgtttcgcttcgtctgtcaatgaatacgttggaaatggagctttaccattactatcaatatgtaagcctggccgagaacaaaatttctcaatatccaatcttgacatgatattgtcttttgatttatccttaacacgcaagagagtgttcatgatgttgtcaagaaaattcttctctgtatgcatcacatcaataatatgtcgaagattgaggtccttccagtaagacaactcccacaagatgctttctttgtgccaattatgttctttcccatagcctagcatcttcttttcatgaccgttcccaccaacatccttcgtttttggtggatttacactagccaaccactcgtaataaacttgcttccctgtcaaagattcgggtggatactcgctagaaacttctcttcctttcacaaagtcttttctgttcctacgggatggatggccatgaggaagaaatctacagtgacaatcaaaccagcatgtcttccgtccattgggtagagaaaaagactttgtactttccatgcaaactggacaagacaatttatcatgagtagtccatcctgataacatgctaaacgccggaaagtcgctaatcgtcaacaatagtactgcttttagattaatattctagcttaatgaaacatcgtacgcatcaactccagtagaccacaactcttttaactcctcaataagaggttggaggaacacatcaagactagctcgaggatgatttggtccagaattcagaattgtaagaaataagtactctgtattcatgcacataccagggggtaaattatatggagtcaggatcacatgccacaacgaatgattacgagacatgccaaatcgattgaacccatcagtacataacccgaaataaacgttacatggttcttcggcaaaccagggatgtaactcttggaaatatctccactccgctgcatctgaaggatgattcatttctccctcctttgattggtgctcagcatgccatcgcattgccgcaactgtcttatggctctgatacattctctgatacattctcttcaaccggtccccaataggtagataccacatatgactatatggtaatttagttcttcgacggttgtccttaggcttccatctttgtgcgccacaaaatcgatattgatcttctttttcgtcttctttccaaaatagcatacaattgttctgacaaacatcaatcgtatgatatggaagttctaaattgcgcatcaatttctcggtctggtaatgtgaagtggtaatctggtttccttctggtaaagaatttgtaaacatttcgcaaacggagtccaccaacttttcactcatattatactccgccttgttgtgcactagtcgagatgctaaggataactgtgactgcccttcacgataaccatcatacaatggattatttgcaccttctaacaagtcgtagaacttatttcaatggttacggaccggttcttccacattctgataactatcatcatgatgatagttatcatcataccccacgttaaaattaaatgcatcgttcaccatatccacatatggatcttctacaacattacccacttcttcataattcaaactaaaatacgtcctatccgtgtaagtactcgttcctatatccatattcatttcttttccatgcttataccaaacataataatcaggcataaatccttgactaaacaaatgactattaactcttctacccgagataatgtgtttttcattcttgcatacactacaaggacaatgaaatttacctcaactagtttgtactataggcttactattagcgaatgtcatgaattgctcaactcctgcgacatattcggctgacaaattccccgtcacttcatcaaatctcttgtacatccaatctcgataaaaactgccactacccgccataattgtagtttcccgccattatacaataaaataaacttatatttttttcttttaaatcgtttttttttctttgatgttgttgttgttttaatttgttggtgaaagaagagtgtcgtgaagttttaatatatcgacgaatttttatgacttatttacgactacatgtcgtagtcgctcacaagttaggtgtacctacttaaaatgcgaaacacgtttttcaacaactttatgctcgtttgcgactcctttgcgactacaaaagagtagtcatcaaatagtcgccaaatagacgactaactaatgtagtcggaaacgtagtcgtcacttaccgactacatgacgactaatttctcacttcagaaatgtaatcgttaaatagtcgtttaataacgactatcgtccaactaacctagttagtcgtaaatggacgactacttcacgacgaattttcttgttgttgtatcgtagtcgttaaactgtcgccacattgtcgcaaaataaaacgactacacatattgtcgttttacgttgtcgttttttgcctgttttcttggtggattagaggaggatatg

SEQ ID NO: 35537 - DNA, 3000 bp, Unknown
  misc_feature (1)..( 3000): 2750-1469P.txt file - cDNA_ID_3088558; gDNA_ID_2926137; Annot_ID_197273
ttctcaacgtccatgtttgtttaatatttaatttagaaaataatttgtttattttttaatttttgttactactaggactcggactcccctcgatatcgcgggaggaatattttaaatatatttatataataatttctttaaaataaatcatatattataaattttattaattatttaagaaaaaaagatatatataaacggaaaaataaccgtcaatttttttactattccaataaaaaaagatacaatcaaagaaaaaacccgtcaatattaacggaaaactacgataaaaagacactaataaaataatcatcaatgttttaacggaaataaacgaagaaaatatacaaacaggaaaaataactgtcaataagtaaccaaaagtaacaataaaaatatatgaacgaaaaaggtaattaagtgacaatattttaatggaaaagtgcgatgaaaagactcaataatatatcgaaaagttgcaacaaaaagacataactgaagaaaaatacccgtccataattttacaaaacaattgcaataaaaaacaaaaacgaaaaaaataacagttaatgttaacggaaagttacgatgaaaaaatatgatcgaaaataataactgtcaatattttaacagaaagttgcgataaaatgaaataatcgaaaaaataaccgtcaatattttaacggaatgttgcaataaacagacacaaccaaggaaaaataactttcaatatttttatgaaaatttgctataaaaaatactaaaggaaaaataacagtcaatattaatgaaaagttatgatgaaaagtcactaacaaaaagttgcgattaagaaaacactaacgaaaaaatgaatcgtcaatattaatggaaagctacgatgaaaagatacgaataaaaaaataaccgtcaatatttaacggaaagttgcgataaaagagacacaacaaaaaaataaccgtcactattataacagagagttgcaataaagagacacaaccaagaaaaaataaccgtcaatagttttacaaagtgacgataaaaaaaaaaaggaaaaataaccgtcaataataacaaaaagttacgataaaaagaaacaaataaaaaggtgtgataagaagaaactaaaggaaaacataaccgtcaatataaatagaaagttacgatgaaaataaactaactaaaaaagtaattgtaaatattttaacgaaatattgcgattagaaaacacaacaaaaaataaccgtcaatattaaaatgacaaagatataaacaaaaagttgcgataaaactgtagtaacggaaaaaataaccgtcattgttagcggaaagttacgatgaaaagacatgaacaaaaaaataaccgtcaacattttaaccaaatgcaaattttatgaagaatcgtagaagaaaattgttccttcccaaattttatgaagaacaaacaagaaaacaaattgttccttctcaactttcattttgcttccagtgcaatttcagagatatgttactggtgtttgtgtaaacaataataaaaaagaatagccaataagatatttcagataaactagagaccaagccatactcctcagcatcccaattacacagaataatcgtccttcgaggcttccatcctcttttctgcagcttatctagtctttgtgcaatctacaattgtttcaaaaatctctcattgcaatgaaaacattgaaaactttcaccaaatacatgttgcagataacttttactcgcctccataagtaccgcagtgccactgttcggatcaacagctctgaaagtccaagtgtctctatggtttcgaagaatcacatatctaaccaatccattcatatacaatccctagttagttactacaatcagaagtctattgccactcactattgaacatgtacctatcaggctcttcttctccctcaatcactccaataacattctgaatcttggctataacagtttgataagaatgaaactatgaatctctctttcttatccttaaaatcccaattacaatgaaacaaactctaaatcggtaagcttggagttacagttctccaatcttatctcctaagaacaaagcacataagccctaattctactcacaacatcaatatgatcacgcaggatagttctctatgtttgctctctatctctatttatactctgaattcttctcatgcttctgtttggctcttcccaagtgcctattcatctcacacgtgctctcttatcacagtttccccctgaaacaaagacccaacaaaactcaaatctaagtaagtaacacatatcatctgaaacacaaactcactcactatgtagctcaggttcaagatcccaggtccaggccccacatctccaacaattgtcttcagaatcacttcagcatcagcagctgagacaggcaacgacggtataagcggaacatcaccgctcaattcaaccgcctcgtcggataatctctcacacccatcaacacttgcccatccaggagtcgttggatcacctaacccattataaacagtaccaacttgaaacccactcggtggcatccatttactcgccggaaaccactcatctccaccgtaatctctcttgtttgtatatatcacaacaccgacagctcctgcctcgtaagcgttgttcacaatgtctactttgtatatctgaccgtacctcgcgattacaacggctccagagacattcacacccatatctttcttgagtctcacgaaatcttccactcgtccatagtttgcataaaccactagacttacctgacttagggtatccatgaaaagtatgtaagtgcggatggcagctggagaatgtgtgttgattgcagagccatcaacaatataacggttaagtattaggatgagagagggagatgaatggaaaactgcatttaaaactaaacatgggttatatgagtggctagtcatgccatttggattaactaatgcacctagtacattcatg

SEQ ID NO: 35538 - DNA, 3000 bp, Unknown
  misc_feature (1)..( 3000): 2750-1469P.txt file - cDNA_ID_3088667; gDNA_ID_2926139; Annot_ID_197376
attcaagttattataatgtttctctcaaatatttttgtttggctgaatgagaaagatgtattagacattgtcttctttagacattatatatatttactagtactaattatagtaaatatacacacgtatacaatcggagtagatgcgcatgttaattaccaaaaaaaatacgatttaagtgtgccatcatctccgttaatctagggttagctggataattatcatttacgttttgatgatgacaaaaaaggataaagaacaaaaaggtacatactaatatatacatatatgtaaggttaaagtttgtttgatgagtgcttaaattcgatattctatttaaaattatatctctattcgctaaggattcaaattcaaataagagaaaaaaaataaaaagtaaattatgcccaccccaaactttgctatatatacaagaaatatcaccttctctttaaaaccaattaaagagacgcatttaaaagcaaatgaccaacaagcgacttcaccatccatctcttacaaccctccaagaacactggctgttttccttcactttctagacaaaacaaaaaccatcttctagagaaaataaaccaacatgggagagacagaaaccatggcaacaaactaactaaaccatagtatatattatctatactaatattatcggcccatgggtaacggagacaaagtcatgagccactggagcttccacatcccacgtctccatcatcatgagcatgatcatgaaaaggtaccaaaagggtgtttggcagtgaaggtaggacaaggagaagagcaagagagatttgtgattcccgttatgtactttaatcatcctttgtttggacaactcttgaaggaagctgaagaagagtttggttttgctcaaaaagggacaatcacgatcccttgtcacgttgaggagtttaggtatgttcaaggattgatcgatcgagaaaacactagatttctcggtactaatctccttgatcatcaccatcatcatcacaaccatctcatccggtgttttagggtttgatgatattgttttggctctttttaaactagatattatctcatgctgctgattataaataaatctcggtcttcatttcatcttatcttaaggtgtggcttgttgttgttgttgttgttgttgttgttgttgttgttgttgttgttgttcatatatatatatatatatatatatatgtctcatgatgattaattgtacgcttatgcccgatcataaaaatagaaaatcatcatcttgtaataatattaaaataatatgtatgttgaacaattaatatttagttatttactatactcaatctcttctatgagttgacttgtcaattgaaattttataattttattaatgatttggagaagaaagtaattttacatttttccatttttattttaaaaatcatttttattttaaaaatcactttagttcaggttttttgttgctaaaatgtaaatattcataagaataaaaatgtttaggtttacagttatatattttagacttatagacttggtcttatggcaaaaaaaaaggattaaaacatggaaggaaaaacaatcagtttgtcgactcaacgtatgctatgaagcaaacaatgttagagaaaaagataaagtgatacaagattttgaagttcctccaaagtgagttacaaaagatgaaatttggcaatgaaaatttataaaaacttcaaaagtggaagcctttcactggaggccaatggactgattctatcggctttgccaaactattctacaacaggttaatcatttggagaagaaagtaatttagtggttatttcacatatataccaccattcatcaatataacttctatgttacgtttccgttcataaagatatgtgaaaacgaagttcctgtaaatgaatgattaagttaagaaatttattcgctaaatctataaattcatctgatcaacattgttgtctacgcaattgttgttcattaaatctttacggtcacaaaaataacaacctcatgatatgttagaaaaactttaatcatacacttgcaaaaaaaagtgaagcaaaatctaccataaatatgcaattgtgcagtggtcttctcctcttaattttgtttgaagtacgtatattcgaaactttatttcgattataatttttcgtacgattctttataagtaaagcaaaataatgatggattgaagaatcttgaaaatggaaagaaatggacgagaggcttttgaccatttgtatggccagaataacaacactcactaccaaatacaataacgtgattttgtttaatagattagatgcggtaggaatatattattcttcgtgaactaaaaccatgttttataacgacaaaaaaaaacccatgttttataagtttatgggccaaaattgggcttttgtattataaacatgtttacggaagtattcagctaagtatatataaaaaaaaacaattacactaatttatttaaattttattattacctacttacaattagtaaaatttaaaattaacaaaaaaaaaacttttacttacttttagttattgttttaagaaaaaacatcattaattaccctacttttttttttaatactaggaggttctaagccaaaacatcttaattattatattgtttatatgtctaataatatccataaatgtattaaaaaaacttaaaacataaactaaagggtaatagatcataatattattgaatggagtaagaaaatgtataaattataattcaaaaagagaactataatctgcttttctacccaaatgaagtaaaataagacatcaatttgcatttcaatggtcagttttaaaggtaaaattaaagacgttaaacacgtgtaatgtaaaagagatcactcatgagtcatgaccaaccatattcttagtttatataagtaattcacaccccttaaaaagaaatatagtctataatcaatcatacttagcatg

SEQ ID NO: 35539 - DNA, 3003 bp, Unknown; identical to SEQ ID NO: 17659
  misc_feature (1)..( 3003): 2750-1469P.txt file - cDNA_ID_3088681; gDNA_ID_2926139; Annot_ID_197368

SEQ ID NO: 35540 - DNA, 3000 bp, Unknown; identical to SEQ ID NO: 8160
  misc_feature (1)..( 3000): 2750-1469P.txt file - cDNA_ID_3088681; gDNA_ID_1621198; Annot_ID_174792

SEQ ID NO: 35541 - DNA, 3000 bp, Unknown; identical to SEQ ID NO: 17654
  misc_feature (1)..( 3000): 2750-1469P.txt file - cDNA_ID_3088685; gDNA_ID_2926139; Annot_ID_197366

SEQ ID NO: 35542 - DNA, 3003 bp, Unknown; identical to SEQ ID NO: 17653
  misc_feature (1)..( 3003): 2750-1469P.txt file - cDNA_ID_3088685; gDNA_ID_1621198; Annot_ID_174794

SEQ ID NO: 35543 - DNA, 3000 bp, Unknown
  misc_feature (1)..( 3000): 2750-1469P.txt file - cDNA_ID_3088693; gDNA_ID_2926139; Annot_ID_197360
atttgattttactatacattttaactatctattccaacataataaactatattttaattttatacgctataccttaaaattgatatttgaattttaaataataacttatacacttttcaatatttaatttaatactttcttaaaacaaattttaattttacaaatttgattttgcgatacaatttaaatataaactttatcataatacaaatattatttaattcgactctattttctccggtgaactttcccattagagcgatctcaaaaccttattcaaaccctgcaagttcgacttcggcaatgatatagtgctcattgtatgttttggtatagacactgctagcactaatttcgttagtgtcaatctccttgcaaaaattaggcacctgtctttccaccctgctaaccttgatgacacactttctaagatctcctcgaaaatctctttatttgttctcttttagagaaatgggcatcccaagattctttccaagttcctttgtcgacttgatcccgctcttgtcactgatcatcactaattcccgtgacacattctcagcaaaaaagattttggatttcttcaacctcactttttggcctgatgctacacaatatctctccaatattcgtcttataatctaaatttggccactgatccttccgtaaatagatcaagtcatccgcaaagcaaatatgagacaactttgttcctctatgtaatattatctcttcttatttctatcatagaaatataaagcattagctctacgttgcggctacaaactctagtctcatgtcactctcttcaaagcttcttcaaaaaaatttattatataaaaacaaactgaaattccttttgataatttttaaaatttacagttattggttttcgttttatttacttatgcatgaataaatttatcaaacacatgaactaaaccaaaatagaggtggtatgagaaaagaacaggactaaaagaactttgttcctcgaaaaaaagtttgaatttctttattatgtaagtatttttttttatcttagaaattcatcaaaatatcttcctcttttattttgaacatgatacacacaaatgtaagaacccaaagaagccaaaacatcattaaattaaacaaaacaaaaaacaaaaacaaaagaacctacaaagagacttggacatcttttaatcccaaaccagacctaatcatacaatcattcatgatttaacttgcgatatacaaagctccatctccaacacttcaccacgtaataaactattaggaacaaacatgacatttttatctttaggggtttcaaaactcacttcaagaattctcttcatctccggcgattcgtgacaacaagtgcgtccatcaaacgagtaagagattcgatatgagaacttctccacttcaggagccaatggtgcaatacaatttacagccacataaacaccgtttggctctctaaaacattgcacaacgaacaataaagtctttgtaagcgttataagaaccaaagacttatcgtttatcgccattcgcacatccctcggttcaccaaaggtgaaaaaacaatcgggttttaaagggtgggatatgatctctttgtataagccagtgtatttgcattctttgatttcagggcaagaacatagagagaaactgcaatattccttctcatgacttgagtctctcccataaggaacattcttagtgcaacctaactttgcgtttcggcatgggacgatgactgatttgagaacactctccattgctttgcaacgtttgtttccaatgggtaaagcacatgcaggacatttctttccgagtttgagccagcaaaaaccgcaagctacatgtccattatcacactgaagtacaaaaccaaagagttgcaatcaaattcatatcaaagcctattaaataaaagcaaagattttcaatttttgaatcgaaggtaaaaataaccaactcaaaattgtcgtcacagtaaatatcaaccaactcttaatttgcgctatatatataaactagcaatcatattaaaagataatgaaaaaatcaaggcactcaaaatatatgtaatctgtataaaactgaaaatgagatgctactgcatgtaaaagctaaagcaagcttacaaaatcaggatcgatcttatactaaatgactataaaaggaaactctatgaagtcaattagcaatgtaaataatcaaaacgtaacctgaaataaaggaatagtgagtggctcgtagcaaataggacaatcaagaacatcaagatctagcaacgtccccgttaccgaacattttcgttgcctcttttgtgatcaagtctttctcgaaccatctccatcttctaaagaacacttcatgtctcagaaaaaagtatgagaggcttgagaatagtagggaaacgaattaggtttttttttttttttttttaaagtaatgttaaattagatttaaaagaaaattgcgtttttacaacgagtgcaacttataatttatacgagagagattgaaaacaggaagtagaaagagtaagctttgcgattaacttcgactttgaagccatcgttggaaggtggcctcatatcgatggtccttgtggcgttgaatggtggtgattctgttgcgcatttgtttgtcgatccattgaataagaatgagagcagattttggagcttcattatgacgtcttcgattcctctcatgccagatggtataaacggaggtttggaagatgtatttcaccaagaaacaagttaccttatccttgcgatgggctgagactaggttgagcagttggtgcctatcacttgtgtagtgatgctgaagcaatcctcgagcaagcgcttcccaaattccagctgtatagctgcaagaaaaaaagagatgatctctggactccaggcagttcgtacagaagtaacaatctcccactgcatctttgttccatttttgcatacggtcaccggtagcaagtcgatcatg

SEQ ID NO: 35544 - DNA, 3000 bp, Unknown; identical to SEQ ID NO: 35344
  misc_feature (1)..( 3000): 2750-1469P.txt file - cDNA_ID_3088697; gDNA_ID_2926139; Annot_ID_197357

SEQ ID NO: 35545 - DNA, 3003 bp, Unknown; identical to SEQ ID NO: 31448
  misc_feature (1)..( 3003): 2750-1469P.txt file - cDNA_ID_3088702; gDNA_ID_2926139; Annot_ID_197354

SEQ ID NO: 35546 - DNA, 3003 bp, Unknown; identical to SEQ ID NO: 24687
  misc_feature (1)..( 3003): 2750-1469P.txt file - cDNA_ID_3088706; gDNA_ID_2926139; Annot_ID_197352

SEQ ID NO: 35547 - DNA, 3000 bp, Unknown
  misc_feature (1)..( 3000): 2750-1469P.txt file - cDNA_ID_3088729; gDNA_ID_2926139; Annot_ID_197340
agccaaacatggtcagaggaagctggataaaaccgggcgcagtcctcatcgatgttgggattaatcctgttgaggtgagtggaattttctttttgacatatggtcatggcgtaattcagtgatataataagtttcaaatcaaccagtatgcaacattcatacatgtacataatatgaattgcaggatccaagtgctgcgcgtggatatcgattggttggagacatttgctacgaggaggctagcaaagttgcatcagccatcacacctgttcctggcggtgtaggaccaatgaccatagccatgcttctatccaacactttaacatcagctaagaggattcacaacttccagtgacgtcacttaaaaagaagattgctggccttttgggaaacaaacaaatcgtactctgttttttgaagccaatgatttactttggtctttaaagaaagttatcgttttgttctatgaaacaaaacatgtagtttttaagtcacataaattgtcttcaacattgtttgtctcttcttggtattttgagtcagaactagttttaacttatcccagctatgatatatcccagcctcacccatcggtctcttcgtcattatactttatttataactacctttcaacgaaggttaatttgaaacaagaaaacacagtcacttgttctacattacttttgttaaaccctaacttgagctcgaagccacgaccactgttctgttttcctagtaaaataatggcgtcgttgatgttaaccgattgctccttctccacgacctcgcgtctcatcgatttgaaccgcctcaacggtgctttcctgccccgctggtgcgtcagccaactcaagctttcccaccactgcgcccggacgtggccgcatgcgctcctcttataccactgtgcccggacgtggccacattctctccattcgctcctcttgtatagactaaaccttttcatccaattgcttacgtattttcagatatccaactcttaagattttacttttctgttcagctgatgaggcgatggtatttgatcaaacggctgtggaactaagtatcatgcaggagatcagagtcgaaacttcaagaatggagaaactaatcagtcctggtttagcagtaatcctttttggggacagagagttctctgaagaatataaagaaatttaaactctagcatctttgctccaaaaacaaactctatagagtttaaatttctttcttcttttttacaaaagagggattatagtattatacaccataaaccccgtaaaattaaaagaaggtattcagttaccaaaatcggatttagtagcatttagtttttttgaattttaaatgtacaccataaaccccgtaaaattagtcaaaacaattaatgtgatttatgataattgtaattaaataaaaaagatattactcgattagtaattactgattaactgaatcattgatctcattaaacaattaaagaaagattactcgattagttagcatttagttttaatttttttaatatactaaaaataccaatcggaaattcagttaccaaaattagatttattaacatttactttttgaattttagatgtacaccataaaccccgtaaaattggtcaaagatttatgatacttgtaattaaggaaagaaccaaatgcaatatatggtttcggtgcaaaaccttaaaactgaccaacttctcaattttttatttaaaaaccctaccaaatttctctctcgtttctctccgatggccaagaacaagactttggttactccatcaacggtgaagaagtcatctgacgtcgcatctacgtcaaagaaactgtcgggagtcgcatctccagcgaagaaaccgtcgggtgtcacatctccggtcaagaagccgttggaagccgtcgcatcaacttcatctgaggaggaggaggaagatgagccttccagcgattcagagtcgggatcggagagtgagtctgacactgaagctgagccgatgactcttgctgctgctgctccttcttcttcgaatgagaagagacaaagtgaaggaaaaccagaggaggaacgagccaagactgaaacagagacggggaagaagccactgttgtttcagagattgtggactgatgaagacgagatcgtctttcttcaaggaatgatcaaatttgctaaggatacaggtaagaatgtttccgaggacatgaatggctttttcgaaaaacttaaagattcgattagctttgaggtgaagactgatcagttcgttaacaaaatccggtctatgaagagaaagtatattgagaacaagaaaactactacagagcatgataagaagtgttacgaattggctgagataatttgggtaagtgatggtgatgctactgctcttgtgaagccaaagaagaagaagcttaaggttgatgaagaaagtgattggttcgagaggtcgtttgttgatggtgcgtttaaagaattgggtccgggggttgatgaagagacatggaagaagaattggagtttggtaccggtgaagaagaggaagaggatagaagaaaaggtgaagtccatgcaagctgatgagctcaaaacgacgtggcagaagattgacgttgtgcatgagatgagatctttgatggctaaatatgtttagtctttatctgtttagagatgcatttgcctatgtttttctttttggttttgtgttggaacctttatggctttctcgtttattcatatgttttatgttaaagatgtttttttggataacaaaaataggtggttttttgtttgcatcttagtcttcttcctttgttactacagacatgaaatcgttagataattatgatatgatataaactaataatgattctaggagataattcctaatggatttaagataagtacatatcttctatatctacctttacacacacgttaacttagaaacaatctactttgttttcttctgtttgcctagtaaacaaatg

SEQ ID NO: 35548 - DNA, 3000 bp, Unknown; identical to SEQ ID NO: 35547
  misc_feature (1)..( 3000): 2750-1469P.txt file - cDNA_ID_3088729; gDNA_ID_1972140; Annot_ID_179259

SEQ ID NO: 35549 - DNA, 3000 bp, Unknown; identical to SEQ ID NO: 9530
  misc_feature (1)..( 3000): 2750-1469P.txt file - cDNA_ID_3088733; gDNA_ID_2926139; Annot_ID_197336

SEQ ID NO: 35550 - DNA, 3000 bp, Unknown
  misc_feature (1)..( 3000): 2750-1469P.txt file - cDNA_ID_3088737; gDNA_ID_2926139; Annot_ID_197335
aaaggccgtcgtacaggtatatatctcttactatcttctttagatttacctttcggttggaaggatgactaaatgattcattccatcattttagttcgaagatttccaagcgaaatgggctttcggaacattggaaagatatcggaagaaattttgcatgttcaatgatgatgtccaggtatgctcacaattttgcaatccagctgccttcctttttagctacttcttgtatgtatctttttcaaaaataataataataaggtttgtgtatgagttatcagggaactgctggtgttgcactggctggactattgggaactgtaagagctcaaggtcggccgatatccgactttgtgaaccaaaagattgttgtggtgggagctggaaggtacttggatattcacttgaaatccttttcttctgtatttatatatttacattaactttcttctcatcttctcattgtatatttcttttattactttcagtgctgggcttggtgtaactaagatggcagtacaggcagttgccagaatggcaggtatcagcgagagtgaagcaacaaaaaacttttacctgatagataaagatgtaagtttttgttttttcactacttgacttcagctgaatcggtttgtcttgcttgataataacaattaagcttgcgtagttccacggggcagttgactttgaaactgtcatattattgtaatgtttagtgcttgcttttggatgttggtttaatcaatccagtaagagcttacctagaaaaagtcagaaaacgtttttaaagttatccaaaagcctttctgttcttgcattggtcaacatattgttttctcatctgtttgcctcataagatcgtgctccttcgaatatttaatgaaaacgacttgatttgtacttcagggtcttgtcaccacggagaggacaaaacttgacccaggagctgtactttttgccaaaaatccagctgagatacgcgagggagcaagtatcgttgaagtggtaagcctaagccttattattgcgttcttacttgccttggccaatattaaactttgacttaatgtgctttctctactacatcctaaagcaacacaggataaccatatttttttactgtccccaaaagttagacataatcatatgataatatttctgtctaaatataatatgtcttcaggtgaagaaagtgaggccacatgttcttcttggtttatctggagttggtggtatctttaatgaagaagtatgtgactttcttagacaacaaatagtttcaagaagtatgaattttaactgttttacttatatcgttaactggtttcaatcatcaaaggttctcaaggcgatgcgagaatctgactcatgcaagcctgccatttttgccatgtcgaatcccactttgaatggtttgtgtgtttttagcttagcaaagtaatgttgttccatctttgaaaaatctgccctgaacatcttttcgtgtgacagccgagtgcactgctgctgatgctttcaaacacgccggaggaaacattgtctttgcaagtggaagtccatttgagaacgttgaacttggtatgttatggtgggattcattgatggtctttgtatctaatttgctataatctaagaataatcacattttcttgtcccactcgcagagaatggtaaagtaggacatgtgaatcaggctaacaacatgtatttattcccggggttcgttttctttcttgaaaactgttgaactgtattgcatttcaatccatagatatagttcactgtgttgcatttcaatccatagatatagttatcagaattaatttggtcattatcgtttccaggatcgggctagggactcttctctctggtgcacgtatcgtaactgatggaatgctacaagcagcttctgaatggtaataatgattgcgttttgttctcttcaaattttaaaaatgagcttatgacaatgctgacgattaacatattcaaacatacacagccttgcgtcctacatgaccgatgaagaagtccaaaaaggcatcctttacccttcaatcaacaagtaattcctctaaatccctctcattcttatccgttgattatattttagtatattaaaactgttatctgaagcaattggtttctgaaaaaattgcagcatccgacacataacagctgaagtcggggcagctgttctacgagctgcggtgactgatgacattgcagaaggacatggtgatgttggtcccaaagatctcagccacatgtctaaggtatgaatcaagtaactgagagatatatttgtatcagaacatgtataaggtaatttagaaaatggaatctaattgcttcatttaatgccaccaacaggaggatacagtgaattacattacacgcaacatgtggttccctgtttacagccctctcgttcacgagaaatagacaacaactctatataactcttctcaggtttcatagaaagccaaaagacaaaaaatcttcgcttcatcttttatttgtgatcaacattctttttttcttcaaaatgtgatatgttttaagaaaaacaatgccaaaaagagggcttaagaacaagaacagggttagttctaggtcaacctgtacttttcctttttttttttggacatttttccaacttcttacgattatttctgatgataatgattacaactttatatactgttttggcaataataagccaataatgatatctttcttctacattttcctgctttaccatttttgttctgataccaaaaggtttaaatggtttcgagattcaaccaactttgaagagttgttaatgcagttgcagaagcatgttaaccgaaaatcattccaaaccggagaatatcaactcgaaccagaataccaaaccggaaattccaacagtgatcgtgctatgtttaagttaaaatttaaattaagcaaacaccggagagtgattggatcggggaatttgggaaaagtatg

SEQ ID NO: 35551 - DNA, 3000 bp, Unknown; identical to SEQ ID NO: 9529
  misc_feature (1)..( 3000): 2750-1469P.txt file - cDNA_ID_3088740; gDNA_ID_2926139; Annot_ID_197334

SEQ ID NO: 35552 - DNA, 3003 bp, Unknown
  misc_feature (1)..( 3003): 2750-1469P.txt file - cDNA_ID_3088744; gDNA_ID_2926139; Annot_ID_197332
atcagaattatagcattctttcttccacatttctacaaatttctgttcgcttcttaccttatatattactttctctgccagtaaattcaaggaatctcatattttttgtacttctttcttgtagttgaatgtataccgggggttcaccccacctaatgctccaacctatggaaaggtttatggagggcaattagttggacaggtatgaaatttactcatgtaaggctacgtcatgtatttagtaaccctgctgatcatccatttgcatatgtagcttgttatgttctatttatatcaggcaatggaaatatatagtaatcactgtgacacaactgtctatgcttcgcaggcacttgccgcagcatcaaaaactgttgaaactatgaagatagtccataattttcattgctatttccttcttgttggagatataaatagtaaggggtagttttaatgtgcttttgcaagtaagcaagcaattgcttttcctcctaccttaaaaccatgcctgctgttttccccggatttctctaaagctcacacatctgttacactttgtaaattatcatagtttgctactcttgcagttcccatcatatatgatgttaaccgcttacgtgacggcaacaactttgccaccagaagtgtagatgctagacagaaaggaaaaactatattcaccttgttcgcgtcatttcaggtttcatgttatattcctgaaatatttcattatgaatctctgtgtttctcttactatgtcataatcagcgaatagcttttcacactttaacacaacagttaaaaaccttgtagcttctgtttttctttggttttacagaaaaagcaacaaggttttattcaccaggagtcgaccatgcctcatacaccagctcctgaaacggtaaatcatttctcctactttcaggcttataaaatgaattgcgatgattgtcagtttgatcccaacctactgcagcttctaccaagggaggagatgcttgaacggcttgttactgagcctctgctacctaggtaagtggaagtttgccagacctattattccaagagctcatcagagtcatacacttctcaattattccttcatttcagggattaccgaaaccaagttgcaactgaaattagtgttccattccctatagatattcgattttgtgagccaaatcgttccactaaacagaataagtctcctccaaggttatcctagttgtctaactcatgaattaatcaattttgttgtttacgtggttgctgataagaactaaccatttctttcctataatcatcttgcagactaaaatattggtttagagcaaagggaaaactttctgatgatgatcaagctttgcacaggtgagcaactctacttcagtggtattaaatagaaagccgcctaaaaacttggtacttattcatatctagacaatttgaattattgtagcgttcacctttagcattccaaggaattcacctatcagcgatatttaagtatcaccggttgatatagttgaaatgtaatccagattgtcttaacattggcaactagagcgtttgtttggacatgtatgatatatctcttgcagtctatctgattgtcatgcgtcgcccgccattgttttgcagatgtgtggttgcatttgcttccgatttgatattcgccactatcagtttaaaccctcaccggagagagggcatgagtgtagctgctcttagcctggaccactcgtaagctttttcttttgtcttagcgaagtgtgagtttgtatcattctccctacataagtacaaacgacttaattcatatatatacacgcaggcgcacacataattacatacctgctctatcgtctattatcttgattttaccatcttcgaaaacaatgcctcgagtaaaagtttcttacttttcttatgtccctttgcaggatgtggttccaccgacctgtaagagcagatgattggttgttgtttgtggtaagaaaagctcatgtttttcttcttctttttttctgaagagtaggagaagttttcttaagaaggaaaagttattactagtagaaaaccaaatgttttgtttaggtcaactgaaactcaaattgtctaaaatacttcgcgcaactttgagttgttttggagaacactagcaactatagattagaacaacttgcttgtttagctgatattcgttgaagtgtatagatcaaccacgtagggatatttatctttgtgtttacattgacatggtaaaagaagtaagccacaacatttttagtgttattgttattgttaaagatgtgactgaatccttaagaaatgaaaactctgaacaagaaaaatatactaacaacatttcccttgtgcagatagtgagtccaactgcgaccgaaagccgcggttttgcaactggcaaaatgttcaacagaaagggagaggtacgttgttgcatcgaagaagaatgaagaatctaatgtggtttgcaaaaatcgagctcttattcttttcaaacgttaatatatagtttgataatttgtgtgcagctggtggtatcattgacgcaagaagctgtgttaagagaagctgtgactattaagccatccttcggggccaagctatgaagccataggattttgatagtgagagaattgctgcatctgttactcctcacggtcacattccaaagagtcgtcacttatactacatttgcatatgtttttcgatccacaattattattttcccctctaaaagggtctacacatatgtttgtttgtaaccacgataatgtttcaacagcaatgaaaaagcaaacagtggttcattttacaggttaacgacgtcgttttggatacaccctcttttaacgttattatcattttatcacacagtcccagtcttcagagttaaagacgctcctcaattttgaaaaaaccctccatagtatctcttctacagaaccttgagttttcggagaacctcgaatctcaatg

SEQ ID NO: 35553 - DNA, 3003 bp, Unknown; identical to SEQ ID NO: 35552
  misc_feature (1)..( 3003): 2750-1469P.txt file - cDNA_ID_3088744; gDNA_ID_1972140; Annot_ID_179250

SEQ ID NO: 35554 - DNA, 3003 bp, Unknown; identical to SEQ ID NO: 31695
  misc_feature (1)..( 3003): 2750-1469P.txt file - cDNA_ID_3088764; gDNA_ID_2926139; Annot_ID_197326

SEQ ID NO: 35555 - DNA, 3000 bp, Unknown
  misc_feature (1)..( 3000): 2750-1469P.txt file - cDNA_ID_3088764; gDNA_ID_1621157; Annot_ID_173552
ttgtctcctctaaacagcccaggaagaagatgggaaaagagctcaactgctcacaagaagtctgcttcagcggatttcataaatcttgtgaacatcaagaaagaaactcatgcgagccaaccagaggaaaatactgatattcaggtctgcaatctaagcaaagaacctgatgattctatccaaccaatcgcaagtgaacctaatgagaaaagtgttgacattgaggatgaaactgctaacgaagataacatgttttctgcaggtaataatatttctgtctcatagtaaggctctctgttttgagtaacaataatttattttataacctttcttccaggttctgcagatgatgtgatgattcccaatgagctagatgaagttccagaggaagcaagctctacattgattggtgacttatcaaaagttgaagctcaggatgaacagagagatagtataaactcgaaacaggcaagtcattttgattgacccctagaacattaccttttttgtatggactttaaaatgaggaaatggtggaagacttaaattggttttgctgcttctttttttctacagacctctcttgaagagagccaaccaccactgtcttcctctgtggcctcaccatcccactgtttagctcaaactgaggagtgcaaatcagctattactgattttccggagtggtcaagcccaatatcagttcttgagccactcttcgtcgaagatgatataagcccagcaaaaatgcgatctcagtctggtatgtagaaaaagatcccaacatctactactagacttggattctagtacttagttcttcaatattgactcatttttacaactcaggtgaagcagaggtgcaaccgtggtgtatccacttcgatgaaaaagatcctgcacctacataccgagaaaattctgtgacaagtgacaaagaattggtgtttaagtatgtaaaagctgtcttggacgcagtagactcagacatcgaagagctctatctaaaggcgcaattctctgaccagcttcttgaaccagcacttatcagcaatataccattctgtccaaaccagctttgtcctgaccatgagctcctctttgactgcatcaatgaagctctcatggagttatgctgttgcccaccttgggcttcgtttgttacaccaagaaccagagtcttctctaccgtcaaaagcatcatccatgaggttcaagaagcggtttactggcatctcttgccattgccactccctcacgccttggatcagatagttagaaaagatatggctagagctggaaactggttagacatcagatgtgacattgactgcattggcttcgaaactagtgaactgattctcaacgagttactcgaagagctcatcctcaacaatactgagcactctctggtttcacctgagttgaagacggatgggagcatccttattctagaaaggtcttgaaagctgaaaactcttttcttaaagacaaagccattgttgatacactctgaacatagtctcactgtcaccattgctaattttttttagcacagaaccatgtagatagtttgtattactcagtcagacaaaaacctcacggagctcctgtctgatcagaaactactgagagggagaaggaggaaatcagatcctttcaaagaccagaccagaaactgttagtggtggggtcatcagagaatcactttcaaagacagtcttcttcctataggctattatatagtatatgatttattattttattttagagtgtttgtgtgaagatggagggatgtgatagtgtttgtttgaaatcggtttgtgtaacattttcagagtttgacataacaatgtattatggattaggagtatgacaaattcaaagtttttgttgttcatgaaaacaaaaagatataaattgggtatgttgattactagacatgaaactagaaagttttgttaataaaacctaggaagagtgttgtaaattgtagtctaacaatggtgggttgataacaggacaggataaatatcaatggagttttttttaagtaataggaaagaagcagtcataacacaaatctgtagagatttttactcaatggagaaatgaattttatggatcatgatatatgtatataaagttttggataatgtttttgtagttgttgcactttatgccctacttagtgaataacattttctttgatgggatatggttatgtggacacaatggacagtacacctgataaagatggattttaagaaattaacaaaactgaatgaattatatacaaactgataaataataaagggtttattctttttaatataaatatatttattttaatagttagtaaaattatttcattttgtttttgtaaaaattatgtataacacttatatataaaagatgtataatgcaaacaatcaacatgtcacttatatgttcttgttttagtattgatcctttggttacattattatgtgatatacaagcttattctatatgccattataaatgcttcttggggggatgcttgtaccatttagtgagtcaatctccgatctaatataacgaactgaacgataaaaataattattatcctttaaattatagtcgttgctatttaatatttcttaccttcattttcttattatctcacgttctttgatttgaataataaaaagcgaatgaaagtaatagataatattaaataataacggtaatttaaatacaaaaccaattttttattttatttttattttaacatgattctaaatactgatgaaaaaaacatgaatctaaaatactttcaactataaaatcaagagaatcaactctctctcaagtgctcacaagatcaacacaattaccaacctgcaaacaacacaaacacagtagcattctcaagctctggaacattaggcaaaggtctctctgctacacgagggtgtcgaccgaccctttagcaaaagagataagggctttgaaatg

SEQ ID NO: 35556 - DNA, 3000 bp, Unknown; identical to SEQ ID NO: 34352
  misc_feature (1)..( 3000): 2750-1469P.txt file - cDNA_ID_3088768; gDNA_ID_2926140; Annot_ID_197443

SEQ ID NO: 35557 - DNA, 3003 bp, Unknown
  misc_feature (1)..( 3003): 2750-1469P.txt file - cDNA_ID_3088783; gDNA_ID_2926140; Annot_ID_197433
aaaaccaaggtcctgctgctcctgatgctgaaatgaaacagatggtacaaccgctgctacaaggacaagcatctagctccatggaatttactaagtagttatctgaattgcaccataacctggactgcagctacaatgacctgaatgctaaagtggaggcattgaataccaaagtcagatacttggaagaacaatcagcatatacctctgcacctaaagttacaggacttcctgggaagtcaatacagaatccaaaggagtacgcaactgctcacgccatcactatctactatgatcgagagctgccaagtcaacctgtccctgacttaatccctagggacagtgatgttcaagaaggggagccttctactcagactgaggtctctgttgttgaattcaacaattctgatggttttggcgatctcattcaatccacctcggaagagaaagcaaccataattgagaggatggtaaaacgtttcaaacctactccattaccctcacgtgctcttccatggaaattgaggaaagcatggatggagagatacaagtctgttgtagcaaaacagctagacgagattgaagcagtgatgccactgatggaagttctcaacttgattcctgatcctcacaaagatgtgagaaatctaatactggaaaggatcaagatgtatcacgattcaaatgatgaatgtgatgctactccatctcgtgctactgaaaagaggattgttcaagaaaagttagaagatcctggatcttttactctaccatgttccattggtgaattagctttcagggattgcatgtgcgatctcggagcctatgtcagcttaatgcgactctttgtggcaagaaggttggaatttattcagtacagaccttgtgacctgactttgatccttgcggataggtcttcacgaaaacccttcggcatgttgaaagatctaccagtcatgattaatggagtggaagtgcctacagacttcgtggtgctggatatggaagaagagcataaggatcccctaatctcgtactttacgcgactgcgctactgatcgcagcgaaagaagagaggtcgagtatcctcagagcggtgctggccgccacagagctgatgaggtcgagtacccacctgctcgagctgatacagaacagggcggctcgtctatggcctgggagcaatcacaggcagccattgacgaccaactgataacactagattttaacctttttaagcccttgcttttcatgcatttagtttagtttcatgtcttttttcatgcattcttagtctcttttccttcttttgcacattttgcattgcattgcctagcatacttgcatttggagtgttttgcaggtgaattaggtacttttggactcaacttggaggtttctaagacaagggatggacaaactcgagttcgggggacctaaggaaggatttgaagtttactcggcctatgtactcggctggaggccgagtggagcacacgtgaaaaacaaggagcctactcgaccaaggcactcggctaaaggccgagtggtgcacttaaggaagaagagaagccacttgaccaagccactcggccaagagccgagctatgtgaccaagaccaagccactcggcttttctactcggcctagggccgagcgctcctgcgccgactttcctattttgtcttattcccaattagggcaacctaggattgtgtataaatagatctcttatgtttttacccaaaatatctttgttttgtcttctggatattagggttcttagatttcttttgcattttctggttgttgtgttgagaatttggatttcatttcttctggaaacttgtttatctcattgagatctatcatttgttaagtttataatgatttctgggttttatgaattttctgggttttgttctatgatgttcttcattgttcttgagtagtcttcttcagagttcttgaggatgggttaggtttaggtggattcctcttttctttagctagctaagtttataaatgcatgattcccttctgttttaggagttcttaatgctattttctttctgatcaattgaaaattgatttcagactttctccacctaataagtgtttgatgaaatgtctgaaccaactaatttcagagatttgtagattctagcccaagacattggatgtttagactgcttattgactttaatagattggtgtttaaagcctgctttattatgtttcatcaatgaaaattgagattaggaagttctaaagttatgagaatcattgtcacgaaagtggattgatttggttttgaatctattgtctagggatagcttgattgagtttgttagttagctaatggattgaggagtccactaagaccaattaccccattcttaagagctctgtttcgtttatttgtgcaaaactcatatttttagtactctgttcgtctcgtgcaaaattggtgtttttagtattgtactcgacctgtttactcgtttgctcgaccgagtgctttacctagtgcttggtttactttccgcttttgctgtttgagttctttattttctgcttagtgtagttttgtttctgaatttgatttgcatgttaacctgttgcttaggtttagtagaaacacaccaaacctattcacacttggcttgacttagtattctttgatcgtatcctgattgatagcaattacacccatttggattgacaccttacatgttgcaatgacataagatgcatttagggaattgacacaccgaaaacccttgtatcaatttggcgccgttgccatttgggtgtttttcttgttacatttagaatttctgagttattaagatcaagttctatttctttctttctggttactcacttgtttcttcatttgcttgtttttgttttgcaggtactcttactctactagcacgtcgagtataagcgtcgagtatcatcaaaactggattactcatttcaaatctggtcgtaatg

SEQ ID NO: 35558 - DNA, 3003 bp, Unknown
  misc_feature (1)..( 3003): 2750-1469P.txt file - cDNA_ID_3088787; gDNA_ID_2926140; Annot_ID_197432
cactgattatattttttgatcatttcagcatttagaaatgatggcaatgttgatgtggcataagaacggtgaacaactgctagcaaacagatgtattgtattggacttctccctgaggcatgaactttccaagcgggtggtcgacttcaggaagtgtattaataagaacgggttcaaatggggcaaatttatgtccgacattgctaatggagtacacataaaccgtgaacccactatgaagtgggtgaaggatgtaaagaacagcgaataactgtgtatgacgctttaatatcacacatgtgggagtcagctgtgaagtcgagaatgactcctatttacgaaatgatgtcgtacttagttagagcgatgtgccagtatgtcttgacttatgcgtactcacttaaaacttttgagtatgagcgttgtttaaccgttgctcaaaacccaactacaggagattgcgggccttacacgatgaagttcttggagttgctcgcgtttggaaaccctgtttcagacttgttcaccattcgagaagcagacatggtcttctaccgttagaaatactcggttgacatctacgagcacggaaagcgcgaggcgggttctgtgtattttgctataatcatccaagaacaataatctgaatctttgcaactaattattttgaacaaacctatcgaagatatttgattgcaactacatttaagtttggagattgtaagaagttaatttagttttcgttatcactctcttctcaaacaaaatgtaatgtgtatgtacacgttaaaacatatgtcccccatatatatctatatttctcgtacactgcaaatttactttctaacataactcaggtgataaattgatttgacagctaacgcttaccaacacatgtatgacattcaatacaactgtaattgccccaactaaatccacaatagtggttattaaagtgaagaacttactgactcttcccgacgattgactctcgaagataactaagaacatggctgactaatgttggtctgaccttggtccattgatacgatcaagcactcgtggaagagacattgtctacttataagtgtgcattttacatgttttgagcatccatttgttatcattattgcatcatatcaccactgttttataccatttctcatcatttgtcatcactttgcatgtttaggatagttttgcatgcatattgtatatttgtgttgatttcaggtgatttggagctgttaacgagctaattggaagaagcggacctgatcatgtcaaaccactcgacccccaggtcgagcagatgctccacgacatcaaaggaccacttgaccccctggtcgagtagaagacttcaccactcgactacctggccgagtaccaccatgagagtcactcgatcacttcactcgatcacaccactctaccatgaagtcgagtatcaccatcaccatcactcgattacatactcgattgccagctaatcactcgacctctcactcgaccacctgggtcgagtactgttcttaatccgtcccaatactgcgtcgttttgagtattagggtttcagaatatctcgctataagtagcatgtactttacattttcgtagggctaagttttattttccgcagacactgtgttcttgacattttgtaatctggatttctcttaatcaattcagtattcagcattttgttcttgatttcgtttactgttgttcatcatgttatcaccttgctattactctgttgttatcatgttttcattctattcaacgtgtatgttctctgcaatgatgtctgagtagtgaataagtttctgaggatgggttagagtagtttagaattctcagtatgctaggtggttgagtttgattgatatatcccttctggattagttgttcttaatgcatattgctttctgatcaactggaattggagcccagacatttctgcgcccaaaaggtgttcgatgaaatgtttgaaccactaattctagagattcgtggctctgtaccaaggtattggttgcagggagcgttttggctttaacttgttgattcgtaagcctgttaggttagctctcgtcaatggtgattaagtctgggactaagttaacttgagagtctctgttgcggtgacacttagatttggtttttgttgtctagggataatttattgagcatgtcaatcacctgtaaactgaggaaacaaacctactcaattaccccatcctcgtgaattctttatgtgattgatttctttgttacgctactgttgtttactgcatcttgtcatctgttgcttagtttctacaattctttcctgttactcgacctgatactcgaccacccagttgtctagcaacagactgtgcagtcgagtatctttgtttcggttactgcatgttactcgaccagtcactcgaccaccccagtgctctgcaacgagttgtgttggtcgagtgttttactgtatccgcttgattttctgttttctgcatgttcacttaggactgctagaacacaccaaaacctgttattgcttggcttgacttagtgacttctgatcacatcttgattgttagcatcacatccatttggattgacaacctaaaatactacaatgacatgattgatgttttaggataattgagtaaaaacctattatcaatttggcgctgttgccgattaggtgtttgtttgttacatttaagatttcaaacttgcttagatcaagttctttttcaattttcagttcagttactgactgtgtatttttgttgttgtctttttgatccaggtacacctctgctgtatgcaaactcgatcaccagagaaccagaacctctttttcaacaataacatcgaccacatggcttgcgaattcagagaaagaagaaacacagtccaccttttaccccaacaaccactcgaaatggctgacgaacagaatcaacagaatggtcctgccaacattggtgatgtagatg

SEQ ID NO: 35559 - DNA, 3003 bp, Unknown
  misc_feature (1)..( 3003): 2750-1469P.txt file - cDNA_ID_3088791; gDNA_ID_2926140; Annot_ID_197431
atttcaaactaaactgagtgaaataagcgttagggtcaacgaatctagaagggatctaacctaatcttcaccacctgaataacctagagattaacctaatataattcatcctcaaaaaccctaatcactactcaagcaacataatcaagaacacaaacccataaattactcatcaaaatgtagatttaaacaagataaacaactatactgaatgaactaaatgcaaaaacgaaatagattaagagtaattaaggtttcaagattctaaaacacaaagaaaaactatagaataaaagtttggtcctttggacaaaccccaaagtgacctatttatagtaaaatatgaaaaccctaaattcactagaagacaagagacttgaggcggtttagatgaatgatcgatcttgggatcaagcaaagagggtgctgcaaagcctgcgcctttgcctcgatgctacgagtgatcaattggtcgagtagttgcttcttcctctcctcttcttatgctcagctgtctcgttgagtggggaatgaggaggatctgaaggcaccttgaacgatcaacaagtcttttagaatccattgcccttgatcgagtatttggtcgagtagaggatcaagtaaagggtcgagtggttatctactgcttcctctatagatgccttgatagagtgattggtcaagtgaattgctctgctgcttccctcctggtctgataaagtagaggggcgagtgatttccttgtaacctccttttgaacctgaaaacacaccaaaacatccttagctaaatgatgacgaatacattcgtaaactaagtaaaatacagtgttatcagaaaccctaattagggttttttcaatcgagtttttctgtcgatttctttagaattaattagggttagttaatatcaattgattttcgttgtagatctaattagagtttctcgttttcgtttaattttcattgtagatctaattaaggtttcgtgtttccggttgattttcattgtagatctaattagggtttctcgttttcgtttgattttcattgtagatctaattagggtttcgtgttttcggttgattttcgtcgtagatctaattagactttgatttacaaatcgatttactaatgtttttttttattgtaagatgtcttttactcggaacgattattcaaggtttcgatctcaaggtagtgaaggaaacgcctcggcgattcagaataatcgccatatacattaccacagacgccaatcaatctgaaccatcaagcagatggtgcttctcctccacctgtcaatcaatccccccgcggttctacctatcacactactttgctagctgcccgactcaatgacttgacaataaaagagttacttgctaatcctgacgtgtaggtttgcctagattatgaagaaacagagtgtctgaagtacaacaggcgtgcctgaagcagtacagatcataacagagaaagtgggaaagtagcagttgcttttgccagcgtggcatgttgattggagtgaagaaaaggcgtatcagtttagacaaaggagacgaagtcgttagacataggacgtgggcctagttgtcaagataatgatgaggagctacacttggacctactggataaagtgaagcatcctgccttttccgtgaaatgatataagagaagtttcggtctcttattagggttagccactttacttgtgaaaagtggaagagaagaaaagttaagtagaacttgttcttgtgggtttcattggtgagtgaacaaagagagcacacggctgttgctgtgtttgtgaggtgggtagttttagtatctgataggagcaaatcaggttgttgatgttgcgtaacactgtccaaacttatctctgattgatcagtttgaaagttgttctaataaagtgtgtttattggagttgtgttctttgtctagtcaaagtacttagggatcttttacttcagattagaccctaaccggcctccgggaactctcgggtaagccactaggctctgatctcttcttgtctctgttcagttttgtctgtctgatggtgttttgatttgtaggtttgacgatgactcttcagttgcaactactgtccggagcatttttgaaagagatttcaaagaacctcatgcaaattggacacagacatcagaagcagtgatcgatcgatggtttgaaacctttggtgtaagtcaaataagttgtgttttgtttggtacaacaattgatcttgtctatttctaatgtgtcttatctttgttttgtagcaagtgtataactgggactctacaattatataatacatttcattgtattgattttgtaaacacacaaccacctcatcgatagcattcagagagggattccaaaaagagtcaacaaatctccttgtggcactacaatttatataaaatgatattattttaaatatcaaaacatatgaaagataaaaaatatacattaaatttttaagttcaaggcttgttaaaaacatcataaatttgtatttcaccaacactccttacataaccgagtatgcctgtaaaaaaaaagaaattttaacagaagttgaagaaaaaaaattgctctcaccgtttgtcaaagtgagaaatggtttccacagtttgtcttttcaatcaatttcggacaaaaataccctgggaaaatttcttaatggcatcaaccaaaccgtacagcagttggtatcggtttagttgatgcggttcagttttgaaaacgacaaaaaaaaacgaaacaaaaaaaccgaagaagaagaaaaagagaagagagaaacagaaagatttgagagagaattaaaaagctgttcgaaattcagtatccactccttcatatttcgacatcacttcgaattgttgggtagttgaattgaaccactaaactccaaaatccggcgaagagaaagttgtagttttttctggcgaagtaaggaacctccggcgagatagcaactttcgctatg

SEQ ID NO: 35560 - DNA, 3003 bp, Unknown
  misc_feature (1)..( 3003): 2750-1469P.txt file - cDNA_ID_3088850; gDNA_ID_2926140; Annot_ID_197412
gaaatatgtaacatgacatataatcatataaatatatatttacgttgagtttgtcaaaatatattgatcaaactaatatttgttttgaaaatcattaaaactcctatagagttatcataagtaatacgatgacaataatctatgataaaatatcactagataatgatatttataagtctatatgaaaaccatataattttgatcattaagattatggttattcattccaacgagatattgtatttgattgaaaatcatctcctgaagaagatgtttccgagggggagattgaatgatatgcgtggatgtaccctttttccttatcatagtttttatcccacatgatttttctatgacaaggtttttaacgagacattaaagaacacgcaaataatacacttgatgaatattaggaaattctatcaatcatccaaatgaatattatacactaatgatatttagagaaataaataagatggtcaagatgaatcatctaaaagatgatatgtatatttttcataagaaactattccaaatcaaaatcgtatacttactataattctacatatacatcccatctacgagattttatatgtatatgtgaatataatataattaagtagatattatatatcaattgattaatactgaaacatgttgacctgaataaattaatcaaatacacagcaaaacaactatggttaaaaaatacccattatcatcaatgaaggcgtgaacgtgtaacgaaataaaagtcatcgatttcgtttgtggataaccatatcaattatttatttgtactcgtactcaaataaccattaacaaaagcgaatagagacatatatgttctctatcatatcaatttaattagtatttatttgtatctaatgtacagaaacgagttctagtcatcaattaagaaattcactaaatcttaacatcgtaatctaattatgataaacgaacaagttcaagtgaattgtataattttgtttttctatgctttactaattagatttcataaatttaaacaagttaaaaacaaattacaattattcatctatatcaaaatatggatttaactagagtcaaattcagtattaaaaacatagactttgatactattgaaaggaatttgtactgttttataacgatttataaatactaacaacaaattcaattgcaaggaactgtgtaaataaagaattaaatctagatcataggatttgaatatacctggatattatgcagcggaaatatgaatcatgttaattcgagattggtttagcactccaagaattgtgcctctactggtatccacacgcatacaaactggatcaaacccagaatgctagttcctttgagatctaatctcaaaacttagaaaaacaatatttctctttgtttttatgagttgaagataatttatcaaattttcagagaacataaccgtaataacggtaaccgtggtcatgcctacatttaaaacatattaatcatgccaaaatagacataccatcatcagtcgttaaaacaatttgataaattatcttcgactttctttctcttctctctcttaatccttcagagagagaatgtctccgatggttgtttttggtggcaacgacatgtttcttcacttgcgttggctctcatatgcccaacacagttggttacctcaacgacggtgactggttttctcgtccgatttcggtggattcatctccgccgttggtcggctcccgtccggaattgtctggctcacatagtagaggtgtccggctttcgtccagcaccgtcgcgtttccacggtggcatgtggctagctttctcctatgcatcctctttcctttgtttatctgtgtttttacttttgtttgcttttaataatctcacatacatgggttggtaatgacagtgtaagtaatctagctttctactgttatgttccgatctatttcatgttgagacttaattgcagaaatcaaataagagatctgagaatgatgatgaagataagaagtggaatccgtcgcttattaatcattgccaatctgctgatgtatctttaattggagcctctttactatctaccggtgagaaacccttaagaatccatgttagatagtcctatcatcagtgattctgtcaccggaactgaagctccaacggtggaggttgaagtcggtttgcttaagattgctcatctgacacgtggttatgtcgacgtgtgtttcaggattgagtcaaatccagttttcttcttctgtgagcaagatgaaatcttctgatgggcctatttgggcaaaaaaacattttgtaatcttaagggttcaaaaacggctgcatctcaaaagtcataatgcatcacttttataataggttcacacaacctaatgcatataaagtcaatgggccaagcccaatccatgcaacgtgactttctctacaagaataaaccacatattcgtattagtgcacatatgtatattttatatacatatataacattatttatttaagtgctcaaatacaaatataagtatatctatatatcacatatatattatatacttttactttaatttatatatcatatatatataatagaaatcttttaacctaatattagtttaatcaaaattaaacttaattttatatttgatccaatttgcttaggtgtgtgaccatgtaggttcgtataatattaacaatgaattataaactcatagattataagcggtctctagcaaaacattataaccatctaatattatgtgaatgtcaaacctcgacattacaactttaactagagtaaagtacaaacgatttcaagatattcccaacattatttaggtttgatgatgtgtacaatgtcttgagttgtgtgtgtgtggattggtagattccttgatagttttttccctgatagtttttcccctttcctcttggcttatttgttttataggtgtcttctttgtatcgcacatgtacgtgctgatg

SEQ ID NO: 35561 - DNA, 3003 bp, Unknown; identical to SEQ ID NO: 35560
  misc_feature (1)..( 3003): 2750-1469P.txt file - cDNA_ID_3088850; gDNA_ID_1620796; Annot_ID_168477

SEQ ID NO: 35562 - DNA, 3000 bp, Unknown; identical to SEQ ID NO: 5501
  misc_feature (1)..( 3000): 2750-1469P.txt file - cDNA_ID_3088854; gDNA_ID_2926140; Annot_ID_197408

SEQ ID NO: 35563 - DNA, 3000 bp, Unknown; identical to SEQ ID NO: 8315
  misc_feature (1)..( 3000): 2750-1469P.txt file - cDNA_ID_3088959; gDNA_ID_2926142; Annot_ID_197541

SEQ ID NO: 35564 - DNA, 3000 bp, Unknown; identical to SEQ ID NO: 8315
  misc_feature (1)..( 3000): 2750-1469P.txt file - cDNA_ID_3088959; gDNA_ID_1971817; Annot_ID_176032

SEQ ID NO: 35565 - DNA, 3000 bp, Unknown; identical to SEQ ID NO: 8315
  misc_feature (1)..( 3000): 2750-1469P.txt file - cDNA_ID_3088959; gDNA_ID_1971715; Annot_ID_175169

SEQ ID NO: 35566 - DNA, 3000 bp, Unknown; identical to SEQ ID NO: 8554
  misc_feature (1)..( 3000): 2750-1469P.txt file - cDNA_ID_3088971; gDNA_ID_2926142; Annot_ID_197535

SEQ ID NO: 35567 - DNA, 3000 bp, Unknown
  misc_feature (1)..( 3000): 2750-1469P.txt file - cDNA_ID_3088971; gDNA_ID_2926142; Annot_ID_139000
ttatgttctgttaatgactttcgtttagcttcatgtggcatcttgttgtctatcacaaaagccaccatggcctgtgtttgttcaattggtgggtggctgaagttttagttgtgcattattaatggatctataagtaaattatttaatttgatgtttaaaatcgtagttgcaaagccattggttgctgatggaagtgcaaagtcacatgagctttcgctggcttacgatcaacactcccttctgaagctcgagcctcctcttgttcttcaggagtttgttaaccatggtatgagattttagtggttatcattgcctgtactagaacttagataatttgattacctatctaaatgcttggctttcgcaggaggtgttcttttcaaggtttacattgttggggaggctattagagttgtccggcgcttctccctacctgatgtctctagacgagaactccccaaatcagctggtgtattccgcttcccacgggtctcttgtgctgcagcttcagctgatgatgcagatctggacccgagcattgccggtaaaatcctcttcatcatcagtaaaaatcgtctgcatttttcctttgatgaggacctaacaatatcctcattctcgttgcagagcttccaccacgtcctctgttggagagactggcaaaggaactccgtcgtggattggtatgtttcagtcctctctactatatatccaagcaggagtattatatcaaactctactgatctctaatttgttgcagggtctaaggctgttcaatttagacataattagagagcacgggacaagagatcggttttatgtgatcgacatcaactatttcccaggcaagtttgatttccacacattttttgcaatagactatcacaaacatgtggtttaagaacaaaagaacttgcgcagggtacgggaaaatgccagagtatgagcatgtattcactgatttcttactgagtgtggtacaaagccaatgtaagaaacgagctttggcagatcaatactaaactcaacggagagaccattgttcctccccaaagaaaaaaagaagattagtagtctatgcaatttatttctgtacaggacaaagcaccgatttccctcgatgttgttctttagcttcattgtgctgtacaaaagaacaatggaagattgcatttaaaagaaaatccttgggacctttagagatttaaggatagagaattgtctgaatctcactacaatgtcaccatatcaaaaagtgaatagaccttatgtcacacactactcatatgggcatggcttcactttgtgactgcttctatcttttgatttggttggctttgtactattttgaccataaatgtcatttcttttggttttaatctgctcttatcttttgatcatgtccttgttagtttgtttgaaacttggagtttatagtttggatcagttttggatgcactcttttatgagtaatcttacaaaatttacatcacaaattgttgattattgactcttttatataaagtagcttttaaaccttatctagtacaacaatttggttagatcaatgtgaaccttctgaggatagaaaccattttgaaaccttaaaaaataggtttacttgcattgtaaggtttaataaacacaagtaggaaaacgaaacctgagcttcagctttgaattctttcgttctttcacatggttgtctatgacaacaattgaagccttctattttaattcaagcaaactacactttcctgggtttaagacaaagcaattgtagtttctctttttcttcttcaaatcacaaaatcaataatgttatttttttcaaagtattgtgtctagctcttgcttgtcttggagttcacttgaaactctctatgttctgtctttgacatagaagcatatattatatatatatatatatcagagcaagttcctcaacccaaccaaaaaaactaaaacctcaaaagctttttaacaattatcttctttttgtgtgtacttaatcttcttcgcttggaacttgctatggagaagaatacaaatacgaaccatacaagtgatgataataatgataaggttgtcgatatttaagcttcttcttaacaatagtgcgctaatgtttctacaagctagctaactagagttattttgtatttacgtctggcagaatcacactaacgaagagcaggagaagatcatcttaaaccctaattttgaggatggcctaaacaactggactggaagagcgtgcaagattgtcttacacgaatccatggacagtgggaagatcgtaccgctctcgggaaaagttttcgcagcagcaacgcagcgtaaagacacatggaatgggattcaacaagagatttcaggaagattcaggaggaagcgtgtgtatgaagtaacagcggtagttcgaatatttggcaacaatgtcacaagtgcaacagtacaagcgactctctgggtcttaaacgcaaacaaacgtgaacaatacatagtcattgccaagtaggtttcaccttttttcatcttctccattacataagtatcttgatataaattcattatactgatagagtttggtatgtcaatgaatcatattagtgttcaagcaacagataagaactgggtggagttgaagggtaaatttgtaatccatggttcgccatcgagagtaatactataccttgaaggtccacctccacgagctgacattcttctcaacagtttagttgttcaacatgctaaaaggaatcgtccatcgcctcctcctttctacgaggtttagtccctttaccaactaaactaaatgacactagactgatggttcttatggggatactaatctgttttgtttggcagaatcctggtttcggagtcaatatagtcgaaaacagtgaagttttagatgggggaactaaaccatggttcactctagggaactgcaagttgagtgttggacaaggcgctccgcgcactctgcctccaatg

SEQ ID NO: 35568 - DNA, 375 bp, Unknown; identical to SEQ ID NO: 5494
  misc_feature (1)..( 375): 2750-1469P.txt file - cDNA_ID_3088971; gDNA_ID_1620795; Annot_ID_50495

SEQ ID NO: 35569 - DNA, 3000 bp, Unknown; identical to SEQ ID NO: 8554
  misc_feature (1)..( 3000): 2750-1469P.txt file - cDNA_ID_3088971; gDNA_ID_1971817; Annot_ID_176025

SEQ ID NO: 35570 - DNA, 3000 bp, Unknown
  misc_feature (1)..( 3000): 2750-1469P.txt file - cDNA_ID_3088977; gDNA_ID_2926142; Annot_ID_197526
ctttctcttgatcatcaaaccaatgtactaaacacatggacatcagatgatccaagttctatgttaggtggaaaacgttcaaactgaattggtggaatggtttgattctcttgaaagatgattagggaaagatttaaaggaatccataaccttgtttggtttggttgttaaaaagataagagaaagatttttcagcttgaagttatgtgatttaaactgtgtttttcagcttgaagttatgttgttaaatagatgcggttttagaagcttcaagttagggtagggtgttaagttaaagctctttgatattgatcacagagagcaataaatcacatagagcttttacttacacttaacctaccaagcattcaataaaatagaccataactatgataatacttttacccaatgtaaaccactccaaaatacactagttaacatgcatttatcacagttaaaaaacagttagcttttattgcttagaccaattcagagaaattttgagcgcaataactaagagagagcttttaaaagcttcaagttagtattaggtgttagaatttttttttttttttttttttttttgatcaaaggtgttagaattttatttaaccatagagaacaaatactttcttctaagcatttaaaatattaatgtaatgctatctcaactcaaaaatatattgcatttaaacagagaaacaaataaactaatcaaaagcagacaacaaataatcaaaaccggacatcaaataatcaaaagcagacatcaactaatcaaaagcagacatcaaataatcacatatcaaaagcaaaatcaacaaatcaaactcagacaacaactactagatgaattaaagaaggctcagttctaccttcgtgttatcaagaaatagtgcaatctgtagagcgtggtaagggccaggacagacaggatatcagaaatgtacttctgcaaacatagcaaatgtaatttttaagccataccaatataagaattgttaataacttgaaatcaatgatgacataccttgagattagaatcagccattgtttcatgaaacgctttaagagttacatactggggacgcagaaactttagtggtttgggaactgaagtcattgaacttgttaaagctcggatttcctgcctacaaaaccaaaaaaaaattaaaaactccaacaagggtagaacacaaggagcagaaaagaaagaaaaactttataaattatgagcttcaaagacagtaatctgaaaacccgaagctaatcaagtcaagaattacctcatactctcaagagcagccttctgcaagtccggattaggatcctgaaccatctcaacatagagcttaaggttctgctttagttccaaatcctcttaagactacaatcacaacccaatgtaagtcgagtcattagtcctgtgaacatatataaaaaaaaaaactctcctcacagcacaagttagcaactttttaatccggctatactaatgacgaacaaaacattcactttgaacatgcttattgttttgtttttgtatatctccttatgctttgtaaaaccacgtacaatactgtaattgatatgttctcgtaataagaaaagaatacgaacccacttagtcttcataattagattcatcatatcgaatcaaagatgaaaagatttattacaaaaataaaccaaattaaaaccgataaataagtttttttctactatagacacaacattccaattgccatggtgattgaacaaccataggaaaaaacgattatcatcttcatttcttctctctttgttcttttccatcctctctttgttcatttccatcttcatcattctaacttcctctttgtaacgcccgtgaaccggaaaatcagttagagtttgtttttaaatcatccggtttaattgattgggttaattggaaaccttagagtatgcctataaaagaagtaaactcgaaattagggctttggttagccacttttcgttttataaaggagaaaaagagagaaaaggagaacgagcagaatcgttagggtttgggagaaatcagtttcgtcatatcaaatcgtggtaaaaggtaacgaaatttggcagagttattcccaagtcctttatcgttattctccaatttacagaattggatttggattcaaattggttgagttattcgcagtttcgtgagacacgttttctcagacgcgaattaggaccagcggagattgaaactgagatcgtggtctcgtctgttttccgatcggcacgagattttgtggtcagctttgtgacgtctgcagctaggatttcaccggagagattgaatagttaacggttagtttgtatttgagggtttcgtctttgagactgcttgtttctggtttttcctgtccagtttgcttcaaggttgcttttggttgtggactttttgtaggacgtttctggactgtttcagacgcaaggagagtctctcctgggtttaattgctattagaatcaatttgttaaggtgagtgcgtgaccatgagcttatctgagcgatagggttgtgtgatttgttttgtgtgatgatatgtaggtgtggtgaatgtgttttggatgaattgttcaatgactggtttgtttgtattgtattcgtgattatacctttttatttgcttgtgtgtatagctcgtagatgggaggatcgcctcactaagtatttatgataatacttacgcatctcattgtgttgttgatacaggtaaagataaagtgtgatcgtggaatcatggcaaggaagagaggatgatctaggaactcgtttgttttatttttggtgtttttggttattggaacccggttaggattgttagttattcttggttttgttggtcgaattatttatttattcattaaatagtatttttgacttgtggtttaattgttattctattggttggtttaattagatatttatggaaatatttaattattttttttaaaaaaaatg

SEQ ID NO: 35571 - DNA, 3000 bp, Unknown
  misc_feature (1)..( 3000): 2750-1469P.txt file - cDNA_ID_3089007; gDNA_ID_2926142; Annot_ID_197508
ggttgacggcggacgaattagacccattccgcctagggttaaggcgcgtctctgtactcgcggcggtgacgccgccgaccttgtctcggatgaactcgaatcatcgctgtaacagtggttgctcttgttctgagaatcttcgaagtcgctcatctttgggtttcgacggagaagggcgagagagatgaaagaaaaaagcaaaggaggcagatcgggaaggagggaatagcagagaaacgaaggagatagcaaaaaaataaaaacgagatttttctacttctacaaaacaaagcgcagtaaataataaaggaggagagaagttaccttgagagttgtgtgagttgacgtgacgtcaagtggagaggtggaaagttatttaaagccatcatcaccacgattttcgagattgcagaaatctattatccgcgcctgatctggaccgtcagatgcggtgcgctgaagagacgctccagctcggccgtccacatcagcagcgacttatctcgcgtatcttctcgaaagtttttggttaaaggaatctgaaatgaaaacgaaattgttgagtttatcctcaaaaccgactgatctaaccacatttatcctctcgtcaagaatattttcgcaatcttacttgacctatatgtccgctcatcgagttcgcctactcactcaatgggctggggggcaaatgttggagctggattcccctccaggaatccacgtgcgaaaatacaaagtcagcccacaaaagcccaccaagcccactaagtagaggacctacgcagctgacgagcccacatacgcgaatgggtatttgggccaaataagcccagtcacctgatgaagggagataagcgaataatgacctaggaactgacgaggagatactcgcggagaggacctgatatctcggaactgacctgccgaatattcaggaggatctccgcagatcccggacaaggctaccacgtgcgtagacctatataagggagcaaggacgacttagaagagacattcaatctagcttacattcacacccacacttttacacttgtaatctcttttctcattgtaaaagctttgtcaaaatcaatacaaaagtccattcgttcttagcaatataactctcaaggtttcagtgaagatctagccctcctttctcataatcttaaatacaaatctctagtgtggatttcagaacccacaatagtgttttaggattaatggactaaaatcctattatcaatttggcgccgttgccagtttggtgtttgtttgctatatttgagatcattagaaacgttaagatcaagttcatttttgttacacaagttactaacattgtgcttcttctgtctttgtgtttcaggtaccttgcaacctgctttacagacgcatctctatttcgtctgttatagcccagctgctatctgttgcatgcatacacggtcacaaggaaattagaacctcctattcaacgataacatcgaccgtattgctcgccaacttagagaacagacagaaacagacacaatggctgacattgtagatgagcaagagcaacctaccaacattggtgctggtgacttccctcacaaccacaaccggcgtcatggaattgttccacctccagtacagaacaacaactttgagatcaaaagtggtttcattgcaatggttcaggggaacaagtttcatggcctgccaatggaggatccgctagatcatcttgatgagtttgaaatgctatgtggccttactaaaatcaatggagttagtaaagatggtttcaagcttcgcttgtttccattctcacttcgagataaagcccatctttgggaaaagacggtaccccagaattcaatcacgacctgggatgactgcaaaaaggctttcttaacaaaattcttctccaactccagaactgcaagactccggaatgagatattcggatttattcagaagcaaaatgaaagcttctgtgaagcttgagagcgatttaagggttatcaaaccaaatgccctcatcacggatttaagcaagcttctcttctcagcacactctacagaggcgtcttgcctaagataaggatgttgcttgacatcgctttaaatgggaatttcctgaagaaggatgttgaacacgggtgggagctagttgaaaactttactcagtcagatggcaattacaatgaagactatgacagaagcatccacaccagttctgactttgattacaagcaccatagagagatgagagctctcaatgacaaactagacaaaattgtccaaatgtagcagaaacatgttcacttcatctctgaagatgaatcattccaagtacaagagggggagaatgatcagtgtgctgaaatcagctatgttcagaataaaggtggctacaacaagggtacaataattacagacccaaccctaatctgtcatatagaagcaccagtgtcgccaaccctcaggaccaagtctaccctcatcagcagcagcagcagaaccaacccaaaccgtttgttacttacaaccaaagccaagggttcattccaaagcagcagtttcagggaggatatcaacaacaacagccaccacctggtttcacaccacaacaacaacaagcaccttggcctcagaatttagacataatgactatgctccagcaactcattcaaggacaagccacatgagcaatggaaatcgctaagaacctggctgaattaaacaacaaagtcgaccgacaaggtgtcaaactgaacagtaagtttgaatcactaggcactaggatgagatatgtggaaggcatcctcgcttcaccatctgttaacaacaacccatgccagcttccagggaaagcaatccggaatccaaaggagtatgccactgcccatgccatcactatcagaaatgatcgagagctgccaactcgacatgtccctacattaaacactgaggacagtgtgattctagagggggaggatttttatcaagatg

SEQ ID NO: 35572 - DNA, 3000 bp, Unknown
  misc_feature (1)..( 3000): 2750-1469P.txt file - cDNA_ID_3089011; gDNA_ID_2926142; Annot_ID_197507
gttttggttttgattctcaggaaatgaataacagctggagtaacagcagggatgcaaccggtgttcaaataaaaaaaatcaattttttttatgaattactcgatcgcatgatgagagtaaaagctcgagagtgcgatctactggttttgggacaacatctttctcaacaaaaatgtcaaactactcgatcgcaacatggaagtggtgtgatcgagtggtctcttagtggaattgcccaaaccactcaatcgcaaggagaagtgaaaatgcccgacaggacttcaatgacaacccgcctgaagacatgccatccagctgccacgactttctcccaccaaggcaatccacctatcaacaaagggaccacaccgttccacaagtttccgcaaggcactcgtctcatgagccaatggaacacaagaggaggaagagtgctagaactgtacattcatcaattaagggtcgaataatgtcgggtcgtagaacacatgagcgacgtgcttcacaacctgctggggttgcgatcgagcataatgacgaggagatggcggagccacatcaagaaccggtcatgcttgctgagtacactcaagcagatatggatgactacatctccagaacattctactgaggtaacacaccaaaaccctttgtaaataccgcttttgtttttgtttctctgtttatcttgaattctttcacaaattttgattacacaagggactgtgtaatttaagtttggaggagggttcaagacgtatttgacttgttttttgtgaatattatttgagtctgcatatcatctaagtcatagaaaaaaacaaaaaaaattgaaaacaattttgaaaatgaattccacaaaaacagagttatcatttagttgcattacatttaggatcgagtctagagtgtttcatataggattgttgcatatccataggggataatcaggaaatagccttgtaagcatgatgattcactaaaatgagttattagttctctgaggcatttgaatgactttgaagtaaaaccgcaccatgttctatagaaaccactcgatgcatgtcatgacacctttccctgtcaatttgaacttgaatctgacttataattatcatgtttgcatcgtttttgaactcatggatagaatacttattttgattttatttaacttattcaccactcttgttaatccaagttgctgcttctattattggagtagttcccccacctttaaccaacccttctttcaagacatgttattttgtgagagcatgtgaggcctatttttaggattgagcttggtataacgtgttaaggttgagccgacaagagtagtatcccatgtagttccaaagaagagaagagaagccgaagaaaccactcgaacaccacctcatgacattcactcaatcgcactcgatcacatggtcgctagaccattcaatcttgacttcactgcatctcactcgattgcaaggcggagcccctgaagcctagtttgatcaaagagatactcgatcacagggaagctcatttcagcccatcagatgccaatgacacattcgatcgcagggtcatgacgtgaagattcgttatatatctagtttccttatttgtttcatttctcgcttatataaactgcctcttagggttttccctagggcatcctttgttattccgtttttcattcacttttacattttcgcaactttcatagccgcagtgtttctcctgcgactttgtattttcactttcaagtatttgatatttggttttcgtataagtcttacgtcatttatgttatcatgttttcaatcgttgctttgctattgtctttgattatgtctgagtagtgaaccgtatttctgaggatgggatagattagttgtggtttacttggtcgttttaggtggttgagtttagaatactagaatcccttctagattagttgcgcttattgctttcattggttaatgtggaatatgagtccagacgtccagcgctcagaaggcgtttaatgggcgttggatcctattaattccagagatatctgactctaccccaaggtattcgctgtagagagggtattggctttaacatgttgattcgataatgcctgcttagttagagatcgctaatgggaattaggtcagtgtctagctttgtttgaggatttctatcacgggagtgaattaatctgttgttgaacttgttgtctagggatagcttctttcaagttttgtcaaccacctgaatagattaaggagaccacactattcgattaccccatccttaggaatcgtttatccatttgattgccagttatcatttctgctttgttattcacctgcctgttactcccatttctgcttttagtttcatttcatttctgttattgcatactaggactgctagaaccaaccaactctctacttggcttgacatagagctttctaatcatatctcatctgtttgcatcacaccggattggattgacacctaaaatactacaatgacaggatagtcgtaacgcccgtgtcccaagttagggagtaaacaagatctctcatccgccgaattcgaggacgaattcagtgtaaggggggtagacttgtaacgaccgcatctcgcgttcataaagaggcaggtttgttttaggagaaaactagatcatggtcgaggaacggaataaaatactacgtaggaagaacgagaaagtataagctaaaccagctaggtgagctggacaagctgtatgaactagctaggtaagctatgtgagctaaaccagctggaagactagctagctcagctaggtgagctgaccgacagctcgactgagcttggtgagctgatcaagtactgacccagctgggtggtccggtcagctgacactcgagctggtggactgtggtagctcacgggtgaagaggtgtctcggccaaaaggtgtaaggtcgagcgggtaccaacgaacgtttgcatcgcccaaaggatg

SEQ ID NO: 35573 - DNA, 3000 bp, Unknown; identical to SEQ ID NO: 17481
  misc_feature (1)..( 3000): 2750-1469P.txt file - cDNA_ID_3089047; gDNA_ID_2926143; Annot_ID_197587

SEQ ID NO: 35574 - DNA, 3003 bp, Unknown; identical to SEQ ID NO: 17480
  misc_feature (1)..( 3003): 2750-1469P.txt file - cDNA_ID_3089047; gDNA_ID_1621164; Annot_ID_173805

SEQ ID NO: 35575 - DNA, 3000 bp, Unknown
  misc_feature (1)..( 3000): 2750-1469P.txt file - cDNA_ID_3089051; gDNA_ID_2926143; Annot_ID_197585
tctaaccaaagttttttggaatctaatagcaataacaatctcaataaatgtttttgcatttctaaacggttgcattttttatcataacttttcgttaaaatatttaatgtttgttttacagtcgtgtttttttgtcgtatcttttcgttaatatatttatggttatttttggtggacagttatacttattcaactttagtcgtatcttttcgattctgaacggttacgtctttttatcgtaacttttcattaatattatttacgattacttttgcggttgtgtcttcttgtcgcatatttttgttaaaatattgcatattttgggaaaatttatgtaataattcaaatatttgaatatatttatataataattaaatacataaatactaggcctgggcattcggttcttctgttctatagcctcttaagatctacgagggaaccgaaaaagtttcggtttggttcagatacttagaaagaaagccgagaaattaccgaactctaatagataccggtttggttccggttattttacccaaaataccaaaaagaaaaaaaacgaaataaccaaatattcgattaacaaaattgtaaaatattaaaaaattaacaaaactctattgggttataggtttgttaaaaatgtagtgggcttagatgtagttttgtatagggttgaccaaatattttttggttagattttggatttccatagatattcggtttgttcagttatacataatattcaatggatagtgtgactgaaatccgttcgaggatatttagtattatctagaaccgaaccggattcctttttcggtttggcttggttcggttcttcggttccggtttttatgcctaagccgttctaacttctatggttaattgaagaatgtgaaatggtggttaatattcaagaaattttaggaagccgaagtactaaatttagatactgaagaaaagaagaagaagcataagaagaggcctaaatgcccagagaattaaacaaatgggcctttaacaatatttttaacaatcagatctcaaaaagctaaagccttaatatataaacaaacatcaatctctggccgtcaaaggttacatctatcgccgccgctgagaccgccacttaaggccgtctcctccgcaatctccgtaaccaaaaccaccggcatcgcctggtaagctcgattttgtaatcatttcgatctcatatgatgtcgatctgttaaatcttgcgaaatcgatctttgttttgttctgagatttagggtttcacgaatttgtgttctaggttttctggcttaatcatttctattgttttttgttcttattggttcttatgcttttggtgacacaaagatctcgactttttcttgactctctatgcgaatttgtcaaaagtcaaaactttgtaacagtttactctctttcgtgcttgtgtttatgtatgaacaatagcttcgctattgggattgtttatttcaccacacttgattaattatacatactattgaaaatgttatcaatcttggcgataaaaaccgtcattttcatgtgtcttagctctagtagcaccttttgtttagagatcctgagtttaaagaagcagtagctagcatctttggtatagtaaattgtttcactgacaaattgtatatcatttggttataactagattagtgaaatttaatggatgagattatgtagcattgttttaattttgtatggagagaactggtggtgggcttatttccaaaattttcctttgattaagtcaagaccctttattttgagaagtgagagagaggattgtctgagtattgtcgctttctcaaaatctttccggggctaagcagagaaaagctgatagttaagcttaggaatgtgatcttggtcttttaagaatcttgaaactagtgggtaacttggatccatcgaatttgttttccgtaggtgagtgttctttagcctatttctgagtctgaattatacagtgtagacatgaaaataggtttttatgtgatggactcttttgttttatggtttaatggatatgttgagttttgtttttcccatgagtctcttataaagttggaatttgattcatggaatcttggatccagattacttcgaatatataaatgaaagaacacttagatgtatcaaagggaacttaagcgtgtgtactgtttagtgtctcacaacttggaatttggattagcgctttcatgttttggagtttgatttatattcgtgatgtttggatttggatagtaccttggtccattgaactatgtatcataataatgctttggatatggatatcgttttgatgacttacttgataactgctcatacttaaaaaacatttgttctagaaatctagattctcgtctatgagtgtttatatgttgaattcatgtcgaagtcatagtttagagatctcattgagcatttccccttcggaagagtgaggagtcttgttttggggattctttttagggctagacctgtgaggaccttcattaattgagttcgttttattttgtacccaaatatgttttttcggcttatcccattggcattgaaaaagttattgtttacattaaaatgttatttttttctttcattgagattaccttgctagtcattggattttatcggttttaaacttttaatagctgaacaaaaggggttttattctaatgtttacttaacactagtctggtcataaacaagtataaattttgggtttaagttatacttcttttattggaaatacatatcaaattagggcgtttcatagatagttgatatattttcttcacttgcatgtagttatgttcggtattatcgagaacttactgtgtttgaagttcctcggcaggaaaatcctgtagagtttgagccaatgttgtcggtgtgaacctcaaaagttgtgggtgtttttcccgccgataaagctgctggcaagatgggttggggttgggtagaatg

SEQ ID NO: 35576 - DNA, 3003 bp, Unknown
  misc_feature (1)..( 3003): 2750-1469P.txt file - cDNA_ID_3089051; gDNA_ID_1621164; Annot_ID_173808
tgatctaaccaaagttttttggaatctaatagcaataacaatctcaataaatgtttttgcatttctaaacggttgcattttttatcataacttttcgttaaaatatttaatgtttgttttacagtcgtgtttttttgtcgtatcttttcgttaatatatttatggttatttttggtggacagttatacttattcaactttagtcgtatcttttcgattctgaacggttacgtctttttatcgtaacttttcattaatattatttacgattacttttgcggttgtgtcttcttgtcgcatatttttgttaaaatattgcatattttgggaaaatttatgtaataattcaaatatttgaatatatttatataataattaaatacataaatactaggcctgggcattcggttcttctgttctatagcctcttaagatctacgagggaaccgaaaaagtttcggtttggttcagatacttagaaagaaagccgagaaattaccgaactctaatagataccggtttggttccggttattttacccaaaataccaaaaagaaaaaaaacgaaataaccaaatattcgattaacaaaattgtaaaatattaaaaaattaacaaaactctattgggttataggtttgttaaaaatgtagtgggcttagatgtagttttgtatagggttgaccaaatattttttggttagattttggatttccatagatattcggtttgttcagttatacataatattcaatggatagtgtgactgaaatccgttcgaggatatttagtattatctagaaccgaaccggattcctttttcggtttggcttggttcggttcttcggttccggtttttatgcctaagccgttctaacttctatggttaattgaagaatgtgaaatggtggttaatattcaagaaattttaggaagccgaagtactaaatttagatactgaagaaaagaagaagaagcataagaagaggcctaaatgcccagagaattaaacaaatgggcctttaacaatatttttaacaatcagatctcaaaaagctaaagccttaatatataaacaaacatcaatctctggccgtcaaaggttacatctatcgccgccgctgagaccgccacttaaggccgtctcctccgcaatctccgtaaccaaaaccaccggcatcgcctggtaagctcgattttgtaatcatttcgatctcatatgatgtcgatctgttaaatcttgcgaaatcgatctttgttttgttctgagatttagggtttcacgaatttgtgttctaggttttctggcttaatcatttctattgttttttgttcttattggttcttatgcttttggtgacacaaagatctcgactttttcttgactctctatgcgaatttgtcaaaagtcaaaactttgtaacagtttactctctttcgtgcttgtgtttatgtatgaacaatagcttcgctattgggattgtttatttcaccacacttgattaattatacatactattgaaaatgttatcaatcttggcgataaaaaccgtcattttcatgtgtcttagctctagtagcaccttttgtttagagatcctgagtttaaagaagcagtagctagcatctttggtatagtaaattgtttcactgacaaattgtatatcatttggttataactagattagtgaaatttaatggatgagattatgtagcattgttttaattttgtatggagagaactggtggtgggcttatttccaaaattttcctttgattaagtcaagaccctttattttgagaagtgagagagaggattgtctgagtattgtcgctttctcaaaatctttccggggctaagcagagaaaagctgatagttaagcttaggaatgtgatcttggtcttttaagaatcttgaaactagtgggtaacttggatccatcgaatttgttttccgtaggtgagtgttctttagcctatttctgagtctgaattatacagtgtagacatgaaaataggtttttatgtgatggactcttttgttttatggtttaatggatatgttgagttttgtttttcccatgagtctcttataaagttggaatttgattcatggaatcttggatccagattacttcgaatatataaatgaaagaacacttagatgtatcaaagggaacttaagcgtgtgtactgtttagtgtctcacaacttggaatttggattagcgctttcatgttttggagtttgatttatattcgtgatgtttggatttggatagtaccttggtccattgaactatgtatcataataatgctttggatatggatatcgttttgatgacttacttgataactgctcatacttaaaaaacatttgttctagaaatctagattctcgtctatgagtgtttatatgttgaattcatgtcgaagtcatagtttagagatctcattgagcatttccccttcggaagagtgaggagtcttgttttggggattctttttagggctagacctgtgaggaccttcattaattgagttcgttttattttgtacccaaatatgttttttcggcttatcccattggcattgaaaaagttattgtttacattaaaatgttatttttttctttcattgagattaccttgctagtcattggattttatcggttttaaacttttaatagctgaacaaaaggggttttattctaatgtttacttaacactagtctggtcataaacaagtataaattttgggtttaagttatacttcttttattggaaatacatatcaaattagggcgtttcatagatagttgatatattttcttcacttgcatgtagttatgttcggtattatcgagaacttactgtgtttgaagttcctcggcaggaaaatcctgtagagtttgagccaatgttgtcggtgtgaacctcaaaagttgtgggtgtttttcccgccgataaagctgctggcaagatgggttggggttgggtagaatg

SEQ ID NO: 35577 - DNA, 3003 bp, Unknown; identical to SEQ ID NO: 31724
  misc_feature (1)..( 3003): 2750-1469P.txt file - cDNA_ID_3089077; gDNA_ID_2926143; Annot_ID_197571

SEQ ID NO: 35578 - DNA, 3003 bp, Unknown; identical to SEQ ID NO: 31724
  misc_feature (1)..( 3003): 2750-1469P.txt file - cDNA_ID_3089077; gDNA_ID_1971793; Annot_ID_175600

SEQ ID NO: 35579 - DNA, 3003 bp, Unknown; identical to SEQ ID NO: 21569
  misc_feature (1)..( 3003): 2750-1469P.txt file - cDNA_ID_3089091; gDNA_ID_2926143; Annot_ID_197565

SEQ ID NO: 35580 - DNA, 3003 bp, Unknown; identical to SEQ ID NO: 21569
  misc_feature (1)..( 3003): 2750-1469P.txt file - cDNA_ID_3089091; gDNA_ID_1971781; Annot_ID_175410

SEQ ID NO: 35581 - DNA, 3003 bp, Unknown; identical to SEQ ID NO: 21569
  misc_feature (1)..( 3003): 2750-1469P.txt file - cDNA_ID_3089091; gDNA_ID_1971793; Annot_ID_175593

SEQ ID NO: 35582 - DNA, 3000 bp, Unknown
  misc_feature (1)..( 3000): 2750-1469P.txt file - cDNA_ID_3089104; gDNA_ID_2926144; Annot_ID_197651
attcgaggtaatgctttaattaatggtatatgtgggtaaatttaattttagtataattttttgtttttgtttttttttctttgtttttattttttgttttttttttatcgacaattttattagttaccattttcactagatctgagtaatttgtatagaacgtcatttttcgtttgttttggccaatcatacatcttattacctagacaaatgcttccacttttgtgtgtagacatgtgaaacttctacgtaggttggcaacacccatggttggatgtccgtatttgataatgtataaaaccatcccatgcgcaaaaacttatcagtttctttacaggagtaatcaatgaaacaatgatatcctgaaggatttatattaaccgatttaactgccattggctccaattgagctaacgtctaaacattggcttcgttttccgttaatgggagaatgttccttggatctcgattaatattctcgtgaagtttttcattccgtgatttctaaatataccgtacgatccaagaaaaattagaactaaagaacccaaaaaaagtgttctccaaagtcaataatttatctttacatagacccaagaaaatagaaaaacttccggaactattagtattggtgataatgccaaggtctgaaatgctggtagacactcacaattttttgattaatagttagtataaatttttaaattgaaaaaatgtatgagatttaacgttttgttaatgtctttcaactgtttggcgtattattctgaaagtgcaagaaaaaagattgtgtattttaaagataatagttagtatagttttcatggatttttcttttcgatacaagggtatatatatcatggaattccaaatttattgtttatatatacgttgtagttggattctatgttaaatattgttgataaaaaaaacggaacaaaaaaatgcacactgtaatagggtaaaagttagattattctaattagtttaattagaattaccagaaaacactctattaacataaatcatttaccaaaacaaagaaaaaatgttattttttcttctctttagtttacgaataatgtttttgtagtgaaagtttcttgtaagtactttcaattaattaatatatctatgattcaactactaagtaccaaatctcacatattacagcagcccccttggtttgacgaatgatatcactagcagcctctttggtttgactagcacccggcttgcttttgtcaaaccatgaaactttctttcatttcattattagtctcgtgggtctctcaaccactccattgtcctctttttttggttcgaatctaggactttttgtgtcatacgacgaaggacttgccactaggtcatcaacttcagtcgtcttttaataatcaatatagatgagtttatgtggaaaatgcaaaaagttcttagaaaatggggaattaaaaaaaacttagtgctagcacatgttttgtttttgtattgatatgtgctagcactaagttttttttaattccccattttctaagaactttttgcattttcatctttacaatttcaattcatatttatattcttgcctaacaaaaccaatataagtaaagacatgcactttgcttctttctatgtgttttcttcacttttagacacatgattcaatttttttaatagttaggatgctcagaaaccgttactcgtatatctctccaagactaaataaaattaacgttcttttggagagcagatcctttctaacgcagatcagtatcctctaaaatctctatattttcagtaaccaaatggtttaactactaaatatcaaatattcgtcgtgtgttacatgactaatttttaatataccatacataattttacaagtttatccactcttttccttattttctacaattcttttccttatttttttggacaaaagacaattattttccttcttttttcccaacaattactgttaaaacaaatcacaaaagacaagtatacagtaaaacctccatatattaatactctataaattaatatatttttccgattccaaattgggaccaatgtaaaaagagatacaatcgataaatttaatgataatattttttttgaaaaatgctatgtatacatatagtaccataatattataaaataatataaaaaaatcaaatgaaatataatttttagtaatgtttcttttgcttaaattcatattagcttttgtttaaatttaattctaatatgtttactgtatcaagtattttggtgttgtttactagacatgaaaattattttgtacatgtaaatggttctagaaagatattttatttagtaaaaaaatcttatattttcattgaaaattaaaaaagttatgaaattaagaaactctctctataaattaataaattataacattattaatttatcgataaattaatagctttttaaattaatagaattttgcagtcctaatactattaatttatagaagttttactgtatatgcacaaaaaataataaacatacagtattggtatagccaaaaaaaaaaatggatacataatcttacgtgaatggctagataaaaacgtctaatttcaatagaaaacactgataaataaccctatttacagaagagaaagtttaaatgtatttaaagtgtgaaataaagagattctgaataagaatacgctataattaaagtatttttagactttaaaacctagtagccgaaagaaaacagatgcttttaaaccactttgtacagagtcattcaacaaataacaatgtcttattcaaagtataacattccatatgtaatatactattcacggatacacaacttgaataaaagtatgtcaaataatccacaaaagtaaaagccgccaagctagaaccttggcctataaaaagaatcgttaagacaaacctacattcactcaaattaaaccataaccaaataattctcttaaaagagctaagaaaatg

SEQ ID NO: 35583 - DNA, 3000 bp, Unknown; identical to SEQ ID NO: 35582
  misc_feature (1)..( 3000): 2750-1469P.txt file - cDNA_ID_3089104; gDNA_ID_2926271; Annot_ID_143427

SEQ ID NO: 35584 - DNA, 3000 bp, Unknown; identical to SEQ ID NO: 35582
  misc_feature (1)..( 3000): 2750-1469P.txt file - cDNA_ID_3089104; gDNA_ID_2926144; Annot_ID_139060

SEQ ID NO: 35585 - DNA, 3000 bp, Unknown; identical to SEQ ID NO: 35582
  misc_feature (1)..( 3000): 2750-1469P.txt file - cDNA_ID_3089104; gDNA_ID_2926271; Annot_ID_205135

SEQ ID NO: 35586 - DNA, 3000 bp, Unknown; identical to SEQ ID NO: 35258
  misc_feature (1)..( 3000): 2750-1469P.txt file - cDNA_ID_3089112; gDNA_ID_2926144; Annot_ID_197635

SEQ ID NO: 35587 - DNA, 3003 bp, Unknown; identical to SEQ ID NO: 28508
  misc_feature (1)..( 3003): 2750-1469P.txt file - cDNA_ID_3089152; gDNA_ID_2926144; Annot_ID_197608

SEQ ID NO: 35588 - DNA, 3003 bp, Unknown; identical to SEQ ID NO: 23416
  misc_feature (1)..( 3003): 2750-1469P.txt file - cDNA_ID_3089168; gDNA_ID_2926145; Annot_ID_197705

SEQ ID NO: 35589 - DNA, 3003 bp, Unknown; identical to SEQ ID NO: 23416
  misc_feature (1)..( 3003): 2750-1469P.txt file - cDNA_ID_3089168; gDNA_ID_2926145; Annot_ID_139084

SEQ ID NO: 35590 - DNA, 3000 bp, Unknown; identical to SEQ ID NO: 8052
  misc_feature (1)..( 3000): 2750-1469P.txt file - cDNA_ID_3089189; gDNA_ID_2926145; Annot_ID_197685

SEQ ID NO: 35591 - DNA, 3000 bp, Unknown
  misc_feature (1)..( 3000): 2750-1469P.txt file - cDNA_ID_3089199; gDNA_ID_2926145; Annot_ID_197666
ttcggaaactccaacctcaccctctcacgtacaaacgcatcgtcaatcacattctccggtttcagaatacctccaccaacactccctttattactaacactcatataacgaaggaaaagtcttacaggtcattttatttcagtgcataatcgtacgagcatttgccttttttggttacaatattttcaattacctaataataataataaatattatagtgtacaggtaaaaattgacttgagcatcagagagttctcgaaattaacaaatcaagtggtagaatacaaacgtcgtatttatattcatataatcactaacatctccttaagatttagtttgatcatagcacctataaatatcaaatcaatttcttgaataaattctaaaccaccttgataagtcaaatactctatttgtgtctttaagcatacaaatattagattaagaaaaaaaaaatatttctctattttgtatatatctatttatatatgtgaatttaaaatttaacgattttattgattttataacatctgttaacggctgataaatcacggatttgaatatactaataattaaaagataaagtatttttagagaaatatctttttctaactaaaaagttaaggtattaaacgttcaaaaatgaatacatatgctttttgttattatttaacgatgttcattgattccataatgttcgttaagtcaagggtttaaatataccaacaattcaaaaaagatgtatttcggaccaaatataattcaatgaaatacttttctttaaactaaaaaataaaagtattaaatattcaaataaaatagatgggataatttttgggttttgtcgtgtacaattatagtttaaattatgaatgaagttatattttacacatttgtagaattcgtttatattttattattattactttttttgaacaaggaattggtttattttattgggtgaattaaatttctatgcttagacgaatgcgaaattaggaaagtatgagtgatgattttatatttagttctttctcctcccgacaacaaattctgacatatttatccctactgagcagagatattgttggatacgtaatgattatgcaacatttaattctaacacaagtatgaagataattaggttagtcgataatacgttatttgatatggtatcataggttatattagaagattcttgatagaaaataagaataaataaaactatgcccaatagtagaagacgataaccagatagcagataataaagttaatatagttgtagggcttcaccactcgcaatgaaatgtcgagttattacacgtgtagtgagagtaccgcaaaaattcgtatatggtaataaagtatccgataatcaatctgttaggggttaaaacttcaacacacgcaataaaatgtcgagatattacacagagtaaaacaatatgaaatgtcgagataatgagatagcagataataaagttaatatattcataatagagttaatatattcactactcgcaacacgtgagacgaattctgaaccgcaaaaacttgtgtacggtaacaaattatctgatagcaaaccaattaggagttaaaacttcaaaacacgcaatgaaatgtcaagataacgagatagcatataatagagttaacatagatataggtcctctcgcaatgaaatgtcgatttattacacatagggagagtaaataaaatgtagaattctgaaccgcaatgtcgataataaagtatctgataataaatatgttagaggttaaaacttcaacacgcgcaataaaatgtcgagatattacacagagtaaaacaatatgaaatatcgagataatgagataacaaataataaagttagtatattcataatagagttaatatattcaccactcgcaacacgtgagacgaattctgaaccgcaaaaactcgtgtacggtaataaattatctgataacaaaccagttaggagttaaaatttcaaaacacgcaatgaaatgtcgagataacgagatagcatataatagagttaatatagatataggtcctctcgcaatgaaatgtcgagataatgagataacagataataaagttaatatattcataatagagttaatatattcaccactcgcaacacgtgagacgaattctgaaccacaaaaactcgtgtacggtaacaaattatccgataacaaaccaattagaatgaaagagacgaagaaaaaacatgaggtaaatatagattggaccgaaacgacgcctcgattgaaaactatcaaaataatataaaaatttaattcacccaccaaaatatccaaagcaagatcttctactattcgccttacacaaagagatataagagctacatttagatttctactagacatagggatacacgcgtttttatttttgcaacagtagcgctgaaacttttgggaaattagaatctaaatactgaatccactgagcatacgtgcaattttcctattttattttactatttcatgaactaaaatttctaaaagtttttattcgttcaacttcgaaatatttatactgaaacctcctaaaatcattaatccaaatatcctcttttagaacacataagtaaaacgttcaaatcaaaccggctcaaacgtcccagtccatttactttacttctaaaccaaaccaattcaaaatcactctcatttattttcgttcctaaattaaatagtaaattaaaaagggaaaaatgtcaaaaaaaagcgtcaacttttaaatttgggacgaaaaaagcctgaactttcgaaatgtcatttaaatcttaaagttttgtttaactttataaaaaaatagttaagttttgttgactgggacattttaagcataccgtaaaatttccgtcaacagaaagataacggagttaattttccgttaataatctaaaacgacgtcgtttttcaaaataaaaataaagacgaaaaatgctaccaactagagatg

SEQ ID NO: 35592 - DNA, 3000 bp, Unknown; identical to SEQ ID NO: 35591
  misc_feature (1)..( 3000): 2750-1469P.txt file - cDNA_ID_3089199; gDNA_ID_2926271; Annot_ID_205139

SEQ ID NO: 35593 - DNA, 3000 bp, Unknown; identical to SEQ ID NO: 28520
  misc_feature (1)..( 3000): 2750-1469P.txt file - cDNA_ID_3089242; gDNA_ID_2926146; Annot_ID_197760

SEQ ID NO: 35594 - DNA, 3000 bp, Unknown
  misc_feature (1)..( 3000): 2750-1469P.txt file - cDNA_ID_3089254; gDNA_ID_2926146; Annot_ID_197755
tataagcctttcactggaaacccaaattgagacgtcaacggttaagtactaaatgtcgtcgatcacattttgatttggaacatggcttgtgttgtcattgtctcaatgaactgttttagcgaggcttcaatgtgagcaaatttctcattgacttctacttctacatgcatcttcacgagcttctcttggacgtcgtcaaagcttactttaagttgatcaagtgtgtccttgttattcgtagtcattgtacgaatttttgttctgatacaaaatgaaaaacaaggatatggaaattgataagaacaatagtcttttggtagaaaaattatgtgattatcttcttatttttatacttaaatagggtatacaacatggacgtgaatatggaatcatggattcatacaaaaatggagataggggaaagtggttcctacttctatgaccactagtatttatttagggggtgattgacattggactgttaagactttaaaagcatttgacagtccttacaagattaataatatttttagacttcaagtttcttttgtaaaattcaagattaataatatttttaaatattttttttctcaaaaatccatcaaaactaaaaattatttatgattcgatgatttatttttggtttagaccctgaatggatgctgattttcgattcagtttttggatttagattttagtttctagattttagattttagttttagatttttgttattatatttttgttttaaaaaccccaaaaaattggtttttagtttttgagaaaaataacgttgatggagtaaaaactagattccctaagttttaggaaaactataaaattaaaatcatgaatcaaaaactacaacaaaatagtttttctaaattgtagggaaaccaaaattttataatcttgattggtataaaaataagtttttgaaaaacaaaatctaaaaactcttacaaaatctacaaaacattcaaggccttagtctattgtattctattttggtttcaatggatgcaatgaaaaaagcacactaaatcgctaacagacaaaaccactttatttttagagcggacgataaatcgcatgcggataaaaaaaattctacgtaaaagttatctgtagttagtacaccgcaaactttttttttttttaattcgcactactgcggattatagtttatgaatgataaacaaaagggtgaatgaaatatctatacatggaagaatatataattaaggatctacacatatcatttagttatttaggtggaaattttcttgtaaattaaatatgacataattgcccctatacaaacaaagaatcagtagccttcttccgcgagatatattgtacctataagaaagagacacaaagcatttaagtcttaggtgtgtacctatatatatatatatatatatatatatagctccttatcatttttttgaaaaaaacagtcgataacaaaacttttaccatggttttgaaaacaggaaagaagatgtcgctgataactttggattatcgataattttgaaaatatcatgataatatacgaattagcagggtaaaaaaatgtttacatattacatttgttgatggtgtatgaagaaagtagagtcgataaagtaaatgttatctgataaaaaaggaaaatgactgctaatcaaaaaattaatgtgttgcagggcggtaagtaagcgacgaggaaaagtttttttgacggttcaagatggaaggatgagactgtttttggactaggagggtttgaacagatggtttcacttttgttatgaattagagttagcacctaatataaatgttacgttaactttttgttaacggctaatatttgtttacatatagtgataataccctcataagttttgcatcagagttactaccttatacaaactgatatgttaatacttgggttatcggctaatatcataagttccttgtgattacagatagtttcacttttgttatgaattagagttagcacctaatacaactgttacgttaacattttgttaacggctaatacctgtttacatatagtgataatacccttagaggtattaaaaatttgaattcataagttttgcatcaaagttaccacctaatacaaactggtatgttaatacttggattaccggctaatatcataagtttatggtgatttgagatagtttcacttttgttatgaattagagttagcacctaatacaaatgttacattaacttttatcttttggactgtgttttaataagggaaagaagggatacaactttccatttagaaagagaaatgacgatgacgactggtttccctaaaaatcaataaataaatagcaaaaaagaaaaaagactacatgcaaagaataataataatctgacacaatatattcatacagtataaaaagattttcctaggggtacatacgcaatttccacatgtacaatattagtcaaacagtgatttttttggacacttaaataacaactcttccaagtatagattgtgcaattttcctaaacaaaaagcagtctaaaccgttgatagatttgtccgtcctaaccgcgtaaccatttgaactcttagctttttttaatgttaagttgttgccaataaaccgaccgtaaatgaatcgagatacttgatttgaaaagtcgatccaaaatcaaatcaaacaaagaaaaatggtttaaaaccgaaatttctttaaaaattaaggatattgtagataaacattcaataccgaaccaaaataaaaccatactaaaccatccataatttggataccagtactaagaaaccaaatttttaaaaaccgaataattcaaataaaaaccgaaccgaaatcacatggttttgtaagagatcatttgaaaaaaataaaaaatattcgctcaacaattttgtttctctataatcaatcaccaatcagcaaaattctagggtttcaattatcttctctgcgatttgaatg

SEQ ID NO: 35595 - DNA, 3000 bp, Unknown; identical to SEQ ID NO: 35594
  misc_feature (1)..( 3000): 2750-1469P.txt file - cDNA_ID_3089254; gDNA_ID_1971905; Annot_ID_176969

SEQ ID NO: 35596 - DNA, 3000 bp, Unknown; identical to SEQ ID NO: 28514
  misc_feature (1)..( 3000): 2750-1469P.txt file - cDNA_ID_3089284; gDNA_ID_2926146; Annot_ID_197721

SEQ ID NO: 35597 - DNA, 15 bp, Unknown
  misc_feature (1)..( 15): 2750-1469P.txt file - cDNA_ID_3089288; gDNA_ID_2926146; Annot_ID_197719
tgattttaaaacatg

SEQ ID NO: 35598 - DNA, 3003 bp, Unknown; identical to SEQ ID NO: 21052
  misc_feature (1)..( 3003): 2750-1469P.txt file - cDNA_ID_3089318; gDNA_ID_2926147; Annot_ID_197821

SEQ ID NO: 35599 - DNA, 3003 bp, Unknown; identical to SEQ ID NO: 21052
  misc_feature (1)..( 3003): 2750-1469P.txt file - cDNA_ID_3089318; gDNA_ID_1620633; Annot_ID_162761

SEQ ID NO: 35600 - DNA, 3003 bp, Unknown; identical to SEQ ID NO: 18935
  misc_feature (1)..( 3003): 2750-1469P.txt file - cDNA_ID_3089325; gDNA_ID_2926147; Annot_ID_197818

SEQ ID NO: 35601 - DNA, 3003 bp, Unknown; identical to SEQ ID NO: 18935
  misc_feature (1)..( 3003): 2750-1469P.txt file - cDNA_ID_3089325; gDNA_ID_1620633; Annot_ID_162758

SEQ ID NO: 35602 - DNA, 3000 bp, Unknown; identical to SEQ ID NO: 28522
  misc_feature (1)..( 3000): 2750-1469P.txt file - cDNA_ID_3089333; gDNA_ID_2926147; Annot_ID_197791

SEQ ID NO: 35603 - DNA, 3000 bp, Unknown
  misc_feature (1)..( 3000): 2750-1469P.txt file - cDNA_ID_3089354; gDNA_ID_2926148; Annot_ID_197878
tttcttttgtggagatagagaataatgagtggcacaaggcctttttcttcatttgttcccattagacttgtttctatagcctcatgttttctcgagtctgccttctcaatctctcactgaacttcaacgtctttgttcgggaccaaaacctctaaataactaactcgattaaaccctgttttcgacacggtgaccaagtttgttttctgtgaatatgattgaggttgagaaagatgagtgtaatatgatgatgtgtattattgcaggtagagacgtgaagaaaagggatttaaagtcgtataagtatgtagttagctctgtttttggcatgtggaggtaatggaacagagcatattccaggctttcacaaattggatacctttaagccacttcaaacccgaaaactaatgtgaatggtttctatagttgaagaagaatctgagtaggagatggtaaaggttaactgaaatagtatggactttaaagtctatataaatcatgttgatgctcatttgcacaataatatatcttgagtgtaaatgggatcatgagattggaacgagtgacatggaaaaagagacaacaaagatgttatatgttcttttctttcataggggaaatatccaaactcaaaattgtaatatagcaataaatatgaaatttattattcgagtgaacaacaaatgacaaattcatggatattgttttttttcatctacccaaaatatgtagtttttcttttattatagtttagccaattatttatcattttcattttattaagaaaaatatgaatgaaacgaaaactaaactgtgatccctcttaattcatttcttttaatgtgtaataatttgtttataatagtatttttttataatatttgggaatttgatattgacataaattttagggtcattgttttctaagattataaccaaaacctaaaattccaaactaccagttatattataaaataagcaaattatagttataatcttgtgtctatattggactttgatataatatttaaaagataaaatgaaatgcattactacacaagccccataatgaatatgtcaaggaatatccaaaaacgggtaaggagctttgtgaccattcgactctttctacgattctagttcttaagtaaagctttcacacccattattcacagatttaggataacgtccacttgcccaccgaaagagactcttagacttattgtgacaacttcaaagtattcttcaatccagtagagatttttcagatatttattagagtaaatctgttaattatatagggctcattgtttgtcagtttattgatggatgatacactgaattttttttgcggtgaaacttatgtattggtgttttttttttctttctttctacatcaatctttttcttttaagagtgtaaagctcagcccaaattcccaacagtcaaaaagttaattgttgctttcattggtaatcatattaaagacagttaaagatataacccttatttagttactatttaccaatcatacaagcagataaaataggcaattgaaaataaaagttcaaatattaactaaccacatatttccgatgcagtcaaatatttttcttaaccacatactaatatactatcaatgaaaagaaaatctcattattttttccaaccacaactatttcttttttttttctacctttctcgatatctaaccgtatcatatcacatatgcaaacaacatttcttagagttgactcttttgagctctaaataaagatagattgacaaaaaacaattttttaatttttattgacgcattcaactttaattttctaaatatcaatcaattcttacaacacactaattttttttctagctggttgaccttctctggtatatctgctttctatttttagtttttgaataaaataaaaatctatttttagtatgtgttaagtatatttattaagaaaaaaacaacgttccaagtaagatacaaaacgtttttacaaatctgaatcatgaaaaatgctacttcacttataatttattgttttctcatgttcctccttatgaacaatgttaaaggtaatatcttagtctcgttaagatttaactaataccttattcacaagatcgaaaacattgattatatctataaaacaaatatgcattaaaaatagagctttcatttttttgtattatcaactaaattctatatattttatacttttttattgattgaaaatagggcagggaaaaaaaaaaccaccatgcccgcttggactgtcggcaaacggaaaatgtgggcatgacggacctaagttatgttttagtgaaatggaacgaaaatttaataaagatgtggttaaaactattacccactgcaagtgctgggatgatcgacgcaacaatgtggacaagcatcggtgcacatgttatttaaaacatggttttccttgcaccaatggctaagtttgaagttataagatagttttgtttatggcaaatgttactggaaaatcttcaaaaaacagctccatttatttttcatttgtatgtttactatccaatactttttggttagaaataaaaatacctcatttaattttttttggcctaaaaataaattatctttaaaaagttaattacaaaatagacatttgtcttaagaatttatttattttaaaacatttctgatatgtctttacgaaaacaagtatttctctcatgtgaaaaatcatctctaacctcatttcatttgagtcatcttctcaaatcgagaaagtttaattagtgttgtagtgttgtgtcgttgtgtctatgtatgcatcgcagactgtcgactaaacggtttgggtttacaagtccaattctagagtatagtgttttgtgaaaaacaaaaaattatgttgcgaaggaccttctctgtcgttgctttgagacaccaagaagcgctgcaccaccactgaagctgtttgccaccatccaccattgatg

SEQ ID NO: 35604 - DNA, 3000 bp, Unknown; identical to SEQ ID NO: 3859
  misc_feature (1)..( 3000): 2750-1469P.txt file - cDNA_ID_3089354; gDNA_ID_2926148; Annot_ID_139192

SEQ ID NO: 35605 - DNA, 3000 bp, Unknown; identical to SEQ ID NO: 3859
  misc_feature (1)..( 3000): 2750-1469P.txt file - cDNA_ID_3089354; gDNA_ID_1620670; Annot_ID_48137

SEQ ID NO: 35606 - DNA, 3000 bp, Unknown; identical to SEQ ID NO: 3854
  misc_feature (1)..( 3000): 2750-1469P.txt file - cDNA_ID_3089354; gDNA_ID_1620670; Annot_ID_164074

SEQ ID NO: 35607 - DNA, 3003 bp, Unknown; identical to SEQ ID NO: 19515
  misc_feature (1)..( 3003): 2750-1469P.txt file - cDNA_ID_3089358; gDNA_ID_2926148; Annot_ID_197876

SEQ ID NO: 35608 - DNA, 3003 bp, Unknown; identical to SEQ ID NO: 15603
  misc_feature (1)..( 3003): 2750-1469P.txt file - cDNA_ID_3089358; gDNA_ID_1620670; Annot_ID_164071

SEQ ID NO: 35609 - DNA, 3000 bp, Unknown; identical to SEQ ID NO: 3861
  misc_feature (1)..( 3000): 2750-1469P.txt file - cDNA_ID_3089366; gDNA_ID_2926148; Annot_ID_197872

SEQ ID NO: 35610 - DNA, 3000 bp, Unknown; identical to SEQ ID NO: 3861
  misc_feature (1)..( 3000): 2750-1469P.txt file - cDNA_ID_3089366; gDNA_ID_1620729; Annot_ID_166051

SEQ ID NO: 35611 - DNA, 3000 bp, Unknown; identical to SEQ ID NO: 3861
  misc_feature (1)..( 3000): 2750-1469P.txt file - cDNA_ID_3089366; gDNA_ID_1620670; Annot_ID_164065

SEQ ID NO: 35612 - DNA, 3003 bp, Unknown; identical to SEQ ID NO: 18927
  misc_feature (1)..( 3003): 2750-1469P.txt file - cDNA_ID_3089381; gDNA_ID_2926148; Annot_ID_197846

SEQ ID NO: 35613 - DNA, 3003 bp, Unknown; identical to SEQ ID NO: 18927
  misc_feature (1)..( 3003): 2750-1469P.txt file - cDNA_ID_3089381; gDNA_ID_1620633; Annot_ID_162775

SEQ ID NO: 35614 - DNA, 3003 bp, Unknown; identical to SEQ ID NO: 19385
  misc_feature (1)..( 3003): 2750-1469P.txt file - cDNA_ID_3089400; gDNA_ID_2926149; Annot_ID_197920

SEQ ID NO: 35615 - DNA, 3003 bp, Unknown; identical to SEQ ID NO: 19385
  misc_feature (1)..( 3003): 2750-1469P.txt file - cDNA_ID_3089400; gDNA_ID_1620659; Annot_ID_163757

SEQ ID NO: 35616 - DNA, 3000 bp, Unknown; identical to SEQ ID NO: 3723
  misc_feature (1)..( 3000): 2750-1469P.txt file - cDNA_ID_3089404; gDNA_ID_2926149; Annot_ID_197916

SEQ ID NO: 35617 - DNA, 3000 bp, Unknown; identical to SEQ ID NO: 3723
  misc_feature (1)..( 3000): 2750-1469P.txt file - cDNA_ID_3089404; gDNA_ID_1620659; Annot_ID_163751

SEQ ID NO: 35618 - DNA, 3000 bp, Unknown
  misc_feature (1)..( 3000): 2750-1469P.txt file - cDNA_ID_3089431; gDNA_ID_2926150; Annot_ID_198033
ctgatcacttgtttaaaattaaacagttgcatttagattatacgatactcgtgagactggattcattgaaccggaggaggtacgtatgtaaactttgtctcaaaaaaaagaaaaagtcatgattaattatatttgacggttttcctcgacttggagaaatctataggtgaaagagatgataatagacgttctagaggaatcagaacttatgctatccgagagtatcattgattctatcgtgtctaaggtgtgtataacgcttaagtttatgagcttgatttaacattatagtgattttacttactatttttgtttacttatatttggcaaagacatttgaagaggccgattggaaaaaagatgggataatagatttggaagaatgggagaattttgttgccacctatcctttgacactaaagaacatgactatccctttcttgaagtaattcgtttgtttgtttttcctaaccattttcttaatattcgctgataaattgcatgttttagatacatctttcgttttacaaaaaaagtaatatatatacatctttcaaaaacagcttttatatatgtgtgtttatgcatatattactattatcttcttttattttatttttcttgttttataaatcgagataattattctaaaattaacttttattgtacagggacattccgaggattttcccaacctttctccggtaaaatcagatgaggtgtttgctagaggtttttgtttaaaaatatttttatccgaaaatcacataggtaatttgttataagaaatatagaaggttaattattatataaacatattaactatcgaaagaaatctttaatatttaacgaggatagaaagtaattgtttttaaccacaaagctaaagctgtgatatgaaaacttaaaagcaaagatcggttcgtgaagacaaaatggggttttggaaaaggaaaagaggaaaaagaaaaagaacaaacgtgtgaaaattcgagaaaaatggtaacacaaaaagaaattggacatgatataagttgccaaaaccaaagagaaaaaattgacatgatataccaatcaaatttttgaatcaggtcaactaatcaaattcacaacaatcatccacaatattatttagatttgacgctttcactgtttcacatgaaaattttacatttgacgcgatgacttgtggagtcacgatcattttagtcactcgttttaaacggatgcttcattcaaaaaatgtaacttatattcagaagactcctaacgtccgattcagatttacaaaaaaacaatatcattgaatcggaaaacagaaaagcatagtaatattctaagtatttaattataatcgtgaggaaatagttccgtaataatgggggaaaaatatatatatgataaaaccaaaatgagatttgcctgaagatgccatatgtctgatcaaacactctgagctgttgtgtcgatgaactcaccatatgccaagatacgctattagcgacaacacatttgtattgtcaaatgtcattaattaacatccacaggtccaacaacagagaaacaaaataattatcacaagtaaaatataaaattagtaatatacttgtacttataatttttggcttatgccttttaatttattttaacactagactcgacgaaactcatcactaacatgaccacaaaaaaaaaagattacaattctaaaacacaaagattaaaaaagaaaacataacgaagtaaaattaagactagacatcaactttacaagttgaaggagcgagaagaggaacttgtccgttagaagatggattaaatctcaaccacacatcacatctggcgtaaaatccataccgtccagtcttaatcgcaccagctttccaacgtagcctcccaaaaatcaccactctcatcaaaacgacgccgtaagcttcatcattttttaaaccattagctacttccggcgagactggtataccgttgcctcccatcaccggagctatcacaaccgtagatttatgtcctaaacgaagcggtggtagtggaagcggcggtgttatgatctgatctttgtacgttacgtacatagagagcttgtcgtagtgaatggagactctccggttagggtttcttgctaaaacgctgaactgaacggaggttgagattaacggcggcgctgtgaaattcaggtcgtagatggcggctccgacgacggtgagacgtggtttatgtggacggtagacgagccaaaggattaaggctatgatacctagtatgacaaggatggtgaagatcgcgccgcagattgcgcggcgagcatctccaccgcctcctccgccttctttagagtaagattctggcgttgaagaagcggagggagcgttcttgtgatctgctttggctgcgtgctctgcttttgcttctccttctcccatggctatactctacagatataagtgttaaagtgtgtatgtataggtatgtgtgtgtctatacgagaatcagagggttcggtgaagagtgaagactctaaagaaggaggaggagaagaaagaagataagtagatgcaaggttttgtctcttttctagttaataagagtaaacagtcttctagagtacagttttattaattgtttattaacttagaaagcttgtagttgtaattatgtgttaaagctaatctttttataaagtagccgtaaattactactgtttttacattgtgattttattttgttataatacttaatgtaataatataagatagagaagtactttcgaaagactccaaatctcggtgcaaccgttcacgtgacggatctgatgagtgatgaattttttaaaaatgaaaaatccaatgtaacgtgtatacatatggctatacataatcaaatactttgttgtcaatgattgacttatttggtgacaactatggtttcgtgcaacgtgataactatcactttttggccgtgttaatttttaaaaaaattagaatg

SEQ ID NO: 35619 - DNA, 3000 bp, Unknown
  misc_feature (1)..( 3000): 2750-1469P.txt file - cDNA_ID_3089431; gDNA_ID_2926150; Annot_ID_139292
tttagatacatctttcgttttacaaaaaaagtaatatatatacatctttcaaaaacagcttttatatatgtgtgtttatgcatatattactattatcttcttttattttatttttcttgttttataaatcgagataattattctaaaattaacttttattgtacagggacattccgaggattttcccaacctttctccggtaaaatcagatgaggtgtttgctagaggtttttgtttaaaaatatttttatccgaaaatcacataggtaatttgttataagaaatatagaaggttaattattatataaacatattaactatcgaaagaaatctttaatatttaacgaggatagaaagtaattgtttttaaccacaaagctaaagctgtgatatgaaaacttaaaagcaaagatcggttcgtgaagacaaaatggggttttggaaaaggaaaagaggaaaaagaaaaagaacaaacgtgtgaaaattcgagaaaaatggtaacacaaaaagaaattggacatgatataagttgccaaaaccaaagagaaaaaattgacatgatataccaatcaaatttttgaatcaggtcaactaatcaaattcacaacaatcatccacaatattatttagatttgacgctttcactgtttcacatgaaaattttacatttgacgcgatgacttgtggagtcacgatcattttagtcactcgttttaaacggatgcttcattcaaaaaatgtaacttatattcagaagactcctaacgtccgattcagatttacaaaaaaacaatatcattgaatcggaaaacagaaaagcatagtaatattctaagtatttaattataatcgtgaggaaatagttccgtaataatgggggaaaaatatatatatgataaaaccaaaatgagatttgcctgaagatgccatatgtctgatcaaacactctgagctgttgtgtcgatgaactcaccatatgccaagatacgctattagcgacaacacatttgtattgtcaaatgtcattaattaacatccacaggtccaacaacagagaaacaaaataattatcacaagtaaaatataaaattagtaatatacttgtacttataatttttggcttatgccttttaatttattttaacactagactcgacgaaactcatcactaacatgaccacaaaaaaaaaagattacaattctaaaacacaaagattaaaaaagaaaacataacgaagtaaaattaagactagacatcaactttacaagttgaaggagcgagaagaggaacttgtccgttagaagatggattaaatctcaaccacacatcacatctggcgtaaaatccataccgtccagtcttaatcgcaccagctttccaacgtagcctcccaaaaatcaccactctcatcaaaacgacgccgtaagcttcatcattttttaaaccattagctacttccggcgagactggtataccgttgcctcccatcaccggagctatcacaaccgtagatttatgtcctaaacgaagcggtggtagtggaagcggcggtgttatgatctgatctttgtacgttacgtacatagagagcttgtcgtagtgaatggagactctccggttagggtttcttgctaaaacgctgaactgaacggaggttgagattaacggcggcgctgtgaaattcaggtcgtagatggcggctccgacgacggtgagacgtggtttatgtggacggtagacgagccaaaggattaaggctatgatacctagtatgacaaggatggtgaagatcgcgccgcagattgcgcggcgagcatctccaccgcctcctccgccttctttagagtaagattctggcgttgaagaagcggagggagcgttcttgtgatctgctttggctgcgtgctctgcttttgcttctccttctcccatggctatactctacagatataagtgttaaagtgtgtatgtataggtatgtgtgtgtctatacgagaatcagagggttcggtgaagagtgaagactctaaagaaggaggaggagaagaaagaagataagtagatgcaaggttttgtctcttttctagttaataagagtaaacagtcttctagagtacagttttattaattgtttattaacttagaaagcttgtagttgtaattatgtgttaaagctaatctttttataaagtagccgtaaattactactgtttttacattgtgattttattttgttataatacttaatgtaataatataagatagagaagtactttcgaaagactccaaatctcggtgcaaccgttcacgtgacggatctgatgagtgatgaattttttaaaaatgaaaaatccaatgtaacgtgtatacatatggctatacataatcaaatactttgttgtcaatgattgacttatttggtgacaactatggtttcgtgcaacgtgataactatcactttttggccgtgttaatttttaaaaaaattagaatgaaatttatcaggttacggcctgtcaaagttagcaataacctaatatctgtttgcatgccagaatacggttatgtagaaagaaaattaaattatcatatttcacaattctttatcaactgtataaagcaattaataataaattaattagataccacatgtgtcatatttgttctaatgtttagaaaataaaagtacaagtcttttatgtccacatctccaacaatacttctgaccaaattccatatattattagtaagcttccaaaataaataataatcacatttaagaagaatctgttatttaatcacactaactgagataccgcaccaccgacactgtagtcaccgacaatgctgtggatgctacctgggcctcaattataagcccattataaaattgggcctacactaaaactattgtgtacagagagatatttgataatttgctgactgatacaagtctcacttccaacggccgatttattaaaaaaaaactccgacaaatg

SEQ ID NO: 35620 - DNA, 3003 bp, Unknown
  misc_feature (1)..( 3003): 2750-1469P.txt file - cDNA_ID_3089439; gDNA_ID_2926150; Annot_ID_198029
ttttattgcaaatacttaagaaaaacactcatgtttatcatacacttggatgagtactccaatctcaaaagcagagtaaatatcaagggaagaggcctttgaggtcctcacagctgtcagcttgtcgttcttcttgaaacggataagacttaaagttcataaacacattgaattacacaaagaagacacaaaaagttcctatatattgcaagacaaactctacttgcactctagctctcgttgctttggctttggctttagctttatttgcttcacgtttagccttgtaaggtatgatactgaagcttggaagtaatctgtgagaaatgtctgccaaattctacatgtttcggcataatcatccacaatctgataaattgttatgtagaatgaagacaatctccttggaaaactctgaaccatccctaaaccacttcaatcacaattcccaaattactgtatttattgggcaaaccaaaaacacaacttctcgagcattagttatagatgagagttgtaaaagcaattgcgatcaatatatcatcagctgattttcaacggttcagattaaaatttacaaaatttccttcttcttctttttttcttttttttttgagattcaagcccaaccaaattattaaacccgtttatggtttaagaaggcccatatggaagataatatcatataactaaggatacttagttttgttaactatattgatttttctcagtgcttcaaaagttgttacaaatccaatgctaattttgggcatgtctcttgagtcttgactaatcaattttttcttttaaaaaagaaaacagtaaactaattataggttgttgtgtcctgacaactctcagccttaataacttaagattcgcatcatcaaattattaagaattactcgaagagtagacttttagctgttttgaatttcaagatttgaaggatgattcaaatcgataaatgaggacacctacatttatgtaacgttgtccacgtctatgacaaataattttggactatgtgcaatgcatgattgttgggctgtatgtctaatttacagcattaatttttcgtaagactaaagtcttgattacttgtcaatcatgctgtaactttattgtaaaatttacagtctaaattttttttctttttaaggttatagtcgagtaaattctcaaagctctaatttttttactgtaaaaattttaattcaataaataaattctagaaattaaaattatcaacaaaaatatataataaaaacaaagatatgttctaaaaaaatgataattatcaaacctaaaaaaaaaagattataaataaatatcatatgaagaggtcaaagtacaagacgatgaccaaatgattgattctaggcaatatatggaaggaattcgagatgatattacaataaatttatgaaataattataggtaaaattatatttattttatcaataattcataaggttttattttatttttatatcatcataatatatttatttaaattagtaatacaaggtattttatttactataaaaatatattttattacaagtattatatttacaaatctatttttataaatatttaaaatcaaaaacttacagtaataaaagttacaggtatagccaacacaggtacatcaaaaattttacagcaaaaattctatagttacaacccaaccaatcatccacttaacttgtggaaaatttgtataaatttaaataacatctgagtaattagttttttatttgtttgatcaaatattattacggcactaaaatacctctaaacttttctagtccgaataaattctcatccacatccaccttttattctcatttttacattcattccgaaaaatcattactttctaaaaagaaaaaacgttcataaattctctaaacactcgtgcatcaacataaatccaccattttcttctatgaatatttccaaattcgaatttgaattatcgagctaataaaagctagcatgttagtatgttacaatctccggttatttgtaaagaagtaaaaagttccgagtcatatattaaatcgtgacatcctttatatatatatatatatatatatatatatatatatatatatatatatatatataagtcgtttaattcatgataattcgtgattcgcatcaaattagtagaatatgtattagaagtctaaatctcttagctgtttgcatgggaccatttttaaaaatatattatcaatttagaaaatttcaaaggcaaaggcgccgacgaccacgtctactacaactaaattatataagaattagcttgtgggacatttgtttaagttcaactactgtatttgaatcgttataaaaaaagtctcgagatcatccaatccataattaattattatattctgaatctgactctgattaatcttattatggtaaattgcaataatgtctccgaattctctttaatattcttttagcccaagcttctgaatgagacaagattgaccttacgttaaactgaggctaacacaaccgtaacaaatagttttttttttttttttgttgttgtttaattcgtattcttttagattatagtcgaaatgaaagtataatcgccggatccagttccaagccagtagaattcagcgcaacgattaaacaaattcatccactaggaaactaattcgtccacaaatctctagatgcgtaggctattaggtcggtttatatgtgttttggtttggagttatggaaaaaaagaataggtgatatttacaaagtttaattgacgtgtgtttatgtaagaaagaagggtgtcctttgttatttaagataggtgatggttcattttgcaaataactcttaacactggctattatattgggattacagaggcatatatcaacgtcttccatcttcacttggagtcttggagatctcatcaaacaaattagcaaacccttttgattcattgacttgtacacgatcaaaaaaatg

SEQ ID NO: 35621 - DNA, 3000 bp, Unknown; identical to SEQ ID NO: 7639
  misc_feature (1)..( 3000): 2750-1469P.txt file - cDNA_ID_3089439; gDNA_ID_1621155; Annot_ID_173451

SEQ ID NO: 35622 - DNA, 3000 bp, Unknown
  misc_feature (1)..( 3000): 2750-1469P.txt file - cDNA_ID_3089447; gDNA_ID_2926150; Annot_ID_198023
gattttggttaacagagaagctccgtacattctaaaaccgaggaagagatgatgaaatcacataagctcaaatcaaatcaaacgcacgagtaagacaagaaactagtaggagtaataaaacctcagatcaaggtacgcactattagaaaagaacaaaatttagaaacgagaagcagagacgatggtatatgaaacaaacgagtcatggaatctcaacacacacaacacagaaagcaaaacccaaacaaaaacgaaatacgatgagtgaaacaggatagtaaaatgtctcagaaaaaggttttgaagcttacccacgacggtttccatgaaaggaatcgccatggctgagaaaagagtgacctgaaccgcgatgaaagcagaagcaaatcgaagaaagcagaagcaaatcgaagaaagcagaggaacgacaaaagagaggtttttcgtttttgactcttctcaggtcggtgtggatatgtaaaacaacaaaaacacgggtacgggttataccttagaagcccaaatagtaaacgggctgagatttaggcccatatgaaacaacccctatattttatctaaaatctctaagtataatagtatattatcaaatattggggccttagttgaaatattatgttttaaaggggctaaacggaaaactccttatcctcaaactgtcaacaaattacgaaggtgccattgggtttaatcaacaacgaacgccgagagctctcacttcacactttatccacttggagcttcgacaatggcgtctccttcgcttctgcagtcttccgcttcttcgtttcacggacgtttctcaccattagcggctccatcctccgcacgaatgctctctccgccgctcagaaacgtggtgaaagtctcggcgtctggaactgtactggtcgagaaatctgaagccgagaaaactcaacgcctcaaaaccgcttacctcgagaggattatccctgcgctcaaagaagagttcaagtacgttaatattcaccaggtaaccccaaatccttcccctctgagctcaaacctagtttttgttctgttgcgattgattgaagtctaattctcagtgaattcgaattttttgagcgaatgttaaacctaatttgcttttaatgataagtttgaattgatttcttctagaaaatgtagtgaagaagcctagatttaagattgttgtgttgataaaatcgtgctgttgggatgtgccatttacaaatgtgaatgtgaatttgtcaatctcatcattgttgtatatctgcttggacatcttctctaccaggttccaaaggtacagaagattgtagtgaattgtggtattggagatgcggcgcagaacgacaagggtttggaggctgcgatgaaggatatcgcgcttatcacagggcagaaacctattaagacacgagctagagcttccattgctactttcaagatcagggaagatcaacctcttgggattgctgtcactctcagaggagatgtgagctatatttctcttgactaatcaaactttccttttgagttatttatgtattaacattttgtgattttgactgttgtgacaggtaatgtactccttcttggatcgtcttatcaacttagcccttccgagaactcgagatttccaaggtgtgagtcccagtagctttgatgggaacggaaactacagtattggtgtgaaagaccaaggtgtattccctgaaatcaggttagttctattgtatctaccctcaaaatcaaaactactaacttgttatccgctggttcaacaagatcaagcatggtttctctttagtcccactctttgtttacaaccgagcaactaaactctatgttggttggttggtttattacactctaggtttgatgccgttggaaaaacgagaggaatggatgtatgcatcagcacaacggctaaaagcgatcaagaaggacagaaactattggctctaatgggaatgcctttcagggaaggaggtggtggcagcacaggcgcgatagtgcggaagaagaaactaaagtctcatcactttgatgctaaaggaaaaggaaagagatgatgaacatagctgcctattgtatgtatcgtcttctgtaaccaaccatttcatgtttcagaaaaaccatctccttttgtaatgctttatgagtcaatttgaaaataatatcagggatcttgttgttatggtaaaaatttatcaaggtttttctgtaatttattgaaagttttgtggattatacaaaatgtagcgcgtgagtgaacgtgaaaagctagcgcgtggatttgtcaattttaccttcccctttgagagaaatcgctcttctttgtaagacttggtttcgatcttctctttttcatcatcaatcgatcaaaacaaacagcaacagcaaaattatctttctgcagatcgaaaccctaattggtttctccgttctccttttgttcttctagaatcggcgactcttacttttttttctttctaattatccttttctgatggattctggaatccatgtaattccccattagcgctaaaaaccctagctgtcgaagaccttagattactgcagaaatgttataatctgttttcatcttttcccgatttgaggtttttatttattttggttgggtgagagaatccgatacgagagattaaagccttgtgagtttaggatgagctagttttctttggctttgagctgtaatttctcttctctgaaatctttcactgtacatatagctagatcctgatgaagttgcgtggtggtgaatcgtggtttaagttttgctagttgagatattattggtggttactgtaatatcgaagaatcatatttcacggtatttactatagacaactactgtagagttacttgattaaggcgttaagaagagatactggtgttttttggcctcaatcagctaagatttttgtgcattgtatgatgagtatagcaaatgaacaacaatttgccatg

SEQ ID NO: 35623 - DNA, 3000 bp, Unknown
  misc_feature (1)..( 3000): 2750-1469P.txt file - cDNA_ID_3089453; gDNA_ID_2926150; Annot_ID_198020
ttggggtttagatctcagcactttgattctaccacctttaccatcaggtccaatagagatgagatcatcttttcttggaacagaacctcctagtgatggagttgcttcgtttctctctccatgtttgctccatctaccaaggtttctatttgttccacttgactgccaaatgtttccactacctgcattggacaatcttcaatctactactacactcaagaacttgaattcatgatgtacaacaaaagtaccattgctgtaaggtgacactgatgatgtcgggtcttttctgatgttgaactttatatccttcaccatggaattatcacctttctcttcaatattagtattccaatctctaatgccagaagtgttggtttcaggaacataatcatcatctacatctataaccgagtctgttctgctaacgaaggagtcttctcttccccttaagcatgatccttgaatggtaaagccatccttttcttctaatttaccaggtggtgtggagattttctccactttgttgtctgatgaaagcattctgaaagaagacatgctctcgattgcaggctcggaaacttctgtgtaactgcatttctttgaaacgtttatgtcccgtagagctctgttctctctctcttcagttatcaactcaagttccctcattcgtttctggtcatagaataaacataataagagccagatatagaagacacaaagaagatcgagataaacaccaaaacacacacctttagtttttctatcttttccaaagctttttcaagtttctcagaagatcgtgcttcgcctcttcccagctgattgcacttggctagcaattccttataactcctgtcagagtaagaaagattgttttttattagagacttcataaaagaaaattcaaagacctaagagaaaagaaacgcaatgttcaatcctcctttcctcaaattcttgaccatacctacttatgaaatttcgtaatttcagtttaacaagttgttgttacgaatgaactaaggtaaatcaccatttcataagtcactgaaggtcaaattaatcttttttaatcggattacactgctgtagacatgacaaatgggaaataatgaaccaagttcactaagtcaatgaccaaaatgagagcagggaaggagtgacaactaagtgctaagcacctacctatatcaaataaccaaaactaagtgaagccatgtgaactgagtggaactaatctatgtgacaaacctattccgaataaccaaggacttgactagtgtgtctattgtatctttcgtcttcgcgttattccccaacaaggccaacttcagtacatcatcttcctccaagcttaaatcagaaaccctggatgcaaaacaagatattagactcagaaaaggtttaaccatacgagtgaatgattaaattagaacctgaagacactaaaagagcaatatgaaagatgttatcttacaatttaagcgatgcgagctccttggcaagagccacagttctctcctgtagcttaacacactgtgagttaagctggatacattcctgtaacaaacaaacacactaagaaactcaacacaaaattctgcctgtgaagcaaaaaggatctaaaatctaaggatgttgtatagtttaaacaaacctcagattttaacttaagcaaatgctgagtcgttgatatttcttgaagagcctcccaccttttcactttatcctccttcaattgctcattgcattgatgcaactgagacacacacaaacaaaaacaaaaaaaaaaaaaatcacataaccttatcttatcttataaaccattctaatcaaacgaaatgaacaaaattaaccttatcagagacttcaacattctcctttttcttcgcctccagagccgaagtaagattctgtaccttcccttcaagccgcttcacttctcctctcaacaaaaccggatcttcttcgattccaacaaccttatccgaggcaatcgaatcggtttgattcccagaagactgaaagtaaagtcgacaaggatcctttagagagcacttctgcttacaaatcggacaatttcgcttgttcgtactcgggcaatactcaaaccattgctgcaaactagggtttccgaaagaaatcgattaaacacataaatctataaaatttcggagataataaacttcattagagaattgattttgccgtactaaccaaagttcgtgaaagacatggccacaagcggagattgattgcagattctcaaccaccggtttaagatcttcgtagcagattgaacaaattgcattccccgccgcgttttcttcggccatagctatctctccggcaatcaccgactagtcagtttccgacacagtcaccattttcttctcgagaaaatcaaaaggcaaatatcagagagcaaacacatggcgcggataaaaagttgaaatttcaatggtaagcgcgaaaatctggggaaggatagcacgtgtaagtcacgtgagataaaaacataaacaaccagtggcttgtattaggcccaacgtttttaccctataggtccattaaagcccaaatcagctattgatcagtggtcaaacacaatgtttaaattaatgttgacttaactcgtttttagtaatactagtacatcttttcgcatgcactaattaactcactctcgagagtagcgttcgtgagtctcgaggtttctcactattttttcttccgcagcgtcaccgactcagatttggtggtgctaggtcaccgtgttcttcacggcgttcgggagaatgtcttagttaccccagcttctccctaaggaaactccactactgttcaaaatccctttcctacacatctgtagttaaatgtcacataatctgttgaattacttgaggcttaaggtgtaaatgttatttttccttggcagagacctaaggtttatgtgtgtcttccagtttaaattatgtgtgggtgactcagagaatg

SEQ ID NO: 35624 - DNA, 3000 bp, Unknown
  misc_feature (1)..( 3000): 2750-1469P.txt file - cDNA_ID_3089465; gDNA_ID_2926150; Annot_ID_198005
ttggtttaggttgcgtgcatctgaagcaatcatgaaattcaacaattccatataatgtaaaatatttttcatgcatgttttgatcatctttgtcttttattaagttcattttgaagtatgtgcctcctgaaactaagtgtggatccaagataatagtttcagatgcaacagatacaatgttgaaacagagacattgtataatataacacgatattacaggaaaacatacagagagaaagctggttttatttgaaaatgaatctattcgcttcctgcgatcttcttcttcaaggattcaatatcctcagccaattcctttctgcttgactgtaacaagatgatcatttcatgtcagatcattgatgctttatagattcacaagaatccaaaaatagtatagttttgttaccttgaagagaaggtatctgtagacaaaccatccagtgtacccgagaccgacaagttccataactttcggaagctacaaacacaagaaatggaaacatcactttaactcaaactcattacacattttctaatctcaaaagaattatatagagagtgttgttaccagaggaacagagttgatggcaccaacaacaatggaagataaccaaacagcaacaatggctcctcctccatatataagtacagtagatttgttctcaagaccatcccactgcaccggaaaaaaaaaccaacaatcaaaacagaacacacaaagccaaaccaaaccaactcggttttttcttcgataaatggttcaccttttccttcaaatctgtgatgagttcgttggtatcaatggacgaggtctcttctgaagaagctcttgtcttcaacaattcaactttttgcaatccattccctgcaatttgaaccggagaatcaaatgttttggtttagattccgtctcaatcaaccgaaatttgtaaattttaccactaaccgaaccggtacatcgctaaaatttcgatttcggaccggaatattctaatttgaggcaatttgtgacaattcagacaatttctcgggaatgtatagattccattgaacccagaaagagagattatgtaaataaatccgtcacctgaaacaagcttcaacggaacggtgaaagaggatcggccaaaggagcgaggaggaagataagggacggcggagcaacgggtggatacggcgggaacacgtggaaccatcacggccatagaggacgaagctgctactgatatcgccattgaagcacgccgagaacttcttcttcttcttctttgtctgcctacttcttctctactcgattttttttgcagctgcgctttttactaaacaagattcgtgtagtaacacgtggaagctcctcgcgctcttattggtcgctcctcttatctttagaaatccaactcagtggtgtttatagaatgctcgcattctgtggggttttaggcccatctattatatgggtcactaaaagcccatcttgtttttttgataactcttgtctttttctaggtgaggaaaaaatggcaaatgaatgcaaacctttgatttttgtttctaaccaaactataagacagttacgaggacaatacgagattaactaaaaagagaaattcgaacaatgaactttaaatatctaactctaaattatgttttgtataagtgaatgaaaaaacgaaacttctttttgataaaagaaatgtggcaaaaagagagaaataaataacaaacccactaaaattgagtgatggtacagctcttccaccctaatacttcgctggcgctttcaactactaaccaaaactccatttctcttgttaatataacaaaatagttgatattataaaagttttatttaatcttatttggtagtttttgtatgattaatataatcaacatacgtattcatctaggatgagttggcatgaaaaaacaaagagttcgctatctaatttttccaccagaatttaaaattatttgagtccatagatgtgagatacaataatcacaagtttacaacataatagtataatggtttatattaatgttgttggtgcattaacatttcaattcaaaataaatatacatacattttttatagtaaaactgatagtttactcatttgcaatgacaatctaattttcgactgtatttaaagaaaaaatgaatggttttatgtacgatttcataaaaaatattgttcatttttacccgaaaaaaaaaaaaaaaatgttcgcacatcaaaatagtccacgatgagatattaaagatgagaattttaaaatatgaagaaaaaaataaattttcaatgtggtaatagtattattattttacagctattttaattttatcactaaattgacagaatggttgaacaaaaattcaatattttcttataatcatattacatgtgaatcgtaagaatactaaaaccaaagaaattgcatgatcgttacgtcatcggcatataatcatagccgacatcttcttttttcttatcacctccattacaaaattttgattagaaaaaaaaataaactccaacttcaatataattttgggtcaaaaaaaaagcatccaccattaatacagctcaaacccaactttctctccccttttttcttacaagtttgaatatcaaagtacggtctcttttttttctatataatagttatttaatcaaccatacacattcatcaaatccatatttcatgcagctgttacatttttattatatgtcctcttacttccttttgagtgtgtatatgtgcttaattatattccctcatcacaacctcaatctcaatctcaatcatgtctccaaatctcaatcatgcttcttccactttgattcttatctatctggatcacaattctattcatatcctttaatcaaaatcatatcatagcttcttttttttatattactaatcttgatgaagatcaccaaaactcattttggtcttcttcatcatcgtcgttcttgattttctcttggcaatg

SEQ ID NO: 35625 - DNA, 3003 bp, Unknown; identical to SEQ ID NO: 19529
  misc_feature (1)..( 3003): 2750-1469P.txt file - cDNA_ID_3089474; gDNA_ID_2926150; Annot_ID_197990

SEQ ID NO: 35626 - DNA, 3003 bp, Unknown
  misc_feature (1)..( 3003): 2750-1469P.txt file - cDNA_ID_3089482; gDNA_ID_2926150; Annot_ID_197985
aaaaacaattggtctccggaagaacaaagctcattattcctccttagctatgtaagtgaaaaatattattgtttaattttgatttttatgcaaataaactctcaaagtcttctatttttacaattttactctctacgtccaaaataaaaaaatatacaaaataatcatatgaagtcaaaactaatacgcaatatagccgatttttgcaactttacatatattgtaaacgttttcagatatagttgaaatcttcatctcaagggcttcaatttgatatattatttatcgaaattttaaaatttggtaatagcgaaaaaagctatattgtgtattatttttatttcatatgattattctgcatttttggacgtgaatgataaagttgcaaaaatggacgactttgacatatattcaactcatgtataggtgtggaaatgctggagagaaggagaagtgttgaacattgtggatccaagtttgattgaaacaagaggtctaagtgatgagatcaggaaatgcattcacattggtttgttgtgtgttcaggagaatccagggagtagaccaacaatggcttctattgttagaatgctcaatgcaaattctttcactttaccgagacccttgcaacccgctttttactcaggagttgtagactcatcgtcaagagacaacaatcatacaagaaacccgcgtattgcgtctttgaatgatgttacaattacggagttagatcctcgttgattaactttgtaagagacaaaaatgattttttctattgctttaaagtttacttcagaatgtatcagtatgatttttggttatgttgtaaaagacttgttaagcatgagatctcaattggtgttgttttcttgagtaatcaagaactgaatttgtgatgataaacagattttgaagagttcttttaggtttctgtttttgaataatttaacaaaagaaaattaaggcagcacaaaggcccaaacgacagttgtgcaatgtgatggagtcgatttgaacgagcacatagacaagaaacaaaagatgaaagaagtgaaaatgaaggttccaaataaacttaattaaagagtttatcctcagagtcagagtgtaagctactttattttggaaactttcttccatgtccagagtctcgttatcatccctccacttatcaatttcagaaaaccaaagaaccatggagggaatcaagagagatcataaaagagaaatcaaatgtgaattatagggaaaaagaatgatggacgacataaaaggggaaaaaagaacttgagcaatcaagaatatggctcaaagagaatcatttcaaatcagagaacaaaaaaaggtcagcaataaaaccattaattgatcaaatctacagattctaagtttccatggtagactatgtagtacggtttaaggacaaggatactgcaaaatggtttacacttccatgtgttttttcaagaaaataactttgatgcacatatagcaagaatacacattcactttcgagatataatgatccgcaagtactaaaagaaagataagaaacaacatacattaagttgtatacaattttacgagatcaaaggaaataaaggatatttaagcaagacatatggatgaaaataatatgtttagcaaatgagtaaagcaattaacaaattcaaatcaaataaatctatcccaaatcgtaaatctaagttaagcctataaaaaactaaaagctagatggaatatttagaagtgagaagatgaaacacaatgagaaaaataaggaggcaaagtcaaagactaaacgcaatgagaaaaaaaggaacgttggtattatgttgggccttaaacgtacattagcccatagctctttattgtataatgttttattattattatactgttgggccttaaacgaacaatttggtttatacaattcggagaaacgtttggataacgttcaacgtctagaatcaatatcatgatacttttatatttaatgcagggaattataactatactagatagacggctgtaagatgtaaatataattttttatcgataatatttaaattttaaatagtaaaataataatatatacattattcttatatataattttgaatagtaaaatagtagttttatgcattttattttattatacacattcaattttattgatgatatttgaagtctaaatagtaatctacacactttttctttattataatttagtatttagaagaaaaaaaacaaaattttatcttacacattcaattttgtaatacaatttaactatctatttcataaaaaactcgattttaattctacacacttcatcttacttgataatgatttcatgtcaaaataatatttatatgagatcaaatctatattttagttaatattaaaaattattaacaattaacaaaacataattaataataataaattttttgttaataccatatatattaaaaatttgaccaataacatatataaaattgttttgttaatttgcttttggttaagaaaaataaaatgtaatattttttagatatagacatatgaattagtatatgttaataatgatttattttttagttttctatttctttaagaaaaaaaagttaattattttcttacacgtgtcaacatctgatcgatagacttgacacgtggcataatcctatgaattagtaattctaataagatattattctggtcttacgattggtagacgagttatatttaatacgctttacatcaacactcaaatctactttgaatgaaaggttctaatgctgctacacagctaacctactttgacgtagtcaaaaacacgtcacgtctaattttcaaagaacagaaaatttcaaagtgacgaagacttattaaatttggtttcgttgataaaatacatataaattatgtaaaagtttaaaaccatgaacaaactacaacattcataatcataatcagcaagtccactttagagtcatg

SEQ ID NO: 35627 - DNA, 3000 bp, Unknown
  misc_feature (1)..( 3000): 2750-1469P.txt file - cDNA_ID_3089491; gDNA_ID_2926150; Annot_ID_197979
tctctattagtggagtttcgtgagtgagtgatcttgtgccatcgggattttgatcgttcctacttaaatttgagccggtatcgatctaaaatttcaagtaaacctagatttgaaaatcggatgctttaatctggatcactcaaatgtcgttgatgtagacatattatcacaacttgacgtttataaatagccagaatgaaataagaagatcgcttgaactttaagaactaatcgggggtgataattgagcagctaggatccattgtccttaaaacgttgtttatttagttgaatatgtaacggctatggagatctataatccggttttacatttcacatactctagattagtttcatataacggctatggaaatctttaaccatctatctaccagtatgcataagctaatttaaccttttaccaaaaaaaaagtatgcataagctattagatcatagcgtagtgttcattttgcagtagtcttgtccttgaaccgtactacatgagtccaccatatgattttttttttctcggctatggagttctagttcctttagtctattcttaatttgcagaatatctaggaagagttgctaattaattcccatgtttttggtattcaacagaaacattgttcaacagagatattaggaacaatcattcacaaaatgagaaggtaatttccgtatcaacagttactggatgaatctttatcttttctacttccactgaatagctttttctcccaattcagtgtactctctgattaaaatcgtgagtcattttgaactatatcattctcctttccagattttaatttattctaaaaacggtagaaactcagaatatgtagatcttcttttttttgtacaccaaatagataccttaaagtcagagtatgttttgcgcatatacatagattgtgagtgcttcgctaaagaatcagccgagacatttgctgatctgggaataaaactacaagagaagctagaaagcctattaatgcagataaatatgtcactcagaatatgtagataaatagtttaatttgctgacctttttggttctatgatttgaaattattctctgagacatattcttgattgatcaagttctttttcaccttttatgtccctctttttcccctataattcaaatcagattcttcttttatgatattacatctagttctttgttttttgaaattgataagtggagggataacaacgagactggacatggaagaaagttccaaaataaagtagctcatagtctgaggataataatctttaaatgtttctttggaaccttcattttcatttctttattacttttgtttcttgtctgtgctcgtttcaaatcgagtccattgcattacaaaactctctttcgggcctttgtgctctgccttaattttcttttgttatttactcttttctttgtcagaacaacaacaatatctaggcaaataaaagaggtttttaaattctataatcgttatcatagtttcattatttctatatgtttagacagaaatgttgtcttgattgaatcaaggttcctttcttagaaaaaaaagaaatgcatgtcggctttcatcttacttttaattggaataagtaaactaaaatctttattcatcacatgcatttgcatgtatatatatatgtatacgttatccattgcttttgctaggttcatgttcttttttttgtgcaataatggcttaatttgttaatccagcttgcagattgcaatttgactgcaaagtttccccacttccataactatatgtatgtgatatcaaatcaattcattatgacgagcgaactcttgacaactatctttgtcagtactctgctttatttggtcgtttttattttgcatgaaaaaggtcaaaaaaagctttactcatttggatattgattagtattacacaaagtcttagtttggatatattttctcaaatgtttccactgctttcaacattcatttgctttggggataagtcaaataccttgacaattaactaattccctaactaaatatctcacctttgtttattagtgcttttttggtgaattaagtgtttttaatttatcccgaccccattgtgatcttgttctgtcacatttaattacgtatatttagtagttttattactaccattttgatagacatatattcatgcatgttaagtaccaaacaatttgttgacagtttaggtatggcgtgtttggaggatttgaaaagttgatggagctccaagagaagatccaagtggctcatgtttcttcaggttactttgctttcatgttctattaacataaataatctctttggttggttccttatttttttcttctttatcggaaagttacatattacgttgtttcttagccacgcctgatttgaattaaaggctcactgaccaaaacatccaagcccaacttttgctaaagcatataagcatatacctatgtcagtttccggcgacttttcttttttgctcttttttgaaccaaaacaaatttctagctaatgtagaaatttatactttttaagaaaattactggacttgtaacaccattagtaataagataagatgagacatttgttttgtttatatgaaaatatagtcagtaataactgttttttatgttctcttttcaacttatttttaattctttttggctttcaactttgcttctttttgataaaagacacatatattgttcctaatctttattgtctttaattttgaaaaatgccacaattaaattttgaattaaaacttcttttaattgcccctttaatgttctccctgactcccaaatctacacgaaacactaggaatagagaaaaaacaaccctcgggtaaagacagagcataaaacacttgtagtgtagatataaaagacacacctcagagaagagaagagcagagagagagagagagagagagagagaaagaaagatccaacttccacaaagaaccatg

SEQ ID NO: 35628 - DNA, 3000 bp, Unknown; identical to SEQ ID NO: 35627
  misc_feature (1)..( 3000): 2750-1469P.txt file - cDNA_ID_3089491; gDNA_ID_2926150; Annot_ID_139248

SEQ ID NO: 35629 - DNA, 3003 bp, Unknown
  misc_feature (1)..( 3003): 2750-1469P.txt file - cDNA_ID_3089509; gDNA_ID_1621151; Annot_ID_173243
ataatctcgataattcctccgccgtctctcttcaacgtgtgaagaaactcgcggctgaacacggagaacgcctctccttccaccaggttcggtgaaatttcgctttcttagggctaggaaacgtgtgattgaaggatttgtgtttgtgtagttgatgatttcaacgaatttgggattatgatttgacttgttaatcattgatttgactacgaggctcttttttttgtgtttatttatttatttaattttgggcataaattctcgtaataaaatatcagtttttctaaaagattgtttgattccaaaatcatgggtatctttctttggtattattgctttgattggtaactactacaatggtactgggtatttaccgttttaacaatcataaaaacgataccaaaagcgttatttaccgttattttgtaccattttaactattcgcattttcggcttaaaaacttgtatagcgttgtgtcaatgtaattttatatgttaatgttaattattacaatttctttttctctaagttttataacccaaaaataattatttatgtattaaatattagtttaggcctaatgagtaccatgtgaaagagtaattgttctactttctatttttgtatttcatataaagtttaatcttgttcttctgaattagtttgtattatgtttacttacggtcaaaagaatctgttagttactgtcaaaagttaaaacttgattgttctgtcttaatttgcaggtggatcttcgagacaggtctgctcttgagaagatattctcagaaacaaagtatgattgagaaaaaaacaaacattcttttagcttcttcactttatcactaacaatgagtgataatgcatattattgggtttattctttattgattgatgaacgtggaattattattattttacaggtttgatgcagtgatacattttgctggacttaaagcagttggtgagagtgtagagaagcctttgctttattataataataatcttgttggtactattactcttttggaagttatggctcaacatggctgcaaaaatgtatgtataatttgccactacacaacaagttcgaatccatttttactttgcttgatcaattctcatgattagctacttttactctgtttccagcttgtgttttcatcatcagcaactgtgtatggctctccaaaagaagttccttgtacagaggagtttccaatttctgctttgaacccatatggacgaacaaaggttgttttcttgacaaaacccacttgagtattgtggttaattatgaagtgtgaatctgacttattatggatgtttttgtagctattcattgaggaaatctgccgcgatgtatacggttctgacccggaatggaagattatattgcttaggtatttcaatcctgttggtgcacatcctagtggtgacattggtgaagaccctcgtggtattccaaacaatctcatgccctttgtacaacaagtggctgttggtaggagacctcatctcactgtctttggaaatgattacaatacaaaagatggaacaggggtatgtacttgtcttttatgttttcataaaacaagaagaggttttcaacattttgatctcatgttttgttttaggttcgagattacattcatgttattgatttagctgatggacacatagcggctctacgtaagctagaagattgcaagatcggtatattatgatttccattcgtttctcttatctactacaatcattctcaagtctcttaactttgtttgtgtgttgtttatattcaggttgtgaagtgtacaatctcggaacaggaaatggaacatcagttcttgaaatggttgatgcttttgaaaaagcatccggaaaggtaaaaagtgacactttctttcatctttagatacttggattctaagtcatgttttgttaaacctttgaactcttttgtggatcagaaaatccctctggtgatcgcgggacgtcgaccgggagatgctgaagttgtatacgcctcgacggaaagagcagaaagtgaattgaattggaagtaagttcatacatacataaagctataactttgaagatattacttgcacaaaattgtatgttagacactaaaaagttgggaatatgtaaatgagataagtctaaatttgggttggtaacaaatgcagggccaaatatgggattgaggagatgtgtagagatttgtggaactgggctagtaataatccttatggatatgattcctcttctgaagacaactctcattaacttttcttaatcgttttcttcttttgctaaaacatatttctccacactaaattattatagtatccgcaagaaaaaacaacaacaataaagagtcagattttagggaaatatagggacattatgtattattattacaatcaatacttagtctgtaattgatttggatatgttcttgtataatcaaaaaagatttgttatgaatagctacaacgcaaatgtttagctctatacggcaaaaagtaccttgaggttgacacgacgtcgttttcagctcggtgatagttgaaatgtatctttctgaagcttttaagttcaagagcccacacacttcttctcattctttataaacataacactggacagtaaccaaacttcagatctgaatcaacctcttaaggttcgtttatactcattctgtttttcactgatagtttatgcacaatccgaatctttcttctatgtgattgttttggatttgattataaatttgacattatcattaatttagaatgattttgtgtgtgttgggttgtttacaaaatcatttctttgaatgagtttgttttaattttgtgttagggttataacgcgattgggaatttagttgaatttagaactaaatttgtgctagcttgtgatttattgtctctaattttgaactactaatatttgattaccatatgtttagtggtacagaagaagagaaaggaatg

SEQ ID NO: 35630 - DNA, 3000 bp, Unknown; identical to SEQ ID NO: 3757
  misc_feature (1)..( 3000): 2750-1469P.txt file - cDNA_ID_3089509; gDNA_ID_1620662; Annot_ID_163839

SEQ ID NO: 35631 - DNA, 3000 bp, Unknown; identical to SEQ ID NO: 3757
  misc_feature (1)..( 3000): 2750-1469P.txt file - cDNA_ID_3089509; gDNA_ID_2926151; Annot_ID_198099

SEQ ID NO: 35632 - DNA, 3000 bp, Unknown; identical to SEQ ID NO: 3752
  misc_feature (1)..( 3000): 2750-1469P.txt file - cDNA_ID_3089513; gDNA_ID_2926151; Annot_ID_198097

SEQ ID NO: 35633 - DNA, 3000 bp, Unknown; identical to SEQ ID NO: 23551
  misc_feature (1)..( 3000): 2750-1469P.txt file - cDNA_ID_3089517; gDNA_ID_2926151; Annot_ID_198072

SEQ ID NO: 35634 - DNA, 3000 bp, Unknown; identical to SEQ ID NO: 8317
  misc_feature (1)..( 3000): 2750-1469P.txt file - cDNA_ID_3089546; gDNA_ID_1971724; Annot_ID_175190

SEQ ID NO: 35635 - DNA, 2011 bp, Unknown
  misc_feature (1)..( 2011): 2750-1469P.txt file - cDNA_ID_3089546; gDNA_ID_2926152; Annot_ID_139373
ggtggtggtggtggtggtggtggtggtggtgaccggcggtggtggtggtggccggcggtggtggtggtgaccggcggggtgatggtcggcggtggtggtggtggtggtggtggtggtggtggtgaccggcggtggtggtggtggccggtggtggtgatggccgacagtggtggtggcggtggtggtggtggccgaagttggtggtggccggagttggtggtggccggatttgatggtggccgacagtgacggtgaccggtgttggtggtgaccggaatagatggtggccgaagttggcggtgatggccggcggtggtggcaggcagtggtggccggcggtggtggcaggcagtgatggccggcggtggtgaccggtggtggtgaccggtggtggccggcggtggtgaccggcggtggtggccggcggtggtggccagcggtggtggttgctactgaaggtattgaggcaacaagggcaaattgagtaatattacatataatacagagaatattataattacatagttaggatggttagttagtgaattatagtttttttgttagttatttctgcaaatttcccaaaaaaatatatcaatttccactaattttttttatgtacatgttggattctagaaaatcaatgaatttaacaaaacaaattcatgatcatcgcacaaattggctaaaatattgttgattttggaattggatggaaggttaattgtagattataacggaatttaaattgtttgaatcttggagtaactcaaaaatatagatcaaaatgattacatatggctatgttctattgcaaatcgtgagcgacagttccgacaaaaaaaatacgtcgatagtaaaataattcaaaaataatctgttatattaattttccatcacatatttccaatgccttgcttaaatatatattttgaactgtataatgttcttatactcttgttacttacctagtataattaagaaaaaaacagttaaaagtaagctaacaatccctatttgtaatagaaaaaatcatattcaaattttcaatttttttatataaatgcaataatcataattaattttttttatatgaatttataattgcccaattataaatattaaagcgggttaacacaattatactttaaaaaaaatttaattgaataacatcagattctatattacactttaagtcattaaaactcttttgaaatcataaaccaataacacccttttacagttgaattttttacctttcatgattttatgtaaatcaattgtttttttgaaatgaatttttgtagtggcattttatgtaatatttaatatgttgttggctatttacttaaatgtatgtttagttaataatatagaaatatcaaagttaattgctaaaaatattattaaacaaaatatagagagtatattgtaaatgataattcgaaaatgaaatccataaattttgttgatctcaattgaatcacatcccagtattagacaaattgggttttataaacactaagaagataaaacggggtcatttcgaaaccgtaagaaaataggatgatttctgcaaatatgggtaatatatatgtagaacgataatattaataccagaaaccctagagttgcttccgcttcgcttctcgtctctcttatcagtcttctcttttcacggctacaaggttagtcctaagtttcggctctgttcttgcatcagtgattggatctctactgccttttaatcaaatctcattgaattgatctgggttagggtttgggtcaggttatcgaatctttctgtgttattttgattctatgaaatgaatttagggtttgggcaagttttttctggtctatgtagcttccatccttttctgagatatctgattgggtttttcggattctggtgatctctgtaacaaaatcgcttctctgtgtttttcaggctaattgagagtgtcccttgcgttagagtttgttactagcttttttcgtctgaaacatg

SEQ ID NO: 35636 - DNA, 2011 bp, Unknown; identical to SEQ ID NO: 35635
  misc_feature (1)..( 2011): 2750-1469P.txt file - cDNA_ID_3089546; gDNA_ID_2926152; Annot_ID_198173

SEQ ID NO: 35637 - DNA, 3000 bp, Unknown; identical to SEQ ID NO: 8317
  misc_feature (1)..( 3000): 2750-1469P.txt file - cDNA_ID_3089546; gDNA_ID_2926153; Annot_ID_198189

SEQ ID NO: 35638 - DNA, 3003 bp, Unknown
  misc_feature (1)..( 3003): 2750-1469P.txt file - cDNA_ID_3089567; gDNA_ID_1971823; Annot_ID_58367
tattttattctagccgttgatacaacaaactaacactagccaaagttttgttttctggatcatagtatttaaaaacgttattgttttgtttttgttggatttacaccaagaatagacactaactagtaaggagtatcgttttttaatctacaaacttttgatgcatgttttgttatggtgtgaagggagttgttgggctttctcgactgtgggagcagtggaaggcttaaacaagatcgtgacgggagagttagtcactttgtctgagcaagatttgatcaattgtaacaaagaaaacaatggttgcggaggaggcaaactcgagactgcctatgagttcatcatgaaaaatggtggtcttggtaccgacaacgattatccttacaaagctgttaacggagtctgtgatggccgcctcaaggtcagtatagttacgatttatatataacaatattaaaagaaagaatcaattttgaacttattttccaaaaatatttgtgtaggaaaacaacaagaatgttatgattgatgggtatgaaaatttgcccgcaaacgacgaatctgctctcatgaaagcggttgctcaccagcctgtgactgccgttatcgattccagtagccgagagtttcagctttatgaatcggtaaaagattaattttttgttaaattttcatgtagaaaccttctctaattggaaaaagatttcatcaaattttttaatattttttttatgtcaaagggagtgtttgatggctcgtgtggaacaaacctaaaccatggagttgttgtggtcgggtatggaactgagaatggtcgtgactactggctcgtgaaaaactctaggggcattacatggggagaagctggctacatgaagatggctcgaaacattgccaatccaagaggcttatgtggcattgcaatgcgagcttcataccctctaaagaactccttttctaccgataaaagctccatcgcctaataaaatgagctaaatgtatgttatgcaaaggatccagtgagccagcaacctattcgattgtgaaatgaaaaataatgtagtcgatgggttttgttttgtaatatattttggatttgtatggagggcaatgtttgaagtttgtataatatttatggatatttcgttaggctctaattatgaatgccttctttttaggaagaaatgccaaaaatgataattgaactacatttttgcccctaataaaaatattacatttgagacggacgagattgattagcgattctaccatatttgcaacacccgatttttatcaaaaaatgttacatgcagaaaggtttaaaatagtaataattatgtttttataaaaagaagtaaaataataccaaaaaaaaagttatgcattttttttcatagaaaaattcataattaagtgtattgaaattaaataattttatgaaaaattgtgttattgaagactacaaaagaattgtaaggatatagaggatacacaacacaatgattttgtctagaacgcgccaaacaaacttttttacttattcttattgataataaatcttttacaaaaatcaattatcttagaaataatttgacctattctacatgaatgatcaactccgactaagaagaaatgtatgcctaattctctcttctgtattttctaccacacatctgtgaaaaccaagagaattacaaacactcacattttaggcttttgctaggctttgaagataacacacgtataccaatattctagaatgcttaggtggctcaatgcaaactccataatatttatactatttccagaaccctaacccttaggatctccgagaatcaataagcgggatcttctttgatcttcaagcttatctctttccttatttgttgagaaaaatattcaccaacttaatcgactttcgtctttgatctccacgctaagtcagcaaagctcttcggctcgtcacatcaaccaattcatctctgccatgtcagcttatgcgtctatgtcagcaactcaaccgtctgatgtgatctgatgcagtttcctgatatacaacaatttcctaaaatacaacaggtctctgatgtccatcaactcgttattgttagaatctacatcttcaaaaattccttgtgaactgtagagtcattcgtcgcgtatgaaatttggcgtaaaaagggagactaataggcagaatgtgagtatgggaggaaaaagatggaggtcgccagtacattacaagtgttcataaggtcacactattgggagtaacgggttttggtgcaacaaagataactatttaaaactgattttttaatattgagcatgtacaaaaaaacacggaaaaagattttgtggtgttctagcggatcacttgacaagtatatatgcaagcttttgcgccataatggttttagatgtactttaaaattctgccatattatgttatatatatgagtgttttttgttccatgatctaaatgatgacatttttttttttttttatctaatgcctatctttaaaatattttctggatccaccactaacctcaattgcattcaaaaacgaccaaattggtgtatcatcttcggaaaacacctaaaatatatagaatatcggttcaaaagaatgacctggacctcttttttactcattcacccaagcgaactttgggcatgtttctatacccaatcgaaaatatatcgaacagccaaaaaaacgaatttttagatacaacatatatttgaaaaagttcttatttacaaatcattggtgaaaaatttagacactactcgacacaaatgcatgagtaggtttacccatttgttcacaccaatggacacgttataaataacaattttaatatatctgagcgctgagtactataaatactgtcatgtgttagccaaaaagaacataacacaaaatcctcttctcttctttaataacttttagaaacacaaataaaagtttaattacttttaagcccaacaaaaatg

SEQ ID NO: 35639 - DNA, 3003 bp, Unknown; identical to SEQ ID NO: 35638
  misc_feature (1)..( 3003): 2750-1469P.txt file - cDNA_ID_3089567; gDNA_ID_1971823; Annot_ID_176263

SEQ ID NO: 35640 - DNA, 3003 bp, Unknown; identical to SEQ ID NO: 35638
  misc_feature (1)..( 3003): 2750-1469P.txt file - cDNA_ID_3089567; gDNA_ID_2926152; Annot_ID_139363

SEQ ID NO: 35641 - DNA, 3003 bp, Unknown; identical to SEQ ID NO: 35638
  misc_feature (1)..( 3003): 2750-1469P.txt file - cDNA_ID_3089567; gDNA_ID_2926152; Annot_ID_198159

SEQ ID NO: 35642 - DNA, 3000 bp, Unknown
  misc_feature (1)..( 3000): 2750-1469P.txt file - cDNA_ID_3089578; gDNA_ID_1621138; Annot_ID_56589
attggagtttccggtcaccgacacttgaactggggaaaattggccgaagcggaagacgaagaaacgaaaagcgagacaagttataagtgttgcagcgacgagttttatgagatatgtgttttgttgaagattagagattgattcccattttagcttcatcttcttcttcttccctcgcgctgagagatatacgattttttttttttggtcagaaagtggaatgtttttgattccgtacttattgcctaagcgataaaccaatgaataatagaatccaaaaagattagtgagtaatttaatgcttgtggggttaatgatatacagaaagttaataaatgaaacagagaatgattaatgaggattctaaacaaccgtaattattctctctctgattttaagtaatgtttaaggttttttacacatattacaaaagtttagtttaatttacctttttttgcataagtaactatatctaagtcaaccaataaaaaatatactatagaatattattggtcaaaaaatattaaatacatttaacttttatattgaaagttgaaagcatcatttaaaatcggaaaaaacattctctaaattatcatttttaatgatatgaaaccgtcatcaattgtgtcaatatcaataaaaacgatctcttcagtagagatgaaaaaaaattgtatcgcatatgtcacaactaatctaatcgtttatattatttaaagttttaatttctaaactcataatttttaccaattgtttcaaaattttcacatctgcaattttaactgcaaaagtctctatattttctacggtcaaattccttacaccaaaattttctacaaccaaaattgatatagttagaaataacacttgttaccaatcggtcctaacactttcagattatagatattgcggttaattagataaaaaagattcaaaaatatatttgatttctaaggacaaactaaaaaaatttaggagctttagaaaaattatgtttgatttccaattattctacgtggttttagtaaaagatgtgtttactataaaaaccttgattgtaattgtttataactcattactaaaagttgtgactgcagaaattacgaaactaaactactacaaaaaaatgtggagaaatgggttaaaaaaaacaaggaaaaaaattcaatgttaaatcaactgaaatttttttcatttaattattcagctaattttagggaagttatcatatcactatatatatatatatatataaataatacaaacaaacgatgcgtagaagaaaaaaaactgttgtccggttcactgtccagatcgggtttaaaaacattgattttcatattatattccgaattttgttttgccaaaaatccaattacttaaatttcaggtcaatttatgttaattttttaacataacccgatccaattcaaattgaaacaaatttatatttctcttttaatagtataggaatttgcacaaatgttatgtaaaaaacggaaaattggttttttcatatctttagtttgaactatgctgcatttatacacgtattataccacagttgatttaacctaaacttcaatttgatatttaaactttcatttttatacgaaaacatacattaatgttacaatgttagaatacctttaatttctgttgttaacctgaatgttagggctgggcaaaatattcgttcgatccgctttgattcggtatatgatttggtttgattcgaaaaatccgaatatccgtaagattttggaccaaagcaaataggaaaatgtagtattcgtaaaaaccgaatcaaataacaaattttaaaaaaaaaaaaccgaatatccgcttcgatccgtatctttttatatatatattagaaaatatagttatatctatatatatatcataatagtttgtgtattgttgctattttacgtttttatgttaaaatgtttgtttgatcatttttctcatgttatgttttgatcaacgacatcaaaaactatcgggttttagttttcggaattagtttgataacattttgtagactggtggtaccaacaagtatttagtttttattttgaaagcatgttaaataaaaactttgaatatctgatatagttatatagtatatagattttttttaatatttaaatatatcaaagcggatatccgcaaatatcacaaaaaattctggatattcgaaattccggatatccggaaattttcgaagcaaagcaaagcaaatcacaaaatcaagtattcgtttaaaacgaatcgaataacaaatatcacaatttttccggatatccgtttcgtacccagacctactgaatgccatatataaaacggtaaaaacagaaaattaaagttctagtaaaaaaaacatcgcatcagttacaaggtttggattaaattaaaaaaaggtttgggttaaattagcttaagaatgaacaatttattaattatttttttggtcacatggaataaacaattaattaatttgaataatattacttaaatacatacaaacattatctgtcatcttcgattacgttatcattaaccaacgtttaggaggactttgcttcttcgtcttcttctctctttaggttcttcaagttcgcaatcctggtaagattttctcgagaaaattccatttctttctatctgattctgtttacattgttgaatgcttgaaagaatctgagttttaaccacactctctcttccctgttactcaccattttctctctgaatcctccgaaacccatttcgatttccacaatctgagctcataaatctggtttaattctcatcttcgttgcatttcagtcataaagagaacataaagcttggatatttagggtttttgcagaatttttgattaagcttatgagtttggtaataatctgtagaaattggttgatgttgtttcaggtttgggtttaggacaaatcagagaagaagatgatgtttggtttagagaaaacgatg

SEQ ID NO: 35643 - DNA, 3000 bp, Unknown
  misc_feature (1)..( 3000): 2750-1469P.txt file - cDNA_ID_3089578; gDNA_ID_1621138; Annot_ID_172747
aataaatgaaacagagaatgattaatgaggattctaaacaaccgtaattattctctctctgattttaagtaatgtttaaggttttttacacatattacaaaagtttagtttaatttacctttttttgcataagtaactatatctaagtcaaccaataaaaaatatactatagaatattattggtcaaaaaatattaaatacatttaacttttatattgaaagttgaaagcatcatttaaaatcggaaaaaacattctctaaattatcatttttaatgatatgaaaccgtcatcaattgtgtcaatatcaataaaaacgatctcttcagtagagatgaaaaaaaattgtatcgcatatgtcacaactaatctaatcgtttatattatttaaagttttaatttctaaactcataatttttaccaattgtttcaaaattttcacatctgcaattttaactgcaaaagtctctatattttctacggtcaaattccttacaccaaaattttctacaaccaaaattgatatagttagaaataacacttgttaccaatcggtcctaacactttcagattatagatattgcggttaattagataaaaaagattcaaaaatatatttgatttctaaggacaaactaaaaaaatttaggagctttagaaaaattatgtttgatttccaattattctacgtggttttagtaaaagatgtgtttactataaaaaccttgattgtaattgtttataactcattactaaaagttgtgactgcagaaattacgaaactaaactactacaaaaaaatgtggagaaatgggttaaaaaaaacaaggaaaaaaattcaatgttaaatcaactgaaatttttttcatttaattattcagctaattttagggaagttatcatatcactatatatatatatatatataaataatacaaacaaacgatgcgtagaagaaaaaaaactgttgtccggttcactgtccagatcgggtttaaaaacattgattttcatattatattccgaattttgttttgccaaaaatccaattacttaaatttcaggtcaatttatgttaattttttaacataacccgatccaattcaaattgaaacaaatttatatttctcttttaatagtataggaatttgcacaaatgttatgtaaaaaacggaaaattggttttttcatatctttagtttgaactatgctgcatttatacacgtattataccacagttgatttaacctaaacttcaatttgatatttaaactttcatttttatacgaaaacatacattaatgttacaatgttagaatacctttaatttctgttgttaacctgaatgttagggctgggcaaaatattcgttcgatccgctttgattcggtatatgatttggtttgattcgaaaaatccgaatatccgtaagattttggaccaaagcaaataggaaaatgtagtattcgtaaaaaccgaatcaaataacaaattttaaaaaaaaaaaaccgaatatccgcttcgatccgtatctttttatatatatattagaaaatatagttatatctatatatatatcataatagtttgtgtattgttgctattttacgtttttatgttaaaatgtttgtttgatcatttttctcatgttatgttttgatcaacgacatcaaaaactatcgggttttagttttcggaattagtttgataacattttgtagactggtggtaccaacaagtatttagtttttattttgaaagcatgttaaataaaaactttgaatatctgatatagttatatagtatatagattttttttaatatttaaatatatcaaagcggatatccgcaaatatcacaaaaaattctggatattcgaaattccggatatccggaaattttcgaagcaaagcaaagcaaatcacaaaatcaagtattcgtttaaaacgaatcgaataacaaatatcacaatttttccggatatccgtttcgtacccagacctactgaatgccatatataaaacggtaaaaacagaaaattaaagttctagtaaaaaaaacatcgcatcagttacaaggtttggattaaattaaaaaaaggtttgggttaaattagcttaagaatgaacaatttattaattatttttttggtcacatggaataaacaattaattaatttgaataatattacttaaatacatacaaacattatctgtcatcttcgattacgttatcattaaccaacgtttaggaggactttgcttcttcgtcttcttctctctttaggttcttcaagttcgcaatcctggtaagattttctcgagaaaattccatttctttctatctgattctgtttacattgttgaatgcttgaaagaatctgagttttaaccacactctctcttccctgttactcaccattttctctctgaatcctccgaaacccatttcgatttccacaatctgagctcataaatctggtttaattctcatcttcgttgcatttcagtcataaagagaacataaagcttggatatttagggtttttgcagaatttttgattaagcttatgagtttggtaataatctgtagaaattggttgatgttgtttcaggtttgggtttaggacaaatcagagaagaagatgatgtttggtttagagaaaacgatgactttggagcatgaaattctgaaggagaatcatgagactctgttgaaagattatgagagtcttcaggagaggattaagcatgctgaggaagcttatgaggctattaagttgcatcatgagaacaaagctaaggagcttgaagtgagtaacaaacgcttgcttgaggaatgtatgaaagagagaagggagaaggctaaggttaggaagacttttgaggagatgaagaagacaatggagagtgagagaactgctattgttgatgagttgaagtcgaagaatcaggagcttttgttggggaagaagaaagaggaagaagagttagtgaagatg

SEQ ID NO: 35644 - DNA, 3003 bp, Unknown
  misc_feature (1)..( 3003): 2750-1469P.txt file - cDNA_ID_3089578; gDNA_ID_1620713; Annot_ID_165527
gttaataaatgaaacagagaatgattaatgaggattctaaacaaccgtaattattctctctctgattttaagtaatgtttaaggttttttacacatattacaaaagtttagtttaatttacctttttttgcataagtaactatatctaagtcaaccaataaaaaatatactatagaatattattggtcaaaaaatattaaatacatttaacttttatattgaaagttgaaagcatcatttaaaatcggaaaaaacattctctaaattatcatttttaatgatatgaaaccgtcatcaattgtgtcaatatcaataaaaacgatctcttcagtagagatgaaaaaaaattgtatcgcatatgtcacaactaatctaatcgtttatattatttaaagttttaatttctaaactcataatttttaccaattgtttcaaaattttcacatctgcaattttaactgcaaaagtctctatattttctacggtcaaattccttacaccaaaattttctacaaccaaaattgatatagttagaaataacacttgttaccaatcggtcctaacactttcagattatagatattgcggttaattagataaaaaagattcaaaaatatatttgatttctaaggacaaactaaaaaaatttaggagctttagaaaaattatgtttgatttccaattattctacgtggttttagtaaaagatgtgtttactataaaaaccttgattgtaattgtttataactcattactaaaagttgtgactgcagaaattacgaaactaaactactacaaaaaaatgtggagaaatgggttaaaaaaaacaaggaaaaaaattcaatgttaaatcaactgaaatttttttcatttaattattcagctaattttagggaagttatcatatcactatatatatatatatatataaataatacaaacaaacgatgcgtagaagaaaaaaaactgttgtccggttcactgtccagatcgggtttaaaaacattgattttcatattatattccgaattttgttttgccaaaaatccaattacttaaatttcaggtcaatttatgttaattttttaacataacccgatccaattcaaattgaaacaaatttatatttctcttttaatagtataggaatttgcacaaatgttatgtaaaaaacggaaaattggttttttcatatctttagtttgaactatgctgcatttatacacgtattataccacagttgatttaacctaaacttcaatttgatatttaaactttcatttttatacgaaaacatacattaatgttacaatgttagaatacctttaatttctgttgttaacctgaatgttagggctgggcaaaatattcgttcgatccgctttgattcggtatatgatttggtttgattcgaaaaatccgaatatccgtaagattttggaccaaagcaaataggaaaatgtagtattcgtaaaaaccgaatcaaataacaaattttaaaaaaaaaaaaccgaatatccgcttcgatccgtatctttttatatatatattagaaaatatagttatatctatatatatatcataatagtttgtgtattgttgctattttacgtttttatgttaaaatgtttgtttgatcatttttctcatgttatgttttgatcaacgacatcaaaaactatcgggttttagttttcggaattagtttgataacattttgtagactggtggtaccaacaagtatttagtttttattttgaaagcatgttaaataaaaactttgaatatctgatatagttatatagtatatagattttttttaatatttaaatatatcaaagcggatatccgcaaatatcacaaaaaattctggatattcgaaattccggatatccggaaattttcgaagcaaagcaaagcaaatcacaaaatcaagtattcgtttaaaacgaatcgaataacaaatatcacaatttttccggatatccgtttcgtacccagacctactgaatgccatatataaaacggtaaaaacagaaaattaaagttctagtaaaaaaaacatcgcatcagttacaaggtttggattaaattaaaaaaaggtttgggttaaattagcttaagaatgaacaatttattaattatttttttggtcacatggaataaacaattaattaatttgaataatattacttaaatacatacaaacattatctgtcatcttcgattacgttatcattaaccaacgtttaggaggactttgcttcttcgtcttcttctctctttaggttcttcaagttcgcaatcctggtaagattttctcgagaaaattccatttctttctatctgattctgtttacattgttgaatgcttgaaagaatctgagttttaaccacactctctcttccctgttactcaccattttctctctgaatcctccgaaacccatttcgatttccacaatctgagctcataaatctggtttaattctcatcttcgttgcatttcagtcataaagagaacataaagcttggatatttagggtttttgcagaatttttgattaagcttatgagtttggtaataatctgtagaaattggttgatgttgtttcaggtttgggtttaggacaaatcagagaagaagatgatgtttggtttagagaaaacgatgactttggagcatgaaattctgaaggagaatcatgagactctgttgaaagattatgagagtcttcaggagaggattaagcatgctgaggaagcttatgaggctattaagttgcatcatgagaacaaagctaaggagcttgaagtgagtaacaaacgcttgcttgaggaatgtatgaaagagagaagggagaaggctaaggttaggaagacttttgaggagatgaagaagacaatggagagtgagagaactgctattgttgatgagttgaagtcgaagaatcaggagcttttgttggggaagaagaaagaggaagaagagttagtgaagatg

SEQ ID NO: 35645 - DNA, 3003 bp, Unknown; identical to SEQ ID NO: 35644
  misc_feature (1)..( 3003): 2750-1469P.txt file - cDNA_ID_3089578; gDNA_ID_2926152; Annot_ID_198131

SEQ ID NO: 35646 - DNA, 3000 bp, Unknown; identical to SEQ ID NO: 4740
  misc_feature (1)..( 3000): 2750-1469P.txt file - cDNA_ID_3089590; gDNA_ID_1620726; Annot_ID_49285

SEQ ID NO: 35647 - DNA, 3000 bp, Unknown; identical to SEQ ID NO: 4740
  misc_feature (1)..( 3000): 2750-1469P.txt file - cDNA_ID_3089590; gDNA_ID_2926153; Annot_ID_139393

SEQ ID NO: 35648 - DNA, 3000 bp, Unknown; identical to SEQ ID NO: 4627
  misc_feature (1)..( 3000): 2750-1469P.txt file - cDNA_ID_3089597; gDNA_ID_1620718; Annot_ID_165713

SEQ ID NO: 35649 - DNA, 3000 bp, Unknown; identical to SEQ ID NO: 4627
  misc_feature (1)..( 3000): 2750-1469P.txt file - cDNA_ID_3089597; gDNA_ID_2926153; Annot_ID_198231

SEQ ID NO: 35650 - DNA, 3000 bp, Unknown; identical to SEQ ID NO: 4743
  misc_feature (1)..( 3000): 2750-1469P.txt file - cDNA_ID_3089599; gDNA_ID_2926153; Annot_ID_198215

SEQ ID NO: 35651 - DNA, 3000 bp, Unknown; identical to SEQ ID NO: 8320
  misc_feature (1)..( 3000): 2750-1469P.txt file - cDNA_ID_3089615; gDNA_ID_1971724; Annot_ID_175201

SEQ ID NO: 35652 - DNA, 3000 bp, Unknown; identical to SEQ ID NO: 8320
  misc_feature (1)..( 3000): 2750-1469P.txt file - cDNA_ID_3089615; gDNA_ID_2926153; Annot_ID_198200

SEQ ID NO: 35653 - DNA, 3003 bp, Unknown
  misc_feature (1)..( 3003): 2750-1469P.txt file - cDNA_ID_3089622; gDNA_ID_1971724; Annot_ID_175199
tagacatggccagattgttgtatggtacgttattccaacatttctttctctggattttgtttggaaggacaagaaaaaataaacgtttacgagttaatttgtacctaacaaaagccttgactatttcctctttggtatgttatgagcttagatacttttaagttccaagatgtccttattgttgctaatgagtcatatacttgcaaatgtacagaccctgcaaaacaaggtgaactagattggacaagacggtacaatatcattggggggattgctcgaggaattctatatcttcatcaagatttacggcttacaatcatacaccgtgatctcaaagcgagtaatattctcttagatgtcgacatgaaacccaaaattgcagattttggcatggctaggatttacagaattgatcaaagtcatgccaattacacaattagaatcgttggaacatagtgattttttttttctcttaacttataaccttacaaatacaaactatatttggtggttacttctaggctaaaaagtctaatccttatttgcagtggttatatgtctccagaatatgcaatgcgtagtcatttctccatgaaatctgatgtctatagctttggtgtaatgattctagagattataagtggtaaaacgaatcgcagcttctactacattgatggttctcctagcaatttggtcactcatgtgagtatatgatcgttcaagttatatgagtgtatatgattaagccaaaggatattaatttatttgatcacttttgttaggcttggaagctttggagaacagggtcaccttttgaacttgtggatccgacaatgggagagagttctcggagtaacgaggctattattagatgcatccatatcgcacttttatgcgttcaagaagatcctgtagatcgaccaatgttgcctgcagcaatagtcgtgatgctcactagtaacatagacaattaccgtttgcctctcaaacatgaatgaccaatccacaagcaggtctattccttgttctaattaacaatgatgtatcaacacagttctagatcctcgttgaagaatggtttttttcttgatattggaactgtattgaatatatggaagtatctacatcatctcttgttcttctcattactctactttatgagacatttaaacaagtatatcagatagtaacattgtacaacaagattcacgttttaaacatattttcagtaaccagaattggttcagacataattaggcattggtgtttcatgtttgtgaagccaataactgaattcatagtttgtataatttaggaaatagacataagaaaatagtttgaactaaacgaacgcaaaacattagttttttttatccatggggcttggttacattgttataattgaaactgttttttagtttttgttgtattatatcatctttcgaggaagagctggtggatctggaccacgacatctctttgatttttcacatcctcgatggtacggattcgccggttgatcgggtggacagttgccatgatcacatcctggttggcgatcgccgcgtcccattcctggatagccaatctcatttgcaactgctacgttcatgttgttgcttatgaacacacatgctatgaacattgccacgaccataaacctttttgtttctttcaaaatgctcatgatgattgatgcctttttcttatgtcaaatatgagtttagatagttcaagagtgttttatgagtgtaatagaaggtttcactttgtgatatttatagagaatgaaaattctgaaagacaatgatccatacatatcaaaacagtgatatttgttgtataatatggaaggaatctcggggagtttgatttgtcttaatctttagaagcattgtgtcatgaaactatttgttggtaatactaaaaatattatgatgatatcttttcgttttagttttacttaaacagagatttgaataggataactgaaattggcagtagaaataaactactaaatatatagatgccataatagttaatagtaaaatttttacttttatattatataaagcttgatttggttttcaaagttgttaattcacgtgatcgtgacacgtctcacatctgtcagttagattatgacacatgttgaaagattttaacattttttaactaaatagaaaaattaaaaagaaaaaagtacatatctacaaatactatttctaaaccaactgagctctattatcttaatccaaaaagtatactagaagaaattaacatatactaatttacatgtgtgttatagagaactcttaaaattgtgttccttaacccaaaaaacaaaaacgaacaaaaattaacatacatactaatttatgtgtgtatagaaaactcttaaaactgttttttcttaacccaacaaaacaaaaactgaaaaaaatgtttttactaatgtttctaatttttattatcggtttacacgtggaaggagttatatgactagaaaccgtgtgtaaaccgataatagataaagagtcatattttcccaaagatattagagaaggagtcatattttgcagttcttttttgtgctagttttactcatttcataatcaaattcaagatgttcaggtatcaatatttgatcaaattaccagtcatgattctataacttgtgtactgaatgcaaatggcaaattctgactagtataaatgggtttgattaaaatgtgttatccggttgggttttgttggttttgtgtggtctaagtttgtttgttgacttccattagagctattgactcagtcaactttaatttttcaaaggcatttgcataattttccttagaccatctctttcaattaagaatgtatgacaaattcagtgaaccagtcaaatctgccaagagaacctacatagtttgagttattgatgcccaaacaaaacttcttgattctaatatctaaacacaatcttttttttctgatcttgagagaatg

SEQ ID NO: 35654 - DNA, 3003 bp, Unknown; identical to SEQ ID NO: 35653
  misc_feature (1)..( 3003): 2750-1469P.txt file - cDNA_ID_3089622; gDNA_ID_2926153; Annot_ID_198198

SEQ ID NO: 35655 - DNA, 3003 bp, Unknown; identical to SEQ ID NO: 31844
  misc_feature (1)..( 3003): 2750-1469P.txt file - cDNA_ID_3089636; gDNA_ID_2926153; Annot_ID_139378

SEQ ID NO: 35656 - DNA, 3003 bp, Unknown; identical to SEQ ID NO: 31844
  misc_feature (1)..( 3003): 2750-1469P.txt file - cDNA_ID_3089636; gDNA_ID_2926153; Annot_ID_198194

SEQ ID NO: 35657 - DNA, 3003 bp, Unknown; identical to SEQ ID NO: 31845
  misc_feature (1)..( 3003): 2750-1469P.txt file - cDNA_ID_3089640; gDNA_ID_2926153; Annot_ID_198193

SEQ ID NO: 35658 - DNA, 3003 bp, Unknown
  misc_feature (1)..( 3003): 2750-1469P.txt file - cDNA_ID_3089690; gDNA_ID_2926154; Annot_ID_198301
ttggcacaaacgtaccaggaaagccagtggatgcgtatcccttatccctgactgtagaaacccgaccaccaacttcgactcaacctccaacaccacccgccgtacccctctctcccaagcagtcaccagcccataatatactccccacagttcagctaagggagctgaacacactccgatgttaagcgcaaaccctcccagccaactgccctccccatccctaaccacaccccttgccgtcgcgaaccccggatttccgtgtgaggccccgtccgtgttcaccgttgcccatcgttcgctcggcttcttccaaacgatctgcctctccactctttctcccaaattcctgcccgcattgactttcaagtacgccgccccaacctccgcagccatgtcccgtacaaaccgaacccgatccctacatggtctcaactcgccaaacacattcatgcatctccatttccatccccaccatatcgacatagcaaacaacgtaggccaccctcccctactcggatcctctttctggtgtagattctcataaagccattccaagagagatcttgtgaagaacctctcacgttcccgggcaggcactaaccgtaaccaaataccactcattgctggacaatcccgaaggacatgtataattgtctccttcgctcctctacacacttggcaaacgtcggtatcccccatgtgtctccgagctctctccacattcgttaatatagcctggttccctacaagccataaaaaaactcgtaccctttccggagccaatactctccatatcctggaaaagaaacgctccatgtcctgagtctgcgatccctcctccatgagtagagaataagccgaccccactgtaaactctccattctccgtaccagaccatgacagagtatccgctactccgggaccgcctcccaacacgaccgcagtcaatcgtaacagcagcttctccggtaagaaacacgaaattctgcccatgtcccaaccaacacgaaattcttaattagttatttataagattgagatttcaccggggcagaaaaatgattaattgtcatgatttatgaataaaagaaaaaagaaatctacttacacttaaaatggaaacagtttatactgtgagataaagagattgattaattacgatttaagtaaaagaaagaaaaataactttgaattgtgaattgaatacaacaaaaacaatatgcacgcattacaaatatttagtcttgttttttattagccgttaagggaagtgagaccaaaggtgacacttgtggtacgaatggtagcttcagtgggtaactacgattacatcattgattatgagttccaaactgatggggttatgagagcaaaggtactttcaatatttgacttttatctcattttgacaaaaacaaatcataaaaggttccgtattgaaaatattttacttttggtaatatcaacgacaggttgggcttagtggaatgttgatggtgaaagggacaacgtacgagaacaagaaccaagtgaagaaagacaaagaaggtaatgaagaagagctttatggcacgattctgtccgaaaatgtaattggagttattcacgaccactacgtcactttttaccttgacctcgatgtcgatggcccggacaattcctttgttaaagtgaacctcaagaggcaagagacggcgccaggtgagtcacctaggaaaagttacatgaaagcagttaggaacattgtgaaaaccgaaaaagacggtcagatcaagcttagcttgtacgatccatcagaataccacgtcattaatcctggtaaaacaactcgagttggtaacccgacgggttacaaggttgtccctagagccacagcagctagtctacttgaccatgatgatccaccgcagaagagaggagcttttactaataaccaaatttgggttactccctacaataagtccgagcaatgggctagtggtttattcacttaccaaagccatggtgatgatactcttgcggtttggtccgacaggtgattagttgcaaagaattaccctttttattagttatattatagttaatattgttacgattgatttagtgtctttatttggtgtgatgcagagatagagatatagagaataaggacattgtggtgtggtacacgcttgggttccatcacattccatgtcaagaagattttccgataatgcccactgtttcttcaagtttcgatttgaagcccgtaaattttttcgagcgcaatccaatccttaaggccgctccaaactttgaatatgaccttccggtttgcggagccaaatctgattctgcttgagaagaataaagaaccaacaaaagaaattatccaactttttggatcttattggcaaaactacaaatcaagttacatgatattcactttcctatgtgttattggcgaaatcccaactcctacaaaacttataagcgcaaaaatagtatataacatgtccaattcacaccggaatgttaatctcaaggaattgtattttctcctagaatcactacttttgtgatagaagactttttttttgtcaaccttgatagaagatcttgataagattttttgtttttgtttttggcattgataacacattattctttcctaaaagaaattagtactcccctatatctcagtcaatttactaatgtttgatcttatgtttgtatatcttctcaaagcttgatcgtatctttctcttaatttgtatctcagtgtcattttatcaattaatgcttgattgtatacggagtattggtatttaacataattttaatgttcactgtgtgaatctaagtaaatcaacagtccagagactcagattgataatgctactacctaattccttgacgtaacaaatgcttatatctcatctaagaaatattcagtcgaaaataaagcatttccatcactctctgctcataaaactatcacaatagatattgacaaaaaaaatg

SEQ ID NO: 35659 - DNA, 3003 bp, Unknown; identical to SEQ ID NO: 21300
  misc_feature (1)..( 3003): 2750-1469P.txt file - cDNA_ID_3089710; gDNA_ID_1620632; Annot_ID_162732

SEQ ID NO: 35660 - DNA, 3003 bp, Unknown; identical to SEQ ID NO: 21300
  misc_feature (1)..( 3003): 2750-1469P.txt file - cDNA_ID_3089710; gDNA_ID_2926154; Annot_ID_198276

SEQ ID NO: 35661 - DNA, 3003 bp, Unknown; identical to SEQ ID NO: 18917
  misc_feature (1)..( 3003): 2750-1469P.txt file - cDNA_ID_3089720; gDNA_ID_1620632; Annot_ID_162722

SEQ ID NO: 35662 - DNA, 3003 bp, Unknown; identical to SEQ ID NO: 18917
  misc_feature (1)..( 3003): 2750-1469P.txt file - cDNA_ID_3089720; gDNA_ID_2926154; Annot_ID_198268

SEQ ID NO: 35663 - DNA, 3000 bp, Unknown; identical to SEQ ID NO: 4505
  misc_feature (1)..( 3000): 2750-1469P.txt file - cDNA_ID_3089733; gDNA_ID_2926155; Annot_ID_198372

SEQ ID NO: 35664 - DNA, 3003 bp, Unknown; identical to SEQ ID NO: 29185
  misc_feature (1)..( 3003): 2750-1469P.txt file - cDNA_ID_3089737; gDNA_ID_1620711; Annot_ID_165410

SEQ ID NO: 35665 - DNA, 3003 bp, Unknown; identical to SEQ ID NO: 29185
  misc_feature (1)..( 3003): 2750-1469P.txt file - cDNA_ID_3089737; gDNA_ID_2926155; Annot_ID_198361

SEQ ID NO: 35666 - DNA, 3000 bp, Unknown; identical to SEQ ID NO: 4491
  misc_feature (1)..( 3000): 2750-1469P.txt file - cDNA_ID_3089741; gDNA_ID_2926155; Annot_ID_198359

SEQ ID NO: 35667 - DNA, 3003 bp, Unknown
  misc_feature (1)..( 3003): 2750-1469P.txt file - cDNA_ID_3089745; gDNA_ID_2926155; Annot_ID_198358
tgttgtataaaacagactggtttctagttactagaagatcaagttcgtcgatgagaagtatgcaaggcttctcatcctctttaccaatcctttttccttctgcaaacctctcatttagacactgtagagctttcttccaaccgactcgatgaccactcaatgcttcatagattacactgtaaatgttctcaggtgaagccaatttgagaccattgatctccacaaagcaataagggcttacgcttccctcttcaacctcagccttcagattcttcataaccgataacacactaatagtcttcccagtcccgggaacaccatgaatatacatacatcttcctaaacactgatcatccgagattgaaccttttataaacgaagtgatctcttccatttctttgcttctacaaggaagagacttaggacgtgtagccaacaacaaagtagctttcgccttttctaactcactctgcttatgacatctcacatgttcaggaatcagcttcatccccaccttctcaaccccaaagaatctccctttacgagagttcgcacctcctcttgcactagtcaaacctcctcgcttactcttcaaaacttcatcatcaagctccatctcttcatcactatcatcaacctcctcctccttcctaccattccactcttgatcactatcagaatctccatcagccaattcagccaaacgcttaaagctacgccaatgaacatcatactcatactcacacaagaacacatcatcaccatcattactagctttcgaaaactccttaggacacttgacagaacaatgcctaagaatacattccatctctatatcagcaaaatcattcgtcaaataaagctctcgtttcagattatgcggttgacgccccgaaacggtctcttcaggtatcatataccaacgagcacgaatccaatacacaccatcatcaacttctttccataacttgtcgattcgagcagcccatagatcaccggaaagtagcttctccctcatagttctcgctaacttcttcccttccggtggcttaggaaggtcaagtgtttgactttgaccagactttttaacctcacagaattgacagatccaatcaccttcaggaacttccttcaatggcggtttcaagcatttcaaatgaaatccacctaaacaatcatcacactcaatcattatgttagtatctgatttgaaacaaatctgacaatcttcaatttctggatcttcttcttcatctgaattcgaatcttctcttctcttaacgtaaacatcatcaccgatttcgaattcggtttcgtcgaattcgactttattgtaataaactctcttcttcttcttcgtcttcttaatcgtctcagatctaattggtgaaacaggagtgaaggaatctatcttcttcttcttcttcggagtttctgttttcttcgacttcgatggaacgacatcagtggttggttttctgggggcacgttctcgttttcgaattagattcattccttcgattgggtcatttcctggagcatcaattgggtcatttcccagatcgattttacgagaaacatgacgagcagatctacggagaggagtgtgagtttctggggtttgaggagtgtgtgaggttgaagatggagatagatacgatttgcgatagatgttagacggagttttggttggggatttgaaggtttttgctcttggagttgaagccattgatggtgtaagctagggtttttctgggtgaagaatgaagagtgaatgaagaggaagaagaagacgatgatgatgatgaagaaggaggtagagagagaaagttggcgggaaaaggtggcggacacttcttcttcttcgcatcagacaagagtttgcgagaaaagggtttaactttgggccgaatattgggcttattaacccaactcatcactttaggtttatccaaattaatcataacattttgggccgatttgataagaaatcaataatataggtccttttgtgaaagaaaaaaaaaaaaacgaagagcacaaagtgaaatggggaattgttttttgtagagccctaaatagaaaatctccaactgtagtgaaagtgaagaagaagaagaagatggtggagatctgaaaatatgcgatagatctgacgaatgcagatctaaaatggtctaattctataccaatctcctctctcattgtttctactaagttcaagttggtgtactgatcttattttgtggcggtgtatatacagtcatctagaggaagggagaggatgatgatgaaggaagacggtagaggaaggaatccaccgtcgcgacatctttgggttggtaaccttcctcatgggatacttgaacgagaattagccgatcggttcttaagatttggtgaattggaaagcttagcgtttcagcctggacgaagctacgcatttgttaattttaatcacgatgaggatgcgttcgctgcgattgagtcgcttcaaggcttcccactctctggaaacccacttaggatcgagtttgctaaggcggttagtgttgaaaactcctttttttttttttttttttccaatgcttgcttaatttggcttggtttttgagtcttgaggttgattagagatgacatgaactaacttattaggagtgattgaaagttatcagttagtgtgtcttcaatagatgactagttatgtgattacttacacgtaaattagttccagtcagtaccattctagaaattaatgattgttgactacgcaaaggtaacaagtctcttaccttgttctggataagttgttactcggatgatacttaatcattgtctaagtttatagaacttagcaatcagtaccattctagaaattaatgattgttgactacgcaaaggtaacaagtctcttaccttgttctggataagttgttactcggatgatacttaatcattgtctaagtttatagaacttagcaatgagcaaaacaaacgaagatg

SEQ ID NO: 35668 - DNA, 3003 bp, Unknown
  misc_feature (1)..( 3003): 2750-1469P.txt file - cDNA_ID_3089775; gDNA_ID_1620711; Annot_ID_49004
aaggatactccatgcaatacataagggcaccattaggaccaagctttagatcctccatcacatcttccaaagaaataagttctctgatatctgcattcaacgatgtcaaaaaagtgagaagcactcaaaactccccccaaaggtaattgaacaagaagaaacttcttcactcacccatagccacaggatagttgaagatctccgcagcaggatcaaggttaacaacatgcattgttcgaccgatagtttcacaatgttcatacaaagacgagcaataagttgactgatagatccaaaacacacaaaaaaacacagttagtcaaatctcactgatgaaactagttaacagaaattaacttaacatagactatagcataacctttccactgcctgctggaccaataactagctgggcgtaacccattgtagcaagcaagcagaacctctccacaaaagctcttgaaattaacaaatacagtgaaagattctaaaagacgcaaagattgcaacagttatataagcaatacaccagacacctaaaccaaacaacactctcaaaatgtcgcagggacccataaaccagaagcaagaagcaatagacacatttcagtacctgaaaggcaaaaaagatcaaaactttaacactcacatacatgatttagctagggttttaaagacccacataaacccatgaaatagataacctaaaaaagacgaaatttgggagagaaattgaagaaattagaagcagccgacaaaaatttcacaaggttgaaacgaaacccagaaggaataaataatcagaagcatcaatggagaagaaaatcggaatcagagaaatgattattgactttcacctttgacgcgtcttcgtttttctttgctctcaaaacctaaagctcaagcaaaagaagaagagaggaaatttcaagagcttcagttttttggtttgttgcgttttattaaagaccttttttagggttctttatggtttttcattcattacttttttaatagtggtcgtaatatataaatcaaaaagacttttttacttaattattttttaattctttgaaacagctaaacgatttgaccatgcaaaagaactagtctccaccaacgtgtctcacgtggatcaaaaacaatgggttttatgcaaaaaaaaaaaaaaaaaaaaacacattcaaaatcgatatttttacaattttagtttttagatttaaaaaatagaaaataatttgattgaatctaaaataatatgtaatatatctaattttagtttgcaactttacagtaaacgttttcacgatcacatatatttgtgtttaaatattttaaagatatagttgaattcatcatctcgagagattccatttgatatattatttatcaaaattttaacatttgacgataatgaaaaaaattgaattgcgtattattttatattttataggtttattttgcatttctgacataaataaaattgtaaaaatagacgacttcgaagtttgagcttgagatcactaaaagaagttaatgaggtatgttgtttgaaataaatttggggacttgtctcccacaaaaactccttatggattaaatagatcaaggcacacctactcaaaagagtcactatttggtaaataaaagaaaatactactttgggctcttagatgtggaagaaattactcaaatacaaaggagtggccaaacaattttgcaaagttgaggtaaacaactggaaaaaagtttcattctggtatgataactggtttacaatgggctgtttgatggatatcataggagagaggggacgaattgagtttgacatcttaaagcaaatgtcgatggcggaagcatggacataactgcaaccctaaaacaaattgaaacagatctcaccatgaagagacaaaatcaaaccgatgaagaggatgtggtattatggaaaggaaaaacgatgtgtatcaatcaatctttagaaccaaagacacttggaatcacactcgtaccgatacaaataaggtagtttggcataaagaggtatggtttactcacacaacaccaaagtattctttttgcacatggttggcgatccagaacagactctcaatgacaaacttctttctctacagcaactgcattgaatcagaggatcatttattcttctattgtagctatgcagctgaagtatgggaggctctaactataaatatctacaaagcaaactactcgacgaactggacatctctaatcacaagcatatatagcccatggcaggagcgtatggaaggttttattgcgcgatatatattccaagccacagtgtcacacaatttggtgcaagagaaacatacgtagagataaagaaacaccaaaccctctggctcggctcatcaagtggatagacaagcatagcaaaatgttccaattttaagtaagaaaaacaaaattctactgacaatttcaaaaacaagataagtaaaagtttaaatttaaaaaaaatgaactaaaaagctttgtcctattgatcacctaatgagcctttaaatttctaaccgtcttaaatcctattactagttaaaatctttaaattattttaaattaaagatataggttacattatttaaaatatagatataatcaattaaaagtttaaaactcatgttaaaagcatcttaaagggaaatgaaatattaatacaagaaacaaatatatatatgtaaagacatattttcaccagcggtccaaaaaaaaggatatattcacatattaaaagaaaatattggggcaaagtggataagataacatccaatgagaataagacatatcaaaattcatatccctgagagccacaacaatcttaagaaacagatcctctgtcttgccacatcagcaaacgcaatctcaagtttcgtagattgcttatttcttcatcacacacttcaaactcgattttattttaattttcataagagaacaaccaagacaaaaagaacaatg

SEQ ID NO: 35669 - DNA, 3003 bp, Unknown; identical to SEQ ID NO: 35668
  misc_feature (1)..( 3003): 2750-1469P.txt file - cDNA_ID_3089775; gDNA_ID_1620711; Annot_ID_165428

SEQ ID NO: 35670 - DNA, 3003 bp, Unknown; identical to SEQ ID NO: 35668
  misc_feature (1)..( 3003): 2750-1469P.txt file - cDNA_ID_3089775; gDNA_ID_2926155; Annot_ID_139506

SEQ ID NO: 35671 - DNA, 3003 bp, Unknown; identical to SEQ ID NO: 35668
  misc_feature (1)..( 3003): 2750-1469P.txt file - cDNA_ID_3089775; gDNA_ID_2926155; Annot_ID_198376

SEQ ID NO: 35672 - DNA, 2492 bp, Unknown
  misc_feature (1)..( 2492): 2750-1469P.txt file - cDNA_ID_3089775; gDNA_ID_2926156; Annot_ID_198400
gttatataagcaatacaccagacacctaaaccaaacaacactctcaaaatgtcgcagggacccataaaccagaagcaagaagcaatagacacatttcagtacctgaaaggcaaaaaagatcaaaactttaacactcacatacatgatttagctagggttttaaagacccacataaacccatgaaatagataacctaaaaaagacgaaatttgggagagaaattgaagaaattagaagcagccgacaaaaatttcacaaggttgaaacgaaacccagaaggaataaataatcagaagcatcaatggagaagaaaatcggaatcagagaaatgattattgactttcacctttgacgcgtcttcgtttttctttgctctcaaaacctaaagctcaagcaaaagaagaagagaggaaatttcaagagcttcagttttttggtttgttgcgttttattaaagaccttttttagggttctttatggtttttcattcattacttttttaatagtggtcgtaatatataaatcaaaaagacttttttacttaattattttttaattctttgaaacagctaaacgatttgaccatgcaaaagaactagtctccaccaacgtgtctcacgtggatcaaaaacaatgggttttatgcaaaaaaaaaaaaaaaaaaaaacacattcaaaatcgatatttttacaattttagtttttagatttaaaaaatagaaaataatttgattgaatctaaaataatatgtaatatatctaattttagtttgcaactttacagtaaacgttttcacgatcacatatatttgtgtttaaatattttaaagatatagttgaattcatcatctcgagagattccatttgatatattatttatcaaaattttaacatttgacgataatgaaaaaaattgaattgcgtattattttatattttataggtttattttgcatttctgacataaataaaattgtaaaaatagacgacttcgaagtttgagcttgagatcactaaaagaagttaatgaggtatgttgtttgaaataaatttggggacttgtctcccacaaaaactccttatggattaaatagatcaaggcacacctactcaaaagagtcactatttggtaaataaaagaaaatactactttgggctcttagatgtggaagaaattactcaaatacaaaggagtggccaaacaattttgcaaagttgaggtaaacaactggaaaaaagtttcattctggtatgataactggtttacaatgggctgtttgatggatatcataggagagaggggacgaattgagtttgacatcttaaagcaaatgtcgatggcggaagcatggacataactgcaaccctaaaacaaattgaaacagatctcaccatgaagagacaaaatcaaaccgatgaagaggatgtggtattatggaaaggaaaaacgatgtgtatcaatcaatctttagaaccaaagacacttggaatcacactcgtaccgatacaaataaggtagtttggcataaagaggtatggtttactcacacaacaccaaagtattctttttgcacatggttggcgatccagaacagactctcaatgacaaacttctttctctacagcaactgcattgaatcagaggatcatttattcttctattgtagctatgcagctgaagtatgggaggctctaactataaatatctacaaagcaaactactcgacgaactggacatctctaatcacaagcatatatagcccatggcaggagcgtatggaaggttttattgcgcgatatatattccaagccacagtgtcacacaatttggtgcaagagaaacatacgtagagataaagaaacaccaaaccctctggctcggctcatcaagtggatagacaagcatagcaaaatgttccaattttaagtaagaaaaacaaaattctactgacaatttcaaaaacaagataagtaaaagtttaaatttaaaaaaaatgaactaaaaagctttgtcctattgatcacctaatgagcctttaaatttctaaccgtcttaaatcctattactagttaaaatctttaaattattttaaattaaagatataggttacattatttaaaatatagatataatcaattaaaagtttaaaactcatgttaaaagcatcttaaagggaaatgaaatattaatacaagaaacaaatatatatatgtaaagacatattttcaccagcggtccaaaaaaaaggatatattcacatattaaaagaaaatattggggcaaagtggataagataacatccaatgagaataagacatatcaaaattcatatccctgagagccacaacaatcttaagaaacagatcctctgtcttgccacatcagcaaacgcaatctcaagtttcgtagattgcttatttcttcatcacacacttcaaactcgattttattttaattttcataagagaacaaccaagacaaaaagaacaatg

SEQ ID NO: 35673 - DNA, 3000 bp, Unknown; identical to SEQ ID NO: 3308
  misc_feature (1)..( 3000): 2750-1469P.txt file - cDNA_ID_3089786; gDNA_ID_1620637; Annot_ID_162953

SEQ ID NO: 35674 - DNA, 3000 bp, Unknown; identical to SEQ ID NO: 3308
  misc_feature (1)..( 3000): 2750-1469P.txt file - cDNA_ID_3089786; gDNA_ID_2926156; Annot_ID_198456

SEQ ID NO: 35675 - DNA, 3000 bp, Unknown
  misc_feature (1)..( 3000): 2750-1469P.txt file - cDNA_ID_3089811; gDNA_ID_1971822; Annot_ID_176232
taacacctttgttcccattaatcaactcaacaatctcattccttttctcctctaacttcaaccctaaactccaattctcaaaatcacttaaatcatcaggttctctaacaaacgtgcctttatcagattgtaacgcaagtaacatcatctcaaaacgacgataaggtttcaacgacaaaacctgatttgtacggtcacgattcggttctaaagattccttaccacgagaaataatcttagccgttgatttccacacggtggcgccgatatcgtcgataacttgacctaccgattcgagagattccgaagcgacggaggcgccaatttcgagagaatcaggtaatcttgaagctactcgtcggattattgaggtttctttcttcaattcggatccgaattcgaccaaatcgcgacggtaggatccgattacagattcggattttgtcgatagggttttgattagattgccgaaactccatgaagaagaagaagaagaagttgtggattcatgcataggtgaatcggagctatgttgatgatccatgaagaagaagcacaaggaaactaggttttttttaaggaagtttaatttcgtacggaaactataataaataataatgaatcgatgattactggttctgttttaaaagtcagatgtcggtggcatgtgttttgtatgaacaataaaatatattaaacggttcacttaaccgagtaataattggaaatttgtaccaaaccggttgaattattttagaacttttgccttttttttcttttatacttgcgtcgcttatttgccatcgaagaaaacggttggtggagattattctcgttgcaggctggtccaaggctaaagcccgtaaaacatgagttttatgcagcaaatgactataacaaagtttaggagtatcattttacagaaatttattgtggtagattggttaatagctggattctctctacaaagatgatgtgtttgaaccttcattattacattatgaatatatatttttttaaactatatttaatgatggaataaaattgtttttgcttcaggtttactttgggtcggccctgtcattgcctcaacgtctaatgagtctagaagagaagtcgttgtcatcgccgtctcttgtaataaatgcctactttcatatggatttccctccggatcctaatatggacatttatcctagtagtgacaaacatttttcatgtggttatgcatcaggtttgatctatttctatagtttgtcgatcaaattagacgagtttcattacgatcatgggcctgtgatatataaccttccgatcaagaaatccttatgtcgcttcttcagatgtggtttgctactgccactacaagatacagaatcatctttgttgttctctgttgcatcatggaagaaatattcttctctcatcgtacaagatgagcatcgtagaatctcatcgtacaagatgagcatcgttttctacatgtctacgaaagagtgtgctggttcaactcccttaattgagcttatttcatcttaatgtgataatgtcattgttatgggctgttcaagatatgggcctcgtgaattaacagggccacaaaggcggtaaaataagcactatcgcgtgcacaattttaatctttaaattgccgttgactcaacaaatttgacccaaaatttagtcaatgtttactaattcatagaaaaacgttaaacaactcgattaaaacctaataagctcataaaatcctcaaaatttctctcaaactaagaagtctatgtgattttttctcaaaatcgattgataaacacatagaaattaaaatcaaattcgcatattttgatgagagtatgatgaatagatgaataaagaagcttctaattcgaatgaatgaattagatttacagagatcttagattttaatttgagacaaattttatgattttctgagtttattaggttttaatcgagtaagttatttggtatttctttcctgcaccgctacccatatttttttatttgtttcctgtttactttttacttgcctatcacgatatttattcgcatatcttaataatctcctttccttgctcaacaagatattaaatttgtgtccactcatgtttccgtatcgaatgccaatcaacattttctttgaaaatgtttgatacttaaacctttgtgaccaagattgtgtcatggttggttgggaacatgtttttcaatgatccttttgtccactgagtttctccttcatctttgaatcgtaagcattgtaacatggtttcggagggatatctccttggtttaagctgatttgtgatgttaaatctagattgacatacgtttccttggtttgatgttgtatataaaagaagttgagtattatagtttattattatcaatacaaaaaacggcttatcacgatattttgtaaaacacgttcatcttagattcatttcgatatttgtattggtagactgaatggataaaccacgacataagccttggaagctctttaaatttgttgatttttgttgataatttaggtttatttgtgtttgttagttttagatgagctaattatattttgtttcgtattgttgattaaggatgtgaaattggtaatgttggtagatagattggacgattgttggtttcttgttatggaccaaagtttttaagcaaaagtttccttttaacccaactctctcttagagaattaggctaactgttggagtttggttctttcattaagaagaagagaccttatataggccacaatacattgtgtaaaaagaaacctcaaacctaattctaaaagtaaaacttccaaaacccatgattaaaagaaacccataacaccaaaactaattaattaaaacgtcctaaccgtggcctaatcaatctaaccatagtctcgtatcatttttcttgtggtgtagagacgcgagggcattgcaagagaaggcagctagataggcaggacaatcaatg

SEQ ID NO: 35676 - DNA, 3000 bp, Unknown; identical to SEQ ID NO: 35675
  misc_feature (1)..( 3000): 2750-1469P.txt file - cDNA_ID_3089811; gDNA_ID_2926156; Annot_ID_198435

SEQ ID NO: 35677 - DNA, 3003 bp, Unknown; identical to SEQ ID NO: 31800
  misc_feature (1)..( 3003): 2750-1469P.txt file - cDNA_ID_3089823; gDNA_ID_2926156; Annot_ID_198425

SEQ ID NO: 35678 - DNA, 3003 bp, Unknown
  misc_feature (1)..( 3003): 2750-1469P.txt file - cDNA_ID_3089827; gDNA_ID_1971822; Annot_ID_176219
aggctactagattacatgataaaacacaatcatgattgtaaatgattttcttcatttctgatgcttacgtagtcactagcggtttctatatggatctcgttgctctgggaatctatggaaaatttgagtacagagaacacgccttttaagctagataatgtgattgagattatgtacgaaatgagagaatgaagaaaagagacgatggtggtgagagtagctcacaaaagaggaattattagtgatagttttaaattatttctctgtttttgtcgattggattggattgcagagtccactagattgcatgatgcatctcatatgtgaagtgtctctgattaagtgattattttgtgaagttagtgttctcatgtgtgtattttttttctgattaaaaggtaacattatctgtttttgtagtgtttttttcttttttttttcttttgtgatgcattcctgtatgtgtattctgtactcttttgatgataaatacgtggttatctgaatatgttctcagcatgttcaagttccggttccaacaccaaagagtaatgaggtttgcctgaaattagaagctactagtctaaaccctgttgattggaaaattcagaaaggaatgatccgcccatttctgccccgcaagttcccctgcattccaggtattctaatagctttgaagattttagtttctgtatagaagaaagaggttactttgcttagaggtcgttgagtttggaacctttgatatttgttttgaacagctactgatgttgctggagaggtcgttgaggttggatcaggagtaaaaaattttaaggctggtgacaaagttgtagcggttcttagccatctagtaagttttttcagacagacaagtagaaactttaattaccttgaaacatgttaagggaaactgattttgttctttcagggtggaggtggacttgctgagttcgctgttgcaaccgagaagctgactgtcaaaagacctcaagaagtgggagcagctgaagcagcagctttacctgtggcgggtctaaccgctctccaagctcttactaatcctgcggggttgaagctggatggtacaggcaagaaggcgaacatcctggtcacagcagcatctggtggggttggtcactatgcagtccagctggcaaaacttgcaaatgctcacgtaaccgctacatgtggtgcccggaacatagagtttgtcaaatcgttgggagcggatgaggttctcgactacaagactcccgagggagccgccctcaagagtccgtcgggtaaaaaatatgacgctgtggtccattgtgcaaacgggattccattttcggtattcgaaccaaatttgtcggaaaacgggaaggtgatagacatcacaccggggcctaatgcaatgtggacttatgcggttaagaaaataaccatgtcaaagaagcagttagtgccactcttgttgatcccaaaagctgagaatttggagtttatggtgaatctagtgaaagaagggaaagtgaagacagtgattgactcaaagcatcctttgagcaaagcggaggatgcttgggccaaaagtatcgatggtcatgctactgggaagatcattgtcgagccataagagcgttgtagccatctttgactgtctgtgaatgtgataatagatgttaaaagtttgcgtaccgtttacagaatgttttatgttgttttgtttaatatacccgagtatgtcgaaagttacatgaaaagaaaatttggatgaaataaataatacttgttaggtattttagttttaccataccgctgaagttgaaccgaaactgagcatggaatcgaataaaacagacccaacaacatcataaagcccaatagcccattaacgacttcgtcaattcccctatcttaaaaagactttctccagtagaatcttccggtaaataaaacaatagtcgaaggagatttccgtcatttcaaatggtaagaaaaccagaattatttaatatcactctcttaagggaccaccgttgccttccccaccacaaccaaccattttcctccatttttttctttttccttattaatattttaataataatacaaaaatcaataattatcttcttaaatatttaatttaattaattaattatgtatttcgttcttcttcttcttcttcaatttcttctttcttctcccatggcttcctaaacaatctgctattcctctctctcttcttcacctatagtttatctctttttttttgttttggcttctcttaaattcactttctctaaaacataaacgacattgatgtttcttcatcagatcctttaattcttctccaattctcattctccttacatcaatggtgagaatttttttttatagattatgtttttaattcttgtgttcatgtaagatttttttttttttttttttttgtgttttattgttttcttaattccgattggatttgttttttgtttatttttctcaattttatctcaatttcttggacaaattgatctttttttactctacaaataaataaagtttgagactttatagcagaatcttcatatgtagcaattgaagatttttttttcttttctaaaccgatctaaatagattaaatcatcattattgaaaacaaaagattttgtttttattttgattaaatcctttttttttttttttttttttgcagataaactttgtagttggagatttgttgtggatgaagattattgattgcagcttataggaagctgctctttttgttttgaacaatgttgctaacttttcagattcttataattaatcagtcttatgatgagaagttggttcttgattacatactacaatcaagaagtaaacagtttatgcaatcttgtgacggttcttgtgttcaaagagtagatacttgttcttcaaggtggaggttaacagaggacaattgacggggtttttaatcgttgttgtattgctcgaataaacggaatcatg

SEQ ID NO: 35679 - DNA, 3003 bp, Unknown; identical to SEQ ID NO: 35678
  misc_feature (1)..( 3003): 2750-1469P.txt file - cDNA_ID_3089827; gDNA_ID_2926156; Annot_ID_198424

SEQ ID NO: 35680 - DNA, 3000 bp, Unknown
  misc_feature (1)..( 3000): 2750-1469P.txt file - cDNA_ID_3089831; gDNA_ID_1971822; Annot_ID_176214
gagacttggtaagaaaactgttggagaaagatcctagccgtaggattaatgttgaaggaatcaagggacatgatttctttaaagggttggattgggatttggtgcttaaggtatcacgaccaccgtatattccggcgccggaaaattatgagatttcgaaaatcgacgtggagaaattcgtccatgaaatatttactaaatgtgaacataatggtaattttattgtcttttagtttaaatttattttaaaaatttgtagaattatttatgtctatcatatgattttaggtaattgtcaaactggccatttacatatatagaatattcgataactcagagaatattatgccaactagcttcaagagatatatttgatatgctttgcttttttagttttcacaatgattttttttttgtatctagtcctaattttgtgacattattatatattcgatttaagaggaatttccaaaaagagaaactcaaatccaaatcttggaatatgaaaaaagaaagaaaattgggtggtttagagaaggtattaaaagaaggaaagtgaagcaacagaagatgtattagtgaactgttttggcggtggcatcatcaatattcactcggagtttgataatggacctacttctttcttttgtcctctctctattctattttttcaatcactactcaattatgaagatgatttagagtcatcaatagtggactattagactctactattcagtaatgacgataccaatataggtggttgatgttgaattgttattaaatcactaatgttgaaacttggaacgtgttaaatcgggttcttatgaagttatgatgctgacccattacctgtctcttgttcttcgaaatttcacaaaagaatatagtgttctaaaagaaaaggaaaaaaaaaagagggttttgatttcttttcttcccaaaacattgattcgttttagactacttttgttagtttaagccatgacttttgtatatgtgtgagccaaatttttattatttattgacttaagtttggctcaaactatttacaaaaatgattggactattatttgacaacaaatcatgtaactcattacaagttttctttaaatcaatcatatgaggaaaagagattaaacatattttgtttttagttgcacccacataaagactcgtaaaatacatgattctatctaactgtttattctttatagatgtgattacacgaacacgaaccatgtgatgatagtaattagatgacaagagatgaataatattgtttggtgatagtatttgtatttgtccatataccaagctgtgatttgcttcgcggtggcatttaagagagctgttgtctttcacatgtttttcaagatgagatttttgtttaaataaattaaatataagttgcaatggaattcacataccgattcttctcaaatcagcccaaccgatgagtaaatgtgaagacaaagaaaaaataatgagattggtttgtaaccaatttcagaaactagccgaaaagaaagtctctcatattaagggaggaccaaggagctgagatgatcgtaggtgcaggagacaacaattatcaaccatagttatcctaaccagaattgtatacgtctatggttgaaatggtttatactacttcatagttgaatctcaagaattttatgtattttgatatattttattttattgaggttttattctttaaatcatactttacaacaaagaaagtgtacatatgtaatatatgaatgtaaatgctgttttttttcttaatcatatggttgaagagatttacattatgacatctaagattttaagattaatggtaaagagaagtttgtttgcaagctttacaagagtttgtgcgggtggaaacatactttgagattagtacaagaggtactttgtgactttctttaggtgtgagactgagttgtagttatcttaagaagtgtggagagtcctacttgacattgttgttgtatgtagatgatatgttgatagtgggagcagacttacatgagattagcaagttaaaggtaaaacttttatcagtttgcggtaaaagacctaggaaaataagatcaatataagcaagggagagcatctccaatggaggggtctcttgttattttgagagagttctcttgattttgttgattaaaaaataatcaaaactgattaattttgagagaatcgtctctctgaagagagatttttggagttgagagagccgaacacgtggctctaggtgattggttggtttatttaacaattttttttttatcgtttatgtattcctgtcgtcttctctagcgattgtgcgactcttttttcctgcgattctgctactctggagaaaggaagacgaatgattagttaaagaagaagaagaggagtcttgcgatagaagaagatttttgcgatatcttcatagaaggaagatggtcttatctcaaggctctgcatctctctccttttctcatccatgtaatctctttttctctctttgctacccttcttcttcctctagttgtactttgtattctgaccaattctccaattctctaaatttaagctttagtttgaaaattaggatttctgggtatcctaagcagctcaatttttgatatttctgattcgttttataaactgaatcgttcacatacggttttgttctcttaaattgggggaaacaactatttagcttggctgaacaccaatagtggcaagaaagagaaatcgaattgaaagagaaattgaatgttgttgcggcaggtagtgcgtattggaagaatttaacattgtgagagagtgatcttattgatttagtggtgttacatgaacttagcatgtaaggatcgtgctctgtcttggttattagtggtgaagggtgttcaaaaatcagtgacttgctttgctcaattttcacaagaggtcatgcgtccatgagcaattggcataatacgtaattgtcagatg

SEQ ID NO: 35681 - DNA, 3000 bp, Unknown; identical to SEQ ID NO: 21968
  misc_feature (1)..( 3000): 2750-1469P.txt file - cDNA_ID_3089831; gDNA_ID_2926156; Annot_ID_198421

SEQ ID NO: 35682 - DNA, 3003 bp, Unknown
  misc_feature (1)..( 3003): 2750-1469P.txt file - cDNA_ID_3089835; gDNA_ID_1971822; Annot_ID_176205
tattcgcaactaaatacttacgcccatctatgatagctccagtaataagcagcttttcgtaacttacctattacttaagatcaagttctacttagctactctagaactagcattaaaaacaatcaagatggcaaactctaaagataattttaataggttggtgatctactaaatcatctaaaaccctaatgagaaaccttaaacctaacaagtggactaataatgtaatcagaaaatcttttggtgtgatttatggaaattttaaacttcaaaccgtcagacttcttgttgggccgcgagcggtctcgatcgactccaggagggtgtcgggtgacactcttgccttggtcaaaatccaaattcgtccttcaagtttgagttcttctgtttagctctagaatactccatgaattctcaaacttgtcccgatctttgaaatacctgaaaagcctctaaaaagactctagaaataacaaaaaaactctaaaacttatacctagatatagctaaaatcagtaaaaatagaggtatatcaactcctccagacttagcttttatttgccctcaagcaaaacacaaaaactgaacccgtggaagaggtttgaaaacgtacaaactctcaatattttctagcctattgccttgataattataaccaaatccatatgcctaacatgtctaatcaaatcctaaccaccatgtaattctccacaagcttacacaacaattccatacctaaatttcacaactatattcaacaagctttcatcgctggggtctcatcaatcaaacttatattcaagaactttctagacttattcatgtactataccatgataaatcaaccattctacattctcttgatattctttctctccccaagacttattatttcagagattaaacaaaggagtagtcacatcaccagaaatatcctccgtaaatttccaacctttgcaattggtcattccctagagtgtaaaataatgggatcatgataaatattcctagccctttaccctacaggaaatcctttcaatttctctcttttaccttttttatataataagggagataaatactattttatatggtttcattcatcaggtatgaacaaggagtcaagttctataaatattaaccgttttgacgaggttaaaagaagagtagtgtgattagctccagcctttatggattatgttgacaaagtggatgtcctctattttgtcggtttgcactctggattttctattagtcggattgactcgaacctgcatcattaatcaaccaaacaatagtctaaagaatatagatcataattcctaactaattttgactcaacaaatatttttatatacatacatatatatatatatataattttatatatatatatatatatatatagaaaagactcaaaacattaaaaataaaattactaagactcaaaaataaaaacttaactagtaagcacctcccccagacttaaacgttactgtctcttatggcattcaaatctgaagtgagcgggaaaaatagaagaataacgtaaataaaagaaaagaaaaagaaatcatactagtgggttgccttccactaaacgcttgtttgtaatttatagcttgactgttctgaagttcaggacttagctggatcaataagagatttgtgttgcatctcaactaataacatccttgccttccatggtggtgtataagcggtggagcttggtgcaacaacatgtggattagctcttttacctacaacatcaacagaagaaacaagctctcgagaaactcgatgctcgtttacctgtgaagcatacttcaaagattcgaaagaactaatcgaagaagtagattgaggaacagtggaggagaaatacctttgtgcataggagtgttgcagatgtggatctggacttagttccaagactttattgaagctgaaatttggctctcagctgctcgatggtgtcgatcaacactggtggtggtatcggttgacactgcagctgtgcggctctcacctgagttgtagaaacctctatagcgacctctggagtcaaaatattagtagccttagtagatgtgtccatgtagggtgctttgctactgataggagacttaaaatttgatccatccatgttgaaatccatcacaacatcgcagacatcaagtgaaatccaacctttttctacatcaatcctagcaccaactgtaggtaagaaagatctacttaagataagaggatccttgagttcttcatcatatgccaataccacaaaatctgccaggatgaggcaatctccaactttctcaggaacatcctcgaagataccttcaaggacttgtttagagcgatccgcgaagaaaagaatgattcatgctaccatgtaggtagttatgtttagtctttcagcaacagacttgggcatcaggttgatgatggatcctagattgcagagagagtggctgaactggatagtagaggtcgaacaatcaataacgaaactatcgggatccaagagctacttagttgtctgacttggaatgatgtgttcagacatgtctactctctttttcttgtcctcttcagcccaaccaatatcatctggctcatatatttttatatttcataacaattttttttacggtttatgataaataatttatatagcttctaaaatcaaattcttttactaaactataaacatggaagagaggcagaaagaattattaattgaatgtagtcatataaataagtttccttacacgataatatagcttaaaaataaatgttgagatatggtttgaggattttagaactaattaatttcactataaagaaaagaaatgtacaataatatgattcttgtctgttttggtaaattgttttataaattaattccaaacaattttacattgatgaatatataagattcagtgttatccactacgttacatcgatttcatattacatttttctcacagttcaacaatg

SEQ ID NO: 35683 - DNA, 3003 bp, Unknown; identical to SEQ ID NO: 35682
  misc_feature (1)..( 3003): 2750-1469P.txt file - cDNA_ID_3089835; gDNA_ID_2926156; Annot_ID_198413

SEQ ID NO: 35684 - DNA, 3000 bp, Unknown; identical to SEQ ID NO: 21597
  misc_feature (1)..( 3000): 2750-1469P.txt file - cDNA_ID_3089842; gDNA_ID_2926156; Annot_ID_198411

SEQ ID NO: 35685 - DNA, 3003 bp, Unknown; identical to SEQ ID NO: 20128
  misc_feature (1)..( 3003): 2750-1469P.txt file - cDNA_ID_3089846; gDNA_ID_2926156; Annot_ID_198410

SEQ ID NO: 35686 - DNA, 3003 bp, Unknown; identical to SEQ ID NO: 20132
  misc_feature (1)..( 3003): 2750-1469P.txt file - cDNA_ID_3089849; gDNA_ID_2926156; Annot_ID_198403

SEQ ID NO: 35687 - DNA, 3003 bp, Unknown
  misc_feature (1)..( 3003): 2750-1469P.txt file - cDNA_ID_3089869; gDNA_ID_1620730; Annot_ID_166066
agttaatatgatgagatataaatacattatgattctagagtggaattcaatacgagatggatgaacttgaagtttcatcatttcgaggaggagaagtaatgaatctcacatggataataagtgacatatccagaagattatgttcaatctttgactactaaagatctaaaagttgtataaagcaattcttatacgaatgtgttattagataaaataagttataattagttattactaaaacttcaagacttgaagtctctttgtgaatataactcacattgttaagagaatatctttgatgcggagatggtaaaacagacacttcaacttttacgcaagtattgttgtcttgtagacacaatattttgaaagaaattttgagaactattataaacttaaatcgagtgtttttcaaaggctaagaaaacatatgagttatctatgataagtaatactcatattctgaagtgaatataagatcttacatagttagtcaaatttaatatcgtttatactagaatataaaattttaattattatctcgttattgttttattaacatatgattgattattaaaatacatggaagtaattttggattataagatctcattaagggagtaactgataagcaatgaaaagtaaattagaagttttgaaagaactagaagtttcaaaagaattaaaagtttcaagagtatatttggcttaaccggattggtcatcctggtttaatgatgatgtgaaagtattgagaattatgtggacattaggtgaaaaaccagaagattctccctaatgatttatcaattgttacttgctcagaaagcaatatgataatgtgatttttttacgagtcaaaataatttggactttatctattcgtaagtatatacaaggagatgattatggattgatcacccactgtatgatatttaaatacctaatggctataaaagatgcatcgattcaatggacgcattgactcgattgttgcatcgacaagaaggtcatatttatccttgttataaacccgcaacatagagtttgcgagattactttcttgattaaagtacaagagtatttcagtgtttatttataataaccatttttggatatccgttgggataagtgtttaacattttgaaattcatgttcatacacaaaatggtttagtaatatcgatacgcatcaagccaatgaataattaatagttttccccatcattattggttttgggtcagaaaccaaatagttttcatctaaaatctttgaatgtgaaaagtgctccaccacagcacgctgagatgaaccctcaaaggaggataagtatacatgttggatatgaatgataactaagccatcctagaaggatttatatagcgctcgttttgaacactatcatattatatagtcagctattccaacataagggggagaatgtatacagctggtgaaaaaagataaaaagaaatgaattatcaatgatcctcggagtaaagaatgtatattaagagtccaaaagataatttaattatagaatttagcgttgtaattgccagacgcatttgctgacccaaataaagtgatgaagtcacttataccagttgtaaattaaatgctccagaatataatgagtgtcctgtaaggaccaacttcaaactgctattgagtcttaagatcgcatgaagcgtaatagaccttggttccaaatataaatatcctcgtaaaagtgaaggagcacaaaattaaaaatgaccaaattgaggaaataaatattttgatgatctcttgaagagagtgaatgatctctaaaagagacataaacatgacaaatgaaacattcaagtacttgacaatgaagagatctagctagctatgtcatgtcaaaatataatggaatcaaaagcaaatcgacgtcgtaatatatttgcatgctatgagcagttgatattatagacaaaaaggaggatcatgaaagaaagtctattgaaaagtgtacacaaagtaatgattagccaaaaaatggaaaagaagaaatagacatataattataatttctagtagagatatttggactagtagtctatgcacatgatgtgtaaaaccagtggaaaataaatgagtttttatgtgaaagaatagtgaaattaatgagattttcacaaagataagaaatgtatgatgaagagatatattctcttgtggtggatgtaatattttttaagtatctaaagtctggcaataagagacggaacactggatatgacatttatatgaaattcttgaaagatataatctctgaagattaattatatgagaattatgttctctagaactctactcgatcgaataaaaaaaaaaaaaaaaagaaatatataacatgacatataatcatataaatgtatatttatgttgagtttgtcaaaatctattgatcaaactaatatttgttttgaaaatcattaaaactcctacagagttatcataagtaatacgatgacaataatctatgataaaatatcactagataatgatatttataagtctatatgaaaaccatataattttgatcattaagattatggttattaattccaacgagatattgtatttgattgaaaatcatctcctgaagaagatgtttccgagggggagattgaatgatatgcgtggatgtaccatttttccttatcatagtttttatcccacatgatttttctatgacaaagtttttaacgagacattaaagaacacgcaaataatacacttgatgaatattaagaaattctaccaatcatccaaatgaatattatacactaatgatatttagagaaataaataagatggtcaagatgaatcatctaaaagattcatgagcagaagaatggcgttgtactttatccagaaatttgttcaagagaagatttggcagacttattctcaaatactgtttattctctgccacatcttctaatcatgtagagattttaccaattcatg

SEQ ID NO: 35688 - DNA, 3003 bp, Unknown; identical to SEQ ID NO: 35687
  misc_feature (1)..( 3003): 2750-1469P.txt file - cDNA_ID_3089869; gDNA_ID_1620736; Annot_ID_166280

SEQ ID NO: 35689 - DNA, 3003 bp, Unknown; identical to SEQ ID NO: 35687
  misc_feature (1)..( 3003): 2750-1469P.txt file - cDNA_ID_3089869; gDNA_ID_2926157; Annot_ID_198509

SEQ ID NO: 35690 - DNA, 3000 bp, Unknown; identical to SEQ ID NO: 4852
  misc_feature (1)..( 3000): 2750-1469P.txt file - cDNA_ID_3089877; gDNA_ID_2926157; Annot_ID_198504

SEQ ID NO: 35691 - DNA, 3000 bp, Unknown; identical to SEQ ID NO: 4844
  misc_feature (1)..( 3000): 2750-1469P.txt file - cDNA_ID_3089886; gDNA_ID_2926157; Annot_ID_198487

SEQ ID NO: 35692 - DNA, 2044 bp, Unknown
  misc_feature (1)..( 2044): 2750-1469P.txt file - cDNA_ID_3089890; gDNA_ID_1620736; Annot_ID_166252
cttcttatcatcgaaccaatagaagtaagaccatgattacggcgtcgatggaaagataatcaagccaagagtccatagcagctgacggatctggatttgagattatattcgttaagttatgtgcgttgttttccgcgcaagaaactagtgaatctgtcaaaaactggaagaacggaaccctataaaacagatctgacgcatcatattcaggagaacgtgggagtttcatttgacgaccgatctggcaggaaaatggtggggttcttcatgatactacatactccatactccattttcaactgtgcgattccgattctagtattgtaatcattcatctgtttgtgaagcacatttatttagagtaaatggtacgagtttgtgttctagtttgggtaaacgagtttggtttgagcccaaattctgacaagcattacaaggtcattaaccgcagacgaacagtacaaggtccaaacattgaaaaagatgattggtacgtgggtttattattgcagaagcaagcatcaacgcaccaagtatagtaatttattctaaaatattttccaaattgatgtgttgaaaatgctcaagaactatagaccataaagatgaaaagttaacacataataaatagaccattaaaaatcgttttaccaaaaaaaaaaaaaaatcaaacaaaaatcacaatctgctccaaaaaactatacaaaagttcaaaacctcaactaaaaattcctagattggaaaatcaaaaatccaatggtgcatgtataaggaagagaacatataaattacatgaaggtatatatgcaattctgaccataaaagtcatttacaaagagtgcttatcaaataatacaaaagagtttattaataaatcaaagaattttatatatgtcagacatatgttctttttactagttaccacgtttagaagatttatgtttatcttcttcgtcttctagatccattcattgtatatatgttcaaactttaaagatttccattacacaaattctcatataagtattttaataaaacaaagagaattaacctttattacattttgataagttatcaaccaaatctgcattggatgtaaaaattgtgattttagtaatttagattgctcaaatctggattaaaaaaagaagaagatgaaagtaatagatcttctgattgtatttttgcaagatcataagtgaaagtagaaatttgtgaatctctaagaacttacaaattgagattacttcttccatctaccatttttgttgtttcaaaataaaaatattaaagaatgaacaaatgctcgtgttcaaaataaaaatgaaaaaaaataaaaaagaaaactccacttgattctaaaccctaaactctaaaccctccgaaaatagaaaattattgatttctaatcttttttagactgaaaatagtttttataaatttaaattgcgagaaagttgagaaaaaacaacttaatcatgagaatatcgtatatttcaaatatgataattttttacattttagatatatactagaaaaatattttaaaagggaatcttaactttaataacttataaattaatgtctaagtttacgaaatcgaactctaagttttggctcgtatcattcttcccaaaaatgtctcatgaatttttatcacaaaaaaaaaagtttaggtcaaaatatattatagataaaacaacgttgcaaggagtacaaaatgttgatatggccgagttggtctaaggcgccagattaaggttctggtccgaaagggcgtgggttcaaatcccactgtcaacattactcttttttagtttttgactacaacgaagtaaatcttacgccgtcgatctcatcactcttttgcaaatcatccaacggtctttaccaatccacgtataaaccacttggtcctttataaaaatcatcaatatacaatttaagaatctaattctcacgaaaaagccccataacttccaaaatcaacttttcacccccaaaaaactcatcttcttcgttgaaacgatcgaaatcgataatg

SEQ ID NO: 35693 - DNA, 3003 bp, Unknown
  misc_feature (1)..( 3003): 2750-1469P.txt file - cDNA_ID_3089890; gDNA_ID_2926157; Annot_ID_198486
tctgacaagaaagcatcaagtttttactccacaggttctgttgttcaagtgtagttttcaaacccattagtatagctatgaaagtatttgttaggaattagacggacaatgctaatatggtttgtagttggaatctgtgcaaattcatgttttccagttcctattatcctaacagcaagcagctatgtcttcaaatatattaacaagaacatgtgaaagaattttgtattagttgatctgaattggtgtcggatgatctggtttccactccaataaacgcattctccacatttcattgttgaaagaagtttgtcacaccccaaacccaacttctagggccaccctatttgatttcctaaaaagaaaagcccatgtgtttttatcttcgcctttctcacagccaccatttacgtctccatcttaagcccgaaactaaagtcaccggccatcatcgtttttaagtccgtgaggcattgttgtcactgattctgtagtggtgatcgtatgttggtgagagataggaagagatcaccaagagtgaaagagagtttcggaggtcacgtccaccaaagctaccgctcaccatcgttcatcactggtttgattaggtaaggaaaagctagcatgattatgtcttctcctcctgcaaatctctgtactggtcttttgaatatgcggcttaaatctgaatctttggtgaaaaataataagaagaggacgattgcgagtagcggttttggtgagcagttcccgtcagatctgaaggagtcaaatcgagaatttggtatcgttggatagatcttgctgcaagaaatgagcagaaacttacggttccttgatactaggtaaactccatccgcaaatcaagttacaacttgaccaaaagtcattgttttttgaatatagaaaataagtaagttaaaataaaagtttcagattcgagttggggttttgtgaagcttcttatcatcgaaccaatagaagtaagaccatgattacggcgtcgatggaaagataatcaagccaagagtccatagcagctgacggatctggatttgagattatattcgttaagttatgtgcgttgttttccgcgcaagaaactagtgaatctgtcaaaaactggaagaacggaaccctataaaacagatctgacgcatcatattcaggagaacgtgggagtttcatttgacgaccgatctggcaggaaaatggtggggttcttcatgatactacatactccatactccattttcaactgtgcgattccgattctagtattgtaatcattcatctgtttgtgaagcacatttatttagagtaaatggtacgagtttgtgttctagtttgggtaaacgagtttggtttgagcccaaattctgacaagcattacaaggtcattaaccgcagacgaacagtacaaggtccaaacattgaaaaagatgattggtacgtgggtttattattgcagaagcaagcatcaacgcaccaagtatagtaatttattctaaaatattttccaaattgatgtgttgaaaatgctcaagaactatagaccataaagatgaaaagttaacacataataaatagaccattaaaaatcgttttaccaaaaaaaaaaaaaaatcaaacaaaaatcacaatctgctccaaaaaactatacaaaagttcaaaacctcaactaaaaattcctagattggaaaatcaaaaatccaatggtgcatgtataaggaagagaacatataaattacatgaaggtatatatgcaattctgaccataaaagtcatttacaaagagtgcttatcaaataatacaaaagagtttattaataaatcaaagaattttatatatgtcagacatatgttctttttactagttaccacgtttagaagatttatgtttatcttcttcgtcttctagatccattcattgtatatatgttcaaactttaaagatttccattacacaaattctcatataagtattttaataaaacaaagagaattaacctttattacattttgataagttatcaaccaaatctgcattggatgtaaaaattgtgattttagtaatttagattgctcaaatctggattaaaaaaagaagaagatgaaagtaatagatcttctgattgtatttttgcaagatcataagtgaaagtagaaatttgtgaatctctaagaacttacaaattgagattacttcttccatctaccatttttgttgtttcaaaataaaaatattaaagaatgaacaaatgctcgtgttcaaaataaaaatgaaaaaaaataaaaaagaaaactccacttgattctaaaccctaaactctaaaccctccgaaaatagaaaattattgatttctaatcttttttagactgaaaatagtttttataaatttaaattgcgagaaagttgagaaaaaacaacttaatcatgagaatatcgtatatttcaaatatgataattttttacattttagatatatactagaaaaatattttaaaagggaatcttaactttaataacttataaattaatgtctaagtttacgaaatcgaactctaagttttggctcgtatcattcttcccaaaaatgtctcatgaatttttatcacaaaaaaaaaagtttaggtcaaaatatattatagataaaacaacgttgcaaggagtacaaaatgttgatatggccgagttggtctaaggcgccagattaaggttctggtccgaaagggcgtgggttcaaatcccactgtcaacattactcttttttagtttttgactacaacgaagtaaatcttacgccgtcgatctcatcactcttttgcaaatcatccaacggtctttaccaatccacgtataaaccacttggtcctttataaaaatcatcaatatacaatttaagaatctaattctcacgaaaaagccccataacttccaaaatcaacttttcacccccaaaaaactcatcttcttcgttgaaacgatcgaaatcgataatg

SEQ ID NO: 35694 - DNA, 3000 bp, Unknown; identical to SEQ ID NO: 4211
  misc_feature (1)..( 3000): 2750-1469P.txt file - cDNA_ID_3089922; gDNA_ID_1620691; Annot_ID_164766

SEQ ID NO: 35695 - DNA, 3000 bp, Unknown; identical to SEQ ID NO: 4211
  misc_feature (1)..( 3000): 2750-1469P.txt file - cDNA_ID_3089922; gDNA_ID_2926158; Annot_ID_198590

SEQ ID NO: 35696 - DNA, 3003 bp, Unknown; identical to SEQ ID NO: 19868
  misc_feature (1)..( 3003): 2750-1469P.txt file - cDNA_ID_3089926; gDNA_ID_1620691; Annot_ID_164761

SEQ ID NO: 35697 - DNA, 3003 bp, Unknown; identical to SEQ ID NO: 19868
  misc_feature (1)..( 3003): 2750-1469P.txt file - cDNA_ID_3089926; gDNA_ID_2926158; Annot_ID_198586

SEQ ID NO: 35698 - DNA, 3000 bp, Unknown; identical to SEQ ID NO: 33861
  misc_feature (1)..( 3000): 2750-1469P.txt file - cDNA_ID_3089932; gDNA_ID_2926158; Annot_ID_198582

SEQ ID NO: 35699 - DNA, 3003 bp, Unknown; identical to SEQ ID NO: 18993
  misc_feature (1)..( 3003): 2750-1469P.txt file - cDNA_ID_3089944; gDNA_ID_1971820; Annot_ID_176146

SEQ ID NO: 35700 - DNA, 3003 bp, Unknown; identical to SEQ ID NO: 18993
  misc_feature (1)..( 3003): 2750-1469P.txt file - cDNA_ID_3089944; gDNA_ID_2926158; Annot_ID_198572

SEQ ID NO: 35701 - DNA, 3003 bp, Unknown
  misc_feature (1)..( 3003): 2750-1469P.txt file - cDNA_ID_3089948; gDNA_ID_1971820; Annot_ID_176145
aagagtatatcccttatttattaggtagcttgcaaggcaagcagcattagctttcacctgttttgcataaactttgaagctaggagccataacctgcttcaacgcaacagctagagcaccaatcttgttattgtgaggaccactttgaagcgcagggaataccgcagagttgatttttgcgtcgaaatcgtagacttcaccctcgggttggcccttcttggctggttttggtccctttctataaaagatcataccagcccttggacctctcaagctcttgtgagttgacgttgtcacaacgtcacagtactcgaacgggtctgcggcttcctgagcagcaacgagggcactgttatgagccatatcacagagcaaaaaagctccaaccttgtcggcgacagccctgaatctcgcgtaatcccattccctagggtaagaagtgcctccacagataattaacttaggcctaaaatccatagctttctcctcaagtttgtcgtaatcaatgtaaccagtcttggaatccaccttgtagggaaggttttcaaagtagatcgaggtcgcggagatgttcttcccaccagagctatagtaaccatgcgttatatgaccacctgatggcaaatcaagccccatgatacgatcatgaggctggagcaaggcggtgtaggctgcgaaattcgcaggggaaccagagtaaggctgaacgttaacgccccatttctctggattgcaatggaaggcttcgagagagcgtgagcggcagagactctctatctcatcgatgaactcggtacctccgtagtaacgattaccaggcataccttccgagtatttgttggttaagcaacttccgagagcttccatgacggccacggaagtgaaattctcggctgctatgagttcgattcctcgacattgacgatgtttctccttctcgattaggtcgtagatctccggatcgacgaagtcaagatgcgtgtttccccaagaatagactggttccatctctaagattgttggaaggatagagagacttttggcgggtctttatataatgtgtgtacccacaaaactaaccatttgacttttctgaatttttagaattaagtatgactttttgatgcctttagcaagttattccaagtcaagtctgtcttttaaacagagcaaaagacataaacatttttgtactccaatgtgttcacctaggaaactaatttagtattgccatgacaactaatagtcatgacaattttattcttaattgcaatttgcaagatatatatagcaattgcccttaagatataccttaacgcaaacattattcatttttaagataaccatatgcactaatagataacgtgttgtattcctttttccccatacttcataactctttaatcattctctgcttgttttagttcagacgtttccctcatacagagtggcatgtcttagttacaagacacaatttatactgattttgtatgattgataattctttaactatctttgatacattactctaccattttcgtatgattattgtcttcgttaaaaggttgagtatttaatagaaacggcatatttataatttatgtatgcttagtcagaaccacgtctatgggacttgaatatgctatgttctcatgataagagatttttatattgagcaatcttcctttgatcagaaaatatattaagatccattctcactccatctttatgtgtcaaattaagcttgaaatcaatcaatctaaatctgtctgtttaggattcacgttacgtggctaacaagttttacgtaggatttatttcttttatgagatcttgattttgaaaatttgctgaagcggttacgatatgcagcaaccgatagttatgcttttatagcatctttaccactttttacgtgctcacaaggtaacgtttggtatatttgactgcttcagatctctacggacgattgcttgagtatagcctttggattagtcaccaaaagaaattatgttgttcagtgtggtttaagtttctcattaaagaaaagagttttttttttttttttttgtgcagcaatcgtgattagagacaaagacacaggaaggtccagaggttttggattagtcaccttctccagtgaatctgaagcctaatctttcataacagagatgaatgatcaggtttatatgactccatttgtggtagttgttctgtttatatgatgatggctttggttttgagttttcagatgatggatggtcgtaaaactgaaagtgaaatcttgctgtacagaaacatacaatgtagcatttgaaagtgaattgcatcatttaataccattacacagactttctcttgatgtcattatagtctactctaacctttaaccttccttataagcaagggacggtatcagcatatgtagcaatgcttctcaattagattcttactcaccaaagactagcttagggcagccagttccacgtaaaaaatggggtttgtttgtttctattcaagcttttaaaagaggaatagaaccaagattctaaaacaataaaacatgttccgatatttctaggaagagcggaaaatgatcaatccaaagggattgagtgattaacccccaccgtacggtcgagatattgcgtttgtggttttgaataatcaaaggaatcttcagcaattattaacccacaccacacggctggaagaattggcgtttgtggaaattatatagtttttgtggagaaatacctcatattgctgtcttcaaaggagacgtgtaagacaagctttaatctcctccacaaatgtaattaagagtcactccaatcatatagagtcaggtactcgattttctgtggaagcaactagtcttcacaggagactttttaagtcaagctttaatggtttcccacaaattttatatgagacaatccaatcatcaaatcgtttcacgtacagaaaaacagaaacaaaacaaatcaaacaaaaaatatg

SEQ ID NO: 35702 - DNA, 3003 bp, Unknown; identical to SEQ ID NO: 35701
  misc_feature (1)..( 3003): 2750-1469P.txt file - cDNA_ID_3089948; gDNA_ID_2926158; Annot_ID_198571

SEQ ID NO: 35703 - DNA, 3000 bp, Unknown; identical to SEQ ID NO: 8596
  misc_feature (1)..( 3000): 2750-1469P.txt file - cDNA_ID_3089952; gDNA_ID_1971820; Annot_ID_176134

SEQ ID NO: 35704 - DNA, 3000 bp, Unknown; identical to SEQ ID NO: 8596
  misc_feature (1)..( 3000): 2750-1469P.txt file - cDNA_ID_3089952; gDNA_ID_2926158; Annot_ID_198561

SEQ ID NO: 35705 - DNA, 3003 bp, Unknown; identical to SEQ ID NO: 19007
  misc_feature (1)..( 3003): 2750-1469P.txt file - cDNA_ID_3089968; gDNA_ID_1971820; Annot_ID_176117

SEQ ID NO: 35706 - DNA, 3003 bp, Unknown; identical to SEQ ID NO: 19007
  misc_feature (1)..( 3003): 2750-1469P.txt file - cDNA_ID_3089968; gDNA_ID_2926158; Annot_ID_198547

SEQ ID NO: 35707 - DNA, 3003 bp, Unknown
  misc_feature (1)..( 3003): 2750-1469P.txt file - cDNA_ID_3089991; gDNA_ID_1621093; Annot_ID_170768
aattgtttgagtaggtgtccttgatgttattcttgatgaatatccaagtcttatggacgagcaagatgaagatggtaggacttgtctttcatacggagcatccattgggtattataaaggactatgcaacatcttaaaccgatcaacaaagggtgtttatgtctgcgaccaagatggttcttttccaattcattcggctgcaaaaaacgaacattacgaaattattaaagagtttataaaacgttgtccagcttcaaaataccttcttaacagacttggtcagaacattctccacgtggcggcaaaaaatgaggcctctcttactgcatatatgttgatgcatgataaagatacgaaacatctgggtgttgggcaagatgtggacgggaatacacctttgcaccttgccgtcatgaactgggactttgactccattacttgtcttgctagccgtaaccacgagatactgaaattacgaaacaaaagcggcttaagagctagggatattgccgagtcagaggtgaaacccaactacatctttcatgaggtatttctgattccgtttcatacaacacatttgatccctcataaatgatttatagcttgacctccatatttttggaattacagaggtggacactggcgctcttattatacgctattcactcaagtggtttcgaatctgttaagtcattaacaatacagtcagtgccactagaccctaagaaaaacagacattacgtcaacgctcttctcgtggtagcggctcttgtagccacagtgacgtttgctgcaggctttacaataccaggtggttatatcagcgatagcaaaaaaccaaacttgggcagggcaactttggccactaacccaactctcttcatttttctgctttttgacatcttggcaatgcaaagttctgttgcaacaatatgtactcttatttgggcgcagttgggtgatctagcactcatcctcaaatccttacatgtggccttgcccttactacttttttcattactatgcatgcccgtagcattcctttttggcgtgatcactgcaattgcccatgtgaaatggcttttagtcaccattagcattatatctggtggattcttccttttcgcaatctttatccttggccctcacgtcatgctacagcgctcacaccttccgcccagttctggtatatttctcaagacttttatgctgactatagacatatctgagttgtttgtgattttgatcaaagcttgttttggttgtgtggcgtgttccgaataaatcatcaaaagtttatagatcaaaggatatttttcttctcttttttttttctttcaaaaagctacgagatatgctggtctctagctctgagaagcggcatcttgatcatacaactcattcgaagtcctatcagaattatctgtagttgtaataaagcgtgaaaagtatatcattcgaagagattttcctctaaaataatcgagtgatattttattattcggtttagtggataccagtttactaatctctcgaatttatgaaccacattcaaaggagatgagtttaacaaaaaaaaaaggtaaattgttttttattctcgtcgtgcgttccacatgagtcgttttcaagagcaatatagacgatacttcacaagaattattatttttgttggggtataaaaatttgaagatacgtttggcaacgacaatacgacgttagattgttccaagaggtgcaaaaacttagggaccctctttattcgttcactgtaaccactgaccacaacatgactaggtagactcttctttttgtcaatgttgatgtttatacgattttgatgagactggctctatcaagatatgaatctctgatcatatctccactaatctttcatcttgttattccctcatttacttttgatttccttctctctctctcttttttatgtatacaaatttttctttatttcgcttcactaaaccccaccatgtaattgtgtgagttttggcgaagtggcgcaacaccgtagagcacaccaacactaacccaatccattttatgaccgtaaattttgttgttgattagtgtatttttttcttgtttagttattctgagaagtaaattttttttttacaattagtttttaaacatagtaaaataaatttatgacagattataatattattttaaaaatcaataatatctaacaaattaaataaacaaatcacaaattactatattttaaataaatattgataattttaattatattattttgtttattggttaactcgcaggatatgcgagttaattcatttgagattgtaatccgccatatactaactcgataaccctgactttttagaaatctaaaagtataaccctataataaaatagattatgtccaactcgcggattctaaacctgaattgacatggcggaaccattcataaaaccataccaattcttgcgttttggaaagttggtttccttttcatttctttgaatttgatcctagattgtgtagttctcaagctcatgctcttgctcgtcaaaaacgtatcaacgatttgcttttcctttagacgttcttgcatcggattggtttactcaactccactcgatgaaaaagttactatcttaaaaagaacaaatgcaaattcaataaaattccccaatatctacgcatgaaaatatgattctgtcttttttttgtttgtctatctttcaatactttaaaaagtgtatttctagaggcgatttgtcatttcccgaataggaatttgagtaaaaaaaaacactctgttttttatttccactaatatcaaatcggcgaatatagttcccaccattcttatctccttgtcgtcactcggaattttttaaataataggatcgctttaataatataatctctataatttatagttccttttccaatattggcgtctccgttgaagctttccacaaatctcaaatttgtttggagactctcaaatg

SEQ ID NO: 35708 - DNA, 3003 bp, Unknown; identical to SEQ ID NO: 35707
  misc_feature (1)..( 3003): 2750-1469P.txt file - cDNA_ID_3089991; gDNA_ID_2926159; Annot_ID_198667

SEQ ID NO: 35709 - DNA, 3003 bp, Unknown; identical to SEQ ID NO: 35707
  misc_feature (1)..( 3003): 2750-1469P.txt file - cDNA_ID_3089991; gDNA_ID_2926160; Annot_ID_198679

SEQ ID NO: 35710 - DNA, 3003 bp, Unknown; identical to SEQ ID NO: 17877
  misc_feature (1)..( 3003): 2750-1469P.txt file - cDNA_ID_3089993; gDNA_ID_2926159; Annot_ID_198666

SEQ ID NO: 35711 - DNA, 3000 bp, Unknown
  misc_feature (1)..( 3000): 2750-1469P.txt file - cDNA_ID_3089997; gDNA_ID_1621093; Annot_ID_170763
aagacacaaaaagcccaattatgtctttatactgcataaaagtcacgagaaagtcaccagcgtacttgggagaaacgtatgaccgttgtagcatgacgtgagggccaaggacaaagatcgcccaagaaaagaataaaacagatataatgcaaatgatgactacaagccatttcacatgcccaactgcagtgaccacgccaaaaaggaatgccaagggcatgcagagtaaagcaaaaagcagtaagggcaaagccacatgtaaggatgagcgaatgagcactggatcacctaactgcgcccaaataagaatacctattgttgcaacggaactttgcatggccaagatgtcaagtaccagaaaaatgaagagagttggattagtggccaaagttgccctgcccaagtgtggagcagagctgttaaacccacctggtattgtaaaacctgcagcaaacgtcattgtggctacaagagcagctaccaggagaagagtgttgacgtaatctctgttatttttagggtctagtggcactgacggttttgttaatgagtgtacagattcgaaaccccttgagtgaatagcgtataataagagcgccagtgtccacctctgtaactcaaaaaatgggggtcgagctataaatcatttatgtgatatcaaattttgttgtatgaaacgaaattatacatacctcctgaaagatgtagtggggtttcacctctctctcggcaatatccctagctcttaagccgtttttgttccgcactttcagtatcttgctactcctagcaagccaagtaatggatttaaagtgccagttcatgacggcaagatgcaaaggtgtattcccgtccacatcttgcccaacacccagatgttccgtatctttattaattatcaacatgttcgaaatccaaaatttcccattttttgctgcaatgtggagaacgttctgaccaagtttgttaagtaagtgttttgaacctggacatcgttttataaactcttcaacaatattttcatgacctttctctgcagctgtatgaattggaaaagaaccatcttggtcgcagacataaacaccctttgttgatcgttctaagaggttgcatactccttcataataccctatatgtgctgcgagtgaaagacaagtccaaccatttatatctcgctcgtccataagacttggatattcatcaagaataacatcaaggacacctgctcaaacaattgggaacaacaattagtatacatacaaatatttttaccgccttgaggaggaaattcccgtctcaaactggttttacatatttgaatagaataaatgcagctgctactggttaaagcgaaaaacaaacctatactctgggtcaccaaagcaacatgtgcaagagatttctgcccttgtaactttgactccaagttagacttcttccctttaaggtccttgttgcctatgattttcaaaattgctttcacaagagatacatctccagtatttattgccacaaacaaggaagatactccatacttatttccaagaaaaggagcatcctggtttgcgttcaccagacatacagccatctcgaaatagcgcccttcaatcgcgtagtacagagcagtatttccatctttgtccttgagaacatatgggttcattctctcactctcttcattacacagtctagctgaagaaaatgttaccaatgcgacaaaagcctcaacaatagtggtatgaccgctatgagccgccacatgtagcggtgtctgaccgcttgagttttgctccaagagaagacgcgggcattcacagacaatctccttcactagttctagatgaccccatgtaacagcaagatgaagaattgaatctcctgtattgctcttgatacgtgccactgaaattccacggcttctcaacttctccagacattctttgttcccatcacttattttactaaaaacctctggaatcatccggacatcttcaccacggatagcgtaaagatccgacaatctaaggttagtaaggaactctggcacagattcggtgtctcctgtaagtggcgtgacgccatctcctccgctttgagagaagtcttgtgaaccgtgtatgttcatgggtaagtatgttctgttctgttgatcatgagacgcatctgttgacctttgtgcctcaattctatctagctctgcttcagaactgtccatcgcaaacctaaactaatcacacaaatagtttggaaacacagatttaagttactaacttccacgaccacaaacaaaaaagtcaaccattgcatgaagagggggcagagaaagacttaccaagtggaagaagaagatcagtaatgcaagaggttttgctaaaggttgacgagattgagacaaaaagttcgtccatttatattaaaagttttgtctcgagccacgtcgagtcatgatgatcggaaggagtggtggtcaggtcacctatatataaattaagggaaagtgtttctttagtcggaaataattaggagaaaaattcaagacaaagattaaaaaatgacccgagttattaagtcattaagttataattaaagactttgaagtcgtcgtctcttaataaagtctaaatgtctattttgttgggagaaagttgcggcggggtttcagcggagatgctcctattcctaacataaaacaccgagaatatgtgacatagtggaaactttataaagaagctagtgattttaggctaccagaaatctaagttcatcactcgtttattatagtttgctgagtaattggttggaccttatgcacgttctactgtaaaataattcaacagcttcaaattgaagtatcgaaccaatcaagcgttatactggaaacttatttttttttccatggacatcaaacttttttatatcaatgacttttaacaaagcatttcttattttacctattttgttgcacatcactacattttatattaaacattagattcaatg

SEQ ID NO: 35712 - DNA, 3000 bp, Unknown
  misc_feature (1)..( 3000): 2750-1469P.txt file - cDNA_ID_3089997; gDNA_ID_2926159; Annot_ID_198663
gtattgtaaaacctgcagcaaacgtcattgtggctacaagagcagctaccaggagaagagtgttgacgtaatctctgttatttttagggtctagtggcactgacggttttgttaatgagtgtacagattcgaaaccccttgagtgaatagcgtataataagagcgccagtgtccacctctgtaactcaaaaaatgggggtcgagctataaatcatttatgtgatatcaaattttgttgtatgaaacgaaattatacatacctcctgaaagatgtagtggggtttcacctctctctcggcaatatccctagctcttaagccgtttttgttccgcactttcagtatcttgctactcctagcaagccaagtaatggatttaaagtgccagttcatgacggcaagatgcaaaggtgtattcccgtccacatcttgcccaacacccagatgttccgtatctttattaattatcaacatgttcgaaatccaaaatttcccattttttgctgcaatgtggagaacgttctgaccaagtttgttaagtaagtgttttgaacctggacatcgttttataaactcttcaacaatattttcatgacctttctctgcagctgtatgaattggaaaagaaccatcttggtcgcagacataaacaccctttgttgatcgttctaagaggttgcatactccttcataataccctatatgtgctgcgagtgaaagacaagtccaaccatttatatctcgctcgtccataagacttggatattcatcaagaataacatcaaggacacctgctcaaacaattgggaacaacaattagtatacatacaaatatttttaccgccttgaggaggaaattcccgtctcaaactggttttacatatttgaatagaataaatgcagctgctactggttaaagcgaaaaacaaacctatactctgggtcaccaaagcaacatgtgcaagagatttctgcccttgtaactttgactccaagttagacttcttccctttaaggtccttgttgcctatgattttcaaaattgctttcacaagagatacatctccagtatttattgccacaaacaaggaagatactccatacttatttccaagaaaaggagcatcctggtttgcgttcaccagacatacagccatctcgaaatagcgcccttcaatcgcgtagtacagagcagtatttccatctttgtccttgagaacatatgggttcattctctcactctcttcattacacagtctagctgaagaaaatgttaccaatgcgacaaaagcctcaacaatagtggtatgaccgctatgagccgccacatgtagcggtgtctgaccgcttgagttttgctccaagagaagacgcgggcattcacagacaatctccttcactagttctagatgaccccatgtaacagcaagatgaagaattgaatctcctgtattgctcttgatacgtgccactgaaattccacggcttctcaacttctccagacattctttgttcccatcacttattttactaaaaacctctggaatcatccggacatcttcaccacggatagcgtaaagatccgacaatctaaggttagtaaggaactctggcacagattcggtgtctcctgtaagtggcgtgacgccatctcctccgctttgagagaagtcttgtgaaccgtgtatgttcatgggtaagtatgttctgttctgttgatcatgagacgcatctgttgacctttgtgcctcaattctatctagctctgcttcagaactgtccatcgcaaacctaaactaatcacacaaatagtttggaaacacagatttaagttactaacttccacgaccacaaacaaaaaagtcaaccattgcatgaagagggggcagagaaagacttaccaagtggaagaagaagatcagtaatgcaagaggttttgctaaaggttgacgagattgagacaaaaagttcgtccatttatattaaaagttttgtctcgagccacgtcgagtcatgatgatcggaaggagtggtggtcaggtcacctatatataaattaagggaaagtgtttctttagtcggaaataattaggagaaaaattcaagacaaagattaaaaaatgacccgagttattaagtcattaagttataattaaagactttgaagtcgtcgtctcttaataaagtctaaatgtctattttgttgggagaaagttgcggcggggtttcagcggagatgctcctattcctaacataaaacaccgagaatatgtgacatagtggaaactttataaagaagctagtgattttaggctaccagaaatctaagttcatcactcgtttattatagtttgctgagtaattggttggaccttatgcacgttctactgtaaaataattcaacagcttcaaattgaagtatcgaaccaatcaagcgttatactggaaacttatttttttttccatggacatcaaacttttttatatcaatgacttttaacaaagcatttcttattttacctattttgttgcacatcactacattttatattaaacattagattcaatgggatcgcaaataccaccatatttttcaatattcttacaagaggtagaatatttttcaatattctttttccatgcttctcactttacttgtgtttattccatgcaatgccaactctttggctgattctttctttagcaaagcaggtagccacatttggccgtagactatttggtcaatttgctagttgagttaataaaatctctgacccataaaaaaaagttataaaaagaaaagagaaccggaccatttttatttttgttgacatcaaaccggaccattggtgaaaacccccaaatcgaattccagaatcatcgtctccatcgtaatcgactcaaatcaggcaacggttacctccgcgtcgaatttcagcgaccacccatttctgggaagggaaaaagctgcgcaatttgtggatttctttctcagaaaatg

SEQ ID NO: 35713 - DNA, 3000 bp, Unknown; identical to SEQ ID NO: 6421
  misc_feature (1)..( 3000): 2750-1469P.txt file - cDNA_ID_3090001; gDNA_ID_1621093; Annot_ID_170760

SEQ ID NO: 35714 - DNA, 3000 bp, Unknown; identical to SEQ ID NO: 6421
  misc_feature (1)..( 3000): 2750-1469P.txt file - cDNA_ID_3090001; gDNA_ID_2926159; Annot_ID_198660

SEQ ID NO: 35715 - DNA, 3000 bp, Unknown; identical to SEQ ID NO: 6422
  misc_feature (1)..( 3000): 2750-1469P.txt file - cDNA_ID_3090005; gDNA_ID_2926159; Annot_ID_198659

SEQ ID NO: 35716 - DNA, 2231 bp, Unknown; identical to SEQ ID NO: 6424
  misc_feature (1)..( 2231): 2750-1469P.txt file - cDNA_ID_3090009; gDNA_ID_1621093; Annot_ID_170756

SEQ ID NO: 35717 - DNA, 3003 bp, Unknown; identical to SEQ ID NO: 17888
  misc_feature (1)..( 3003): 2750-1469P.txt file - cDNA_ID_3090009; gDNA_ID_2926159; Annot_ID_198657

SEQ ID NO: 35718 - DNA, 3000 bp, Unknown; identical to SEQ ID NO: 4221
  misc_feature (1)..( 3000): 2750-1469P.txt file - cDNA_ID_3090028; gDNA_ID_2926159; Annot_ID_198637

SEQ ID NO: 35719 - DNA, 3000 bp, Unknown; identical to SEQ ID NO: 4223
  misc_feature (1)..( 3000): 2750-1469P.txt file - cDNA_ID_3090032; gDNA_ID_2926159; Annot_ID_198632

SEQ ID NO: 35720 - DNA, 3000 bp, Unknown; identical to SEQ ID NO: 4212
  misc_feature (1)..( 3000): 2750-1469P.txt file - cDNA_ID_3090041; gDNA_ID_2926159; Annot_ID_198620

SEQ ID NO: 35721 - DNA, 3000 bp, Unknown; identical to SEQ ID NO: 4211
  misc_feature (1)..( 3000): 2750-1469P.txt file - cDNA_ID_3090049; gDNA_ID_2926159; Annot_ID_198615

SEQ ID NO: 35722 - DNA, 3000 bp, Unknown; identical to SEQ ID NO: 6447
  misc_feature (1)..( 3000): 2750-1469P.txt file - cDNA_ID_3090071; gDNA_ID_1621094; Annot_ID_170841

SEQ ID NO: 35723 - DNA, 3000 bp, Unknown; identical to SEQ ID NO: 6447
  misc_feature (1)..( 3000): 2750-1469P.txt file - cDNA_ID_3090071; gDNA_ID_2926160; Annot_ID_198722

SEQ ID NO: 35724 - DNA, 3000 bp, Unknown; identical to SEQ ID NO: 6412
  misc_feature (1)..( 3000): 2750-1469P.txt file - cDNA_ID_3090079; gDNA_ID_1621093; Annot_ID_170805

SEQ ID NO: 35725 - DNA, 3000 bp, Unknown; identical to SEQ ID NO: 6412
  misc_feature (1)..( 3000): 2750-1469P.txt file - cDNA_ID_3090079; gDNA_ID_2926160; Annot_ID_198713

SEQ ID NO: 35726 - DNA, 3003 bp, Unknown; identical to SEQ ID NO: 20783
  misc_feature (1)..( 3003): 2750-1469P.txt file - cDNA_ID_3090120; gDNA_ID_1620806; Annot_ID_168836

SEQ ID NO: 35727 - DNA, 3003 bp, Unknown; identical to SEQ ID NO: 20783
  misc_feature (1)..( 3003): 2750-1469P.txt file - cDNA_ID_3090120; gDNA_ID_2926161; Annot_ID_198796

SEQ ID NO: 35728 - DNA, 3000 bp, Unknown; identical to SEQ ID NO: 7786
  misc_feature (1)..( 3000): 2750-1469P.txt file - cDNA_ID_3090128; gDNA_ID_1621163; Annot_ID_173759

SEQ ID NO: 35729 - DNA, 3003 bp, Unknown
  misc_feature (1)..( 3003): 2750-1469P.txt file - cDNA_ID_3090128; gDNA_ID_2926161; Annot_ID_139732
tcaatgatgataaccaaattttttgaaatttccttctgtttcattctaaatttcgtttaagaatttttcacagtcaattggtaagagcaaatatattttgaaacgtggtcctggccaaatcaaggatgattacggcttgaaaatttgtattaatacacttttatcttataactaaaaaattaacatgataaagataaatttgaaatttcttttaaatatatgaatgaaatacaaaacatatttaaaaaagaataaaaacgaattattaaaactaacatttattgtgaaacagcaaaaaaagaatttatgcatactatcagaaataattttaaatgaattcatcaaacaaatgttttttttctttataagaatgtaaaatatcattataaaatgaaaagtttaagttattacatgacacataactttaaaaaaaagttgcatgccaaaaaaaggtaaaaaaaacatagaaacataaaccattcgaacctcattctcgttgatcaacaaaattttaaacaattaggctcttagtgcgaagatctaataaagtcaatctaaatactctcctaagtaaacatgagacaaataccaagagcagaaaaagaaacaagaacaaaaggtgaaagacgaaaagcgaagaacataaaaagaaataagaaaaaaaatgtgaaaggcgaaaagcaaagaggaagtcctttcgataatagcccgaaaaacaaatgaaatttctttttatgttctttgacatataattttgtagatacgtttcttttttgctagcacctttctctgaactggatggatacgatctcatatctcaccgatagcacgtttgaccctctctacttcactaacttatgcatgtttcatgtttggaacgaaagaaataacaacattcttctacaactacgtactttacacaattaaccaaccatctcagttataattataagacctcgatttaattttaccaaaagttattgtatttttagtgagtcttgttgtattaatgctctaagaaaaaagttttctccagaataaacaatcaaggagcaaatatttcagcgccaataaatatagtagcctttaggatggtccaaatctggtaaaatatatccttagctaaaatgttgatctaactaaagagatttatatgtcaatttccaaccaaaagatttaggccctgaatggatgctgattttcgattcagtttttggattttgattttagtttctagattttagattttagttttagatttttgttaatatatttttgttttaaaaacttcaaaaaattagtttttagtttttgagaaaaataacgttgatggagtaaaaactagattccctaaattttagaaaaactaaaaaactaaaatcatgaatggaaaattacaacaaaatagtttttcaaattgtagggaaaccaaaattttaaaatcttgattgttatgaaaataagtttttgaaaaacaaaatccaaaaactcttacaaaatctacaaaacattcaagaccttattcttctcaggtttatatcttaaacaaaacaaaatccaaaatgctatttaacaaaacaaacaaacaagttctcttttgaaattaattatttatatgatattaatttccaaataaaacctgaaaagttatcataatcagatatacatttttaatgtggaaaaatcacgtaataacattataaatatatatatgtaaactaatattgtgaaatctaagactctgtatatatagtactgactactgaacaagtatataaattttatgtttataattataaaacgaatcattaaagatatcaaatctgaatctcaaataactaacccaaaatcatgatatctatataaatatattcaaatgaccttgcacgacggtctacactgagcttgttgacgatgacagattcagaaattctgattattagtttagaaaaaaaaaactatagtattattattaactattttaaatttttaagaaaaaggcaaaataaatgacgagtttaagactttggtagttagctccggtttcaatgaatggtccaagttggagagattaggttctttttcttccctatgtgggtcccattcttccttgtgtgggtcccactctctttaacgtttcttcaccgtcctttagtgccaccgttatgccgtgccgtcaactccgttgacttcaggacaacgctgctcgtcttttactgagtctcactcacgtcgtctttctccgtcaactttcttactaacggccacttaacggaaatccgtcactgttaacaattaaattaattccgctcgacatttatcgccgatttacacgtcacttttttctatcttaccctggttatttaacacgtgtacatttatgacgctatatatcgaggaatttatccatctcaaggcattttctcaattatattctggctgcaagtatccaaattttataccagttctaaacaaaattagaaagaaaacaaaataacaataaagacatacttataatattgagatcaaatctgacatttaagaaccactcaagatcttcctattttaaaaggcaaaagaaagagtcagactgatacttatcataaataattttcaacatatatatcaaatgtttgagcacataaaatataaatatcaaatataaattttaaatgcaacgctgtaaattttcgttttatgtatgtcataagaattgattagataaaattggcattttcgcataatttacgtaattagtataaactaaatcattatgcaatttcggaaattaccaaccttctaatataatattcccaacagttgcttggtcatttatttgtatgtgtaacatttgacaaaagagtgatttctcgttgaaaatggaaacctttagctaagactttacacaacttatcctcataaatttagtctttatataaagggactctcttttttttctttttcttctctctatctctatctatctctctttgtctgcaaatg

SEQ ID NO: 35730 - DNA, 3003 bp, Unknown; identical to SEQ ID NO: 35729
  misc_feature (1)..( 3003): 2750-1469P.txt file - cDNA_ID_3090128; gDNA_ID_2926161; Annot_ID_198790

SEQ ID NO: 35731 - DNA, 3003 bp, Unknown; identical to SEQ ID NO: 17473
  misc_feature (1)..( 3003): 2750-1469P.txt file - cDNA_ID_3090134; gDNA_ID_1621163; Annot_ID_173761

SEQ ID NO: 35732 - DNA, 3000 bp, Unknown; identical to SEQ ID NO: 17474
  misc_feature (1)..( 3000): 2750-1469P.txt file - cDNA_ID_3090134; gDNA_ID_2926161; Annot_ID_198786

SEQ ID NO: 35733 - DNA, 3000 bp, Unknown; identical to SEQ ID NO: 7790
  misc_feature (1)..( 3000): 2750-1469P.txt file - cDNA_ID_3090143; gDNA_ID_1621163; Annot_ID_173768

SEQ ID NO: 35734 - DNA, 3003 bp, Unknown; identical to SEQ ID NO: 21174
  misc_feature (1)..( 3003): 2750-1469P.txt file - cDNA_ID_3090143; gDNA_ID_2926161; Annot_ID_198777

SEQ ID NO: 35735 - DNA, 3003 bp, Unknown; identical to SEQ ID NO: 32041
  misc_feature (1)..( 3003): 2750-1469P.txt file - cDNA_ID_3090199; gDNA_ID_2926162; Annot_ID_198863

SEQ ID NO: 35736 - DNA, 3003 bp, Unknown
  misc_feature (1)..( 3003): 2750-1469P.txt file - cDNA_ID_3090203; gDNA_ID_1621095; Annot_ID_170935
aaatttcctccaagatctagtatagtcagcttatacttttaatcaacactcagactaatggggccattaaagggtccttgcctttcgccactggtccaaggcgctaggttgttaaaaaaaaaaagttatttgcatacacgtaataaaaaattcatgtattatagttgaactcttgaaacattagccaaaagatgttaactcaaacagtgatcgacagtgagttaccggaagcataacgtaaacgggaacataattaagaagaagcttctcgttgtaattggtagccatttttcttctaaatacaaacaaagaaagaacgtcttttttttttgtttttttgttgagagagtgttgtaggaaaatataagcaatatgagtagtagatgaagctcacatgtctctcttaaagaaagctcacgagctctttatatagaagtagatgatattatgcgagtggttgtgatttttgtgtactgatctaaaacgactggtgctctgttttcagcggtccatttgaggattgtataatgactttattgccctctgtttttggcgtcttccttgtcctctttcgtcatttcctgagattctttggaatgatacctttttctataattgaggttcaccgattttgatttccgacactgattgtgttgtcgccactcgccggccttctttttgtttctccatgtgttgtttttaagcacgtggagtaaatgcaaatgatatttgttcatgtctgtattcaccattcaaatcttgttaccttaataagtaagctcaatgtcaaaatttaccttagtgttgatgtcttacaacttgaatattatagtaggtggattatgtggatgtcaaaaatttggtgtgatggattttataaatcgtgaaaataaactggagtccaaaatctgtaagttactaagttgagctaaatgaagactgaacaaaagggaatcaagagaaaacaacaaagtgaaagagtgatcttattgataatgtgtcaaacaaattacaaagaaagaaaaaagatgtaggtagagtgactttcagaaaaaatagtgaactttacctccttgttatctttgaaattgaatgggcttccgttggattaggttcgtgagggtgtgttttttttgtcgacaattttattagattgactcaaataagccaatgttgagaaatattgtttgcaaatataataatatgtgtttggttcaatatttcgtgccaaataatctgttttaaaatttccacgagttaaagataaatcaaaatctggataataattcggtttgtgttaaatctgaatttttcagaatagttgacttatacttcaagttaatttgagtaattatatatatatatataaaacttaccggggaattgtaaataacatcacacaatacgttttttttaacattaaaatacgattaaactcgacatagatttgttgatctacatgttttctctctcttctctctcctcatctttcagagagagcaaaccagtttcagcttttctggccggcaatgactggctttatcagcagtgtttggtcggcttctactctggcatcgctggcttccttagaagcgttggttggctcagcttccggcatcgaccggctactttcagcggtggtggctggcttatctcccgagagcaagatatcctcttttttgtttcgccgggcttttctccggcgtctttggccggctttctctccggtttcttgaccggatttagatttgttttgttttttttatcttctgcctgtagtttaaagattgatgaacccaagttaaaaagatgttgattgaagaagaagaggaagaaaaagaaaaagaagaagaagaagaatagcacttcgtggagtcaaattctcatccaaggtacaactgaaatttcgccattaatcctttgggcgacgagtgagctatgccagttgaacaagttttccggtgtttcagccggaattgaagcttctgacggcgactcccttctcttccagttcctacgtgtccttcaaaatgttttccactgacacgtgttttctatgcggcgcacaacaatcacttgttctcttccttcagtttagggtttattcatttgagcttttgggaatttttttttttttttgggcttgtttatttcagtttttgtgaattattggcctgttaattttggctctataatattaataaaacacacttgtgatagaaaaaaatacgattaaactcatctgattggactgtttataatattataaaagccaaaaactattttgaaactgttgtcgcgtcatcaattctcacagtgtcggcgtcagcgaataacactgtaaacgcgcgccaacgattcgattgcatatgattcttcctctgtaaattgtaatgcaagctaatctcattaatctctgacatgcatcaagtattttgtgatatctcatcttccagagtacgtgatcttgaagaaattatccatgtgatttctcacccatgcattgtttattcattcgtctacctcactgcagcttcgattcgatcagattcacaaatctcaggaacaaattcgtctaccgaaacagataaaacgcacataaagtgttcgatggaatgcctcacagaaagccaataagttgtgtgtcagtatgaatccgttcgcacattgtgaaatcagttctgacattgtttagtgagttgactattgtctaaaagatctcttcgttgattttatttacttactttaatgaatcaccagttttttcaacgcttacctgatttttcactagtttattcgttcttttgttcagtttttctctctgtacaagaccggattctatggttatgatcacgtggagctcgcgtgatattagtgtatgcgtaagttttgttcaagttatatatataaaactctgacttcattagcttcttcattcatgtggagttttgcttgcttctccttgttgttattagtttctttggctgcttttacctgacaatg

SEQ ID NO: 35737 - DNA, 3003 bp, Unknown; identical to SEQ ID NO: 35736
  misc_feature (1)..( 3003): 2750-1469P.txt file - cDNA_ID_3090203; gDNA_ID_2926162; Annot_ID_198862

SEQ ID NO: 35738 - DNA, 3003 bp, Unknown
  misc_feature (1)..( 3003): 2750-1469P.txt file - cDNA_ID_3090207; gDNA_ID_1621095; Annot_ID_170931
tgcgtagataaacttaagcttgatgtattctttggtacaatgtaattctgtttagttctataacttggaatcactctaagtgtaatgtatattgatgcgaagtcaaatgttgctgaatttttgctctcctgcattttccccaattttttctgagccagtattgtgaaaaattggagtctgagaaaactgaaaagtttaatggattctcatttaatcagtgttcatagattcactagttgtttgaccagggcttaggcttaatcattcttgtgacacttggttttcttttaaatctgttttgatgttcagttttctttggaagctatatacccataaacttaaaatgaataaagatggaagctttagctgatataatttgggtgtttctttctttcttccttggtgtgaagctgtttcaaaatgtctcggaggtatgatagtcgcaccacgatcttctcaccggaaggtcgtctctaccaggttgaatatgctatggaagctattggcaatgctggttctgccattggaattcttggcaaaagacggagtggtgttggttggtgagaagaaagtcacttctaaacttcttcaaacctcttcatccatggagaaaatgtacaagatcgatgaccatgtggcttgtgcagttgctggtataatgtctgatgccaacattctgattaacactgctcgagttcaagctcagcgttacacctttatgtaccaagagccaatgcccgtttagcagctggttcagtctctttgtgacaccaagcaaggatacacccagtttggtggtctccgcccgtttggagtttcctttctttttgcaggctgggacaggaaccacgggtttcagctgtatatgagtgacccaagtggaaactatggtggatggcaagctgcagctgttggagcaaataatcaagcggctcagtctattcttaagcaagactataaggatgatgcaacgagggaagaagtggttcagctcgctatcaaggttttgagcaagacgatgacagcacgacttgacagctgaaaaactcgagcttgctgagttgtatctgactccttcaaaatgtgttaagtaccatgttcactcgcctgactcgctcactaagctcttggttaagcatggtgtgactcaaccagccgcagaaacttcctaagctagaaactggtgacagttttacctgacccgcctggttactgtagatgtccatttgctttctttccctttggagatatcgtatcagaatcaatttaccactctgattatgtcatgtgattcatttgggttgactatcttttatcttgagattgatcttcttctagtctaaagtaaagttagactttagaggttttattcaataaatgaatgagcaatcaccaacgggcccattagaaagcccataacattcattgattgaggtaacgggttttaatggctcaaattaacgaagaatcagaatctctttaagtttcaccacgtcgatttacggtcaagagtgtctgtttattaacagaacagtaaaaatgttaccgctcaaagcgtatatcttgagcgccaaatggaatttcattggtacaatgcccagaagttctgggccagaactggcctcattgtaagagattttttaggagatttatgcagatctggaaaaacaagtttttctctcttggattatctacaaaatattatttacttaagtagttgtcagttagacaatgccctgaatccaaggaattgtatcgaccgggattgaagagaccattcttgcatcgtctcttctttttgcagcatcgcgattgtatgaaacattgatggccagatctttcttctataagtcaatcaaccggccaccggaattaccctaaaaacatagaaaatatgttgaaatatattgagatattagtcatcgactatgactaagtgtcacaaacttttgtgtgataggattcaatcaatccaatggatcttagtaagaatattttacattctataccagtctagttcacatattttctaccacaaattgttaattcctcacaccttttaaattcattttctagtttgcagtttttttttaagtgtcactttaccagattacctcaaacttaaaaattatcaaattattatcaaaatatacaaatttactaattataaaacaagtatatatctaatatcttatcttaaaaggtaaatatataaatattttctaccttttgtcatgtaatacaatttttttcctatttattaggtatcagaatctcaattaattaaattcagaaaaagtgtgagaaaataatttccagtaagcaaaaaaaaaaagtattaacacgacggcttcttctttcagcaaaaaaaaaaaaacataaacggagaaagagagagagaacgatacagaagagaagccaaggtcgcagagagaaacaatacacacggcgacagatatatttcccggcgaaacgggaacaataatatatacagagagagagagagatttagtgagagagctttctagggttttcttcttctcgatttatcttcctttgacctcgatctattcctcttccttctccataaattttcccttcttctcaccttcattcatatctctcctagctccattctagggttcttgatccgtttctctaccttttcgttttcttcctccgggtataatttcttcttcaattcgtttgttttcgcgtctcttcgtctcttctaatttcatcaatttgggtcttgtagggttttgagattttctccttcgtcgggtgaagaaaaccctacattttgttttgtcactgattgtgttttcggtgtttcaggttgtttaatttactccggcgggtgaccaaattggcggtggcaaagtatgagtattgatttccctgggaaaggggagagttagggaagtttgggctagagagaaattggattgggtttccatgagcgatgggggtgtcgcatgcatgcctctactgaatatcatg

SEQ ID NO: 35739 - DNA, 3003 bp, Unknown; identical to SEQ ID NO: 35738
  misc_feature (1)..( 3003): 2750-1469P.txt file - cDNA_ID_3090207; gDNA_ID_2926162; Annot_ID_198859

SEQ ID NO: 35740 - DNA, 3003 bp, Unknown; identical to SEQ ID NO: 17893
  misc_feature (1)..( 3003): 2750-1469P.txt file - cDNA_ID_3090222; gDNA_ID_2926162; Annot_ID_198849

SEQ ID NO: 35741 - DNA, 3000 bp, Unknown; identical to SEQ ID NO: 6483
  misc_feature (1)..( 3000): 2750-1469P.txt file - cDNA_ID_3090228; gDNA_ID_2926162; Annot_ID_198847

SEQ ID NO: 35742 - DNA, 3003 bp, Unknown
  misc_feature (1)..( 3003): 2750-1469P.txt file - cDNA_ID_3090252; gDNA_ID_2926162; Annot_ID_198838
atttaccaaaagttgaatcttgtatcgtttttgttagattctgaatatcccattgcaagtagcttattcctaaactcgtcgtaaaatacagcaaattttcgagtttcatttgtctaggaaattgataatttgtaatcatcaaacttacagatacagccaatgatgttaattatttatttcagagtattgagaaaaactcacatatgatttctctgttaactgtataacaaaacgcaggctactaaaaaacaatcactattgcggtatcgttaatctgatctaaagacagatttgtaggcttatgtgattgtttgttttctcacttgggaaccaataaatcgacagctaagtaatagcttcctacgatcacagtcgatgcaacagagcttcgagccatcctcatcccaatacctcggaacaagagatttctgtctgtaggatggattcctgtccatctctctaatctcttccctggtttattccattttagaaacttcctctcctttgctgtatactgtaagtaaaacaatagaaacccaacagagaaaatgagtttcatatctctttgtaagataaagtggaaagccatgagtagagtttctttaaacctttggcaatattacacactgtgcacgtgttcttgctgtgtcaaagctatgtgatgctgcagctgcaacggcaccagatatcccagcagcaaggctaatggctaccggagataaaggtccaacttcttcttcagaactgaattcatcaagtttccgcataatcattttaacaatcaacaatccaagttcaagtgaattgagaattcagtgtcgattgagagttttaagtacctgggcagaggattcatcccaacagctttccaaccgaccattgcctcgtgaagaaactgccatgttgaaaagaatactccaccgtaaatacaatctcttataagacctgaacgtagattcctccataaagctctatatccttcaagtgatgcaacatcgagcggtctcttaacatccatggctgatggtgggtttcctgttccagtcatcatccaagggtactcttgcaaagcagctgtcatgtttgggtgtttgtgatttaagacggataagagactgactgtttgtgtcaatgactttacatcaagagtgtatcttcttagcagttttgtgatcatgggtgagaccggtgcggtctctgcaacagcggaagcatttggagcccgtgatgcagcagtcacttgttttcggactttgattagctcaaatggagaagtcatcactgtttctgctgcacctcccaccagaccagccagaaaagcttcaccaacactcacgtagttatcatgtcgaccatctggagcgaaatgaattcatattcagattcttcaagacaaaggtattgcccaaaaaggaaccaaatttgcgtataaatgacatgaatgtatgtgaacactgttgcatattctaacataatccatgaacaaatgattgctgtattgactaattaactgatgttattgagctaattgacagaggagctagacacaaagaaacctaatcttgaatcatcgaaatcagacacaacaaaggagacatggacctgtgtaatacctttgtagaaagctgttagaatctcatagacaccaaaccttgcaccaaaaccagaaattcttcctaaagttaacgatccaagaccactgtacagacctgcatttgaagaacatgtcattatgcctgatgcagaatcagaaaatgattggaatctaaaagagtagtttgcgaacctgaatagccagagaatcgaagaactctattaaaaacttgaaaggagcttaatttcttattgggtcctgaaccaacctgtagttcaatgctattcttaatccccagatgaatctaagtgataaaaagaacaatttggtgaagaagagggaaaaaacctggataatggttttgatggtatctaaaggataagcgagagcagttcctaacgagacagaggccgaggcagcgatggcatgtgtcgcaaactgatgattctcaagaagcttatccatctttagcctcagcgaaaacaaatgtacatatacctatacgtttttgtcagcaacactacagactacagtatcagtattcaaacatactatgtcctttactcttatcatagtctccaaaattaagaggtttagaagtagatcaacaagttcttatcatccatttgatccaacacaaaataaacaataattagagtattatcatacctcaagtcaagaagagttttctctcacaggatattaagtaaacagaaacctcatcatcaacctcaaagatgtttcacgttgaagcaaaacccagatcagcgacagagagaagacgaagaagacgaccgacgctaatcggagaagaaaagacgacgtcgttcaatcagaaaatgccctaaaggaaatgacgtcgttttagttatcaagggtaaacaaaaaaaagttaaaaaacggaaaacaaattttagcaaaattgggttggtgacgtcacgatacagatttgccgatttataggtcataaaccagaaaaagctgccaaacctattttcttcgaaccctaaaaacgggccgggtcgatttctccgccatcgcaatcctccaccctcctctgattctctccgccgttcgtcggaaatctccatctccggctgattccagcttcctcttctccagaaccgaagctactgtaccggaattttatcactttccccgaaaccgattcaccgtaaccggccacaaaccaaatcaggtcttttctcttcatctccttgtacaaattttttacgggtttgttttgtttgtatcgaaattgtttattccggctaagaatttggtgcatgaggtctgcgaaatttcaaatcttttttctcgaattgttcattagaggatctaggcttatttacccattaacaaagtctttaccttttcttatatcttcttcctcttgaatgaattagatg

SEQ ID NO: 35743 - DNA, 3000 bp, Unknown; identical to SEQ ID NO: 6460
  misc_feature (1)..( 3000): 2750-1469P.txt file - cDNA_ID_3090256; gDNA_ID_1621094; Annot_ID_170886

SEQ ID NO: 35744 - DNA, 3000 bp, Unknown; identical to SEQ ID NO: 6460
  misc_feature (1)..( 3000): 2750-1469P.txt file - cDNA_ID_3090256; gDNA_ID_2926162; Annot_ID_198837

SEQ ID NO: 35745 - DNA, 3000 bp, Unknown; identical to SEQ ID NO: 6466
  misc_feature (1)..( 3000): 2750-1469P.txt file - cDNA_ID_3090260; gDNA_ID_2926162; Annot_ID_198835

SEQ ID NO: 35746 - DNA, 3003 bp, Unknown
  misc_feature (1)..( 3003): 2750-1469P.txt file - cDNA_ID_3090272; gDNA_ID_1621094; Annot_ID_170878
gaaacaaaggaacttctgcttctgctatgagttccagttattagttccttctcatattactactgaaataatgtttcagtgccatcttttgtatccagatagttcttagcagcttatgcagatatgataaaggttgactttaggagaagtctagttcaactaacaaaaatacccagctaaaattcagtttttgagattactttatcacatagtaagaaagatattaccagaaacatgagtcaatacacaaacgaactagataatagaaatcaaaccaccagcaagagatagaaatataggtttagaaaaacacacaactaagactcgtaagagtttcgagcccccattcatcacaacacgagataatagagaaaaacccaacacaaaatccaatttttaagaaacattcttcttagtattcctctccttcatcatcctcatcgtcaccaccttcagcaccgacctcttcataatccttctccaatgctgcaagatcctcacgagcctctgagaattctccttcttccataccctcaccaacataccagtgaacgaaagcacgtttggcgtacataagatcaaacttgtgatcaatacgggagaatacctcagcaacactggttgagtttgagatcatacaaacagctctctggactttagcaagatcacctccaggaacaacagttggtggctggtagttgataccacacttgaatccagtaggacaccagtcaacaaactgaatagttcgcttggtcttgatggtgccaaccgctgcgttcacatccttggggactacatcaccacggtacatcaaacagcaagccatgtactttccatgtcgcgggtcacactttgccatcatggaagcaggttcaaaggcactgttcgtgatctcagcaactgagagttgctcatggaaggccttctccgcggagatgactggtgcataggacgaaagcatgaagtggatccttgggtatggaaccaagttggtttggaactcagtaacatcaacattcaaggcaccatcgaacctcagagaagcagtcaaggaagaaataacctgagagacgagacggttgaggttggtgtaggtaggtctctcaatgttaagggagcgtctacagatgtcatagatagcttcattgtcgaggaggatggagacatcagtgtgttccaagagagagtgagtggagaggacactgttgtaaggctcaaccacagaggtagacacctgtggagatgggtaaacagtgaaacccaacttggactttttcccatagtcaacagaaagtctctcaaggagaagagatccaagaccagatccagtcccaccaccaacagcgttgaaaacaaggaatccttgaagaccagtacagttatcagcgagctttctgatccggtccaagcagagatcaacaatctctttcccaatggtgtaatgaccacgggcgaaattgttagcagcgtcttctttaccactgatgagttgttcagggtggaaaagctgacggtaagtaccagtcctgacctcgtcgatcacagttggctcaagatcaacaaagacagcacgtgggacgtgcttacctgcaccggtttcactgaagaaggtgttgaaagcatcatcacctccaccaacagtcttgtcaccaggcatctggccatcaggctgtaacattccagatccaatacaccacatcaatacaaaaatcatatacaatagatctaaacaggttcatcgaaacggatcttacatcaactatataaatcaaacacagatctaagcaattacgtacaatatatctacgaaatccgaagaacaaggtgaaaatatctcagatctgatctataagaggaagagacgaacctgaatgccatgttcaagacagtaaagctcccagcaagcatttccgacttgaataccagcctgaccaatgtggatcgaaatgcactctctcattgtcgtttcgcggaagaaagaaagatctagaaaatagatttgcagggaagaagacgaagggcgtttatgaagacgctcttctttagatctgatattttcgatttctaggttatgaggaaggtgtttgatgctgtattttataagcgaaaattatcccatctgtatgtaacggcaggtatattacacgtgtaatgatgtaattgggttgttgttaaaaccacgatttgttgttattctcgtgagctgtgtattttataattttggaatttttgaaaagcaaaatcccttgaattgcgtggaacttaaccggaattttaactggaattgaaccgtatcagaccattatttaggactgaaccaaagtgtatcagataagtaatttccattgtatgtttgaacttgcaatcaatcttcagggaaatgataaatcgatatacaataaaacctctataaattaataatgttgggaccgcgaaattttattaatttagagaggtattaatttatcgataaattaatatttattaatttatacagacattttcctaatttggtaacttttaaaattgttttataagatttctttcattgtagaaaatatatatttagaaccagttacaagtaaaacataataataatgtttagaaaacaacaccaaaaattttgatacaataaaatatgaaaattatactcaaacaaagaacaaatatgaatttaagcaaaaaaaattttaaaatatattttaaagaaattcttttacatataatatatatatagttaatatatttatacaattattaatttatgatattgatgagaccatacattcacatcaaactttcagaaaaattattatcttattaatttatcgtgttcaaggtcggtcttaaaaaatttatgaaacgcactctgaatatttgaagtatcacagtttagtaccttaacttttgttgtttagttaaaaaagtcatcacatcctaaaaagtggtgtaaaaaattagcaaatttcgcagacacgtgaaatcggatccaatgcgatg

SEQ ID NO: 35747 - DNA, 3003 bp, Unknown; identical to SEQ ID NO: 35746
  misc_feature (1)..( 3003): 2750-1469P.txt file - cDNA_ID_3090272; gDNA_ID_2926162; Annot_ID_198831

SEQ ID NO: 35748 - DNA, 3003 bp, Unknown
  misc_feature (1)..( 3003): 2750-1469P.txt file - cDNA_ID_3090274; gDNA_ID_1621094; Annot_ID_170872
acctctatccatctacacagcacctaaaattttccccaatttcagcaaaaattcgaaaatgcaatcaccagagaccatgaatctccagcgtcgatgaaccctaggaacgccagatctaaatcgacgatagatcgatctgcaaatattccctcaatgagagacgaaacgtgacagtaattacagagaataatttccgacgcgacaatggaagactccgccgatcagataacatggattattccgacggcggtgggcggagatgtaatttttccggccaccaacaacgatttaaaatggaagaaagagatgagagtttgtttcacacggcctaattatatgtccactgtaaaaaaaaagaaaaaaaaagactcattactattgtaaatagaattttttgttaaatttaaatttaattgtgttgcttaattatttcttaaacgttgtaggtttgtcacttaccttttctgtttccctccaaatctcgttcgacgatgggaaatcccttagcgttatttcccgatattgaagaataaagtggcaagatctcatccctcgacaaaaggatcataggttatgtcaattatttactactactagactattagtgtaaacaaacatgtccctgagttatatacatgtactgtcccattagtcctagtcaaaatacccaaacataaaataccaaaacgaaaccgaatcctaagtagagaaactgaactaaaccaaaccaactaaattttcgaataaatcataaactctaaaaccgaaatatttccaaaaataatagttattctaaaactgaataatcggaaaaatttaagaatttttgaacgaaaaatacccgaataaaccaaatagatctgaaccaaaataacaaaaaaatattcgaactctgaaaagaaaaatatactcaaaacattttcaattctttgttattcagatatatagaccaaaaccaaaattacttcaaaatttttggttcctaatcggttcttgatctttcaactatcaagaaatgtatataaaaagcaaacaaaattagacttgaattatcgagataagttcaatagtttgggtgaaaaaaaaaaagttcaatagtaaaaaaagttcaatagtttttttttttttttttttttttgatgaaaaaaaaaaaaagttcaatagtttgggtaataaaatctatatctatgtggatgtgatgaaatgactaacatacttcagttgcatgatcatgattatgaatatagattcacccatgatatttatatgcattttgcaagaagagtgcatatcacattacatgtatcaaaagatttataaaaaaatcgttcactacattttctttaaaaatctcaccctcaagtaaaatattatgttaaaattgtcaatcacttgcatagagataattggcgatgaaagcttttttaaaatggcgatgaagtttgataaaggttcacaggaaaaatattacttgcataatgttaattgatttcacttatgaaataaaaagaaaataaggtcgattaagataattatatgaaccgaagaagagaatacaaaggaatgcttcggtaagggttttcggaatcgaataaaggtgacggttcggtctaagtgggttattttaaatgtgggtgatggttcttgtcccttcacgtttgggaatagtggccaaactcggtctctatagctgtccgtagacgctctcttatcgtcggatgtgtttaggtttgcatcaagtcttcagagaaactgtaaacatctttttgttatgaggtttgagggctgatcatgactccgtttttattgttttatctgataattttgtgtaatgtgacataaatataagtccaattttattgtttttggaaaatgatataaaagcgtgcatttagattcttgggcccatcgatgagtggataagtaataaaaattagtatggttttcttatttcccatgacgttttatttttcgatccattatcaagcttaagataggattggcccaactttatcgttgatttgcaagcttctgttttattattagttgtgacgttgctttcaccaaatttttctatgcaagttcaaaatattgaatgggaaaataattaatggtagtattatacattatgtaaaatgactctaatatgttcgaaacaaacttagacaaaacaacaataaaccaccatgaatgtaataacgaataaatcaaaaccaaacccataaagtattaattgacattgacttgttattgcgacttgtgtgaaagtaaataatacaaagttacaaacggtcgattgcggtatgacacgtagtaactagtaagtcatctagaaaacgttttcctctagataggttgatgacaaaattttaaggggacaataatttgatgtatctttcaaccccagttcaaaagagtgtaggaataaatggaaatgttttgtttatacattgaacttgaccactttgttgttgcgtgaaaatgaccacaacctctaacaataaagttcttttatctttatcgttagccgttacataaacatgatgataacacttaaaattattggatgggatgtgtacacgaaacatgtgaaaatggaataagattttttttgaaagttatttttcttttatattcgcattattacaaaaatatattagtgaataataaatgactagattgactgtttcatttatttaaagacaacattgtggtcaagacaacattggaaattacataatttaattcatataaacaattttatgaatatattaaaataaaaatagttattattattatgaaacatataatgtatcactacagacgataaaggatttgattttttcaaatggtaagttcataacttcccaaattactataaataagtgttaaagttagtcattatcaaattaagccactccactaattacaagctccaaaagctttctccttctttttctctctaatctctatttcgtacggatttctctaaccggagcgatg

SEQ ID NO: 35749 - DNA, 3003 bp, Unknown; identical to SEQ ID NO: 35748
  misc_feature (1)..( 3003): 2750-1469P.txt file - cDNA_ID_3090274; gDNA_ID_2926162; Annot_ID_198827

SEQ ID NO: 35750 - DNA, 3000 bp, Unknown; identical to SEQ ID NO: 6469
  misc_feature (1)..( 3000): 2750-1469P.txt file - cDNA_ID_3090281; gDNA_ID_1621094; Annot_ID_170869

SEQ ID NO: 35751 - DNA, 3000 bp, Unknown; identical to SEQ ID NO: 6469
  misc_feature (1)..( 3000): 2750-1469P.txt file - cDNA_ID_3090281; gDNA_ID_2926162; Annot_ID_198825

SEQ ID NO: 35752 - DNA, 3000 bp, Unknown; identical to SEQ ID NO: 17908
  misc_feature (1)..( 3000): 2750-1469P.txt file - cDNA_ID_3090285; gDNA_ID_1621094; Annot_ID_170867

SEQ ID NO: 35753 - DNA, 3000 bp, Unknown; identical to SEQ ID NO: 17908
  misc_feature (1)..( 3000): 2750-1469P.txt file - cDNA_ID_3090285; gDNA_ID_2926162; Annot_ID_198824

SEQ ID NO: 35754 - DNA, 3003 bp, Unknown
  misc_feature (1)..( 3003): 2750-1469P.txt file - cDNA_ID_3090289; gDNA_ID_1621094; Annot_ID_170861
cttcttatcactctcacacccaaaaaaaaaagacccatgaaaatccacccattacccagaaacgaaaataacaacaatctgatccatcacgctcgtgatccgacccgagaacccggaaagaagctccgtcgtctcccacatatcttcagccgtgttctagagctgcccttgaagtcagacgctgacgtggctgttgaagagagtcatgactgcttcaggttcgtcgcggaaacagacgggggaggaggaggaggtgtgagggcttacatggttgagattcatcctggtgtgaccaagattcttgtgagaaccaatggttcatcgtctcttggtttgtcgcttgatgagcttgagcttgacgtgtggcgtttcaggctaccggaatcaactaggcctgagctcgttaccgtggattgcgacggcgatggagaattgattgtcactgtgcctaagattgaagacaatggtagagatttgatagtgcttgtacagtaatctaatgtgtttgtgatcaaatgagaaaaatcttgactttttttatctaatggttatcaaagttaagatctttttgtttctttatgaaaatatggatacagagtaggttttgccttatgtaacgtaacatcaattggttttagttttagagataaaatcctttgagaggggcaaatttattgaggatctctgattcacgtttaagagcattgtctttcttcatttcccattcaggtttcttcaagttagctgcttgaacttcttgaaccactttagggattgagttcgctaccatcttctgaccaaagattagatcaaccttctctttccccttgttactgatgcagcgggtaagctcggttcgtttagcttgaagctgagcgatttgctcgtcaatttgacggattgtctctgagtttctatcgacttccgtttggatattgcctagcttgtcctttaagtcgctgtattcgtacttgagagatgcgaccttcgctttgttaagctcgagagcggagaagaacctatctgcttctactatcatgctttggttctcttgaaaaacttcgctgaaagttggaatttcttcgattagcttcaacctcactatttcttcagctgataggcttggatctttcttgagtttagctgccaagcttgccatctccgtagcttcattagacatgaacaaggaagagaaatctttctccagaagcgatgaaagcttcattcgagcttctgtccattcgtaatctctcactggagagcttgcactaacgggaagtgatgatgaagactcctgtcctgcttctgaaggctgttgctgaagaagattctctagagagttcagataactgtcaaactcttctgggtttatatccacaggagggtgagagactgcaatgacaccgttcatagaagaaacatagatatgcggaacaaaagcctcttcttcttcttcttcgtctgcatagttacctctgcgtttcttcatcctcttgctgcctttctttgcatctgattccttgttttcttcagtcaagtcaaacacatcaccttgttgctgtcttgtgtaacgtttcgaggaagattcccgagctgacttatgttcagcagctggtgttgttgtggctgtctttttcctgttgctagctcgcggagttgctttaggttcattagtctgtatctgcacctgttttctcttcctctggctgtaacgcgaagttgatccttctttttttacatcctcagcatcctcatcttgattctgtccttctttggatgtctcttcaaacagagacgcagcatcaactacagaaaaaaagaaacatcattcatgtgttgcagatagagttttatggctgacgcaacagaagagtgttagttgctacctctttctgcaggctgaaacaaagccggaatgttccaggtaaaagatgcaaagaatgcattagcatccatatcagggaaactagtttcgagataacgcgaaagagtgtttttgcttgcaaaagatttgggtacattcttgcccttaagcctctccgggagaatgagtaagcgatccttatggaacccggcattattcactctcctcccaactctccaagtccaaacatcgccggggctcgggaaatcgacaggtgcaaacggcaaaccttgaccactagaagctggcggaatcgccgggagttgattcaaatcagtgaaggagcttctgtcaccattaaccttcacatcatcaccatcaccatcactgttgaatccgttttcccgataatagtcattctcaaccgggactggttcagtctccttgcttctattactcattgacactactgattcaccatcaaatctgtgcagattcataaatgtgattgaatcaaataacataacttaactaattgctttgcagttataatcacatatattcattactctattcccaataacaaaacaaaatcgatcatgactcaaagtttcctagaatcaatgcagagaaacctatacagaagtgtaaacatattgatagttcttaatgaattgaatttacccaggagaattttgacctatctcttgatccatatccatcgaagcagaccaaaaaccctaattcctgcgatagataaacacccaaataaacaaagcaaaggatgaattctaatctataacaatgttaagggaacaaacccacacaaattaaaagttaagttgattagaaatttctccagaatgcagataaagatacgaactttggagagtcaagaacagagtagccgatcttatgcttcaactacaacagattacaaatttatcaaactcattcgtttcttatatatcctcttttcgatcagattagtcctacaaacagaggtggaataacagttatacccttttagtttgtttttgtttacacagatgaagattgaaattacgattataccgttcaatgtttcttcttcaccgacttgaaagctatgacctttccgatcaccggcgttagttatg

SEQ ID NO: 35755 - DNA, 3003 bp, Unknown; identical to SEQ ID NO: 35754
  misc_feature (1)..( 3003): 2750-1469P.txt file - cDNA_ID_3090289; gDNA_ID_2926162; Annot_ID_198818

SEQ ID NO: 35756 - DNA, 3000 bp, Unknown; identical to SEQ ID NO: 6477
  misc_feature (1)..( 3000): 2750-1469P.txt file - cDNA_ID_3090297; gDNA_ID_1621094; Annot_ID_170854

SEQ ID NO: 35757 - DNA, 3000 bp, Unknown; identical to SEQ ID NO: 6477
  misc_feature (1)..( 3000): 2750-1469P.txt file - cDNA_ID_3090297; gDNA_ID_2926162; Annot_ID_198811

SEQ ID NO: 35758 - DNA, 3000 bp, Unknown; identical to SEQ ID NO: 6508
  misc_feature (1)..( 3000): 2750-1469P.txt file - cDNA_ID_3090314; gDNA_ID_1621096; Annot_ID_171003

SEQ ID NO: 35759 - DNA, 3000 bp, Unknown; identical to SEQ ID NO: 6508
  misc_feature (1)..( 3000): 2750-1469P.txt file - cDNA_ID_3090314; gDNA_ID_2926163; Annot_ID_198931

SEQ ID NO: 35760 - DNA, 3003 bp, Unknown
  misc_feature (1)..( 3003): 2750-1469P.txt file - cDNA_ID_3090318; gDNA_ID_1621096; Annot_ID_170993
catgcatatctagccttacttataagcttttcagtttttattgaagtatactaaatgttttgattgttagaagagatagaacatgtacatattggacaatttactatccaccgttagaacattgcgtgaacgactcagtcatagtactagtcaggtttgtagttatagacatatcaagatttctgtctagttcatgtctatatcaaaggttgtggtatctctgcattcgaagacttatgtttctttttttgtccgtaaatttttaagatttatcttttcttgatagatatatatgtatcacaatgcatagcaatatcgacgtgattggcccagaatcaagtcttatctttggttgtgttcaataatgtaaagtccctttataagctggtacaatatgatggtgcagtgtttggaactatattataaaaggaatgatgactcagggaccatgtaaagcgttagtacaaatgtgtcgttgagacttgaaacttacttgggaccataattatgtttcttgggtttctttttttcagtgctagtaaactttctcatcagtttctctctcgttgattacattctaaaaatttctccatatatgctcatagtgaaaacgtaaatcatgtcttctgagtcgtgaaagctgaagtcgaaagtgttttagtttagggtaatttctgaaatgggctttgcttcaggttgctggaggtggaatcctaggatatttacatatttggagagaagcaaaagttatagcttataagatttttgtcattgttatgatttatcaattcttaagttgtacgtataatttatatttgtcttcggttaataagttattctcattgtttagaactacaactctttctcacattgctctgaactgaatcgcctagaatttgcttcttcttgtttcttaaacgctaagtggtaactaaacattattcatagtgtctgagtattatcagttaaacaaaaacataaataatcgtttcatttttaccaaaaaaagaccattaatggttcttaattccaaattgtaaatacaaaatttacacaagtaatgtcatgcttctaaagtctaggactactgcatgctaaactattcgttttaaaatttaaaatacatcaaatgaaagaaattagattgaataaaaaaatcaaatataaccgagcttccagagtttctctaagtaaattgagaacgcaagccatgaccaatctggtgaatatgaaaaaaactcaaatatttatcatttacatacaatgcacactagatacatatgaagattttaactagtttagtataagataaaaaacacaattttccatgattatttcattaaaaatcttaaaatttgctaaaaacaatcctgatactttgcattattatcattcatattacgttgttttacttttcaaggaactgttttatctaaacatgtataaggttatcaaatgattaacgtcaaatctgaaacaataatgtaaccaatatggaatttcgccataacgtggatacttggcagtggttacttggcttttcctttattttcttttggacggaagcggtggttactttgtcacacatttaaaaaaacacgtgtttctcacttttttctattcccgtcacaaacaattttaagaaagatcgatctatcgtgatctttctatcaaacaaaagaaaaaaggtcttcatagtaacgctacaacatcaaatatgtggttgctctgacatcagtcgggaaaataaggatatggcgccattggccacatctattggggtcccaacttcctttcacaaaaaaattaaattgggtgtcccaacttttatctttgatatagtgacatgagtatcgggagcattggacaatggataaaatgagaactaaaaaaattctggttaatttttgatcattgttatttaaaaggttattttatctataatctacccatattgatcagttttatttaaatttgtttagctaccgctcctcgagagagatcctcatcttaaaaatggaatatggaaattacacacgaccccaaaagtatattttttctctggagaatgctatttagagctttgactatatggtctgaattagaaagacgggaaataaaatctgctaagtgatataagctctaagtaggcgatgtgtgatggagaacaccttttctttaacagtcttcatgttttacagattcgcgaacttcgaatatccctatacggtctgtctaaccctcgtgtgtcttttgagtccaagataaaggccattattgagtaacatagacatgctggaatccaaccattgaagtcacaactgtccatgtagattctttggagaatctgaaaagtcttaataaaggtggtgtttcaaagaaaacaaaacaattgagttaagaaaaaaaaatatcatgtagtggtcgagtattatgttatttattgtgtagctaccaatctttattctttaaatctgacataaaatgctacaaactttttacctcgtctatagccccaaaaaacctaaccacggttctaaaaccacacacagtgattttggttgacgacaatgcctctccttcctcaaaacgatttatttacattttttaaatcaaatgttacattttataccataattaagtctttttacagaatacttagatggaagagatgtataaaaaaggaggaaattgtaaaaaacatatttcgatcaattaaaccaggattcataaaaatataagtatatatataaatgatgtttcgtttagcgatgaacttcactcatatgataatacttaacaatataagtacataaaaaataaaataaaattaattgtttacgaaaagtctacaaatactgcatgtataattaatgttctctttatttatttatttataccttaccaagatatatctataaccgcatagaaatagaaggcgaagagataatttccaaaaacaagaaaaacctctaagctcaaaagatgttgttgagaacgatg

SEQ ID NO: 35761 - DNA, 3003 bp, Unknown; identical to SEQ ID NO: 35760
  misc_feature (1)..( 3003): 2750-1469P.txt file - cDNA_ID_3090318; gDNA_ID_2926163; Annot_ID_198921

SEQ ID NO: 35762 - DNA, 3003 bp, Unknown
  misc_feature (1)..( 3003): 2750-1469P.txt file - cDNA_ID_3090329; gDNA_ID_1621095; Annot_ID_170977
atttgttcttagtcaatgagtggtattcaatttcattgtcccggtcccacggactgactactcagcaacccaatcttacaaagtcaaagtcaacttttattttgtttctctttttttccgtttccatcccaaattcatttctttataaattatttattcctaaaaggatttgtaaattaacctaatttgcatttcaaaatatttttatctattttagtattaaattggaataattgttatttttgtattaaaaaaacactaatatccaaaattgttatattgctttttattttgcttttttctatttttaatttctattttttaatagcatcgccgtatcgtcgcatcgatactcggatttagtaaataagtgttttttagcaagagtttatgcaagtccgcttcgattaaagtatctaaaccaaaatccaaacacgtgggagtttccgttttaatttctagttatattatacccttcgttatttaagatataaaacagcaatttattatcactaattgataaaaccttcattgcaaatataaactagattttaaaaataaaatttgacttttaaaatacaatgtaatattattaatgatataaaaacaaaaaacctaaaatggtattgaagtgtcaaacagaggaagtatatgatatatatgtaattaactagtcaaaatctgctgtgataacgaccaattctaaacaattataaaatcttctaaaaattaatgagaatctactatatttaataactaaaataatagaaggatgacaattgacaactataacaatattgaagaagtcataccaaatatattaagacgtgtataaaaagggtatcataaccgaagacttaagatgaacaagacacaaacacaacagaaacttaaccaaagacatatctctctctcctcaaacccacctcttgtctctatgggatcgcaactctcaaacgcaatcgacggtaaagataacaccaaaaccatcggatcagcggatccggaccagcttatggagatcgaatccttggagaagatcttaaattacaagttcaaagacaagagtttgttgctgaaagcgttcacagacgctagttacgttgatgacaagagtgaatcgtacgaactcctagaacttttaggagattcgatcctaaatatgggtataatctatgattttattaagctctaccctaaagaagcacctggtccgttgaccaagctccgagccgtcaacgtagataccgagaaattggcacgggtcgctgtaaatcaccaactctatagctatctccgtcataagaaacccttgcttgaggagcaagtaagttacattcttaaaaaccctactcaattatcatctttgaaatccctagtatttaaccgtgtcaaatcttataaatttttatttattaattacttcgatcatgtcttattgcaatttggttcattattaaaatccatggaaaataaactttgtcaacctttttttcccattctctatatcactttcatccacaatttgtctcaatgaatgtgttagtttattccataacccatgggcctaattagaaatttaccaacaataatctttaataaaaacgtttgtattggttgtgtgtaatatgtgaatcaatattattatatgcagatactagaatttgtggaagccatggaaaaatatccattacattcaaatggtcttttaaaagttcctaaagttctagcagacatagtagagtctaccattggagctatcttcatggactgcaactccaccgagaccgtctggaaggtaacttactatacatttagttataaatatctagctactagactaaggcaatcgattaatccatgactcttttggtgttgaaaccattgttgacaaaaccattgttgataggtgataaaaccattgttggagccaataatacatttagacaaaatgaagagccatccaatgacagaactcaatgagatgtgtcagaagaggaacttgaaattgacgtccaaagacacttgggaagaaaatcaaacctattgtttccatattgaggataagtttgttggatgtggtcaccatcctgtcaagaaagaaactgctcgtaatttcgctgcaaaaaatgctattgacaattttgctaaatttttcggagacctttagatatatcgaaaagaaaaagaaaaattatatttttataaatttttacagtataaattgtaatatctttctgttttctttttgttaaaaaaaaaaaaggcaaaaagaaaacataaagaaatatgtactgtctttgtattttaaccagcttgtattcaaattcatcatttcatttttcttatgaatggtgcgaaagacgtaaaaaaacgaaaaaggaaaaaatagaatgatgtgaatgaacctagccaaatgttataagcatatataagtgttactcgagaaccataggatatcatttgtaaatcttggttagagacccatattacctctgatcatggcatagcacacaacaaaatagtttattcataaaagtaaatatagtttattcataaaatacaaagatttccaatcacacaatgtaacaagcacaaataagtatacttttacttataagaagacatcggatgtacgtagacaaacaagtatcaaagtatgttcataaaggaaaacaaagttcgcattcaacaaggtgggttaataccttcacgcatgcacaagtgatggaaagcaatacaaatactcagatcaacaaaatgacaactttttcagcaagcaatacaaatatacaatataaaaaatctggggtttcttggttgggcttgaatttgagaaaggcccagatccttccagatactctttatttgactaataaatatcacaaaaacaattttctcttaaagcttttcttgaagaacaagagaaatcagaagctctttcctttgttttttttttctttttcttccaccaatctacagatttcgaatcatcagaaaatg

SEQ ID NO: 35763 - DNA, 3003 bp, Unknown; identical to SEQ ID NO: 35762
  misc_feature (1)..( 3003): 2750-1469P.txt file - cDNA_ID_3090329; gDNA_ID_2926163; Annot_ID_198918

SEQ ID NO: 35764 - DNA, 3003 bp, Unknown
  misc_feature (1)..( 3003): 2750-1469P.txt file - cDNA_ID_3090413; gDNA_ID_1621096; Annot_ID_171049
ggatgtaccgaatagatattggattgtctagcgatgaatatgagatttagtagactggaaagaacgtgtagctatttttgacttgaagtgcatgcaaagttgagcttgtgtagtataactatatggaatatgctaactagtcttgaagaggaaatattttgcaatcttcagcttatcttaaaattttaggtgctgctcaggattctgagcaaagacgaccatcaaacgaagttaagaagtcaagaatatctggaaatcgagtgggcggaacaccaaatatgaaagctggttctggatttggtagcacttcattgtcagagaaacatggagacgtcaggaaaggaacaccattgagaagagcaaaggagaaacaatctgagaaagagaataaattgtggtggctcaagcttccctatgtgctggtaggtaaataatattggatttttggttaaaaagctttctttgccagatccaattattaattcacaatcaagaacgaactatcacaaaatattatgagccagacacttaccgttttctcttttcttcagagaattctcatgcggagtaatatcgatcaagacatatctgagggatattttaccttgaggaccgaatctatggaacaaaatgagggtcaagtttcacatatgattgcatttgaagatcaaagtgatgctagaaacttctcttatctgcttgaatcagtttttgaagacttggatgatttcagtgccgatatagctcccgtaacaaccaaggtagatagttcatttctttaccaacttgattcttctttattaatgtctgtatctgtgaagtttacttgtttaggagaattttgttccttaaacccttaatttctcttcatgatctgagagtatactgaattctaagagcagtgagatcgtatttttatttataggatctttatgaggaagttagttctggtggcaagaatgtgatagttgtgaggaagaggcagcttacgttgtatgctggacaaccatttgaagacgttgaaagagctttgcgaactctgattcaagaacgaagatgaaaaaagtaacaacattacttcggactgaaaaaactagagagcccagagatgatcaatgtggagatgacaggggcagtaagaacaatggttccacaacaacaatttttcatgaagcttaaagaaccactgagcttctgttgtattatggtagtagcattggaattgagaggacagatccactagaaataaaaaagattgtttatatcatgtaaaaacgtattttacatgaatcagagagaacaacattttcatcttcagaattttattgagatgcaacgatcttgatcatggcttgtgcattaagccctgttacattcttctcacaaaacttcttccaagcttcttgcttgcttccttcttcgtcttcttcttcattccatgtaaatttctcgaaaagcgagttcaccatactccttgcagcttcccttgcctctggcaacttgtcactcaactgatccgcagccatttgtgcgagcagaatcatcccaaattcttccatttcatttacctcctgataacaaacatagagacaaatatatcaatcacacaattcaagaaaataataactttgctctgagcattttaatcattgttgaagaattcaaaataccattttagaaacgcagttggaagtagacacagcagctttggccctgacacgagggttactgtgacggacataactctgaagcttacgcagaagcggcaagcgagccaccgagttaaccatcgtgttcagcgctttctctgcttcttcacacacaaacttcttgtcttgtgaagctttcatcagcaactgcaacagctgttattttcaccatcaagataccaaaatcaaactttattattaaatcaacaatccatagccaatcaaaaagctaaactaaccggaaaaaacaaaaaacaaaaatcaattttaccagatcgtccatagatttcaaatgaggtccttccagcaacttttctccataagcagtgaagatatcagaacaagtcataatcgaagtcttgcacaatgcacttctaggattcttcatcgccttcaccatcacaactataagcttttctctacaaattgacaaaaacaaaatcatcaccaagaaactccataagatttcagattctggtcaaaaaataaaaaatactcacagaattggtagcaacagagaagagtgatgaattgcaaatctccttgtgttgttcaatgagtcacatactttaatccaatcctttgatgctaattcttcaagtaatctctgtgatagattgaatcaataatcatcaaaaacaaattactacacataaattcagaatcaattgagaaatttaattacctggacagaagattcaggatctgaaaatggtttgagattctcagaagcaacgtattcgacggtcgattcagccacagcgacagggttgttttcgtcatttagaccaatctccggttgctttgagagtttggccagcttcttaggtcgttcctgtgagatcggaagagcgttttcaatgttcctcaacgccattagagataagagaaagagagagattttgatttgaaattcgttaggggaataataatcaatggtggggttgaaaagcttaatataaagagaaatttttgttacctttttcgcattttatattcaaaaattcaagaggaaaaaaagcaaaagaccgttggtaaggttttggctccaacggtcacaagcatcggttcggtttacatgaattagattcggttatctggtttattgttcaattcacacgacgtcgtttcataacttttaagaaacgacagcgtctaagttatcacttttgcgccacacgcgagtgagagctaagctaattctccgtcttcaatggcttttctcttttccccaattgaaattgaatctattccctagaacaaattgattgtgaatccggcgtcatttttgatg

SEQ ID NO: 35765 - DNA, 3003 bp, Unknown; identical to SEQ ID NO: 35764
  misc_feature (1)..( 3003): 2750-1469P.txt file - cDNA_ID_3090413; gDNA_ID_2926164; Annot_ID_198988

SEQ ID NO: 35766 - DNA, 3000 bp, Unknown; identical to SEQ ID NO: 6530
  misc_feature (1)..( 3000): 2750-1469P.txt file - cDNA_ID_3090424; gDNA_ID_1621096; Annot_ID_171042

SEQ ID NO: 35767 - DNA, 3000 bp, Unknown; identical to SEQ ID NO: 6530
  misc_feature (1)..( 3000): 2750-1469P.txt file - cDNA_ID_3090424; gDNA_ID_2926164; Annot_ID_198981

SEQ ID NO: 35768 - DNA, 3000 bp, Unknown; identical to SEQ ID NO: 6532
  misc_feature (1)..( 3000): 2750-1469P.txt file - cDNA_ID_3090427; gDNA_ID_1621096; Annot_ID_171039

SEQ ID NO: 35769 - DNA, 3000 bp, Unknown; identical to SEQ ID NO: 6532
  misc_feature (1)..( 3000): 2750-1469P.txt file - cDNA_ID_3090427; gDNA_ID_2926164; Annot_ID_198978

SEQ ID NO: 35770 - DNA, 3003 bp, Unknown
  misc_feature (1)..( 3003): 2750-1469P.txt file - cDNA_ID_3090435; gDNA_ID_1621096; Annot_ID_55677
aataatataaccgataaatatatataaaaaattatttagaaaaaatcaattaattacgattttacctttttcacagatgaaacagtagaatttggttacgtctacatagttgaaaataaaactattaattacggataaagtgataaatttgagacgtcgaggctgataattgattagagtcttacctgttggttgcatgcgggaaaggactgctgaactaatattttgtataattaaccttctcatcatatatatgggtccgtagagtattcataattaaatgttacacataaatgcatatataataccaatcatagaaaaatgactagtatactgtatacagtaaaatttgtagctaatcataaatgtccaactaccaaaaatgtgacacaacagcaatgttggcccatagccaatttttacctgacatttttccagctcttatgttactttaaatttagtgtccaacagttcttacttcttagctggcatgaccaaaagtgtatagcctacatatctaaataaattttataaactagaaacatgaattcaaattaaatgctaatctgatttttaattatttttactctttcatggcaaaaaaagagaagagaattacattagaacatgcataaaatacggaaataagcaatgtggtattacaaatgttgtaggtacaacatttctgtgaacgctatagcttgcggttacacggcgatctcgatagcgattctgatgatcagcaggggaagaagaagcaagaagttgttaatggtggttttgctaggagatctagtgatggtggctttgctgttttccggcactggagccgccagcgcaattgggctaatgggtttacatgggaacaagcatgtcatgtggaagaaagtttgtggcgtttttggaaaattctgtcaccgagctgctccttcgcttcctctcactcttcttgctgcagttgtgtttatgtttcttgttgttcttgacgctattaagcttccttaattattaattgtttctgttcttgtcgttttgtgtgatgtaaaataactatcaacaatcatgtaattgtctattgcttctaatgttttatcacatcgttttctatggtgagacgatatattcaaaattcggaaactaattatctctactgattactatataacgacgtgataagatatcctaatcactaatgtggacatatagttagttgtaagcaatgaacctttatatcaattaagtgacacatttttacttttaaacagataagattaagtcactaagaacaattgttctcgtttttttccctgtcaacttcacgaaggactaatgataaaatgagttgccgtagaatgcaagaaactgatcataaatgtgttcattttcttctctacgttcttgccatcgtgataattggaaaatatcacatcaaaacctgaatttaactcatattataactccacgctcaaattcaaaccgagtttaaatagagtaatggaccgtgagttacgtttttgcttggtatcactcatgaacatacgaaatattgaggtagattggtttataatgaacatacgaaaccttttaagtcaaaatctgttttaattttctaaaattccaaccttcacgtatttttctgattaaaggtgtaggaatatcatttccctagacgaactggtcatctgcttagcctgatgtaggagtttatgttgacattcttaattattaatttttttttttatgatcatacattacaatttttcattttattattaacaattttagtggtgatatccaaagttaaaaactaagcacaaagggaaatgtttctttttttccgtatatatcttatatagtgtattattattttattttttttcaccgatcattgactctcattgtcatatgatagttaaaaggaagcattcacagaattaaaaatgtatctattagattgcggattttcaactcaaaattaattggcaataggtcaagaagctcatattttatatataccacctaaaattctattcaacttgacaatatttctaatacattccttcgaaataatagtttttctaaccattaatcttgatatgtttgggcatagatcggtaagcaaagtattgggccgaaccaatatggattgagttgagtatgttcggatcgaattctgataccatattagattgtgagctttcaactcaaaatcaataagcaatagatacgaagattcatattttatatataccacttaaaatcatattttactttcaaacaatattcctgatactatctgtatttgatgcatacaaatacaaataatcatcataattatcagattaaatacttatacaaatttatgtatttgctcgaaaaattagaacgtacaagacttactcgaattttcagtaacttaaatagcccaacaagtttccgaaatcaaaatatctgacctaacagaaatcaatatattttgtgcgaattcacatatccaacaaattccatactattaccaaacgcatatttatccgtatgcacttcgaatatcagtttttttagttttttttttgggtcaaaacgaatatcaggtttcatataccaatgttaccttattttttgacacctacaatgaacacactaagtcaaaaattacacaaatttgttttcctcgcaacttttcaacgtatacacacgtttttttttatatacacaacgtattcacacttcgttcccatacattatccatatatgtttttatttcgtaagctgagattcactcttgcgccacataaacttaaaaagccacgtaaacatcattactatccacaacttgatgtgtgttaagtaagactatttcaattttttttttaatatatatatacggctctctactcacatctagagcatgagaaactttaaagaaaaaacaaaaagaacaaaatttgttatctctctttcctctcattttgaccctcttcacttctttttgatccctaaatg

SEQ ID NO: 35771 - DNA, 3003 bp, Unknown; identical to SEQ ID NO: 35770
  misc_feature (1)..( 3003): 2750-1469P.txt file - cDNA_ID_3090435; gDNA_ID_1621096; Annot_ID_171018

SEQ ID NO: 35772 - DNA, 3003 bp, Unknown; identical to SEQ ID NO: 35770
  misc_feature (1)..( 3003): 2750-1469P.txt file - cDNA_ID_3090435; gDNA_ID_2926164; Annot_ID_139819

SEQ ID NO: 35773 - DNA, 3003 bp, Unknown; identical to SEQ ID NO: 35770
  misc_feature (1)..( 3003): 2750-1469P.txt file - cDNA_ID_3090435; gDNA_ID_2926164; Annot_ID_198959

SEQ ID NO: 35774 - DNA, 3003 bp, Unknown
  misc_feature (1)..( 3003): 2750-1469P.txt file - cDNA_ID_3090447; gDNA_ID_1621096; Annot_ID_171012
ggcacacaaaaagttcatgtatgtttacgaaaaccaagaggttgttagtatatttttttttatggaatttctctaagatcttaatattctttgttagtttctttaacaaaaaaatatatattctttgttagtgtgagtctataagtattaagtagtcttggaataactcttttgtaaagctcttcatatatgttttgtaaagaaatatttctatgcttttaagcactcttcaaggtatagaactagaagttttgacagttttataaaaagtcaatggcttaataagttaatattgacagtattatcaaaagtcaatgctatatgtaattagcttatttgttagttctaaacgcgttatgtcataatttattattaaaaagtgatcaacgttgggcatttggtctagtgatcaaaattttgcagatgctgcaattaacaagtctcaataactgagttttctaagtgattatctttctctcaggcatatcatcgaacaacttacaggcatccaccaaagtctaccaaagaagagctttttcttggttatcctctggagaagatgagttcttatgagattgggcatataaatctgatctgggcacaagccgtcttcgaagttcatggcctacagagaaagaagaaataaccaaaaattgacgtttttgtctgttcggttaattttgtctctttttgttgtttgagtcaacatcaacaaggtatattttttatgtggtgagtcattgtcattgtcatcatcatcatcatcagcagcagcagcagctccttcacattgtaaatagtcatacggtaacgtgttctctctagaaaccaaagacatcaaaggaaaatttagaattgataaaaaaaaaatatggatacaattcgatttttttcttgtagctctctccctcaagacataatcctgaagatcggctcttctcttcaggtttttgcttgtattttttttactaattcttcagttttttttttattgtgatgctacttcttggtaaattgtgtgctatttgatgaataggtgattgatctttgtgcattaagtagctgttctacgttttggagagagttatgtggttctgatatcttatgggaacctctgtttaggcaaagatggcctttattgtcctcatttgaatctgatggagacaatactctgtttctttaaacccaaaccaatgaaaattctcaggtagaaatgagacagttccatggattcttgtttctttcaaattcaagtttctgagttgttttagattttggccatttttgtaggatagtgagtttgtttgttgttgaattgaattctatttatgatgaattggttctcattagatggatgatgtttgattgacatggtagagaacaattgtttagttgagatatttaacaattgttctgtcttggagaaacaaattactgaggcatattgaaggtgatgtgattcttgatattatctgctttaattgtggatagttggattatagaaagcttgagacttttttcttgaagaggtgatagttggaattggacatggtcatcataatcgtttatatatctcaacttgcagttagactttgcttgtttataatttgttgttgtggcagagactaaaattctttgttgttgcgttagcattactttgaggtctattacaggtttcatgaatagtctattttaaagcttttgtaggaatggagaagattttatgtgatgcaacacaaggaaatggcatcaagagcttccgaggtgattaaatatgtgactaagtctcctgctacgttgtctttagaggcaggtatatatctgcacgcggttgaaaccatgagctcgatgcggtttggatttcaagatgtggagttatttttcttcaaaccaaacttaagtgtgctgctcaacctcattggactcatttactgcatacaacacttgaaaccgcgggttagttactcccagagaaagtcgaccggcctttcggaacattttctaacttctttaacattttctttctgcagcgagagcaagtcgtggatgtgctaaggcaatgtggaatctcagagcagctagtttgggtgaaatggttaacgttaggtcgatggtcaggtgggagtcgaatgagagacgacatcgtgtcgcgtcaggtctctctagtcgatgttgtaacagggaaagaagaaacggttctacgagtgcttcaacgaggagttgttcacgaagttctacgtgtttgtatctcaaccgttgatcttgcctgtgcaccttgcagcagtagcaccatcagaaactactaaactgtttcaaggattcgaggattacaagttgaattggattcaatgaatgtgattaaacatgtgatattgaaacagtattgaagttcgagtaaataataacaacgcgcaattcaaatgcaaacgattgtatggagaattaactgtaagaaattcgcggtaaaaaaactgaaattataggattcatatattgggccttagtatattttcggcccattaccaaaattatcttaaacaagtttgagtcctaaacccttttctccggttacagctacaccgccgttttctctctccgccgtcttttctcttcttctccgactggtaaaaatcctctctccagaactctggtctcccgttatatatatatgctcgtctacattctccaattgcttctcgagttcttagctcatatcagtcacatgttgttctctgtaaattcaattccctaatttcaatttgaaattttctctgttggtgaaaaggctctgctatttgattaggttgatgcatagtaattcgatttcgaaactctgcttttaattccatagactatataatggaaaagatgatgataacaagttacttgactgatgattatacaatcacattatgcttatgctaaagtttttttttttgtatgttcatgtagaatctgtgaaggtgaatttcggagttgagaaagagagattagcgtgtaatg

SEQ ID NO: 35775 - DNA, 3003 bp, Unknown; identical to SEQ ID NO: 35774
  misc_feature (1)..( 3003): 2750-1469P.txt file - cDNA_ID_3090447; gDNA_ID_2926164; Annot_ID_198954

SEQ ID NO: 35776 - DNA, 3000 bp, Unknown; identical to SEQ ID NO: 6577
  misc_feature (1)..( 3000): 2750-1469P.txt file - cDNA_ID_3090457; gDNA_ID_1621097; Annot_ID_55740

SEQ ID NO: 35777 - DNA, 3000 bp, Unknown; identical to SEQ ID NO: 6542
  misc_feature (1)..( 3000): 2750-1469P.txt file - cDNA_ID_3090457; gDNA_ID_1621097; Annot_ID_171141

SEQ ID NO: 35778 - DNA, 3000 bp, Unknown; identical to SEQ ID NO: 6577
  misc_feature (1)..( 3000): 2750-1469P.txt file - cDNA_ID_3090457; gDNA_ID_2926165; Annot_ID_139882

SEQ ID NO: 35779 - DNA, 3000 bp, Unknown; identical to SEQ ID NO: 6542
  misc_feature (1)..( 3000): 2750-1469P.txt file - cDNA_ID_3090457; gDNA_ID_2926165; Annot_ID_199075

SEQ ID NO: 35780 - DNA, 3000 bp, Unknown; identical to SEQ ID NO: 6615
  misc_feature (1)..( 3000): 2750-1469P.txt file - cDNA_ID_3090467; gDNA_ID_2926165; Annot_ID_199083

SEQ ID NO: 35781 - DNA, 3003 bp, Unknown
  misc_feature (1)..( 3003): 2750-1469P.txt file - cDNA_ID_3090480; gDNA_ID_1621097; Annot_ID_171108
ttatatttagttacttaaaatttagttttagttttgtggtattttcagaaaaaaaaatagttttatttttgaaaaagaaacatagtgatggtatttttggaacaaaaactcattttactagtattttaaaattaaccatatttatatatgtctagagaaagaaatttaaatttgacgacgaaataggattacaaaatggaagatttctttttcgaaaaagatttgtagatcatgtttatcatataatagtataatgttatatttaatagatctttctgtaactgattgaagaatattactctgttatgctagtaacttttctttcccttaatttgttacttcgtatatcttttttttttataagatacttcgtatatatcttacactactgcgattaagctttttctctctgctctgctcttcgtgtaagtgttcttttctaaattttaaagattgacttttagggttacagtttactggtaaggtgatgtgagatttttggtgttacgatttaatctataggtttgtctaataatattatggttttatattatctttgtttgataatttgacctgtgtcatgtctatacgattatttgtgtcatccttaagatccgatatacttgcttaatctttaatttccgtagtttgaaggagatagatatgtccgagatcactaataatgaaacttctggagaagggactttaactaacaacgtgaatgattgtggttagtattttgattgttttattctcaaatgactctagtattttagttgatgtaccacaagtatgtgttttcgtggtgtttaaattacttgatatcgttacattacataggatcaaatccttctgaactatatgggacatttacatggaagattcataaattttcacaaatcaatgagcgatccgtagcaatgtttttgagattggtggccaccgatggtaaatgacatcattttcataataataaagttgaaactttctgaatatatatgttttttgtttgctttattataatcttacctatgactatgataggtatttgttaatttatccacgaggggttgatgtttccaactgtctctctttgtttctctgtgttgcaaactacgaaaaacttcttccaggtgagtattgtaatgtataattttcactttcttgatttgcaaacctttatcattatataagtttaacattttgagacaggttggagtcatttagctcagttttctgtagctgttgagaataaagatccgaagaaatcaaagattgcaggttattttctgcatcttttactttagcttgaatccgcaatagcgcaaacaaactgaacacgttccttcgcagatacgttacaccagttttggaagaaagagcatgattggggatggaaaaagtttattgagttacctaaattacaggatggattcatagataagtttgactctctttcacttaaagctcaagttcaagtgattaggtaaatgccaagatttagagtctcttgagtgatatatatatatatataaccacatttttccatgcaaccattaacatacaaccaacttttctcaactcttgtagagagtgtgtgaaccgaccttttcgctgccttgatggtcagtataggaaggaacttcttacggtttatttggaaaaagtggagaaaatgttcatgagctttgtggaagagaaaagaagcaagcttatgaaggtgatagacgacaaaaagagatggaagaggtcttttccctaatagtttgagcatgttgcgaatcattacaagaaaataagttttagttcattttttctggtgcagcttatgtgtctttggttagggatggaccataatgcgaggctcgaaatatctagcgagaaaatggatgtgattctgaaacaagttgtgaaacacttcttcgtcaagaatgaagtaacatccactcttttgatggatttcttgttttataggttaaagtctcttgaagaaaaacgcagaaggctcgaaacacttgtaagagtggtcgcaaaagaagtgatcaacagtaaccaaagtgaatccgctatgaagaatcttgaagaggaaactaagaaagagagaacaaatgatgacaaagaattcgctttaaagattaatgaagacgaaactaagaatgaaagaacaattgacgccatggaatttgaagcttcaattgcttatgtggtcaacgatatgcttggtgttacagatccgttgttacgtctagagagatttgttcttgcaccattgcctgaaatgggttctccaaagcttctgcaggttagtctcctatgtctcaacgttaacgtctattagaagttattggtaatgttttctttaaggaatttatttcatgtgactttaggtttccaatctccgtatacagcataatatggaacccgatgagaagcaattagctgattatggtagatgggccttggaggtatttgttcttgaccatatattctgcaacaaaattgaattcacatatgaagaaactattgcattgaaaaggcaagaagaacttattcatgaagaggaagcagagaagaacactaaactcaaaaaaacatttgttggtaaaaaagtgaactaattctttttagtgttttattcctaggctgctctggttttaagactttttaatataagctttctatcttttaactatgtgattaaagattatatatggtggttgtgtttcttttatttttctttaaattaatgctacatacttataaatttaaggttatgttcaatcttgtcactatcctactggcgttaagtcttcgctcacacgtcacacactgcaaagcactgaaattatttcttaattagtgaaaaggtttggggtatgttaacaaataccaataaataaataaaacatatatagtacatgttcctccacctgtcacaggcaacatttgctttcaaaagcaaagaagcattttttcctccattttcttcttcttctccaaatg

SEQ ID NO: 35782 - DNA, 3003 bp, Unknown; identical to SEQ ID NO: 35781
  misc_feature (1)..( 3003): 2750-1469P.txt file - cDNA_ID_3090480; gDNA_ID_2926165; Annot_ID_199044

SEQ ID NO: 35783 - DNA, 3003 bp, Unknown
  misc_feature (1)..( 3003): 2750-1469P.txt file - cDNA_ID_3090493; gDNA_ID_1621098; Annot_ID_171232
caaggtagaaatgaaaagagaattgcattactaattcataaacttatgactactctgttaaattgtttttagtttggaattttcatgatttaatttctcatcatttatatgttaaaactgtgacttgaccttcaagaaaaatcattatatcttaaaatttctatagataatttcaaaatgtaattctgtctacatagttcatctttttatatgtatgagacagttggtggagcaagacgggattaacaaaacacctcgatttcgttagagatcgaataacggagggttatttctcgagtgttggagtaatgtatgagcccgagtttgcatatcaccgacaaatgcttacaaaggttttcatgctcattacaactatcgacgatatatacgatatttatgggacacttgaggagctccaactattcacgaccatagttgaaaagttactattaataccttgcaaaataatatcaaactatttcactctatatctatttgcttatttcttcagtgaatcgatatatcatgcagatgggatgtgaatcgtcttgaagaacttcccaactacatgaagttatgttttctctgcctcgtcaacgaaatcaatcagattggatattttgtactcagagataaagggtttaatgtgattccttacctcaaagaatctgtacgtattctcatcattttatctatgtaacaatagattttgaaatattaatttgttggttcattcaaagttagctataaaaatgaatatacactataatatacatatattgtagtgtgcagcaatagattatcaaccggaaagtatattgtttaagtttaagatttttttcgaagatttcttaaaaaacataaatgaatttcgttttcttttctcatttttttgtcaccaagactttttattaataaatatgaatatttctaaactttttctctacatctcttgataacttagttttttctttttagtgggcagatatgtgtacaacgtttttgaaagaggcaaagtggtataaaagtggttacaaacctaacttcgaagaatacatgcaaaatggttggatctcaagctcagtccctacaatacttctacacttgttctgtctcttatccgaccaaaccttagacattcttggctcctacaatcactctgtagttcgaagctccgccaccatcctccgtctcgctaacgatctcgccacttcttcggtcagtcatggtttcacaacgtacaatactgtaaataatttattgacagatcaaaggcgattatatctaagcaaactttttcagactaaataaacaaagtcaaccaacatatggggactcacacatgtgtttcaaagttatgctcaaagcggtcctataaatatagttattttaacaggaggaattagcgagaggcgacactatgaaatccgtacaatgtcacatgcatgaaactggagcttcggaggcagagtcacgcgcgtacattcaaggaattatcggtgtggcttgggatgacttaaacatggagaaaaagagttgtaggctacatcaaggtttcctagaagctgcggctaatcttggacgtgtggctcagtgcgtttatcagtacggtgatggccatggctgtcctgacaaggctaagaccgtcaatcatgtccggtccttgctcgtccaccctcttccactcaattaattaattagtttctaataataagtcttaaatcacacaagtattggattagacgctcaaagagttgagagatgcatatgtattctctactcaaattatataatgcatgtaaacatttgttagtttttatcaacatcaagagcttgtaaaatcaagttagatgaatattttgtatatgagcaaataatattcacttgatcagtatatactagtgcttatataagaaaagaaaattcctatatacagttttaacatttcgagcaaaggaatcagcataaatgtaagctatgtgagataaagataatttgaaaagacgaaaactgattttggaggagtagacacaaaatttgatcggaaaatggagataaacagagcattgtctacaaacaaaactaattaatagcttagcgtggaaggccgacaaacaacgtcaagagcccttcaatcccatgtggtagcaaaatgtgggtagtgtctagaaggcaccatccaaagccattttgtcgtgtgcattgcttcctaggaaatgtcaactcaacgacatatggcagaagaatcttcgtttcacaatctctttaatacattacttaatttcgtttcaaataaactttttgttatcactatctcactaaaccaacaactcttctttttcttttccggcatttcaattctatgatgttttcaaacaagtgatggacaatttacaaaaataaaacttttttttttttgccaaacaaaaagaaaacttattcatggaaataaacaaaaaaagacaactggttgccattgaattacgccagaagggtttagactgacgtagtacacacgtcagcttacactaaaaaagatccgattctaattattcctaaaattggaataaattaagggaaaggttaattttaggcaacttaagctaataatacggagggaaaatacataacattaattaccgttaccatctacttaaccataacctccttccacatctctccctctggatcgagaaatctccgatccattcttctccgtctgccaaaatccccacttcacgaatcgcaaaagatcaaggtacgtacatacatgtccctttctagaattagggtttttgtttttgcagttagtactagaatctcaaatggatcttttttttttggatgatcaggtttattgatctattgcgaaattagggtttgtgaattcgaatcggagattaataatagattttgtgatggagtgttcatcacgcatagaagaatcttgatttcgatctcgatgaaattaggaatcgagggattttatttataattgagatg

SEQ ID NO: 35784 - DNA, 3003 bp, Unknown; identical to SEQ ID NO: 35783
  misc_feature (1)..( 3003): 2750-1469P.txt file - cDNA_ID_3090493; gDNA_ID_2926166; Annot_ID_199162

SEQ ID NO: 35785 - DNA, 3003 bp, Unknown; identical to SEQ ID NO: 32076
  misc_feature (1)..( 3003): 2750-1469P.txt file - cDNA_ID_3090500; gDNA_ID_2926166; Annot_ID_199155

SEQ ID NO: 35786 - DNA, 3003 bp, Unknown; identical to SEQ ID NO: 32077
  misc_feature (1)..( 3003): 2750-1469P.txt file - cDNA_ID_3090504; gDNA_ID_2926166; Annot_ID_199150

SEQ ID NO: 35787 - DNA, 3000 bp, Unknown; identical to SEQ ID NO: 6592
  misc_feature (1)..( 3000): 2750-1469P.txt file - cDNA_ID_3090508; gDNA_ID_1621098; Annot_ID_171219

SEQ ID NO: 35788 - DNA, 3000 bp, Unknown; identical to SEQ ID NO: 6592
  misc_feature (1)..( 3000): 2750-1469P.txt file - cDNA_ID_3090508; gDNA_ID_2926166; Annot_ID_199148

SEQ ID NO: 35789 - DNA, 3000 bp, Unknown
  misc_feature (1)..( 3000): 2750-1469P.txt file - cDNA_ID_3090513; gDNA_ID_1621098; Annot_ID_171217
aacaataataaactttcaagtccttttgattcttgttgctgaaaaagctgatttgtttctttggaatggttgcaggattcacagtatgattcagaatcttgcacagtttactgatatcaagtgtggattgattgtaggagggctttctgtaagggtatgtatttatctttctctaaggatgtatttgtctgtgtacactatttgatgtttgagaacaagcttattttctctctgagaatcgtttcttaaaatgggaatagcaagattgctaaaatctttaatgtttcttgtgtaaggagcaagaggtggttctgaggtctatgccagatattgttgtggcgactcctggacgtatgatagatcatttgcgtaattctatgtctgttgatttggatgatctagcggttttaatccttgatgaggcagaccgccttctacagactgggtttgccactgaaatcacagagctggtatctttctgatttctttgcgtttatctctttcgtacggtcggttcctgtgacacctagtattgaattgtagtcaataacttcttgtctttgttagtttctaatctgaagaagtggacactatataatttgacttaacaggagagattatgttatgctgttcgttatttgatttatatttgagtccacatctatatgcaggttcgcttatgtcccaagagaaggcaaacaatgctcttctcagccacaatgactgaagaagttaaagagctagtcaaactttccttgaacaaaccgttgcggctctcagctgatccatcagctagaaggccaccaggcttgactgaggagtatgtcagccactacttatcattttcaaccttttcaagagccaaaatatttatccacaaatagcttatgaatatacatcatgtatgccaattagctaactcgtgatctcctaactgtagggtggtaagaatacgcaggactcgtgaggcaaatcaggaagctgttcttctatcattgtgcacaaggacttttaaatcaaaagtcattatctttaggttagaagccactataaatatgatgcctttcaaatccaagttccataaagtgcttgcatagtttggcattttgtatttcagctgagagaattttttgtcccttcttgcgccagtggaacaaaacaagctgcacatagactgaaaattttattcggattagctggcctcaaagcagctgagcttcatggaaacctaactcaagcacaacgtcttgatgtaagaaacttgggcacatcagctttatttgtacatgaatatttctgttctctgtttgcaagtacttaatggtatcattttgcagtctctggagcttttcagaaagcaggaggtcgattttctcattgctaccgatgtagccgctcgagtaagtataagaagcaaaaaacttattttcaagattctcttctcagtagctctgctatttaacctcttgaacactgtctgctttgatcattccagggacttgacatcattggtgttcaaacagttataaattatgcttgtcctcgggaaatagacaggtaaacaagatatatttcctgtattatgattaaattaaaaagctactagttttgttctctttaactgatgtgaggacaatatgttttcctttgattttgcagttatgttcacagagttggtagaacagctagggctggaagggaaggttatgctgtaacgtttgtgactgatagtgaccgatcccttttgaaagtcattgtaagtgaatcatcagacatacatggatcttgcttttacccaattcattatcgctttgtttagacatttgaatcgactttgtttctttgtttaaaggcaaagaaggtgggttcaaagttgaagagccgagtcatcccagagcagtcaatcgtcaagtggtctcagataatcgatgaaatggaagatcaatattccgctgttatttcagcagagaggtttcattcacactcatcaaagaattatggtatcccaggagaattggttgatctgtatacttaagctttgaggtgttttcatcaatttcagggatgagcgagctctaaggaaagctgaaatggaatttgcaaaggtaggcagctttggttcttgtctttgttcaattattgtgggaataatttcaaattcgtgattatgggcttgtttctgcaggcggagaacatgcttgagcacagagatgaaatatatgcacgcccaaaaaggacttggttcatgacagagaaggagaagaagctcgtggcacaggctgaaaaggtgttcttttaatttcctgaggttgttgttgtagagagagggatacacttgtctgaatcattctttatactttctctgaataggattctgcagggaaccctgctggaggcgaactagttagtgctgatagagcagaggacctcaagatgaaggagaagagaaaacgtgaacgcgaggtctgtttatcaagaagctcttcactattcagttgcattatcgttctagtttagtgttgattgcttcttcctagagaacttacaattctcttgaccatgcaagtacagaagaatcttcctaggaaaaaacgtagaaagctagaagctgccagagagatgctagaagataacgaaggagaagaagaggaagaagacgaagaaggagacgaaaagagaggaagatcaagagtaagtatttcagagatacacatcactctctctctctctctctctctctctctctctctctctctctctctctcgccgggatgacaaacattgtattgattttaaatgtgtgttttttttcaggggaaagacaagaaaaaacaggagacagataagaagggattgacactaaaggatcttggttacatgagagcaaaagcggtgaaagcaaaacagagagcaattgattccggtaagatggagagaccaaagccggacaagaaacaaagccggagtaaaccaagaaaccagcctcgtggtgaagagatg

SEQ ID NO: 35790 - DNA, 3000 bp, Unknown; identical to SEQ ID NO: 35789
  misc_feature (1)..( 3000): 2750-1469P.txt file - cDNA_ID_3090513; gDNA_ID_2926166; Annot_ID_199146

SEQ ID NO: 35791 - DNA, 3003 bp, Unknown; identical to SEQ ID NO: 32080
  misc_feature (1)..( 3003): 2750-1469P.txt file - cDNA_ID_3090521; gDNA_ID_2926166; Annot_ID_199131

SEQ ID NO: 35792 - DNA, 1696 bp, Unknown; identical to SEQ ID NO: 6631
  misc_feature (1)..( 1696): 2750-1469P.txt file - cDNA_ID_3090553; gDNA_ID_1621099; Annot_ID_171312

SEQ ID NO: 35793 - DNA, 3000 bp, Unknown; identical to SEQ ID NO: 6683
  misc_feature (1)..( 3000): 2750-1469P.txt file - cDNA_ID_3090553; gDNA_ID_2926167; Annot_ID_199232

SEQ ID NO: 35794 - DNA, 3000 bp, Unknown; identical to SEQ ID NO: 6623
  misc_feature (1)..( 3000): 2750-1469P.txt file - cDNA_ID_3090557; gDNA_ID_1621099; Annot_ID_171311

SEQ ID NO: 35795 - DNA, 3000 bp, Unknown; identical to SEQ ID NO: 6623
  misc_feature (1)..( 3000): 2750-1469P.txt file - cDNA_ID_3090557; gDNA_ID_2926167; Annot_ID_199231

SEQ ID NO: 35796 - DNA, 3003 bp, Unknown; identical to SEQ ID NO: 18023
  misc_feature (1)..( 3003): 2750-1469P.txt file - cDNA_ID_3090561; gDNA_ID_1621099; Annot_ID_171308

SEQ ID NO: 35797 - DNA, 3003 bp, Unknown; identical to SEQ ID NO: 18023
  misc_feature (1)..( 3003): 2750-1469P.txt file - cDNA_ID_3090561; gDNA_ID_2926167; Annot_ID_199228

SEQ ID NO: 35798 - DNA, 3003 bp, Unknown; identical to SEQ ID NO: 32087
  misc_feature (1)..( 3003): 2750-1469P.txt file - cDNA_ID_3090564; gDNA_ID_2926167; Annot_ID_199225

SEQ ID NO: 35799 - DNA, 3000 bp, Unknown; identical to SEQ ID NO: 6629
  misc_feature (1)..( 3000): 2750-1469P.txt file - cDNA_ID_3090568; gDNA_ID_1621099; Annot_ID_171300

SEQ ID NO: 35800 - DNA, 3000 bp, Unknown; identical to SEQ ID NO: 6629
  misc_feature (1)..( 3000): 2750-1469P.txt file - cDNA_ID_3090568; gDNA_ID_2926167; Annot_ID_199222

SEQ ID NO: 35801 - DNA, 3003 bp, Unknown
  misc_feature (1)..( 3003): 2750-1469P.txt file - cDNA_ID_3090572; gDNA_ID_2926167; Annot_ID_199221
tgaaaagccagaagattctccttaatgatttaacaattgttacttgctcagaaagcaatatgataaagtgatttttaccagtcaaaataatttggactttatctattcgtaagtatatacaaggagatgattatgggttaatcacccactgtatgacatttagatacctaatggctataaaagatgcatcgattcaatggacgcattgactcgattgttgcatcgactagaaggtcatatttatccttgttataaacccgcaacatagagtttgcgaggttactttcttgattaaaatacaagagtattccagtgtttatttattataaccattattggatatccgttgggataagtgtttaacattttgaaattcatgttcatacacaaaatggtttagtaatatcgatatgcatcaagccaatgaataattaatagttttccccatcattattggttttggatcagaaaccaaatagttttcatctaaaatctttgaatgtgaaaagtgctccaccacagcacgctgagatgaaccctcaaaggaggataaggatacatgttggatatgaatgataactaagccatcctagaaagatttatataccgctcgttttgaagactatcatattatatagtcagatattccaacataagggggagaatgtatacagctggtgaaaaaaagataaaaagaaatgaattatcaatgatcttcggagtaaagaatgtatattaagagtccaaaagataattcaattacagaatttagcgttgtaattgccagaggcatttgctgacccaaataaagtgatgaagtcacctataccagttgtaaattaaatgctctagaatataatgaatgtcctgtaaggaccaatttcaaactgctattgagtcttaagatcgcatgaagcgtaatagaccttggttccaaatataaacatcctcgtaaaagtgaaggagcacaaaattaaaaatgaccaaattgaggaaataaatattttgatgatctcttgaagagagtgaatgatctctaaaagagacataaacatgacaaatgaaacattcaagtacttgacaatgaagagatctagctagttatgtcatgtcaaaatataatggaatcaaaagcaaatcgacgtcgtaatatatttgcatgctatgagcagttgatattatggacaaaaaggaggatcatgaaagaaagtctattgaaaagtgtacacaaagtaatgattagccaaaaatggaaaagaagaaatagacatataattataatctctagtagagatatttgtactagtagtctatgcacatgatgtgtaaaaccagtggaagataaatgagtctttatgtgaaagaatagtgaaattaatgagattttcacaagataagaaatgtattatgaagagatatattctcttgtggtggatgtaatatttttaagtatctaaagtctgacaataagagacagaacactggatatgacatttatatgaaattattgaaagatataatctctgaaggattaattatatgagaattatgttctctagaactctactcgatcgaataaaaagaaatatgtaacatgacatataatcatataaatgtatatttatgttgagtttgtcaaaatatattgatcaaactaatatttgttttgaaaatcattaaaactcgtacagagttatcataagtaatacgatgacaataatctatgataaaatatcactagataatgatatttataagtctatatgaaaaccatataattttgatcattaagattatggttattaattccaacgagatattgtatttgattgaaaatcatctccttaagaagatgtttccgagggggagattgaatgatatgcgtggatgtaccctttttccttatcatagtttttatcccacatgatttttctatgacaaagtttttaacgagacattaaagaacacgcaaataatacacttgatgaatattaagaaattctatcaatcatccaaatgaatattatacactaatgatatttagagaaataaataagatggtcaagatgaatcatctaaaagattcatgagcagaagaatgacgttgtactttatccagaaatttgttcaagagaagatttggcagacttattctcaaatactgtttattctctgccacatcttctaatcatgcagagattttactaattcatgaagctagccgcgagtgtgtatggctaagatccatagttcaccatatacaagaagactgtggtatgtatgcagggaaaaaaactccaacaattatgtacgaagacaatgcagcatgcatcgcacaactcaaagacggatacatcaaaggcgatagaataaagcacatcctaccaaaattcttttacacacacgatctacaaaagagcggcgatgtacgagttctacagatccgttcgaatgataatctggctgacttattcaccaaggcgctacctactgctactttcaagaagttagtctatcgtatcggattacgccgtctcaaagatctcgacgaatatactcataagggggagtaattgtatgttgcactctttttcccttaaccaaggttttcctattgggttttcctggtaaggtttttaatgagatagcatttcaaatactttacgagttatggtactataatggtcatcaagggggagtgttatgaataaagatggatgcccattataagacccatcatctaagcccatcatttagatgtttgtagagttttacctttttcttgtactcctatataaagaacccttttctcaatagaaaacacactcatttcttctatctctttctcaagagaaatttattttcaacggatacttgtgacttttggagactcgagaatctaaacaacggcgatctacaaagataaagagttattgagctcactatgccaagttctgaaaaggcccacttcaaattataaaggcccagtttaagcccactatg

SEQ ID NO: 35802 - DNA, 3003 bp, Unknown; identical to SEQ ID NO: 18031
  misc_feature (1)..( 3003): 2750-1469P.txt file - cDNA_ID_3090576; gDNA_ID_2926167; Annot_ID_199219

SEQ ID NO: 35803 - DNA, 3000 bp, Unknown; identical to SEQ ID NO: 18033
  misc_feature (1)..( 3000): 2750-1469P.txt file - cDNA_ID_3090582; gDNA_ID_1621099; Annot_ID_171290

SEQ ID NO: 35804 - DNA, 3000 bp, Unknown; identical to SEQ ID NO: 18033
  misc_feature (1)..( 3000): 2750-1469P.txt file - cDNA_ID_3090582; gDNA_ID_2926167; Annot_ID_199215

SEQ ID NO: 35805 - DNA, 3000 bp, Unknown
  misc_feature (1)..( 3000): 2750-1469P.txt file - cDNA_ID_3090586; gDNA_ID_1621099; Annot_ID_171288
atgggaaggcatccaggtacattgttaatgctatgctgatttttgtttaccttctgttatataactaattaagtatacccaaatttgtttttatggcttgtggtcgatccacggttatgtcttacatacatacgtaataatgtttaattataattttaaacatatataggtataaaattaaaatgattatcatcgataatgtttttttcagtcgcttggaagtctcgaagagatggatctgtcagaatctgaaaacctgacagaaattccagatctttcaaaggccaccaatctgaagcatttatatctcaacaactgcaaaagtttggtgacacttccttctactattgggaatctccaaaaattggtgaggttggaaatgaaagaatgcacagggctggaggttcttccaaccgatgtcaacttgtcatctctcgaaaccctcgatctcagtggttgctcaagtttgagaacttttcctctgatttcaaagagtatcaaatggctctatctggaaaacaccgccattgaagaaattctagatctttcaaaggccaccaagctcgagtctttgatactcaacaactgcaaaagtttggtgacacttccttctacaattgggaatcttcaaaatttgagacgtttgtacatgaaaagatgcacagggctggaggttcttccaaccgatgtcaacttgtcatctctgggtatcctcgatctcagtggttgctcaagtttgagaacttttcctctgatttcaactaatattgtatggctctatctggaaaacaccgccattggagaagttccctgctgcattgaggatttcacgaggctccgtgtactactgatgtattgttgccagaggttgaaaaacatctccccaaacattttcagactgagaagtctaatgttcgccgactttacagactgtagaggtgtcatcaaggcgttgagtgatgcaactgtggtagcgacaatggaagatagcgtttcttgtgtaccattatctgaaaacattgaatatacatgtgaacgtttctggggtgagttgtatggtgatggtgattgggacttaggtactgaatattttagcttccgtaattgcttcaaattggatagagatgcgcgagagctcatcctacgatcatgcttcaagcctgtggccttaccaggtggagaaatccctaagtatttcacgtatcgagcttatggagattccctaactgtcactttacctcggagctctctttctcaatccttcttgcgatttaaggcttgtctcgtggttgaccctctctccgagggcaagggtttttatcgatatttggaggtaaactttggcttcaatggcaaacagtatcagaaatcatttttggaagatgaagaactggagttttgtaagacggatcatctgtttttctgttccttcaagttcgagtctgaaatgactttcaacgatgtggagtttaagttttgttgctccaataggatcaaagaatgcggtgtacgactcatgtatgtctctcaagaaacagagtacaaccaacagactacgagaagcaagaagcggatgcgggtatcttttgacttttgattagagctgaaaattataaagctatattttgacttttgatttgattttccaggatcgaaataccatagagacagactatttaatagaatcgatcgtttgatttataatgcagatgacatcgggaacatctgaagaatatatcaacttagccggtgaccaaattgtagcagacacaggattggccgctctaaatatggagctttcgttaggggagggagaagcatcatcatcaacatctctagagggggaagctttgtctgttgattatatgataactaaagaacaagatgaagacattcctttcttggatcctgtttctggtaactgaagcatcttatcattctgttttggtctgttttaggataacttgggatcgaccatgattatatatctataatgataacaagacgatttcataggttttgacacaagccattttttattgatagatggtacatggagatcattttattctgcagaatgatatttggagaaccaaattccgtttaatcatccaactccggagcctgaaagtgtttgtaatttcttctttatctgaatgcagaaacactctgtttgctttgaacattttgtctgccttttctttgaaacatagatctcaatgtgtatattagcacaggttgtttttctctttattagcaatgaatagagaaatcagactttgcgtaaacaaaaatgtatatcgcaaattcacaaaagaattgacaacaagagtgtgttggaactaattttaaatagcaagatccttgtcatcaacaacatttgcattgctgattcaatagccaaaaggcagaagcgtttttggcctaactttggccaaagatgtgaccagcataaggaacaatccatcagctgaaggaaagagcttttaaactttctgcaggagacattgtctggtccacttccaaaccatgaagtatcatccagctatcctacgtcgatgagaaaacatgtcgctgctgttcccccatcccgctgcactctttaattatatgataaagagtgaaagttgtaggcctgaactactcactagaacatctaggataggaagctcattctctggggctgttcttgactgaattggtttgcttcagatctttgcatcgagggcctaagatgatagacgtttggtctgatggggacgacacctttcactgctgaccctgatcagttaagatctgccttgactgaattcacaccatcacattgttaagattcctttcctggatccttagccgtctccacagcttatcacattgttaaggtgacctgaaacgtattacaactctgtttcataatgaacatgggatcgaccatgactatactggtaatgacaagacgatttcttagtttttcacacaagccattttctcctgcagatg

SEQ ID NO: 35806 - DNA, 3000 bp, Unknown; identical to SEQ ID NO: 35805
  misc_feature (1)..( 3000): 2750-1469P.txt file - cDNA_ID_3090586; gDNA_ID_2926167; Annot_ID_199213

SEQ ID NO: 35807 - DNA, 3000 bp, Unknown; identical to SEQ ID NO: 6634
  misc_feature (1)..( 3000): 2750-1469P.txt file - cDNA_ID_3090590; gDNA_ID_1621099; Annot_ID_171284

SEQ ID NO: 35808 - DNA, 3000 bp, Unknown; identical to SEQ ID NO: 6634
  misc_feature (1)..( 3000): 2750-1469P.txt file - cDNA_ID_3090590; gDNA_ID_2926167; Annot_ID_199209

SEQ ID NO: 35809 - DNA, 3000 bp, Unknown; identical to SEQ ID NO: 6636
  misc_feature (1)..( 3000): 2750-1469P.txt file - cDNA_ID_3090594; gDNA_ID_1621099; Annot_ID_171280

SEQ ID NO: 35810 - DNA, 3000 bp, Unknown; identical to SEQ ID NO: 32094
  misc_feature (1)..( 3000): 2750-1469P.txt file - cDNA_ID_3090594; gDNA_ID_2926167; Annot_ID_199206

SEQ ID NO: 35811 - DNA, 3000 bp, Unknown; identical to SEQ ID NO: 6637
  misc_feature (1)..( 3000): 2750-1469P.txt file - cDNA_ID_3090604; gDNA_ID_1621099; Annot_ID_171277

SEQ ID NO: 35812 - DNA, 3000 bp, Unknown; identical to SEQ ID NO: 6637
  misc_feature (1)..( 3000): 2750-1469P.txt file - cDNA_ID_3090604; gDNA_ID_2926167; Annot_ID_199203

SEQ ID NO: 35813 - DNA, 3003 bp, Unknown
  misc_feature (1)..( 3003): 2750-1469P.txt file - cDNA_ID_3090615; gDNA_ID_1621099; Annot_ID_171274
gcaacactcacacatcgactttgattccgacgaagccgctctcagtttctcccgcgagaaaaaccaacaaagaacatctcagaaaccttgagaacgttcttagaacttcgtcaaactctatagatcatatcgaaaatgtaacttctcgtcaagagaagacgacgaagaatacatcgacgtcatcacttctcggaggtttgaatttggcgcgaatatggcctcagatgaaagcagccgtcgacgaaatgtcgccaaagaatctgaaacggctccaaaggcttctctcaaagtcatccgaggaacgttcgccgaagagtaaactcgggtctaaatggcgggagctacacgggttaaacaactgggccgggttgttggatccgttagacgagaatctccggcgagagcttgtccgctacggagagtttgtacaagcggcttatcacgcgtttcactcagacccggaaggttcgccgagacacgtggcgttacctgatgggtcatttaaagtgaccaagagtctttacgccacgtcatccgttcgtttacctaaatggatcgatgacgttgcaccggatctccggtggatgactaaacagacgagctgggttggttacgtggcggtgtgtgatgatccgagagagatccgacggatgggaaggagggagatcgtcatcgccctccgtggaaccgccacgttgctcgaatggtcagagaatttcaggcccaatctcgtttcaatgcctgagcccaaacccgatcaatccgacccgactcgacccaaagtggaatgcggatttaatagcctctacacgacgggtgaccaacacgcaccaagcctcgccgagtctttggtcggcgaaatcagccggctcgtcgagctctatgcaggagaggagctgagtatcagcgtaaccggccacagcctcggcgccgcaatcgcgcttctcgccgccgacgacatcgccgagcgtgttccacacgcgcctccggttgcggtgttttcctttggtgggcctcgagtcgggaaccgtgagttcgcggatcgtttggattcgaaaggagtgaaagtcctccgcgtggttaacagccaagatgtggtcacgaaagtccccggaatattcgccgataacgataaacaggggcaaagtcgtaataacgggagaagtccagggggtattatggaaatggtggagaggaacaatccatgggcttactcgcatgtgggagcagagctccgtgtagacatgaagatgtctccgtacttgaaaccaaacgctgacgtggcgtgttgccatgaccttgaggcgtacttgcacttagtcgacgggtttttggcatctaactgtccgtttcgggcaaacgcgaaacggagtttaaggaaactgttggatgagcaacggtcaaacgtcaaggttttgtacacaggaaagtctttaagacttaaccgtacttttcatgataacggagatgttttgcctagtccgtcgtcttcatgagctttgatttattaaagaaaaaagatttgttctcttttaatactttttaagtatttgtttattttttctaattaccaaaaaaagtatttgtttattttgctataattattatttactttttctaagattaagatattcattattggtggggggaattatttatttatttgtttgttatgatttctttgtcgccattggtgataataaaagattaaaaagttgtgcaatttagactttcgcgtttgttttagcaaatgtgatttttgcacaaaaaattgtaaatagaataaaatgaaataaatgtcattggttaaactattagataaaaaataagttttgctagagaaaaaaacagaaaataacataatctatgtgtttaaaccttaaatttcaattaaaatggtactgattaattattttcatatatacataggaacacttgaatatatgaactgcaaaactatgtttttttaaagtgggactaaatgaccaaattttattaaaacgacatatggaagactagtatgttgtaaccaacaatgaacaataaccaatactgaaataagttattgtttgtttgattttagaattgttacatccggtacgacgaagtctgaatcatcataagagtctggatcatcatctgagtctcatcacacaattgtttgcaatgcggttctaacatttatccacttcatattttttttatataaaaattgtttatacgtttccaacacgtaaacacttctcattgtacattttcttttttttttttgctataatgactgaaaccatgcatgaaaagtcttctaaatagaatcgaactaaaagaaaaattacacttaaaaaaacaaattgcaatattttttggttttatttggtttaaaactatgtatgatctagaaaaaaaatattatgagcctaaagtgaattattctgattctatataaatacaaacggtaagtattaagttagaaaactaaatagtcttatgtatacaaatctcttcataattcattaaatatattgtaaattgtaatgagtattttcatatacatagactgatagaagcactttatcgttaaaattgcaaaataaaagtagttataagtgggcataaatgaccaaaatttgctaaaatagattgtttttttttttttttttttggtaggggacactggacagggagataatccaataatgaaatataaacttttgtttagatatgccgtcggtttaagtattctgataatcaccaccgtttttttgcctattccaaatttccacacattttattttcatttcttaatatttatttccttatcatttctttctctcaccaaccaacaagttctcctttctacccatttcgtctccttcattttgacgttttctttagatctgttaataatcccatccatggcttggtctagtcactagtggtgttatctctctgtgtggaataaaaagcaaggttttttaatcacttggattgttttaagatatg

SEQ ID NO: 35814 - DNA, 3003 bp, Unknown; identical to SEQ ID NO: 35813
  misc_feature (1)..( 3003): 2750-1469P.txt file - cDNA_ID_3090615; gDNA_ID_2926167; Annot_ID_199200

SEQ ID NO: 35815 - DNA, 3000 bp, Unknown
  misc_feature (1)..( 3000): 2750-1469P.txt file - cDNA_ID_3090627; gDNA_ID_1621099; Annot_ID_171271
atccattttctaagttttcctcttacatttctcaatcgaagatacaataataataataattattataatttatcttatagattcaacgtcctttttgttataatggatccgattaagctgacaacagaagctaaggtccctgctaagcgatcaaaggctacaaggtttgttgataaatgtggttatagtatttgaaaactccccacttctgaaactgaattttagggtcccaatttcatatgtttctaatgtcaaaattttgtatattattggtttcttttgagtaatgatttttcgaccaagaaaaataaatatgaagtcgaagaatgattttctaaattttgttttttactttgtttcttagtggatgtttcttcttttaaaaatctcgttttaattttattacacagtttacttaattcatttgattttatattttctagatttttaactttacttttagattcaatgtattaaaataaacaaatcttttatagatactactaatacaatcttaatgaaaatgtctatatattattttatttttggtatatatagtacattgtatagtttgtattcaaaccaaaaattctatatctacctcttgataacactattatatactatattttatcaaattttcacatatctctatttgtatatttctttctttaaacaaattctcaaaactatttaagggtccacatttccgaatctcgcccaaagccctgtgttttttttcatcatgacaggctgttattttaatttaccatttttgtgtatttaatctaccattactgggtaaatttgtttccagccactacttgcctcttcataaacgccagttctatcattcccgaaccggtcaggtgattcatgctccttcttttgcatagtctttgaatttcacgttattatgtattatcaaagtatacttggtcccaattcacgtacctctctggtctgattcttctcatttaaattcgtatttctgcttcggtttgtatatccacgtgaattttttattgtcactaaccaaaaactgcatgtttttgttgttacaaagccattgtcacttgagcaagttatgtctgaccgagatagcgaaaatgacgtcgacaaaaatgatgatgctgcacatctcgaagaaagccaggtatatatatattccatgaattatttatgcttttactaaataaacaacaaaagtggtatacgattattcttgctaatgacatcaatttttctaaaaaactgtagatgcttaatggttccatggatgagaatgaaatcgtagcagagagattcataaaactttggaactcctttgttaaacagcaaaggtaactaacgatatttcttacgctaacatccatacgattaaagaccttttatatatgtcttacattccatacgtttgttaggcttataaaacattagcataactcaaattatgattttatgtttcaggattgttgcagatgctcatattccttgggcatgtgaagcattctcaagattacacctgcaagagctgcgcagtaacttatcactcgacttgtaattatctcttcaaaactatatcaatacaccaacttatacacatacacatatagaattttgttttgtttattggaaaaaaaaaaaattccaggtgctggagacaattcatgatcaaacaatgggattatggacttcttgacagagtcaccatgaacaaatgcaataccatcatctaccataatatctcaactaccaacgatgacataaacaataacaacacaaggacgactgataatatggatgttgtcgacgatgacataaacagagacaagtaatatgaagattttcgattgcaaatttttatattgtttttattgtttaggagcacaaagatatataacttttttattaattggattttatttttttggctagggggaacacagaaactactgagactgccccagttgcaactgaagctactacacatggggaacaagatggaatagatgtgggagaacaaggtaataacgggtcgacattatgcgagcaaatggagtcagctactgttacagaatcttcgcaagatgccacatggtccacatctactcagagaagctttgggaaaaggccgatcgtaccaactccaaagatgatagagtggcaatggagtagtgttggtggtcgcagaagcggtggtcgtagaggtcgtggtcgccgaggccgaggtggtcgtggtcgtgaaggcggaagcgcaagcggtagtggaaacctcatctagtgatctccggtgggccggggtagttcttcattctctcttcccattctctttttcatgcttatgttgttttttcacatctagattaagtgtatgcttaatcacttttatctataaaatactatttcaacatgtagcatgacccaaaaagtcatagccatgtaacagttgcttatcattttaatttgaatatacttttaattatggttttttgccctcctttatgaagccacttgtccacttttcacattttcgatgattccacaaagcaaacaaacaaatagagcagacttaatctgcaaaagaatcttgtgttaaatctaatttatttagaaagaaaaaaaatggcccctaataaaaggaagaaatcagatagaaaaaaaaacacatctaataaaaagaagaaataaatctaatttattttccctaattaagtttatccttattcattaaatttctctcaatgcactattttggacccttaattgaataacatatagcgcaaaaagccttcattagtttgggttttaaattataggcccattaatattataaggtccaacatcaaattttgtttccgctcccccataattttaggtgaaattagcgcgcgaaaccataaaaaaaaaaaaatcgaaaatcaaaaacaaacatctctcagattgcagaatcaaaaactttgagcaaaagagagagagacgaagtggagagctctaatg

SEQ ID NO: 35816 - DNA, 3000 bp, Unknown; identical to SEQ ID NO: 35815
  misc_feature (1)..( 3000): 2750-1469P.txt file - cDNA_ID_3090627; gDNA_ID_2926167; Annot_ID_199197

SEQ ID NO: 35817 - DNA, 3003 bp, Unknown
  misc_feature (1)..( 3003): 2750-1469P.txt file - cDNA_ID_3090678; gDNA_ID_1621100; Annot_ID_171384
tatgggatagacttcaggagaagaaaaaaaaaaaaaaaccggaaattgttcgggggattgaacccgacgtgaatcgaacacgcaaccttctgatctggagtcagacgcgctaccattgcgccacggatccggatgttattatgttgcatttataaaattataataccgtagtatacgcaaattaaacaaaacattttgaggacgcgttcccaacacggccggtgaccaaagagtcaatttaagcccgctttaaagatatcaaaatgatataaaactctaattgatcgagttaacggcaggagaatcaaagctactaatcataatcaagaaatttaatatatatacgctattattattgttttgaacgataaacacgtggtctggtcgtgattaaggtcctaattatgtcaacgtttgcctgccacattgcagaccgaagtactaattccacaccgactggtctacgacatatttaattcataaacacaatactttataattaaattgattcttgtagagatttggcttcatgatctgatttatttagttaataaccatttcaacagataattacagtttagagcctttttccagttgtcaagagtgttatggttttaaaatggcaccctgtaaatatcacatatgttagtggatttattttaccaaagaaacaaaaaatgttaatggattaaaaaacttgtgtttttttagatagcaaaaccaaaagaagatatggtgaccactaacacgatcagtcgaagacaaatgtttcccagactttattattggcgtttccattttgcatattagtcaaattatggagcatcgcaaatatctaataaactaactatataaaaagttattataatacagggttaccaattccgtatattcagaatattcctaagaggtgccattttgactaataaaatggacggatctttgatttattccggaagtgaatggatattagaagaaacaaaagaaattttgaatttcttgtccaaaaaatatttttcccattcttagtatacagaaacatagaaaatatcgtgtatgcttacgtaacaatcaagttgtaaaaagaaaaaaagacagaagataaatagtacagaatgaacataacagaaatcaatctatggaattaggtacaattaggttcggtctaactgaaattacatgacgacagaaaaaactgaactaaacgccgattctattaacttccaaaactgactcgtctcacacgcgcttactatgattcacacgtgcgaatatgccatcatataagcgctactaaaattcattccaaaggaaaaagaaaaataaataatcgatctcaaccgtccgatcatccatcttgccatcaccgttcaccaatcttcttcgtctcctctctctttctctctttttgctgtttctagctcctctctctctggatctcgccggcgaaccgtttctcttgggtggtgagtgttgcttcttatttttaagaatctttttcttttatttccatcgaatttcgtttttttgagtttgatttttggcctgtggaattctcgatgtttctacattgatcgtctggtttcgaatcgtgttttactggtacaattttgattccatctccgtatcttatggattcgaagaactttgtgttttttttttctttcttcattgatgctactttgctagggtttacacttttttcttccatggtaaaaaaatttgagcaaagttgttgagattcttctagactgttttcaattttacgtttcacaaagatttttttagatgatttgtttctaatgaaatggcattgtttgtgttctgtttccatatgtgtagattttgaaaatatgtttgtgatgattgtgcagtaaacagtagcaatcaagctatagaatctcagatatcgctgaattagctgttggattttatccgccttttcttcgttatccggggctcgggtataaggtttcatcgtcttatttcatctgtaaatgggctgcttccactcaaaggcagcaaaagaatttcgaggacacgaagaccctgttaagcttgcctctgagacagcttgtaagtttactcgcgctataagtttaaacctcctctagattcatttctctcaaagctgcatgttcatttgttttctgatatgagatgagaatcatcagttagattcaaatcattctttctctgttcactgatttagtttatctccggtttggatttttttagttttgtgttttggagtctttgtctgcctaacaatttctagtaatgatccttcaaagttggttaacactctatctcatgtttcttgttaccaataccatcaccttaatcttgttccttaacttgtcaagacgagttctctctccatgcaaattctaaatgtgaattattagtctctttgtttgtttgtttgtttgttcctggtaattctttgttttgatctcgtagtgttgcttgtttttttctcttttccagttagtgtgagtgaggttgaagcattatttgagctattcaagagcataagcagttcggttgttgatgatggtctgattaacaaggtacaaagtttgtttcttttgacccaatttggatcttttcatgaccccatcgttgtatctttttgttctttacgctattcatctacagtatttttcaacttagttgactttatttgagcaataattattcttccatgacgatatgtctgttccatattgcatcgattcaatgtatcgtagcccttaatgtttgacttgaacttaacttattttattgattgctttgattttgaattttgaagccttcatggcccaccttgtttatgttgttttttaatcctggcttcacatgtatgcaggaggagtttcaacttgctttgttcaaaagccggaagagggagaatatatttgctaatagggtaaaatcttaattcttcaggcttttacaagattcatcttctggaagagtgatctaaaccaagataatatg

SEQ ID NO: 35818 - DNA, 3003 bp, Unknown; identical to SEQ ID NO: 35817
  misc_feature (1)..( 3003): 2750-1469P.txt file - cDNA_ID_3090678; gDNA_ID_2926168; Annot_ID_199303

SEQ ID NO: 35819 - DNA, 3000 bp, Unknown; identical to SEQ ID NO: 6674
  misc_feature (1)..( 3000): 2750-1469P.txt file - cDNA_ID_3090684; gDNA_ID_1621100; Annot_ID_171382

SEQ ID NO: 35820 - DNA, 3000 bp, Unknown; identical to SEQ ID NO: 6674
  misc_feature (1)..( 3000): 2750-1469P.txt file - cDNA_ID_3090684; gDNA_ID_2926168; Annot_ID_199301

SEQ ID NO: 35821 - DNA, 3000 bp, Unknown; identical to SEQ ID NO: 6675
  misc_feature (1)..( 3000): 2750-1469P.txt file - cDNA_ID_3090698; gDNA_ID_1621100; Annot_ID_171375

SEQ ID NO: 35822 - DNA, 3000 bp, Unknown; identical to SEQ ID NO: 6675
  misc_feature (1)..( 3000): 2750-1469P.txt file - cDNA_ID_3090698; gDNA_ID_2926168; Annot_ID_199294

SEQ ID NO: 35823 - DNA, 3003 bp, Unknown
  misc_feature (1)..( 3003): 2750-1469P.txt file - cDNA_ID_3090704; gDNA_ID_1621100; Annot_ID_171366
ctataattaatcatcattttaatttacctttgttaattttttgttaacatgtgtgatcgcggtcatagttcagttaataaaataagaacgaaaagtttgatcgtataatatactagttcatacttaaattgttcttctcgaattccattcaacaaaactattcaataacttccttaatagaatatttattttttggcaattggacataaatagttactctttctgaacagtatactacaattaagttggaatatgtaatttctacgaaggtactataatactattctataaatacttgtgtgtaaaagtaatcaaaatgcatgtatccagtctatttcaaccatatgattgaacacgtgcatttcttacatttatctcacttttatatatatggtgtacagtttcaactttaaaaactgaaaattgtcaaaagtacgaatatttaaagaaaatgtttgaatgcttttttcttttcttctggtaagtatgtttttgtgttttgttaaaatataaaaatgagaattttagaatttaaaaggatatatagttaaattggtaaagatcttaggcgaaatttagaggttgtcagttcgagtgacgtttggaacgaaactaacattacatgctttggtttcgaatctggaggaattacggatttcggcccaaaacctcataatattcaggaaaaaaaaaaaaaggatattttttttttctttcttgaaacaccatttctattaaaagtagttttcttatgcggggaaaatgggatagttttcttaatctttcaacgtaccaacaaacttttaaaagtattctttgttgccagaacaaaagtataccatctttgtcgaagaactcaattgcagtgggaatgcacgtgtggttttgttttcacgtacacagatgtttgtagaaagtttgaaaattcttatggtcaaaagtctcacacgaccggatttggtcaatttcaaagctgatgtgtcatagactcattcactcatatgcttcccctctttcaaatgtataccatttttttttgttaaactcaataaattattaagagaaactcaaactattaagtatgtaaactaatgtcttatatattctaattttttaacgtatctttgttttaacgtatcttttaaactacagattcggatgattacgaaaattaataattatgaatattcaaataaaatggacagtaattcttatataaaaaatccttttgtcaataatctaaccaatgattcactccaaactcatctgacatctctataggcccttattatgattggtatgtccattttggaagtcgtcatgacttatgagcataaaatgaatacatgaatacatgttttgcagtttttttttgcttcttaaacagttgatgtctttaatttgtttcttgtaagtttaagatgttatctatttatataccttgtttcgaaatttgattgtcccattatgtttctgacgtggaattaaaacccaatgagaatggggtcctcctgttagattttccaacaacgataagaatatagaggttgatgtgatttaaaaccaatagaggcagcgcaattgagtaatcatcatcttaccatccttcctcgaagtagtcttcattgcaagttggcaaaagcgagagacccacccattcactttttaacttttagtttagctcgacatgagagaaattatattatgaacaactatctttagtttagctcacatgacggggttttttttttgagaaaagaaaattttgaatttttggtttatcatacaggaactatctttctccggcgggaatttggaagtcattatgcccattaaggagtcataatatatatttgtagttattattgtatctggtgtcaaacaaaaattaatgttagttgtacattgtgagatctaaaacctcgagagatgaagtcttagtaatgtttgaacaaacaataatcacgttttccatcaaattcgagcatttaaagtttatattactacatgccccaagatgataccgtccatctcatccgaaaatatttctgaaattgcgctaagacaacaatgtttgctcaaattcgatcatttaaagtttacaaatctctcatcactcttacaaacttctcacactaaacagaggtacatattttcttataaagacaaaaggttcgaacagctggcttctcaactcgagttgtttgtcagggcctctcttcactaactacaagttggtacttcaaatattggtggctagcttcacgtgatattgtctacaaattaaacccatgaaaaagctgcattaattgttccaagtgaaccctgaggagtgtcaatagtctttgctttagtgtgatcattaaaccaaatctctaaattcctaatttgtactaacatttggaacgtatttcctactcttctccctgctccaactcccaaaaataagattagttagatttctataactaatatacatgtatactcccaaaaacagtaaaaccatattaataaagctaattttgcatagatttatttcggtaaaccggcggttcaagttggggaaaaaaaagacaaacggtctaaagtcatccaaagacaaaaaaccaaagacaagttgagagagacgagaccaatcacaacattgcttcgtagattgcgtgacatcatccttgacggctactttcatttgtgtcttatttggataaaacgcacgtgtttaattcacgaaccttcatagcaataagaaatttccattactttcatattttcaactttttttattacccattacatgcttaaaatattaattcacaagtctttgtcaaaattcaatattttccaggttcatgaaccctttttatctcaatctactctataatatctccctataaattacaacaaaacctctttatttttcattcacaccggacattttgaaatctcaacaagaaccaaaccaaacaacaaaaaaacattcttaataattatctttctgttatg

SEQ ID NO: 35824 - DNA, 3003 bp, Unknown; identical to SEQ ID NO: 35823
  misc_feature (1)..( 3003): 2750-1469P.txt file - cDNA_ID_3090704; gDNA_ID_2926168; Annot_ID_199285

SEQ ID NO: 35825 - DNA, 3000 bp, Unknown; identical to SEQ ID NO: 6680
  misc_feature (1)..( 3000): 2750-1469P.txt file - cDNA_ID_3090710; gDNA_ID_1621100; Annot_ID_171363

SEQ ID NO: 35826 - DNA, 87 bp, Unknown; identical to SEQ ID NO: 223
  misc_feature (1)..( 87): 2750-1469P.txt file - cDNA_ID_3090710; gDNA_ID_30962; Annot_ID_146872

SEQ ID NO: 35827 - DNA, 3000 bp, Unknown; identical to SEQ ID NO: 6680
  misc_feature (1)..( 3000): 2750-1469P.txt file - cDNA_ID_3090710; gDNA_ID_2926168; Annot_ID_199283

SEQ ID NO: 35828 - DNA, 3000 bp, Unknown; identical to SEQ ID NO: 6666
  misc_feature (1)..( 3000): 2750-1469P.txt file - cDNA_ID_3090724; gDNA_ID_2926168; Annot_ID_199267

SEQ ID NO: 35829 - DNA, 3003 bp, Unknown
  misc_feature (1)..( 3003): 2750-1469P.txt file - cDNA_ID_3090728; gDNA_ID_1621100; Annot_ID_55840
gaagacgaagaaatagaagaatcgagagagtgagacaaatctagtgatgggttgcgactcacatggaaatctaagcgacacagagttcagcaagccgttgccatccataggtgtatatgtcgctgcagcttcactgatctgtggagttgctatgttttccgatcttcttcacggcttccggcaccgtaagttctggtttccttgcaaattcttctctctcaacgctaccactctcacctttatctctgtatgcgtcaaactctcattggatctcaacacttctatgcctagtcgccaagatcagcttgctaaactcagcagcagcgtcttcgtatgcaccgtgatggctaattccatgccttctcttggttacatggtcacgcaagatctcctcatgaacctcacggctcttgggattctagtcatcaccgatgttgttaacatctgtatccaattgggtacaggagctatatatgtgttccctcaagaacacgctctggtcattattctcatgcttttgatgtttatgatcttgagtttctctgctatcactgtcccagccacaaagcgtttcttggagctcaagtacaagaagagatacgagtttgctttgaagcagtgtccttcgtatacagagagaagaagaggggttcctaagcttaaagaagatctgatgaaattctggatgatggctcacacttctagccctcagtttgtgatggctcgctctgttacttgcaccaccactggtttcctctgtttcttgattgcaatcacattggctgaagccatggtccggtcttactttcttcaaccccggtcactagggttctgcaatggagattctgattacaaatggtcaaccactttggttctagtctcccagacagctgcagtggccataggaaccgttgctccagcgagcagatggctcaaggcagtgaactttaggtgtccatttagaaacaagaaatctttgaaagatgagttaagagtagagagttattgggtagagtgtctcgctgagaagaaagaacgtcccttgaacttttggatgctccatggtcgctgcagcaggaagcttgcacacgacttaaaccggttgatgcttgatatctgcattgcaacacagtatggtatagtgctggctagcaagtttctccgtttcatcacggtctattgttcgagtagaatcttgctatgttgttttcatttcaccttcaaaagtgattctgttgcaaacgctgagtcctccgggttcaaatccatcaaccagacaattcgttctgcatcttgaaggagaggaggagatggtggactacatggcacgtagcaaccgtgtggccacagaccacttgatacaaaagggtcggaagaaccaacctgtaacttgatagagctcttggaggcaacaactttcatctcaaaaggatttgaagggattcgagattttgacagcgacgaggtttcttctctggcctctggagagccacctaatagttgggcccttccattggtaacactgacgagtatcgctgtcgctcttcctaacatcaagccttgctcgctcaagaagttagtgaaagctgtaaacgaggcattggtctatgtcaacaagttcgaagaggtcttagacatcgaaggagagttagctaacagcaggaaagctgcagaagttgtttggttaggagttgatctctaccataaatggctcaacgtggatcttcgaaaactatccaagcaacatagcaaaacaccacaggaagttcttaaagagctggtagatatagcacaaaaagagtttacagagtcatgggagaaaaatcggatactatgcatgaagcataagccctcgcactggcccatcaagactcaagcagcaaactcaatgtaccgaatcagccaaacccttttgatgaagtacgaattcaagaaacatttgaaacagaggagactctgttgaaagatgtggaaaagatggtatcggacatagtatcaggatgcttttgcaacacggcacaagttattggaatgaagtgtttggttacagcagtggaagtgagggaagcgtcggtgagagaagcggcaatgcatttggggagaacagagaagatacttgagatcgtagacaggagatgcatgcctgctttgtctcatcacaaagtggcaaagattgatgaatggagagagttttataggaccaataaatccatcactttcactcatccttcgtcccagtgtacgacccgtgaactcattatcacctagaataacacattttcttgtcacatttaaagaattaattacgttttgtacatgataaaccctaattagcaaataaaatcctttctttgtcggttgatctaactattaacacttgatgccaagtctaaagagtttattagtttttaaaacccagtttaccaataataagtttcctttgtcggttgatgcactagtcaaactatcaaagtcgtcaagtttgctttgttgacaaggcaaagctactcttccaaaacattgatccattcttctggaaatttgcaataacgtctcaagaccaatgcaagtaataatttaaccatgccatgttatcaacaaaagctgcttctctgatttctagagtattattttttaaccattattgaagtttgaagatttcttattattgctaaatggtaaaaccatcttgaggggaacaatttgataaaactgtgtgctgcttcctgtctccgaccaaaacatgtttaaaattagattcggaccaaacaagttgtcaatttttagtacaaatcaaaggttcaaatgtcaataaataatcattacattttaaaatttcgaaataaaaggacaaacatgtaaaaaccaaaaaagtgaagcactgatatttgtcatttctgcctataaaatgtacacttcccactcacacggtcacagaaaccaaattcgaagaagaaacagagaatcatcaaatcaaatccctaaaaattgatttttgaaatg

SEQ ID NO: 35830 - DNA, 3003 bp, Unknown; identical to SEQ ID NO: 35829
  misc_feature (1)..( 3003): 2750-1469P.txt file - cDNA_ID_3090728; gDNA_ID_1621100; Annot_ID_171342

SEQ ID NO: 35831 - DNA, 3003 bp, Unknown; identical to SEQ ID NO: 35829
  misc_feature (1)..( 3003): 2750-1469P.txt file - cDNA_ID_3090728; gDNA_ID_2926168; Annot_ID_139979

SEQ ID NO: 35832 - DNA, 3003 bp, Unknown; identical to SEQ ID NO: 35829
  misc_feature (1)..( 3003): 2750-1469P.txt file - cDNA_ID_3090728; gDNA_ID_2926168; Annot_ID_199263

SEQ ID NO: 35833 - DNA, 3003 bp, Unknown
  misc_feature (1)..( 3003): 2750-1469P.txt file - cDNA_ID_3090734; gDNA_ID_1621100; Annot_ID_171334
gactctctttcttctcagtaaggactttcatgtcttccacagctcttttctctgcggttttcgctttctccaccgctcttccaactatctcgagctgtttcactgcttcacccattaccatatgttttgctgctgcttctctcctgagttcatccacgttcatcctcatctcttccgcttcttttcttgttttctctgcttcacgcatgatttcatcaactttacgactcgcttctacccattctccttcttcagcttcttgtctctccttctcctttcccttcaattctctgttttctctctgcactccatctaattccacagtgagtgaacccaccaagcttttgtatgaactttcttcatcataaatttcttgcatcgcactctttgcctctttgagctcgccagaaagtttaatctcctcctgtaacctctcgttttcggtagatatctccattaactcctcaatatctttctttagctcagggtcacaatctcgcttgagatcctccagcctttgcttagcttctagcttcttacacacgtaagtttctctcaaggcaatactctcttcctttatctgttcctcttcctcttttttccttgcagcatcagaattaagtcgctcagcagcatcacgcatttccgctatgtcatgcgacatgtctttgatcttgttggagttaaccatagacgcacactctgcttcctctgccctctgaagttcagctagtctctcttccacggagaggttaaactgttgttttaattccgcgagctcgtatttcgccatgaacagctccgcggtaatcaaaatgtaatcctctcttgtgctctctgtttcttggttttcagattgaagttgttctaaccgttgattcatggtgtgtttggtagagatagcacatttccttgaatgtttgatggattctagtttaacccttaaatcagcagcctttcgttgagcagagtcgagatcagagagagcttgtgctttagctgcgacagagccatcaagacatatcttgactctatccatttcttgttcggctaacagaagttgcatctccttatccgacacatccgttgttgtgtccttaacgaagaaagaaaagatatttatagagagacacgttttgtaaaatgagagaaagaggcatgcagagaggaagaatgtgtgtatacctgagactgagaagaggaggaggaggagagacgaggtggttgcttcttggaaaagctaacttgacggaataaactaagggcgtctctaacggattggaagggagcgcgggtgtcaatctctcccacctcactgctccgaggaggagtctccggaggcatcaccggagcatccgttctgatcttcgccatcaatcctctcaacacaaacttttacgtaatgaagcaaagagagagagggtttgatgttgatccttaggatctttgtcttccaaataatgaactagagggtcgccatgttttgcgctcatgtcttttgtcactctaaggtcttcctttatctatttgtctattttcaattttgattattaatcttgttttcttttgttgggggcatgggcattggtaaactcaaaacatcaatatcttgactcctaaaataagaacatgtctatatactgatatatacattatagtatttagaaataagataatttcgttattaagatgaataattgaatataacctgagtctagaagtttattagtaaagaatctggaccggctattctaaacttggtgcttggtggtcattttgtggatttggttcggatttgtgtaccgtaccgttcacctaaaccccttgcttagttattccttttgggtttatttgtgtaacacttttgaaaactatttaagaaatcaaatttgttattaatatgtttatagttgtgcaactgaaatgaaaattttaattaattaagatttgatttaaaactattgaatacattttgtatgtgttgatataatttgtttatttttatttttatttctatcattttatcaacagttgttggttaataatatcttttgtaagaaattatctatagaaaataatttaattaacaaaactatatatattgcattgatacgtcaacaaaaaaaataactctactttaaaaataacaattagatatttccttcttggtaactatcacaattacataacaatgacatatacaattatatatatatataacaatgaaatatacaattatatatttatatatatatatatatatatatattggctataaataataaaagcctgatgcactttttagttaaagataacactataattatgtgaaattgttgatctttttgtgtagttataattgagaaaatgcaataaatagagattgaatgaaattataatattgataggtcatcatagacacatcattcaaataaacatttttgtatttatccttggagagattattgataaccaacccacacaagaactctcccaaaaaagttgtctttgggacaaagacaaatgtctagaagaaaagaaaaacagttggggcaggcttgattatttgtcaattgtgactttaaatttaggttagactttgaaacataatattaaaaaaataaagacatttgtaaagaagaaacgtcgcataccgtactgatatttgaccaaagattgatcaaagattgatcaaatttattaactagaagaagaaaagaagaagaagaaagaaggattaggcaaacaagtaatttctactattatataagcaaggagatatataattaaggagtcatataatttgaccaaaaaagataaaagtcaaattatggaagaggcatttttacttataaaaaagcaaaataaggatctcatattcttaatttattcaactaatccattcatttttgtgtgtgtatatatataacacatccttgcttgttccatttctaagccagttggtagtttttcacatatatacgaccttgaagattaaagatg

SEQ ID NO: 35834 - DNA, 3003 bp, Unknown; identical to SEQ ID NO: 35833
  misc_feature (1)..( 3003): 2750-1469P.txt file - cDNA_ID_3090734; gDNA_ID_2926168; Annot_ID_199256

SEQ ID NO: 35835 - DNA, 3000 bp, Unknown
  misc_feature (1)..( 3000): 2750-1469P.txt file - cDNA_ID_3090777; gDNA_ID_1971815; Annot_ID_175943
tgttcaaaaacaattcatactataaataaccttccttgatgttcaatgcattgctggagtttcccatcagaagacacaactagtcctcttacttttacaggcttcgttttgcgtttaatttggaatcttggcatagtcttaatacagttatgatcatcttctgcgttagtcgatttctctccttcttccaaaaactcatctgcaacatctccatcttcatcaacccttagccgttttgtgtaccatctcagtccctggttcaacacaagagagagctataatacagcttgtgacagaaccaatatccaagaagatatgcaagctcttaactaagaaaaattcactagtctaacattagaaataaagtaacagctaactggaggaaccacaggagtaaaaatataaacagaagtgatacagagtcgttgtctaatgtcaaagaaaagacaatgtgaaaccagtttagaggcaatgattatagttacgcttctactacatagaaagttaaggtaagccatattggtgaacttacttctactcattttctttattgcatctaactgttactactcatgagaacatctaactcaaaacctcaataatgctaaagcaagaacagagagtatcgaaatcaattttgtacactatgctaagagagtcaagctgaggactatgtagcacatgaaccatgattactaacagctaaagtagaactaaagaatgaggaatctttaatggaacttactaatcaatctcaaacccaatgtatgatgttcctaagctaatctaactaactagaatccacacttccgtataaagcaatcaaccactatagcaaccgttccagcacaggaatcccaaacctgaataccaccatctccattggcgcaaggctgaagaagaggaccaagttgagacctttcgacagcaacttgaaccggaactccaaatcctttccttggtaatccagtttcacgaaatctctgctgattacctccgtcaccgtaaacatcaatatcatcttcctcatttttcaatacttcctggccaaatccaaacacaccagctaatttcttgaaaaaacccatcctaatccttacaaatcaaactctcccaaaataaatccgttactaaaaatacaaactttctctcccagaagctacaatttgcatactagtttctagaccaatccgtcactaagagaaacaaaaaaaaaaatgatctttcctataagttaatcagacaacagatacttattagggtttatgaaactgaatcctttagacccaagttctacttcataaactgaatccgaatatctccactctctctgcgacgacaatggaggaaagtggatcaaagagagaatcttcttcttcttgcttttgctcatttctctactttccaaatctaacccttcttcttctccattaacgagcggtaaattcttatttaccacaattacatttcactagtgggctacattagtgagagttaagcccattaataaaagcccacctgaccaataattatacttttggtcaattgcttccaagttcattagtttccgtaagtgttttcatttttcaatgcaacactcttatgtgttgcagccttgcagcaccaagtgataatagagattatggatctttcaggtgacttgaatcatatgataaactctaaagtactttaaaagaaaaacattcgttatctgtctcgaaatatttctatgttcaggtactaatttttcacagcatctggttttacgtgtccagtttcttaaggtacgcgcatggcgtaaactgttgataacatttgctttttattgcttgttggtctactaaagtcaatcactttagtcgctacctagacataaaaagtttagtacttttagtcttttacattgattatcatctccaacaaaaccggatacacatcacatattttatcctttggattaaaccgggatacaaaaaaaaatctaatcggtaaattccattttctcgtgaacaagtatgggagaagagtacataaccaattaaaatatacacttttgttcctttacacagatttttgttttggattctaaagttgcatatattaaatatttggttgctacattctattccaactccagtgggtctttatctatgtgatatagtagcattaaaaattagtaacttgagtttgtcaattaatttggaatctatagagagtatatacaacagtattctgaattctgaatgatagatttttcttaaaaagataggcaatagaaggacaaaatagtcaaaataagctgctgtcattttcaaactagtgattgtttttaagatctgaaggatatacttaagaaaaaaaatctgacacatcaaagtacaaaccccatctttattatttttgcatttcccaaacacagtcaaaccaaaatctttagtttacataataatttatttgatatattattctcttattaattcttgtgcatttgtttgcattttagagattttctaaaaagacactgaactaaaataacctcctaatattttattaaacttcaatgtctcattccggtttgatttctcttccaataaccaaacttggttcattcaatgcaacaatggaaattatgtgaaaaaccccaaaaaaattgaaaaccatttattaaaacagaactagtgttaaaggagagaacaccaaaccatttacattagattacaactagaaactataactggactgaacatcatcattattaaagacacaaactctttatttcattcacattttaacaaaaccctaattatattatattttaaaagttaaattcatcaatattaaagaaaacaaaaacaaaacttaatctcctgaaaactgaaaaccataaaccaaagatttgtttcctcaatttcttcttttatttatataattaaaaatcttcaaaaacacaaaaaaaaaataaaaaaattagacactaactagatcgtccctcgtctgatg

SEQ ID NO: 35836 - DNA, 3000 bp, Unknown; identical to SEQ ID NO: 35835
  misc_feature (1)..( 3000): 2750-1469P.txt file - cDNA_ID_3090777; gDNA_ID_2926169; Annot_ID_199374

SEQ ID NO: 35837 - DNA, 3000 bp, Unknown; identical to SEQ ID NO: 8533
  misc_feature (1)..( 3000): 2750-1469P.txt file - cDNA_ID_3090788; gDNA_ID_2926169; Annot_ID_199368

SEQ ID NO: 35838 - DNA, 3003 bp, Unknown
  misc_feature (1)..( 3003): 2750-1469P.txt file - cDNA_ID_3090796; gDNA_ID_1621101; Annot_ID_171427
cattttttgtaaagaaaattaccaataatgttgacatgatatcatatatcactaccatctattggaaatagtttatagaagaataattaaatgaatcgacaagaactcacacatatacgcaaattgttatgtatgtgcacctaatgtagatttgtaggcattatatggtggggacgtgttaccatttatattgacattaatgatggtattgacacttttgtggacctaatcatgatacaaacatacatcaatgctgcttatataatatacttatatgtctatgtcgcgcacacacacccacacatataaacggtgggaatttatcgaatgatatgctaatcatttctgtatactaaacgtacaatgtctcatttgtgtatgtatatgtaccgatgtacgtataaaccaatgtatatagatgtatagaccagagagacctaatatacatggaaaaaattcttactagagttaataaaactgatgaacctagcgagtcactgagacatgcgagaatctctcctttttgaatgaactatatatagtctaatcaataacatattaataaatttacggcaatttgcaccaatttgataatctaatcatatattctttgtcgggttgataatctgaaaggacattataaacaatgagaaatataaatcctattatatacgaaagtataaacaaatcattcctttcgaatcttgacaaccaataaatcctaccctaagagatttaattatatattgattagagaaatgtattgtattcttcgaaacatatgctcatgagcacggacacggtatattgttttactgatcatcggtttaaacatttgaaattttgaacttactatctacatatgtcttcggtgaacaaacctttatacggattgataaataatactcttcgaatttattaatcttattaagcccacttggcgtgagaagaaggtatataaatactaatagtagttgaaatatactacaataattactaaagtaactgcagtagttaagatttaatttaaccatagtcaacgaaatcgacgctgatattgatatttattggaatttcgacttgcgagcctcttcacatgaatttaggctttgaaattagagttatgatcattgaagttaatgtagcgatccaagcttattattttaatttttaatagcatttctagtagtagtagatagtgaatttaatttggactgtccaatttcttttattaatacatagctgatattatgtattttattgaatttaaatttggattttaagttacgaaacaaatacaaatttagaagtttcatattgattaaaaaaacttattgctatccaaattatattaaaaaaaacttatagctatcgttttataattcgaaaacaaatttaaactaaacattatattatattaccttcattttaattacatatttacctaatgactattccagcaacaatgacatcattagttcaattgctttaaccatttgaattcttatataacaggggagaaagacaaattaaactagatacgaactgtgttcctcaatcaacaaagacatcaagagatttgttgtcttttcactcacaaattattaaagttaaacatcaaaattattatttatagaaaacgaccactgatcaacattaatatcatttttttattgcattattctaatgcctagcttattttacacacccaacaacaaatctatcaagtttctaattcccaaccttaaatgatgcgtattagtagaaaccaaaagaatgtgattaaatagtatgttttaatacctttgtctcctatgtttggttataaccacttgtaaatatatcttcctaaaacatttagtcacatgaactaagataaataataatgttgtttatgcttatggatgctttgtatatatctatatttaaatccccataataaatatttttacaaaaaataaaagagaaactagtcacataaaaagaaaaaaaagaaaaatttatgtagcaaaatataaaaattgaaaaagttaattggcgtgtattttctttaacaaaattcatatttcgacctttttttcttttataaatattgtgtactcattgtcatatggactatcaattacttccattacatgattggtcataaaaaccagaaaactattgccgtatggagagaaagcagagaagagaatcttccaaaaatgttaaatcttgtgaaacaaataaagcatagcaaagcaaagtccaaagtccaatgagctaaaacaaaatcaaaaaggtttctttatgtttttttttttgaagtaagaaaaaaaaagagtttataaagaaacagtggagaaataaatagcagaacaaagagaaagatcggagaaaagaatctttttaggctctctctcgcagacttcgcactcacacactcacttccattgctccaaaaaagtgagcttttttcttcctttttcctattttcctgatcatcttctttgcatcttatgtaactgtagaatctgactaactttcagtaacccaaagttttgttttttattttcattttttcctccagctgtgtgttctgatcttgcttgtataagtgtaagctctggcttaagcttttttttttttagttgttctaactataagacatgatttctgactacttgaggttacatttatgacgcattttgattatttgtcgttgttccggcatgtgtttgtctgcatataagctgttcgaggttttgtgaaatttgttcttttgatttcagatttagtctccactaattgtgtctagggtctgagatctgctggttctgtccccagtttttgtaaaaaaggaaacctttacctgagatttttagtttctgtttaagtttgaaatgaatgatctttgattaaagttttggtcttttgttaaattagactaatcaaagttctgatctttgttgtgtattttactgttgcagacattgtatctacttcacttgctgtagagatatg

SEQ ID NO: 35839 - DNA, 3003 bp, Unknown; identical to SEQ ID NO: 35838
  misc_feature (1)..( 3003): 2750-1469P.txt file - cDNA_ID_3090796; gDNA_ID_2926169; Annot_ID_199345

SEQ ID NO: 35840 - DNA, 3000 bp, Unknown; identical to SEQ ID NO: 3834
  misc_feature (1)..( 3000): 2750-1469P.txt file - cDNA_ID_3090819; gDNA_ID_2926170; Annot_ID_199451

SEQ ID NO: 35841 - DNA, 3003 bp, Unknown
  misc_feature (1)..( 3003): 2750-1469P.txt file - cDNA_ID_3090839; gDNA_ID_1620735; Annot_ID_166229
tgtacatatgataccaataatttcagaatatttttcttctatatataccaataagttttcttaaagatgcaaatgcaatactctgctttgtaattttgcaatgcatttgaaacaccgaatcaagagcaaacaacgaagtcagagagacaaataggctaaaacagagctttgagcaaaaaaaaaaaacaagtgaacagatataatacccacttacttggaagccactgacataacagataaacaatgtagtgacttgcaacaaaactccttaaaataccaaaaacgtatactctaggagcttggcttcttgtatctttgttgacttctgatttaacgtcaatagacactgaggaaaaagagttctcttagagccgccattcaaaagttttaagaattttaagtcaagtgtaagcaaataagaaaggtcaatggtcagcatgagactactaaattatgatactgctgtcatctatcacctgacccatctttattattatacacaaattagtaaaagtctgccaagtttgattagtgcaacttgtatctggggtatttagttactataataaatatcattttgtgtataaagaaaggtctcttctgtatctaaaagacatatcaaacgaaagaaatcaataaacacaatattctttcttccaaattttctcatttctcatgggcatatctcaagtacactattgcaatggtaagcaaaaggtacctgatgacgttagatcatttgatcctctttcgatgaaatataataaccacgagtgttaatttttcaggtgaccagaacttagaagcaaaccttctagatcatgaggaaactgaatcattttcagtacctcaaacgaagaactgtaagaggtggctccgtgtctccatatacgcaatctttgtcatcttctgccaaccacttgctacagttctgggtagactgtactatgaaaatggagggaaaagcacatatgtggtaacacttcttcaactcattggcttccctgtactgattctcttccgcttcttttctcgaatcaggcaacccaaatcaacagatacaaatttcagtcagtccccttccttcaccacccttgcatcggtttacttgtgcactggactgctagtgtctgcttatgcttatttgtctgcagttgggttgctttacttaccagtctctactttctccctcatcttggcctcacagttggccttcactgcctttttctcatatttccttaactcgcaaaagttcactcctttgatagtcaattctttgtttctccttacggtttcctctgccctcctcgtggtcaacactgattcagaaaacacaacaaatgtatctagagtacaatatgtgattgggttcatctgtaccattggtgcttccgctgggattggattggtactatctctgatacaactgctcttcaggaaagttttcacgaagcatacatcctcagcagtcctggacttggccaattaccagtctctagttgcaacttgtgtggtactcataggactgtttgcaagtggagagtggagaactctgccaagtgagatgagaaactacaaactggggaaagtgtcatatatcttgactttggcctcagcagctattttctggcaagtatacactgttggttgtgtgggattaatcttcgagtcttcttctgtgttctccaattccataactgctgtgggactgcctatagttccagttgtagcagtgatagttttccatgataagatggatgcatcaaagattttctccatcattttagctatctggggcttcctttcatttgtctatcagcactacctcgacgaaaagaagttgaagacttgccagacaaaacctgttgaggaagaaacacaaactttatgaaacaagttgtatcgaaggtctcagaaacaaacatacatagttgtacacagtcatgtaaataacctatataaagcttgtatgtgtaatatccgtaatggtccatgcaaatgggatatgtatgtcgctcatatttcaggtatttagaacttttattcaaaagagtattgtgtaatacgagcagagtgataaaagcagtcatttatttaacagaaaaaccatgtcaattttgtgatactttcattgtgtgagtgtgaaacccgataaaaattgaccagttagcataacttacagatatgtcaatgcaatattctcctttctagttttgaaatgcacctaaatcttgggaaacaagaacaaacagcaaatcatgtataatgagagatagaagataatttgtcagattggtccaacatccttggggaaacagagctttgaacaaaaagtaaatgaccagaaataataccattttatatagcgacttcctctgccgtccagtattaagttgttgcgaatgtcttctcttgaaaagataggcgagacataatctttagctaacgtcagcatcatcttgatggcaaaaacttcatgactagccatggaaaccgaagtgtgtacccaatccaaataaatttaaaaagacaaataacttttagaaatgtcgtcctcatcaagatcacagaatactacaacttgtgtacacgttcatacatatgcgtatgcgtgttaagtttctatttgtctatgcgtatggggttcatgtcctccacatagttgcagaagaaagtctgaatgaatattgcctacacataatttcctcctagacttaactcatctcttggtcaacaatagaggcatctttgcatgtagaaagactacagatactaaattcatggaaagagaagagatatggttggcatttactgaatgtggggccaagaacaaagaaaacttagacggtgaccgattcctaatcccagaatatataacttagcatatctcacccatatcaaaggagcaatcacttggtagcattatcaaccaagagaattgataataagatacgttagttcctccttgtccatctccaaggtggtgattccacatccaccatg

SEQ ID NO: 35842 - DNA, 3003 bp, Unknown; identical to SEQ ID NO: 35841
  misc_feature (1)..( 3003): 2750-1469P.txt file - cDNA_ID_3090839; gDNA_ID_2926170; Annot_ID_199419

SEQ ID NO: 35843 - DNA, 3003 bp, Unknown
  misc_feature (1)..( 3003): 2750-1469P.txt file - cDNA_ID_3090841; gDNA_ID_2926170; Annot_ID_199417
caagggggtgagtatgagctcttgagggagatttttccttcaattttctttaagcaagagccttgatcgatcattgttataactacatatattatatatattgagagagagaggtagagaaaaaaaaaacttatatgtaacttaagatcttattttgtctctcttatttgcatgtacatattttttcatgaaagaatgagacagttgggcttgcttatatatttgatgatgtttaatgtgttaccgttggatacatattttcgcttccattttgtgaaattatattttcttcttttggttagttttttacattatgatattatgctgtgtaatttgtactatcatatgtagaagcgaaaaagacataactctagctaggagcctacgattgatctcccaaatgttgattataatatatacatatgcttttgggaaacttaagtattaaattgacaagttcaaatggtcaacttcttactgatttatatcttaataatcaaaaattacaaaaaaaagttacaagctcatatgtgatgaagaaattagaatcggaaatttaatgtaagggtgttgatataaaaggttcaagttgtagacgacgaatatctatgtgtgtgaacaagtaaagaaaaaacaaaacaagttgagatctaaccttgtgtcctaagagaatggacccgaataaaagatttgactgcttctgctttctatcttatccacacacacatggaaacatagactgtggaccaataatattacccctaccatcaaaactgaaaacaatgttttaattcaaaaaacgaaaaataaaaagaaaatactaaacaataataaaattatatatcaaatctcagatttataaagagtgaatgaattacaaaaaaaatttgaaggaacgagaaggatgcgaagaagaaccttagaaaaagatctctttatatattaacttgtaaatgtgtttgtgcaaatgaaagtataggcaacaaagtaatagtggattctctatatataagtattttatgaggaacaagaggaccaaatttctgaattaataagcaatactattatttgggagcgcatttgtgtcatataccaaagtcattgaatttagctgaaacttgaaatcatgagatgaacgagtcatgagatcatagaacatgtggatttctgaaatttcaacatgcgcgctccaatgtaacttcagtttcctatttgaaaactattcttaaattttgaaattcaactgatatgtccaatctcgaatcttttcattatcaattatcatactcaatttgtattaaatcacttcaaatacagtagtttttttttttttagtttaaagacgtttcttaaaggttttaaatgttatgacacattcacaattatcatcactggtaaaatttgcattggagtgttcttggaaaacattctttcaatatagtcataaaattacgtttgacatataattcttacaaacctaaggtatattcgcaaaaatgttatagcaactttgagaaaacatattaaatatatacataaatcctttctatgttctagattttgactaaatatgtacatgttttgactgaagaatgatttggcctacacagataactattaaaatgatcatataccaagtcaaatcatatattgaatcatacgggaaatccatttgacacaaatctgtattagatggaacatttattttagtattttcatattattttgcttataaaaagaaatctcggtgataatgattttggttttgttttcggggtcgttatcaaattcacctaacaaaaacaaaaaaggaagccagaatgttagaaagagaagcaaagttataaaagatcttccgggagaatcaagtaattgccaaaccccctagtccctagacaactacaatcatatgacaaacattatattattttagaaaatacatacaaaagctccgtttttaaattgaaaaataagcttatatctaaagaaagatcaatttattacgtcaattttaagaagaattttaagcatattctaatggtggaatatcatctttcaaatacttcccaaacaccaaatctaggcatcgaaaccgttgtggacgtgtagatatcatttgtaatctattgccaatgaccgattgattgtatcatcatcaaaatgaaaaatgcgtggatattgtaaaaataaaaattttagttgacaaactcatgtcatgcgacataactcattgggtcaggcaaaatactacattcgaatccaaatctggcaattatagctagcactattccttgtatcaaaccggtaataaagctagaggtaaagttggcaaacatagatagtttataaacaactatgctttcggatatcattggtcttctttttgacttacattcatattatataatgttgttgcaagtatatgatatgtttcgaatgaaaagaaaaaaagtttcgaatgaccaatcttctcttctcgatcaataattggattttgctggtaaatgaattatttactatatatcttctttgatacgtctcttcttatttaaatgacataaaacaaatacaataatccaaattttaggcacgtcaacattattaactcttaagtggacataaataatctcactcttgacggtctttcaaaggtattgtattagcatgaaattctatattaattcttaacatttacctttatcttgtttttgttcctaagaacgttttctaaaattctccaaaatgggcccaaaagtatgaaatccaaattgagcccaaagttgtgatccagtgaaacgataaagctctcacgaggttcaagctcccacaagctcagatcgtgggcggtaaaagaaacggttaactaattgtaaaaaatgatttttttttttctacttcactaaaatattacagttttttttagcaaaagtaaaagtttcgagaaactctgaaaaagcagttttcaatcttaggagcagtgtatgtgtcatgtacatcgagatg

SEQ ID NO: 35844 - DNA, 3000 bp, Unknown; identical to SEQ ID NO: 29133
  misc_feature (1)..( 3000): 2750-1469P.txt file - cDNA_ID_3090849; gDNA_ID_2096290; Annot_ID_195342

SEQ ID NO: 35845 - DNA, 3000 bp, Unknown; identical to SEQ ID NO: 29133
  misc_feature (1)..( 3000): 2750-1469P.txt file - cDNA_ID_3090849; gDNA_ID_2926170; Annot_ID_199413

SEQ ID NO: 35846 - DNA, 3003 bp, Unknown; identical to SEQ ID NO: 29132
  misc_feature (1)..( 3003): 2750-1469P.txt file - cDNA_ID_3090853; gDNA_ID_2096290; Annot_ID_195340

SEQ ID NO: 35847 - DNA, 3003 bp, Unknown; identical to SEQ ID NO: 29132
  misc_feature (1)..( 3003): 2750-1469P.txt file - cDNA_ID_3090853; gDNA_ID_2926170; Annot_ID_199411

SEQ ID NO: 35848 - DNA, 3000 bp, Unknown; identical to SEQ ID NO: 8483
  misc_feature (1)..( 3000): 2750-1469P.txt file - cDNA_ID_3090871; gDNA_ID_1971812; Annot_ID_175793

SEQ ID NO: 35849 - DNA, 3000 bp, Unknown; identical to SEQ ID NO: 8483
  misc_feature (1)..( 3000): 2750-1469P.txt file - cDNA_ID_3090871; gDNA_ID_2926171; Annot_ID_199537

SEQ ID NO: 35850 - DNA, 3003 bp, Unknown
  misc_feature (1)..( 3003): 2750-1469P.txt file - cDNA_ID_3090879; gDNA_ID_2926171; Annot_ID_199528
gcacaatcacaatcaagccaaaagcagcactgatttctctttttttttttctttctaattagtcttaattcggtccaaaaccaaacaaaaatatctttaaattatattggaacctgacgaaaacaaatcttaaattcccacaaaatgctatatatatagtatctaagtttgaatgccaattccatatttttacggaatttataaaagtacgcagaatctatttctagcagtttggaaaattttcaaaatatttgaaaattttcaaatggtttgtggtctgttgatctactaatcacgtcatactaattttgggatggaatgttacagaatatataatttcaaaacagagagagtattcttttgttttctgtgaactgattttattctaggtaatataatgtatccattttttttaatgacgaggaagaaaaattaaggaacaaaagaatatgcattaaatttgattaggtagtgtcatttaagtgatcccttctccaacacaaaatgtatgattcgacgtcaaattaatgttttaaatatttattgcttttattgatcatatataatttaatatttataatcattattacgtgggaacttatctagtacacattctatgtctttgtgaacttagtacacgagtaacggtttttctattaaattaaaaccttcaaaacaacatttgatgaaaatttcatagattttacaccaaaatttcgtaagaaaaattgttggagttcgtattgttttcttgtagtagatgacattaaaaaaatacattaagatacactaaacaagaattatgcatattgttttttggtcaaaatcgagcctttaccaaattgatcgatacattttttctgatgatacgtttagactagttggataaaatattaatctgtcctcaaaaccaatttgcagtggatcaatccatatatcttctatattattaggatctttgtctaacttccgatgtgtgatattgttattcctaagataaaacaccattgaaaaacagtattttaaatcgggtaaataattcagcgagtcacatatttttgttttaataaaaactcaaatcaaaagtgatcaaaatatggtagaaagcaaccttcgattgtggtccatcatgtaagatacgagaagattttatggtttttaaaacccacttcgaccatgaaagcttgacccaaagcaattgagttgtttcttttataaatgacctaatcaatttccatacatacaagcatacatgtgacgtaaaggaaatctaattatgtactaatttgtaaattttactagtattcaattcagtaattcttactaaacttactttaactcttgctaattaaatatactactagagaaggtaaattacatgcagttaagctatactattttttctaattgcaagaaagaaagaaaaagtacaaaagaaaagaaagcacattgcaagtggatgtatatatagttatagggaaataaatatgaatatggactgtatatacatataggtttctcttatctctatcaaattaccttaaatgggttcataaagatggagatcaaagactacacatcacatgctactctccctcttcttttggcataaccttactccatttatacattgtgctcctcaattattcaacattttttaaaaataacttatttaacaaaatgttagaaaatatctacccaatttttttcttccacatacgagctacaaagatctttatcaaataaaacaagaaagattattaatccatattttgggttaaattttaatccatttagccaattaggagaactattttaacagttagatacttttcaacaaaatttattaagtagtcacctatgtatattcatatagtagtttcacaaacaatatggagagctgtgatcttgaagagggcgacaaaagtcaaaaagaaaatgtaaaaaaagagagagagattaaagtagttggagaagagagaaaagtctggttaccttctaattgagtcagaagcattacacttaaataactttccaaattaagccctacgtcttgtccagccccttaaaagtacgcttcatctccctatttcccctataaaccctaaaaccctatttatcttattaatttatcattttttttatatgtcaatatcacaacaagtaaacatcatcaacttcaaatctcactaacataaatagtatgctaattttcttcactatctgagtaattttctccttctttttacatcattcgattctatatttgccacaccattaaatagataagtatattggttcttactactaataatcagtttagccatatatctaattacacagttttcttttatatgttactttatatttgtacaccatcagttactatatacggaataaattacacctcatcatgtaattacaatattatcataaattttttgaaattctattctttaatattttcagtatccagaatccattttcttatatttattctggcaaaataatgtaaaatggtatcaaatatacaacaccatatatttgtttataaataacttccttaattagtgaaacaaattttcctgcagaatgtcacttaaatctttaaaacaattcacaaaagaaaagggaatagagctgaaattttttcctctttaaaaagatcaagatttagtaaaaactagaaacaaagaagaagatcgatatttgttgtaacaaaaaaatgtactgatcagatttacccaaagattttagtgcctcaaaaactttcacatgaaaagcaaagacaagtaatggtaagtagagtctgcatctcatgagtgattgcccaacttgaaccctcttttcatttagacctttgtgaaagaccacacaagaactacccaccaataactctctctttttttcttcatttccaaaaactatttattcatttctacaatttctcaatttgggggtgtccttaataagtattatatttatgaaaagtccggatgtatg

SEQ ID NO: 35851 - DNA, 3000 bp, Unknown
  misc_feature (1)..( 3000): 2750-1469P.txt file - cDNA_ID_3090894; gDNA_ID_2926171; Annot_ID_199482
ctgttttgatgctgactttttcccgcattgctttctcagcacatctcatcatgcatattgctttcccccttcttttgcgtgttcatgtgtgttaaacttcttgacgaaaaaaaggtgtgttaaacttctatttgtgttttgatcaaacacaaattaattaacacatctatttatataataaaaataaaaaagtttgacaaatgacactacaactctcatttagtaattgtaattaaactataaaacaaatcgatgatgaagtagaatgacgtgagatattgataatctaatgaaccttaattacaatgcaacttattgattgcagtcatcattgaaactcgaatatgggtcactttattaaaattttgattgtatttttttttgtcaacataaaatgttttattgttaaatttgtattagacaaaaaaaaaaatagaaggtataaacgtatacgtggtttagtcatttagaggtttcttagattgatttattgaggaaaaaaacttagctaattactatgaaagtgaaaggagaaattaatgttgagcagcgtcgaagaaggggaaagaacagagaattgaaaagaatgtcacataaccttgtgggggtgaatatatctattcatatgtgtgtatatatgtatatgtttcaattaataaaacccttaataataatattttgaaggtggtccttttacaaaaaatcaacatcttgtctcttctatagtttgctgtaacatacaaaatatacacaaatttatacacattaacacatgtgtacacatacctaactatatcttatacataaagattgcttttccgattatgatcccttgtgacatgtttttgttttgaacttgattccatcgtaatagggattagattggatcagaagataaaaatctagcaaatttactatttattttgttaaacttttggtcggtacattaaataaggttcattagttttgaagttggtgatgctgacttgtctagtaacaaaaatgtaattagacatattaagagaattgttcctattttgagtattgcatctttgtctctcaaaaaagtgggctctattgaatttgttggttaggtcatgaacacttgttgtatgtgtgaatttattaataggatttgtgttggggactcttagccatatttgaggtgttaaagggagctttctcttcccacatgcttttgttttgtttattcttctaagttctaagcagaacgataaaatgaaatggtatccatatctatctataagccatcagtcattaatgtaccaaccctattaatctaatagccaaatcttcatttcaagttttggactatactttttaactctatttttgttgttgtttgctatagataaacgtttagcttttaaatattttatatattagtcatttcgacaaaccctatcggtgaaggtattacacaatctctgtgtgcatctacagttacacgtctctgtatgtgaccgttcgtttttgtggagacagtagtgaaatggagcctcgtgtagccaccatgcattggactcaggaccattttcactaaaatgttcatactttaacattagcaattattacgtactgttgtacatttggatttctgcagctgtacaatcatatgtaccatgtacaacaaattatcaaaaatttcaccgaatattgtggcggtcaaattgagaatcatctaatctttgtgtaagagaggcgtatgaacaagtacatgagaaattaggcctatatggacgaaagatgtactcttcaagcccattttgtaaaaaggcctatcttcatggtttagtttgaacataaaggatttagtacccaataaaatatgtaaatctgcagattagtgtatcgaacaatttattatttaattttacccactaatccgctatatttaatcatctagatttgtttcacagcttttatatgcataacgtgatataataaatgcagggttgtaattagtagacctccattggttacgaagcgtccactactaagaaaatactaattaaaaacaaaataatctatatttgtgatctgaaaatgaaatcatgtaatgtatcaatatgtgggttttatagttggtaaacacataaatgacatgaccgtcaatttcggagctatacctggctcattatcgactatattatctgagataatgttaaattatttgtataaattttgttgcaaatcacttttaatggttttctataacaaaaacgaatatatgatattattccaaagaagataaagctgtatcgacctatccaaacatatagtattacgttagatagcttgctccacgtttacaagcaattgacaattactcaattagtgacatgaccacactataatgctttcacgtaacatgatgattcaatctcatagcaatatacattaatgtttttatatggactatttttaaagtacatatgctcgattcgtaatttcattcgaattttgactttacggtttaacaaaatataggaataatcaaatttaaaataatcctagtttggtaaggttcggtacaaaattagtttcactgttgattccttataaaatatatcttcaaatttgagtaaatttgacattgaaccgcttttaggtttggttaaaccatttgcagcatggcaaaaagtgaaaaaaagattacaagaagagaaaggaatcgtttgtactgtgtatgttgatgcaaaggtgagctattgctttccttaaacgttaaaagaacatcttttcggatcaattaagaaactttatcaaataaaaaatactttatattttaataccatatcgagaacgatacttcctctgcaacacgcctacaatacgccaacgaatatttatatcatcaaaccactctattgttttcatttttcaacaaaattcatctttaatttttcgatccaaggagcttctctgatcctaattaacctaaacaaaacattcattacaggtatcttaaagattatg

SEQ ID NO: 35852 - DNA, 3000 bp, Unknown
  misc_feature (1)..( 3000): 2750-1469P.txt file - cDNA_ID_3090932; gDNA_ID_1621085; Annot_ID_170495
aggttgaaacatttggagtttctgaatcctctatgactcaatctttgacaagtactcaataacaagtgaatatatgatgcattgcgtgtgagctaaactggtataacaaatgagaaatctttaataccaaccttagcatagtaatccttccagaccctgcgagcaatctggtgaccacccaaatcaaaagccttaaacttgattttcccaatgctgagttcttcagaagttggatgctgcgtaggctgatgctgtaccaatctctgtttcaccaattcaaccatgttcgattatcgatcagttaagcaattaaaacacactactcaaggactcaaaattcaagcagtaaactcagattcctaaatcaaatttaagcatctaatccagaatcatataaaaacaaaattggagatcgaataaggttagggaattggatcgattagataagaaagatctgaataagaaagtgagagcgaacctcgtctttcaacatgtgaagcagagtggttttaccagcattatcgagtcccagaaacaagatcttagcctctttctgccataaccctaacgaagcgagaacgccatagaaccaatcgatcatgaacatgactaactcagatcctccaaccacaaagctcaaatattatccgatcgagagagagagagagagagagatcgtcaggtttctaatttagctttgaagacgacgagagaggcgtttctgaattgaaaagtaaagtagaaacggaaaacggcaagcagtgcggattcctaaatcacaaacgggagtcacaacgatgcttctgtcttctacgtcaaaggcaagcccattagaggacccaataagcccatttatatatttacattagctcaagttccaaatggccttttaggacaagaaataaattttcctttgcgacaatacaggtatgtaatgtaagatctaaaatatttttaaaattttgtcgatttttgtgttttcaattgaaatacttcataatcatgaatcggaatttatcgtttgtttataacgtcatagcataattagaacacattttaaatttgattctattaatttatgtaacattacacaaaacaattttacgactgattacacaacatttaaggttaactggtatatcagataaataaatgaattgcagaataagcgaacaatggttaactggatgaactgaattagagaaagttctcatacaaatatttataaaatgctaaaaaacctagttttagtagattgatttttttttctagttatattaattaacatgttaatagaataatagtataaaacaaaattttttaaaaaagaattaatgttgttgttcacattaaacttttttttgtgtgacacttttaattaatcaactcagttttaaatttatatcttattgaaaaattcccacaaatagcacatttttaagttttttggacaaaaatagcattaaaaagttgtttacacataattagcactcaaatgattatttgaaaaattcttaaaagtaacactaaaacaagttttatggacaataataataccacaagtttatataaaatctattcaaccaaaataaattagaaataaatttaaatattatatttgagttttctatttccaatatagggtatatatttcaactatttaaaagaaatattgattcattttaatataagtttatggtattatatttgggtttcctatttccaatttagggtatatattttcaccatttaaaagagattttttattttaaaattagtttgtaatattatatttgggttttttatttccaatttagggtatatatttccactatttaaaagtttttaattcaatttaatattagattagtgtttgctctcatttttatttgggagattgatacaaatggtaataaaaaaactttattattgaattaatttatagaggattaaaatttttatatactatttttggaagtttcaaaaaaagatgccatttttggaataataaagttttttagtgctatttgtgtcaatcgccctatcttattatacttttctgccacggtttttttttgtgacgaatttaatcaaatctatttacacaattacgcgaatacctcttcatattttcatggcaaagtttttttttttttaaccgcaatatttatattttatgccggcacaatttatattatattcgtttaaaattgaacaaatcaattatgtgtataatgatatttacaagaatctacctgaaaatgattagtcggcgaattttgaaatagagtgagttaaatatcaaaatatttgttttaattgattccttttagtcgttgaaacttgaaccccaacaaaaatagaacgtagaaagataaggtcgccaaaaaaatgagataagcacaaatgtcagcgtctaagtgtatggaaacaaaagaagctaataattatgcaatacaataattacataactaatattataacaaatgaagataattgtctattgtcgtgatatgttgtcatgttgatgatcagatgatataccttgttgtcttcgttttaaatagaaaacatcagagtatggagaagtataatctaatatggaaacttgaccttgattctttgaaaaatatgtgttttgctaaaataatgataataaaacgtatattcagtatgggtcaattttcatttgcatttatggtctcactttttttcaagaataaacatgaaatttcaggaacactaataatcataagattttgtaatgggttttttggtttggtatactgattatttttaaaaataaaaataggacccacgagtttaaatttctggtgtactcaccagctgatcaggcgaccgttgataaagcaatcatagaattcgtgagccttattaggcttcatattcaaattcgttccagtttcacatattgcacaatcattttgttatataatatgagttacatgataaattttctgtgtccacaaaaaaataatg

SEQ ID NO: 35853 - DNA, 3000 bp, Unknown; identical to SEQ ID NO: 35852
  misc_feature (1)..( 3000): 2750-1469P.txt file - cDNA_ID_3090932; gDNA_ID_1621086; Annot_ID_170529

SEQ ID NO: 35854 - DNA, 3000 bp, Unknown
  misc_feature (1)..( 3000): 2750-1469P.txt file - cDNA_ID_3090932; gDNA_ID_2926172; Annot_ID_199594
tcataagattttgtaatgggttttttggtttggtatactgattatttttaaaaataaaaataggacccacgagtttaaatttctggtgtactcaccagctgatcaggcgaccgttgataaagcaatcatagaattcgtgagccttattaggcttcatattcaaattcgttccagtttcacatattgcacaatcattttgttatataatatgagttacatgataaattttctgtgtccacaaaaaaataatgataaatagtcactatcaggttacctaaacttttttttatgttgttagctaaatcgagtttaaatttcagtttatcacatatttaaggcttgaaaatcagaatattatcgcttatttttgtggttggagttttttttcatccactgttgagtttggttcttgcctctttgtgagattgtatcttagtattttattaagtgtttttttctttcgtattattgatatgattagttaagatactagttgacaaaatgaactttctaaggccagaatgtataaatcgacaattccaagaagatattgaaatttgatggcatttattatgatgtgtgtatttagtttgttgctgaactagtcaatcctatggtttgacgtaattaatccaaatacaaaaatgcaatactaagagaagggcaagaaatgacaagttaaaaagtttttgtgatatgaaagctaacctaatgtattattattttttagggtaattgagttttagatataagaccatagtgatttgaagttttttttatataactattcttgcagttatatgcatatccaatagacatcatccaatcaaaagatatatgtaagcagaatcttattaatacataaacaaatgcttcaaattctgaacaagaatcaaacatttttatgctttgaatggatgttgtggttagtgcggattaatccgtcagcggtgcagtccatattatttttaggacggataacaaatcgttgcgaatttagtttttgcgagttttgattttgagacgtacattgtcattctattattcggtcatcaccactaaactagaaaatatttttttaatatttcctatactgaaataaattcgaatataatgtcaccaagtacaaaagtgaagaaatcactttttcgaattaggatcttaagttgttgttgagcccaaaaataagtaaaaatgtgaaggtaccaatagatcctctcaactatcacaatcttctacttgcacaagaaaccaattcgtttaaaaaagaaatacatcaaacaaagtttattaaattataactaaaaccaatatatgttaagttctttccatttattatgttcataaagaaagaaatgagaaaagtcgaggcttgtgttgacttgtgagatctcatagttgacaattatacattacttcattttgcctgaactcttaaattgaaataatcattcttccagctcttacataaccgcgttttgttttattaacttttgatcttttttcttggtcgttatactcatttatgttatggatatactttaaaactcaattaaacaattatactcagtttctcaaaaaaaaagttgtatactttatgttatggatatactatttataaaaccccatagttattcttcctagtagtattataagttcttgaatttgaaacactaaaaccataaaaaaagttcttgaaacacgtcaaagctgccatatgcatgatttaaatcctgctttgtttcatgcaataatgcacaccatattctctctttgtcctaatttataagattctttggctaaaaagctaatatcaaaaaaaaaaaaaattcttcacaaaaaatatcgtttcatttataaattaataatttaatctatgtaaaaaatactacataactaggatttaactcgaagtataccgcatggaattttatgtttcacacaatcttaattaaatcaatctgattcaacatgtctaagattggtggtgttgacttgttaagaaaacaacaaaatgaagatttaacatgtattgcaatgttagattaataatattttaaattgttactaatgtctattcaaactcgttttgtcatataacacatccaacaatataacccatcacatgttattttttaaaaattattaagtttaaatatatcacttataatatttcatatttttaaaagttttaaatttattatatccagaaaaattaaatagttcgacaaaataaccaaactaaaccgtatacaaatttttaaatttggatgcttgttaagttcaaaattaattatattctttgtaaatatttgatatattaaaagagatatttttatgctcatatggcaagctcacaatatttctcatctattttacttaacacctttatttccatatactatctattttgatgattctaagtttctaataacaattgccaaacatatttgaagaatttttaacttaccaaaaataattacttcaaatttttttaatatgaaaatcttataattaaaaatgaacaaaaatttcataataaaaaatggattttaatctatttagactacaacaaattttgttctaaaattaaaatcattatattgaaaccacaattaaattttactacaaataaataaaatcaatacaaaataaatattaattatattctattaattaacataaacaagaataaaacaattttttttaattttccaaggaagaagaaagaagaaaacacatgttaatagctagggaaaatgattttattgggaattactgaattagacgttaaaaacatgatattggaatttgaataaaagaaatataagtaagggtaaaatagagaattcgaaaaagctgtgtatataaagttgcagacccctctgcctaaagctcctcttcagaagataacaaaaacagagcaaagtttttcaaaaaaaaaaaaaaaacagagccacgaagaaatttacagaaaattcaaaaccatcgataaagatg

SEQ ID NO: 35855 - DNA, 3003 bp, Unknown; identical to SEQ ID NO: 17743
  misc_feature (1)..( 3003): 2750-1469P.txt file - cDNA_ID_3090935; gDNA_ID_1621085; Annot_ID_170489

SEQ ID NO: 35856 - DNA, 3003 bp, Unknown; identical to SEQ ID NO: 17743
  misc_feature (1)..( 3003): 2750-1469P.txt file - cDNA_ID_3090935; gDNA_ID_2926172; Annot_ID_199589

SEQ ID NO: 35857 - DNA, 3003 bp, Unknown; identical to SEQ ID NO: 17745
  misc_feature (1)..( 3003): 2750-1469P.txt file - cDNA_ID_3090939; gDNA_ID_1621085; Annot_ID_170488

SEQ ID NO: 35858 - DNA, 3003 bp, Unknown; identical to SEQ ID NO: 17745
  misc_feature (1)..( 3003): 2750-1469P.txt file - cDNA_ID_3090939; gDNA_ID_2926172; Annot_ID_199588

SEQ ID NO: 35859 - DNA, 3003 bp, Unknown
  misc_feature (1)..( 3003): 2750-1469P.txt file - cDNA_ID_3090944; gDNA_ID_1620806; Annot_ID_168875
cctaattatctaaaacaaaaaaaaagttttgggattagtttaagacgaagaaaacgatatttctttagttatagttttttttttcttagatggatttcatcatatgtttgggacaagaaattacgttgcaatttttcataacagatttatttgaatgaatgtgtagcaaatttgagatatttgggcttgcgatggattttgtttcaaaataatagatttttggtagtagccatacttcggaaatgtaacaagtttttctcttaattaaaattcgattattacaagggggtttattccccctttgggacggaaatgcattttttagataacaatggactaaaggctggctctagaggcaatcagttgctccatttccacaaatttttgcaaaattcttctgcttcatctacgtctttagcttctcaaagtgaataaattagctctgagctccaagtccaatcgatttccttcttgttatgcctggaaaagacagtttaaacttgataagataggttgcattgctaacttgataagcctggccttctgcagcaagtcccaaactcgctgaaccgcggtagcatcagatagttcagcatatgagctattgagaaaaccatagcaatcagatttggaaaacaacggcgtgtactttttaatgtagtaaaccgtatgttattattgggccgacttcatgtgttaaccttattcgggccttggaaaccttgggccaacgtcatgtgttaacctagttcgggccttgagaatcttgatttcaactctattaattgttaaagatagatgttcttgattccaacattatcatggagtttatattgccgaattcatgatgagccttcttttgatttgagtccccccaaactcagataaacgtcagtaacatttgagattccagcatatgagcgagcaattatgtttgcaaaagttcattgttctcgtatatttcttattcatttccattaaaacagctttagttagaatgattttagcgaccatcacatagattctccttcatgtacgtttaagttctttttcgttttatgtatctctatgtacacacgttttatgcatatagatctaaggcaaactataacgagaacatgagtccgaacaaaatgcttcaaatgcttagttttacagaacattcacttatcattactaagctttaggatgaatcaagggcaaatcttgctaagcaaacattcttgctcttcgtctaccaggatcccttgttcttccaatctctttttcatatccggacaagctttccctgcagcgaggtaagtcttcataagaagagtgtaagtttcagaactgaggggactccatttcgtcaaggttttgcagaattcttctgctccatcaacgtctttggcttcctcaaagtgaagaaagaacgaactgatcagctctgagctccaagtccagttcttgtcttgatccaaaaccgccgcttcaaaatgcttcagagccaaatctgcctgatcgttcttcaacaggtgcatcatcaaaagctgccttgcctttgagaattgacctttacactttttcatggcgccgttgaaaacagcctcagcttcttcgtacatgttctgctttaagtagctgctaatcgctacattcgccatccgcatatcgtaagtccagcatgtcgattcccattctgcaaagactttcttgactccatcaatgtcatcgagtttactcagtgctcgaagcattgtaagatagcttgaattgttgacattagggtatcttttcttaagcaaatcccaaactcgataaacctcagaagcatttgcaattccagtatacaagttaatgagaaaatgataacaatcacgtacgtcaggattcatattgttctccagagatttcaacgcctcttctgctttaccgtagagaccgactttaatataaattgctgcaagattagcaaatgtattccaagagaaaataccttcaccttctgctttcatttcatcaagaaccttctctactccatctaaatcctttaaacttccacagctttgtatccacatggagtaagtaatatcacaaggagtaatactcttctctttcatcgcaacaaccaatgcaggcaccttctctggttgacctagccccatatacatagccatcaggttattaaacggcaaagaattactcacatgattgagatcaaccatattttcaaaatgagcctttgctttaacttcctccttttccacacagtaacagttcaataaggaaccataagtggactgattcttaatagaatcgtctaaactgttgaagtaggtctcagccgcctctaagcctttactctttgcaattagattcaaacgaatcgcgtgatcgctgccagtaaacgctatttcctttctttccatccactcaaagatctacacataattcagaaaaactcaaacactatacacatttaagcttcctatacaataagcctctaacaatggtggctaaaatcaattccaaaggaaagaggagacaaacctcgagagcgcgttgaggttgacgaaacttgcgaagatcctttgcgtagcgaatgaggtcgtgttttttgacaggtacgccttccatgacgaactgatttagcgtttcctccattttccctcctcccctcgtgccaaggcttgagagtttcttgtatattgaccgatgctttttcgccttcgtcggaacagaagcagcagcctcgccgctaatctccgccgtagcagtagcgagcgttgcacagaacctcctcgcgagccgtgaaacggaatgcatcatcagatttacggattttgaatttttttctgagtctcactcgaatctatgattttgctagggtttaaaaggcttttagaaaataagaagtcgaacttcatgtcgtttttatataactaaaaacgacatatagtttatttttgtaatcgtctctcttttgttattggagcagaaaaacttgtaaggccagaaatg

SEQ ID NO: 35860 - DNA, 3003 bp, Unknown; identical to SEQ ID NO: 35859
  misc_feature (1)..( 3003): 2750-1469P.txt file - cDNA_ID_3090944; gDNA_ID_2926172; Annot_ID_199585

SEQ ID NO: 35861 - DNA, 3003 bp, Unknown
  misc_feature (1)..( 3003): 2750-1469P.txt file - cDNA_ID_3090951; gDNA_ID_2926172; Annot_ID_199571
aaacgtgtgtacatgttgataaaacattttcaggtgagcgtggggagaaagcagagaagatgactggtgatatgctttcaccgtcttaggaacaaacagagctcaagaatggtttttttttttttcatttcggtctctagattctgcgaataataatgaatggagtctgtgtttggtttcatgttgaatcgatcaagatgtgtttttaactgtacatgaattatgcagaaacatctgtcctggttctcagacatcgaaactctgttcctaataaaagccgaagtccctgtttttattgtggtactagattttaatcacaatttttttttaaagttagtatatataaaaatttgcaaattgtatctatctattaaatatttttattttatagtttacaattgttattaagtaacgtcctgccaaacccgtaccgccaacccgtcccgtaaaaaaatttatttattttattaatgttgattttatttatgatatgtttatgaatcattgtttaaatattttgtaattttgtagtaattaattgctatcaaatatctctatggtttgcggcttataatcgaattgttataatcatgaaaaaaagcaatatcaaaaatgataattttgtagtgtttaaatcatattaattattttagaagttttactttagtaactaatcgtatagttaatgcggagagattttgggaaggtagttaaatgcaaatatttaattcgaagatttactttctaattatcaaaaataattattaaatatcagtggcagccactgtaaataagtcccaacttgaagatttatttcacagaatggctgcaaaaatatatatgtagattctcaaacaacaatgctttgaagacgccgttgtccaagacttcttgcgacaacgatacttcttttactttgtttcataatgatttcaagtaaccaaaagtgcctagtactactagtgttgtttgttagtagttctttgtctgctcctctagcaacatcatttctcatttttcttctctcttttgacaaggccaaatgtctcataactcaagagcctctggaaacacttgtaaattgaagaaacttcttaaagtctataagaatgttactgaaaccaatatttgaaaagacaacaaccgttttccagtgtaaaggagaattgcttctaatggaagcacaatataacctaatctatctagatttatatgcatatatctagatttaatgaagacgcttttggtcataagatctaaatgtaaaagcagacaagactgatagtattgtgttcttcatttttaatgtgagattttgtagaaacgaaaggcataacacgtttgaaatagctggatcatatcaaattaaaattgcaagattcttatataaataatacatcaacgaaatcaacttataatggaaatgaacttgtagaagaaatggtacaagatatctaaaagaaacccccactccctagacattttgggctttaagggtataccttcaccccactcgcttgacatctatccaaaggcgcattcaatagagcaaaagtacttatctgaggttccaactatcttcaagatgataggaaaaatgcaatgcatcttacacccgctgcaaaatggacgcgatatactattattgagtaccaccttagataattcgctaagatctatcgtgcttcctggcatgagccatgaaaagtctccgagcacacactttatatgcaaactagcccggtaatctttacatgtgtagaaccatgtctctggattggtttctttttcacaaatgtcacaccagtatttaccactagcctctttgtcaaagcatagtgagagaggatgatcgtcaactctatgctttaccacttgtggaaaagtggcgcatttgaagcatatggcaaatctgcaatcgtcttcaatgcaccttagcacagaataagaactcttattgcagccattgcaactactcttagtctcttcatctagtaaagtgtaatataagggatgatcgggatgacttggatggacaaacggctcagagattgaaccgcacccaacatcgaatgtaatgcccgaatactggtaactgaaaccattggaaaatctattacaagcttgacactgaaagaaatcatactcgtatgaaactagagtaagacgttcattgtgtagcacatgccatctctttctaggaaatccagcgcagttttggtggagaatgaagtcacaatccatacagccgtagaaagattggagacatatgggatgagtgcatgctctgcaccgcttcttgtcgtcacaaagaacaccattaacgtggagtcttaggtaatgttttttgtggctgaaatgttgtattgtgttgttgtctattaccacaaatggtttgatatcttctgtttcttcaggtactccttcgagttctttcccgttccacacatctttgttggtagcacattttgaatgaacgacgtagccggagcacctctgacaagaaaaacctccacaagtccaatccaccttccggtgacaaacttcacacacagaattcacaacaccaagaacagaagttcgcgaaacacggtgatcatgccgattaatgtttatgaggcgtggaagggaaagacagtcttgatggatcatgaaaccacattgaaaacacacgtaagggcttcgatctcccttcagcccgcaagcattacatgtaaaagaatcaagtcttgggagaagggtgagttggtgatcatgagctttcaaattcagaagagattgttgtggtggatgtagaacacaacgcatatccaaggtgaagttgcaagaagaacaatgataaaaatatctatcatcaatctttcttgcgcaaagacgacatgctccatcagaatagtccggtcgttgacctgtgtggagcttaagagggtgcgaggggtggtaagagtggtttacctctaaagggtgatatacctctgacggatgccatacgcaatccacatg

SEQ ID NO: 35862 - DNA, 3003 bp, Unknown
  misc_feature (1)..( 3003): 2750-1469P.txt file - cDNA_ID_3090954; gDNA_ID_2926172; Annot_ID_199567
gtcgtggaagtagctctctggagctccgggaatctgctcgggcttagaaattccggatcgggttttgtaaatcctggcggatccgtttctttccgaaacaaagacgacatcatcgcttttatcgttgacgaattgagcgttgaagttcacggaaacgccgtctgttaaacggcgttcgacggaggtggctatgttgagagagaagacgtcgaagccgtagtgagttcgaccgacggtggtgaaaatgatagtgcctttgggagtttccattgtcgagtttttgatgaattgttggtggtaagtgattcgagtatttatagaaggttgtggaggtgtttgactatttgactgagtgtgaagtgtgaacggaacaaaactgatccgtacgtgcgtgtgtaatgacgttgcagtcttcataggatcttttatcgttaattacgtggaaaatcgacgcagaagagattcatgtatgtgtaatagaatgtgagaaaattggttttgaatactaaacagtggatttgaccaaagacagagaatgagctaatgaagttgtgacttaacaagcaaaatcgctgtcgtatacaccatgtgtaatatctcttctagttttcaccaaccaagtattaaataaccaacaagaatacaacatcaagcaatagaaggattgggttttccggcgatcagtaaagtattttccggcgagatgcttgccgggatatacttcactagctttgaatttaatccatgtttcttaacccacttcatcctccctgcatcgatgatctgtttgcatttgaatcctaaaacagctctttccatgggtttcattttcttcacaacttcctccacgctgatcaaagaagcatctcttacttctccttcttcctcctcctttgcactgcatcagaagaacaatcaaatatgaaacaacttatatgcagtaacttctttatcatctttaaatccaagaaaatgttactttgaatcaagaaggtcaatgtcatcaacaccgggaagcttggaaccgtgatcatcatctactgcccagctagtgaacgaagtcatgatatggaactcgtccttggaaatccccaggctaaggatatattctttatctgagagacacataaccatattcttgattaaatagagaagttatataataatctgatagatcaaagaagtcacagtgactgtgagtttacttatgtagcttttccattgggaaagatgatggcaacaagtcgcaatagcgagacctctaagtactgggctttcaccatcttgtctggataaacaacatcttaagctcaaatctattatcgacacataagaatgaacatcaattagcaaaaccagatgctataaatgaagtggaaatctaatagtgaaggagcaaagacataagcatgtagtgacctgttgcaggaccacagagatgtttccctacggccacataaggaacaccgtgcaaagattcaaccgcgttaaggttcaaatcctcaactgaaaacacacaaggttttttccatcattaatacataacctggaacaagtaaacaagaaaaggtactagatttacgggaaccttactatcgattctcatacgctctaatactaagctctccttttgcctcaatgacctatcagcctatatgcgataaaacaaatgtggactgaaaaacaagatagattactaaaaataacagaatgaacacaaactagcaagcttaaccaaccttaagcttgtaagatttcctctcaactagatacacttttttgatcccatagcaatctgctagcatctgtgttaagtatcctctcccagcgccaaattcaacaaccgctggcgcagtattatcgtctttctcttccagatcgctttcgcaacattccacatttatgttgcacctcttcaatacaccaatctcttccaagttaccaagaattgaaccttgctgcaaaacatgtttctcttgaaatggtaatttcctgccaaacaatatgtatcagtcccgaaacttctcctcgccctatccatacccaagaaccaaagctccaaactattctaaccatttatgatttacctatctatctccttattaaaccatatgttacaagcttcaggtgacaaatacgaatcttcgatatctttacaaataccgccatgaacatcctcaattttcttaataagctgatgaaacttagaaacactcatactatagagcagatttctcttcatctctgaagtaacaagagaacaagatcccatcttttcttcttcttcgtcgttcccagcattaatacccttctgataaaatcgttgaccagacaattctacagtttgtttaagtaaaggacatctctttacatgccattcgagattctcctgcaacacagagctaacaaaattcgaatcaaacagttgctacaatagcagaaaaattgcaaactataacctttgaaaaaaaaaacaaagtatttgactcactgagaaggatcaatagggcatggaatccattgaccttccaatctctggctatggtttccacaaaacctgtttgataactttgaaaaattagctcctcactaatttgaacagaagaaaaaaacgaaactttactctttcacttacatagaactctcgattcgagtattcgcgcatgatcttttcttcttcggaagccagaaactgcatcgattgctacttttcgcctccattctctcagccagagttttgctcttgagacaaaggagacggaggtcttcaacgggtcctaaaaagggctttttttggcccattaagagcccatttaagtttaaaatcgaatcaatctaagcaaccatttgaaaaatgacacgtggcatttccaaaaaaacaaagaagcatgtttcttctcctccttacatactctttaacgccataagtctttacattttcttccgccggaaaaacagatatcacacagaaaacacaaacgacgacgaagaaagaagaagatg

SEQ ID NO: 35863 - DNA, 3000 bp, Unknown; identical to SEQ ID NO: 5605
  misc_feature (1)..( 3000): 2750-1469P.txt file - cDNA_ID_3090958; gDNA_ID_2926172; Annot_ID_199557

SEQ ID NO: 35864 - DNA, 3000 bp, Unknown; identical to SEQ ID NO: 4754
  misc_feature (1)..( 3000): 2750-1469P.txt file - cDNA_ID_3090968; gDNA_ID_1620728; Annot_ID_166004

SEQ ID NO: 35865 - DNA, 3000 bp, Unknown; identical to SEQ ID NO: 4754
  misc_feature (1)..( 3000): 2750-1469P.txt file - cDNA_ID_3090968; gDNA_ID_2926173; Annot_ID_199674

SEQ ID NO: 35866 - DNA, 3000 bp, Unknown; identical to SEQ ID NO: 20333
  misc_feature (1)..( 3000): 2750-1469P.txt file - cDNA_ID_3090972; gDNA_ID_1620728; Annot_ID_166003

SEQ ID NO: 35867 - DNA, 3000 bp, Unknown; identical to SEQ ID NO: 20333
  misc_feature (1)..( 3000): 2750-1469P.txt file - cDNA_ID_3090972; gDNA_ID_2926173; Annot_ID_199673

SEQ ID NO: 35868 - DNA, 3003 bp, Unknown
  misc_feature (1)..( 3003): 2750-1469P.txt file - cDNA_ID_3090986; gDNA_ID_1620707; Annot_ID_165335
gtaaaccgaaatcccttctttggaccgatgagggatctctggttcctgagcttcctataccagtattaaccacatcagcattgtaatcggatccttctgggttaatgggaagagaatttgcatctctggtcctgagtttatccatagcacctaacatagtcctggtatctgctgaatagtttagcttgtccactttcacaactgttgctttcacacgctgttcgtcgctgaatgtttcttcttttaccttcagcttgaagttgtacttggtaaaagcaaccttacggatgatatcttcgaatttttcctcatccttgtgttcattcttcacataatacaaatctttagcagatatgcccattatctcttcaccagcctcctggaatgctgtgacgcaagtaagatctgtatggtcctgtatctgaagctgcagtatatacctgtagtcacattcatcaacgcttttatcacacttttcgcaccgccatgtcccatctccattgtctgttacctttttgctgcatggacgatcaccgttcatgataggacaagctgtgtagcagaagttatcaaacttcaagtataaaattgtggcactgactgtgatccagtctggtttttcggaggttcctagtttctcatctttaatttgagatattgtcttacgaacatctactttgccactgccggaaaactcccgagataaggagatacaagggacactctttccttctctctcaaaccagttcttcagtttctcagcttcaacaaaatctgggtcaatgaacagctgacttgatccaatggtgctcactgtctttccattaaattcactaatcctgcccgccttaacagcaagaaccggaaacacaccagaatcacaaagactttgcagcctttgtccttctgcattgcagaagtcaccccacatagttacctcaacacttcggcctgacatatccttcaactgaagtgatcttttcggtgttgcagttccgtttttcctcgttattgttacagtaggactgatagatgacacaataccaattacatcaacgatgcagttattctccatgctctcaatatccccaatggtacggaaatggaactgatggcgcggaattgcagcatcctcttcatagcattgttttatagttgatgcattatccagcatgatctcgtaatcatttcgaagatgattaaagttcttttgtgcaggccgcaaacttcccctcgagataagataaagattaccaacaacaatctggtcatagaattgatcagccacagcgttaaaacaagtaacacgtatttctccgccatcagcatcaagaagatcaaagttgaacactttcccttccccacggggattactgtattgcttaagtgctgctttattcgtgactctggccttgatggtccacctacctgaatatggactaagagcattaactggaattatcttaggaggtgcttcattcctagccactggtcccctgtttgcatacatcggtggtggtggttgaggctgatgaggataacttgttggaggatcacgagcatagtcctgcctagtgactccattacctgaagacggattgctgtatgcccgagtggaaggtgttgttgatgcaggaacactagaaccagtaccaccaacctgaggtgaaatagctgcattacttctccctggctcgatattgtttacttgacggataccactaccttgttgctcagttgtattaaacttaataccagaatctgctccacgttgatcattatgctttcctcctggaacaggatgcccgataatatcagaaatctgttttaacacctccagttgcggaacaataacaatcctggcatcaaaaacaaaactttataagattatgtgaaattttggtaatgtagtctctaacatgaagcaactatcattggctatatatccaaacttcaaaatcatgttcacaaccaattaccttcgacccttgatgacatcaccgacgaaacgagtaagtctaacaatagaaccgggttgaagagtcccttctttgacaagattgttgagatcagttcctagcattccttgatgcaagtatgtcccatcagataacaccatcctaaacctctctcttgttggatcttgttgagccataatctgcttcaaatccgtcacttgcaacaccggaatcatatctgcttcagtcgtcacttctccattcattatcttcccgattgctcccgccgtcaaacttacctccatcattacagattgacactaaaacccaaattcaaaagcgttacaaacctcaagaaaatttggataatcagtagaagcaattcgagattcgaggaggaaaagggtgaaatctttataaatgaattcaaaattgaggagacgaaaaacgatttgtttgaattgacagagaccagaggttgaagaagatgaaggatttgagattagcccctagagtgaaaggtggaaactttacgctccctttgagagggaaactaaagaaggagggtttcaagaatttggaaatcacaatcgagccacgatttggtgttattacggatctaccccttcacaaaattcccttacaagcttcgttaagatgtagactggtaaggctcaaagcacatatataggcccatttgaaggcccaaaatggcaagtaaacgaacatattacgtggaagacgtggcaagtgtactgctgagtcagcaatctctctccatcacattcacattgatcaaccctgtccgaaaaaattattttattattattttttgttgtaattgcatttaacacactcgcatcatagtcaaagactcaacgcggaagggaaaaaaaaaaaaggcgcaattgaaagaaaaaaattgataatcggtaagatttgatgtcccggcgtccgtcgttttgatcaccgtgagaaatggattcttcgaattgttgttctgagtaaaactcactcaccgtcaccggagaagaaagtgtaaatg

SEQ ID NO: 35869 - DNA, 3003 bp, Unknown; identical to SEQ ID NO: 35868
  misc_feature (1)..( 3003): 2750-1469P.txt file - cDNA_ID_3090986; gDNA_ID_2926173; Annot_ID_199642

SEQ ID NO: 35870 - DNA, 3000 bp, Unknown; identical to SEQ ID NO: 33951
  misc_feature (1)..( 3000): 2750-1469P.txt file - cDNA_ID_3090989; gDNA_ID_2926173; Annot_ID_199640

SEQ ID NO: 35871 - DNA, 3000 bp, Unknown; identical to SEQ ID NO: 4465
  misc_feature (1)..( 3000): 2750-1469P.txt file - cDNA_ID_3090993; gDNA_ID_2926173; Annot_ID_199638

SEQ ID NO: 35872 - DNA, 3000 bp, Unknown; identical to SEQ ID NO: 4395
  misc_feature (1)..( 3000): 2750-1469P.txt file - cDNA_ID_3091033; gDNA_ID_2926174; Annot_ID_199739

SEQ ID NO: 35873 - DNA, 3003 bp, Unknown
  misc_feature (1)..( 3003): 2750-1469P.txt file - cDNA_ID_3091045; gDNA_ID_1620660; Annot_ID_163794
aatgcatctagttctttgtccatatttatccttctagaaactagcgcagaacagtattaagattattactgagtcctttttccatgttgtcctccctcctcacccagacgattgctacagtctgcatgttccttgcgggaaaagtggaagaaactcctaggccgttaaaagatgttattgttgtctcctatgagataatacacaagaaggatcctactactgcacagaaaatcaagcaaaaggtctgaatattctaaactttctctaatccggtttcctgtttagtaataagcgaatttgcactgtttctcgcatattctattttactatgacataagttttctactaaacccaggattgcacttgtttgtgaacaatcctcctatgatcattgtccttgtcgttggatctctcatctgtgctggtcaccgtctctattatttctcttctttgtactgaacgtatttcacttttgcaggaagtatatgagcaacaaaaagagcttatactaaatggagaaaagattgtactttctacgctgggatttgacttcaatgtttatcatccttataagcctcttgtagaagcgataaagaaatttaaggtcgcacagaatgctctggcccaagttgcatggaattttgttaacgatgggtacgttaaaagtctgtttccttgaaagcttcagatagatctatctgtcttgtattttcttcttcatacaatgaaaagatgcttgcagtctgcggacgtcactctgcctgcaatttaagcctcaccacattgcggcgggagcaatttttcttgctgcgaagttccttaaagtgaaattaccatcagatggagagaaggtctggtggcaagaatttgatgtcacacctcgacaactagagggtgagagaactatctttatctttgaattaattttatgaaactgtttccactttttctgtttgacttgtatgccttattttgcatctgatgctaagagctactcccttatgtatactgcagatgttagcaaccaaatgcttgagctctatgagcaaaaccgtgttcctgcatctcaagtaagcgaagtcgaaagtagtgtaggtggaggatcagctcatcatgttgggtctaggccatcagcacgtctaactcatgaacattcaaattctgataatctcgggggctcgacaaaagctacacaaaaccggagcaatgataatgggagtggtgaggcaggtagtgtcatcaccgagcagaagggggaaagagatacagaaacgaaagatagcatgcatactgaaagtcatccagcccataagtctagatcgggagttgaggcacctggggaggataaaatagagaaagcaggtgcacattttccagaagatgataaatctagaattgttggtacagctgatgtcacggtcagccaatccccaaaagacataaaaatgtttagagataaggtgaaggccaaactagaggcgaagaaggtccaaggtgaaaagacgagaaagaaggatttggtggatgaggatgatttgatagaaagagaactggaagacgtggaattagctgttgaggatgacaaagatatacaaaacaaaagctccatgggtacagaacatggcgagattcttgatggaaacaacttggtggtcaataccgaggaaggtgaaatgatagatgatgtttcttcaacaatgcctagccggaagagaaaaatggaaagtccttgtgaaaaacagttaggagaaggaaagagacgacacgacaacagtgagaatgtggaagaaggtcagaagacaaacccaggaggaagtagtcatagttatggtgacagagagccaagaagacactcccaagagaggtagatgatcaaaaccttctcatggtctattagagacatttcccaaccatgatgcgaaatgagtccactgtatttacaatgttggttatcttttcattttccttggcacttgtattcaacagttgagaaactaaatcaggtttccatccatcccataggatttagggtctctataattttgatctttgttagcattcccttttgtatatcgggggaataaaaaagaattttgacgaatttatttagagccaagacaatattagtgttttgtcattcattgccgaaggatgttttgataataacaatatgaaacagagtggtcaattgatttgtcaatgtgtagttgtttttgtaaggtttgttttatgttaagtccactcgtaaccttgttcccattgtcattatactgcttttcgtatgtatcggttagcttggtgaccaatccggttaaccacaaaatcaggcggaatagttgtcaaattaaagagcaaaaaagactcatgaaaaagagctgtaggggttttcattttttcaattcgttttcaaaattttcaggtttaaaaataaatacaggtctgaattaattcgctcggtttgaattttcgggtttagtccagtgtgatttagtcggttaagttgctcaaaattttggatttggttcggtttattcattatcaaacacaaaaacacaaaaaaagccaacctaaagaaggaacaacaaaagacctaaaaaccctctcgtcttctcttcttcttcttcttcttctccttgctctctcttgtcgtcggcggcagattatccaatcgttaggctatcgttccgacactctacagtcattacaaacatttcaatacaacaaaaactcatccttttcttctcttattaaccataatttcggattccctttctaagtatacagctttcccagaacgagctcttgcaaagccaaagaatgtaagtatttgtttctttagggttttagcgaattcaatcttagtaagtcatcttcttcttttttcgacctttgtataattgcaggtcgaggatttgtgttaagaatttgccaaaacatgtgaaagaggatcaacttcgagatcacttttcacagaaaggagaaatcactgacgccaaattgatg

SEQ ID NO: 35874 - DNA, 3003 bp, Unknown; identical to SEQ ID NO: 33721
  misc_feature (1)..( 3003): 2750-1469P.txt file - cDNA_ID_3091045; gDNA_ID_2926174; Annot_ID_199713

SEQ ID NO: 35875 - DNA, 3003 bp, Unknown
  misc_feature (1)..( 3003): 2750-1469P.txt file - cDNA_ID_3091065; gDNA_ID_1971816; Annot_ID_175972
tcatatagtgagcatctctacttgctttctttttgtttcactcttgattctcaaactctttgagtttttacctttttttatttatttttgtgccattttccataagaacttgaaatcaaaatgtcatatatttcttgattttctgatccttgttattcatctttgtctcgctccatatgattctgatgtggatttggtactcaacgaccaatcacttaatttgaaaccactgtgggcagattacatcaacaattcaaggagattgcagaatataacataaagaacttaaagaggaaagttgaaatgtgaagagataatgaagaagaggaaagagagagcttatggaatgcgaccaccacctctgccactgaaagatgggcctgcatcgatctcaccatttgtttgataactcctcattcttctccctaacaaataacaatcattattattgttagttttcatggaagacaataatttactaagtcatacgacttgacatatgtgtagtgtagagtgtaaaatatatatactatgagagtctatggaacactaaccagctcttgggagtgattcttgtttagaagcaagaacaagactgttgcaacgaagaagaagcagaagcaccataaagaacacaaaacccaactgtgaaaaaacctgctttaccattttgctcaatatctatgattctatattggtttttcgtattttttaaagtgttgtgtatatatagagagatagtagacgctgattagagatatggtttattttaataggatttgtttaatgaaagattcgcaatacagagtgacatgataagtaatgagatggacacaaggaatctcacgtgtcctcatcttccaacttgttcttccaatggtgagctcttatcttctataaatctataaaaatatatataatctctttcttaattttgatcttcgaggcttttgatgtagacccgtgaggatagagaaaaaatagttctaagacagagccaaaaggacaccccttttaagtcagtggcacaagattttaagattatttgcaaggttgaccatatacttcattaaacttgagagatcaagtttgtgacatcagtagagtttatacaagaatatgaagaagctgctttcttttcatgcaagaaatattaagtttcatgtcttagatcccgagctgcaaaaaaagagttaaagatgtttgaaattaatgcaatgaagtatccacgagaatctttatagtctcatgcaaatgatgtgaactcaaatctatgttcaaactcactcttgttgttggcggtagtacagagcgaacactctcaacgggtgtgagtatgattcttctgattgacattgcagtaactaacctggttagtgagatcttctgtttcctcttgagacaccatctctatctgcaaaaacatgacacagccaatctttgtgattgaaccaggcttaaaagcatgctcttaaagatattttttgtgatattttgtaccgtcatcattatcagtgagaacttgacctttgggattcaagaaccttcaaagctgcaaaacccaaaaaagaaagaagttgggccactggaagcaaagcccaagcccaatgcgcagcctttgaaagatcctcagcaacggtcatgtccacctgtcaataaagccaaaactgcagtcatcacacagctaagagaacgtacagattcaacgatacctttgaagaaccaatttgagtgtcttggatccggtgatgattgccaagactgacacctgtcattattagggtttaggctacatcaccttgtattcaatataaaaggactttatgatgtaatgtgaaacctaagtcgaaatataagaaagataagttctctatatttcagattacgttcatggtatcagagccatggcaaatcagtccatggagctctattcctatcctgttctaaacatctcaaactgtgttactgttaagcttactgagagaaattacctgctctggaaaactcagtttgagtccttcttgtctggtcagaaccttctcggcttcgtcaatggcgctaccaagagtccagatcctgtctcagctgtcacgaacattgatggtgttgttacagagatcccaaatgctgactacagtgctaggcacagatctgaccaagtggtgaagtcatggatcttaggctctctctctgaagacattctggaagaggtcatcactgaatccactgctcaacaagtctgggaaggtctagccaggtatttcaatcgtgtctctactgctcgcctatttgaactgcaaagaaaacagcagactatgtgtaagcatgatacacctatgatagattacattaagggaataaagaacatttgtgaacaacttgcctctgctggtagtcctgttaaggaacaaatgaaattttttgctgctcttaatggtcttggtcgtgagtatgaacctattaagacatccatagagggtagtatggaatctacacctgctcctactctagatagtatcactcctaggcttacaggctttgctgaccgtctcaagagctatgaagtggtgtctgtcactccccatctagtcttcactgcagatgctcctgatgctggcaactactatcagaccaactacagtggcagagggaatttttctggcaagggaaacagaggcagaggagcatacaacaccaagggacgtggctttcatcagcagaccacaactggctcttccatgtcaggagaaaacagacctgtctgtcagatctgtggaaagctaggccatcctgctctcaaatgttggcacaggttcaacaatagctaccagcatgaagaactgcctagtgccttgacagctatgcacatcacagaagttacagaacacaatggacaagagtggttccctgatacaggagcttcagctcatgtgaccaacagtcatcagcatctgcaacaatcaagaccatacaatggttcagacgctgtgattgtaggaaatg

SEQ ID NO: 35876 - DNA, 3003 bp, Unknown; identical to SEQ ID NO: 35875
  misc_feature (1)..( 3003): 2750-1469P.txt file - cDNA_ID_3091065; gDNA_ID_2926175; Annot_ID_199820

SEQ ID NO: 35877 - DNA, 3003 bp, Unknown; identical to SEQ ID NO: 16931
  misc_feature (1)..( 3003): 2750-1469P.txt file - cDNA_ID_3091079; gDNA_ID_1620645; Annot_ID_163215

SEQ ID NO: 35878 - DNA, 3003 bp, Unknown; identical to SEQ ID NO: 16931
  misc_feature (1)..( 3003): 2750-1469P.txt file - cDNA_ID_3091079; gDNA_ID_2926175; Annot_ID_199812

SEQ ID NO: 35879 - DNA, 3003 bp, Unknown
  misc_feature (1)..( 3003): 2750-1469P.txt file - cDNA_ID_3091085; gDNA_ID_2926175; Annot_ID_199807
actgttctttgtggcaatgctatgtgtgcaagaacatagtgttgagagaccgaccatgagagaggttgtccagatgatctctcaggctaaacagcctaatactttctaaatgcagtgatgttatatatataagagactaaatatatatttttctgttttatgtgtttcatagagttttgtttttagaatttgtaatgatggtttggtggtgatatgagtttatattgaaattgaggaggaaaaaaagggttagcattatatcttcctatcataaagtatcaagcaaaactaaataacatttgctagaaaattatgaattatgtgaaagatttgaaaaaatagataactgttctttgattcatttggaattataaaaatcatgatgaccaaagaaaaatgttgaaatcactcaagcatttgatttaacatatgattatccaatatctatagaaatagttagcatttgagtgtttttactttttagtatccaattcactatcattgatatttttaattttgttgtctagctcgatttataacatttggctagttgtaaatcgttatcccaacattgtattccaaaaaaaaaaaccagttagttattcagtggttttgaactgagcccagcccaaatccaatgatgtggttctcgaaactttttgggttggtttaacaaaaaccggttcagatcttttcttttgatccaccaattgattggactaaaccgacttataacagtcgctacactcctatagaaaagcttgaaattgaacacagtcgatgaattttcctctccgcctggaagattgtggagctcccagttgttgttaacaacggtctagagattcgtgtctcttgaaattcgatctgagtttcaccttcaaggttcgtcaatgatccgtagcaatttgcttcgttctaaaccctaatttgagatctcaattatgtgattttttcgtttaggttttaatcaggaatgaagcattcaaaggatccgtttgaagcagcgattgaggaagagcaagaggaatcgccaccggaatcacccgttggcggaggaggaggaggtgatggtagtgaagacggacgaattgaaatcgaccagactcaagatgaagatgagagacctgtggatgttcgccgtccgatgaagaaagctaaaacctctgttgttgttactgaagctaagaacaaagataaagatgaagatgatgaagaagaggaagagaatatggatgttgagcttactaaatatccaactagttctgatcctgctaaaatggccaaaatgcagtgagtctttgtagaattttgattgttcttcatgtttctttgatgattgattgtttgttgaattcttcagaaccatattatcgcaattcactgaggatcagatgagtagatatgaatcttttaggagatctgcacttcaaagaccacagatgaagaaggtatatatgttatatgatttgtggttatcaacattcttaattttgtttcattgcaaatatgaaccatttagcttttatgttaatgcagttattgataggtgtcactggtagtcagaagattggtatgccaatgattattgttgcgtgtggtattgcaaagatgttcgttggtgaactcgttgaaacaggtaagccagtgcaaaaatttccaatgattttgtttatgtgccaacaaagctcatttactgaacctcaatacattatctgtagctcgagttgttatggcggaaaggaaagaatcaggacctatcagaccttgtcatatcagggagtcttatcggagactaaagctcgaaggaaaagtgcctaaaagatcagttccacgccttttccgctagtcaacaagagccaaaagagaacttatatcagcctaagactggggaatttaccaatgctgctcaaggataagggtctacggcaggtttaagctggcgagatttgcctatcaatctcatcataaaggagaacttctttggcttccctggtggatcatattgttctttgatgttcttaactttgtgtgacaacttttgtagtaaatcaatctttggatacagaccctgaaatggctatcagtcttacggtttggtttttatttggtttacgtttccagttttcattttcaatacaagatcaatctttgactacagaccacatggcctaaaagtggcaatccggtttactaggttggattcggtttcatttccggttttatagaattcgaaatcaaataaaatcatttgtaatccggtttatttggttaaatttggctatacctaaaaattggttttagtattgattcgtttttggtcgaacattacaagaactgggtttataagttcaaattcaaattgtgtatttcttcggcgtgattgaaaaccgtcgcgatcagaattcggtctactgtcaaaattggtacggagacgttttgaatcacacaagttccggcgaaagaggatctagtgggcctgataatgggccgatctcgaaacgaactattacgtgaagagaagaaaacaaagtgggttgcgaattgaaagtctacagaaaataaaaggactggattggaaaaataaaaagaataaaagaagttttgacacaataacgcacccactatctttctccttcccttccgccttccttcttcttcttcttcttcttcatcctcctcactgtttaacgcagagcgcctccgtttcttctcttctcctcctctctcttttctctctacacaaatatttttcccttcttttttcattctctttattcaatataatccttttgattcgctggtgatcggtacgagaaacttagaatcacacgaggaagctgtgtttcgtttatcctcgtttaatcggaatcgaaatttgttctggagaagaaatttaacgaatcatagattcctgatacaaaaaaaaaactatcacagatcggaatcggaaacgtaaccattacataattcgaatctggttttcacttgggtataatgatg

SEQ ID NO: 35880 - DNA, 3003 bp, Unknown; identical to SEQ ID NO: 19103
  misc_feature (1)..( 3003): 2750-1469P.txt file - cDNA_ID_3091087; gDNA_ID_1620645; Annot_ID_163204

SEQ ID NO: 35881 - DNA, 3003 bp, Unknown; identical to SEQ ID NO: 19103
  misc_feature (1)..( 3003): 2750-1469P.txt file - cDNA_ID_3091087; gDNA_ID_2926175; Annot_ID_199804

SEQ ID NO: 35882 - DNA, 3000 bp, Unknown; identical to SEQ ID NO: 19115
  misc_feature (1)..( 3000): 2750-1469P.txt file - cDNA_ID_3091104; gDNA_ID_1620645; Annot_ID_163186

SEQ ID NO: 35883 - DNA, 3000 bp, Unknown; identical to SEQ ID NO: 19115
  misc_feature (1)..( 3000): 2750-1469P.txt file - cDNA_ID_3091104; gDNA_ID_2926175; Annot_ID_199789

SEQ ID NO: 35884 - DNA, 3000 bp, Unknown; identical to SEQ ID NO: 8466
  misc_feature (1)..( 3000): 2750-1469P.txt file - cDNA_ID_3091118; gDNA_ID_1971811; Annot_ID_175750

SEQ ID NO: 35885 - DNA, 3000 bp, Unknown; identical to SEQ ID NO: 8466
  misc_feature (1)..( 3000): 2750-1469P.txt file - cDNA_ID_3091118; gDNA_ID_2926175; Annot_ID_199775

SEQ ID NO: 35886 - DNA, 3003 bp, Unknown
  misc_feature (1)..( 3003): 2750-1469P.txt file - cDNA_ID_3091129; gDNA_ID_1971811; Annot_ID_175743
ttaattatatttagtgttgagatagtacgtttttttttttgttatttgtaagtattaaagttttaaacttataagaaattcttaaaggtaaacctctaatttatattccagtgttgttgtttgataattttaatacttttattcttgaagtgtatttgatgtagttcacataggtttattatagatgtattcaaatagtaatatgaaataaatttaaaatggtgacaatagaacatatataatcagattgaaatcttagacaattaaaaaaatcacagctatcaaattttactctatatgtcattaattaatcataacactggaataaaaattgtcatttgcattatttcttatgtttttggcaataatttgtaacactgcacaatcgcttaacgacataagttgcaaatgaaaatttgcagaataaatatttgcatgataaaagttatataataaactattaaacaactatatactcatttatttgcataataaatttatttgtatttttaggtaaaaatataagcctatcgttttttgcgttttggtaaacattatataaattttcttaatgaatattttttttgcataatcacattagaaaacgtaattccattattatttgtgttactaaccagagctaaaacataagaaataatgtaaaaaacaattattatatactatttcttataattattaattgtgtcggcaaaaacctatagttttgacctcgtttgttcattgttatagtgttcccaaacgtatggcgagacgtccttattgtagaatctgtaagcacacccgattttgaaatatctgcaagtttgtagggatttaaaaatgagcttctactgttttattattcctcaaataattcatgtattaaaatgtagagttgttcacaaaaacacaagttcaaaaaattgtcacggttccccactataaaaaaaaaaaaagatttagttttactacgcttttgattacggtaaatcattacaaatattttaaatgatatagtactttctttcacatatctaaaaactacttctagatttatgacatggatcctctataatatttacataaagaaagtggtgaaatgttcaatcttaattattgttacaaaaccaagtcgttgaaatgtgtctaacaaggtatggtctttgatttgctggcgggaaatcatatactagaagacaactcaaaaccctggccattgtattaaattatcattaaatttgtatagtaatataatactaagagatatttcttttcctaatagcatatgttatagcctacagtgttgataaataattatggtgaaagctacggtgcaaccaaaaagaacgaagaagatataaaattcgagaaaggaaaaattaagattttgaaaggacaaactttcaaccaataaaatttgatctgtaagagttttataagaattcatttgaaccagttttcaaaacagaaaatactttcgtcactcacatttcaaccgtttgctataatacttaacaacacttatatattacaataaattcaaattacaaatttaacaaaaccataatattaataaaccttttgtaaaaaaaatactccataatacaattaaatttcaaaaatctaaaattttgtatttattatcaaaatttaacacccgagcgaagcacgggttatcaatctaataatacgttaatttggaagtataatccaagttccaaccatgaaataagaaaaaaaaaaaaaacttatccaaccaaaaatgattaactacacatcatctaagacatgactttgagttctgagttataaaatcacttgatgaattaagagtatcagtcaattatgtacaatttcataaatgaaaagctcataccgaactttctgacaaaaatgaaaaatcaaatcttacagagttttctttagacttggtcttttttttttggtaaacggtataccgtattcgagtaagactagtctttaactctttatcagtatttctttttgtttggtcgaaaactaatatataattcattcgagaagcatagagttcgacgcttcctagtgtagtcattaatcaacgaattaatttgagtcattcacttaataaaatcagtaaaggggagtaattaaaatataactgcggccacgagtagtcggagataacgtgagcgtgatcaaaactgaataaaaagccacgtgttgtcactggaagaattaaacaattactaattgtcattcaattatgtgaaataaaatattaggtgaattctgagaagaaagtttcaatttggggttatgaagagttgaagactattgtttcccaatctatagattattattatgcattcgaaagtcgcaactagtttcagtgatctgttccaaggttatgattatattttgacatatatatgtaattatgtattatggattcgccagatagatttttttctaattaagctagtacttagcgcaattattatacgtaatgttattaaataaaaagttactgtatggtttattttttatttaaaaaaagaagagaaataattaatgttatgtccgtctctcatcgaccaaatcatgtttctctcgggtcattcatgtatctctttgtctttttctgcacttttttcccattatctgatgattcacagtttaatattcgtacacgattctatatcacttgtatagttatatatatatttttaaacactcgaatatataatttggaatcggtctgttctcttgattctctacactctaataaaaacaggaattgatttcaaatggagaaaaagagttggtaaaagaattcattcataaaaatcattgctacaaataaataattagtgtgacaaaacaagaacaatgaccttacaaaactgccagtgatgacgtttgccttgaccttttgtacttaactataagaaccgacaaaataaacagagaagagaacagagaaaacgaaagaaacgctttaaaccccctcaagaacacatg

SEQ ID NO: 35887 - DNA, 3003 bp, Unknown; identical to SEQ ID NO: 35886
  misc_feature (1)..( 3003): 2750-1469P.txt file - cDNA_ID_3091129; gDNA_ID_2926175; Annot_ID_199768

SEQ ID NO: 35888 - DNA, 3003 bp, Unknown; identical to SEQ ID NO: 19048
  misc_feature (1)..( 3003): 2750-1469P.txt file - cDNA_ID_3091133; gDNA_ID_1971811; Annot_ID_175741

SEQ ID NO: 35889 - DNA, 3003 bp, Unknown; identical to SEQ ID NO: 19048
  misc_feature (1)..( 3003): 2750-1469P.txt file - cDNA_ID_3091133; gDNA_ID_2926175; Annot_ID_199766

SEQ ID NO: 35890 - DNA, 3000 bp, Unknown; identical to SEQ ID NO: 4345
  misc_feature (1)..( 3000): 2750-1469P.txt file - cDNA_ID_3091158; gDNA_ID_1620701; Annot_ID_165067

SEQ ID NO: 35891 - DNA, 3000 bp, Unknown; identical to SEQ ID NO: 4345
  misc_feature (1)..( 3000): 2750-1469P.txt file - cDNA_ID_3091158; gDNA_ID_2926176; Annot_ID_199897

SEQ ID NO: 35892 - DNA, 3000 bp, Unknown; identical to SEQ ID NO: 8549
  misc_feature (1)..( 3000): 2750-1469P.txt file - cDNA_ID_3091174; gDNA_ID_1971816; Annot_ID_175984

SEQ ID NO: 35893 - DNA, 3000 bp, Unknown; identical to SEQ ID NO: 8549
  misc_feature (1)..( 3000): 2750-1469P.txt file - cDNA_ID_3091174; gDNA_ID_2926176; Annot_ID_199844

SEQ ID NO: 35894 - DNA, 3003 bp, Unknown; identical to SEQ ID NO: 24452
  misc_feature (1)..( 3003): 2750-1469P.txt file - cDNA_ID_3091184; gDNA_ID_2926176; Annot_ID_199837

SEQ ID NO: 35895 - DNA, 46 bp, Unknown
  misc_feature (1)..( 46): 2750-1469P.txt file - cDNA_ID_3091188; gDNA_ID_2926176; Annot_ID_199833
tcctgcttctataggcaacagtctctctctcattcctcagaggatg

SEQ ID NO: 35896 - DNA, 3000 bp, Unknown
  misc_feature (1)..( 3000): 2750-1469P.txt file - cDNA_ID_3091202; gDNA_ID_1620683; Annot_ID_164541
tttcttctaattagtttcatttttgtttggtttctctctctcaaaaagataactggtcatcaaaaatgattggcaagtgtatgtgaacattaaattaggtcgaccctaaatatataataacaccatgacatttcgaaacaacttgatggatatcagaaaatccgcaagatagcattttggtagttagatagtaaactcttggtattttcaagattcaactatccacccccactattttggtacgacgtgacgagtgaacgtctagtggttatcgctctacgaaaaaacgtttctcatttaagttctaacatgaagagtcgcaaaagaaatgtccatataaaacttacgatatttgcaggttaatcagttaatcgaacctgcaagaaccaacaatagaaaagaaaaaaatgcaataaagatatgacatccaacttcaatcatttgaactaggcgtgttaaaacaagtcgatcttaacattacaccaaaaaaagaagaaaaaaattgattttatgatacattgacacaagtgagaacgaagatatggaggtggttctggtcttgaattggtccaacaagtcgtagacaataaaaatagaaaagaaaaacaaagcatgtgatgattagaataagatccagcaaaataaccgttaccctgaaaccttgtcggctcatacgtggtgatttctacgatcacatgcaatttttggcccgagttttctcgaatgcaaatatttgcatcaaacaatgttccaattgttgtttctttcccttattaaatagcatttttcttggtacttgtgaaataaattgatcagtcaaatggttggcttcttcttctgatgacttctggaagaaaattctttgaaatgttggagaccacgtgccaacaaacactgtgtaacagaaaactaacaaacacatggtctgattttccttgaccacctctgtttcagtggtataaaatcttggtagaacaaaattttgattacagaaaaacgttatgttctgtaacattttaagagtgatgttttgtagtcaatagaatttaattgctcaactaaagcaaagcaaaactgcaaaacatatttcttgttctcgtttgtaaggacgttttaatgataacagatcatttcagaacagaccttctaacatttgcataatgtttctttgaactcagtcctttagagatgttgttatactagagattcaacattcgctaaaactgtcatggagatcgaacataagatagagaactagcagtttccaaaacagactcaatgttaaggaactttagaagtcaatggaaactaaattgtagccacaataaaatgaaaatcgtgtagctactcgccttacttccatagataaaggtgtaagaaacaattttgctgcagacctagtatttcaaaacgctaaaccctaatcaatacaagtgcaatactatgtttttcactcatttacgaggcaaaagagtatcaaaactcttctttgtggatcaatttagaaatgtgttcttttgaaatagacacacgcacatgttctttataggattattatacaacaatgctcaagtctctgcggtttcttctttccttatagctttcagtctttcttgaagtttcttgctttgttcgaaatttaccttccgcttcacagctttctgcaaatatattgtaaagatatcatctctaagaggaaaactttgaaccgaaacatacttaatcgactattagtaacttattacctcttggcggaaacatcgatcaagctttactttcagctctgtacattctccaaagaatttcccaatcggatggtctatatgacacttttgaaattcctcaattatctaccaaacatatgacaaacagaaagaattagtaagtagaacaaaacatatcaaactgatttcttttgaaaggtttgctctttccaaatgcagtcatgtagcttgtttgcaaaggcttactaaagctagagattgacacacataggagttatcacataaattgcatatattttacaaaaatctctcatctcatttgcgtacagctctaatacactgttataagattgatcttattctcaaagaagcagtcacagaggttaaaactaacagaggattgaaactacaagttgagcaaactctcacctccagacacattggatgtctatgtggtgtaagtggaggatgcatctttcacttcttctgcaagaaaaaagcaaaatctgaatcgcttgtaatggatgttaaaaatcagatcttttatttctctgctaaaaacccataaggaatttacagcaaaactaagcaaaagacccttatgttgaagaagcaaaagaaggaaagatatggtttttgtatcatactaacatttcacaagtcattctaatattctaaaatttcggatctcaatttaacatggagcagaaccacatgattttcaagagcaaatcagttcgaaaatcatcgattcgagattcaaaccaaaacctaatcgaagaagaatcacgaagaagagtaaaattaccttaatttgggtatctataagctgagagagagagaattcgtttccagctcagagaatcgatggcgaagaggaaagagatgaagaatacagacgacgggtcaaaattttcaggttaatgggcctatttaactttactagttaatgggcctatttaactttactagttaatgggccttatccgttacttccataaacgcatttcgtatgttttggatgagaatcagacatcagagggaacttggaggacacagagaagcgcaaattatcagacagagtgagaacgaagaagaagaaagcacaggtaagttgaacaatatgtgtttcgattctctagaaaacttacacaattgtaaattgaattcactagatatctctagtggctgaaaaggagaaagctttaagatttctgggttcttcttcttcttcttcttcttcttcttcttctctgaattgatttttttcaggatg

SEQ ID NO: 35897 - DNA, 3000 bp, Unknown; identical to SEQ ID NO: 35896
  misc_feature (1)..( 3000): 2750-1469P.txt file - cDNA_ID_3091202; gDNA_ID_2926177; Annot_ID_199945

SEQ ID NO: 35898 - DNA, 3003 bp, Unknown; identical to SEQ ID NO: 19705
  misc_feature (1)..( 3003): 2750-1469P.txt file - cDNA_ID_3091206; gDNA_ID_1620683; Annot_ID_164538

SEQ ID NO: 35899 - DNA, 3003 bp, Unknown; identical to SEQ ID NO: 19705
  misc_feature (1)..( 3003): 2750-1469P.txt file - cDNA_ID_3091206; gDNA_ID_2926177; Annot_ID_199942

SEQ ID NO: 35900 - DNA, 3000 bp, Unknown; identical to SEQ ID NO: 4348
  misc_feature (1)..( 3000): 2750-1469P.txt file - cDNA_ID_3091218; gDNA_ID_2926177; Annot_ID_199914

SEQ ID NO: 35901 - DNA, 3000 bp, Unknown; identical to SEQ ID NO: 3257
  misc_feature (1)..( 3000): 2750-1469P.txt file - cDNA_ID_3091269; gDNA_ID_2926178; Annot_ID_200018

SEQ ID NO: 35902 - DNA, 3000 bp, Unknown; identical to SEQ ID NO: 3256
  misc_feature (1)..( 3000): 2750-1469P.txt file - cDNA_ID_3091277; gDNA_ID_1620635; Annot_ID_162859

SEQ ID NO: 35903 - DNA, 3000 bp, Unknown; identical to SEQ ID NO: 3256
  misc_feature (1)..( 3000): 2750-1469P.txt file - cDNA_ID_3091277; gDNA_ID_2926178; Annot_ID_200013

SEQ ID NO: 35904 - DNA, 3000 bp, Unknown
  misc_feature (1)..( 3000): 2750-1469P.txt file - cDNA_ID_3091281; gDNA_ID_1620635; Annot_ID_162855
tccttggctcacatcatgtatgtatgtatatgcagggatatggccagagtcaaaggcagtcaacgatcaaggccttggaccaatacctaagcgttggagaggaaaatgtgaacctggagaacagtttaacgccacaatacattgcaacaacaagctaataggagctaggtactatctaaacggtgtagtcgccgcaattggaggaaaattcaacagaacaatcatccaagatttccaatccaccagagatgcaaacggtcacggtacacatacagccacaatagctggtggctcatttgtccccaacgtgagctactttggtttagcccaaggtactgatatatatatatatatatatattatttcaccacagaagttagcttaagagtcaaggtactagttttataagacaatagtttgtttcctttttaaccgatgtgtgattcttatcaggtcttgtccgaggtggtgctcctcgagcccgaatagcctcgtacaaggcgtgttggaacgtaatgagagatgaaggaggaggaactgatggaagatgcacatctgctgatatgtggaaggcttttgatgatgctatacatgatggggttgatgttttgtcggtttctatcgggggaggtattcccgaggattcggaagtcgataagctcgattatatcgcggcttttcacgcggtggctaaagggattacggttgtggctgctgcgggtaacgaagggcctggtgctcacactgttgacaatgttgctccttggcttttgactgttgctgcaactactcttgaccggtcttttcctacaaagatcacacttgggaataatcaaaccctcttcgtacgttttactagttagagaaaacagttcaaagtttggagttcttttttgagtaacttgttgttcttttgttcgttcgtttttaggctgaatctctgttcactggaccggagatttcaaccggtttagctttcttggactcagacagtgatgacactgttgatgtgaaggggaaaacagttcttgttttcgatagtgcaactccaattgcagggaaaggtgtagcagcagtgatcctagcccaaaagcctgatgatcttctttctcgatgcaatggtgtaccatgcatttttccagattacgagtttggaactgagattttaaaatacatacgtaccaccaggtctctatcttgaaacaaaaacactctcttaactacacaagtgcatgtatatatatacatcattgatcgtcgtgccaacagatctcccacggtgagaattactgcagctactacactaactggtcagcctgcaacaactaaggttgctgcattctcatgtagagggcctaattcggtttcaccagccattctcaaggttattaagccattgcgtctcttatcaatgtttacttcaaaaggtttaacgtttctgagtaaactttgctaaatatgtggtcatgttttactctgtagcctgatatagcagctccgggtgtgagcatactcgcggcaataagtccgcttaatccagaagaacagaacggatttggacttctttcagggacatcaatgtcaactcctgttgtttctggaataatagctctcctaaaatctcttcaccctaagtggtctcctgctgcagtgagatcagctttggtcacaacaggttcctgcttcttcttattcttcttttccataaacaaaccgttacagactatcatctgtttcttttgtagcttggaggacaagtccatctggagaaccaatctttgctgaaggatcaaacaagaagcttgcagatccatttgactatggaggaggacttgtaaaccctgaaaaagctgctaaaccaggacttgtctacgatatggggattgtggattacatcaagtatatgtgttctgcgggttacaacgactcttcaatctctcgtgtgctcggtaaaaagactaattgcccaattcctaagccatcaatgcttgatatcaacttaccttcaatcacaattccaaatcttgagaaagaagtcacactcacaagaactgtaaccaatgttggacccatcaagtcagtctatagagctgtgatcgagtctcctctcggtataactctcaccgtgaacccaaccacactcgtgtttaagtctgcagctaagagagtactcactttctcggttaaggctaaaacaagtcacaaagtcaacactggctacttctttggaagcttaacatggagtgatggtgttcatgatgttataatccctgtctctgttaagacaacgatttcgatgtaataaaaagagccatatgatgctcattgtgtttgttcttatgtaatttgttgcaaatctaagtctaaaatgtcaaatcaagattcaagatcatcataataaaagatcaaatcacaaataccttagaatctcttataaaagatcatgatcataacctatagctgtaacattacatacaaatatataatcatcatattgactatatattataaagatgtgatattttagtgtacacataaatgcaaaaaatggaactggtttgctctcctgtgatcctatatatattaaagttcagaatataatctgttttactaaaatgagtaattcagacaatcatgatctaccaacttatacagatacctaatctactctattagttagaaatgattgatatcctcttatactcagctgaaattaaagtaggtacactattagtatatctataataagaaagacatcaataataagaaagacgacaattgtaagagttaaaactgagccctcttgagatccatggcgggaaataacgttacacaagagataaaaccggtatgattcagaattaccataccgatattgagccgaataaaccaataattgaattcgaatcttacgcaatagttcactccctaaagacacactatgtatataataaagcttctcttcgacagaatcacacacacttctcactgcataaaatg

SEQ ID NO: 35905 - DNA, 3000 bp, Unknown; identical to SEQ ID NO: 35904
  misc_feature (1)..( 3000): 2750-1469P.txt file - cDNA_ID_3091281; gDNA_ID_2926178; Annot_ID_200009

SEQ ID NO: 35906 - DNA, 3003 bp, Unknown
  misc_feature (1)..( 3003): 2750-1469P.txt file - cDNA_ID_3091285; gDNA_ID_2926178; Annot_ID_200003
aattgagggagcatgagaccgccattaatggagtcacaaacgtggtcgtattataaaaatggcgacgcgtttaccacgtgagagagacgctacgattgcataaaaagaagtcggcattggtatacatgtgtctctctgattcgtccacacggttttgtcgcatttgttggagaaaagataagtcttttaaacagaggtcggtatggtatgtatttggtttcaaggattcatgaaattgatatatgattgtgatgtaagttattgattttttcttcattcattacacgtcatgggctgagagaagaaatcaaaagagaggatttgtatctttgagcccaaaaaaaaaaggcaccatcttggaccattggtttggttggaccaaataatataatgatgtggtgaaaagttttttagcggttatgaaaatcaaaataaaaaaaaaaggcggtaagaaaaatggcaatgcagtagaaatggtggttcaaaaatggttttagaagtgagatcatctttatgctcatttatcttgggtttgttcgggctctaacaccatgtacaattttaatcatttgaaaataagtggaaagatctatacatttcatatactttatatacttatgttgaattagctccacatcttattggtaatggtttgacagtttgaattatagcagaaataaaaataaatatatagatttaagaaatataattgctccaaatgaatgacatatagttgaatgattggaaaaataggtgcaaatggttgcctaaaattaagaagttgaaagagttgaatgagcatttatctattttttttaccatttaagatgaataagttggaaaaatgattcaaccctttcaacttaaaaagttggaaaaataaactaattataaagaaattttttcaacttgtatatcttctatttcacagagaaatgagttgaataatattcaacttttatttttcaactcaaaatttccaattatttcatctctatgcaaccattttcagcaaaaccaagttgaacattattcaactcattcatctacaaaagagtagatgaaatggttgaacaagtttcttttataatttgttcatttttcttttttttttgttgaatgagttgaatcaattttccaacctattcatttcaaatcgtaaaaataaaataaatagttattcaacattttcaaccttttattttaaaacaaccaattcatctaaataattttattactttataacaatcgcttgttgaggagatgacttaatcacttttcattttctcttcgtgaattcgttttactaagtttccgttactttcaaatgtactcaaaacaaaaaaaacaatcgcttgttactataataaaagatcgatgaaacaagattctaatgttaagcattttgaaatgttacgaaaccgtacaaacaatttatgtgattaacgtcaaatgcataaaaacgcaaacacaaaaaatagcagttaaatcttataaagatatttcataaaatattacacactcatgaaaggtcttaaaagcttaattagttctcattatcaaagaaaaaaataaaagcttaattagttcttaccgaaaaaaacaaagcttaatgttgatgagtgaacgagtctttccacgtcgtccacactgtcctcgtcgtcctcgttgtctacgtcgtcttcgtggtccaggtcgtcgtaattggaagtggcgagagaaaatccgatttggcggtgcccaaaatcaaatatcgtatgatatctctgagtaaaggcattccaagaatattgtaaacaaattaatatataaatttaattgataagtaatttacgaaacaaaacgtacttaatgtgacgaaatggagagatagtcctccgaagtgaaataaaaagcacatcgggcaaataatttgctaccgctgctgccactttggcatttgtaaatatcatcctttccatatgactagaaaatagaaaacgaaaagagaaagtattaagttaacataaaacaacaaataataataaaatgttgtaaataaaacttacacgtctaccacaaatttgagagtaatctctcgggtaatgagatagaaaaataaatataaatgataaattgcattagtaaatagtatttgatacaaaataaaatttaaacattaaatcctttactaaccgggggaccgtatatatacggacagctcatatgaattaaagttttatgggtgagtgatcctaaaaagaaaaagaagatgtaaagtttatgtactgaaaacacacatatatagatagactcattattgtaattaattattacatgatatccgttgacttggatggaatgcatcctaatgattcatctattaccttcaatgaggttgaagtatatatgctcaacgacaaaatgaatctgatcaacatcccgaacgattgtttctcctcccaaattatagctgtcaccataatgaacttattcatagtaattctgtagccacaccgacaatatatttcgatgtaaaaatctttgatccatcatatttgtcctaaaattatttctaatttatttcttatttttatttgttatctaaatatacctaatctcatagctctattaatattttgacgttaaatcattgtataataaataaattgatgtacgtaacatgttcaaatatatacatttattttcagtagacttttagacacacaatttatatgattagagtcgaatgcataaaatctcaaacgcgaaaaataagcggttaaacttttaaacacaaaataatataaaaattgagcggttaaatcccaattgcggcggttgaatagtaccgatcaaaccaaagattttggaatttgacggaacaaataaaccgtggagcattggtcaataacaacactctttactctttcttccgtttgctcgaaccatctagtctaagagaaagaaaaaatactaaagagaaagaagaagaggacttgaatacggaagcttgagagaatg

SEQ ID NO: 35907 - DNA, 3003 bp, Unknown; identical to SEQ ID NO: 33576
  misc_feature (1)..( 3003): 2750-1469P.txt file - cDNA_ID_3091289; gDNA_ID_2926178; Annot_ID_199999

SEQ ID NO: 35908 - DNA, 3003 bp, Unknown; identical to SEQ ID NO: 19026
  misc_feature (1)..( 3003): 2750-1469P.txt file - cDNA_ID_3091303; gDNA_ID_1620640; Annot_ID_163020

SEQ ID NO: 35909 - DNA, 3003 bp, Unknown; identical to SEQ ID NO: 19026
  misc_feature (1)..( 3003): 2750-1469P.txt file - cDNA_ID_3091303; gDNA_ID_2926178; Annot_ID_199991

SEQ ID NO: 35910 - DNA, 3003 bp, Unknown; identical to SEQ ID NO: 19030
  misc_feature (1)..( 3003): 2750-1469P.txt file - cDNA_ID_3091307; gDNA_ID_2926178; Annot_ID_199990

SEQ ID NO: 35911 - DNA, 3000 bp, Unknown; identical to SEQ ID NO: 21148
  misc_feature (1)..( 3000): 2750-1469P.txt file - cDNA_ID_3091311; gDNA_ID_2926178; Annot_ID_199988

SEQ ID NO: 35912 - DNA, 3000 bp, Unknown; identical to SEQ ID NO: 4800
  misc_feature (1)..( 3000): 2750-1469P.txt file - cDNA_ID_3091322; gDNA_ID_1620733; Annot_ID_49430

SEQ ID NO: 35913 - DNA, 3000 bp, Unknown; identical to SEQ ID NO: 4800
  misc_feature (1)..( 3000): 2750-1469P.txt file - cDNA_ID_3091322; gDNA_ID_1620733; Annot_ID_166149

SEQ ID NO: 35914 - DNA, 3000 bp, Unknown; identical to SEQ ID NO: 4800
  misc_feature (1)..( 3000): 2750-1469P.txt file - cDNA_ID_3091322; gDNA_ID_2926179; Annot_ID_140458

SEQ ID NO: 35915 - DNA, 3000 bp, Unknown; identical to SEQ ID NO: 4800
  misc_feature (1)..( 3000): 2750-1469P.txt file - cDNA_ID_3091322; gDNA_ID_2926179; Annot_ID_200060

SEQ ID NO: 35916 - DNA, 3000 bp, Unknown; identical to SEQ ID NO: 8678
  misc_feature (1)..( 3000): 2750-1469P.txt file - cDNA_ID_3091351; gDNA_ID_1971851; Annot_ID_58404

SEQ ID NO: 35917 - DNA, 3000 bp, Unknown; identical to SEQ ID NO: 8678
  misc_feature (1)..( 3000): 2750-1469P.txt file - cDNA_ID_3091351; gDNA_ID_1971851; Annot_ID_176383

SEQ ID NO: 35918 - DNA, 3000 bp, Unknown; identical to SEQ ID NO: 8678
  misc_feature (1)..( 3000): 2750-1469P.txt file - cDNA_ID_3091351; gDNA_ID_2926179; Annot_ID_140489

SEQ ID NO: 35919 - DNA, 3000 bp, Unknown; identical to SEQ ID NO: 8678
  misc_feature (1)..( 3000): 2750-1469P.txt file - cDNA_ID_3091351; gDNA_ID_2926179; Annot_ID_200103

SEQ ID NO: 35920 - DNA, 3000 bp, Unknown
  misc_feature (1)..( 3000): 2750-1469P.txt file - cDNA_ID_3091359; gDNA_ID_2926179; Annot_ID_200096
ccggcgatgaggtctggctccggcgaagtcttgccgacttgcccatgaagtgtaaatttgggcagagagagatatagagagagacagtggaacatgggttttgttgttttggttttgattctttcaactttaaaaactgattagactaaagtggttccactttcgattaaaagcaactttttcacgtatacgaaagttgttcattaattccgtaaaaaaaaatcaattttctcttcttaatctattaaattcgctaaaagattattcggaaataattctccatcagatcacattttctcaaacatcatgaaaaagaaaaatcctctgataatctcaaacgattacagtataacataaagcatattaacaatttaataattaaaaaaaaaaaaaaaaaaaaaaaaaaaaaaaaaaaatttaataattaatgctagttttgtttctggctaagcacacgcgcataagagaacacgctttagaattaacaaggagtgtattacacgcgcttggttttcgcgtaaaagccttgtttagcgtattattatttcataagttcgatttcctaattcctaatccgtttcctttttattccgatcaaagcagcgaaaaaagcatcggagatatgtcgtctaaggacaagaaactatcgaagccaacaagtggtcgtactggtggtatccgtacactttccgatctgaaccgaagatcagaacctgattccgatagtgactccgatggacctcaagaatacttcaccggtggcgaaaaaaggttcgtacttaaaaaacccttaaatcactagttttactatgatctgcttaattatgatgtgttaactaaagtttttgatgattcaactataatggtcttaggccaattaagtgttttaatcaaaatcattactttttgagatttgtgtagtttagtgagtaatttattaatcatcaattatctatttgatgattagtatggttggtaaattgttggatctttgttttgtgttttatgtgtgaagtggtatgcttgttcaagatcctacaaaagaaccaaaacacgatgatgttgatgagatatttaatcaagcaagacagctaggagctgtggaaggacctcttgagcatccttcgagttctagaagctttacaggaacaggaagattgctttctggagaaagtgtgccaacggctcttcaacagcctgagcctgtgattcacaatattattttctggtctaatggattcactgtagatgatggacctttgaggaagttggatgatccagagaatgcttcttttcttgatgtgagtgtgaattttattttggttaatgcttatgaattggcttatgaatattgtgttgaactgtcttgtattttcgtgtattgcagagcattcgaaagtctgaatgtccgaaagagcttgagcctgttgataaaagagctcctgtacatgttaatcttatgagaagagatgagaagtgccctgtaagttcctattgggatacactaacttgtgcttgatccatcttatgactatggtaccaacacttataacatctttgtttcttcttcttttgtaggagaaagaaaagcttaaggtttcatttcaaggagttggaaggactctaggtggtgcaagctcatcaacagcttcaagccaaagtaacctaactgatgtagcagcggttcaatcaccgttacagagccttgtagtagatgaaactcttccatccacatcgatccagcttagactcgcggatgggacacgcatggtagcaaagttcaacaaccatcacacggttaacgacattcgtggtttcattgagttttctcgaccagggaatccaaacaactatacccttcaggtcatggggttcccaccaaagccacttactgacccttctcagaccattgaacaagccggtctagcaagttctgtagtcattcagaaattctagaaaagtttcgtttctctttttttgtactagagagagatttcaacaacttggaattgtactgaaaatattcaatcggcttattgttgtggcaagagaaataaaaacatcatatggtttctatcttgtttcgtttcaatgtgtttactttcatacttgttacctatatgagagtgaaaagtttgagttctaacattacttcaaatttcacatgaacaattatttgattttctttgttttattaaagttcaatctaaacaattagtgtatgacagtttggtaatatcaaaatatcattgaacttttgattaaatattcatgttattgctgtgccaaactggctattttggacgtacgtatatccatgattaatttagtttcattcactaatgttttgattagtttcatcaaataccaaaactagtgattattgtatcaaacaattagtaattttcattagccgaaagattaaacacgcgtgctaccattctagatttaaatataaacattgatcttgccagtaaatggctcaaatacatgataacataaataaaaaaaaaacttgaataaccatgaaaattattgtactgtttcacctataaacttttacttttacttgctcaaaatattcaatcaaagttcaaaacgacagtaaaaatttgaaattcgagccacttttttttcccattttacggtaaatgtggcaggaaaaagtaacaatatttccaaaattgttataagagaaataaaataaaagcaaagggcaaaaaaatgaattgggctttgtgaacagtaaaactcccaaatttgcaaatgactcatcttcttcacctggagagaatctagggttccagatttactcttcgtcttcctctcttcgcttcttccccactgggattttccttttcttctccttttttctctacccatcgatctacacatcctgatcttcttagaagccccaatccttatacattccgggaacaaaaaacctagctttttttttattccggcttaaccagttttcgaaaaaccctagcttccatg

SEQ ID NO: 35921 - DNA, 3003 bp, Unknown
  misc_feature (1)..( 3003): 2750-1469P.txt file - cDNA_ID_3091362; gDNA_ID_1620646; Annot_ID_47613
attcgtaaagatgatgatatatagaaagagcttttacagtagcaagtacaaataattgataaccaaatgggtagaatttaactcgaagacgtggcagagaaggtgtactataaggaatttaagaacacaagtagaggattaacaaaagaagaaaaggctttggaaaaagcaaaacaaaactgatagcgaaagccaaatagcccaaaaagaacgcgagtcaaatgttgcctcccaaaatttactatttttttactctcatattaaaatcactctaaatatacatagaaaattgttctccaaaacattaaaatatgttgaaaaaataaaatgaaagcaaattccaaactcccaccgacaccaacacaaacacacaagtcagtaagtcagattcaattatcaaatatggtcaagaaattcaacaatctcatatcaatcacacaagataaagtataaaaagacttatataaatgattgaatcagtgatattaactactattaacaatcttgtcttatgagttaaatgaagtcttaaatacgttttaccaattaatgtgaatgaatctacggagaaacagaggtttttagtataataatcataaaataaacctgaattaaaatattatatactaaaaaatagtttctctctcttcataactcagagcaagcttggaatcaatctctcaatctctcactctctcactacctatccttttctttaatggcgatgtctctaactactactatccccaacacacactgttactcttcttcttcttctctgtcactgtctattctctcttttggacctttcatggctatgtttctctgcaatggaagtccaagctcgtgatcaccaacaccgacacgctaatggctattggagatagagctatgtttactgttttgcttctattcattgcttcgatctctggattctctgttgttcgttgtgttactgatccatctgatggtaaagtattcagctttatgagttttcttcttctctgcttttaacctcattgttttgattgatcatctatgtgatttgagagtgaagggtttttaaaagttgattactttagatttagaagatgaaacccttttgcattaatgtagatttgatgatttttgacaccgtctgttttcctgagaacccgccggaaaataatatttctgctttacttacttttttagctcaaaaaggaaagttgtaaactttatgaaagatttttcttctttcttgatagatcctttgatgtgtttttctgacttgtgagctgttttcttctttctggtattattgcagttcaagcccttcaagttttgtatacttcactaaatagtccttcacagctaaccaattggaaaaatggtggtggtgatccatgtggagagtcatggaaagggattacttgtgagggctctgcagttgtcactatgtaaagaatcagattttgagtattatttttgttctttccacttgcattgatttgtgattgtcttataatgttgttgttttctgttgttatgattgtaacagagatatatcggatttaggagtctctggcactcttggatacttgctctcagaccttaagtcactcagaaaattgtattgtttttggaattttccttctgtttttgtttgtttgatctttctgctctttggattttggttcaataactttggtctctttcgttttggttacagggatgttagtggtaacagcatccatgatacacttccatatcagttgccaccgaatctcacaagcctgtaatgctgtgtttgcttagctttgttgttatagtatttactctcagttttcaatttgaaactaacagtttaaagaaaatgtaatgcagaaatcttgcgagaaacaacctaagtggtaaccttccatactccatatccgccatgggttctctttcgtatatgtgagtttgcctttctagaaccatacactgtgagattagcatgtttagttttcttatgtattatagtttgaaatgttattgtgtaggaatgtaagtggtaattcacttacaatgtcaataggagatatctttgctgatcataagtcactggcaaccttgtaagatcgcttacctatcactttagcatagtcatatcacttccagtttccattgatctattgtttctttattcagggacctttctcataacaacttcagtggcgatcttcctagttccttaagcacagtgtccacactttccgttctgtaagtgctttcaaacaatctttagtggaacaatacttaagaagtgcgaaaggaaattccatgataatatctgattatcttcatttgtgacagttatgttcagaacaatcaattgacaggttccatcgatgttctctcggggttgcctttgaaaactttgtaagtttcattgcaagtagaaaaagaaacgaatgtatatattcctccatcacacttaccgtctatgttttcttggcagaaatgttgcaaacaatcatttcaatggatccatacctaaggagcttagttctattcagaccttaatgtaagttttcaataacaatctgttaatttcaatttaaactgtaagtttatgtctttgacattcctaaatgaaacagatatgatggtaattcctttgataacgtccctgcctctcctcagccagaaagacctggcaaaaaagagacaccttctggttctaagaaacccaaaattggttctgaagagaaatcttcagactctggcaagggtttgtctggtggagtagtcactggtatagtgttcggttctctatttgttgctggtattatagcacttgttctttacttgtgccttcacaagaaaaaacggaaagttagaggaagtacaagagcttcccaaagaagtcttccgcttagtggaacacctgaggtgcaggagcagagggtaaaaagtgtagcatccgttgcagacttgaagtcttcacctgcagaaaaagtaacggttgatcgcgttatg

SEQ ID NO: 35922 - DNA, 3003 bp, Unknown; identical to SEQ ID NO: 35921
  misc_feature (1)..( 3003): 2750-1469P.txt file - cDNA_ID_3091362; gDNA_ID_2926179; Annot_ID_140484

SEQ ID NO: 35923 - DNA, 3003 bp, Unknown; identical to SEQ ID NO: 33603
  misc_feature (1)..( 3003): 2750-1469P.txt file - cDNA_ID_3091362; gDNA_ID_2926179; Annot_ID_200095

SEQ ID NO: 35924 - DNA, 3000 bp, Unknown; identical to SEQ ID NO: 3441
  misc_feature (1)..( 3000): 2750-1469P.txt file - cDNA_ID_3091366; gDNA_ID_2926179; Annot_ID_200094

SEQ ID NO: 35925 - DNA, 3000 bp, Unknown; identical to SEQ ID NO: 33608
  misc_feature (1)..( 3000): 2750-1469P.txt file - cDNA_ID_3091399; gDNA_ID_1620733; Annot_ID_166156

SEQ ID NO: 35926 - DNA, 3000 bp, Unknown; identical to SEQ ID NO: 33608
  misc_feature (1)..( 3000): 2750-1469P.txt file - cDNA_ID_3091399; gDNA_ID_2926179; Annot_ID_200067

SEQ ID NO: 35927 - DNA, 3000 bp, Unknown; identical to SEQ ID NO: 4311
  misc_feature (1)..( 3000): 2750-1469P.txt file - cDNA_ID_3091429; gDNA_ID_1620698; Annot_ID_164964

SEQ ID NO: 35928 - DNA, 3000 bp, Unknown; identical to SEQ ID NO: 4311
  misc_feature (1)..( 3000): 2750-1469P.txt file - cDNA_ID_3091429; gDNA_ID_2926180; Annot_ID_200212

SEQ ID NO: 35929 - DNA, 3000 bp, Unknown; identical to SEQ ID NO: 4312
  misc_feature (1)..( 3000): 2750-1469P.txt file - cDNA_ID_3091433; gDNA_ID_2926180; Annot_ID_200211

SEQ ID NO: 35930 - DNA, 3000 bp, Unknown; identical to SEQ ID NO: 31763
  misc_feature (1)..( 3000): 2750-1469P.txt file - cDNA_ID_3091445; gDNA_ID_2926180; Annot_ID_200187

SEQ ID NO: 35931 - DNA, 3000 bp, Unknown; identical to SEQ ID NO: 8516
  misc_feature (1)..( 3000): 2750-1469P.txt file - cDNA_ID_3091451; gDNA_ID_1971814; Annot_ID_175893

SEQ ID NO: 35932 - DNA, 3000 bp, Unknown; identical to SEQ ID NO: 8516
  misc_feature (1)..( 3000): 2750-1469P.txt file - cDNA_ID_3091451; gDNA_ID_2926180; Annot_ID_200184

SEQ ID NO: 35933 - DNA, 3000 bp, Unknown
  misc_feature (1)..( 3000): 2750-1469P.txt file - cDNA_ID_3091455; gDNA_ID_2926180; Annot_ID_200180
aggagcttgggcctttgtgaagacaaggaagacgaggttaatggtgaggaagagagctatagcgtttttcatcatgttctttgaagccatgttttgaaaatgttaattatgctctctctcttttgtttagttctgagaggagtattgagtatttagtttgggaggtgagagtttgtatttatagttgttagaacatttggttagattactgtttgatatttcttttggatgaaagtttacaaaaataaaaaataatgccaacttttcggaaaattaatttgaatttcgcattttagccaaaagtaaaaaaagaagaagaagatactatataatcaactctcaagatatttaaaccttatctactcatctagagaagaggttaggcaaggaacaatttgtcaatgcccaaaacaatacaaactctatcaaagttgttattcttgctgaacgcacactattagtattaatttaacaaatgtcttacaatagagttttggtgaccaaggtgtaatttgaaaatttgccaagtctacgaataaaaggtttggcgatgaaattaatgtaaaacgtctacccaaataaagtcaaattccacattccataacgtacttaatcggtcatcaaaatttgcaatagaattagtgatttactcatattcatatccaaagttctattgaatatgaataaatttactcatatgagtcatatccaaagtcccatttagtcgataatttagtaaatttctataatatatatggatgaacatctcagtattattatttttaattctgattagttaaaaattgttatagatgctaactgtctactcttattgtgattgaacaaaataaacaattaacactggccaacgtcaattcttcttcctttgttttttttcataactcagggttttgttgacgaatgagttttgttgaattaaaacatttattccctacgatactacccctaatcaggactttataaaggatacaatttacattcatctctttaaaatctttgttgaactcattgctgtaaatctgctaaaaaaagctcttagcatgggattattcagtttcttacttacatttaatgtgggaagcaatctctaggaagaggtatatgttctaattgatattaccaatcaaaattgctccagagacaacctagtggaaacatgtattttttgccttttccacttctctcattgctccagagaatgtaattctcggtgactagctttttgagctcattaattatgacacttggtagatgctagcatgtagagcaattttcgacgttcggctggtacagtgatgtttgtttgtggtaggcatttggttcaatcaaacatgaaaaagatagtaatagctagaacagccgagcatgtgaaacacaatccaagattcatttatttcaaacataacataaagacataattacttttttttttaaacacatatagttgcaccatgaaccgatattacggaacttgtatacttattttagtgatcttattacatataagattctgcatattgtttacttataaaaggcagttgaaaccaggttgtaccggcaaacgacagagaccaaggagcccattaagcctcaaattgaggttgacggtgatgccgagaaggttaagaatattgagtcttacagcctcgcatgcacatacagacacaagaggagtattattaagaccagctaagatagaacaacatcgggccacgttgctggtggtgagggagatgagaccaagtacgttgacgcaaatccccaagtcagaccggttaagaggacacacaggttgggctgaggtgaaacccaagaagacgaggttgaaggtgaggaagagagccatgattgttgtcatattctttgaagccatattgtgtaaatgctaaataagaatttgatgattattgtagttggagagattgagatgtgtgagttatattagtcttggaggtgagggtttgtatttatactgtttagaagctttagttggtttacgtagaatattgtgactattataagttctctaacgtaaagtcattttttttttttttgataaattctaacaaaaagttaattgacataattgcaagtacggttcaaacgtagaatagcgaaatcgtggaaaatgaggcacaccaaaagagatatttctcaaaaattctcaaaaaacatttggttacagatcgtatttattttttacttatacaggattgtgaaattgattaattaatgaaaaatatgaattaataaaaattgtgatcagaaaaaaagacatgcggaatcacaaattcattcattctgttaattgagtcagattgatacgaaatgtttgctcgcatcattaaatttactagccgaaccttttcctctagaatgtctgaaactgcaacttgggccacatgtatgtagagggaccaaaagctacaactgtggctaggtatatcattatttatatatgcttaggtctacaaaattatcaatatatccggttccttgaactagaatccgcattagttgttcattctttttggttaagggtgatccttatagagccaatatatctggttcagctaaattttggtttggttttagatcaacttttgttttgtttctggttcgttcgttctgaaatgcaaattatctctaaccaacactgttattgatatgataaaatattactgacatatttttaaactctaaagaatatcttatattctttttttttttaccgaaaaccaaaatttatttctaggtttgttttgatgaaattcagttttactttaataatttcaactaactctacttatgttctaatgcatcttcatgttcgagtagtttctaagaaatctacatgttttcattctctttctcattttaactgagttcgacatctcaagctacatgcaaaagtactaaattatacaccaacaaacaaatacgtgcatcctagttgccgaatatgaaacaaagcacatg

SEQ ID NO: 35934 - DNA, 3003 bp, Unknown
  misc_feature (1)..( 3003): 2750-1469P.txt file - cDNA_ID_3091458; gDNA_ID_1971814; Annot_ID_175889
tcaccaccatcaaaatttgtatataaaagtgaaaatgtataaatttagcctttgatgtcattgatgaagttatcaccaccatcaacttcattgatgatttttttaccaaaaaaaaaaaaaaatcattgatgatgttttgtttcattagtattggaagaaagtaaaaaagtttgaagcgctttaagatattgtacttatatttacaagtgactttatcatctttggtaaaaaaactaccgatttcgattagatgaatataatacatgtacaagtaaaacgaccgcctgaagtcaagggtcttgtagcatgggtaaatgggtgggaaatgttccgtgaattagtcatatagatgtttaaggatatccgattgagacaatctaagttaccttggcaactacgtctctaaagttaggctctatattgaacatatatgtaattatcaactatctctagttagacgttatagagaacccttcaaaatgggccatataaattttgtggccacatgaaaacagttttaaatggtgatctttagctccattacaaattttttagctaatccatggctctttagcaacggatttgctacagaacaaaaaaaaaaaccatgacatcaagccaaaaaccaaaaacgtggtcatatggcatgggttataagagctacacacgtcaaatcgccatattttcatagagcctaagttaggcctggttaaaaaaacgtacttgttaagcttgtagggttttcaaataatcacaagattgaatatgcactgcaaatcggaccatgcactgaaaatagatatcattatctttcttcttttttttttttttggaccagatgcatttactttatgaaatgaatacttcttttattatttttggaaaatagaactaaacaccatgatgcctatagtggcttctgctggttttgagctagtggtcactggaccccgaaaaattgaagtaaaaccaagttttttatgaatgaattcagagtatggaatcacatacttctgaccatcactttacaagacaatgacgagtaacctcatataaacaataaatatgtataattaattaactatatatagattttggataacacttctatatattgatctttttattgggttattatttgtaaaaatgttttaattttgttattaagtaatagtttttgttagttttgatgatttttatgtcgaataaacctgtaaattaataaaataatacgttgtcgaaaatgtatatatgtttggatcatatttcgcaattttctttttcatttcaacatatcatatgggagacaggaagagacacaaagtgttatactttatttaatattattcttcatagacattaatagatatgcttaacaactttttagtaagcatcgatagtccttataattacgttctaatcaacaacgaaacacacaccaacactgtaaaacattaatagataaacccatacttttggtaccagcaaacttatagtgcaaggaaacaccggatagggctcttatttaggggaattaagtagtagttactgtggtggtggacactggaaaccgataggaaaaaccctattgcaagcaaaaaagatttctctaacggccacatcaataccgaaaaccaacggaatcggcctgaagataaagcagagacaatcggttacttgaacattagtgaggccattgagggcagtgcaacactgtcgtgctctggggtcgccagctgtaacattggctaggccaaggacgttggcacatacgcctagttgcaatgggtttctgggacatgagccaaagttgttggtcggtgtaggcgagcttaagaggtttgcttctgcgaggctgatgaggaggatgatgatgagggaaatggtggttgagctctttgaggccatttttttattttattttgtggatatgaaagtgtggatgctttcgatgatgttgtgtagtatgtatttatagagccaagagatgccttggaatcacaaacacttgtgtatcatttattttttttgcctaacattactcttttttaattaatgaggttttagagatttaggcaagttgttggttctctctcttatgtacaactttacgctcaaaatgtctagtttggcttccaaggagttttttcttttgttttcagatttgttttttctttctttcatatattcaagagttcaacacaaattataaccagtatatacggtttaaatctaaggtcatgaatgtatgcatttttttatgaattgaatggatgtaattttggtttttttaacacttgatatatgaaccaacttgaaattacatatttacagaagtagatatagaccatcaattgatatagatgttacaaggaacacaatacacacaataaacattaataaataatttttcacaagtgcgtcttcaatactaattttatttcccggatttcatgtcttctaaataattaaaatttatcttccacattcagcctccaataaaattctatgtcttcgtaatctaacgaaatgaaaacttctaaaatctccatccccgtctttgtatggaacaataacttgatgtgtcaattgaaattctatgttctacttatagaaaccgatgccatgcatgatctagttttagaaggaaaatctttgattactgagggttctttcattgtctaagaatgaatatacttgaggtttaccgaagcggggatcaaacagaatgcaatcattttgtttgagatttgaatttacgtatgtaagttcttcaattacttttttttccagtaatatttgtaaactccaacgtgattcaaaatctaaaataaagacaatcaacactcccgtacaaactttattttattttttattacattattggaacaaagtatatatttagaaacaaaagaaaatcacggttaagtgtatagtaagtaggttttttagtttattgtggggaaaggaggtggtcatgggcaagtgaagcctgggggaatg

SEQ ID NO: 35935 - DNA, 3003 bp, Unknown; identical to SEQ ID NO: 35934
  misc_feature (1)..( 3003): 2750-1469P.txt file - cDNA_ID_3091458; gDNA_ID_2926180; Annot_ID_200179

SEQ ID NO: 35936 - DNA, 3000 bp, Unknown; identical to SEQ ID NO: 8522
  misc_feature (1)..( 3000): 2750-1469P.txt file - cDNA_ID_3091472; gDNA_ID_1971814; Annot_ID_175879

SEQ ID NO: 35937 - DNA, 3000 bp, Unknown; identical to SEQ ID NO: 8522
  misc_feature (1)..( 3000): 2750-1469P.txt file - cDNA_ID_3091472; gDNA_ID_2926180; Annot_ID_200168

SEQ ID NO: 35938 - DNA, 3003 bp, Unknown
  misc_feature (1)..( 3003): 2750-1469P.txt file - cDNA_ID_3091476; gDNA_ID_1971814; Annot_ID_175878
gtttagctatagacgatttacgttcataacattgcgttctctaaactctagtagatcctcttcatcaacaatatttgcgactagatttacttttgattgagattgatagtttcaagtcatatcaaattgcaaaagaccatactgataagagttttacatataaatttcagtcgattacatatagaagaacactatcttattatttccttacgacatcatactacgtacatagggttaagcttattagtactaagatctcacatgggtttaggattttgccatatcctttccccctgccactgctactgttactgtacctgaaatcaaacacagatcaagattttcttctacatgtttcaaactcaaaaacacttgaaatagtcagattttagataaagctcctaagcttgtttatgttaaactatgataagattggaaatctcacatcgaaagaaaagaagatgccaacttaaggaaatactcaagatctttagatccatttcacttaccttaatctaatgtttgggctcagaagtttcccttgctttgctcatagcttcagcttgaatcccttggacagaaaaccatccctgagaatgtaacacaagatgtttaagcatgttgatacggttaaaccctttctacaattcttcatggaaacaaactgcgtaagaaaacactaactagagaagggcataccaccttttagtactctttggcatcatcttctgatctttactgcgctgagcttgagtaggatctcctttacatcccaaaacaaggctactcacgaggatgtctgcggtaaatgaactatcacactctattccggcagttgtaagactctgactttccaaatcaaaccacatgagattcgccgcattgttaatctccagcaaaatcttgctcctgtccttggaacagatcagaggtctaatgaactcaaccgattcaacactctctggtttcggcaccctatacagcttagtccaagatttataatcctcatactctttcaaaacccaaacatcaacatggctatactcgtcgtaacacatcaaacaaacgcagccatctaacacaccaatatccatgttatcttcaatgtaaagctcctgtgggaaactgaggactccaatgtcatcagaggcaagatcatatttgattatcgcgttaaaggcaatgactccctgccttcgaggcaaaatccagtgaagatggttgttaacaaccacaccatagccacgacgaggcaagagatggtaatagtacgaaatccaaagaatctgaaactcgaacataagacacactctcttccacgaattcttcttcaagctgaaaactttgacttcaacagggcaaggaaatttctttttaccttctttaagcttacactgaacaatcctcacaactttaaagtcatcgcccacagaatcataacccaaaccgtaaaacacatactcacgagtgatgtcacgttctgggaaatcaattggctcaattggtaaacggtgaatcttcctagtcgaaggattaaagatcgctagatcaacaggagagttacataaccctatgacaccgttaaatgaaccaaaaacctctgtaaaacctccggcttgtaaaggatgagggatgtcggagacgttctcaggcgagtctagctccaccgtgcgtagaagacgaggtcctcggagtaagatcatgagatgttctcccgtttcgagtctgcgacggagatgagatgagacgaactcgggactgtcgatcaaagagaagcaaggctttgagaggacgcgacactttacgagcgtagttgctctgagacggagaaacatttcgttgatgagatccgtcggacattccgccatttctgttctccggaagaaaattgacgttagagaggaattagggtttcagaggatttgagagatgaattttcgagtccagctctcgagtgttgagacatgagaagtctttagctgtaaatgtttccgggtttttgttggttcgggttgataaaattgatccgaaccgaaattaattcggtttatttctatcgaattctgattcttcggtttaagttcggttcttttggtccaatttggttgtgtctcgatttgatattggattgaggtaagagaccgttaaaagagacttatcaatggcgggagatctggtgcttgacacggcgatctgagactgggttttgatccctctctccgtcgtgtggttcttataggaattctccgagacttcgtttctaagctcatgcgatcttctccgactactttttatctttcacctctcacatcttatttctttgtctacatcaacttcacaaacatcttccctcgaatcacaccattattattaataatttcgttaaacttacaaactagaactaaaaatttttataaattgttgcttgggttccttattttctcttagggtttaatttttttctaattaaaaataatcaaaatcttataggatttgaatgtatttttattcataaaagatgaaaaaacaatccaaacattttatcaagtatttcaaaatgtacgtaaaacattgaactttaaaatcaaacccacatattatcaagccaattcaagtccattaaaaacctcaatctaataacaactccttaatctctctttacgtacatttaagagaaaagtagtactagatctgttacttaactggcatgcatcatcaacattaatcttatgtttgttttgttgttgaatgagatatttcccatccaccaagggtttgttgtatacttgtatgtgcaagagatatgttgactagactatcagaagaattcatacgaaatgtttttgtagatagagtaaagcagatataaatgtgagtgtcaaacaaaacttaacttgtgaaggtatgttattccaaatttcccaattcaacctttacttttgtgtccttacgtctccaaaaaattattaccgtctttggtaacttgataacgtgacgagcatg

SEQ ID NO: 35939 - DNA, 3003 bp, Unknown; identical to SEQ ID NO: 35938
  misc_feature (1)..( 3003): 2750-1469P.txt file - cDNA_ID_3091476; gDNA_ID_2926180; Annot_ID_200167

SEQ ID NO: 35940 - DNA, 3000 bp, Unknown; identical to SEQ ID NO: 8686
  misc_feature (1)..( 3000): 2750-1469P.txt file - cDNA_ID_3091484; gDNA_ID_1971851; Annot_ID_176407

SEQ ID NO: 35941 - DNA, 3000 bp, Unknown; identical to SEQ ID NO: 8686
  misc_feature (1)..( 3000): 2750-1469P.txt file - cDNA_ID_3091484; gDNA_ID_2926180; Annot_ID_200161

SEQ ID NO: 35942 - DNA, 3003 bp, Unknown
  misc_feature (1)..( 3003): 2750-1469P.txt file - cDNA_ID_3091488; gDNA_ID_1971851; Annot_ID_176406
aaagtataacagtcgataaagatgaaagtgatttagtatggccctgaataacttatgtgatttaattcgaccaaaaaattgttccattgaattgtcataatgaagattgaattgttttggacctaatcaaaggaataaacatttgtcatttggacctaatcaaaagaaatatatttgaattgaaccaactcaaaggaaaatgttagttttgttttgaccgaaactaatcgttaattgtcgctgtcgcatatgaaacagagtacttgcaaatgaattaagaaaacgagaagcctgggaatgagtttgtgatattggtttgaaatagtagatgtgaacaataaccattttcagctccagaaattagactgaatggacctcttgttgtatattagaattcataaaacaagatatgtatattacccccaaaaattagagaagtgtttgttctcgatgaaacgttagatcttgtaaaccaaactaagtatttagatctggtagagtaaaccttctaatacactgcaatcaagtcccaagcaaacaagatttgaatttgaaaacacaaatttaaaagcgttctcatcttgcaaagctgaaaaatgaaaatccatagtaagggaaaacaatttcagtttatgtactacacaattatatagagttcacacaattgaccattccttaggttggttatacccaatctcaaaagccgccataacctttgcgcattggaatgtgttcaatcgtcaaaagaaaaattagccctgggcatgtgggtattcgggtcgggtcgggtcgggtcctttcgggttcggatttttcgggttttgaaattttggacccgtatggttatatcaacaatttcgggtcgggttctatccgggttcacttcgggtccggataattcgggtattgcccataagtaaccaaaactatctcgggtttgagtactacttacccaaactttatttaaatatacccaaaaatacataaaagtattcataaaacccgaaaaaaccgcaattataacaagtttttccttaagagaataatataaaacaagaaataaaccttattttgagcttattccataactcatatcattagacaagtcacaaattcaagctattaatgcatatataccatcatatgtatatatatgttcgggtagtaaaaaatacccacgagtatcgcgttcggttcgggtaatacccgatacccttggttatttgaaaacagaacccgatcgggtaattagccggaaccgaagtagaatgggttcgggtatttcgggtcggattcggttcgattcttcgggttcggatattatgcccagacctaaaaaaaatcttaatgtccaaaaggtccatccgcttttgttataatccatgatacagcatcttacttcactaataaaaacactcaagtctcaaattttccaataaattgttttaccgggccacttggtcgtgaaaattccaactgtaaacgcatttgctcataatgtgtttcttctttgtaccaccaatgaagatctaacatgctcggaagagtgctcaatgtttgttaatcatccccaaaatagtcaaacaatccttcatacatataacttgtttagcaatatacattagtaatcatcaataaaaaaaaagaaaaacgaatatagtactatcactatctaacaatgtacagttaaggttaactgtctgaatatggtttcttctctttcgttaagaaacagtctcatgttaaatacatctagtcatagtaaatgattggttggtaaagttcattccctaaatccgtgcgaacttttatgtctctgactctaataagtaccaaaaaccattaaagtaaagtggatttacacgagttttctagttatattattaatccacattaagtaaaaacaggaacaaagaaggatgaccttaaacagaaattactgattcaccaaattttaccgaatcccatgtcgacggaagtgtgcgccgctcttaggtttttaatttcaattttaatattcttttacaatatccaaaattccggcaggtgataagacgggaatacccctcaattggcgaaattcagaaaaggaccaagagagagaagaagacgaaacgatcgtcagagatagagagagagaaaggtcatcacccattctcactcgcagaatatttgttctcatctgattcctccgatctgccatgtctcggcttttctaacgctaagaagtttcacagacgcggcgaaggagagggaggaaggagatagatctctttttccgtcgcgataataataaaaaataaacggtttgtttttcgttctcttgctgttcatgtggatcggatttttgttttcgtgctagattccattagttttttggtttcgggatcgactagtttcgtaatggatctgatttttctattggatctccctagttttgacctgagcaagcgtttgtgaggacttcatgttcttatgacctagattcgttgttttagatgtggaatttggtgtttcactaatcgatttattcgatttctctggtttttggtgatgattgatcaacgtgatgatttgaagatattcattgttcatgtgcattgttgtaaagatgttttcaagtttccagtgtcttgattaatcaatcactgtgttatgggaaaagtttggaatcttaactgctaccattagcgtgttggtttgttaaatcactactttatatacttattatggtatgttgcttgtttctgcaacttaactcttattggttactgttggagccttgagaaacaatcagttaataaagtcaattagcagagataatcttgttctttcttttgcgttatttcatttcatgaataaatcagatgttagtgttgtctttccctcttctgtttggtcttctcagatggtttttgactgttttgtggcttttattttggatctctagtgtctagaggctgttactgaagagttgattcatacggagagaggatagaaatg

SEQ ID NO: 35943 - DNA, 3003 bp, Unknown; identical to SEQ ID NO: 35942
  misc_feature (1)..( 3003): 2750-1469P.txt file - cDNA_ID_3091488; gDNA_ID_2926180; Annot_ID_200160

SEQ ID NO: 35944 - DNA, 3003 bp, Unknown; identical to SEQ ID NO: 24491
  misc_feature (1)..( 3003): 2750-1469P.txt file - cDNA_ID_3091492; gDNA_ID_1971851; Annot_ID_176403

SEQ ID NO: 35945 - DNA, 3003 bp, Unknown; identical to SEQ ID NO: 24491
  misc_feature (1)..( 3003): 2750-1469P.txt file - cDNA_ID_3091492; gDNA_ID_2926180; Annot_ID_200157

SEQ ID NO: 35946 - DNA, 3000 bp, Unknown; identical to SEQ ID NO: 8682
  misc_feature (1)..( 3000): 2750-1469P.txt file - cDNA_ID_3091495; gDNA_ID_2926180; Annot_ID_200155

SEQ ID NO: 35947 - DNA, 3000 bp, Unknown; identical to SEQ ID NO: 8696
  misc_feature (1)..( 3000): 2750-1469P.txt file - cDNA_ID_3091499; gDNA_ID_1971851; Annot_ID_176394

SEQ ID NO: 35948 - DNA, 3000 bp, Unknown; identical to SEQ ID NO: 8696
  misc_feature (1)..( 3000): 2750-1469P.txt file - cDNA_ID_3091499; gDNA_ID_2926180; Annot_ID_200151

SEQ ID NO: 35949 - DNA, 3003 bp, Unknown; identical to SEQ ID NO: 27485
  misc_feature (1)..( 3003): 2750-1469P.txt file - cDNA_ID_3091511; gDNA_ID_1620682; Annot_ID_164483

SEQ ID NO: 35950 - DNA, 3003 bp, Unknown; identical to SEQ ID NO: 27485
  misc_feature (1)..( 3003): 2750-1469P.txt file - cDNA_ID_3091511; gDNA_ID_2926181; Annot_ID_200260

SEQ ID NO: 35951 - DNA, 3000 bp, Unknown; identical to SEQ ID NO: 19784
  misc_feature (1)..( 3000): 2750-1469P.txt file - cDNA_ID_3091543; gDNA_ID_2926182; Annot_ID_200346

SEQ ID NO: 35952 - DNA, 3000 bp, Unknown; identical to SEQ ID NO: 3201
  misc_feature (1)..( 3000): 2750-1469P.txt file - cDNA_ID_3091554; gDNA_ID_2926182; Annot_ID_200335

SEQ ID NO: 35953 - DNA, 3003 bp, Unknown; identical to SEQ ID NO: 18907
  misc_feature (1)..( 3003): 2750-1469P.txt file - cDNA_ID_3091560; gDNA_ID_1620631; Annot_ID_162686

SEQ ID NO: 35954 - DNA, 3003 bp, Unknown; identical to SEQ ID NO: 18907
  misc_feature (1)..( 3003): 2750-1469P.txt file - cDNA_ID_3091560; gDNA_ID_2926182; Annot_ID_200331

SEQ ID NO: 35955 - DNA, 3000 bp, Unknown; identical to SEQ ID NO: 3198
  misc_feature (1)..( 3000): 2750-1469P.txt file - cDNA_ID_3091564; gDNA_ID_1620631; Annot_ID_162682

SEQ ID NO: 35956 - DNA, 3000 bp, Unknown; identical to SEQ ID NO: 3198
  misc_feature (1)..( 3000): 2750-1469P.txt file - cDNA_ID_3091564; gDNA_ID_2926182; Annot_ID_200328

SEQ ID NO: 35957 - DNA, 3000 bp, Unknown; identical to SEQ ID NO: 3563
  misc_feature (1)..( 3000): 2750-1469P.txt file - cDNA_ID_3091577; gDNA_ID_2926182; Annot_ID_200310

SEQ ID NO: 35958 - DNA, 3003 bp, Unknown; identical to SEQ ID NO: 20530
  misc_feature (1)..( 3003): 2750-1469P.txt file - cDNA_ID_3091612; gDNA_ID_2926183; Annot_ID_200435

SEQ ID NO: 35959 - DNA, 3000 bp, Unknown; identical to SEQ ID NO: 20528
  misc_feature (1)..( 3000): 2750-1469P.txt file - cDNA_ID_3091616; gDNA_ID_2926183; Annot_ID_200434

SEQ ID NO: 35960 - DNA, 3003 bp, Unknown
  misc_feature (1)..( 3003): 2750-1469P.txt file - cDNA_ID_3091622; gDNA_ID_1620751; Annot_ID_166806
catgtgcaactttcacatattttctggagaaatcaaatataataataatcattatcattgattgaatgatcatttttgacttttgatggcgctcctcctatcttccaattagtagtaacttttaagggttaagttgtatactagtcactttttaaaatttaattgaaaaaatagtcactttactatttataatttgcaaaatagtcacttttcactgtttgattcgtacacttagtttgtacaccacttttagtgatcagatgtatataaaaaatacacagcgtacactttacatttgtacaataaaagtgatgtacaatccaagtgtacgaatcaaacagtgaaaagtgactactttgcaaattatgaatagtaaagtgactactttcctaattaagtttgaaaaagtgactattttgccaaaacaccccttgaacgagatttatttaataaatactgtattaattaacgaaagaaattttaaaactttaatgacaaattgggtcaagtaagaggaacctgagattctttcgaaacagtattctctctattcgtcgaaaattgggactaagaacatcattattggtagtatcttaggttagtcttagcttagttcttaggatttttttataattgattttgaaaattttgaaatgaaagctaagaacatttcattttatctcttatgtaaaagactcttttaacaaatatatgattaaaaagccaaaattttctaataattaacctaagcaactaccaataaatgtgttctaacgttttgatttaatctggtatttagggtattttgtcattttggtttatctcttatggatttttgtttccatgtttgttgtgtggcattgcttaccaatacatagaatagaaacaataaatgaaactatgatgcttttcttacttaaagagtctgaggtcatcaaaattcaatatgtagagtgagtgagatgcaatttctatataaccgaaatccaactgcattattgtttgcatctggaagctcctctctttctgatgtattttatctacaaactaaaaattcatttgtctatcttgatgatggttcttttcttctttatcctcattttaacaaatattcgagaatcactttcgctatgaacgtgtgctaacatggatatatttctttttaatattcaatattgtgattcaaaccaaccatcgaattatatcagccttctttttaccacagtttggctcaaccaagtttcttccttttatttcaaatgagattgtttgagagattttgaatatgactgtatgtaacgtattgtatgcgcttaaactaaacttagtgctctccatatctgtttttactcgcattttgtcaactattgagttttatattgcccccttagctagtggatcttgtcgtggtgtatgcttattttgagataattaaaatcgaaagcatgatatcatcttgaagtttacagactgtccgagtgcaaagtctacgaaagatttaaagattagaaacttgaagaaatcaatgtgaaaattaatggtcatttacacatatatatatgtgttggggaaacaacggacaactgtacagcaataaagttccaccctacatatttatgtgagtttgtgaaaaaaaataaaaaatattttgctagcaaaaaagtaaaaaataaatgagacaccaaattatacgtaaaaatcatcttaatgtgaagagtaaaaactatgggaccgtagtacactcaaaatttcagacacgaccagcaaatgtccaaacgttctacacaaaaaaacctaacagatctatttttctcctcctctagatcttaaacctctcttttcttttgtttcttatacacaaacaattaggttaagagtgtttatatactccctcataacccttacccaaattccaatctcatggattaataatataaatggttgaactccaagtttggttctccaaatcaaaacccaatttggttcccaccactaggaggaaaaccaacagactcccctccgataaagtactggaggaaacaacaatcctgactatgataacatcgtatttttgcatgttttagatatagattttttatgttttaaaaaagtttttgtttgattttcaaatttttttagtactaatgtagtttatacgagattaatattgtagtctttaatggactgtatcaaccaaacctgactttgttggggcaatttgtggtaattgtatatatgaaaaaatggtaatgggcttgaatatcccacgaagccttttaccaagaagtttcacgcatcccacatcggaagggtaagagagtttgatagtggaaacttttatataaatagacttcactctccctcagattcaaatttcgcagctatgtggtgagcacaaagcgaactattctttcgccttttactaaagaataccgtgtgctctccacgccaagtggcttacgcctatttttggagggcccttacttaatcgtgaggcccaacatttaacctagtctgaatgtttcatttgctaaaaactttgtttgttgctactgggcccaaaggtttgaaaggccagttcaattgaaatatcgcataatcaaattgaatttaatctgcaagaccaattcgttaatcaataagagcatactaggatttcaaaccaaatgattcagttcaacgatgttttaaattatcatctagaaattataaaatgtgtaataaagcattttttttttttttaaacttgacaaaatctctaaatgtaaagtctaatataaaccttaaaatctaaaaactaattatgcttgtttttgagaaatttttaaaaaattgtgaaaaagaaaagtaatgaaaaaaatattgagagtgagtgattggaggaaaataacacaacgcaacaatctaacaaagagagaccttatcatcatcagcatcaccttaacccatataacattcctcttcgaaaatgccaacaacaaatttcatagagaagcagaaatg

SEQ ID NO: 35961 - DNA, 3000 bp, Unknown
  misc_feature (1)..( 3000): 2750-1469P.txt file - cDNA_ID_3091622; gDNA_ID_2926183; Annot_ID_200430
gtgcaactttcacatattttctggagaaatcaaatataataataatcattatcattgattgaatgatcatttttgacttttgatggcgctcctcctatcttccaattagtagtaacttttaagggttaagttgtatactagtcactttttaaaatttaattgaaaaaatagtcactttactatttataatttgcaaaatagtcacttttcactgtttgattcgtacacttagtttgtacaccacttttagtgatcagatgtatataaaaaatacacagcgtacactttacatttgtacaataaaagtgatgtacaatccaagtgtacgaatcaaacagtgaaaagtgactactttgcaaattatgaatagtaaagtgactactttcctaattaagtttgaaaaagtgactattttgccaaaacaccccttgaacgagatttatttaataaatactgtattaattaacgaaagaaattttaaaactttaatgacaaattgggtcaagtaagaggaacctgagattctttcgaaacagtattctctctattcgtcgaaaattgggactaagaacatcattattggtagtatcttaggttagtcttagcttagttcttaggatttttttataattgattttgaaaattttgaaatgaaagctaagaacatttcattttatctcttatgtaaaagactcttttaacaaatatatgattaaaaagccaaaattttctaataattaacctaagcaactaccaataaatgtgttctaacgttttgatttaatctggtatttagggtattttgtcattttggtttatctcttatggatttttgtttccatgtttgttgtgtggcattgcttaccaatacatagaatagaaacaataaatgaaactatgatgcttttcttacttaaagagtctgaggtcatcaaaattcaatatgtagagtgagtgagatgcaatttctatataaccgaaatccaactgcattattgtttgcatctggaagctcctctctttctgatgtattttatctacaaactaaaaattcatttgtctatcttgatgatggttcttttcttctttatcctcattttaacaaatattcgagaatcactttcgctatgaacgtgtgctaacatggatatatttctttttaatattcaatattgtgattcaaaccaaccatcgaattatatcagccttctttttaccacagtttggctcaaccaagtttcttccttttatttcaaatgagattgtttgagagattttgaatatgactgtatgtaacgtattgtatgcgcttaaactaaacttagtgctctccatatctgtttttactcgcattttgtcaactattgagttttatattgcccccttagctagtggatcttgtcgtggtgtatgcttattttgagataattaaaatcgaaagcatgatatcatcttgaagtttacagactgtccgagtgcaaagtctacgaaagatttaaagattagaaacttgaagaaatcaatgtgaaaattaatggtcatttacacatatatatatgtgttggggaaacaacggacaactgtacagcaataaagttccaccctacatatttatgtgagtttgtgaaaaaaaataaaaaatattttgctagcaaaaaagtaaaaaataaatgagacaccaaattatacgtaaaaatcatcttaatgtgaagagtaaaaactatgggaccgtagtacactcaaaatttcagacacgaccagcaaatgtccaaacgttctacacaaaaaaacctaacagatctatttttctcctcctctagatcttaaacctctcttttcttttgtttcttatacacaaacaattaggttaagagtgtttatatactccctcataacccttacccaaattccaatctcatggattaataatataaatggttgaactccaagtttggttctccaaatcaaaacccaatttggttcccaccactaggaggaaaaccaacagactcccctccgataaagtactggaggaaacaacaatcctgactatgataacatcgtatttttgcatgttttagatatagattttttatgttttaaaaaagtttttgtttgattttcaaatttttttagtactaatgtagtttatacgagattaatattgtagtctttaatggactgtatcaaccaaacctgactttgttggggcaatttgtggtaattgtatatatgaaaaaatggtaatgggcttgaatatcccacgaagccttttaccaagaagtttcacgcatcccacatcggaagggtaagagagtttgatagtggaaacttttatataaatagacttcactctccctcagattcaaatttcgcagctatgtggtgagcacaaagcgaactattctttcgccttttactaaagaataccgtgtgctctccacgccaagtggcttacgcctatttttggagggcccttacttaatcgtgaggcccaacatttaacctagtctgaatgtttcatttgctaaaaactttgtttgttgctactgggcccaaaggtttgaaaggccagttcaattgaaatatcgcataatcaaattgaatttaatctgcaagaccaattcgttaatcaataagagcatactaggatttcaaaccaaatgattcagttcaacgatgttttaaattatcatctagaaattataaaatgtgtaataaagcattttttttttttttaaacttgacaaaatctctaaatgtaaagtctaatataaaccttaaaatctaaaaactaattatgcttgtttttgagaaatttttaaaaaattgtgaaaaagaaaagtaatgaaaaaaatattgagagtgagtgattggaggaaaataacacaacgcaacaatctaacaaagagagaccttatcatcatcagcatcaccttaacccatataacattcctcttcgaaaatgccaacaacaaatttcatagagaagcagaaatg

SEQ ID NO: 35962 - DNA, 3003 bp, Unknown
  misc_feature (1)..( 3003): 2750-1469P.txt file - cDNA_ID_3091625; gDNA_ID_2926183; Annot_ID_200428
accgacaattaagtgaaatcagacaatcttaactgtcgtgtccaaaaacacaaaaactctcctcgcttctcttctcttgttgtagtaagtaactttggtaattaacagtgttattatcaaattcgaatctcttacattaatggaaactcagatcttctcttaaaaacacataaagcacagatcttttacagagaatcttgtaagaagaaagaagatgattgagaggtgtttaggagcttaccggtgccggagaatccaaagagctttacgccaattaaaggtaacgattctctgtcttcttcttaccgttgttgtcctacgtagcacaatcggcgccggtaaattcggaactccggagcaagatcttgacgagatccgtcaacatttccacgcacgcaaacgaggtgagcctcaccgtgtcctcgaagaaattcagaccggaggagattcttcttccggtgacggtggaggtaattccggtgggagtaataactacgagacgtttgacatcaacaagattttcgttgacgaaggtgaagaagagaaacccgacccgaataaaccttacactctcggacccaagatatcagattgggatgagcagagatctgattggttagctaagaaccctagcttccctaatttcatcggacctaacaagccacgtgttcttttggtgactggttcggcgccaaaaccatgtgagaatcctgtcggtgatcattacctcttgaaatcgatcaagaacaagatcgattactgtaggttacatgggatcgagatcttctacaacatggctcttctcgatgcagagatggctggtttttgggcaaagcttccattgattaggaagcttttgttgtcacatcctgagattgagtttctttggtggatggatagtgatgctatgtttacagatatggcttttgagcttccatgggagaggtataaagattacaatctggtgatgcatggatggaatgagatggtttatgatcagaagaattggattgggttgaatacagggagtttcttgcttaggaacaatcaatgggcacttgatttgcttgatacttgggctcccatgggtcctaaagggaagatccgtgaagaagcgggtaaggttttgacccgtgagctcaaggatagaccggtgttcgaagctgatgatcagtctgctatggtttatctgttggctactcagcgagacgcttggggcaataaggtacaaactgattttgactggtatataactatgaacttgattccatttcagcattggtttgatgtggaaaaaaaaaaaaactaaatttggaaacttgtggtttgcttgttgtggtttatcatgtctcttgaacatcaaaaataacaatgtgagttgctttttgtggtttatcatgtctcttgatcatcaaaaatgacaatgtgagttgcatcttgtggtttctgacatctgtgtaagggtctattattgaagtaaactcaaatctttgcttggtttggattttgttgagctactcatttgagccactgcattgttgttataggtgtacctagaaagtggatactatcttcacggttactgggggattcttgtggacagatatgaagaaatgatagaaaactaccacccgggtctaggagatcacagatggccattggtgactcactttgtcggttgcaaaccgtgtgggaaatttggtgattacccggtggaacggtgtctaaaacaaatggacagagcctttaactttggagataaccagattctgcaaatctatggtttcactcacaaatctttggctagtcgtaaagtcaagagagtgcggaacgagactagcaatccgttggagatgaaagacgagctcgggttgcttcatccggcgtttaaggcggttaaggtacaaaccaatcaagtttgaatcggttttgcgtttaggatttgtgttatgtttctcgctatatttatgtcttgtgtctttgcttgttgttgtactaagatggatgataaagtattgtgcagagacatcagttaattctttggttttactttgtctctacgtctagagttctattacgaaatcaaaatgttgtttttcttcctttttgttctttgtaatccattagaacttgagattttgtagcttcatggatcaataatctgtgttaattcaagaacttttttttaacctgatttcacattcaactaattatttacttttagtatgcaaaatgtgaaaaaatcacattgagttagtatagttctgagatcatattcacaagttttgtgtagtttaggagtttaattcgaaaaacaaaatttggcatgtggtcagattcttttgcagtatgggttgttgtatctgaaatctgaatgtctttaattgataataaaatcatgtatacgggctattattagggggaggccttataaaagcccatctgaaaactaaaatcacggcctaatatatggaatccgtgttatacaaaaatccaagataattcgtagataatggtgagaaaatcgtttgtggccaagcaatttcgggtagggaggatcaacaaagatacaaaaaagatttctttcttctttataaaacccaaatctcaaaatgttatctcgttttttattttaaatgttttattttattttgttgttgtgtggtttttttggtttttagtaaagagaagatataacaaaaccctaattctcatgagttcaaaaaccctagatttagtgagcccatcaaaacattttccattggggaagattttaacatttggagaattgtgcataataaaaacaaaatattaaacagtaaatactttccaaaaagtgactaaaatattctaaatttactcaacaaaaattgaaaattcttgacaaaaaaattactgttttttaaaatgatacaatgtttttcaaattttaaccacaaatgattattgtacttcttcctcaaataaaaaaagaaactctatatattttggcttgagccaatg

SEQ ID NO: 35963 - DNA, 3003 bp, Unknown
  misc_feature (1)..( 3003): 2750-1469P.txt file - cDNA_ID_3091633; gDNA_ID_1621162; Annot_ID_57137
ggtggaaatgtccctgctgctggttatgaaattagaccaatcgtgcaccttcttggtgaatcttcttcatttgatataaggggtagcatctccagattactggatgaacgaagggaagtgaaagaattcctcagagaatttgacctttcatcaactatatcgactagacgccaagcttttaaggatagtctgcgaggaggagtactcaatgctcaaaacatagatatttcttttgagaacttcccatattatttaaggtaagattgcttaatattatgttacatttgtattacacatcttgctttcgatggtttgatgatttatagccaaaaatatatctaaattgtctcagtgctacaacaaagggtgttttgatgatatcgatgtatgttcatatgaacggtggaagcaagtatgcaaattttgcaacagacttgactacagcctgtccccgtatcttactctctggaccatcaggtatttctactttttgctgagtccattcctctaaacaagtttacctttgtatatataaggtctgagattcctatatttcttaccatttgaaatatttttaggctctgagatatatcaggaaatgttggcaaaagcgcttgctaaacagtttggggccaaattgatgattgttgattctcttttgttgcctggggtaatcttcttttcccctttattttttttttcatcttttagttgacagacctaagtgatctagtagaatgaggtccatgaacaggatcttgataaatacatagatacataaatcttgatccaaaaagaaaaaatcctaatagtcgagaaccaatcaggagtgtttcagcttatattactactaatgtatatacacattccaatgttgttttatttattacaatatttattgcatcttgagcaagtggatattaactggtagtgttgactttttcgtcccaaatagcttatattactacctatcacagtgtccactcggacatcggacattatttttcagcaggctcctttataagtaataggtttgttcattccggtgaattcaatgattttgtactgtttctggatggtttcagggatcaccagccagggaagctgaatcctctaaagaaggttctaggcgtgaaaggctgtctatgcttgctaaaagagctgttcaggctgcacaagtattgcagcataagaaaccgacttcaagtgttgatgctgatataacaggtggctcaacattaagctctcaggctttgccaaaacaagaagtgtcaacagcaacttctaaaagttacacattcaaagcaggcatgatgtttttcttttcatctgactgttcaacttcttttgatgtaccactcctgttttgttgaacaagcatttttatcattttcaggtgacagagttaaatttgtaggtccttcggcttctgcaatttcttctcttcaaggccagcttaggtattgtttactgtttttaaaagtcttcacatctgctgtaaatgtgtgttgtattcacaactttgctcttactttttccctgctatgtaatataggggaccggccattggttcccagggaaaagtagcccttgcatttgaagacaactgtgcttcaaaaattgggattagattcgataggcctgtacaagatggcaatgatcttggtggcctctgcgaagaagaccatggttttttttgtgctggtaatcgcgggctgttttttttctttctaactttacttaacttaaaaagtgaactttattaatattattctttgtgtgcagctagctcacttcggttagaaggttcttctagcgatgatgctgataaactcgccgttaatgaaatctttgaggtagcttttactttaagttttgtgataactacttatggcttgtagctacaggatagtaacctcttgacccataccataggtcgcacttagtgagagtgaaggagggtcattaatattgtttctgaaagatattgagaaatctcttgtggggaacagtgatgtgtatgcaaccttgaaaagcaagcttgagactttaccggaaaatatagttgtcattgcctcgcagacccagttggacagccgaaaggagaaagtaggaaactttttcagtcttctctatttctgttttggtatcttttaagttggttttaatttgcttatctgtatagttaattagagatttgatggttctttttcagtcccatcctggaggtttcttgtttactaagtttggtggcaatcagacggcactactggatctagcatttccggtatgatgacctgacttatcttgaactattttccatttcttgaaatagttgtgtacctaaataattctatcctgatggtaaggttcaccaaagtcatcttagatttggtatcttattgatgaaatgatttttcctattatctgcaggataattttggtaaactgcacgatagaagcaaagaaacacctaaatcaatgaaacaaataactcgactatttcctaacaaaatcgccatccagttacctcaggttgttaccttcattcatgatttcttgtctgggataattttatttttcctttttcttatgctccgaagatgtaataggaagaagctttactctcggattggaaggagaaacttgaccgtgacacagagattttgaaggttcaggctaatataaccagcatccttgcagtgagtatcttctaatcatgcccttagtaatataagcgttccttgtttcttttcatttttttccttttgcttatttctttgtaatgatgcctgcaggtcctcgccaaaaacaaacttgactgccctgaccttggaacgttgtgcatcaaagatcaaacccttccatctgaaagtaggcctcgttcacttgctttttctttctttattttgtcctgataacccggttgtttgactaaccaaaaactatgtgttcataggtgttgaaaaagtggttggctgggctttcggtcaccatcttatg

SEQ ID NO: 35964 - DNA, 3003 bp, Unknown; identical to SEQ ID NO: 17511
  misc_feature (1)..( 3003): 2750-1469P.txt file - cDNA_ID_3091633; gDNA_ID_1621162; Annot_ID_173721

SEQ ID NO: 35965 - DNA, 3000 bp, Unknown
  misc_feature (1)..( 3000): 2750-1469P.txt file - cDNA_ID_3091633; gDNA_ID_2926183; Annot_ID_140663
ggaaatgtccctgctgctggttatgaaattagaccaatcgtgcaccttcttggtgaatcttcttcatttgatataaggggtagcatctccagattactggatgaacgaagggaagtgaaagaattcctcagagaatttgacctttcatcaactatatcgactagacgccaagcttttaaggatagtctgcgaggaggagtactcaatgctcaaaacatagatatttcttttgagaacttcccatattatttaaggtaagattgcttaatattatgttacatttgtattacacatcttgctttcgatggtttgatgatttatagccaaaaatatatctaaattgtctcagtgctacaacaaagggtgttttgatgatatcgatgtatgttcatatgaacggtggaagcaagtatgcaaattttgcaacagacttgactacagcctgtccccgtatcttactctctggaccatcaggtatttctactttttgctgagtccattcctctaaacaagtttacctttgtatatataaggtctgagattcctatatttcttaccatttgaaatatttttaggctctgagatatatcaggaaatgttggcaaaagcgcttgctaaacagtttggggccaaattgatgattgttgattctcttttgttgcctggggtaatcttcttttcccctttattttttttttcatcttttagttgacagacctaagtgatctagtagaatgaggtccatgaacaggatcttgataaatacatagatacataaatcttgatccaaaaagaaaaaatcctaatagtcgagaaccaatcaggagtgtttcagcttatattactactaatgtatatacacattccaatgttgttttatttattacaatatttattgcatcttgagcaagtggatattaactggtagtgttgactttttcgtcccaaatagcttatattactacctatcacagtgtccactcggacatcggacattatttttcagcaggctcctttataagtaataggtttgttcattccggtgaattcaatgattttgtactgtttctggatggtttcagggatcaccagccagggaagctgaatcctctaaagaaggttctaggcgtgaaaggctgtctatgcttgctaaaagagctgttcaggctgcacaagtattgcagcataagaaaccgacttcaagtgttgatgctgatataacaggtggctcaacattaagctctcaggctttgccaaaacaagaagtgtcaacagcaacttctaaaagttacacattcaaagcaggcatgatgtttttcttttcatctgactgttcaacttcttttgatgtaccactcctgttttgttgaacaagcatttttatcattttcaggtgacagagttaaatttgtaggtccttcggcttctgcaatttcttctcttcaaggccagcttaggtattgtttactgtttttaaaagtcttcacatctgctgtaaatgtgtgttgtattcacaactttgctcttactttttccctgctatgtaatataggggaccggccattggttcccagggaaaagtagcccttgcatttgaagacaactgtgcttcaaaaattgggattagattcgataggcctgtacaagatggcaatgatcttggtggcctctgcgaagaagaccatggttttttttgtgctggtaatcgcgggctgttttttttctttctaactttacttaacttaaaaagtgaactttattaatattattctttgtgtgcagctagctcacttcggttagaaggttcttctagcgatgatgctgataaactcgccgttaatgaaatctttgaggtagcttttactttaagttttgtgataactacttatggcttgtagctacaggatagtaacctcttgacccataccataggtcgcacttagtgagagtgaaggagggtcattaatattgtttctgaaagatattgagaaatctcttgtggggaacagtgatgtgtatgcaaccttgaaaagcaagcttgagactttaccggaaaatatagttgtcattgcctcgcagacccagttggacagccgaaaggagaaagtaggaaactttttcagtcttctctatttctgttttggtatcttttaagttggttttaatttgcttatctgtatagttaattagagatttgatggttctttttcagtcccatcctggaggtttcttgtttactaagtttggtggcaatcagacggcactactggatctagcatttccggtatgatgacctgacttatcttgaactattttccatttcttgaaatagttgtgtacctaaataattctatcctgatggtaaggttcaccaaagtcatcttagatttggtatcttattgatgaaatgatttttcctattatctgcaggataattttggtaaactgcacgatagaagcaaagaaacacctaaatcaatgaaacaaataactcgactatttcctaacaaaatcgccatccagttacctcaggttgttaccttcattcatgatttcttgtctgggataattttatttttcctttttcttatgctccgaagatgtaataggaagaagctttactctcggattggaaggagaaacttgaccgtgacacagagattttgaaggttcaggctaatataaccagcatccttgcagtgagtatcttctaatcatgcccttagtaatataagcgttccttgtttcttttcatttttttccttttgcttatttctttgtaatgatgcctgcaggtcctcgccaaaaacaaacttgactgccctgaccttggaacgttgtgcatcaaagatcaaacccttccatctgaaagtaggcctcgttcacttgctttttctttctttattttgtcctgataacccggttgtttgactaaccaaaaactatgtgttcataggtgttgaaaaagtggttggctgggctttcggtcaccatcttatg

SEQ ID NO: 35966 - DNA, 3000 bp, Unknown; identical to SEQ ID NO: 17512
  misc_feature (1)..( 3000): 2750-1469P.txt file - cDNA_ID_3091633; gDNA_ID_2926183; Annot_ID_200422

SEQ ID NO: 35967 - DNA, 3003 bp, Unknown; identical to SEQ ID NO: 17509
  misc_feature (1)..( 3003): 2750-1469P.txt file - cDNA_ID_3091641; gDNA_ID_1621162; Annot_ID_173723

SEQ ID NO: 35968 - DNA, 3000 bp, Unknown; identical to SEQ ID NO: 17510
  misc_feature (1)..( 3000): 2750-1469P.txt file - cDNA_ID_3091641; gDNA_ID_2926183; Annot_ID_200420

SEQ ID NO: 35969 - DNA, 3003 bp, Unknown
  misc_feature (1)..( 3003): 2750-1469P.txt file - cDNA_ID_3091645; gDNA_ID_2926183; Annot_ID_200417
tctgcatggttgtgttggttagctttaagagaccgtttggtgtgatggtggcaattcctaggatggatatgtctgtcggtggaggacggaagccattgtaagtgaagtcgataatttgggaagaggactttagggattgccaaaagaagcttaagaagaagatggtgaagagcttgatgaagaacatggtgaagagttttattttatttttgttggctttggtttaggtatttgagtttgtaaagaaaatttatggagagtgtggaaaagtcattttttgtattggtcaagggaaaagtcgtttcggcttaacctatattagaggtcatggtagagactcacgaagatgaatgacggatcataaaggttttcaatttgtaatgttgtggtacaacgtgtgtttgtctccggtgtaacttatcttgtctcacattaatagaggctttgattagagatgtacaacgtgtatcatctcattatgtgtaagtcactattgagtgaagctgatgagttagtaaacgatagccataactaaatctaattgcaaaaacaatgtgtcactactctgttttccattgtgttaaggtttgggatttaatcatttggtatcaaatcacgttttggttttgatccgaaccacaatagtggtattagtaccgcacctaactttcattcttttgtttttagtcaaaactattttgtggtagacaaacttccatctattatcttggttttaattcggaccacaattgtactatcaagtctctatccggaaaaaataataattgttcaccctcgtgactacggcattctatttgcacaaggacagagagtcatgactaagtctttcttttaacttccatcaattgcaaataattgtgtcatattctgattcatataataaaggagcaagagtaacaatcatagttgtcttttttagttacatttgtctacatatactctccgcgacagagtcccaaatgaaggtcaccaacttggtttccgtaaacggaatggtcttttgtgcagctatacacgcattgtggttttcgtaaatctttctccagatcgtcgaatctttgagacatccatatcaccaaaaaaagggcacagatttttctataaaaaaaatgtttgacaaagctctttacagtttcaggtgttaggacaaatacatattaacgtttctccaataagacctcttctcttggtatctgtaaacaactcggtaagaatgtctgcggatcatcatgagggtggatgagcatggagtcaacagttttgttatgttcatcatctcatggagacattactgaataactgaatagtaatgtctttgttatgttcatctcatggagtcaacagttttgtagtcatgttgtcttcttcgccggcacctgaattgaggtttactatctgagaatttcgtctcaccagacatccccattgttgaatctgtatctgctccaaatccaaaacactcaccaatcactaaacatatcaaaataccaagtacatacatatccatttcagacaatgacctaacatgataagaacccaattccacaatgtacaatcattatttcattccctaacccaaatttgacaactttctgacaattcctatgaggcaatgccataatagacaagcagagcaaaatcagactcattttcatcagaagaaataacactaaagttgtcatctttaatctaatcaatgatgatcaatctccaaatcttcatagcaaaaaccacgaatctcaagatggaacacaattgctataaaaagtctctgaatttaatacctccccaaaacaatggcttgacatcttcttcttcatcatcaaattcatcaccatagccaaactcagcatcacctctgtaaccaggctcactcccatacccagattcattccccattggatcaactccattagcaaatccaaatccaccagaagcttccttctctccaccagaatctcgccgctctctccgtgaattcctcgccgcctcactcacatcagaagcccaattcgcttcaccaaaaagctctccacttgaatctgtaccaacagcgaaaggcaaatccgaacaagtcccatgagcaccaatggagcaacatctccgagtcccactccgatcactactccgaccagacaccgatctcgaattacgccgccgccgcttcctcgctactaacctgaaacttcctctattgctgtaattggaagctgataatgtcttccctccattgtcgtcgtcggcgagtgagagacggctcatagcttcgatggtgaaagaagtggatcgatcggagaagcaagggcgtttgggagtaaaggagtgaaacccattggtctgcggtggttggtcagatgagtctagggttttggagcggtgaaatggtcgccatgagagaagctgtgaagtgcatgattcaatagagcttcgtgatgactctagatgtttcggagacattgttaaaggtaacaactttccagatcacaaaaagcgaaaatgaaaaaagaaaaatccttttgagtgaatctgaaattgggaatggatctgtgttgttttcaagttctttgagaatatcgagtagtgaagatttggagttgttcttttgggtttaagagcttttgattgaagattacgatttgttgcaaaacgggtcaaatgtattttatacggtcaagacacaatgtattttaatacgtacccggtcggtcacgtgactcacgtgatgatctctatggtattcgaaagccctagtcagatttcaattttcgcctttcttcttctcttccatcggaattttctctcaggtgatcggaatcgttactggaattttagttcatatatagacgatcaatcaaacctctttagttttccttaggttaatcgttatccaatgagttttttttgtgtgtgatcgcttctttgtttcgatctattgacgtttcgaatctcaattttgattttggtataggaaagaaataaatg

SEQ ID NO: 35970 - DNA, 3003 bp, Unknown
  misc_feature (1)..( 3003): 2750-1469P.txt file - cDNA_ID_3091648; gDNA_ID_1621162; Annot_ID_173728
tttctttcacatgcaaatcttgtaaagacatattcatcacataacacaaaattcgatcctgagttctgagttcttaaattaggagaaacgagtaatttaccttactgaacaagtcttcaacttctctttcacggatatcgccgggaaggttcccgacgtaaatcgttctactcgaacggctgctcatttatttctttcctataccaaaatcaaaattgagattcgaaacgtcaatagatcgaaacaaagaagcgatcacacacaaaaaaaactcattggataacgattaacctaaggaaaactaaagaggtttgattgatcgtctatatatgaactaaaattccagtaacgattccgatcacctgagagaaaattccgatggaagagaagaagaaaggcgaaaattgaaatctgactagggctttcgaataccatagagatcatcacgtgagtcacgtgaccgaccgggtacgtattaaaatacattgtgtcttgaccgtataaaatacatttgacccgttttgcaacaaatcgtaatcttcaatcaaaagctcttaaacccaaaagaacaactccaaatcttcactactcgatattctcaaagaacttgaaaacaacacagatccattcccaatttcagattcactcaaaaggatttttcttttttcattttcgctttttgtgatctggaaagttgttacctttaacaatgtctccgaaacatctagagtcatcacgaagctctattgaatcatgcacttcacagcttctctcatggcgaccatttcaccgctccaaaaccctagactcatctgaccaaccaccgcagaccaatgggtttcactcctttactcccaaacgcccttgcttctccgatcgatccacttctttcaccatcgaagctatgagccgtctctcactcgccgacgacgacaatggagggaagacattatcagcttccaattacagcaatagaggaagtttcaggttagtagcgaggaagcggcggcggcgtaattcgagatcggtgtctggtcggagtagtgatcggagtgggactcggagatgttgctccattggtgctcatgggacttgttcggatttgcctttcgctgttggtacagattcaagtggagagctttttggtgaagcgaattgggcttctgatgtgagtgaggcggcgaggaattcacggagagagcggcgagattctggtggagagaaggaagcttctggtggatttggatttgctaatggagttgatccaatggggaatgaatctgggtatgggagtgagcctggttacagaggtgatgctgagtttggctatggtgatgaatttgatgatgaagaagaagatgtcaagccattgttttggggaggtattaaattcagagactttttatagcaattgtgttccatcttgagattcgtggtttttgctatgaagatttggagattgatcatcattgattagattaaagatgacaactttagtgttatttcttctgatgaaaatgagtctgattttgctctgcttgtctattatggcattgcctcataggaattgtcagaaagttgtcaaatttgggttagggaatgaaataatgattgtacattgtggaattgggttcttatcatgttaggtcattgtctgaaatggatatgtatgtacttggtattttgatatgtttagtgattggtgagtgttttggatttggagcagatacagattcaacaatggggatgtctggtgagacgaaattctcagatagtaaacctcaattcaggtgccggcgaagaagacaacatgactacaaaactgttgactccatgagatgaacataacaaagacattactattcagttattcagtaatgtctccatgagatgatgaacataacaaaactgttgactccatgctcatccaccctcatgatgatccgcagacattcttaccgagttgtttacagataccaagagaagaggtcttattggagaaacgttaatatgtatttgtcctaacacctgaaactgtaaagagctttgtcaaacattttttttatagaaaaatctgtgccctttttttggtgatatggatgtctcaaagattcgacgatctggagaaagatttacgaaaaccacaatgcgtgtatagctgcacaaaagaccattccgtttacggaaaccaagttggtgaccttcatttgggactctgtcgcggagagtatatgtagacaaatgtaactaaaaaagacaactatgattgttactcttgctcctttattatatgaatcagaatatgacacaattatttgcaattgatggaagttaaaagaaagacttagtcatgactctctgtccttgtgcaaatagaatgccgtagtcacgagggtgaacaattattattttttccggatagagacttgatagtacaattgtggtccgaattaaaaccaagataatagatggaagtttgtctaccacaaaatagttttgactaaaaacaaaagaatgaaagttaggtgcggtactaataccactattgtggttcggatcaaaaccaaaacgtgatttgataccaaatgattaaatcccaaaccttaacacaatggaaaacagagtagtgacacattgtttttgcaattagatttagttatggctatcgtttactaactcatcagcttcactcaatagtgacttacacataatgagatgatacacgttgtacatctctaatcaaagcctctattaatgtgagacaagataagttacaccggagacaaacacacgttgtaccacaacattacaaattgaaaacctttatgatccgtcattcatcttcgtgagtctctaccatgacctctaatataggttaagccgaaacgacttttcccttgaccaatacaaaaaatgacttttccacactctccataaattttctttacaaactcaaatacctaaaccaaagccaacaaaaataaaataaaactcttcaccatg

SEQ ID NO: 35971 - DNA, 3000 bp, Unknown
  misc_feature (1)..( 3000): 2750-1469P.txt file - cDNA_ID_3091648; gDNA_ID_2926183; Annot_ID_200415
ctttcacatgcaaatcttgtaaagacatattcatcacataacacaaaattcgatcctgagttctgagttcttaaattaggagaaacgagtaatttaccttactgaacaagtcttcaacttctctttcacggatatcgccgggaaggttcccgacgtaaatcgttctactcgaacggctgctcatttatttctttcctataccaaaatcaaaattgagattcgaaacgtcaatagatcgaaacaaagaagcgatcacacacaaaaaaaactcattggataacgattaacctaaggaaaactaaagaggtttgattgatcgtctatatatgaactaaaattccagtaacgattccgatcacctgagagaaaattccgatggaagagaagaagaaaggcgaaaattgaaatctgactagggctttcgaataccatagagatcatcacgtgagtcacgtgaccgaccgggtacgtattaaaatacattgtgtcttgaccgtataaaatacatttgacccgttttgcaacaaatcgtaatcttcaatcaaaagctcttaaacccaaaagaacaactccaaatcttcactactcgatattctcaaagaacttgaaaacaacacagatccattcccaatttcagattcactcaaaaggatttttcttttttcattttcgctttttgtgatctggaaagttgttacctttaacaatgtctccgaaacatctagagtcatcacgaagctctattgaatcatgcacttcacagcttctctcatggcgaccatttcaccgctccaaaaccctagactcatctgaccaaccaccgcagaccaatgggtttcactcctttactcccaaacgcccttgcttctccgatcgatccacttctttcaccatcgaagctatgagccgtctctcactcgccgacgacgacaatggagggaagacattatcagcttccaattacagcaatagaggaagtttcaggttagtagcgaggaagcggcggcggcgtaattcgagatcggtgtctggtcggagtagtgatcggagtgggactcggagatgttgctccattggtgctcatgggacttgttcggatttgcctttcgctgttggtacagattcaagtggagagctttttggtgaagcgaattgggcttctgatgtgagtgaggcggcgaggaattcacggagagagcggcgagattctggtggagagaaggaagcttctggtggatttggatttgctaatggagttgatccaatggggaatgaatctgggtatgggagtgagcctggttacagaggtgatgctgagtttggctatggtgatgaatttgatgatgaagaagaagatgtcaagccattgttttggggaggtattaaattcagagactttttatagcaattgtgttccatcttgagattcgtggtttttgctatgaagatttggagattgatcatcattgattagattaaagatgacaactttagtgttatttcttctgatgaaaatgagtctgattttgctctgcttgtctattatggcattgcctcataggaattgtcagaaagttgtcaaatttgggttagggaatgaaataatgattgtacattgtggaattgggttcttatcatgttaggtcattgtctgaaatggatatgtatgtacttggtattttgatatgtttagtgattggtgagtgttttggatttggagcagatacagattcaacaatggggatgtctggtgagacgaaattctcagatagtaaacctcaattcaggtgccggcgaagaagacaacatgactacaaaactgttgactccatgagatgaacataacaaagacattactattcagttattcagtaatgtctccatgagatgatgaacataacaaaactgttgactccatgctcatccaccctcatgatgatccgcagacattcttaccgagttgtttacagataccaagagaagaggtcttattggagaaacgttaatatgtatttgtcctaacacctgaaactgtaaagagctttgtcaaacattttttttatagaaaaatctgtgccctttttttggtgatatggatgtctcaaagattcgacgatctggagaaagatttacgaaaaccacaatgcgtgtatagctgcacaaaagaccattccgtttacggaaaccaagttggtgaccttcatttgggactctgtcgcggagagtatatgtagacaaatgtaactaaaaaagacaactatgattgttactcttgctcctttattatatgaatcagaatatgacacaattatttgcaattgatggaagttaaaagaaagacttagtcatgactctctgtccttgtgcaaatagaatgccgtagtcacgagggtgaacaattattattttttccggatagagacttgatagtacaattgtggtccgaattaaaaccaagataatagatggaagtttgtctaccacaaaatagttttgactaaaaacaaaagaatgaaagttaggtgcggtactaataccactattgtggttcggatcaaaaccaaaacgtgatttgataccaaatgattaaatcccaaaccttaacacaatggaaaacagagtagtgacacattgtttttgcaattagatttagttatggctatcgtttactaactcatcagcttcactcaatagtgacttacacataatgagatgatacacgttgtacatctctaatcaaagcctctattaatgtgagacaagataagttacaccggagacaaacacacgttgtaccacaacattacaaattgaaaacctttatgatccgtcattcatcttcgtgagtctctaccatgacctctaatataggttaagccgaaacgacttttcccttgaccaatacaaaaaatgacttttccacactctccataaattttctttacaaactcaaatacctaaaccaaagccaacaaaaataaaataaaactcttcaccatg

SEQ ID NO: 35972 - DNA, 3003 bp, Unknown
  misc_feature (1)..( 3003): 2750-1469P.txt file - cDNA_ID_3091652; gDNA_ID_1621162; Annot_ID_173729
tctggtgtacgattacatgcccaatggaagtttagacaagtatttgtacaatagtccagaggtaaccctcgattggaaacagaggtttaaagtcattaatggcgtggcctctgccttattttatctccacgaggagtgggaacaagtggtgattcaccgcgacgtcaaagccagcaacgtcttgttagatgcagagctcaatgggagactcggggatttcggtttagctcagttgtgtgatcacgggtctgatcctcaaactacgcgtgtagttggaacttggggatacctagcccccgatcacatcaggacaggacgggccacaaccactactgatgtttttgcatttggggtgctcctactagaagtggcgtgcggcagacgtcctatcgagattaataaccaaagtggtgagagggtcgtgctcgtggattgggtttttagattttggatggaggcaaacattttggatgctaaggatcctaatctagggtctgagtatgaccaaaaagaagtcgaaatggttttgaagctaggtttgttgtgctctcactccgacccactagctagaccaacaatgagacaagtgctacagtatctaaggggagatgcaatgttaccagatctgtcgccgttggacttgcgtgggagtgggatcatgttgggaacccacaacgggtctaatgagtcgggcatgtttaccagtggatcttctgttgcttattctctactctccagtgggaggtgattttcgtataccataacgtttgtagaaagcaattatctgcaaaagatagaggaccatgaactcaaacgtgaaatatttgaaactctaacgtttagttttattgttgctgcattgaaagtgtatggttatcgaagtataattatgtatcacatggcttttcgattaatagtgtttcctaagagcatgtccattgcagagaccttacaagtttcttaagagaatcctaatgaaaagaagcaaaaaaataaattaaaattgtctaattaaccaaggtgcgaaccttaaataaggtatttttgggtgagtaaggttcgctgacgtggcactatatcattggaggaccaataaaacaaaataagtttttttccttttttctttctctcctctctcttggtttcgtatagagtttctgggctttggtttatgttcaaatttgtgtttgatctgttggtttttaagataaaaatgtgacccttttgctgcttattcacttctcattagcattacaacggattggtgacacaaaataattggttctaggtttatgtttatgctcttttgtttgctcatttagttggtgttatcaaataattggttctaggtacgtgctttcatttaagttcatgacagtgtcttgagctggagatagattattctatgttcttcctttggtgacaatttcattaatagacctctcatcttggactttagtttcctcttgtaagccttttgatttgtattctttttctttttttttttgcttttatgtcatcatatatgtttacaatttgtaatattttttaataacttttaagttttatcaaataaattattttaaaaatatttttgctttttaaaaaaattttcataaggactccaccattggataacaaaaaatttagagactcaacaaaaactctaaactttaaaattaccaaaatatattattaaaaaatgttaaggattttttataaggattcaatcaatgggcatgctctaagacttttaaatatttagagatattttttcttggctgatatattgtcctaaaacacataagtcacaaaatgataggttaatttcactatatcatataaatctcatagagtttcactatttcaaactatttttacatattgtgtgtacactttaagaatatgattgctacaaatttggcgttaatattttagattaatggtcgctaacaccaacttgtctcccaaatttagagttgaattcaatggcaataaaatagacataatttaatcacggaaagagatatcaataaactaataagattatatattacattaaaaatatatgtaaatataattagaagcgataaaaattacaaaattatcaagtgattattactttattagtctagtgatagtgagtagtgagtttcttgaaagagtacaaaaacattgacaataatgctttcggattatttttgaaagaaatagtctaaagacggcatctagatcaaatggatatcataaacttttgatccgaatgttgcggttatcaaaaaagaaatgacaatagtataaaatatggtagaagtattgtctatccttatttcttaagcaaaaatgatctctattttatgaacaactagcaataaagaaaatgtggaaaacagatgataagttactctggttcctatattatatgaaacagagtagtgacaccattatttggaattcatggaaattaaaagaaaagactcggtctctttgaattagtcatgactatccttgtgcagatattaaaatgcctgacggtgaacaatttttttcaagttattttatactacgtgtgtggtcaaaatcaaaaccaaaatcactttttgataccacaaagtaatttgaaatatgcttttgctcttttgttataggaaacagagtagtaacaccattacatgcagttaacaaaaatcaaaagaaacacttagtctctttggttttgttatgactatggtttgtttttttgtcagcttcactaaataagacaagagacaatacacgtagtagttgtaccacaacatcattaccaatcaaagcctttctgtctttgtcttcgtgagtctccacaccatgacttctaatttggggtaaactacgacttttcctttgaccaacaaactacgacttttctacactctctttacaccatatattattactcttattttcattacaaactcaataatatctaaaccaaaagccaaaacacacaaaaacagagccatg

SEQ ID NO: 35973 - DNA, 3000 bp, Unknown
  misc_feature (1)..( 3000): 2750-1469P.txt file - cDNA_ID_3091652; gDNA_ID_2926183; Annot_ID_200414
ggtgtacgattacatgcccaatggaagtttagacaagtatttgtacaatagtccagaggtaaccctcgattggaaacagaggtttaaagtcattaatggcgtggcctctgccttattttatctccacgaggagtgggaacaagtggtgattcaccgcgacgtcaaagccagcaacgtcttgttagatgcagagctcaatgggagactcggggatttcggtttagctcagttgtgtgatcacgggtctgatcctcaaactacgcgtgtagttggaacttggggatacctagcccccgatcacatcaggacaggacgggccacaaccactactgatgtttttgcatttggggtgctcctactagaagtggcgtgcggcagacgtcctatcgagattaataaccaaagtggtgagagggtcgtgctcgtggattgggtttttagattttggatggaggcaaacattttggatgctaaggatcctaatctagggtctgagtatgaccaaaaagaagtcgaaatggttttgaagctaggtttgttgtgctctcactccgacccactagctagaccaacaatgagacaagtgctacagtatctaaggggagatgcaatgttaccagatctgtcgccgttggacttgcgtgggagtgggatcatgttgggaacccacaacgggtctaatgagtcgggcatgtttaccagtggatcttctgttgcttattctctactctccagtgggaggtgattttcgtataccataacgtttgtagaaagcaattatctgcaaaagatagaggaccatgaactcaaacgtgaaatatttgaaactctaacgtttagttttattgttgctgcattgaaagtgtatggttatcgaagtataattatgtatcacatggcttttcgattaatagtgtttcctaagagcatgtccattgcagagaccttacaagtttcttaagagaatcctaatgaaaagaagcaaaaaaataaattaaaattgtctaattaaccaaggtgcgaaccttaaataaggtatttttgggtgagtaaggttcgctgacgtggcactatatcattggaggaccaataaaacaaaataagtttttttccttttttctttctctcctctctcttggtttcgtatagagtttctgggctttggtttatgttcaaatttgtgtttgatctgttggtttttaagataaaaatgtgacccttttgctgcttattcacttctcattagcattacaacggattggtgacacaaaataattggttctaggtttatgtttatgctcttttgtttgctcatttagttggtgttatcaaataattggttctaggtacgtgctttcatttaagttcatgacagtgtcttgagctggagatagattattctatgttcttcctttggtgacaatttcattaatagacctctcatcttggactttagtttcctcttgtaagccttttgatttgtattctttttctttttttttttgcttttatgtcatcatatatgtttacaatttgtaatattttttaataacttttaagttttatcaaataaattattttaaaaatatttttgctttttaaaaaaattttcataaggactccaccattggataacaaaaaatttagagactcaacaaaaactctaaactttaaaattaccaaaatatattattaaaaaatgttaaggattttttataaggattcaatcaatgggcatgctctaagacttttaaatatttagagatattttttcttggctgatatattgtcctaaaacacataagtcacaaaatgataggttaatttcactatatcatataaatctcatagagtttcactatttcaaactatttttacatattgtgtgtacactttaagaatatgattgctacaaatttggcgttaatattttagattaatggtcgctaacaccaacttgtctcccaaatttagagttgaattcaatggcaataaaatagacataatttaatcacggaaagagatatcaataaactaataagattatatattacattaaaaatatatgtaaatataattagaagcgataaaaattacaaaattatcaagtgattattactttattagtctagtgatagtgagtagtgagtttcttgaaagagtacaaaaacattgacaataatgctttcggattatttttgaaagaaatagtctaaagacggcatctagatcaaatggatatcataaacttttgatccgaatgttgcggttatcaaaaaagaaatgacaatagtataaaatatggtagaagtattgtctatccttatttcttaagcaaaaatgatctctattttatgaacaactagcaataaagaaaatgtggaaaacagatgataagttactctggttcctatattatatgaaacagagtagtgacaccattatttggaattcatggaaattaaaagaaaagactcggtctctttgaattagtcatgactatccttgtgcagatattaaaatgcctgacggtgaacaatttttttcaagttattttatactacgtgtgtggtcaaaatcaaaaccaaaatcactttttgataccacaaagtaatttgaaatatgcttttgctcttttgttataggaaacagagtagtaacaccattacatgcagttaacaaaaatcaaaagaaacacttagtctctttggttttgttatgactatggtttgtttttttgtcagcttcactaaataagacaagagacaatacacgtagtagttgtaccacaacatcattaccaatcaaagcctttctgtctttgtcttcgtgagtctccacaccatgacttctaatttggggtaaactacgacttttcctttgaccaacaaactacgacttttctacactctctttacaccatatattattactcttattttcattacaaactcaataatatctaaaccaaaagccaaaacacacaaaaacagagccatg

SEQ ID NO: 35974 - DNA, 3000 bp, Unknown; identical to SEQ ID NO: 7772
  misc_feature (1)..( 3000): 2750-1469P.txt file - cDNA_ID_3091656; gDNA_ID_1621162; Annot_ID_173730

SEQ ID NO: 35975 - DNA, 3003 bp, Unknown; identical to SEQ ID NO: 17508
  misc_feature (1)..( 3003): 2750-1469P.txt file - cDNA_ID_3091656; gDNA_ID_2926183; Annot_ID_200413

SEQ ID NO: 35976 - DNA, 3003 bp, Unknown
  misc_feature (1)..( 3003): 2750-1469P.txt file - cDNA_ID_3091678; gDNA_ID_2926183; Annot_ID_200397
gctctgagttcgtacaaacaaggcttgtaccacaaacaaagaaaacccctaaatcaaggaaactgaaactgcgtagtcttgtttaccagaaggaggattatcatacacccaaagcagagacacaataatcgaccacaaacacaatcaatcctttagcaaacagataaagatgacaaatcacccaaaagctgaagaacactcctccaacaagcttactcgaatgcagaaaacggactgtacatatgaagatgagaacttgatgttcacattttctagtatacaaggtaaaggcaacgataactatagcctctgcattgttggccaataaggagaatttgtccgtttgtaaattcaaaaggaacgtctggaagctgcactagggagcagagaaagaacaagcaatgtagatctaaggagattagatcataaggggtgagagaaactgtaaagtataactgtatatgctttggggtagtttttcaagtagtacatgatggagagtgagtctttagctagagaaaagttttagacgttcactagtattatcctgtaatcaccctctttctccttcgttgtgaacaaatacttgtgtgctcctcttcttcctattctgctctgttatttcctctacttctttatatcttgcttactctgtttccgtgagttggtgtggatggcaaaggtttaagcttgatgtgttgtagagtttaacaaaacctaagagtatctccatcaaggagaaacccaaaaagtttctcgaacaagaaaaatattagtattttattataattttattatatgattaaatttttattttagtgtaaaaattgaatcaattaaaagaagagaaatgtaatgatggcttgtagagagtatctcatagtttctcacttgagaaactttctacactctctcttctctttttattatttctgttattttaatagtgaaaaactctcttgagagattaccaatgtagatggtctaacaatacatagtctttgcaagccccagcgcaattgcaatcaaattcaccattatgattgttcatggatgaaccatcaaaaagcttcatatcacaacatccaaaaaatcatccataaaataataaattatttagactaaaatatataattattttagacccaaacatacaacaatttttagtatttttacccattgtgatttagatcaaaactacacatcccaaaataaaaccatggtaggcccatcattgactatgtacaaatgtgcgttgacctttttctcgtatcacacaattctctccgaacccaccaaattaagaaacatggcaaaaactaggaataacctaaaaatagaatgaaagaggaagaaaagaacttaaaaatagaataacagatgtaaaagaagagttggataaaaaatagaatcaacccaaaaatacatttctcaaagctctttaaataaccaattttcaatttgtttgtaacaattaataaccacgagaagagaagttgagaaagaaaaaatagtaacgatgaaaatggccggaaggatctttctccttttcctctccgtctacgtcacggtggccatcgccggtaaagctccaccgccaacattcaccgagaaaggcaaagcctagcggagaaactctgcgagaaatccgaagacaaagcgttttgcgttgcaagcctaacgtcccgtcctgaggcagcaaccgcaaccgcaccaaaactaggcgtgatcgcgttaagcatcgcgtcctcaaatgcttcggacacatctttctacatcaaagccaaactaaagcaaaagaacctcgagccggctttagaagacaccctcgacgattgctctaagaattacttagatgcggtcgcgcagctcgacgattctctagccgctttgatgcaaaactcgttcatcgacgtcgatatttggctcaacaccgcgataagcgacggtgaggcttgtgaaaacgctttgaacgatcgtgccggtaatgatgctgagcttgctcgtaggaacacaaacttgttgaagctttgcaaggatgctcttctcattaacactattttaactccctaaatttaaagttattgcccattaattattttatatttgttcacattgttataatttttttttaaatggctcgttgatttgtcccgggggtaaattgtaacgatatttgaaatacttgtttttgggaatttttgaatgagcttattaaattatatataaagtatatacaaccaatatgcatattttcttgtttatattcacctaataataaccaatgaaataataaaatacaaatgtatattattttccttttggtcacaaatgtattttcttttcccttcttatattatatacacaataaaataaaataaaaatatgaaattatcctttttttgtgtggacattttatcatttaagaaaatgaaattaataattctaaattactatcttattacaaatgaaaattgtaaattaattaaatatttacaagcatccatataattttggtcattcaatataattcctaaatactaaaaactattgactttttttttttttttttttttttttttgtaaaccctaaaaactattgactaaaaaaaagtattttaacagaaaaagaagagaatatataattttaatgtttgaccacaaagggaaaaaaatatctcaaagttttttctttctttggtatatcggacggtatttgtgtggccagggagggctacctgagactccatatctgtctctcttcttcttcttcttcctcttcttcctctgcttcttcttcttcacatcactgtgtgcgtctctctatctctctattctatcatttcgaaatcctctctatccgaatttgaactcgtctcttcttcgtaaagagttcttaatctccgtctctgtgatttcggaatctggaggttttgaatttcttgttcgtatcaatcaaatggtggatcgatttagtgagattgctttacctcattagcaatg

SEQ ID NO: 35977 - DNA, 3003 bp, Unknown; identical to SEQ ID NO: 17590
  misc_feature (1)..( 3003): 2750-1469P.txt file - cDNA_ID_3091682; gDNA_ID_2926183; Annot_ID_200396

SEQ ID NO: 35978 - DNA, 3000 bp, Unknown; identical to SEQ ID NO: 6258
  misc_feature (1)..( 3000): 2750-1469P.txt file - cDNA_ID_3091690; gDNA_ID_2926183; Annot_ID_200389

SEQ ID NO: 35979 - DNA, 3003 bp, Unknown; identical to SEQ ID NO: 20287
  misc_feature (1)..( 3003): 2750-1469P.txt file - cDNA_ID_3091710; gDNA_ID_2926184; Annot_ID_200495

SEQ ID NO: 35980 - DNA, 3003 bp, Unknown
  misc_feature (1)..( 3003): 2750-1469P.txt file - cDNA_ID_3091714; gDNA_ID_2926184; Annot_ID_200494
tctatagtgtgtatattcagaaaagttatcaatagttcaatactaagaaaccggcctatatatatatatttgtggtcactaatttctccaaaaaccagttgccttccgtaaaaagatggaacctcagagaaaacactcgacagccctccacacgtgtcatccctgccggcgaaccattccatacagaatctacgccgtatttcacacgtgtggcatcatagctctcatgtatcaccatgtacactcaattgtcaacgcaaacaacactctaataacatgtcttcttctcctctccgatattgttctcgccttcatgtgggcaaccacaacttccctccggttaaacccgattcatcggaccgagtaccctgaaaaatatgctgctaaaccggaggactttccaaagctggacgtttttatatgcacggctgatccgtacaaggagcctccgatgatggtggttaacaccgctttatcggtgatggcttacgagtatccgtctcataagatctcagtgtacgtatcggacgatggaggatcttccttgactttgtttgctcttatggaggctgccaagttctctaagcattggttgcccttttgcaagaataacaatgttcaagatcgctctcctgaagtttatttttcttcaaagtcacattcttcgagtgatgaagctgaaaatcttaaggtatgtatgtattagtttctttgttcctaactaatccaaattttagaaaaaacattgtttcaaaaagatacatttttaaagttttctatgcgttctaaattagttatggatgataaattatagatttcaacaaaaataatcaaatattcttggtttagatttatagaaagttgaatcacaaaaaactaagcattggttatcaaaattttaaatgttttttttaatatgtgggaaaaagtttaaaattagactagttatgatttaggaacatagggagtatttatcaactagtcacttttttctttctatttctaagtaaatatcatataaagaaaatggtttggatttatatgttgattaccatcaactaatcacgtataattaggtttaatacataggtcaacagaaatttacacataacagattaatagtcactgttgtcctttaaagccttacgacgttcttgtcgacaatcttaatggcgtttttgtcctttacgaccccaaaagtttgtgggagactgtgacatatacccatgatatttcctattcatttattgcagtacaatcatgacactttaatgatttcttctcctaaacgataggagtatgtattagttttcttaatgacagcagagaagtctttatttgttagaaagtttgaaacacccatgagaaaaagatatttaattgtgtggtggaacagatgatgtacgaagacatgaagagtagagtcgaacatgtggtcgagagcggaaaagttgagactgcgtttatcgcatgcgatcaatttagttgtgtgttcgatctgtggacagataaattcactcgtcatgaccatcctaccattattatggtatgtaactattttgtaatgcatggtaaaagtttcgtcacaaattaatgtttctaaaaactcgtttttatctattaatttgtggtgaaggtgctacaacataacgaaacagagatgatgccaaaccttatatatgtttcaagagaaaagagtaaagtttcaccacatcatttcaaagccggtgctcttaatactttggtatcaactaatccatatctcggttaaactgtcatttctatatttgtaatatttcgttaaccacaacatgtattttctttgtagttacgtgtatctgccgtgatgacaaactcaccaatcattctaacactagattgtgacatgtactcaaacaatcctacaacaccacttcatgctctgtgctatttgtcagaccctaaaatcaattttgatttaggatttgtgcaatttcctcaaaaatttcaaggagtaaacaaaaatgatatttatgcatccgagctcaaacgcccatttgacatcaacacggttgggtttgatggacttatgggaccagttcatatgggaactgggtgtttcttcaatcgacgggcgttttatgggcctccgactactttgattttgcctgagatagaaacatttgggccaaatcggattgccgataagcccattaaagcccaagatattttggcgttggcacacgatgtagcaggatgtaactacgagtgcaacaccaattggggatccaaggtaagattaaaatgaactttagctttcttttatgtatgttgattttttggttatgtttacagattttgtttcttttacatcaactagtcttctcaaaatccatatttataaacatattaacaaaatttttgtgtaattaacataaacacaaaacacacataaaaatgaaaaaaatgaaaaaaaagtatgtttgcattcacatgtaaaacaatcgactctccaatcttgatttctgtgacattgttttgttattacttactagccatttgtcaaactttacagataggtttcagatatgggtcattagtagaagactacttcacaggatttatgctccattgtgaaggatggagatcaattttttgcagcccgacaaaagctgcattttatggagactccccaaaatgcctaacggatgtaataggccaacaaatccgatggtccgttggacttcttgaagtagctttttcaagatacaatccacttacctatggaatcaagccattgagcctattaatgagcttaggttattgccactatgcattttggccattttggtgtattcctctcgttgtctatggaattttaccccaagttgccctcatacatggagttagcgtctttcccaaggcatcggatccatggttttggctttacattatcttgtttctcggtgggtacgcgcaagatctatcagactttttattagaaggaggaacttatcggaaatg

SEQ ID NO: 35981 - DNA, 3003 bp, Unknown; identical to SEQ ID NO: 21047
  misc_feature (1)..( 3003): 2750-1469P.txt file - cDNA_ID_3091718; gDNA_ID_2926184; Annot_ID_200493

SEQ ID NO: 35982 - DNA, 3003 bp, Unknown
  misc_feature (1)..( 3003): 2750-1469P.txt file - cDNA_ID_3091722; gDNA_ID_1620724; Annot_ID_165894
ttcgtggggcagagaattatataggcgaccaactttaccattattcggacacgtagtgaagtgtgctttggggtaagaagatgacgtcactttgccgtgggatactagaatagtagaatttaattattcaagtttgctttgctttactatgcaaaaagtgtaagaaccatctattacgttaatatcttataagcataatcaaataatacaaaacaattgacaagtccattaatttacagtcgatgttgatttacgggaaggttatattgaattgaagataactggttaaattgtaagagatctgaaggtaaaaattagagataatcagtttttaccaacgatcgtataagtatctgcgtatgtgaatgtaaccatagtctattgatgaatttaaggtaaaccaaggaaaagtgattctattgcatcattaatcagtcaataagctttaccatgactttaaagttttctctaatgttgctcttctggaaatgacattaagtaaatcggtcatctttatccaatttttaattattatctagcggaataatcaactacaagacgttttcatatatttttttacaaaaagaaaaccaactttccactgaaaaaaattggtgccgtgccactggcggcatatgacatggtcaattacttcattttgaactggtctaactaaataattgaataatatttacaaaaccaagataaaaaacaaatacgaaaacaagtgtatatttgtcacagataacagattctttatgtaatttggcgtaaagtccgttcgtccaaaaccaacctattcacaatgtacaattaggtcaagtcgagttttaaacgaggaaaattgacagtattttgtataagcgcttcttgatatgagaaagaaagccttgcacagcagtaaggctgcataacaaacacgatcttggtcattactcaaaatcggaagatgaattgaattaagaaactcatacacacccaaaacaagtatgtatctaagtatcttccattactagaaagttcaaatcctctattattgttttctcaatttttaaaaaggaacagttactagtatagggagatgatttcgtacgtggatattcaacaaatgacgttacacttgattatgaagataccaagtttgtggaaccatacttgtttttttaatcgttgtcatttatgatgataaaataacaaagaaatcacatttagatttttgtttttgtttttgaaaggtacaatatcaagagaacatggaaagttgtataaattcaggcgaatccagcaatatatcaaaacgtctatggactcatttttgaaagtaacttatctcatatttatagtcgtcttctacattagagtttcaagtaaaggtgcttatgcaatggcaaacctatctccacccgttcgagtatatttctctcttaccaccagaggtttttgcatctcctttaagagttttctaacgagtttttttttatgtgtaataactgtagacttgcgttctgagagttggaatcaagtgttgcaaaggctgccagacaaaagcaaagagaaagttgctaaatgtctctggtaatagatccactagtgaaatattgttaaagctatagtgttgttataaatattctagctaatattattttcgaaacaggggtgagtacagttgagtataacgcagaacaagggctcttgacagtcacaggtgatgccaacccaacaacattgcttcataagcttacgaaatggggcaaaaaggcagaactagtctcttttcttggagacaactactcttcccatgttcctagaaccccggaacaaaaccaaaacaagacaatggagaagaaaaagaagaagccaacaaagtgttgtcttctaatgtgttttggaaataagagaagcaagaacacaaagattgagcctatggcgataccaaactggcaatatcgaggagtaggaaatgaaaatggcaatgccaggcctttcattaacgcggcaatgtcacctccaatggtgtatcctcctccacaagcagtgcctggcttcacaacacccataccataccctcctcctagtttttttccaggaagaccaccaccaccatacactggtgctggtatgttccagtcagctccaccacaatccccaccatattttccagttcccaaccctaggctgcattacccgcaccactgatacagttctttcagacgatacattcattgcctgtttcttctcttagctatgactcaaatgctgagtaataataagatggtaaattcttttcaacatgtaaggtatatgaagaaatgcaaatgaatgatttccacaataaggcagactagaaaacacatatagacaattaacttgataaacttttttttcggccggactcatgttttaaatgataccaaaaataaacatatcttgttgggaaattagtaaatattttatcaatttattaggattttttatagaaacgtatatattatttagtgtagacaatagagagaaacaaagaagtggttaatacttttattgagataacgcgttgaaagcttaccaaattttggtggattacgaccaaccacccaaaaagatttttacgcttgactaagtcctggttctctcttagtctctaccctttgctatcaaacattcagtctgaatctgagattaacataattatggcaattaatggcactcaaacaaaaaacacgattgagtcaaaaacaaaaaagaaattcctagtttgatttttatttatggttttgacttgagagggattttttttgtcccaacagagaaacgaacattgtgaggcttttaaatgggtcatatagacttatctgggcctaaccacaaaaaatggcccacttttggagaaactttgaaaataaacccgaaggttcgggaaaatacagagagagaaaatttccagtcgccgtcgtcaacattctccttttggtacacagacgagaacgaaagagcgaaaagaagatg

SEQ ID NO: 35983 - DNA, 3003 bp, Unknown; identical to SEQ ID NO: 35982
  misc_feature (1)..( 3003): 2750-1469P.txt file - cDNA_ID_3091722; gDNA_ID_2926184; Annot_ID_200481

SEQ ID NO: 35984 - DNA, 3003 bp, Unknown; identical to SEQ ID NO: 22293
  misc_feature (1)..( 3003): 2750-1469P.txt file - cDNA_ID_3091726; gDNA_ID_2926184; Annot_ID_200466

SEQ ID NO: 35985 - DNA, 3000 bp, Unknown; identical to SEQ ID NO: 19291
  misc_feature (1)..( 3000): 2750-1469P.txt file - cDNA_ID_3091748; gDNA_ID_2926185; Annot_ID_200576

SEQ ID NO: 35986 - DNA, 3003 bp, Unknown; identical to SEQ ID NO: 19273
  misc_feature (1)..( 3003): 2750-1469P.txt file - cDNA_ID_3091752; gDNA_ID_1620653; Annot_ID_163562

SEQ ID NO: 35987 - DNA, 3000 bp, Unknown
  misc_feature (1)..( 3000): 2750-1469P.txt file - cDNA_ID_3091752; gDNA_ID_2926185; Annot_ID_200563
tcacgtcggcgacagtgaagtcacgtgcacccttgaagaagtagacggctcggacgtagtggagcttcatggctaagtccatgggtgtgagctgtcgtggcttgttctcacctaccacagaagcaggcaccaccgaagagagcctgacactggtcactgggcttccctccattttatttttgtgagagagctgatatgtgtagcttataggcttaaatgggatgtgttatataaggattgagtttcgaaagagagttgagttcagaataggcatgggtatcactgatttaggacagttgggaaaactgtttccgtgacggcaacattaaatgtgggtgggatttgggtctttagcaacaacattagagttggacagttgagtcatcatattcagatccatccaacaacaagcacactttattacgtccaccttgtccttattggcttcaagcaataaacgcacatgtacgtgtcgtagccaactagtattatattacggtacctaacaagtcacattaatctataaaaaaccaagttcagtttcctggtaacattgtttccaccagcaaaaatgatcttaatacggatgcggttcatttccacctcaaacacaatcatgcaacaaatttcctgataatgattttacataattgtacgataactaaatcttgcgaaaaaacagtaaaatttttggtagagaacatccctattgccaaccaatctactcctaattgcgccctcagagatgttcatcattcgctgttgtgtcttgttaagaaaataaacacaagtcactgaacaatacctagttcgaaagagtcaacggtgatctttccaggtacctcagatgcttggacttggtgtattttcactaggccagttgtcctgattaattgcttgactcatcgcatgtagcaccatctagagaagcagcaaggtactcagcaaggctctgctgattactgctagttttgtgggtagcttctgaggtcacagatttttttggtgctatagacttgggaagccaggcttgacctgttgagctgctgctcgaagcatctgagcaattcttccataagactggcttaagatgcttccatggatcttcagccatagagttggagtaaaatcgttctgcccctggttccatgggtcttcttcctccatctctcccaaagcttgtgttcataccgcgtcctcgacttctgcctcttcctgagttaggatacgtgtttccaccccagtttgcattttgtcgtccataattggaaaactgtggaggagtattgttgtagctgcctcgaccaccaaatctattattccccatgttcggcatttcttgagagaatggaaaagggcgaggtacccattgaggtggacctgaatggttaactggtggaggcctaaagttgttattccaaccggcgggtggacctctgtgtgagggtgaaagatgtgccatccctcttggttcataatgagctgcatgaaagccaccatgattggtctgtgcctgatactcactacataatgatcctgttcaaagttataatgcaaggatcagaactggattactgttcattgcaaggcacaggacacaaacctaactgaattccataattgatgtgattttcatactgtcaattcctagaaagtgaaacttaaagagatatatcaaattaaagtagctaaagctaataagtttgaagcctgagactgagagacaaatttcttcctccattgatcttgatttgtagattataatcaagaacacatgactaaacccaaacaaagaacaaaaatttcatatagatttgtagaagagaatcatcacctaactctacgaaagcccaacaaccaaataccaaagtgaattcctgattctgttcaatcctatacctatactcaccaaggaccaactaacatactgtaagttaaactctcatgatattaggcaatcttctttatcagtggactactttctttggcctcacaagaatatagacaaaacaaaaattaagacagagtcattgactatcaaggcagaaacaagcacctggaggaactgatggtggaaactgaggtggtacaggagagcttccttgatgactaggagatgagatgtattgttgcttaggggtcttgtttttcttgaaactagaataagcagccatgggatcggtataataatcaaacctttgcgtttcaaatgaatcctgctggtgattggatgtctctgccaatggattggagaggtgacctgtgctcatagatgtttcagtacctgtagtagcatcatcatcattctgcgctgcagcttccattcgcattgcttttaacatctgttttcttttctctgaatcttccattgtgattcaactacaagatcaaaaggaaatttagaaatcaatccttcaaaatccaaaacacgagctactacaatgtaaaagcattagatacataatcaatctgaccttaaaaccccaaattcttacaattatcggatacccaaattggaaaaacgaaattgaaggtgaaacgaaccttcacaaaagtatggtttctccaaaaatcttcactttctcgtgaaaaccttcaactgtgaaacaacgatgatgacgaagcctttcactacataaacgaagacttccaaaaccgggttagtgttcgaccgtatttttcaattaaacccggtttactggtttaagcgattgaaatcattaaaccggcccattaaattttccgatagaaccttctctcagtcgctcaattgcccgaaaacaaaagtctctctctctcgatcgacgccgcaacgtgctcctttcaggtgatctgcttcttattctccatttcgtcatctctgttgtttctagatttggatcacgttttttctttcctcgatctagtgtttgttttaactgttttcgtaatttctgatcagatttaaccggaaaagttgaatcacactgtcgcatctctcacagtcgtcggagaagaatg

SEQ ID NO: 35988 - DNA, 3003 bp, Unknown; identical to SEQ ID NO: 20146
  misc_feature (1)..( 3003): 2750-1469P.txt file - cDNA_ID_3091756; gDNA_ID_2926185; Annot_ID_200562

SEQ ID NO: 35989 - DNA, 3003 bp, Unknown; identical to SEQ ID NO: 21100
  misc_feature (1)..( 3003): 2750-1469P.txt file - cDNA_ID_3091760; gDNA_ID_1620712; Annot_ID_165490

SEQ ID NO: 35990 - DNA, 3003 bp, Unknown; identical to SEQ ID NO: 21100
  misc_feature (1)..( 3003): 2750-1469P.txt file - cDNA_ID_3091760; gDNA_ID_2926185; Annot_ID_200559

SEQ ID NO: 35991 - DNA, 3003 bp, Unknown; identical to SEQ ID NO: 20156
  misc_feature (1)..( 3003): 2750-1469P.txt file - cDNA_ID_3091764; gDNA_ID_1620712; Annot_ID_165479

SEQ ID NO: 35992 - DNA, 3003 bp, Unknown; identical to SEQ ID NO: 20156
  misc_feature (1)..( 3003): 2750-1469P.txt file - cDNA_ID_3091764; gDNA_ID_2926185; Annot_ID_200549

SEQ ID NO: 35993 - DNA, 3003 bp, Unknown; identical to SEQ ID NO: 20158
  misc_feature (1)..( 3003): 2750-1469P.txt file - cDNA_ID_3091768; gDNA_ID_1620712; Annot_ID_165478

SEQ ID NO: 35994 - DNA, 3003 bp, Unknown; identical to SEQ ID NO: 20158
  misc_feature (1)..( 3003): 2750-1469P.txt file - cDNA_ID_3091768; gDNA_ID_2926185; Annot_ID_200548

SEQ ID NO: 35995 - DNA, 3000 bp, Unknown; identical to SEQ ID NO: 3127
  misc_feature (1)..( 3000): 2750-1469P.txt file - cDNA_ID_3091785; gDNA_ID_1620627; Annot_ID_162517

SEQ ID NO: 35996 - DNA, 3000 bp, Unknown; identical to SEQ ID NO: 3127
  misc_feature (1)..( 3000): 2750-1469P.txt file - cDNA_ID_3091785; gDNA_ID_2926186; Annot_ID_200648

SEQ ID NO: 35997 - DNA, 1154 bp, Unknown; identical to SEQ ID NO: 18864
  misc_feature (1)..( 1154): 2750-1469P.txt file - cDNA_ID_3091793; gDNA_ID_1620627; Annot_ID_162500

SEQ ID NO: 35998 - DNA, 3003 bp, Unknown; identical to SEQ ID NO: 18865
  misc_feature (1)..( 3003): 2750-1469P.txt file - cDNA_ID_3091793; gDNA_ID_2926186; Annot_ID_200632

SEQ ID NO: 35999 - DNA, 1882 bp, Unknown; identical to SEQ ID NO: 4610
  misc_feature (1)..( 1882): 2750-1469P.txt file - cDNA_ID_3091862; gDNA_ID_1620717; Annot_ID_165665

SEQ ID NO: 36000 - DNA, 3003 bp, Unknown
  misc_feature (1)..( 3003): 2750-1469P.txt file - cDNA_ID_3091862; gDNA_ID_1620647; Annot_ID_163302
ttgcggtgatatattaatttcagtcagtccaactttattataagagagtgttggggtttagtagattttgtatgaaaggcttgtattttattttttatggaacttgatatcccaacaatgtggttgttcttgttcattcgcatgttttttgtgtttctaagttttgagagttgatataagaattactttaatttgtcaagatctcgtcaagtgtttatacttgatgaaaatcttttggggatcaaaacggtttgaagtaaagatcgtactgtcgtactggtgtctgtagattgatattaaactcgaacaacatgattattgtaatataccttaactaccatataatttttttcaattctttctggatacaattgtaagaaaacagaaaaatcggaaaaatgagaaaattcaccaaaactaatggggttgttttgaaattagtttgatacttgaggattgacaaacgaattctacttttccggggaaagaattagagagcgaaacagaacaaaacaaacaaaaagtcatgtctccgacgacgacatcgttacgatccctaagcttctcgctttacgcttcttctaattctactccgatttctacaccaattgaggcccgacagttactgagttcatgcaatagattctacggtctgtcctcttcgagctcttcttcctcccttactacttcatctttgatcggaaatcttgttttctcatcaaggaatcagtctctctccgtaaaggtatacaatttcgtaaatttttgtgatggatttcaactttacggcctaaattcgagaacccatgttccacttattgagaaatctgcttaattcttatgtcacttgtagtcgattgggaaattagggatttctatatgtgccattgattgtgattactctttatgtggtctttttggtccatttgaagatgttttaagttaggtctctcagccacatagacgattacattagtcctgtgtttaagttcacactgtcttactttgattgaagctaggttgcgttaagggcttttaaataacatctaactttatgagtgtttggtgttgtcagtgtggctacatattgatgaaatgtatgtgtgttttgggataggtccaagcgttagctgctgaaaccgaacagccaaaatggtgggagaggaaagcagggccaaacatgattgacattacctcagctgagcagtttctcaacgcgttaaaagatgcgggagatagattagttatcgtagatttttacggaacttggtgtggttcttgccgtgcaatgttcccaaaggtaactttcccgttagctacttaacgattgtatctcttcgtgtatactcgatcatctctcatttcattcagttcgcgagtcttgaaccattatgtttcttaagcttgctcaaattatcggcttgcttattctaaagctgagactcttttcttattcttttccagctctgcaaaacggcgaaagaacaccctaacatcttgttccttaaagtaaactttgacgagaacaagtctctctgcaaaagcttaaacgtcaaggtgttaccgtatttccacttctaccgcggtgctgatggccaagtcgaatccttctcatgctctcttgccaaggttagttcttcttgtcccagctttctttaatttcaaacgtcacttgtctatcacgaaaccagagaatagttactgcattgtatagtcttgatggcgacctctaagtctaataagcgtctgcaaacatttatgcagttccagaaactgagagaggcgatagagagacacaatgtaggaagtatcagtaacatctcttcttcagcttctgagaaagttgaagattcaagtgaataatcaatgcctggttcagattgatcacagattattttgttaaatcgcttccctgtatatatgttgactgcattttccatgtggtgcatcataatttttgtacataaataaatgagtctgacttcgagttcatcgcctatcaagtatcagcttccctaaaccgagtaaaaccgggaagtgttgggtttcaaaattaacttggtgagttaacagttaacacacacatccaccgtttttagatagataagaggatgccctaataaaaccactgctttgtcttgggtaagaagaaacgttaacatgttagttgtcctacaaattcattcatctataaacgttaaagtctgtattaacgaatgaaagtaatcaaaagctacatatttattacacaaacaaaaatgcatcagttgcatctcgtctaagaaagcattttttcttcactcgaagaaaaataacaagaagttgaagccttaggctcacgagccaactcctttaacatgtcgagtttctaatccgagtaaaggatttgtatttcgtcgagaaagttgccgcttcttcaaatgtttggcatttgttaagttgcaacttgtctctcttcttcacgttgtccattgtatccttcccactggaatctttgtaggtggaataacaaacaaggaggaacagaaatcggtttgctaattggcgggttaatagttttgtaaaatggtagattaaacatgcgctctatcctgtaacatttctgagcttgagaacttgtagttgaggagaattcagtagcaaattcgttagtagcttccaccgctcgtttttcctagtattgtagctccaaatgtacatcattaatagatcatataaaagaaaattataatttcaaaaaaggctcaagttgaagtatccaacggtggtcaatttaagactataccaacgcctgtacttcaaaagtttctgcaagtattcattagcagtgacgaattcaaatttgaaaaaaaaaacttttatctgtaaattctccatccttaacggtcaaatttagtcgggcagcagacaaactctcaagtccgatcaggaaacgaaacgagaacaaaagaaaagagattggattttggtgacggcgtttccttcgccgtcgtgttcaccatg

SEQ ID NO: 36001 - DNA, 3003 bp, Unknown; identical to SEQ ID NO: 22338
  misc_feature (1)..( 3003): 2750-1469P.txt file - cDNA_ID_3091862; gDNA_ID_2926188; Annot_ID_200814

SEQ ID NO: 36002 - DNA, 3003 bp, Unknown; identical to SEQ ID NO: 22220
  misc_feature (1)..( 3003): 2750-1469P.txt file - cDNA_ID_3091881; gDNA_ID_2926188; Annot_ID_200778

SEQ ID NO: 36003 - DNA, 3003 bp, Unknown; identical to SEQ ID NO: 21309
  misc_feature (1)..( 3003): 2750-1469P.txt file - cDNA_ID_3091885; gDNA_ID_1620628; Annot_ID_162565

SEQ ID NO: 36004 - DNA, 3003 bp, Unknown; identical to SEQ ID NO: 21309
  misc_feature (1)..( 3003): 2750-1469P.txt file - cDNA_ID_3091885; gDNA_ID_2926188; Annot_ID_200775

SEQ ID NO: 36005 - DNA, 3000 bp, Unknown; identical to SEQ ID NO: 3141
  misc_feature (1)..( 3000): 2750-1469P.txt file - cDNA_ID_3091891; gDNA_ID_1620628; Annot_ID_47181

SEQ ID NO: 36006 - DNA, 3000 bp, Unknown; identical to SEQ ID NO: 3141
  misc_feature (1)..( 3000): 2750-1469P.txt file - cDNA_ID_3091891; gDNA_ID_1620628; Annot_ID_162555

SEQ ID NO: 36007 - DNA, 3000 bp, Unknown; identical to SEQ ID NO: 3141
  misc_feature (1)..( 3000): 2750-1469P.txt file - cDNA_ID_3091891; gDNA_ID_2926187; Annot_ID_140860

SEQ ID NO: 36008 - DNA, 3000 bp, Unknown
  misc_feature (1)..( 3000): 2750-1469P.txt file - cDNA_ID_3091891; gDNA_ID_2926187; Annot_ID_200752
tataaaactgtaagaactatatacagtaaagggtatttaaaaaacttctggttagataaagtaatagagcgagtagtgcaattggaggggtaggttctcagcgtcagcttccaccatgactaaaggaaaaacggatattccattagtttccaatcactttcacttacgttctccatttccacattcttcctcttccattttctttaatttcttcattcgtactttaagatcattgtttaatgtgtccactagtattacagtaagcaataatatatcattacgtcaactaaaaggaatttctaaggcagaaccttttttaaagcatccaaacccccaaacaatgttatgtgcggttaatatgccaacacaatcactagtcgcttacattaatctttggagataagttttacttttaaatcccctcactgtgtatatattagttttaaattattatgtgtgtgggctgtataatttattccctgatccgacttaaattccggatttgatttgtgtttgtgcatgaatcatagggaatcatattctcgttaaataggcacgttacatgtgaagataatgtataaaataaatacatatacctaggaacccattatttagtttctcgaacaaacagattaagtacgataattaaatattggagttctattcttcttcctttccggtaattattctgccagaccaattagaatcggtatgttgattgttgaaaagattgattgatgggtgcttcattttgtgcttggttaacaatcagaatacttgccctctttacttttatttcttttgaaatttcctaagaaatcgttttcggtgttgaaagaattaacaaaggttccaaatatctcaacttctcaagtcagagattagctttcatgtagtttttcaaattgtgtttatttcttcatctaattacttttaaaggtggctcgttcagtttttttcagaacttatctccgtacattctaaaactcatttttagttatcaagatatttttctttctctttagatacggattagtgaacttgagataggtatatctaatttaaatagacagctttatagagctatgatgacacttttaaaaactgatagatatgcaacaaatatcattattgcatgcctcacagttcacacatgttatttgaagtttgaacattaagtcataaacaacagtttaattacaataaaataatcaacatttgctagcaagaaaaagagaagatatggtaataaaaataaggtttattgaaagaaaagatgagaaaaggagatgaaagtacaataattgtatatatcgtcaaccatggcgacatgatcatatacatacatgtttaaaataattttggaaagtgtaaaagcaagtgtctaaggaagtgttatgcactaatagaagtataggacggtatctagtgagaagaaacaaagagtaaagatacaaaaaaaacagagtgattaacatttcctacatatattctatagttttttttttggaatatgttgtaacagttatgacatgattcatgtggaagctgctacaaaaaagtggaggaacgagagggaatagtaataaagcagaaaggggtgtttctttgagagagtacatttgtgaacgaggaccagcctttgtgggacctaagagtggagggtggttcagcttttagccgagacgtcctcatcgcccagcaccctggtctggtccatcctcctccactgtcgcctgtcggccttcattactctttaacttacccacacacattcttttcacttttcagttttgggtctgttcttgcagttatgatatatacggcatggtatatttatcttgtgacattgcaagttgcttttcacacatttttttcaatattgatccacattcaaatgggcttatttctgatttcctaatgtcaattttcttctgtttagccctgcactctgttcttgtttttgtacccgttaaggggctttgaaacaacatgctactttttattatgtgtagaaatttaggaaaaacacaacatgagatacggatatattgatggccaaagaaagtgaagagaatgctttattagtataacaaactatataaacatatcacatatgtgatatgtataacaagttactataatatgattcaaattctgtttagaatattttctttcatagataaagaaattgtaccatttacaattatttcacctattaactcctaaagtttattcatttgcatgtacggtgatatacctaaagtaaaagcaaccacaagtaactataactaactaacgtttaagccagattgtttttatagaaactccttcaaatccaggactggtcacgtcattaatatgtaattgtaaaaatggtttggcaaattgtgtgccaaacaaacaaaggaagatgcagagattgggaaatagacttgtacgtgatttgcaattttctgtgtaataattgtcagcaggcccgtgacctttatctgcattcccctttggctttcttcttctcagtttctcaacaatatatattcactatgacacacatgcatattcatttgatccatctttacatgttttcaataaatgtgtgtatacgtaactgttagcaagctttctttatgagaatatatctaagaattttcgtttcttctggatccaccttctcactaataactccatcttaatttggacttgaatctctaatgatctcttcaatatctgactctctcttgtcttactgtcgcatcctggttacatcaccgtttgaccacaattatattcgatgagttctatgtaacgcaaaattcaaaatgacagaaaagacaaaataattaaccaaaaggtcaaaaaacaaataagaaagaaaaaaagactgaaaaattgtcaatttcattggaaaatacaaaacattccaaactcaagcatcaataaattctctttacaacactcacttcccttctccaacctttaaacatttctctcaaaatg

SEQ ID NO: 36009 - DNA, 3000 bp, Unknown; identical to SEQ ID NO: 36008
  misc_feature (1)..( 3000): 2750-1469P.txt file - cDNA_ID_3091891; gDNA_ID_2926188; Annot_ID_200767

SEQ ID NO: 36010 - DNA, 3000 bp, Unknown
  misc_feature (1)..( 3000): 2750-1469P.txt file - cDNA_ID_3091934; gDNA_ID_1620620; Annot_ID_162249
gacttcagcttgatttgggttcgttcccaaattctgtctcagggattttgaccataaaccctaaaccctacagtgttgaagtgtttgagacttgagagaactgaaagaattgaacagagaagaaatacaactttaaccggtttagaaacaatcgagcctttttaggtttttggtttacaataatcgaaaaccgtacaaaattaataaccaaacgcttaaaacggttcgacgaaaccgaaccggattgcacaatttcgattcgatcctccttttctctaatggcatcctcttgtctcgtccggaaaggatttgtcgaaaatgtcgcatttgttattctctcactgtgatcccaattgatttcttcttcatcttcttttatgaacctggctttcgcatcttcttagctctgggccattcctccggtgattttggtgagcaaaatggttgatttagttgtcacgctgagtcacaaatgtcagcttttttggtttctggcttcatgattcacttccatttctgttttagtattttaaagtttgatcttgtccatttttataacatcacagtagcatctttatgtagtcacacgaacatagagtaagaagaatggttcttgtacaacattttggaagcttgatttgagtgatatctagacaagaaactcacagaaaaaaatatatatgttgtggaggaaagaatttagtaggttaactaataactatagtgcttgtggtgtagcaatttcttattttatcactgaaaccgagataagtcgtatttcagaacatgatttgctacgatggcgtttgtcttctctgttgggtgaaatgagtcccaaaatacatatttgcttgcatccgaacatgtgaatgggttcattttatcacacaagtagctcatctcatagtatcccgttccgcaacacgcacttcttacgttttcgaaacctgcaatgcacataggaatattatcataagaattcttgatttaagagcatttggtacatattgaaacttagccctatgtctttgcagggttgcaatggttgggaaaatatttttgttagaactttgtactaaccgaatgcttcaggatggtatatgatttctgaaacaaggtcatatggatttgaaaacaccagctggattccgttcagatctctgttcaactggaagactttctcttccatcttgatgttgaaatctctagccacaatgttgtattcttcaatacatttgcttccataaaagagctgagttgttctttccaggggtaagcatccaaaaggagagagtcccgacaaagacatcttccgagctccgagtctgtatatatctgtcacgaaatctgctgctattcctatcaggaaatattggtactcgttcactgagtacttccgtaacttgcggggaagaagatagtaattctccaggaaatcgttggttccgatactaatcaggtaaagtgattcactaataatctcattagctttctcttcacccaagtagcttcttagcctggtttggtattctttgtagtattccacttccttccatagcggcattacagactttagaaatcgatgacaattcagagaaagcatgtcagaaatctaagtccagtacagtagaatatatatatgttgtaagatatataactatgcttgacttactaacacggcagaggttgcattgtctaagccggttccagctgaagcgaaacagacaccagtggcaaagtctgcaatgttgtatgctggatctaggtaggcagggactgcgttcttgagtcccaaaccttcagaaatgaagtctggtgcaatccggccatttgaaaatctcccagtcgctttgccgtcaaagtaatcccggccatatggctggaaattgctcttcagaacagtagaaatctggttgttgttgcctgaatcaacagttgagtcaccaaatacgataagtgcgggaaattttgcacacgtttcaggtatcttcaccaagagctgagctgctagcaacaagaacgcaagaactctgtttcgctgcatgctttttacacaagttttttcaattttttgcttctgcaaaacaagaacctcacgattaattgggaagaacaattggagcaagcatttaagatggagaaagataggtatcttctatcaaacctgactaaaacagatttagctcgtgtagttaataccttggcctgttgttagatgatgcttattaaatactccttagtctgatatgtctctgtttatttttggccacagagagttagttgaggtgagtaatgagctgaaaatgattgagagtttcaataatagttgtgcagcagagagccgtatttatagctactaaaaaagagagaaagacagaatattttaaaatagaaggattcgtaccattgcaagcttcagatgtatatgtaacgcatcttcctttttaccggattcacgctcaaaactcaactctctgttcttgtatcacttactgtttttattgcttactgagtctagagtcttgaatgtaaagattatttgcactttgggtgaactgtgtcgcacgttttggggctttttagttcaaccatagttttggttgttgcaacgacaataacaagtaacggcaagaaagtgtctctcatgcgtcaaatgtgacatttccgataaagtaactttgttttttgagtctcaactaaagatttataaatttattgacaagtggttcataacataggtttgcgttttgaattaactagaggctattagcaattaagtggtcatttatcgtttgttgaattatagattaagtagttgaacattaatttccaaattctcccatccaaatgacgtcaaatctacacaacctctatattaatccagcaattttaattaaacacaagaatgaaactaaaaaagccaaaccacttagcaacagtaacatactgctgcttgttctgtttggtaggactgtaccaatcaggcccaggagataaatg

SEQ ID NO: 36011 - DNA, 3000 bp, Unknown; identical to SEQ ID NO: 36010
  misc_feature (1)..( 3000): 2750-1469P.txt file - cDNA_ID_3091934; gDNA_ID_2926189; Annot_ID_200911

SEQ ID NO: 36012 - DNA, 3003 bp, Unknown
  misc_feature (1)..( 3003): 2750-1469P.txt file - cDNA_ID_3091942; gDNA_ID_2926189; Annot_ID_200879
cctgaaccaccagagaaaagaattaagaccaaaagcaaaagaggtacaagcattagatgcctatgttggttccctttaggacttaaagtaatcaaaatcagtaaaacacacaagaagaagcttaaccattttttagcatataccaacacagaggattttaatattcaaaatctcaactttgatcaaaaaaaaaaaaaaaaaaaagatacaatggtctcaggaaagaaaagttgcagaaattggttggctaaaaccacagctggtttcactagacaggtatgtaaagctgattgtatataaaaccccacaagtctcagctaatggggctttaagaaacatcacatgtctaacggtagactgaaacagggatcatctgaaactcctttcacattttttacttattttatcagaaagaagtaaagcaaccaaatctctttctttttttctgtagtccctcaaaccaacttgcatcacttgattagacaataccaactttgagtatctagattctagaagaattaaaaaatgaacaagaaacttcgcatgtctaatggtggcatgaatatagtaccatttttctccccaaattcctttttcgctttccctaggtgctgtgatctttctaacgattcaaacttagccaaatggacaacaaccttgagcattctctctattcatctctcaaagcgtaggtacaaaacttaatatcaggaaaccatatcaaaacaaaaaagaccttgaccctcataagataaagggaaatcagtttgaaaatggtgaatcatgtggcgattggcgaaaacattatttatatccttcaatatctatctctcatttaacacaatcctgatcgagctcttaacattattagaaggtccagagaacaatatccaaagcaaatggaccaaaagaagtaaaagaatcaggacctgacttcttccaatgttacaccctcaaacctcagcaggagtctttgccacaatagagagagcatgtaacccgctcttcaactcatcttgcaacaagtcatatatcagcctatgtctcttgaccaagcttttaccttggaaagcatccgaaacgattcgcaagttgaaatgtgtttccccatcatcaccagcactacctctaacagcggcatgtcctgcgtgctggtaagaaacatcttcaacttctaactcaacaggatctagctccttctccaatttctctcttatcctcatccctctactccctaaagcaacaacatttgacccactctcagaatcatcaatcttttctgttcccaaatcctcaactagatcaggtttagactccaaatccacctccggaacattagcttcgtccttagtctcaggaatagacacaaagctggattctgaactctctccagaacttgaatcttcctcacctttgacttccaaatgaagagcctttttctgcatcagcttaagcatattaagtaatccattgtttctagaaggagacagactctgctgcaacccgagaagaacagcgaaatcaggtgttatcctcaaaatctcagggacaggtcttccagataaacccttgactaatagagcagctaaccctttagtgagaaccgaatcagaatcagcttcatacacaacattacgttcctcatcaaagaaagccctaacccaaacctgagaaacacatccttctactttattctccctcgtcttgaattgagaatcgagaggtgtcagattcttcccgtagaacataagctgctcgtatttagcctttggctcttgtaccgattggaaaagcttgacgatctcttgtagcttcggtggaagctcttcgattggttgaaggtctccatagctcgacggagatgatgaagccgatggtggaggaacaatcccggttgaaattttctggaaagtgatgatcgtccggcgaaaggaaggaacttccgacggttttagtggtcgtagaagaagggttttggccggataatggattgaagaaaacaaggtccgtttgaatgggattaaacgaagcgaggaagcgcaacaagaagaagacatcgctgctgccatagtcgcgaacttgaaacttcgagagagactgagatgatgatgaaagctctccttcttcactttttctgagtcaaaaaccaataccgccaattaggtagtaaccgggaattaaaccgggaatgtaccaaaatccaaaaattagatgtaaaatcaattgtggggttgattatgaataattagaaagtatacgactcttttcataaataaggaaaagaaaaagatatctagattttttttgttttgttttgaagcatcgtcttcctggttcttcgttctcttgcgttcgtcacctcaaacacgtccgccattattatatatcaaatcaatcatgtccgaatccagcttttaccaatgtaagcaattaaattaaattaaataaaaacacttttatcaaatttaatcaaattaaaaaactgtccctttcttatctgagattctattgtttctgtctacttccacagaaagaaactgcatctccgtttttttttctgatttgaggctttccttagatccttgagagcaaaactgaatctgggtaattttaaaaatctcatttttacgacttatctcttttgaacgatctgttttttcatgtaagtacgatttcacctcgagatgatcgatcattgctcttctggttcttccatgtttgattaaatgttataacttgagggttttgtttcttttggattgttctcgcatttgttgatctatggttatcaaaagagtttggatttacagtttttggttgcagctgaaatttttcactcttttcttctctgttttgctggataaagttggatttgattcacattgttgtttagaatctagatgaagttgtaagattccttgtattgtgtttgcttatgcatgattgtgataaagatttaagttattttaccaatgtacaatgtccagaattgtcgtcgggatg

SEQ ID NO: 36013 - DNA, 3000 bp, Unknown; identical to SEQ ID NO: 18108
  misc_feature (1)..( 3000): 2750-1469P.txt file - cDNA_ID_3091950; gDNA_ID_1621102; Annot_ID_171464

SEQ ID NO: 36014 - DNA, 3003 bp, Unknown; identical to SEQ ID NO: 18109
  misc_feature (1)..( 3003): 2750-1469P.txt file - cDNA_ID_3091950; gDNA_ID_2926189; Annot_ID_200865

SEQ ID NO: 36015 - DNA, 3003 bp, Unknown; identical to SEQ ID NO: 18106
  misc_feature (1)..( 3003): 2750-1469P.txt file - cDNA_ID_3091954; gDNA_ID_1621102; Annot_ID_171468

SEQ ID NO: 36016 - DNA, 3000 bp, Unknown; identical to SEQ ID NO: 4613
  misc_feature (1)..( 3000): 2750-1469P.txt file - cDNA_ID_3091954; gDNA_ID_1620717; Annot_ID_165695

SEQ ID NO: 36017 - DNA, 3000 bp, Unknown; identical to SEQ ID NO: 4613
  misc_feature (1)..( 3000): 2750-1469P.txt file - cDNA_ID_3091954; gDNA_ID_2926189; Annot_ID_200861

SEQ ID NO: 36018 - DNA, 3003 bp, Unknown
  misc_feature (1)..( 3003): 2750-1469P.txt file - cDNA_ID_3091991; gDNA_ID_1620620; Annot_ID_162274
gctggtagtttccatagccgcccccagcataaccaccgtagtaggcgttagggtcctgaggaggaggtgcatatccgtatgcttcatatccttgaggaggatacccatagtatcctccaccaccaccatactgggcttgatcaggttgagtctgtgaaattcgtggatcaacaagtcatcagatcacataacgtatatgaaagcgtagtaagcttggtgcattgtctaacagatacaaacctgtttgttggaaggactgcgaccccatgaaagacgaatgctttgtcccccaagttgtgttccgttcaacacagaaagtgcttgctcagcacatgccctgaagcatacagacagattaaatatgtgaaaaaacattctcaaaataagtaaagatgaagttcgtctccaagttcacatttacctattggcgtattgaacaaatccgcaacgttttcctgcgggtattttcacatgaactagttcaccaaattgaccaaaaactgacttcaaatcatcttctgttacactttgatccacagctccaacaaaaatctggaatagagaacataacgcttcaatttcaacaatatatcccacagagaaaaaggcttaggcaacgtcaaagaaaaaaaaggcttagggaaaccaaaacaagttacgcactgttgtgttagttggatcactttctcctgaatttccttgagtgttctgatatgaagctgcaataaaacagtcaagagaaggtaaggaaaaaaacctcaaacatctatttatttaattaagctgacagtgcaaggacacagacactaacacaaacgcacacacacgacaatagcagtagcagaacttatccaaatcaagacccaaaattatcaacatataaagcaaatgccatacataggttacagctcgaagataaaggtaaagtgattctgaagttagttgctaattaatacaaaaaagcacattaaagatatactaggggaagtgcctgcaagatccaacttcgagaaattagagaatcggacctaaattctctagggtatcacaagtaacctaaattccttccaaggtctgacagtcttaccattgtaatcaacttttccgaaagacgaaatgtaacactaaaaaaggttgcaagtataaatttagaggcacaacgtaactgaaagaaggaaaaaaattgcagcactaactactggaaaaagatgaattgagaggtatgaaaaagatatcaaaacactctttaaggattcaaactggacaaaataaagcgaagagtaatgaactatgtaacatgaaaagaaataaaagatagggctaaaaattaaaaggaaagacttatgcttgataagtaagaaactggaaaataatttgcaaatggagtaaaagctttgtaattaacttcttctgaaaacataaccaactgacctaaatgaggccacgcaaggtggaatcattttcagctgaaatcagttccaggcccccgaaagagagcctcttgttctcctgcttaaagacaacatgagtttttttcttataagttttaggatgttttgcgatattaaattctttgaagagctgaaaggcaagaagcgggagaaaagggtagacagattctccagtaatcagaaagatagcagtaaaggagtaccccaaagaaaagacaatcaactaacatagacagtgtaagacaaagtgagtcatatcatcactcaacttattcataagtgatcagatatcaggctccttaatatcaaaacatacctggttgcattgtaagaggcttcttgttggcagcaggaccagtacgcataggccttgatgagcagtattgaccattcatttcagtcatggcacgaatctgctcactttcatccgcaaacctgacaaatccataacccttggaccgtccagtagtcctatcattcacaactttagctcccttgacagaggaatacacagctttaaacgtttcagtaagcatgtggtcggtaacatcaggtgccaagtctccaacaaaaactgtgtgctcaggcccttcagcctggcgtctctctccagctccaagctgagcccagttcaacctgaaggcctgctcactgctcggcatcggagcaccattgtaagtctgtaaattcctctcagctgtagcatggttcacaaactcaataaagccataaccttctgaatatccgttctgtttattgcgaataactttagctgctgtagcctgcaaccacaaaggatgaaactttcaatacttgtagaagaaaaacgagagactaaaaacagaaatcaacaggattttcaaaattacctcgccagtaagaccaaagacgttcatgagatagttctcatccatccatggctgcaagtcaccgatccacagggaccggatctcaccagctgatcctggattctgagatccaccaccaccatactgctgctgctgtggttgaccagaagacggtgcagactgctgattccatcctgcaggcggctgaccttgttgttgctgctggtgctgcatcatccacgactgctgctgctggaggtaagcttgttggtcggaaggaatctgccctggccctgttgcagcaccgttggaagctggaggtggctgctgcatcatgacgacgataacctagcaaaaggtacgactgtcgtagatgcaattaaagggttgagctcgaggacgtaagggcaaaagagagagagagagaaagattcgctgtcgctgtttcttttttatagtcaaaagttggttctaatatggcccaatataaaagtttgagctcggcccattataagagcactcgaacaacccggttaagtaagtctagggttgaccaaaaaaatcgatacgaaccggtcgggattggtttgggattgagatgcctgatttcgaactctcagcgtcgccgatatgttttgtcctgttaaaccctaaaactaaaaccccgcgaagagagaagagttctctgtagtgttcttttgatg

SEQ ID NO: 36019 - DNA, 3003 bp, Unknown; identical to SEQ ID NO: 36018
  misc_feature (1)..( 3003): 2750-1469P.txt file - cDNA_ID_3091991; gDNA_ID_2926190; Annot_ID_200958

SEQ ID NO: 36020 - DNA, 3003 bp, Unknown
  misc_feature (1)..( 3003): 2750-1469P.txt file - cDNA_ID_3091995; gDNA_ID_1620620; Annot_ID_162270
tacatgaaaagattcagctaagtgtgatcatgtaaaatgaaactaacagaggttatttagatgatcaaaacgaatattaagactcttgtagaatccatttgtagagtaatatattctgatgtgcttctttctactatccagtgaaggagaaaagatgggtcaagtttagacgagaggaggacccaacctctattcctggtaactcttctttaaaacataaaatgggttgttatatacgaccatatattcatttacttgagtgatgtcagatctgaaataagcacatctataagatatatggcatgtatacacgaatctagttacatttttgtttgatcaatgttgtagttgaatggatttgttggctgaatgggcagcgaaaaagggctcctactcctgaggtaagataaactcctttttaaccagaattatttgtggtcagcatagtgttcttaccatggaagtttttcattgcatacagactggctatgcttggcctttgatattggtgtttgttattggttcaggaaatgattgaacttgaagcaaggcgtgagcgtgtaaagcttaatgttgctcgtaggtgtttcagcttataaatacattttctaaacttatatccttttaaacgtcttaaaattattatttccttgtgtcattgatccttactgcaaacagtttatgactttgaggacttgattttatgaacttcgaagttgtgaatgaacaaagtcaagaattatttctgtttctgtgttagcaagtcaagaaatccgtatgcaaattttccatttaatatgtcgctcaagttcaaggcaaaacatttatcgtttttcttttgcctttatttccttgtcaagttctcaagaaggaagaggaggagaagaaagccagagtaggcaccggacgcaaaatcaccattggtaattaacattagagcccagaaaatttgtttcatttatgaattggtagcttaatgttcggtctccttgtgtaaaggtaaagttgatggtccagatttgacaagctttgttcgccaatttccaccagattcaaaaggtattacattttctctgccaatagattaattgagtcaccatagatgctgatgactaacttcttaggaatcccttgtgtaaatttgatagagattatgatggatatgcgtttatatttttgtggtgtttgacccatgaaatggtgtccattggctgatgattataatagttttgtgaaagaaacatcttttgaatgttccccatataaccattatgattgcggtagcttaaaagggcaacaaaattgttctcatgcaccattatatatcgtttaagtcatttgttgattcaagggctgaggttactacagttgctagatttcttataaccttaaaagagattatggttcgaccataaagtcgtggaagtaagactgacagttaagtttatttcctttttttgttaatgctttaaggtggtgaaccagaggaagctagtgaagaagcagataaatcaaggtgagtcatcatgattcataatatctccgcactaatcatatatgtgttaaatcttcttacattctattttttcctggatgcaaagcacaacatctttcagaagactaacataaccacatgttctcacattgctttacagggccaaggaacatgaacccgagatagtttctgcagaaccacccgaaccaaagtaagtctagccaacttgacattgttaatcctaaagttcagattctagctcacggatacgaaacatgactcgttctttctgatagttacagactgctactatgctgaaactgttctctatgaacataagttatgtattgtgtttggtatgctttaaattaaactaatgttaatgttgatgttgatgatgatgcaggacaacagagccatcaggatctggatcatcatttaggcccgggacatggcagccaccatcctaaacacatctctcttcacgcagatgacaaaccaacatactattcaattattttgtttgttgtactctacacaaccgattggtttgagccttacagatgagccataagaccagagagcttttcaagaccctaaaattgtgtcctttcacgctgtcattgaggacttagaagagtcaaaatgagaagccatcttcttatactttgttttgtttagggtgtttgtctcttggcataatgcttgagacttttagcctgccttgtccttcatagctgaagaggagcctagctaccttttgtttctcttcgttgacttgaataaaacagtttgattgaataacagttattcattttcatgtcatgatggtagtggatataagaaaaaacaaatacatagaataattattttaatgtttcagaggagaaatcctacttggcttgtgccagactcataacccaatcaaaacttcgtattaccaaaataagtgtagttctaaattttattctggtttaggctgtagttataaattactcattttagtttgtgaatataaaattactttctgcaaaagaaaatattctcatctttcgacgaaaagccaattattcgaatgttctcacgttggtctgtagctgtaaactttatagtttatataataaggtgttctactgttcttatataatttgcaagaacaaataatattaaatgcaaataaaaaatagtcaacggtccaaagtggatcataagccgtccgttcggtcgtctgaacttcatccaacggttaaaagaaatatacctgacgtggccttgggccattgtatattagtagtgagtgtgcccttggaaggttctgtaaaatgttttattcgcctctatcagaagcttgacgaaatctcttctccgtctctctctctctttccctcgtccattccacgatcttcttccaatctcaaatctcccattttctagtgtttcattttgatccttcttccttcctctggagatttctcaaatctcttcaactattttgatttgccgccatg

SEQ ID NO: 36021 - DNA, 3003 bp, Unknown; identical to SEQ ID NO: 36020
  misc_feature (1)..( 3003): 2750-1469P.txt file - cDNA_ID_3091995; gDNA_ID_2926190; Annot_ID_200954

SEQ ID NO: 36022 - DNA, 3003 bp, Unknown
  misc_feature (1)..( 3003): 2750-1469P.txt file - cDNA_ID_3091999; gDNA_ID_1620620; Annot_ID_162258
atttatttggcagtctctacgactacgatcgtacgtccctccttccatcaccgtttgttttatttattgtttcttttctttttttactttaaacaaccatttatcatgttttaagacctcgacatgtaattcgaattagtattgcattaagatttaaagagttacggcggtggatcggtggtagtcagtgcaagtaacggatcataattgcggttgaccaagcctctttcactggcctctttgtaaccatgaaagctgagatgctattggtacaccactaagtcccaaattcccaataatcgtgcgtcagtaaacatcaatttcgagaggacaagtatcaaaatgcgatatctgctgttacaaatattcaactcagttacaaagcccttaacaatgtattgatttctaattttctataaagtaactttgtgaatacacctaagtttatcaatgaagaataaaattgtttaaaataatcgacaaaataacattatacatgaattttacaacaagtgtttgagcatagtagctaagttgttttcttggggtactctcttggtccgaaaatggtggaaccaaccctcacattggtgcttcccatctcaatctgcagaaacatagtcaaagatcatcttccacatatatgtggttcctcggatgaaagaaagaacacattcaaatgattttcgatattgagttgattgcattttcgatattagaagagagacaaagatattaccgctagctcgaagtcaccagacatgcccatggacagttcaaattgatcctcagccattccaagtgccttgcatacatcagctctacagtttgaaagtgtctgtcccggtttatggggaaaagaataaaccttggtaagtaaaacttgtaggaataacccgagaacacgtaaaacaagtatccaatcaagtagtagaataccctgaagttctctggggtagacgtataatcaggcatcccaatagtcattaatccggagaataccagatttggacagtgatgtttcacatgtcttgctagctctacaacgctagaaggttcgattccagatttagctgcatccataatcaatcagtcagccaactgaagaggctggacaaggaaatcagcatagaggtaaaatactcacaaacttctccgcttgtgttcacttggaccaaaacctttagtggatgtctcccaagatttgaaacagctcgatctagatgatttgctacctgtgaaatcaatcccaagtgattgtataaccaaaataacctcctagtaaagtgaattgtgcaagttaaacgccacaacaacctctaatcgctagttataataccttttctccatccacaccatgaaccattgccaaatttgggactccagctgcaaacattggattaaacgactttcactttcactaaacccctaattcaatattaaagatggggataaaagtcagactcaatagcgttttggctttgttgctctgtaaatgccccacgaaatgccactctatatcttccggaagctgtatatcaatcaaacaaagtgaaggagaagctccattagcatcatcaaaagcacaaaatatatcacattcccagaaaatggagagacacatagtagttagtgattgaaggataaacattcggattttgaaatgaaatcgattatctagtgaagataacaaggattggagagaggaacctgtggagctttatcgatgatttcttgaacgtaattctcgccgaagcaacggtgacctgcgtcgtagatttggcggataagtgagacgggtttagtcttggagactggaaggaccctgacccgctcggcatctcttcctacttgctccgccgccttacgagctctaagaatcacagagcggagagcacttgcgacggttgcctccaccgcaggagctgccatcgccaatcgccactaacgcctgtcgtcaatttgggcttcttcgggagtaatgtttttgtcacgtaaattagtttatggcctttaattggataattcacggtccacacgttcaatactaattgcgattatttatctcttcacttttaatcaaaatttccaaggcagagacacatgtaagggttgatgtatatagtcatcaattcacgagattattggaatctttattgcataaacaatatcaaaattgtgtttttatatataccctttcaaaacgttatgggattcaaaattacacccacacccaccacttattgattggacataacatcattcaatgtaaaattacacccacctcttattcatgttttaattttcacttctgtatatatttttcgaatttcatgtattctgtttgtacttttttgggtcttatgttaagcccatttgtgggtttgtaaaagtctttgacaatatccaataaatcagtgaaaaaaaaaagaaaaaaaaaattattatcactgtaaacttcaaatcaattcaacttgtgctttacatgggtcttcgctggaccaatatgttttgtgggcctttcaagcccaacaatagttatctaccctagctcaaaaagagttatcttattctcattctctctctctctgccgcagctatcaatttactggagaagagatggtgggatcagaggttttggaggaatgtggagaaaaaataagcaagaaagagtcaaagaagcgagccgctaaactggagaagttgctccgtaaacaggaacgagaagaagccacatcatcatctctttctctggaggaggaggatgaatcgtgttccagcaactacggtgacgtgactactaacgagttgcagtcggctgttgagggaaaagagctcactgatgtgagcaacttggttgaagagattgtggggtcagaggtttcgatcagaggtcgactgcacaagaatcgcttagtcggtaccaaattgtttgtgatcttgagggaaagtggattcacggttcaatgcgtggtggaggagaccagagttggtgcaaacatg

SEQ ID NO: 36023 - DNA, 3003 bp, Unknown; identical to SEQ ID NO: 36022
  misc_feature (1)..( 3003): 2750-1469P.txt file - cDNA_ID_3091999; gDNA_ID_2926190; Annot_ID_200944

SEQ ID NO: 36024 - DNA, 3000 bp, Unknown; identical to SEQ ID NO: 4642
  misc_feature (1)..( 3000): 2750-1469P.txt file - cDNA_ID_3092020; gDNA_ID_1971690; Annot_ID_175073

SEQ ID NO: 36025 - DNA, 3000 bp, Unknown; identical to SEQ ID NO: 4642
  misc_feature (1)..( 3000): 2750-1469P.txt file - cDNA_ID_3092020; gDNA_ID_2926191; Annot_ID_201073

SEQ ID NO: 36026 - DNA, 3000 bp, Unknown; identical to SEQ ID NO: 4680
  misc_feature (1)..( 3000): 2750-1469P.txt file - cDNA_ID_3092028; gDNA_ID_1620721; Annot_ID_165830

SEQ ID NO: 36027 - DNA, 3000 bp, Unknown; identical to SEQ ID NO: 4680
  misc_feature (1)..( 3000): 2750-1469P.txt file - cDNA_ID_3092028; gDNA_ID_2926191; Annot_ID_201062

SEQ ID NO: 36028 - DNA, 3000 bp, Unknown; identical to SEQ ID NO: 4673
  misc_feature (1)..( 3000): 2750-1469P.txt file - cDNA_ID_3092031; gDNA_ID_1620721; Annot_ID_49194

SEQ ID NO: 36029 - DNA, 3000 bp, Unknown; identical to SEQ ID NO: 4689
  misc_feature (1)..( 3000): 2750-1469P.txt file - cDNA_ID_3092031; gDNA_ID_1620721; Annot_ID_165817

SEQ ID NO: 36030 - DNA, 3000 bp, Unknown; identical to SEQ ID NO: 4673
  misc_feature (1)..( 3000): 2750-1469P.txt file - cDNA_ID_3092031; gDNA_ID_2926191; Annot_ID_141044

SEQ ID NO: 36031 - DNA, 3000 bp, Unknown; identical to SEQ ID NO: 4689
  misc_feature (1)..( 3000): 2750-1469P.txt file - cDNA_ID_3092031; gDNA_ID_2926191; Annot_ID_201050

SEQ ID NO: 36032 - DNA, 3000 bp, Unknown; identical to SEQ ID NO: 3808
  misc_feature (1)..( 3000): 2750-1469P.txt file - cDNA_ID_3092039; gDNA_ID_1620666; Annot_ID_163947

SEQ ID NO: 36033 - DNA, 3000 bp, Unknown; identical to SEQ ID NO: 3808
  misc_feature (1)..( 3000): 2750-1469P.txt file - cDNA_ID_3092039; gDNA_ID_2926191; Annot_ID_201031

SEQ ID NO: 36034 - DNA, 3000 bp, Unknown; identical to SEQ ID NO: 6338
  misc_feature (1)..( 3000): 2750-1469P.txt file - cDNA_ID_3092070; gDNA_ID_2926192; Annot_ID_201173

SEQ ID NO: 36035 - DNA, 3003 bp, Unknown; identical to SEQ ID NO: 17816
  misc_feature (1)..( 3003): 2750-1469P.txt file - cDNA_ID_3092078; gDNA_ID_1621089; Annot_ID_170628

SEQ ID NO: 36036 - DNA, 3003 bp, Unknown; identical to SEQ ID NO: 17816
  misc_feature (1)..( 3003): 2750-1469P.txt file - cDNA_ID_3092078; gDNA_ID_2926192; Annot_ID_201169

SEQ ID NO: 36037 - DNA, 3003 bp, Unknown; identical to SEQ ID NO: 32013
  misc_feature (1)..( 3003): 2750-1469P.txt file - cDNA_ID_3092085; gDNA_ID_2926192; Annot_ID_201165

SEQ ID NO: 36038 - DNA, 3000 bp, Unknown; identical to SEQ ID NO: 6330
  misc_feature (1)..( 3000): 2750-1469P.txt file - cDNA_ID_3092089; gDNA_ID_2926192; Annot_ID_201161

SEQ ID NO: 36039 - DNA, 3000 bp, Unknown; identical to SEQ ID NO: 6344
  misc_feature (1)..( 3000): 2750-1469P.txt file - cDNA_ID_3092093; gDNA_ID_1621089; Annot_ID_170619

SEQ ID NO: 36040 - DNA, 3000 bp, Unknown; identical to SEQ ID NO: 6344
  misc_feature (1)..( 3000): 2750-1469P.txt file - cDNA_ID_3092093; gDNA_ID_2926192; Annot_ID_201160

SEQ ID NO: 36041 - DNA, 3003 bp, Unknown
  misc_feature (1)..( 3003): 2750-1469P.txt file - cDNA_ID_3092098; gDNA_ID_1971693; Annot_ID_175093
tcaaaaaagtgttttagagtataactagactcataaagtagtacatcgactcctgttctgttacaaccaaaattcatatcttaaggatcacataactgaaacctgcatccacaaatacgaggcaaacatagtgtttccttcatcatacatactagactacctataaatcagagatcaaactatgaaatccgcggattcattcagagtctttctcgcacgccaatacactccattggctgtctctgatgttcccagctgcaataaacatcagaaagattgtcagttagcatacttgacactaagtcatagtattggttttggtcagggtattaagaatccactttacctttgtctccaatgagtagtaattcttccacagctccacgtcttgaccgtaacttgcaacagcagaatcatacagcttccgggcattactgagaccatctttatcacctactgatatgaggttggtctctatttcaatgcaacctttgtatagaacaagactgggaccaggaagagccaagaacctgcagttttacggtaacagtggtgagaataaagtccatgtgtgactcaagggactggaggagtagtgactcacctcttgtatatcttcctcgcactgtgggccccttttgtttcaagaacaaatttcaccactgtggaagcaagagaaaacacatggtcgctcccatggcttttggttgctgataggatggacatctctacaagtttgtccaaataagttcgctgatgagcaaagaaattaaaagcctgcaatacaataagcattttattagtgtagtcttaacaaactagtgtattgtctagaaaatatattagtcacataccattagccacaagctctcagattctgagatcggtactttcctcaaagcatttgaaaggagctcaaagactgtctgaaaatctgctttactaggagatgagttctctgaaagtgatcttatttcaatggaaactcttgaaagccacaacttagctgatccagcaaatttttcagagcagagcttttctgctagcttctgagcttcatgagtcttttccagtttcaagtacagagaaacatattcatcagcaagctcttcagtcaaacagccagtttcatcagccttttggtacacgtttatgatatgtgaaatgatcggattagacaaagaggagatttcattctcgtcgccgtttgactgtacaatagcctccatcagaaaatttatataaatctcaaacatagaacttgacgtaacagtttgcaagccttcttcaaaaacctgcattcaggggacaagatttaagacctatcagatattgtactttctagtttctactactaagccgaaacagattgtggtaaagcaagttagtatagtcctaaagaaaagcccccccataaccaatgttccacctgtcctctccgacattattaaactaggcaatttgacttcaggttcaaaccaaaaagagtgagcgtaaaatcaagactaaagatttgatctatgttaaggaaatgcagcacaactatggccgccacattctttaacagatttcagcatttaataaatttctaacccctagtcataagttaagatttgtttacctgaatagccttttgcatttgaggatttgcaaactctaggcctgcctcattgctaatacaaccactcatttcatgtcttgcaagccaattccagtattcaggttcattgcaaaaatcacgcttcaggtcacttagaatggtattgcgcatttcatctgaatgcgctaagtctgttgcctctagaatctccaaaaaacgcttcctcaagtcaaaactagatggaatagcctcaacggctccactatagatggtctgaagaacattggaccctttctcttttaagaaatcaactttctcagtcacatcctcaacatcttcgacaatagagtcctcgtcattctcttctttttcatttccttctttctcatctagcgacataaataactctttgttctcatctttccattgctcatcctcaacggttttcgtgtcacgcaccaaacttcctttatcttcaccaagggcaactttacgagctttcagcttatttagaaaagtaagttccattcgcagatactcaacccacaggtcttcagagtttgaacacactctcagcccattcagcataagagcacgagctgctgtaacattcaagtttctatcaaattcccaagatgcagcatatatccacactccagccacttttggatgaaaccttattgcttgagccaatgcctacacatgtttcagataatataaacgcaattaaacatcgacatatacccaccaaagacaaatcattaacaaagcaaccagcaaatttcaaatcttttacctttttcattcttccatgcctcttctgtttacaaaactcgagatacctaaaccacaaattgatatcacctttatacctcatcgtcgccaatctataaatctcaacaatcctagccacaccggcgaaatcagatactgatttcttctttctcttcttagtcacacgcgccaccgatttcctccgtagctgacggagctcatcgagcttaacctcatagtcaatataggctatgaaatcttctttgagtgggcttggacgcttgagccggtactcaaacttacgccgctgcttcacgatctcagctatctcagcacgagtgaagatttctcttcgttctagatcatcaagctcgtcaaccatccgctcgaggcggtattgaactacgtcggccatggctgctgcttctcgattctcggcggggactgataacggtagggcaaacgcttaatgcttcttcttctttcttcagttattatataatgggccgtaagagtaagaagctattgggcctacgtctaattttatcacggcccaatgttaaaactcttgctatgagctatttgttgttgttctgggggaaaagctttagaagttgaagacgacgatg

SEQ ID NO: 36042 - DNA, 3003 bp, Unknown; identical to SEQ ID NO: 36041
  misc_feature (1)..( 3003): 2750-1469P.txt file - cDNA_ID_3092098; gDNA_ID_2926192; Annot_ID_141100

SEQ ID NO: 36043 - DNA, 3003 bp, Unknown; identical to SEQ ID NO: 36041
  misc_feature (1)..( 3003): 2750-1469P.txt file - cDNA_ID_3092098; gDNA_ID_2926192; Annot_ID_201145

SEQ ID NO: 36044 - DNA, 3000 bp, Unknown; identical to SEQ ID NO: 8296
  misc_feature (1)..( 3000): 2750-1469P.txt file - cDNA_ID_3092101; gDNA_ID_1971693; Annot_ID_175092

SEQ ID NO: 36045 - DNA, 3000 bp, Unknown; identical to SEQ ID NO: 8296
  misc_feature (1)..( 3000): 2750-1469P.txt file - cDNA_ID_3092101; gDNA_ID_2926192; Annot_ID_141099

SEQ ID NO: 36046 - DNA, 3000 bp, Unknown; identical to SEQ ID NO: 8296
  misc_feature (1)..( 3000): 2750-1469P.txt file - cDNA_ID_3092101; gDNA_ID_2926192; Annot_ID_201144

SEQ ID NO: 36047 - DNA, 3003 bp, Unknown
  misc_feature (1)..( 3003): 2750-1469P.txt file - cDNA_ID_3092108; gDNA_ID_1971693; Annot_ID_175089
ctgattctgtctcctccctaaatcatcattcatcgcagcgacatgttagattgttgaatatatgcttgtgtttatgaaaatggcagcataatgatcattacctaagagtattgataacagaatgagaggtgaaaatctggattgcagagaggtaaggaacatagtattggaccaatgtttcgcccgtttccgatacaatggggacacctgcaccgtaagcactccactcgtcgaaacaatcccaaaaatctcccaacctgaaatactcgacgctctggctctccaacggataccatagaggattaaggttcttgatctgtgtctgccaaaaaacacacagtttcagatcctaaattcagagaattgttttaagaaaaagaaaaaggcgtaaacctttgggagggaataggcaggcacaatcggtgtagtgcagcgtaagaatcggtctaggttagattcactgtcaaaaaccatcattatccaacaaagaaccaaacttcgacccagaaaaaaaaaaaaaagagagaggagagagtattgcgggattctctttccctgacgtttcaaagagcttagttttcggacaaaagtgttagctttattagacgagcatttgagactttcacggcaatgtcagaaacagggaaagattgaacgaaaagggacaaactttttaaagaaaactccaacggaactctgttttgagcaatgagaaaaaaaacaagtaaaattgtatctactttgagataaaagaaagtaaggaaataggtttatataatcaaccaaactccatgagacccattcttctaaggcaggagattattggtagattcacctgtctttctcacaactctccaccttctccatttattttcattttcatttaataaaatatagtttcgtttctctaactttgtcggatgagattgagttttgtttgtttgggtttagtataaaacgttatggcttcttaatatcttcattttgcatagttcgtgaacaacacaacaaaacagagctattattcctaagtcttagatgatgacatctcccaatacaaagtctccttcttttggatacatcttgaaagaagagaaactaggtcgatcacatataacaagatttcaagagaaactgggtcaatgacttttttgtttacatattataattcatatggtttaaaagaatcattaacataaaaggacatgtgtgacaggatcagtcggcaatgttgtaatccaagttaaactaaatatctactatagaagtttgacacattcaaatagtacgacgacatggggataataaaagtacggaaacactctttgacttttatggatttcttacaaatttctatcagacaactgtagaatatgccgctagtcacgtaaatgtaattattaaaacattatcaaaagattgatcggagaagaaaactcaagaaatggtcaaatatgttttaccaacttcgtaaagaataaagagaaagtaaaagaaatcaaactctttcaaagtggaagccgtcgtctctcgctgacttcttcttcatcggtttttctgttacttgtatgtgaagccaaataaacctgcagaattcacggtttgaatatgagaagaaagtaggattttaaataataaaagaaaagtgagagagaagacaaagacctcgttgcacaaaagcccatcacaaccaaaattactaattagacatgtgtggcaaatgttatgactgatcatcatgcaataattcaccgccaataccatagatgctaccagactttgtaggctctctctctttagtaaataaagcactttgtttatgttcgtttaatgtacccataattagctttaactatttcactctactctatatattacacacactatctcttccatcttccctccacaaaccacacattcaagctcttaccttttatcctcaactaacacaacaatggcttatactctgcaaaatctgacagccacaattgttctggtaagcctgattcttggatgtacagaggaagtaaccggaatgcgttacattcccatttcccccactcccagtgagagcaaacattcagactttcctgtaaacatggtgcctcaaccatctagtctcattcctggttttggaaggttcttgctacctcccacacctaagctgccattccttccttacaaagatccccttgctgttgccccagccacttcaaatggaactcctagtaataaagcccgcagtccgagttcaggagaagatgaagttccaccagtgccacaaccatgacctgtcaacaaataagcttttgctagatgcagaagggtattcaattctggttcacataacaagtatactagtcatttcatcatagtcatatatcttcatgatctctctctatatatacttaagaggatattgaataaattccagagcttttgcttacatactatctaaaaataatatttccaaataaaatgtaatgactcacattgctgcaaatgtattgagtcacaaaagagtagaaatatgtagaaactcttcaattgaatcattattgccatgattgagtcaaaagagaaactctctttacaaagtctgaaattttgtcaagatatgtaaaatctcaaagtttcaaagtaatctcagcattagcatttagcattaacaaaaccaacgacaactacgatgtattaacaaatcaaatttggaaacttctaaaacaatgcgatgataatggacaaagagatgtcttggaaaagtctattggaattgaagtttctgtctatccatagcgaattggaaaaaacgatcaccatgaccaaaaaccaaatcgatgaaggttcgttcaaacacccaataccttgaagatgatataacaaagaaagcagaaaaatataaagaggaaaagataatcaacgaacacgaagaagttcgtggatccatggtttcggtttttcatcttcgtcttcttcttgtcctctgactcgtcctcatcaatg

SEQ ID NO: 36048 - DNA, 3003 bp, Unknown; identical to SEQ ID NO: 36047
  misc_feature (1)..( 3003): 2750-1469P.txt file - cDNA_ID_3092108; gDNA_ID_2926192; Annot_ID_201141

SEQ ID NO: 36049 - DNA, 3000 bp, Unknown; identical to SEQ ID NO: 4337
  misc_feature (1)..( 3000): 2750-1469P.txt file - cDNA_ID_3092127; gDNA_ID_2926192; Annot_ID_201131

SEQ ID NO: 36050 - DNA, 3003 bp, Unknown
  misc_feature (1)..( 3003): 2750-1469P.txt file - cDNA_ID_3092135; gDNA_ID_1620700; Annot_ID_165035
atttcgttacattcggagacgatagacggaaaaacagggacattggctatagaatcgttcgtggtggatgtgccggaaggtaacacaaaggaggagacatgcttcttcgtggaggctttgattcaatgcaatctcaattctttagcagatgttaccgagcgtctacaagcagaatctatggagaagaagatatgagatgtgacttgagaatcttttcattcggaaaagaaggaaaaagaccaaagaagagaaataactcttcccttttatagcaatgtctatgttttttcttcttctatttccattttctgaatgtttgtatattattggaagtttgtaacgaaatgatttcgaatagctgtcaaacgagaaatataaattcaaatttgtaagtgtttatatgaaatgcttttttatttttaacatttccacatgaaaatataaataacatatcatgacacatgcaaaatcatatttatgaaagttttttcaactctctccattttttcgacatatcagcattagatagagtgacacttatcacatcaacatatgaattacatttcttatttaatttaatgtatttaagaatttataatcatgcattaattctttctaaattttttgacatgtttgaacttattaattaaataatttcaatttaattaggtacaaagtatatcaaactcacataaataacttatttaaattaaattatataaatcgtataaacttatgtataaacataaaattaatagaattttaatgaacttttagatttgattaaagtataaaaattaaataatatgatataagaatttatttcatgttttcatatactaatatatatatatatatatatatatataaaagattaataacaattgatattagttaaatttacggtttagtttaaggtaaacccaagatgctctcatctggaattctgttatgatctgtacgtcctcaaagttccagagatgttgagaaagatcaaacatcagcagcgtcagaggctttttctctggagaggtgatgttgaatggctctatgcgctgctcggagagcaaaagagtcttgaagaagactctagcaaatccatattggcatctaagcttgatctttgtgttcctgttatgaaacacagaatctagactgagactgaagttggatacctcagctttgggatggagaataccggaactcttggccggagtaagaggatggaaagcatgctgaagatgagcaagagcgttccaagaaagactatgacgaagaaaacaaatcagaaatatactaagtatgagttgtttcaaagaacgtagtaatggtttataataatattaacaatagaataaaataaatagtaatggtttaagaaaatattaataatagtgagcaaaagctaagcaaaatataagcaaaacataataacatagtcaaaataatatggaaatgacaagtatataaattatatgttaaaagttaagaaattgacttggaggtttgtgttgggattttcccttaacttaaataaaggttttaaatgtgaacaaaaaaagtttgaagttttagttgggaaaatgttttgatttggaggtttgttttggaattttttcacttacctaaaaagattttggttattattaacataaaattctactaataacaattgatatgcttcttcgtgttaaaaacaaaaaaaaaacaattgatatgcttcttctttttttgtgcacccaataaatatgaattaaataagcatttttaatagatttatctcttgatagggtatccatctaaacaaatacaaaaaagaatacatttaaccaaaatgcttatctaatgtatatttaaatgtaaaactttattgtatttgttaatttagcaaaagataaaatgtctaattgctaaatcatatttacaaaatataatatctgttaattaaatcatgattcagttgtttgggctgttaattttgttttaatccgtctttgggcttgacccttctgtatttgcctattgggctttatgaatgttatgaatgaaaatgaatagtcacaaaacaaaagaaaaaaaacagaatttgagtcggtacacaactgttaacgaggtgtacttggtggaatcatagacacgtgtcttgacactcttaaggcctcttcaccaccaaattacttccctaacaaaagaattattattattgtgaagccccaaaagatcgaacattctaattcaatggcctacttgctgaccaagcaaaaaggaccggctccgttttcacctaattccgagcttcacaacgtgccttccattggttgaatattcaactggtttaaccaaaccgaagttacacatacgatttgagtcggtacacaaatattacgagacgtactttgtggacagtttgacacgtgtatcgccactctttatccctcttcaccagtcaccactcaccaccaacttaaaaataaaataaaaagagcatatattgtggagccccttacatgatcgaaaattctcgttcaaaagcattcgttaagaccgtgtgttgtgtgtcgttttttgtcgacgaaaattagaccggctctgtttttattggctcgtttcgattgaaagcgtggctataattggtttaaccaaaccgaagtcgacgtctcggtttgttcggttaagattaagccttgtagaacattccaaaacgccgcgtcaaagcttttagggtttgattctgctgtgtggctacccactcaagtctccagtgttcctttgtggctctggtttgccctattcttctcttccccctctctctctctctctctctcttgttttctttttccctcttctccaaggaatctggaaaaaattaaaccttttttctaaatccctggaaatcagaaaacttcctattgagaaaccatagattcgatccaagcctttgattgtatcaaaatctctgcttcaccaagaatttgggttgatacagaagaaaaaagttaaatg

SEQ ID NO: 36051 - DNA, 3003 bp, Unknown; identical to SEQ ID NO: 36050
  misc_feature (1)..( 3003): 2750-1469P.txt file - cDNA_ID_3092135; gDNA_ID_2926192; Annot_ID_201116

SEQ ID NO: 36052 - DNA, 3003 bp, Unknown
  misc_feature (1)..( 3003): 2750-1469P.txt file - cDNA_ID_3092139; gDNA_ID_2926192; Annot_ID_201114
attgatagtgggtaataatgttgaatatttgtcatttgttaaaatgaaaacatgggtattttagttatttttatctaaatgaaaatgtgaatgaactacaaaatgatcaaacaaataaagatccatttaaatgcatcatttagattaaattacaaataacgaaacaaacatcattcaaatgtatcattcaaatgaatcatgtaagtggatcatttgaatgaaaatgataaatgatgaaacaaacagggcctaagccaattttgtgttctaatataatcttgttatgtcttcaagattacaatcctgcccttttggtttatttcaagacagttgttgataagttaaatatctacttccttaagaaaacttcatctgtgttttttttgcttattgatctgttcatgagtcatgactatgaatatagtttcgttttctaaccctttcgattcctagctgatttctctttaatttgtttttgtttacttatgtattcatatcaaaagcatgcacattattattattatatttttgcgcattatttatgtgagaatgaaaacttattgtagaatctccggtgaggtttagctctggtgggtggaatattcttgttgtggtacggacttatgtttttagtgtaagttagatttgatcaaaactggtcacatggtccttgtccatactccattgttctcaatgattcataagagacaacaacagtagacgacgacacgttttcttcttttatgtgttatgctttagttagttagatccatgcatctacaacaataccttccaaaattattgcagctataatagaaatatcaaaacgtggatgagaatatttgcactaagcttttcagaattctactacactaaaccatggaaaattagtttctcctacatgctaaattcatctaaagtattttctcgagtccatccacaagagtattcgagcttggaagcaagagttaaaagaggttattgtggttgtacaaagtgggacacctttcctgattggcgccgccatgccccttggcaatgaacaatcaataaaggtatcgcaaaagccaaaggttcaaattttcaagctacacttctgagattaatggcagacaaaaaatatatttatagcttagatagttatacgttatatatagcattgtatatagacgtagccaatttgataaaaaccaatgcattcatgacccaacatattgggactcaagactatataaagccaaatacaaaacaaaacaaaacaaaaagaagtccacttgcgtataaaatatattcaatttcaataaatataaatgcaaacacaaacttagatgtataaactatagccgaagtgaaaatattcggcaactttagcaaatgaacaatttcttacagaaaataaatggtcatcatcaaatttggaccacccatggatttatatgtcaattttcatttccatattcatgtaacaacactaccgattgttggtccccaactttgtgttatttcaaattactttttatacgtacgtgtcacaagtaactatgagtaaatccaaaacaaaaaagttgagacaagaacataagaatatataattcgatgaaactgaagagttaaacataagaaagaaaagcataagatcatacgaataaattttgagaatcataatttgatatatatactcaaggaccatctgtatttattcacttttgggtattatgttaagttctcggtaatcaaatacaaaatttcctctcacgcacgtacacttgtagtttcaattcccactgatacaaaagcttccctcaaagatggagtaaggaaattgaagtaaaacaaacaatttggactaatgaaattttataaaacgattcaagttggaaaatacaaggaattaacaaaacgtgttttggacgtcaaaatttagacaagagtagtcaagaatccaactatggaactaaaccatcctcactgttaaatctagactctagtgattagcattcaacaaaaacaaattatacttttcgtacggaacatattctgaaactattcacatgtcagttttgtcatttcctcaaaactcatattcattttttttttaaatggacatcacgggacctgagttcctggccataaaggctaaaaagcagatccaagaattgattgattatatgaatttagttacaaagtacaaccagattgtattctatgaacatattaattgtttccactattcatggattcatgatagagaacaatatcactcagaactagttaatgtcgcgatttacaaaaatcccacagcaccataacctcgcaatcgcatgacgtaatggaaaatgtgagagagagtcacaagaacataggacctacactaaacatgtgtagtgtctacactctacagtcacctactatacaagttgctaaatactactacgtacgacttgtttagttagaactgcaaaaaattaaacttgtttgtcctctaatcccaacagattttgtttttatatactgattaaccactgctttgttacaacaacttacaacttgaaaggaacgttacatgaaataactcttctcattcatgaatcatcttctctacataagaaaaagttgtgcataagaaatatctacactgaaaaaatggcagtgggggttacatttttgatttctctaattctttatttacatttatttctattttcatgttaaacatttatttcaatgccaaaataataaagaaagtaaaatctataaatgggattcagtgcaccaataattcttacacataaaaaaatatcagtatcaggcctctcaacatcacaatagggcaagaggaggggccaaagtacacaactttctcctcagggtatgctccaaattcccaacttggcctctctttttcatcttttgggtttttatgttcactcttctctgcttcattcctctttctacttccaggaaataaaaacttctaatcaaagagcaagagattaagaaatg

SEQ ID NO: 36053 - DNA, 3003 bp, Unknown; identical to SEQ ID NO: 19422
  misc_feature (1)..( 3003): 2750-1469P.txt file - cDNA_ID_3092161; gDNA_ID_2926193; Annot_ID_201251

SEQ ID NO: 36054 - DNA, 3000 bp, Unknown; identical to SEQ ID NO: 3177
  misc_feature (1)..( 3000): 2750-1469P.txt file - cDNA_ID_3092165; gDNA_ID_1620630; Annot_ID_162641

SEQ ID NO: 36055 - DNA, 3003 bp, Unknown; identical to SEQ ID NO: 18892
  misc_feature (1)..( 3003): 2750-1469P.txt file - cDNA_ID_3092165; gDNA_ID_2926193; Annot_ID_201247

SEQ ID NO: 36056 - DNA, 3003 bp, Unknown
  misc_feature (1)..( 3003): 2750-1469P.txt file - cDNA_ID_3092174; gDNA_ID_2926193; Annot_ID_201242
aacacacaatgacttaccaaaagtacacgcggcccatcctcgtctttatgttccaagtgcgactgtttgtttatttgtaagcatttttcttataataataaaacagctctatcttcgttaatatcaacctttcttagaagcttttcactggagataaatgtgaggaaaaaatcccctacgttataagccaagtataagctattctgattggcttaacacctcctacgtcaaaactcaaaaagaaacacttagtagtattatatgaaaaaagaagagtgaattgcagctgcctcaaaagtaatatttactttattataagatttagtatgaacttatctacatgtattttgtttgaaagaaaagtaaacaaaaaaaaaacaatagaaaaagagaaagacgcaacatgactttttttttgtattgatattgtagagaggatggcgtaagaagaagtctgtttgtttcctaaggttaatctaatcattatatatttggaatgttttgtttcttacagagatatcttagcacaaaattctgaaaaaataatcagaagactgtggaaaaataaattcaacgaatgtgaccaaccactacaaaacaaaacaacattataaaatctaggtttcgaactcgcaaatcaaccaaatattatgcaggtcttttctactctgtgggtaaaccgacagaaacagcgacgacgtttgttttatttcttttaaactgttcacatttgtttattgttttcctcctgttgaaagttaacaattcaaaaatttccagtacatgtgtttctgttctcttctcttctcaaaattttttgtttctttttgtctcaagctatgaacttccatactttgaatcttctacttctctttcttcctcttacttgatcttcctatagcatacttccatcatgtaagttcctttttgtatttttatttctcttacttgctaaagttttatcttcacattttttgatgattagggttttggtttgagattaggggtgaagatgatatagtggagctcttatggaacggccaagtcgttcgaaccagccaaccacaaagaccttcctcgggtaaaccttctcctactccacccattctgcgtggtagcggaagcggcagcggagaagaaaatgctccccttccacttccacttctacaacctccacgtcccctgcatcatcagaatctcttcattcgggaagaagaaatgtcttcttggcttcactattcttacactggtgtcacgtccacaccggctactcatccgcaaagttctgtttccctgccaccaccaccacccattgctccgtacatttccgttctttttcctttcattctcttactctttgcaatttgacgagtctgatattttagggtttggattttggtttgaaattaggagtgaagatgatgtggtggaactcttatggaaaagcggccaagtcgttcaaagcatccagacacagagacccattcctcctcccattttccgcggcagcggaagtgggggaggtgaagaaactgttctgcctctgcctcccctgcatccgtctcatcaaaatatcttcatccaggaagacgaaatggcctcttggctttaccatcccctccgtcaagattatttttcctctggcgtcgcctctacttcagctactcgcccgcaaagttccgcctctctagcaccaacaccaccaccacccagtgttccctacggtcagattcccgttgagagaaggacagagaattttatgaacttcttgaggctaagagggaacatattttccggcggtagagttgaagctggtccggtggttatagaatcgacgcagataggctcaagcgcgaccccgtcgtcttcagccgctgaatcctgtgtaataccagcgactcacggcaccgagagtagagcggcggccattaccggagtatcccgtacttttgcagttcctggtcttggtcggaggggaaaggaggtggcaaccgagacggccggaacatcatattcaggggtaaacaaggccgaaacagagcgggttcaaatacaaccggagagggagacgaaaattaccgaagataagaagagagaagaaaccattgcagaaatccaagtgagtcacagctaccataggttcacctgttgacacgtgcagtgtagcagtcaaggcttaattttatcttgtttcttggcgtacagggaactgaagaagctcatggttcaacgtctaggaagaggtcacgagctgcagatatgcataacctctccgaaagggttcttatattttactttctaggttttaataatggactctttgtttcgtctctccattaaaacgtagtttgtataattgtttaacagagacggagggaaaggatcaacgagaggatgaaaactctgcaagaactccttcctcgctgcagaaaggtctctctcagttatttataacctgtggctgttaaacataaaaaaagttagattctgatgacatctgtttctattctgatcagactgataaagtttcaatgcttgaagatgttatcgagtacgtgaaatcgctacagctgcaaatacaggcatgtactcaaaaactgaatgtgtgttaaagcaaaacacaaccggaaattaagtgctgtggaatagttgaacatggttatttgagtgctatggaatggttatactctttgtttatcaaccagcgtctctgcattttaaacaaccaattttttagatttgatttctgcagattcatcttggaagggttttaaagtgtcatggaagataaatgcaaatcttataagtcatgttcttgaggtcttactcttctgtattgcttcacacgtttacaggattatgttgaagaatctacagcttataactgagattttaatatatgaatcaatgttgttatgccagatgatgtcgatgggacatggtatgatgccaccgatgatgcatgaggggaatacgcaacagttcatgccccacatggccatg

SEQ ID NO: 36057 - DNA, 3000 bp, Unknown; identical to SEQ ID NO: 3182
  misc_feature (1)..( 3000): 2750-1469P.txt file - cDNA_ID_3092186; gDNA_ID_1620630; Annot_ID_162655

SEQ ID NO: 36058 - DNA, 3003 bp, Unknown; identical to SEQ ID NO: 18886
  misc_feature (1)..( 3003): 2750-1469P.txt file - cDNA_ID_3092186; gDNA_ID_2926193; Annot_ID_201234

SEQ ID NO: 36059 - DNA, 3003 bp, Unknown
  misc_feature (1)..( 3003): 2750-1469P.txt file - cDNA_ID_3092191; gDNA_ID_2926193; Annot_ID_201230
ctgtatgttacttacttaattttagattttatagtgctatatccttaaataatttatgaaaataggttacttttgcaattcacccattattattttcgtattagaaatagaaatcgtctacttattgtgtcgaatttgtttttaacctttaaataaaataatgggcctctaaaataaagacaattagggggctaggttgttgagcccaggaccgattctagtactactagactagttgttacaaaattagttttattataggatataattttttatatattttaaattcttaaataattaatctttcaattttttgaaaagaaaagtactaactcactcgtattaaatagctgaaaattttgaagatgagacacgtccgaatgagacacaagtacaaaggacatgattcatcatcatcccatgcataaaaaagacgacaatcaaaaaagcaaagtaaaaaacaaacactcacacgggagctggaaagagatataaatggccaaaattttaagaatatatcaaaataaaacgtggagaaagggattaaaaaagctatgtaaagatataattgcattgtaccaaaaaagaagaagatataattgcacacatacgtcatattgtttatcaaaactcaaaccaatattctttaaaaaaaaaaaaaaactcacaccaatcttatatcctaaatcattcgtgttgcgagaaatcttacattcagcttttaaattcttcattgattcttgacatgtatttctatatttggtgaaacaaatataagttgttttaagttggtctacgaagtttgtgctcgcaagagagaggatatttgcaaatttaagctgtgattttgtaggaaaatgattgtattgggggatattttgcaaattgcaatggtatgtatcaagttagagacaaaaatcacaaaagtgggctacaatatgactttgagtattaatgtcggtatcttcgagaaccatatgattcccttatctagtcagatactgcactatttatatccattcagattatgccacgtgatggtcaaactggatgttcagtcaaacctttgactcagtggatccaatatacacatgcatgtcacttaaattatgatagaaagataaatttattaccatatctataaggttagattctcttttgttgaaacaaaatttcctagctttttagtaaaattttcagtcaactaataataacatttcaaactatggcaagattagcattataaagaaggaactaaacctaataataatacttattaaatggtgaaattttggtttgtattctccaaaattctgaaaatttcatagccattattggagtcatctgcttttccttttttgttcttcatttttttttcctagtcaatagagatattttctctttcttactgcatcgatccatatcttgactgaataaatacgtcaaaagaaagcattaacgattacacactctcatacttatctcctcttaggtttctcatttctctcgtctctttggaaaataaaaattgttgatcagaaataaaggagaaaagaataaatggcagatcaaaatccaagaatcatcgtcgagcaaaacccatctcaagctcgtcttgacgaactaaagttcaagtcatggcccaagtaagatcgactcttgtttttaatccttacttgtgggtgagagatccatttggtaaagttgcatgagatagatttagaaaattgagttttggttttctttgttgttcaaggtggggatgttcaccagggaagtaccatttgaaatatgaagcagaagagatatgttacattttgaggggcaaagttaaggtttaccctaaaccaccaccatcatcatcgtcggatgcagaagttgaatggtgtgtagagtttggggcaggtgatattgtcacttttccaaagggactttcttgtacttgggatgtatctctctctgttgacaagcactacattttcctctcttcttaatttttgtaaaagttttttttattattctttattttttgtatttctaacattgtgtttcttattagttgttgtaattggtgttctgtttttttttttttagtaagaaatatagatgtgtttgcatttataatcgcataatgaaacaatgttcttcaccaatcaagcttgagcaaacctcatcaattcgaataatcctgagatgaatcttcaagaaaatataaaaattatactcattaatcctataaaaagtggggcatatacaaaagccttcaccactagaaccccaacccttttttctagattgaaattcaaattcatatgagttgttcaaatgtttggaaattaagaaacggtaaacgttggattctctttagtcaacaagaggtgatcttctttacttgtccatttacgcttctattatactactactaaatttcctttctttaagatccgctgaccagtcaactttccatcttgtttatctttaactagggtaagcagagattttaagatcaatattggaagagaaatttaatagaaagatgcatactgtaaaaatttcacacgttcaaatgttatttactcctttgttaaatcaatgctggttagcattttcaaaagccaatcgtcaacataaatgtagcattaagtccactatcataagtcataactgtttaacatgttaccattcaaaaccaacaacatgtcacataacatcatcaaaagatatgtgatcatcatgtgagatacactttggacacaaatttgacaaaagccagaagaaaaaccagttaaatgctttcaataaggaaaaaaagaaaaaagaaaaacgttccaaaaccaaaaccttctaactcatcgaaaagatttcggtccaaaccgattgaactggccggtttatgaatttaaaaacaccgtccaatcgaataacatctggattttacacacacacacacactctctcacactcgttgaccaaaaaaaaaactctctctttcactgagaaatg

SEQ ID NO: 36060 - DNA, 3003 bp, Unknown; identical to SEQ ID NO: 32411
  misc_feature (1)..( 3003): 2750-1469P.txt file - cDNA_ID_3092195; gDNA_ID_2926193; Annot_ID_141146

SEQ ID NO: 36061 - DNA, 3003 bp, Unknown; identical to SEQ ID NO: 32411
  misc_feature (1)..( 3003): 2750-1469P.txt file - cDNA_ID_3092195; gDNA_ID_2926193; Annot_ID_201226

SEQ ID NO: 36062 - DNA, 3000 bp, Unknown; identical to SEQ ID NO: 8303
  misc_feature (1)..( 3000): 2750-1469P.txt file - cDNA_ID_3092203; gDNA_ID_1971713; Annot_ID_175141

SEQ ID NO: 36063 - DNA, 3000 bp, Unknown; identical to SEQ ID NO: 8303
  misc_feature (1)..( 3000): 2750-1469P.txt file - cDNA_ID_3092203; gDNA_ID_2926193; Annot_ID_141143

SEQ ID NO: 36064 - DNA, 3000 bp, Unknown; identical to SEQ ID NO: 8303
  misc_feature (1)..( 3000): 2750-1469P.txt file - cDNA_ID_3092203; gDNA_ID_2926193; Annot_ID_201223

SEQ ID NO: 36065 - DNA, 3000 bp, Unknown; identical to SEQ ID NO: 8306
  misc_feature (1)..( 3000): 2750-1469P.txt file - cDNA_ID_3092211; gDNA_ID_1971713; Annot_ID_175138

SEQ ID NO: 36066 - DNA, 94 bp, Unknown; identical to SEQ ID NO: 445
  misc_feature (1)..( 94): 2750-1469P.txt file - cDNA_ID_3092211; gDNA_ID_1591038; Annot_ID_150434

SEQ ID NO: 36067 - DNA, 3000 bp, Unknown; identical to SEQ ID NO: 8306
  misc_feature (1)..( 3000): 2750-1469P.txt file - cDNA_ID_3092211; gDNA_ID_2926193; Annot_ID_201220

SEQ ID NO: 36068 - DNA, 3000 bp, Unknown; identical to SEQ ID NO: 8302
  misc_feature (1)..( 3000): 2750-1469P.txt file - cDNA_ID_3092222; gDNA_ID_1971713; Annot_ID_175134

SEQ ID NO: 36069 - DNA, 3000 bp, Unknown; identical to SEQ ID NO: 8302
  misc_feature (1)..( 3000): 2750-1469P.txt file - cDNA_ID_3092222; gDNA_ID_2926193; Annot_ID_201216

SEQ ID NO: 36070 - DNA, 3003 bp, Unknown; identical to SEQ ID NO: 32011
  misc_feature (1)..( 3003): 2750-1469P.txt file - cDNA_ID_3092237; gDNA_ID_2926193; Annot_ID_201211

SEQ ID NO: 36071 - DNA, 3000 bp, Unknown; identical to SEQ ID NO: 29060
  misc_feature (1)..( 3000): 2750-1469P.txt file - cDNA_ID_3092260; gDNA_ID_2926194; Annot_ID_201313

SEQ ID NO: 36072 - DNA, 3000 bp, Unknown
  misc_feature (1)..( 3000): 2750-1469P.txt file - cDNA_ID_3092264; gDNA_ID_2926194; Annot_ID_201312
cgcaattatagaaggaagagatgtttctctgacattgaaatcttgcaggatttgcacgtttggtttcaccgtatcatccaattcaaacccgagtatgtgaggccgcttctctatcaacctagctgcagccagtctcggaataccaagaacctcgagatactccacgagaggcttaattatccgagctacccgcattcccaaaatctcagggtaccgtgttaaaatacccccaatctccctcctagctacacctataccaaccaaataagcgactgatgtgctcatagtcccttccagcttaaaccccaaaacttctggatacctctcaagcacccgaggtacatcactcggtttaatatccagtccttgaagatacttaaccaccggtgcaagatctataacaacgctagagtgaagaacctgcgggtatcttctaagaaactcagtgaaagtcgatttcctgacgcctagtttcccgagataatcaagaaccggaaccatgttcttcttcacgctacaaccaagaacaagagggtaattgttgatatcttcaatggtaagccctaacttgtgaagaaactcgacacgctctttcatcacatcagctgttacagggagttcaaggccatcaagctcatcaggaacaatcccaatcccacgcaagaactcataaaccttagcacgattagcagctttctccttattcatatctaacaaactaggacgactatacaaagacttagaatctcttcccttatccttatctctatccctatcccttcccgaagaagaagaagaacgagaagacctttctcttctcggtgaatccaaagaacgtgaagaaaatctccgatttgcaatagcgcattgaacagttagaccaattccagtcccaggtctcttcttgtggttgcataagttgccataagtggaatcagagagtgaacgagatctaacggcaaaaaaagatggtggctcaaagtgaactagcaaaaacccaggctttgtgaagccattacagaacctaatcttcattctttacctgcacaaaaacggaacaacactaaaatcgacgattatcaacgagaaaatcataccaattcggactaacccagacaattttacagtacaattagctcagaaaactccgaaaaaataccatcattcatgttcatgttaacatcaacgaaccaaaaaaccataacctaactagaagcaaaccacagaaactatggaataaggagaattggaccagcgtgtgattgaaatctcaccggagctgaggaaagatatcggagaagacgagggttttagaggagcgggtaaggttttttcctcatcacacaacaaagtcactctctttctccattgaaatgatttatccgaattattgacgttctcccccttatttcttatatttcccattattgccctatactatctgaaattatcacattaaaccaatacgtatatgattactttggatgtgatataaattaataaaaaaactatatatcatcaaaactttctcttaatatttctaaaattaattaattccctccttttatcttcaacattggattatcgaaaatgaaaaatagtattttctgactcttttttatagtatcgggtttaattcagaaatatataaagctttggggtctgtttcgaagtatctttactcttttaacagttctgagacttctaaagagaggaaaattagttcgtcgaagcatcgagaaaatgatcgtactttctgttggttccgcttcttcatctccgatcgtcgtcgtcttttccgtcgcgcttcttctgttctacttctctgaaacttctctaggagctccttgtcccatcaatggtgcgtttcgcctgttttcatccctactcgccattagattgtatctagttatattgtgaatgcagatttcatcttgtttatctatgtatcagtgatagaatctaaggtcttagttagctgtgaaatcgtatgtcctggtagaatcagatggaccaaaatgtgctgaacttgtgattgattttaactctaaattaggtttatggaggtgtttcagaatgcttcatagtgaatttggttgctgatatggtacagattcgctgcaatttcatcgatctgtagcttattagaggatccaaaatttgtttagaaatgcttacatagcttaaatacttagaaattgtgatgttaatactggttcttgactcttgaatggtgattctaggcttgccaatcgtgaggaatattagtgaccttcctcaggataactatggaagaccaggtctttcccacatgactgttgctggctccgtattgcatggaatgaaagaggtaatgttcaaagctgatagaggtttaaaactctttccattggtatccgctcggctcttatctgtgttttttcatggttggatgttcaggttgaaatatggcttcagacatttgctccaggttcagagacaccaattcacaggcactcctgtgaagaggtttttgttgtcctaaagggcagtggtactctgtatctcgctgaaacacatggaaatttccctgggaaaccaatcgaatttccaatctttgccaacagtacaattcatattccgatcaatgatgctcatcaggtatctctttctacctcccacatcgtttcagatgacttggctctttccttgattcttagagtttgaaatcctagattgttagagtttcccctttaattgtaatcttgattgagggcaaaagaaactccatgtaaggctgatgataaacaatccaatttcgtatgcaacagatgttagttgagcaaaaacatactattatgtttaagattgcttgagagtgttagaggtgccgcaggtcctatgtcacatgtagagacaattattagaaaactgaccttttcgctaacgttgtgtatattcttatgaatcagtgaaagatgacgttttcttctgctaaaataacttttgtgttatcttatg

SEQ ID NO: 36073 - DNA, 3000 bp, Unknown; identical to SEQ ID NO: 5105
  misc_feature (1)..( 3000): 2750-1469P.txt file - cDNA_ID_3092270; gDNA_ID_2926194; Annot_ID_201287

SEQ ID NO: 36074 - DNA, 3003 bp, Unknown
  misc_feature (1)..( 3003): 2750-1469P.txt file - cDNA_ID_3092280; gDNA_ID_2926183; Annot_ID_200442
tattgtaatatagcctacatagtggtgatttgtggtattggtgacactatgttaaggtcaaaaagaaatagagagtaaattccatatatatgaaaattgaaaatgactgtttaaatttacatatggcgcgaaaaaatgatctagttcgttaattatttttagaagctttttgtggtaaatttagatttttaaaaaactccatatattttttttttataatttaggcttgtctattgtaaatttgtaatatagcttagtgatttatttgtttagcttctggtgacattttataaatttttaatgaccagtataatatagtatttttttataaattaaaatataatctaatgttttatgtcaacttcgttgttcattgaataaatcaaactttgaagaataattaaataacaatgtttgcaaaaactgttacgttttttcatgtaaacattagtggacgttatacaatagatatttaaattataaaaactattcaaagaatattgtaaagaaataaaacagaaatgtgtaagaaaaaatgtttattttattgtacgtaataaaaaaagagaatatacttgtgtgggtggacctaaatgcaaataggcaaagtaccgacaaaaaaagaagaatcagaaagtgaaaaagagagcgagcgatgaacagtatcttctccattgacgatttctccgatcctttctgggaaactcctccgattcctctcaatcccgactcttctaagcctgttacggcggatgaagttagccagagtcaaccggaatggactttcgagatgtttctcgaagagatttcttcgtcggcggtgagctctgagccacttggtaacaacaacaacgcgatcgtcggtgtttcttcggcgcaatctcttccttctgtttccggacagaatgatttcgaggatgatagtcgatttcgtgatcgcgattcgggaaatttggattgtgctgctcccatgacgacgaagacggtgattgttgattccgatgattatcgtcgtgttcttaagaacaagcttgagactgagtgcgctactgttgtttctcttcgggtgtgttgttaatcttctatttttcttatctatatgtgtaatttgtgcgttttgatctaaatctgaagctctgatgttctcttcttaggttgggtctgtgaagcctgaagattcgactagttctccagaaactcaacttcaaccagttcaatccagtcctcttactcaaggtaagagtctcttcttagtttcaccaggatagatgagcgatgataaacctgcagattcgtttctctgttctgtgtttgttaatttagatgcctaggttaaggaattagaaatagaaaatggtacttttgttggatcaagcgcctagttttatccgtcaagtttcaatctttttgtgactgactttctcattgaaattaaactgctttctggaagaacaataagcttgggattgagatgagttctggtggttagttcaatatatgggaaatcattatttcagcgctcgtctttctctttcagatatctcttctgagtcttagacatagtaagttttaatcgtggtaggttctttgatgaccccaggagaacttggtgttacttcttccttaccagctgaggtgaaaaaaactggtgtatcaatgaagcaggttactagtggatcgtcgagagaatattctgatgacgaggaccttgatgaagagaatgaaaccaccggttccttgaagccagaggacgttaaaaaatctagaaggtaatcattactttttctccaatttcttgtcgtttgaagattacatttatagagccttgttcttccttttaatatttgtaggatgctgtcaaatcgtgagtcagctaggcgatctagaaggagaaagcaggagcaaacaagtgacctcgaaacacaggttttgtgttgtatcctctcaacacctcatttttgtgttgaaggatattaatgagacctaatttgtattttgataggttaatgatctaaaaggtgagcattcatcacttcttaaacaactgagcaacatgaatcacaagtatgacgaggctgctgttggcaatagaatactaaaggctgacattgagacattaagagctaaggtaagaagacttaagtattatcctcctctcctttttctgaactaccctttttttgtatacagttttagtaactcccatgttatgttaaggtgaaaatggcggaagaaaccgtgaagagagtaacaggaatgaatccgatgcttctcggaagatcaagtggacataacaacaacaacagaatgccaataactggtaacaacaggatggattcttctagcattattccagcttatcaaccacactcaaacctaaaccatatgtcaaaccaaaacatcgggatcccaaccattctacctccaagactcggaaacaatttcgctgctcctccatcccaaaccagctctcccttgcagagaattagaaatgggcaaaatcaccatgttactccaagcgccaacccgtatggctggaataccgaacctcagaacgattcagcatggtaagctaaaacatggctctttcttttaagaccattgaacaatttaaaaccatttgaagtactatgatccctgtttatacatatcagattcctgtctcccctttttttgctcattttacaggccgaaaaaatgcgtggactgatcaaacaagaagcgggtttcgcactatattaatgtctatgcatctgtaatttgtaagtgttattaagttacgaatcatgagaaaacatcttgtgaaaatacagtctcatggcttatatatatatataagctctgtcttataacattacaagattcttatttgagaatcgtctttctatttatagctaataacagagtgtatatctgtttttatccaattttaaaaaagatagctcacatggctttactaatttcccctatcattaaattccgacaacctcggcgatttccatg

SEQ ID NO: 36075 - DNA, 2137 bp, Unknown
  misc_feature (1)..( 2137): 2750-1469P.txt file - cDNA_ID_3092280; gDNA_ID_2926194; Annot_ID_201269
tttcttcggcgcaatctcttccttctgtttccggacagaatgatttcgaggatgatagtcgatttcgtgatcgcgattcgggaaatttggattgtgctgctcccatgacgacgaagacggtgattgttgattccgatgattatcgtcgtgttcttaagaacaagcttgagactgagtgcgctactgttgtttctcttcgggtgtgttgttaatcttctatttttcttatctatatgtgtaatttgtgcgttttgatctaaatctgaagctctgatgttctcttcttaggttgggtctgtgaagcctgaagattcgactagttctccagaaactcaacttcaaccagttcaatccagtcctcttactcaaggtaagagtctcttcttagtttcaccaggatagatgagcgatgataaacctgcagattcgtttctctgttctgtgtttgttaatttagatgcctaggttaaggaattagaaatagaaaatggtacttttgttggatcaagcgcctagttttatccgtcaagtttcaatctttttgtgactgactttctcattgaaattaaactgctttctggaagaacaataagcttgggattgagatgagttctggtggttagttcaatatatgggaaatcattatttcagcgctcgtctttctctttcagatatctcttctgagtcttagacatagtaagttttaatcgtggtaggttctttgatgaccccaggagaacttggtgttacttcttccttaccagctgaggtgaaaaaaactggtgtatcaatgaagcaggttactagtggatcgtcgagagaatattctgatgacgaggaccttgatgaagagaatgaaaccaccggttccttgaagccagaggacgttaaaaaatctagaaggtaatcattactttttctccaatttcttgtcgtttgaagattacatttatagagccttgttcttccttttaatatttgtaggatgctgtcaaatcgtgagtcagctaggcgatctagaaggagaaagcaggagcaaacaagtgacctcgaaacacaggttttgtgttgtatcctctcaacacctcatttttgtgttgaaggatattaatgagacctaatttgtattttgataggttaatgatctaaaaggtgagcattcatcacttcttaaacaactgagcaacatgaatcacaagtatgacgaggctgctgttggcaatagaatactaaaggctgacattgagacattaagagctaaggtaagaagacttaagtattatcctcctctcctttttctgaactaccctttttttgtatacagttttagtaactcccatgttatgttaaggtgaaaatggcggaagaaaccgtgaagagagtaacaggaatgaatccgatgcttctcggaagatcaagtggacataacaacaacaacagaatgccaataactggtaacaacaggatggattcttctagcattattccagcttatcaaccacactcaaacctaaaccatatgtcaaaccaaaacatcgggatcccaaccattctacctccaagactcggaaacaatttcgctgctcctccatcccaaaccagctctcccttgcagagaattagaaatgggcaaaatcaccatgttactccaagcgccaacccgtatggctggaataccgaacctcagaacgattcagcatggtaagctaaaacatggctctttcttttaagaccattgaacaatttaaaaccatttgaagtactatgatccctgtttatacatatcagattcctgtctcccctttttttgctcattttacaggccgaaaaaatgcgtggactgatcaaacaagaagcgggtttcgcactatattaatgtctatgcatctgtaatttgtaagtgttattaagttacgaatcatgagaaaacatcttgtgaaaatacagtctcatggcttatatatatatataagctctgtcttataacattacaagattcttatttgagaatcgtctttctatttatagctaataacagagtgtatatctgtttttatccaattttaaaaaagatagctcacatggctttactaatttcccctatcattaaattccgacaacctcggcgatttccatg

SEQ ID NO: 36076 - DNA, 3003 bp, Unknown; identical to SEQ ID NO: 31700
  misc_feature (1)..( 3003): 2750-1469P.txt file - cDNA_ID_3092317; gDNA_ID_2926195; Annot_ID_141254

SEQ ID NO: 36077 - DNA, 3003 bp, Unknown; identical to SEQ ID NO: 31700
  misc_feature (1)..( 3003): 2750-1469P.txt file - cDNA_ID_3092317; gDNA_ID_2926195; Annot_ID_201402

SEQ ID NO: 36078 - DNA, 3003 bp, Unknown; identical to SEQ ID NO: 31701
  misc_feature (1)..( 3003): 2750-1469P.txt file - cDNA_ID_3092325; gDNA_ID_2926195; Annot_ID_201398

SEQ ID NO: 36079 - DNA, 3003 bp, Unknown; identical to SEQ ID NO: 28955
  misc_feature (1)..( 3003): 2750-1469P.txt file - cDNA_ID_3092340; gDNA_ID_1971748; Annot_ID_175237

SEQ ID NO: 36080 - DNA, 3003 bp, Unknown; identical to SEQ ID NO: 28955
  misc_feature (1)..( 3003): 2750-1469P.txt file - cDNA_ID_3092340; gDNA_ID_2926195; Annot_ID_201387

SEQ ID NO: 36081 - DNA, 3003 bp, Unknown; identical to SEQ ID NO: 21946
  misc_feature (1)..( 3003): 2750-1469P.txt file - cDNA_ID_3092348; gDNA_ID_2926195; Annot_ID_141237

SEQ ID NO: 36082 - DNA, 3003 bp, Unknown; identical to SEQ ID NO: 21946
  misc_feature (1)..( 3003): 2750-1469P.txt file - cDNA_ID_3092348; gDNA_ID_2926195; Annot_ID_201382

SEQ ID NO: 36083 - DNA, 3003 bp, Unknown
  misc_feature (1)..( 3003): 2750-1469P.txt file - cDNA_ID_3092376; gDNA_ID_1620665; Annot_ID_48036
cgaaacagattacaaacagtaatctagaagatatgagcttaatccctgagtttctctatccagaactacagaaatgatcttaagaaggttctaattatgatcagatccaccaaccacattacagttaatgcattcaaactcaacaaaatcttcatatgcagtacaaataaacaatcaaacctaacactcgcgaaattcagtaaaatcagcaccgaacgaggaagaggaaagacttacgacttcaggctccaattgagaaatgattcgaactccatccttgttaacacgtagatctccatccttaaacgtaccgctttgagtcctacagagagaaccaaaacctttcctccttcaaaaacaaaaccagagacatttccacacacaaatacatctatctatccacagatccatggagaaagagagatcgagaaacatacaggaatttggtgatggattgctcgccagcaacaggaattgcgagcttgagattattgctgaatccacctttcttcatcgtcttcgtctacttcgttcttcgcttcttcctttttgttgtttcctcgtcattatatattaagtaaaacacagttttaagcataattcatgtacttttcagccagaaattggaatttggaaataaaacagccattaattaatattagtcaagcacatgttcacgacgttgaccaacgacttagagactttcccatttactacttctttttcccggttttctttgaccgaaaagttttaatccacattttaaccggaaacaaaccggttaattcagtgattcttcgttctttagcttttggtttttaaacactcccaaaatcaccactacaacaaaacgctaacgcagaatgccaaactaacgtttgatatttatagaaagttttcaatatttcaaatattgtttgatcaaatacaataaacacatataacaaacagtaaaatctttacttatgtttctcggtttcatgtttgaagataacaaggttttcttcaacaaggaatatacaaataagcatacacccctatatttgttttactcatgtatacattcaattacacatcgaaattatcacacaaagaaaaattgtttcgaattgattaatctatctatcagtatacttcatgtctagtctctataaccaacaagaacatgctattcttcaacattgtctatatattataagccctatatacattatatagtcacagactcagagaggctccacaaacgatttccccaaacataatcctatcacaaattgcggggggcaagagctactagaggcaatgatcatgaggttcgttcatatctccatcatgttgaaggagaatttcgaaagaagcttaggaatttgcgacatgatcggcccataagtctgcaacgcataaatgaaacatcacaacacataattaaatacagcttgattgactgaccctgttagttttaccaggaacatcgattaaaagttcacgatgagttaagggcaatgcaagtaagatagtacataccttttcattttcatggagttgacacaatggaacagcgaggagtttgaagttcttaggcacaacaaactgttgatgtaccggtaatctcacaagaaaaagctttgtgcattcctacacaaaagatgaggatagagcagagcttttagtataagcgcaaatcttcaaaagtctcaactttttcttacaatgaaagtgaaactaactaaccaacctttgggtgtttaatattaggtggcaagaaaggatacatcaatgtctcaaagttgggtctccaccacatcccaatacattctcctacctacaacaatgttgtaattagagagaccattcttaagccagaaacaatcagatacaaaagcactttaacaagaagccatagttcctacctcataacccgaaacacccacattttcgttaaccgatagctttgatgctagtttccgttttagaccttcaatatctagaagattaaggagaaacatgactttagcgtttagaattgagacagcgatatttatgcataaagatgcaaggaaacagcatactaaacctgattctccaggtctcaaacgaccaccaggaagcttgaaaatggagtttctatattgaagaagcaaaacatgaggatgcttgaacaactcaacctgatgtgtcccaacattagattttaatcaatcctttcaaaccaattttccctgtaaaacttttcaaaatccctaatttggctaccaactataaaattaccagaagaacagcttcaacgcaagttctcaatccatgagcagcataacttcaaaagaaacaaaaaagaaactttagctatagattaaaacaataagaaaaaaaccagatgatctaaatcacatcaaaactcgatttacttggatttcaatctgatgactcgatcagagataatctcgtccttgacgcgaagagcttcttttgaaccgaagtagtagctgctaagcgggtataaatcaaccatcaagtcatgaacgacatcgtttcgtctcgtcgtgttgtcactgatctcctccatatctaacgctcgagcttcttcacccattttctgcccgtaaaattcaaagacgagagctaaaagcgatctcaatcgattaaaattaaataacagagagaccacgagagcagagaagacgcaagaagaagagtgaagaaaggtgtcgtagtcggatcactgagacgtggcggctccagagagtacttctccgcaattagctgacgacggcgggagagtgaggaagaagatattaatgggcctgttacgatattaatgggcctttagtagtaaacaagaatacggaacgatgttaaacactctattgtttccaactactaaaaacgacgcgagtttctattttataactaaaaaacgagaatcaaagtctctgtttcaaatttgggtcttttgcttcttcttgctcacttgaggaaacacagtaaaaacctaaaaagagaatg

SEQ ID NO: 36084 - DNA, 3003 bp, Unknown; identical to SEQ ID NO: 36083
  misc_feature (1)..( 3003): 2750-1469P.txt file - cDNA_ID_3092376; gDNA_ID_1620665; Annot_ID_163897

SEQ ID NO: 36085 - DNA, 3003 bp, Unknown; identical to SEQ ID NO: 36083
  misc_feature (1)..( 3003): 2750-1469P.txt file - cDNA_ID_3092376; gDNA_ID_2926196; Annot_ID_141297

SEQ ID NO: 36086 - DNA, 3003 bp, Unknown; identical to SEQ ID NO: 36083
  misc_feature (1)..( 3003): 2750-1469P.txt file - cDNA_ID_3092376; gDNA_ID_2926196; Annot_ID_201482

SEQ ID NO: 36087 - DNA, 3000 bp, Unknown
  misc_feature (1)..( 3000): 2750-1469P.txt file - cDNA_ID_3092394; gDNA_ID_2926196; Annot_ID_201489
aatttaaaacaaaatcataacaataattgaatattctcacacggtggttgttctctttagtacccaagtagaattgttttggtcaaaatccatactaatctttgaaacctattaaaaattcgagtattttgtaatctaaacgttttactgtggctaaaaaaaattctagcaattcttttattgatggttgtattcgttttctagtctagatagtagatacacatcatcaacgattcttcttctactcgaacaaatcacgaatcttcttctactcgaaaaaaacttataacacttctttggttaaaaatgaagattttttgttgactttatttcacatatgtttaaatagttaatcttcttccggttcacgaatcttcttctactcgaaaaagtattctcctatgatggaaatttgataactgcggctaataaacaattttgatttccggtttagttttactttgtaagaagacatatttgattaaattttggaaattgttggacccataccatcaagacttgttggcagtagataaggtttgatattcaaatctcaaaatcattgtcttatgtcttttctgtgcccgaaaagccgaactcacatagtgtccctccatttcttttacttttcaatgtggcagtataacattcgaatttacgaaatgtttatatacttatgtttcaactttcacgtacaattacccttcacaaatcacaatcagtacctttcacaaatcatagtcaccaatcaccaatcaagatcacttcaggtctttcattcgactcagaccggattcatagttttgacggttcatatgattacaacgattgaaagttgtacattttatgttttagaacagtttatggatcattgattggtgctagctagtttaactacgtagtgcttctttttatcataaataaaaaatacgttgcccttctcattcttgctattgcgtgatcttcaaatcatttataaacaatctgttgaatataagattaaacaaaaaatattttttatttttattaaaattatggtataatcaagttgtcaatgactattgacgtacatacatacacacacacacatgatacataaaatggtgataaaatagaatcacaaaacataaataaatattttgccgagagctctttagccaggttgttaccacctttggtctattctcgggcgtgtgtttgtggatttaattaaagtatagtaaaggatttaggtccagcaaataatataaaagatcaacatttcacacatcatttacaataaagtaactgcagaatcacaagattattaatattttccgttattaacgttaattttgtcggatcgacttttttcatgtttttcttcttgttcgagagtccgaattggacatagaatcaaacccattttgaacaaaatgaaactaggtttcacttatgctttagtaagtttctttcattccaaagtaaagctaactaattaggcaaattactagagaaaatgcatatacacatacacacgatctattttgaatcattaaaaagaatggtttgaatttggtaatttgtttggggattttcgtttttagaccacatgggtgcaatattcaacaacgataagtaacgagattactggtcctagttaatcggcccaatatgatagaacatgtcccttcgtggctttgatttgttgggctctgaacgaaacaaacttcattcatatagactatagactgatcttaacaggcccacgagtaattaacttaggttcttaactgttgacttttttcttgttctagttttgctttgttgaaaacggcatggttaggctttcttgaaaacgacattttttttgggccgagaaatttgcaattagttacggattttgaactgtactaaactgtagcataatatcattgatccaatatatgacatgagagatctccatatacattttttcccgaagtaaataatatcataatttggtgtaccaacttaggaaattgactaatagcctcacttatggattactcaaacccttagacttataattgactagtcttaaaaataagtaatttaggacgacgacctaaaaaagagagtagtttttgagtctttatatataaagatatgataagagtaaggatgtcacattcacgagcaagtgtatgtgctttcctagaaatttcttccacatgtctacatggtacgacatgccatttgattccaaattctatcattattgatatagatggctctataagaatatgaagcaaacattatttgattagtttcctctactttataattccaaacaagaaaatagtcgaccatataacatcgttttttttttaaaagagagagaatcatttatatatttgatcaacagagaattacatttctaaaacgcaaaaaaaaagaaaatatttaagttttttttttttgcaaaacaaccacatatctgcaaattcaccggatcatcagctctattactggtcatgataactaattctttatattttcgataatgaacgtggaagttggaacgatggatttatgagttgtccacaccgttcgttatgtgcatgcattcaatgcttctcagagccatattccgatagcgagaattttaacatcattattgagtagtgtgttatatttcacactatttatgcaagatttttcgctcaacatcaaacataataacccaatcaaacataatttcttgattaaagttgagctttgttgataccaagtcaattactcattcatataataacccaatcaatcattcttcctttattgtacccaattaacgactacaaaactggtcctacaacatcgtaaaataccaaacaaaatcgtgaaaaaaacagatggaacaacgtgattttctttttcccaaattctacattaaaaatgtctaggccgcaaaactgcaaatctttgctttgtagctattttctcgatatatttcaacataaaatcataaaaggaaaaatg

SEQ ID NO: 36088 - DNA, 3000 bp, Unknown; identical to SEQ ID NO: 28958
  misc_feature (1)..( 3000): 2750-1469P.txt file - cDNA_ID_3092401; gDNA_ID_1971748; Annot_ID_175260

SEQ ID NO: 36089 - DNA, 3000 bp, Unknown; identical to SEQ ID NO: 28958
  misc_feature (1)..( 3000): 2750-1469P.txt file - cDNA_ID_3092401; gDNA_ID_2926196; Annot_ID_201437

SEQ ID NO: 36090 - DNA, 3000 bp, Unknown; identical to SEQ ID NO: 8334
  misc_feature (1)..( 3000): 2750-1469P.txt file - cDNA_ID_3092405; gDNA_ID_2926196; Annot_ID_201434

SEQ ID NO: 36091 - DNA, 1494 bp, Unknown
  misc_feature (1)..( 1494): 2750-1469P.txt file - cDNA_ID_3092426; gDNA_ID_2926197; Annot_ID_141350
tcgataacgattccctacgatggctcaatctcccgcgagccatcaccgtctccaccgccgccaaaagcgaacacgaagaatctaccgacgaagattctctctaacttcctcataggtctaatcatgatccctgtagctataaccgcttttatctttatcctcacgtctctcggtttcaccttcttcttcgctttctactggtttcttcaacgaaactatcgccaccgtctccgccgccatcgccgtcacgaatactcagatgggttatctccaagatgcgtgaagaggcttcctcaattcaagtattgtgagcctagttcagagtacggaggcgatgattgtgttgtttgtatcgatggatttagacaaggacagtggtgtcggaagctgcctcgatgtggacatgtgtttcaccgaaagtgtgtggacttgtggttgattaaagtctcgacttgtccgatttgtagggatagggtttatagatttgaagaaggaagaagatggagaccacaaggtgaaattttttgatcggtggttttataattagatttgaaagtgtgtttagtttgttatcatatttagcagcaattttggttttcatcaatagtcatgtacagtgtcttttttttttttttacacggcttcacaattgaaagcttgtttcttcaccgtttgatgaatttgatccaataagagaatgatgggtttctgtagaatttaacttagtttgaggtttgattatcatgccaattattaaattcaatctagtcaattactgatagaaatgttgtccatttgtcactttaaacatgttgcttatgttaccttaatgatttctcataatttcacttgagattcagtggttaatcatcaatgtttctgtttcaatttgtccatgatgaagtataagttctaagtaaagcttggttcatgtgattttaatttacctacttcacctccaaagttatgtcaactatgttttcaagtgtgtgattcaaaagtttatattgaacataaaaataaaggaggctaaagaatcgttttctgattggaatgtgagattgtgactcacacggagaaagtgattgtgattggatctgactataagactaaagaagtgtttttgtgaagtaacaagtaacattgtctaattagtgttttgtattgtaaactaataatgactttgattaacgaaataatgtcactttagtcaaatgtgttgactttcttgtcttataccgatggctcaagtattcccaagaaaaaaaaacaaatatccctccgatttctgactcgtcccgtgactcagtgattctcctcttccaatcctctccggaagaactaaacaaaaacacgatctttctcagatttagagagagtaagagtgagagagtgtcagagacacgaatcaaagaaatgatttttaaaagcttctgttaattctaatttgcatagatttgtttactcgagcttgagcttgagcttcttctaatg

SEQ ID NO: 36092 - DNA, 1494 bp, Unknown; identical to SEQ ID NO: 36091
  misc_feature (1)..( 1494): 2750-1469P.txt file - cDNA_ID_3092426; gDNA_ID_2926197; Annot_ID_201566

SEQ ID NO: 36093 - DNA, 3000 bp, Unknown; identical to SEQ ID NO: 7068
  misc_feature (1)..( 3000): 2750-1469P.txt file - cDNA_ID_3092430; gDNA_ID_1621125; Annot_ID_172271

SEQ ID NO: 36094 - DNA, 3003 bp, Unknown; identical to SEQ ID NO: 28960
  misc_feature (1)..( 3003): 2750-1469P.txt file - cDNA_ID_3092430; gDNA_ID_2926197; Annot_ID_201561

SEQ ID NO: 36095 - DNA, 3000 bp, Unknown; identical to SEQ ID NO: 24280
  misc_feature (1)..( 3000): 2750-1469P.txt file - cDNA_ID_3092434; gDNA_ID_2926197; Annot_ID_201559

SEQ ID NO: 36096 - DNA, 3000 bp, Unknown
  misc_feature (1)..( 3000): 2750-1469P.txt file - cDNA_ID_3092437; gDNA_ID_1971791; Annot_ID_58041
cgcctgaactccgactagctttcctccacttcttgacacgtatccgccacgtgttctcttctcacatctacttcgacataacggagattgacggcgtcaacaccaacgagctctacaacgccgttcagctttacctcagctcttccgtcaccgtcaacgacgcagtttctagcagcaacaacaacacacgtctcagcttgacacgtgttcctaactcaagctccgttactttcggcctctccaacaacgacagaatcaccgacgtatttaacggcgtcactatcctctgggaacacgtcgttgtacaacgtcaagtacagagcttttcgtggagaccaatgccggaagagaaacgagggtttacgttacagatcaacaaaagagacaaagcccttgtcctagattcttaccttgattacattgtcggaaaatcagaggagattcgtcggagaaacgaggagagactgctttacacgaactcaagaggtgtttcgctcgacgcgaggagccatccatgggattctgtaagattcaagcatccaagcacgttcgatactctggctatggatcctgagaagaagaagcgaatcatggaggatctaagggagtttgcgaacggacaagggttttatcagaaaacgggaagagcttggaaacgaggttacttgttgtatggaccacctggaactggcaaatcgagtttgattgctgcaatggcgaattaccttggttacgatatttacgatcttgaactcactgaggttcagaacaactctgaattgaggaagctgttgatgaagactagctctaagtctatcattgtcatcgaagacattgattgttctatcagtttgacgaaacgaggaaagaacaaaaagaagaatgggagctatgaatatgatccaggtttgacaaacgggtcgggtttggaggaaccgggaagctcggtgactctgtcggggctattgaacttcacagatgggctttggtcttgttgtgggagtgagaagatatttgtgttcacgacaaatcatatagagaagttagattctgctctgatgagaagtgggaggatggatatgcatgttcacatgggtttttgtaagtttccggctttgaagattctgttgaagaattatctgaggcttgaggaagaagatatggatagtgttgttttgaaggagatggaagaatgtgtggaggaagcagagattactccggctgatgttagtgaagtgttgattaggaataggagtgatgcggagaaggcggtgagggagattgtgagtgtgttgaaggagagagttgtgaagagaaggaagagtgttggattgaagaagaagaaacaggaaggtcaagaagaagaagaagaagcagaggaagaacaagagaagagagctttggatagtcctaatagaagaaacagagaggtttgtgggtttcgagaggaggaagaagaagaagatgagaaggagaagtgaatgataagagactgtttatcctaggatcatcatctaatggtggttcttgtgtgtttttaattatccgttttgtttagtcaaaattattataatatatgattagttaccatataatataacgttatccattttggtttactcttaagtcaaaagtaggcactgtccaaagttaaccttctgagatttgctacatgagagttgagactaaactggcttttgtatctactaatgctgcagaaattgccactttgttgttgtatatgttgtctcaaattttcgtgtcggttacgtttgttttgaagagataaaagagaattggcgtttggactttgggtgttgtaaattggttagtgtcacacccttttttatacaggttatatgtgaaacctgtaaatttcaaaatttatagttcaagaaaacaatttactcgagaagtgacatttaaagaatcatcacatcaaacacttgacttcaaactagaagtgacctgaaaaatccatccgttctttttttttttctaaatataatattgaccgctgatttttgacatattgtagtagtgaagcccaatcctacccaaagagatttgcatcagaaaaaagttgttttatattatgggcccaatctttttgatcaaaaaaaatatatatatatattatgggcccaatctctagaatctaccaccggttaatgtctaaataagaacaaaaacaggtcttggtaactaattaaaactgaaaacaccaaaatcaaggttgggatttgttgaagaaggtggtatttcaccatatcacaacaactaattaattaaatttatttaacaaaacatgtctctccaaaactgaaaacaccaaaacatgttttcattttatgaatttcaatttaactagttaaaattttgatatcacatgcgctacacatgccacctcaatttgtcctgctcctactgtctattactaaactaaaagttaaaattagcgttgagtttttattgaatttatttactcattagcatttgacttgtatagagagtattaaaataaagaataataataataatataatgcggttggcgaacaattgatgttgcggcaaaccggtaggcccaacaacaacacggacattcttgatgtttttctttgacaagcggtaatctcctgcagctaagaccatcttactttaaattatttcccaattacaataaaacacgtgtgaaatatggtcaatttagttcagagaggcctctttattaaaatcttccattaacgtttaaagtgaagaaagcaaagaaatatcgaagaatttaaggaataaaaaataaaaacagaaagctggaggaagaaaaaataaaaattccttctttcctcctgaaggcaaaaaaggaagagaagagaagagaagagaaggaagcagaatctaattttggattataatcggagagagaatctattccgacgaatcttttcgggttgattttttggtctttaatttgaagggtttaggtgtggtttcgaagatg

SEQ ID NO: 36097 - DNA, 3000 bp, Unknown; identical to SEQ ID NO: 36096
  misc_feature (1)..( 3000): 2750-1469P.txt file - cDNA_ID_3092437; gDNA_ID_2926197; Annot_ID_141338

SEQ ID NO: 36098 - DNA, 3000 bp, Unknown; identical to SEQ ID NO: 31745
  misc_feature (1)..( 3000): 2750-1469P.txt file - cDNA_ID_3092437; gDNA_ID_2926197; Annot_ID_201556

SEQ ID NO: 36099 - DNA, 3003 bp, Unknown
  misc_feature (1)..( 3003): 2750-1469P.txt file - cDNA_ID_3092444; gDNA_ID_1971791; Annot_ID_175556
gaatttaaataattatattttattttaaaaaaaagaaattcccaatgattgtcaaagctttgataggccacagtatcttgcctattcacggcggctccgaccatcagtttccacggtgccggcggctatatacgatagtcgttgtgaagaaaaaggtccttttcgtcaaatcattttacattggagccgaaagtgtgtactttactttggtcggtttttgatattttatcattactttattctgaaaataaaattaagtttgatgtattcatttcttgagactttaaagacaatagtagaatatatattctccttgttataaatatgattgggtgacatggtacgaccgcgatataaattctatatatatcatcaactctgatattaagaaaaattacgataaaacgaaaggatataaaaaaatagtcaaactttagcgatataacaaaaattattgattgtacaaagttttgtattgctgtcatattagaccgtaaaattttatgacgatcccaattcccaaccctaaactaacaccacaattattgagcacattcaaatgctgtcatttttattactcgtacgtacacatgaataaggtggaaatgtcatatttgggaaaacaccataaaacaatatgtatgtcgttcactttggtctcatataaacgctagccaaatcatacagaggtaatggtaatgtttttttatcgacggcaacgaaagtttatgctaatatgtttataaattacttttattgattaatatgattatctctgtatagttgtggacgtgtgtatataactgaccgtctaattaaagaaaaatttatcacatcacgtacctaaaagacgttcttcattaatccataattgctttagtgtataactaatcatctatttagaagttttttgttttacttttcctattgttaatgtttgaaagattagaatatatttataagaagaaatttataactttttagcaaaaaaaaaaaaaaaaaacttataacttatgaagtctttggtatgtatattaaatttgacctgatcacaagtaatgcacgtatattcacgatttgaggtacgaagcagatgaaaattgtactatttaacaaaattactaaactataccaattaccagacacataaaatctagataaagtggtcctaatttctgagaaagaatattcctgtgttcgttctttctatctctttccttttctgttgttacatttcccacacacaaaaaaaaaaaaaatctatttactgatctatgttaaataaaaatcaaaaggaaattgttttatgatttttattactttatattaatttaattgatgtaataaattattaaattaattcttggaaaattaatcaaattaacttaaatcaaacaaaatttagttaaactaataaacactttaaaataaaaagtttaatttgattaatttagtcagttatttattaaactaataaacactttaaaacaaatttagttaaactaataaacacttcagttaattattaaatatttatgagaattctaaaagattaatccttatgaaacagaggaaatatattttaagatagaaaagagatattaagaaatctcaaattaaaatacaactcatatttgacacccataagcaaaagatattataatactaaactacttatcaaagatatttcagtttattgatatgatcagaatttggtcaatttttctgtcaacaaagattggtctaaattaatgacctaaggaagcgaattaattcattaagaagactttttttctttctcaaaacttatgaaaattaacccacttctaattaatcatcaaaaagcttgaaattatttgtaaacgaagactagaaagagagaggggaaaaaggtatgacaaacagccttaaagttaaaggtaatagtaccttttgtttgttcttctttttttgcaaacaattttttcccttatttaattacgtttataaaccttaattcagattccttaaatacattgttaggactccataattagtaacggcattaggagcataaacaaaaattatgataaaagttttgatattatggaaataaccaaatatcttacctgtaaataaaataaagagatgtgaccaaatttaattgtggatttaattacattatctaacccttgaagaaactcaatgttttttgtgggattgttgtcctaaacctgaggttacatgtaatcaaaacattaatgggatttgaagtaaataaattagatttgcgccaaaaaaacaaaatctccattgattacagtgttttaatatggtcagataaaaccacagaagtggtaacgacataaaaaatcaccaccaaacataaaaccgtaagaaaagtttcgatttttattttctgcgatccaaaggtctagtgatgaattgaatttggtttttgtttttataattgaagaatgaagaaataaacagttgatgggttcttcgcttcttctcttgttgggttagtgataagcacgcctggcttctcatcattccctccaacctttctctctctaaaagacttcaattgttttatcagcttctctctctaaataaagctctcaattcaattctctctctttcacttttttttcctctgcttgcttcttctgttcatctttttgcttcgtcaaaattttgaccaaagttttgtacttttttgttgctgcaatttttgtgattagattggatctgggcttggagctgaatagcggatttgtataaggtaattgcttgaaacgtaccgaattgattcgtttttttgtttctctgagatttttcaatatctgggtcttagagtttggctgatctgattggttctctgagattttcatgtagataagtttgttttaaaagccaaagccttagtttttaattagtgagatagatttatgtagagagcatcaatgatcaatccttgagctttatcttgggttttgttatgttgtttattgaaaaatg

SEQ ID NO: 36100 - DNA, 3003 bp, Unknown; identical to SEQ ID NO: 36099
  misc_feature (1)..( 3003): 2750-1469P.txt file - cDNA_ID_3092444; gDNA_ID_2926197; Annot_ID_201546

SEQ ID NO: 36101 - DNA, 3000 bp, Unknown; identical to SEQ ID NO: 32027
  misc_feature (1)..( 3000): 2750-1469P.txt file - cDNA_ID_3092509; gDNA_ID_2926198; Annot_ID_201650

SEQ ID NO: 36102 - DNA, 3003 bp, Unknown
  misc_feature (1)..( 3003): 2750-1469P.txt file - cDNA_ID_3092513; gDNA_ID_1621091; Annot_ID_170726
acacaaactattaggagcacaagatgaaggatacaagtcgtcaatcttatgtttcagtggtcatcaataataacacaaactattaggagcaaacaaaacaatttatttaaatctcttttgaatatgttttagctcaaatcaataaataaaggcgccgagaaaaaaacagagctcatttgcacaacaatcagtatagtccaaagcttaagcaagtgaggacatgtgttctagctttcctcttgagcaggagcagaaacaggaggagtaggttcaagcattcttacagaacgaggaagcataaactcagcaaacacagggtagtgagatgaaggatacaagtcgtcaatcttatcatttacgatctcgcacattacaggaactatagatctacctctgtaaagtatccaatccgtgtgtagatcttgcgtctgtcggtcccagcagaggcataacgctctgaatatcagcttcaggaactcgaccgttccctgcttgtcacctgaacaaaggcccaacatgttatgatctagaagctttggagataaatgatttttatagctcatgagagggtggaatgtttcacacctttgaaatcatggtatgttcttatgagagcgacgttttttcttactcgggcacttggccatgcgtctctcatatctcctaccacaccatgctctctgcaagttgaatgatgcccaaaagccattcatcagcagtcaaataagtaaatatgctttgatttgaaactagttgatcagtgtgtgaagaatggtttagccattcttgcattaactaggagccctgaaagaaaactctaggagattggtaaaaagcacaaaacttgtgaatgtgatattaaggtacctagatctgcccaacagaaaccgccctgttgttgattccttctgtgtgttgaatcctccacagtacacaaccggcaaagtgggaggtaatgatgctatgtgttgccatgtgagtaaagcacttcgcctacgggcacgagggctgatttcatccaagtttgtgttgactatctgaaacgaaaaaccaggcggctccgctcctttaagttggaatgtgtaggcagcttgtcaaagaaaaccaaaatactgatatataggacaaaaacaccaaaatcataaactaatctaattatagtttaactaaaatgaacccaactagtaaaaaggatatagcccatgtcgctatacaaggaactgcggaaccccatgccgtgcttccagggaccgagggagactctgacaaccaaaaagttccaccctctagcagctctaccttcaattagtataaagtatagtatcaagcagcgtattaattatttagagcgtagttatgtattgtcttatcaaccgaattaatactttttccttgttgaagaagatggtgcagtgttcatcattagcatccccaggtcctgttcttgatatgccaaattgatcataggctgcaagcaaagagtactaccatctatttaagttcaaagaaacaatgcaaactgaagtattattaaggcatgtgaaactagaagctaagctccatggttcacagtaacaaaaaccagataaacaataccaccatcatttcaaagaaagcacctgtaaatgtgagaatatcatgcattccattgccataaaacagatgcattaagtgcactagactccggcttttgtagcctaaaaacactaacttgaacttgatgcaaaaaaggatacggattgacaaattggctatcagatttaagcaataccaacatatactaaaaatagaattaaatctagtagatcacaaatagatttacatagtagattgagaacaagaagagtggtctacgattgataacaagattcacactagtctgtgaacttaagaagaagcagactgctgtatacaaacagggttcaattagacctaactcacaccatttaagtagagattagacttccataaatcaaagagaattcaattatacctggcaacccctgctgaagataatccaactgcgacttcacacctaaccaatgtaaacatgataacaaaagatcaaaacgaaaatcctatctctgttcaatatttcagaaggcaagaaaaagcacaagaatcaatctccagcattcaggaaaaagaagccttcttggagaaccaatataaagaaggaagcaagatctaacaagcattgaatcaccaatacgaagaaggaatcaaagatctaacaagcattgatccattgtggctaaagattattaccttgttgggtacagagaacaatgggggagtaactagtgatgacagtgagacacaaatctttccttttgagccatgaattagggctttcttcaggtagatcatcgtgaagattgaatgacatcacactcaaagacacactcattgttttgtctcctttcttcttcttcttcttcctctagttttctctcttctttctttatggtttggtaagacgaataaaaacaaaggtctctctcacatcagcagcagctcatcgtcgtcgtgacctacatgattttcaataataagtcaaaagcttatcaatttttatgtgaaaaaacagctcaggattcgaagaaagaaaatcaatcaacataatttattatattatattattgaggaatccaatacgaaccttgttgtttcagactcttatcaacaacaacagtggagaaaatgagtcttggacatttgacgacttttgctggaaaatctgtgaaagtcatgccctttgatcaccaaaagtctcttaaagccatttcctgatacatgtataaatcagcaacttcagaaacaaatcaaatcggaaacgggggaagaagaagaagaagagtaactaatcggaggagggaccggtgaagtcacggtggagggaccggtggagtcacggtggactaatcgtcggctttttggtctctctctagatttttttaaggtttaaaattaatttcagacaagcttcgaacccgagacatg

SEQ ID NO: 36103 - DNA, 3000 bp, Unknown
  misc_feature (1)..( 3000): 2750-1469P.txt file - cDNA_ID_3092513; gDNA_ID_2926198; Annot_ID_201648
caaactattaggagcacaagatgaaggatacaagtcgtcaatcttatgtttcagtggtcatcaataataacacaaactattaggagcaaacaaaacaatttatttaaatctcttttgaatatgttttagctcaaatcaataaataaaggcgccgagaaaaaaacagagctcatttgcacaacaatcagtatagtccaaagcttaagcaagtgaggacatgtgttctagctttcctcttgagcaggagcagaaacaggaggagtaggttcaagcattcttacagaacgaggaagcataaactcagcaaacacagggtagtgagatgaaggatacaagtcgtcaatcttatcatttacgatctcgcacattacaggaactatagatctacctctgtaaagtatccaatccgtgtgtagatcttgcgtctgtcggtcccagcagaggcataacgctctgaatatcagcttcaggaactcgaccgttccctgcttgtcacctgaacaaaggcccaacatgttatgatctagaagctttggagataaatgatttttatagctcatgagagggtggaatgtttcacacctttgaaatcatggtatgttcttatgagagcgacgttttttcttactcgggcacttggccatgcgtctctcatatctcctaccacaccatgctctctgcaagttgaatgatgcccaaaagccattcatcagcagtcaaataagtaaatatgctttgatttgaaactagttgatcagtgtgtgaagaatggtttagccattcttgcattaactaggagccctgaaagaaaactctaggagattggtaaaaagcacaaaacttgtgaatgtgatattaaggtacctagatctgcccaacagaaaccgccctgttgttgattccttctgtgtgttgaatcctccacagtacacaaccggcaaagtgggaggtaatgatgctatgtgttgccatgtgagtaaagcacttcgcctacgggcacgagggctgatttcatccaagtttgtgttgactatctgaaacgaaaaaccaggcggctccgctcctttaagttggaatgtgtaggcagcttgtcaaagaaaaccaaaatactgatatataggacaaaaacaccaaaatcataaactaatctaattatagtttaactaaaatgaacccaactagtaaaaaggatatagcccatgtcgctatacaaggaactgcggaaccccatgccgtgcttccagggaccgagggagactctgacaaccaaaaagttccaccctctagcagctctaccttcaattagtataaagtatagtatcaagcagcgtattaattatttagagcgtagttatgtattgtcttatcaaccgaattaatactttttccttgttgaagaagatggtgcagtgttcatcattagcatccccaggtcctgttcttgatatgccaaattgatcataggctgcaagcaaagagtactaccatctatttaagttcaaagaaacaatgcaaactgaagtattattaaggcatgtgaaactagaagctaagctccatggttcacagtaacaaaaaccagataaacaataccaccatcatttcaaagaaagcacctgtaaatgtgagaatatcatgcattccattgccataaaacagatgcattaagtgcactagactccggcttttgtagcctaaaaacactaacttgaacttgatgcaaaaaaggatacggattgacaaattggctatcagatttaagcaataccaacatatactaaaaatagaattaaatctagtagatcacaaatagatttacatagtagattgagaacaagaagagtggtctacgattgataacaagattcacactagtctgtgaacttaagaagaagcagactgctgtatacaaacagggttcaattagacctaactcacaccatttaagtagagattagacttccataaatcaaagagaattcaattatacctggcaacccctgctgaagataatccaactgcgacttcacacctaaccaatgtaaacatgataacaaaagatcaaaacgaaaatcctatctctgttcaatatttcagaaggcaagaaaaagcacaagaatcaatctccagcattcaggaaaaagaagccttcttggagaaccaatataaagaaggaagcaagatctaacaagcattgaatcaccaatacgaagaaggaatcaaagatctaacaagcattgatccattgtggctaaagattattaccttgttgggtacagagaacaatgggggagtaactagtgatgacagtgagacacaaatctttccttttgagccatgaattagggctttcttcaggtagatcatcgtgaagattgaatgacatcacactcaaagacacactcattgttttgtctcctttcttcttcttcttcttcctctagttttctctcttctttctttatggtttggtaagacgaataaaaacaaaggtctctctcacatcagcagcagctcatcgtcgtcgtgacctacatgattttcaataataagtcaaaagcttatcaatttttatgtgaaaaaacagctcaggattcgaagaaagaaaatcaatcaacataatttattatattatattattgaggaatccaatacgaaccttgttgtttcagactcttatcaacaacaacagtggagaaaatgagtcttggacatttgacgacttttgctggaaaatctgtgaaagtcatgccctttgatcaccaaaagtctcttaaagccatttcctgatacatgtataaatcagcaacttcagaaacaaatcaaatcggaaacgggggaagaagaagaagaagagtaactaatcggaggagggaccggtgaagtcacggtggagggaccggtggagtcacggtggactaatcgtcggctttttggtctctctctagatttttttaaggtttaaaattaatttcagacaagcttcgaacccgagacatg

SEQ ID NO: 36104 - DNA, 3003 bp, Unknown; identical to SEQ ID NO: 17832
  misc_feature (1)..( 3003): 2750-1469P.txt file - cDNA_ID_3092528; gDNA_ID_2926198; Annot_ID_201635

SEQ ID NO: 36105 - DNA, 3003 bp, Unknown; identical to SEQ ID NO: 21540
  misc_feature (1)..( 3003): 2750-1469P.txt file - cDNA_ID_3092532; gDNA_ID_2926198; Annot_ID_201632

SEQ ID NO: 36106 - DNA, 3000 bp, Unknown; identical to SEQ ID NO: 8391
  misc_feature (1)..( 3000): 2750-1469P.txt file - cDNA_ID_3092540; gDNA_ID_2926198; Annot_ID_201626

SEQ ID NO: 36107 - DNA, 3003 bp, Unknown
  misc_feature (1)..( 3003): 2750-1469P.txt file - cDNA_ID_3092550; gDNA_ID_1621125; Annot_ID_172235
cctctcggcggcgtaagatagagagcgttctgtacaatgcctgatccgaatctctgtgagacctccttcactccgatcaacaacagatcggagaaatgaatcgactttatcctcaaactcgggagtccaccagttgatcgactcagggaacgacagaaaccgagtttcgaggtcgaagatggtgtttagtgtcgggtcatagcatgcgttcatccagttcttgctgaccagcatcggtccaatccatctttgttcctggcttagccgtgagaagatgtcaagaagacattctcgagtcaactcagaccagtcagggtagagtcccgatcccatctccacctttccttccccgccgttgacttccataggattgaagaacgcttcgtcgttttgagtacgaatagacttgaaatgttgagacttttttttatcgtcaatggaataaatgtagtcaatggaaacaaaaatgctgagactttttcagcttctataatcaagcatgctctttacctattacaaaacagagcttttttttattggtcattagtaacctttccaattttgatatccagtttatattaatgttctgtcagtttgaagttggagcaaaacggttctgctcctcgactttgattaagagaatgagtaagaacatccaacaacaaatgagattccctaattaccaaattggattaaaaggataatgtagtcacttatgacaagagttattattcaaaggttttcctatgttggacatatggaagtaatgactttctaagtcatcaaatcaaatcttatatctatatacttgtataagcatatgtgcatattgggacgacaaatcattatctcaaatcctatttcatactaaacaccctaaacacttaaagccactggatcttgccatgtaaccttcctcttcactgctctatttaactctttctccacatctccgcaaatgggtaactttctttcaacatgtagatcactgatcctgttatcaagcattgcattcttcattgcttccgcgaccatatgttcaccattcacttccggctcctcttcttctctctacaaccaaaacacaaatcaaactaataaagttctatagactctaccaaaaggaagacactaaaataacacaagttgtttggctttaccgagatctggtttaggtcaaagccagggactttgtcagtgccagaagtgtttccctctccgttaaggtcaggaagtgaaacggggaatgtcaaaacatcgcttcctctgctcctttttcgcttcttatccaagtcacaacttgcaacattattagccaatgcttccttctcattgcaaattgtattcttcagtttcaaatcaaaacatggtacagatgctctcacaccagactgcttctttctttcgccacttggtttccttgggacctctaaacccccggattctgacaatctcaacatctctggagaggtttcaagagtttgatcttgcttcaagtgctcgtatctacgtctcaagaacctatcgtttgatcatcaaaaactcaataagctaatgaatgtacaaaagcttggatcatgtaagttaatacacgctaaacacgtaaattgacaagaagatcagagatcatacctaacttctgacttgagggtcaatctcttttgtttaatcatctccaatctctttctctttatctctaattcctgagaaaacgagataaggaaacaaatttcaaaactttacttcttccctatgacttcacttagaatcaagcgaacaattccaaacccaaagtcatgacaaaacatcatgatcacccaaaccagcagatccagaggaaatcgaaacaaataagaaacccagaaatttcaaacttaaaaccctaacgaaaaagcaattaccttttccaactccagaacctgcacaaaggttaatctgatcatgggatcgccaccggaagcagaggaaacgaaattagtcttcttcatcggatccgttcagtgaatttaggaatcgcagattggaaagacagcaagcaagcgagaaagagggaggtgtgaaggagaaagaaggaagcgaaggtaaaggggatgattaggttttaatggtgagagtcttattccatgtatgaaaccctctgaccaaaagacttaagaaaccacataattgattgattttcctttgggtgcccattacaaacaaaattgatattgaaaaaattaaaaattttggattttccttttctcttctttttgtgtgtgagaagtctatgagacaagtagcagaaaactaggactagtgatcaaagatggtaaagagaggaaagaaagaaagaaaaagttttgattttttctcatttctttctttctttttcacttattatttctatgtgtgtccttttggaagttgcagaaggggtattgaaatgctgaccacttaacccaaaaaaaaggttcttccttttattgtgtttgttgatgattgggttcatgtctttgtgaggtgggtttgataaattgtaaagaatttgaattaaaaagcacatctgggttattgaagagatgaaagagttaatattgttggatatgtatgtaaagaaattggggtatagagagaaagagagcaaaaaaaaataagagtttggttgagacaaacagtgaaacaggagaagaagcaactatggagatttgacaagagagatgattggtgactggtgtgtataatgtgtgtatatatgatgtacttttatttattcttttagtcaaatacatgtttttgcataattctcaatttctcatattattattggacccaaatcctgtgaaaataatctcttctttgggctttttctcatataagcatcaattttaaaagcccattaaacccaattaagggatcctcaagcttttccacgtggcacaatcttattagtctttaagaaacatatctcgttctttctgtttatcttgtcgaagcacacttctctgtttcaggagaacaatg

SEQ ID NO: 36108 - DNA, 3000 bp, Unknown; identical to SEQ ID NO: 28977
  misc_feature (1)..( 3000): 2750-1469P.txt file - cDNA_ID_3092550; gDNA_ID_2926198; Annot_ID_201615

SEQ ID NO: 36109 - DNA, 3000 bp, Unknown
  misc_feature (1)..( 3000): 2750-1469P.txt file - cDNA_ID_3092560; gDNA_ID_2926198; Annot_ID_201610
gacatcgtttttgcttttaagaaaattgtaaaaggtcaaagattacataaatagatagtccgttacgttacatttttaaaattacgtgttttcctagttcctactatcggaccattctttgtgtaatcgtttgacacattttcaagtttatagaaattaaagtcatttatattcaaaaacagattagtcttttattttataagatgtaaaagaaaaaattggaaagatttagaaagaattagtatcttgaatattatggactagttatttttttttcttcaaaaggatgaaaacaaaaaattacgatcaactcatagtcatagtggttcaatagttaaattttctttttgtgattttaaacatcgttgagtactttaaaaacttttcaacatttcctatttgtaaattggaaaattatatatattcttaagtttcaatgtttttcccaaactgactactttaccttacgtttatatgatgatcagaagttcagaactactattcgaatattattttaaaaatatttaagaaaattatagcagaaatatgtgtgataatttattagttaactaaacacatatcaagagttagtttattttgaaacaattaataataaatctaataattcatttagctttaaacagtaaattattttggaaatcaaatctatatttaacgtagacaactcatagcaatttattaagaaatcaatccaaattaaagatttttttaattttaaactgaaacatattgtttttgtaataaaaagtaaacaaaaacggacattaatttagcaaatcagagagagattactcttgaatactcggttaggaaatcccaaacctagctccgaacccccaagaaacaagatttagctccaaaccacaatgactatataaacaccacatcaccatctcatattttattcacagagaaaacaaaaacaaacgagagacaaaactcaatccaaaacaaaacaaaagccaagttttttgtagtaagtaaaaaatccaaattatgggaatcatagttccagttttgacccttgtcttcctcttgtttgctaaagtgagccatggtgcctccaatcctagggtgattctagttggtggatctgtgggatcatggaaggttcctgattctcctaacaacactctcaatcactgggccgagaacaaccgtttcaaagtcggcgacttcatcggtactcgatatatatctctctctatctctttacttctgatatatttatatgctttgattctcttgtgatcatatgttcataaaaatttatatgcatggttgaatatttgatatatatttgttgtgcatgtgaaatagtgtggaagtacgacatgaaagtagattcggtactacaagtgacaaaagaagattacgagagctgtaacacagcaaatcccttgaagcaatacaatgatggaaacactaaggttgcgcttgacaaatctggcccttacttcttcattagtggtgctcctggtaactgcgctaaaggcgaaaagattacccttgttgttttggctgaacgcaaatccggtggtggcagcagcagcggtgacgctcctaaggtttctcctgttagtcctacggctcaaactccagctccagctcccggtccagctgcagcccataacgctgcggtggggttgaaggttgcaagcggttggttcttgaccgcagtcgtggttggtttggctatggcttagagcttagaggggtttggtcgagagaatgtagtttttattgagttcactttttagcaagatttagttttatttttccagattgttgacgtttcttttgttcccttagtttttcattataaaagatctctctttctgttttttgttatgtgtttgggatattatattcactcttaaagcttataatctatagtttgttcttgccattttgaatctaaaatttcaaaacctcaacaaggcaactacttgccgaccatcgatgaactgatcggattaatcaaccaaagtttaacaattttcattttttctatgagatatgttgactcaataattaatacaaagagattcagtcgactctatcttaatggtaataggattcatttgtagaaactaaatatatttatttaccaaaatgaccattgtgaaagtggtaattaaaaaacaaaactatatatggtgtccaagagattcttctatctctaaaataaaagagaatatatatgctacgttatggaaactacattttgaaatctgccttgcatgtactgattgatattctaagattgttcttgattttgttggtaacgccattgtgcgtggtaataaataagacgaggccaagtggataatgtgctaatctaattccattacttacacatatagtacatctttgacttttaagtaatctatcgttactaattaataattatgataattaaattacccgtttcacttatatcatggcaacgtttctgaagaaaactatactacacatttacgctaacagccgtataggagattaaattctaagaattgtacgttcaaagtctgaattaattcagagaattttgtttttgttttcaaaatttaaaagttggtatatattgatgaaattagttcaatgtagaagaaaacagtggtgaatggattttgcgatgaaaggaaaaaatggatttagtgattaatttaattcaacgtataaaaatgcttaagtttgataatgggtcactaaaagaccattagttcaaatgggccattgttcaacgacttcaaaggccttgtacaatagtttgctggcttcacttacaaaaacggcatgcaatctacgtcacaaactagaaaatgcaatccgccgctttttcaaagtaaaacgacacacagttgatgtttagaaagtgaaaacagtagagcagggaacccctgagagataagcctgaagatgacacaaattacatgagcaaatcccacgcatgtttttgctccagattccgccatg

SEQ ID NO: 36110 - DNA, 3000 bp, Unknown; identical to SEQ ID NO: 28969
  misc_feature (1)..( 3000): 2750-1469P.txt file - cDNA_ID_3092568; gDNA_ID_2926198; Annot_ID_201603

SEQ ID NO: 36111 - DNA, 3003 bp, Unknown
  misc_feature (1)..( 3003): 2750-1469P.txt file - cDNA_ID_3092632; gDNA_ID_1971819; Annot_ID_176091
ccacaaatagagcctataatttaccgggatctctttcttttccgaaccctcgcctccttcttaaatggcttcagtctacagaaactgggttgcaacgcagagctaatagttgatgaatttggagaaaagcttttggaggagcttgactacaccttggtatctcatatgcttctcaatttcactctatgcgttgttctgtattgatagctcaaatgatgtgtcttaagttcttgcctacaggaagccagaaacattgaagactttctggagaacttcaaagatgaccccacagtcaaaattcctggagtatacaagaatctttgtggtccgcgggttctggtaatggagtggattgatggtattcggtgcactgacccacaggtatgactttcaaaaagggggacaactcaaaataaattcccctataccctcctaaaaagtcaaaattaaagtacattctgatactgactcttactaaatgtactcaggccatcaaggatgcagggattgatttaaatggattcttgactgttggcgtaagtgctgctctaaggcagctgttggaatttggattgttccatggagatccacatcctggaaatatctttgcaatgcaagatgggcgtatcgcttatgtggacttcggtaatgttgctgtactgagtcaggtaatttgagtttaatggttccaaggtatctagtatagctagcttatgtcccttcctatagtgattttcacatctatatatagagacttgttattcatagtccaaactaaatctttttttttctcagcaaaacaagcaaattttgattgatgctgttgttcatgcggttaatgaggactatggggagatggcaaatgatttcactaggcttgggttcttggccaaggataccgatgtttctcctatcgttccagctttagaagccatctggcagaactctgcagggaaaggacttgcagatttcaatttccgaagtgttacaggtacttgatatattgcattcctcaagcaagtttgttttgtttactgagcaccccatgcacatttgaagaaacggtgtcacgtttttggtgcaggacaattcaacaagcttgtgtacgactttcccatccgtatcccagagcggttctctcttgttattcgttctctgcttacgcaggagggtatatgtttcacactgaagcctgattttaaatttctagaggtgaagtctcgtttagtattttgattctttcttttcaaagttaggattagctgacatataaatcctgaagtgagcagatactagctatatgttcacttatatttcccttcccacactaaaagtgaacattttatctaggttgcttatccatatgtagcaaaacggctcctaacggatccaaatcctgcacttcgggaacgcttgatacaggttaaattgataattctgatttagtttcataaatgctatgttgaattgttatccgcatcagatgaaatcaaagctcttgttgccaccgcatgtcaggttctattcaaagatggtgttttccaatggaaaaggctagaaaaccttttatcacttgcaaaggaaaacgtcgccaagatgagtagcaatcctaatctacgagtaaagcgtgtgtaagtaaccaagttctatataagcattgctcccaaaatctcactcgttcaccctgtgaagcttgaattctaaatccgtatttgactcatgaaactttcagggagagtaagcttgacttgacagataccattaaggacggagctcgtcttttcctccttgacgaaggcatccgcaggaaacttattcttgcactcacagaggactcgaagcttcatgtagaagaggttcatacatcagacgtcaccagatttatatctatagcacttatcatcgccattgatgactctctaaagcaataaatttacatttgttctttcagcttgtggacgtatacagattggttgaagacgaagtagatattcccacactggccatgcaagtcgtgcaaggtaatagaacggaaaaacccccattttgcttcctttcttttttgtcttctcttcatctatcattcaaataataaagcttttgcatcaatagaagccttatggagagactatcacagatatgcattcctaacataactaagcctgaatcgatagctgaccatcaattctcttatgatccagtaaacataggaatcttggggcattgattgtaaattaacaagtagttttgtatgactgaagaatgtggttccttttgttttgaatgcagatttaccgaatgttttccgagattttgtgttgtcatggagcaactcagtattatccgacagatgatgaatcagcttctcacttactttttttggctctttttgaagaggaaagaggtaatatatattacagggagtagatggagaagaaaagcgtagattaatatatagtttaatcttcgatgcatacatgttattaacttatacaccaatccatacatgtaattatataaaagcacacacaaacttcacttcacttgttacccagtttgagtcttggtctcttggacgttgtctactgtagttggatatctaaacacattaatcgacgtcatcaaatcaaagttgtagtgttctcacaacacaactgattcacaatctggactcgaatgaattgaatcgttttgcgtctcttgggtcttggcctcgccctcgaatactggaaactaaactgaaccaaatgatattgagttatgcaattacacaaaaggtcccctcaattatccagtgtcattttctgctttcttgagctgtttggtttacaaaaatttaggtaggaatcggcataagattaaatcttatttgacagaaaattccattatcgccaaaaatttcaatcaataggcgccaaacatttcaatcaataggcgccaaaattggagaagtaaagggaaaaacacaaacgtaacaaggattcgagctctctctagacgatg

SEQ ID NO: 36112 - DNA, 3003 bp, Unknown; identical to SEQ ID NO: 36111
  misc_feature (1)..( 3003): 2750-1469P.txt file - cDNA_ID_3092632; gDNA_ID_1620673; Annot_ID_164148

SEQ ID NO: 36113 - DNA, 3003 bp, Unknown; identical to SEQ ID NO: 36111
  misc_feature (1)..( 3003): 2750-1469P.txt file - cDNA_ID_3092632; gDNA_ID_2926199; Annot_ID_201741

SEQ ID NO: 36114 - DNA, 3003 bp, Unknown; identical to SEQ ID NO: 36111
  misc_feature (1)..( 3003): 2750-1469P.txt file - cDNA_ID_3092632; gDNA_ID_2926200; Annot_ID_201762

SEQ ID NO: 36115 - DNA, 3003 bp, Unknown; identical to SEQ ID NO: 31787
  misc_feature (1)..( 3003): 2750-1469P.txt file - cDNA_ID_3092639; gDNA_ID_2926199; Annot_ID_201735

SEQ ID NO: 36116 - DNA, 3003 bp, Unknown; identical to SEQ ID NO: 19761
  misc_feature (1)..( 3003): 2750-1469P.txt file - cDNA_ID_3092651; gDNA_ID_1971819; Annot_ID_176075

SEQ ID NO: 36117 - DNA, 3003 bp, Unknown; identical to SEQ ID NO: 19761
  misc_feature (1)..( 3003): 2750-1469P.txt file - cDNA_ID_3092651; gDNA_ID_2926199; Annot_ID_201727

SEQ ID NO: 36118 - DNA, 3000 bp, Unknown; identical to SEQ ID NO: 8577
  misc_feature (1)..( 3000): 2750-1469P.txt file - cDNA_ID_3092659; gDNA_ID_1971819; Annot_ID_176070

SEQ ID NO: 36119 - DNA, 3000 bp, Unknown; identical to SEQ ID NO: 8577
  misc_feature (1)..( 3000): 2750-1469P.txt file - cDNA_ID_3092659; gDNA_ID_2926199; Annot_ID_201722

SEQ ID NO: 36120 - DNA, 3003 bp, Unknown; identical to SEQ ID NO: 28984
  misc_feature (1)..( 3003): 2750-1469P.txt file - cDNA_ID_3092668; gDNA_ID_1971712; Annot_ID_175122

SEQ ID NO: 36121 - DNA, 3003 bp, Unknown; identical to SEQ ID NO: 28984
  misc_feature (1)..( 3003): 2750-1469P.txt file - cDNA_ID_3092668; gDNA_ID_2926199; Annot_ID_201713

SEQ ID NO: 36122 - DNA, 3003 bp, Unknown
  misc_feature (1)..( 3003): 2750-1469P.txt file - cDNA_ID_3092672; gDNA_ID_1971712; Annot_ID_175120
gaacagagtcggaaaaatcgaactgtaaaagaaaaacactcaccgagacgacgaatgaatctggagatttgtggcttcagagagataagagaaatcggaagatatggttagttaggttgcttagttttgattttggtttaattcgatccacttgcactgataattcggggatgagccctaaaaagtctccgagtgttgttgttgttttgggctcttcaagattctgttgaccaaaaaataaaagattccatatttatcttcttccacatgtattcatcatcttatttttctttataaaaaaatctacgtaatagagattttcaactgatttacttcctcatattattttttattctgaatatagatattactataatttacaaaataaaaatatatcttgatcgtataattatttggtataaaatattatcttcccacgtaggtatataatttaccaaaaataagtttaagatggatttaccaagaatccaatattattacttgcgatactttatatgggaagtagaataattggatatgatattggaatttctttttggaaagtacatattgaaaatgttcattatcgtatgaagcagaacttaaagactggctgggatagttagtacttttgagaaatgggattatcgaatctttgaagataatctgatgttgtatgttccaaagagtctgtcgagttttgtatgcggaagctttcactgttgtaacactttgcaacacttgttctttataaaatggtaacacttatggggatatttaaaaaaacaaagatagcaacatgtttagcttttataaaaatgtattatttgaacgataccagggaatcaggatgctagatgcattatccggtcggtgaacgatcgtgacacccaagcaacaaatatacaagaccaaaattggccacgctctctcctctacccctccagctttacttgtccttatcacttccctttatcatctgaattaatttcatctcattgatgcttctctatgtataatgatccaacacaaataaatcaatcaaatcaaaccaaccgatcactttctctttttcactcataatcattccaagcatgattttaaaatgggcttttgttgtctctcataaaaggtgatagctattcgcctcttccactttcttcttagattgttgtagtataagtttaaacctacgactacgagtggataaaatggttttggtttgacttattaggtttaatcgagtacgacaagtggacttgtgacacttgtccaaccgatacttcttatcttgtgtttttgtgttttctcgtcttctagatcacgttttggcatattgaatttattatataagaataagattcgattgttgaatttttaataagtatggctttgttatattacacgtaagaattgaaaacattacttgatcaaagaaataaaagattttatgtgtggtgactgataatgttgttgaggaagatcagagtcattaatgcagactcagtgaccagtggacaatcttgtataaagaaagacattacagagttatattcaaaaacgtggaaaagtatgcattaccttcttgagatggaaatcttaacaaaaacaagcttttaaaattgagtgcatgtccaagtcatttttagatttggtgtttagtgcttcaatatttcacaatatccaaaaaactcataaaaagatttcagagatagaccaagaaaagttatttgagtctctaagaagggattgaccattattcttaattatactatttgatgtttcaactcacttccaatatgaaagtcttaaacataatcatattatagatattaacctgtgaataaaatgccaatcatccaactctcaaaaatataaatgggccgagaatgggctcacacagtaagggagagtaacgagagaggcttgaaggagaataaatgttacttcaccaaccggacctgccgacctctttcattctctgtttgactcactattccttcacacaaaaaagggaacatttaagtttttttacattttcattcaactttaattctgagagcatcaggtaacactgctccacaatctttcaaagattcctcctttttttgttgttctctctttttatttggcttacacgtccgcttgacctcacccacatgcccctgcctcacatcaaaccatctttatttcgtaatagctaaatcttagacaggcaaaatctatcaaattttagaaagtactattcaaaattaatactctctcatgttactaccatacttgctgattataataactgtaaactataacaaagatggtaaacccaaatctatatttatgattgattaattattttaaagtatatattgatgattttttctttataaattatcatgattgccgtatcgtataattaatagatttgagtggtattgtgaagagctactacagctaaggaagtagacaacacctaacgtagtaaattaaaacattaacgtttctcttttagtccctttttttttgttaatcgttttcataatattctgctaattaaatttcgattgggggtaccaatcaaaaagcaaacaccgcctttcaggtcactgggacagacaataaaaaaacctttttcgtttatgttccatgtctgaaattaaaacattttcaagtctcgtgtatttcagattctccatcttagttcttgtaacctctccctcttcttctccaaattccacctgagagaagagaacttattccacccaaaaagcaataatatatagtaccgtactttgattttttcgataatctgttgattgaagttaagccaaaactcagctctgttcttattcttcttcaaacccaagtttcccacttcactgattctttcatcttagctcgttttaaccacaaagttcagttcttttttggtgtgtttctttttcgttattggcttttgccttttttgggtatagggtgtttacgatttatctctcggttccgatg

SEQ ID NO: 36123 - DNA, 3003 bp, Unknown; identical to SEQ ID NO: 36122
  misc_feature (1)..( 3003): 2750-1469P.txt file - cDNA_ID_3092672; gDNA_ID_2926199; Annot_ID_141425

SEQ ID NO: 36124 - DNA, 3003 bp, Unknown; identical to SEQ ID NO: 36122
  misc_feature (1)..( 3003): 2750-1469P.txt file - cDNA_ID_3092672; gDNA_ID_2926199; Annot_ID_201711

SEQ ID NO: 36125 - DNA, 3000 bp, Unknown; identical to SEQ ID NO: 8301
  misc_feature (1)..( 3000): 2750-1469P.txt file - cDNA_ID_3092676; gDNA_ID_1971712; Annot_ID_175118

SEQ ID NO: 36126 - DNA, 3000 bp, Unknown; identical to SEQ ID NO: 8301
  misc_feature (1)..( 3000): 2750-1469P.txt file - cDNA_ID_3092676; gDNA_ID_2926199; Annot_ID_201709

SEQ ID NO: 36127 - DNA, 3003 bp, Unknown
  misc_feature (1)..( 3003): 2750-1469P.txt file - cDNA_ID_3092680; gDNA_ID_2926199; Annot_ID_201708
tctagtagagaaacatgagcaacgaaagtacaaattgctctttcttcttgaatctcttcatgctgttacttttgctgattttttattctgcagatgcttgtcaaagggaatgtggaggaatctctatcccataccctttcggaatcggaaaagattgctgtctcgagaagtattacgaaatcgaatgtcgtaacacaacttcaagaaagcttgttcctttactttcttttattaacaaagaagttgtgagtatctctcttccgagtgcagatagtcattttgcttatgaagtatctgatcaagaacgtcatgaatcatttggcttagttcgtgtcaagttcccgattacatccgccggatgtttcaacgatggaaaagagtctggaggcggatcaaaaatgaacttcacgggtagccctttcttcattgacagatcaaacagcctcatagcggctggttgcaacagcaaagtgtctttgatgtatataaagccaaaaatggtaggatgcgagttgagttgcaatacaagcaaagactcatatagcaatagcatcccttttgtcgaagcggggtgctcaagcaacgttttaccctattctcaggaccaaggttgtccagaagagatagcagaagaaacaggatgcaatggtatcggatgttgccaggcaagtctacctaacgagcctcaacaagttattggtatcagaacagagaataatgatggaaactcgacaacaaaagtagagtgtacagtctcggccttcttaacagatgagatctacgctttgccgaaggcgaccaaaacagaacacttacttgctaagagatatgctacggttagtctaggatgggtaatccagacgagtaatagatctttcctggactccttggccttggcctgcaaagacagagaagattaccgcaatactactaacttggaaagaaagtgtacatgcggcagaatcactatatctgagacaagttatgcaaactgtggatgcacctatggttacacaggtaacccatatgttttgaacggatgcaaaggtcagtatatgttccttccttattctctcttctctctttttgtgtgcacgcatcttttgagattttacaaatcatccctagatgttataattataagtttttctttcatcatttgattataatatgtcatctttcaaatatagatattgatgaatgtaaagtcaaattcgaatactgtggaaagacagaaacttgtgtgaattttgaaggaggctatcgctgcgtgcgcgataaaactaaagcgataatgataggtaggtcactgatttatcttccaagttgagtcacaaacatgtagaacttttaaaaagaaagtgatgatcaacctgtaatattcttgtgcggttttgcaggcgcgggtacgggttttggggtcttagtcctagttggtggattatggtggttgagaaagtttctaataaagagaaggatcacaaagagaaagaaaaagttcttcaaacgtaacggaggactactattgctacaagaattaaataccagagaaggctatgtcgaaaagactagagtcttcaactcgagagagctagagaaagccaccgagaacttcagcgaaaacagagttcttggacatggtggtcaaggtactgtgtacaaaggtatgcttgtagatggtagaaccgttgcagtaaagaaatccaaagttatagatgaagacaaactccaagagttcatcaacgaggtcgtgattctctcccaaataaaccatagacacgtcgtcaaactcttgggatgttgtcttgagacagaagttcctatgttggtttacgagtttatcatcaatggtaacctctttaagcatatccatgaagaagaatctgatgattacactatgttatggggaatgcgtctacgcatagctgtggatattgcaggagctctttcttatcttcattcttctgcatcttctccaatctatcatagagatatcaagtcaacaaatatattactagacgaaaagtaccgagccaaggtggctgattttggaacgtcaagatcagtaaccatagatcaaactcattggacaacggttatttcaggtacagttgggtatgtggatccggagtactaccagtcaagccaatatactgaaaagagtgatgtttatagctttggagtgattttagctgaacttatcactggagataagcctgtcataatggtacaaaacactcaagagatagttgcccttgcagagcatttcagagttgccatgaaagagaagagacttacagatatcatagatgctagaataagaaatgactgcaaaccggaacaagtaatggcagtagcaaaggtggcaatgaagtgtttgagctcgaaaggaaaaaaacgtccgaatatgagagaagtttttacagagttggagaggatttgtacttctccggaagattcacaggtgcataaccggattgacgaagaagaagaagaagaagaagaggaggaagaagttgtgacgacaataaacagaggcgattcttggagcattagtgttactgctccagccttaagtattgtggcttcatctccttcttcagatgttgaaccattgtttcctcgtctcacatggtgactgacacttaatttgatgtttcttcttacaacgtttgtgtaatatatttgtaacatctatatatcttgttactttagtcttgagttttgtattaaggaacctgttatgtttgtttttgtaaattaattgtgagtgatgatgacacgtggaagagcattaacgttatgtgtcttcttcagagcacatcaaatcaatggcggataagagttttatgtgtcactgacggagagaaatcacgtctcttctgtccacgaagatgatcgtgcaagaccgaagcgataagtctcttgcagaaccaacttttaagatttaaggttgcttgtcccttttttggctccttaattcttggattgatagagaaaatg

SEQ ID NO: 36128 - DNA, 1862 bp, Unknown
  misc_feature (1)..( 1862): 2750-1469P.txt file - cDNA_ID_3092684; gDNA_ID_1971712; Annot_ID_175115
gatagtgagtgactatgttttcgaagattgttgtccatattttgggataatagcaattatgaatagaaagttggaatcttagtctgacatggcagttggaattcattgtatttaatgccaacagagacatgcatctatgcctgtatatagcaatagaaatacataaagtggttttcttaagtatgtctcgtaggcgtggcatagccatgcaacgaaagagagatcaatgtttgccgacttgaagaggttaactactgcatgtagagctggtgctaacagaattgttttgatgcagagatatgacccggacccagctgcaaaggcagctgccgcaactgtcctggcatccaaattgggtgccgattcaggcttgaaagtatatttaggagatgaatcccaactcgatccatcctcgggcaagagcaatgacatggaggttaaccaatcacgtgggttgaggaatcgaaggcaaccaaatacaagaccccacggttctgggagcacttcaacacatcattctgatgatgagtctcaccattctggaacaagcgagagatttccaggcaccacagagcaaaaccagcagatgttggttgagcattacagccctcagggatatgctgctcatgatggcagttggatctcacgcattgcggctctacttgtgggcgaagatcccacacaatcatatgcgctcatttgtggaaactgtcgtatgcacaatggtgaatgaatgtttaagcaaatcctttacctgaatctttcaactatatacttatttctaacataattttgcaatatgctttgtaaatgcaggacttgctcggaaagaggattttgcttacattacatactattgccctcactgtaatgctctgaacaaaccgaagcattcagaggagaatgtacttcttcctgctatttccgcttcaccaatcacagactctctgccactgattgagaccagcgaagtggttaatagcagcagctcgagtagtgaacgtggaagtagccccactccagaaataaaagaggaagctgcaattactgagaccgggacaccgagctgaggaagatccagtgagctaagaagaaggcttagtcgtgttggtgctacagagaagagattttgtgtgtgcatgtgtgtttgtggatgcgagtactcattcaggtaatcttatgctatggattgctaatatatgaaggtgcttacagttttgattctggtttgtttctatacaacaagacaatagggttttggtgggtaaatatgcgattctactgtcgtaaacgacgattgttatacgttttgggggtttgaattctaattatcttttaccattacagattgtctctgtttctgttaaatgtattcactcttggatgatggatcattcccttttcgattttagcactacgagcctacacctttcttattaatcttcttcaatattcaatttattggatagcgtttttttatacctaactctgctttttcattgtttttttttttgttgtattttactagttcatgatatgaatatgacttttgcgatagtagatttttaaaattatctttagtaaattaattaccaaaattgtttgcaaaacacgtgatgatctacactttaaagactttgaaatatattttaaactggtaaaaaagatgctttccgccataaagttgatctcatcaagaaacacaaagagaggtagcaattaaaatattcaaagatgaagagcattattagcacgagcaactcttttcctctgtctccacttacaaaggaacaaaacttgatctgctttatagtaaagaacaaaactcaggaagttcaaatttgcttgggcagagaaccatg

SEQ ID NO: 36129 - DNA, 3003 bp, Unknown; identical to SEQ ID NO: 28980
  misc_feature (1)..( 3003): 2750-1469P.txt file - cDNA_ID_3092684; gDNA_ID_2926199; Annot_ID_201706

SEQ ID NO: 36130 - DNA, 3000 bp, Unknown; identical to SEQ ID NO: 6392
  misc_feature (1)..( 3000): 2750-1469P.txt file - cDNA_ID_3092689; gDNA_ID_1621091; Annot_ID_170701

SEQ ID NO: 36131 - DNA, 22 bp, Unknown
  misc_feature (1)..( 22): 2750-1469P.txt file - cDNA_ID_3092689; gDNA_ID_1564156; Annot_ID_148954
ctcgggcaagagcaatgacatg

SEQ ID NO: 36132 - DNA, 3003 bp, Unknown
  misc_feature (1)..( 3003): 2750-1469P.txt file - cDNA_ID_3092689; gDNA_ID_2926199; Annot_ID_201704
caaatcccataatcacttatattgatagtgaatatatcagtaagaaagatactgcatggtagtttatgctaatatcctcctgaaagaaagagataaacagcactgatgagctcaaggttctgatgaaaccacaaaaatacattacattaccttcaggcttcagaaattgcaggcttcacttatggtatctctttcagatccatatttagcgtagtagcacatcaacaaaacatcacttagaaaaggctcagatcagtttgagaaatggatccgtagcaaagcagagcacatcatatactcgtgaaatgatcacactggcatccctcagagataggtccaagcaataacaaaaagcatggattagaatctgtggccatgtaaaattaacaatcttctaaatcaagttcagcaaatatttacgaactattccttacttgagttgttggaacattctgcatcagtgatgctgcttttgaaatgcagaaagagaacagtgcttagatagaatcttcatataggactccacgattttccttggtaatcttcaatctgtaattcaggttcaattttactgaatccgtagcatttgttcagtttccgtctttgcataaccctccttacttcttctgcagcatggtagttaccagattctgtgtgaatcttgctaagcaatacataattggctggattatcgggttcagatttcattagctcgtttgcaataatttttcctgcaacatcaagcctgccatgagtctcgcaagcagatagcagagaactccatattctggcacttggtttcattggcatatttattgtgacctcaaaggcatcgtcaatcttcccaaacctgccaagaagattgatatagcaagcataatgctccaatgtgactggcatgtggtatttcccagcttgtgtgaatatggtttgagcttcttctaccaggccagcatggttgcaagccgataaaattgcaagaaacgccatatcatctacttcatgtccaccttttatcatccctttaaagatttctaaagcttctgaaccatgtccatgaagaccgtatgcgttaatcattgagctccatgacacaagatctttctcagtaagttcataaaatacttcacgcgctgcagaaagactgccacactttgcatacatatctatgagggcgtttcccaataagatatgtgacatgaagccacatttcaggatttgagaatggactgtagatgcaaaactcaacaatgtcgaattggtacaagctgagacaattgccaatagagtaaccgagttggcttcaattccttcttttctcatttgatttaacagattcataacttcagagcaatctccagtctccgcatagccgctaatcattgaactccacattacaacatctctcacttttgatgtttcgaaaagaaccctagagagacttacattaccacatctgcagtacatggtcataaaagcagctgttaaccgctcgtcagcatggcatccatgacgaaaagaaaatccatgaatctccttcaccagacttgagccataattcaattctacacatgcaggtaaaacagacaacagtgtgacacgattgggcctcaagttttctctctgcattgctcgaaacaaatcaacgcccatttcataattctgatttgcaacacaaccggagatcatggcagtccatgagacctcattcttcacctccatctgatcaaacacatggaaagccgccgcatgatcatcaaactttaagtacatatcaaccaaagccgttgataatagaactgattcctgcatcctctcatcaacaagaacaagagcatgaaacattcttgctaccttactgctgcttcccatgcgagtgcagagagccaatagagatgcaaccagctcggacttgggaataaaaccataaaaatacatctccttaatcaacttcatcgcttcatacaacaacccatcctggcaacaactattgatgatggaacaatagctaactgtatctctgtgaagcatttcatcgaataccttacgtacagcatattttctcgagaatttcgcatacatagagatgagagaattggaaacaactgtatcacaatctgcacctgctttgagacaaaggcaatgaagctgtgcgccaagtaagaaaggctcttgttgaaaagcgcaagctttgatgacagaaggaagaatagctgtgaagccattggtccctaaagaatgaatctttagcttgtacagtctcaatgcttcatcgtagaattggtccgacaccaaacccttcagcttattgccgagctccaagtttaagcgggaagacaacgcccttgacattataacacgacggcctagtttaacccatctcatcggacgggtaataatgacgtgcccactatgactgtattatctttgagaaatagtttgtgtttgattcagtaaacaaaaagcacccatggcctaatggataaggcgcttgacttctaatcaagcgattgtgggttcgagtcccactgggtgtgtatttaataaatacaatttaatctttttcaaccttattatattcaattttttgtttgttaatattcaatttaaagcccaataaagttggaagatggtgggctagtaatgggtcgaggtttttgaatacagaagcacgtggagatcacgtgcgttgacgtcaaggtgtggctgtaccggtggatctcgaattcctcccctttggcttctcgaaggagaagaaaagtgtcggagagaaagaagaagccaatcatcatcgccagttgttcttctcttcgagatattcaaatcctccgtctctagagaatttcatatcaagagaatcaggcaagtgggcgattctctgatcccgagtcaaaccatttctggcttctcaagtctcctcaggttctgatgaatagattgtttgattttgcagtggtttctgtagtttgtggtggtggtggttggaaggtaagataggatatg

SEQ ID NO: 36133 - DNA, 3000 bp, Unknown; identical to SEQ ID NO: 6385
  misc_feature (1)..( 3000): 2750-1469P.txt file - cDNA_ID_3092693; gDNA_ID_1621091; Annot_ID_170703

SEQ ID NO: 36134 - DNA, 3003 bp, Unknown; identical to SEQ ID NO: 17846
  misc_feature (1)..( 3003): 2750-1469P.txt file - cDNA_ID_3092693; gDNA_ID_2926199; Annot_ID_201702

SEQ ID NO: 36135 - DNA, 3003 bp, Unknown
  misc_feature (1)..( 3003): 2750-1469P.txt file - cDNA_ID_3092697; gDNA_ID_1621091; Annot_ID_170704
agcaaaattttcagagtagtgttttacagttttatgcacaagtacagggactgtggaaactgaaaagtaagggtattgaaagcagaaagaacttttgtgttgaactatggagcaagtggtgatgaaatggagaggcacgcgatgtttaccaacagcacgtggcaatgtagaaactgcgattgtgccagcgtagtagagtcctcgagagttgcatccgcggggatcgactaataaggtaaaagccaatttatttgtcaagcatacgtttcttaaaggagaggcaccgcaaaaagaaagtaaaaaggagaggaagaacttacgatttatttaaagtcagatgaccgttttttcccccaagttgagacacgcgtacgaaccaccgcagtttctgaagataccattcgatcaatccaaagctagcaaaagttctaatcttgttgtccatatgttaaccagaaaagcaaagcattaagtttgatcgacatcacttgctggaaacatttggaaccggagcttcttgtcgtattcctgtaatccgaggaaccaagcctaacaacattgaaatggaaagaatgaatcaaactggagaaaagggaaagaggggaaagaaaggtaaaatggtctgcagatcttctgatatcagaaacattaactaggatcatatattctcagttacataattatatacttaactgcacaatgcactagaagtctagaacataatcttgtactacagttgtagaatcttctattatcacctagatgaactgcaaagggatcatttgatgatcgtcatacttagcacatgaatctccatcagcaaactggttaaatgtggaaactgcaaagagacaggtactcatctaagtaaatatcaggtagttatggaaatttctctacagagcaaacgcatttaatacaaaacatccagatttgaactcatcagactactgtaattgctacctttctctctttaacgcaatggcttggccttcaattacagcaaatgactaaatgcagcacgcacaagaatatgcttattggaaaatttcgtatacaaactgattggtatgcctcttctaggtgctcgaagaacggaatcctgtgagttactatttggtttcccagctactacgactcttcactaccaaagaggcccaaaagtgggaagaatgtattcagaaactaacaatgtcttaaacccttcttccaaaacccttaagtcacaaatctttacagaacaaaagagaagtaaatagaccaatctcatataaacatcaacaagaagcagacaatgtcacaaaacatccaataaaaccttctatgtagataagatcattatgttcaaaacttaacaagaatgctatagagattgcaaggattttgttctaccaataccaccttccttttagcactccaatcgtttaaaagactcagcttacagaatattaggatctgaaactgtttgcttttcgatctgaagctggaaagcttcagagaattcctttagtaaagactcgtgaactatatcgatcaacctcaaatcatcaaccattccgtgttctccatcttcaagcaagccctttatgtttccaactttccggtctctaatcccacatggaactatccagttgaatggtgttagatctgtagtgacattaagagctaaaccatgatatgttatccatttcgacacacgaatacctatcgccgccactttttggttgcctatatataccatttgcaaacaaaaagaaatcaatctcggaatatatattagatcacttacaaaatcatccatttgaaatatgagacataccaacccaaactccagttaaaccgtcaagacgagaagctttaatggagaaagttgaggaaagcacacggatgacaatctcttcaagcatcctgaggtaccaatgaagatccatctcgtgatttcgaagattgattataggatacataactagctacattttcaaacattcctataatcagcttgaagagctcattagaaaacacacagaaacttccaatgcattgttgacattattacctgaccagggccatggtaagtgacttcgccaccacgttcagttcgataaacattgaaaggagcatcctttatatcgaaattgagataatcctctgtactagcagttcccattgtgtaaacaggagagtgttgtaacaaaatcactgtatcagcgcagtcttggtttctatcaatcaatgtctttttctcctcgacaatgctcttctgccatgaccaagctttcttgtatggaaccaatttgtcgtaaagatcaaaacacaggcacctgcaaaattgatagtgattgcacggaaggtgttcgttaaaatgcctcaaacagaaaatagagagcacaaaaaaggaaactttactttctggggatttcatgattcccggagtttaagatcttgacagatctaactaatctgtttctcttcgcgttagtacgatggtgatgatgaattcccgaaactagagtttctactccattcagcaactccataactctgtactaaagaagaaagtggaatttacttaaaatttatttctgtaaatatacagtcattcaatttttagccaatcaaaaacgacggaaacaacaattttgactctacaaaataatatgtaaatgtaattaattatttgaaaccaaaaaagcaatctttatggataacagatattttacaagcttaatttgaagaagaagataacaaaacaaaaaaaagagcgtggctttatctatcatctggtatccactatccacaactggggtcagcttctggttctctctctcggtaactttctgagctgaagaaccctaattcttatcttcaccggattccgggtatagggctttgtaaagttgttgaatttacaaagaaagatatgctggtttgtctgggttttgtagaagaatctgtgttgttgctttgagattaaagtccgaacaatgttgggtttgattcatg

SEQ ID NO: 36136 - DNA, 3000 bp, Unknown
  misc_feature (1)..( 3000): 2750-1469P.txt file - cDNA_ID_3092697; gDNA_ID_2926199; Annot_ID_201701
aaaattttcagagtagtgttttacagttttatgcacaagtacagggactgtggaaactgaaaagtaagggtattgaaagcagaaagaacttttgtgttgaactatggagcaagtggtgatgaaatggagaggcacgcgatgtttaccaacagcacgtggcaatgtagaaactgcgattgtgccagcgtagtagagtcctcgagagttgcatccgcggggatcgactaataaggtaaaagccaatttatttgtcaagcatacgtttcttaaaggagaggcaccgcaaaaagaaagtaaaaaggagaggaagaacttacgatttatttaaagtcagatgaccgttttttcccccaagttgagacacgcgtacgaaccaccgcagtttctgaagataccattcgatcaatccaaagctagcaaaagttctaatcttgttgtccatatgttaaccagaaaagcaaagcattaagtttgatcgacatcacttgctggaaacatttggaaccggagcttcttgtcgtattcctgtaatccgaggaaccaagcctaacaacattgaaatggaaagaatgaatcaaactggagaaaagggaaagaggggaaagaaaggtaaaatggtctgcagatcttctgatatcagaaacattaactaggatcatatattctcagttacataattatatacttaactgcacaatgcactagaagtctagaacataatcttgtactacagttgtagaatcttctattatcacctagatgaactgcaaagggatcatttgatgatcgtcatacttagcacatgaatctccatcagcaaactggttaaatgtggaaactgcaaagagacaggtactcatctaagtaaatatcaggtagttatggaaatttctctacagagcaaacgcatttaatacaaaacatccagatttgaactcatcagactactgtaattgctacctttctctctttaacgcaatggcttggccttcaattacagcaaatgactaaatgcagcacgcacaagaatatgcttattggaaaatttcgtatacaaactgattggtatgcctcttctaggtgctcgaagaacggaatcctgtgagttactatttggtttcccagctactacgactcttcactaccaaagaggcccaaaagtgggaagaatgtattcagaaactaacaatgtcttaaacccttcttccaaaacccttaagtcacaaatctttacagaacaaaagagaagtaaatagaccaatctcatataaacatcaacaagaagcagacaatgtcacaaaacatccaataaaaccttctatgtagataagatcattatgttcaaaacttaacaagaatgctatagagattgcaaggattttgttctaccaataccaccttccttttagcactccaatcgtttaaaagactcagcttacagaatattaggatctgaaactgtttgcttttcgatctgaagctggaaagcttcagagaattcctttagtaaagactcgtgaactatatcgatcaacctcaaatcatcaaccattccgtgttctccatcttcaagcaagccctttatgtttccaactttccggtctctaatcccacatggaactatccagttgaatggtgttagatctgtagtgacattaagagctaaaccatgatatgttatccatttcgacacacgaatacctatcgccgccactttttggttgcctatatataccatttgcaaacaaaaagaaatcaatctcggaatatatattagatcacttacaaaatcatccatttgaaatatgagacataccaacccaaactccagttaaaccgtcaagacgagaagctttaatggagaaagttgaggaaagcacacggatgacaatctcttcaagcatcctgaggtaccaatgaagatccatctcgtgatttcgaagattgattataggatacataactagctacattttcaaacattcctataatcagcttgaagagctcattagaaaacacacagaaacttccaatgcattgttgacattattacctgaccagggccatggtaagtgacttcgccaccacgttcagttcgataaacattgaaaggagcatcctttatatcgaaattgagataatcctctgtactagcagttcccattgtgtaaacaggagagtgttgtaacaaaatcactgtatcagcgcagtcttggtttctatcaatcaatgtctttttctcctcgacaatgctcttctgccatgaccaagctttcttgtatggaaccaatttgtcgtaaagatcaaaacacaggcacctgcaaaattgatagtgattgcacggaaggtgttcgttaaaatgcctcaaacagaaaatagagagcacaaaaaaggaaactttactttctggggatttcatgattcccggagtttaagatcttgacagatctaactaatctgtttctcttcgcgttagtacgatggtgatgatgaattcccgaaactagagtttctactccattcagcaactccataactctgtactaaagaagaaagtggaatttacttaaaatttatttctgtaaatatacagtcattcaatttttagccaatcaaaaacgacggaaacaacaattttgactctacaaaataatatgtaaatgtaattaattatttgaaaccaaaaaagcaatctttatggataacagatattttacaagcttaatttgaagaagaagataacaaaacaaaaaaaagagcgtggctttatctatcatctggtatccactatccacaactggggtcagcttctggttctctctctcggtaactttctgagctgaagaaccctaattcttatcttcaccggattccgggtatagggctttgtaaagttgttgaatttacaaagaaagatatgctggtttgtctgggttttgtagaagaatctgtgttgttgctttgagattaaagtccgaacaatgttgggtttgattcatg

SEQ ID NO: 36137 - DNA, 3003 bp, Unknown; identical to SEQ ID NO: 17843
  misc_feature (1)..( 3003): 2750-1469P.txt file - cDNA_ID_3092701; gDNA_ID_1621091; Annot_ID_170706

SEQ ID NO: 36138 - DNA, 3000 bp, Unknown; identical to SEQ ID NO: 17844
  misc_feature (1)..( 3000): 2750-1469P.txt file - cDNA_ID_3092701; gDNA_ID_2926199; Annot_ID_201699

SEQ ID NO: 36139 - DNA, 3003 bp, Unknown; identical to SEQ ID NO: 17842
  misc_feature (1)..( 3003): 2750-1469P.txt file - cDNA_ID_3092705; gDNA_ID_2926199; Annot_ID_201698

SEQ ID NO: 36140 - DNA, 3003 bp, Unknown
  misc_feature (1)..( 3003): 2750-1469P.txt file - cDNA_ID_3092712; gDNA_ID_2926199; Annot_ID_201696
atgatcggaagtttgctcaaaagaatggggaagattgctcttgatatggagtctgttcaggtttgcgtcattcccttttctgattaaaccttagcgtttgcaggttttagtaactatatgtatatatatttgcttgtgatatgcagatgagagttatgttcaacgtctataaatcttttgcctcacaattgaatcaagaagaatgtcgcttatatgcctacaaaattctgcttccgttgtacaaagtctgcgaaggatatacgggaaaaatcgtcacaggtattataagtttttgtatgtttttccctctgcatattcggctatctgtgtcacaaatgtgacaaaacattatatgattattatcagatgagttgaaacagctagcagaagaggtacgagacagtataagggacaagagtttaggcaacaaaatgtttgtggaagtatacagtgaaataagaaacagtttgagaacgaaaagagacaagagaaagcgagaagagaagctaatggcagtggtaaatccggagagaaacgccaagaggaaactgaggttggcttcaaagaataaagcaaacaagaaaaggagaatgacgagcatgaaattgtctagatgggcttgctcttgaagtaacccttgtatgaaattttgttaatctcatagtagaagcaatcagagataataaatcacttatgagtctacgtttcaatttgaatgttctcaatcttttttattccattttatctaaatgacgacgaaagagatttaaaagcgaaagcaactgcaaacttatcgtgacaaatttgggtaactagtcatcatcatcaagctaatgttgcagtctcttactaccactaaaataagaagacaaaacattaaaattaaaaccaatcatttgttttcttgagtttctgtgaactcaaaaaaaaaatcaaatcctttttgagtttcaatctctgagagtttctatgaaacaatcgtcatggggttgcacaatcttcatccaattatctctatgtctcatcatctatgtgtctctgcattcgggtcacccattcttcttctctagtgacgacggtgacaatgccacacctctagatcttcatttcatctccgttgccggcggtttcaggcctcttaaccaccaaactcgccttctccgattggtttgtttccaatcttcttacgttttggttggaacatgaaaaattggtttcaatttatctagttatcgaattcattggtttcatggttaaagtttggttatttatagtatttctagcttccccaggattcataatttgtgtttctgtttgatcgttgaagatggagaaagttgcagaaacttacaaggccaaatttgttgtgagctcaagtgaacaaggagaagaagatccattcctgcaaaatgtaatcttccattttgggttacttggattgacaaaaaagttctgaatctctttacttcagaaagttagcatgagtaatgagtgtattgatctttttgcaggcgactcgactgtcttcttcactgaaacttccatggtatcttgatcctgtggaatggatccttttagttaacttaagttccgttgatgtaacaaggagactaatcactttgttgtgtattaggtacactagaatgaaaggatctggatatttcagagagcacatcaaaatgccttttggtggatccttggatgttgttttcgtagacactggctcactcaagcaggtaggatcagtttgtatctgtgagtttgatagaaatgtattgttaggcttttcttctgattttgttgtttcattatgtatgattaattgaaactgaaggaagtgcttggtggagcagtgaatgcctatatgatcagtcaattgaaagggttgacaaggattctaaaagcagtagacggagactggtaagttggcttttttcagcgatagattgtcttgatctctcatcaacttgtataaaataccgtctctgtcgttatttggtgaccaagtttgctttctgctctccaaaatcagtccttataatctgtgccatgtgcttgatattacaggcgtattgtggttggatcagacccgttactcgcctatactctaactaaggaaccagaggaacctaagagagtggcaaggacatttcatcaaatcatgaccaaatatggagtggtaagacattgaatatcttgcattgccgagaaatttgatggaacgaatcaagtatatgattgatctgagaggaaaaactttgatgaatacaagaacttatatataagcgaaaaaggctgcacaaggggaggcagcaacgagagcttgacttgcattacggttcctaatcaacaagagaaccaaggtccaacgaataatagtaagaggtaacaagatctcttatcatgacattataatcataaactatgaaagctcaatcttaatgactgagagaagatgcatttttttttgtcagagaaagggaagatgggtttcttcttcacagagttagcttctcagagtttgtaagtcccctagtttctttcttgtgttaagatatgtttatcaagaccaagaaaaacataagaaaaaagggaaataacgtcttctttattttaccatatacaggttacttatactatcaactcatcaggagaagtcattgacacaaaattagttaagcagaaaggcaaagagaccatctaaggtttcattactccattgctgtgaagcgcacaaacattttgtattcttcgcttaatgaccgaaataccctttgagtggtctgagtctcagttgaatcgtcagagggtaaaactggaaatttgattctataagtttcacccaaaaaaaaggaatgacctttagggttttgtattggatttggtctctctcatcattagtttaagtatgaggttctgctcccggaggattttttcttccggtggaagcggagccgatgatttcaaatctctcttgacgaaccactttttaaagtggtgatg

SEQ ID NO: 36141 - DNA, 3003 bp, Unknown
  misc_feature (1)..( 3003): 2750-1469P.txt file - cDNA_ID_3092716; gDNA_ID_2926199; Annot_ID_201694
aagttggtggaggagtgtcgtcgagaacggatgagggccaaggagtggaggagaagatgtggtggaggaaatcatcgtggtcgaatgttgcaggagattgaagatgtggagaaggagatgatgaaggagttagaagagacgaggagttcatggcttctgttttttttttttttggtggggagtgagaatgaaaatgaatgttgttgaaatgtcttttgaggtttaaggctttatggtgtttaaaagagggatggagattgtaatatttgagatttgaagggtttgactttgacatgttaaatacgtttaccaaatttaccattttttttatcatccttgcaaattaattatttcgtgttattttcataatttcttgatttttttaatcactaaaagaattcgatcactgaagtcatgatttcttcaattttataatcctttgttgataatatacttttcacaattttgtagtaactacaaaaagtaagtgaaacatatatttctaaaaatatcatagtcgatcgaatgacaggcttaaagtaataaaactaacttaaaattcggttgtactaaaaaaaaaaaaaaaaaaaaaaaattcggttgtactaacttcactcaaatgatttacgtatgtttaattatctttttttttttatttaagacagaatgtggttctaataccgtatattattaaatttctatatatataacataggtttttctattaatcatttttgaaaactcatgtttaagataattgtataagattttcattcggtaacattaaaattggtttatttgaatgctgaataaaattctttggatttatgttaaggatgccaactacaaaaataaaataaaatacaaatctctattgttgatcttttttattaaaatcagtcggagttttaaacttgtcccggcaactacgtaccacgagataaatatttgctagtccaaaaatgcaatagtctacaagataacaccagagccaacactttttcttgtgacaactattttagacatataatatttagacatgcagtataaatgcatacaattatactctattcatttgggtacattcattcattcatcaacggttcatgataatgttctcttcatatattactgtttacaatttgtccccaagattacaaacatgctatccctttagacgatactcgtgttcgataagaataagatcactttttatagattattcttgttttgttttctgattaatatgataccgatcgatgaaattgttgttttaaccgatctgattaacatttgggaaagaggatcctctcaaacgagaacataacataacagaacatcgtcatcatcatcatgtcatgttaccatgtattttttatacttgttaaatattttttggtctaataaattcatcatttaccttaaaaattcttttttaccatcgtatacagtttttcagctgtttgatagtatttgattaagattaatattaaattgacaaagataagtaaagaacattattatgcaatatgcatgattaagcacatgggacattctgagttttgcacaaactcacaagaggtagagatcggctttaatacacttcccatttattaattacaaatgttggtaagcattgatgtactacacaacagaaagagagatctatcatctcatgtattagtattatcaagagaatgcaataattatttttgtttttacttaataatcataatgtataccaaaataattaactaagggggtgtaaaataagttacgaatgataatttaaattccatatagaaaaaataaacagatagtaaagacaaaaatgctactatgttaaataaactattggtcccatctagtatactgatacattagttttatttcatattatcagtagttttttctattgtttatataaaacaatacgtttacaataggaaggcaggaaaataaaccatatggtgcacaaccattgtagactcaatcctgacaaaacccaataaatttgaggaactccctcaaaaattacggctttgttcaaattgaaaaactggctcttacgatcttagtttggtacacaatcacgtctgatttcccaagttctacttattcacctataatgaactataaatataatctgtaaatatcaaaaggtgggcttaactaggccttgggaaaatattgaattatttaaccttgtatgaatctgacaaactctgattaaagtcttggttcttactctattagtctaatacaaataaataaacatatcttatttccttaaatgtaatttcattctcttaaattatactaaaaaaactctacttgagaaacatgaaagcttaatttggcttgctgtgattgtagatgaagctgagtgctggacgtgctcgaaatgctattttaatttgagagaagaagatgttgatgagttaacgcgcgtctcaatattttgttggccagtgttacgattttcgaatgttaagattgggctaaaaagggaaataaaaatgtctaaaattatggatctcggttatggaaaaccagaaatatacgtcaaaacccgaacattcggttcgattaaacgataaaccaggataaaacctaaccgggtcgttaaacccaaccgcctccttgtttgagaacaaaaaagaagcttaaaccctttcttcctccgccgcgttctcaagctcaagctcaatctcaattctcaagctcaagccttttcgatttttctctttaaagacgcaattttgctttcgcaaccctctgtgtgatttcgtttccaaacgtaagctctacttttgttgtttaatttccaaggctttagcaattaagcaattaagcaattagattgatatacatagttgctcttagaagcttctctttttttttttttagcctggatttaattgtaaagtttggggattttggaatcgaaattgactgttttggagattgatgtgtttaggaaacacggctctctgaatcatg

SEQ ID NO: 36142 - DNA, 3000 bp, Unknown
  misc_feature (1)..( 3000): 2750-1469P.txt file - cDNA_ID_3092728; gDNA_ID_2926199; Annot_ID_201684
cgcatggtgattgatttgttctgtttcaaacattcaggaactactaccgatgcacttcagcgggatgtccagttcgtaaacacattgagacagcagtcgagaacacaaaagcagtaataatcacatacaaaggagtacacaaccacgacatgccggtgcctaagaaacgccatggtcctccaagctcaatgctcgtagctgcagccgctccaacatcaatgagaaccaggacagacgatcaggtgaacattccgacttcaagccagtgctcggtggggcgagaaagtgagaagcagagtaaagaagcattggacgttggtggagagaaagtgatggaatcagctaggactttgttgagcattggattcgaaatcaagcaatgctgattatatgtagtttatgagttttatagagttcatcgactcaattttcgcctccttgttcttgttatataataataataaaaaaccccatgaagattaccaactaaatacgttaacattcgtctgtgtaatgatggtatatgtttattgtgatattaaatcgctaattttagtgaatagcctctggttcgtctagagggtcttctgaaacttgaaagggactaaaagacgagaacaaaaaccctttctctctactctgtgtaaaccctagtgtgttcgtgctctccgatggcgagtcttcgatgctttcgtgagctgagccgccgcgctacgactgttttctccatcaaccagacgcgatcgatctcttcatttcatgggattgagttttccgggaccagcatttctcatgggaccgtaattccgaatcgatctctcactaggaatttgccatggtacagtcattggtatcgctctcaagatcgttgtttctcttcgaacacaaaggatactgatgaagatgaagaaagcagtgaaggagaggatgatgatgaggaggagggggaagactttgaggattcggcggatatggaagtagaaagggaatattcaccggcggagaaagtggaagaggcggaggagatagggtacaaggtgatgggtcctcttaaaccttcggagagacttttcaaaccctatgaaccagtgtttgccattgttcaggtctcgtctctgtgctatctcaattaatcctttagtttcatttctcactctcactgatgctgagtggttatttttatcctgtagattggttcgcatcagtttaaagttagcaatggggactccattttcaccgagaagttgaaattctgtgacatcaatgataaggtatgctagcttcaagctcttcttcgttaatctttgctattcttctctcaaagggctagactttaccgtatctctcgtaagaaggacgaacctttgcatttgtgtttatgatttatgattgttgctaaaacctttctctttatgtccctttgcagttggaactaaccaaggttcttctattgggctcggcaagccagacgattattggtaggcctattttgccagatgcgacagttcatgctgtagttgaagagcatgtaagtgtctcattgacttgcttggtgttttataatactagtgaagctgtgcttaagaataatttacaattgaaaagaggatagatgagagtttgcttgctgaatccggtgactgagagaaactaaatcaaactgtctgctgattagtttgtgaaagtcttgcaagtcattagattagtgttcatctatctctacatcatctgaatgtcttgatttaagatgggcttggaatgtagaaggatctactcatgtaccagcattactcaactagtttttccttgatgcgtgacaggctttggatgaaaaagtgctcattttcaaaaagaaacgaagaaagaattataggagaacgagaggacatcgacaggtatactttataactccttgtttagatagacagtgtgtttatttcatctttgccttcttctagttctttccactgtgttatgattgttgtttttgaccattcaacacttgtgtccaggaattgacgaagttgagaataaccgatatacaaggaattgaaaaaccagaaccgaagatcgtccataagccttcgaaagaagctgttacagaacagacgaaggctgagctagttgcttagagataaaatttgcttctttcttttttgctgatgccgatacatttgaagtaagttaaattatcacttgctgttcactaagaactagattttaaagtcgttgaaatgatgaaaaggccttcttggtagttagtggtaagtaactaggctcctgagatatgaaatgtgatttgcctttcactgtcttgttctccttgctcttcattttgtatttaaactggctcatgcttgtgggagctgtttgttgcttctgtttcagaaataaagatttgcggaaacatctctctccttatcttctctatgctttgtactttgtactgtactactgtggtttggttatggtttaatttacttcttcatgcaagtctcggtcacagatatgaaactggtggtaaattggtaataactgcaagtcacattacactcaaaatctcgattttttccactatgactctttagatcaggtgattattattgtaactatatatggcaaccacttcctcatcaacaaatgattcacagaattgatagtacttggaactgatttataatttcttttatcaacatcggaaaatcgtgtaagaatgccttgaaatatttgaatgtttgtaaatagtatcaaaaccattgtttgtataaatatgtataaagaacttaaacaaaagcaatttggagccaaagagaattataaagctacacgagtacgtaagtccatggttaagatcgggtcgggtggggacgggttggataaaagcaaacaatgagtcaagtaaaagaagaatcatcgtcaacaagagagagagagagataagcacaaacgcggcttttcttctccttataaataagagaagctcagtgcgttactcaaatg

SEQ ID NO: 36143 - DNA, 3000 bp, Unknown; identical to SEQ ID NO: 3074
  misc_feature (1)..( 3000): 2750-1469P.txt file - cDNA_ID_3092745; gDNA_ID_1620623; Annot_ID_162400

SEQ ID NO: 36144 - DNA, 3000 bp, Unknown; identical to SEQ ID NO: 3074
  misc_feature (1)..( 3000): 2750-1469P.txt file - cDNA_ID_3092745; gDNA_ID_2926200; Annot_ID_201817

SEQ ID NO: 36145 - DNA, 3003 bp, Unknown; identical to SEQ ID NO: 18785
  misc_feature (1)..( 3003): 2750-1469P.txt file - cDNA_ID_3092751; gDNA_ID_1620623; Annot_ID_162397

SEQ ID NO: 36146 - DNA, 3003 bp, Unknown; identical to SEQ ID NO: 18785
  misc_feature (1)..( 3003): 2750-1469P.txt file - cDNA_ID_3092751; gDNA_ID_2926200; Annot_ID_201814

SEQ ID NO: 36147 - DNA, 3000 bp, Unknown; identical to SEQ ID NO: 3070
  misc_feature (1)..( 3000): 2750-1469P.txt file - cDNA_ID_3092755; gDNA_ID_1620623; Annot_ID_162389

SEQ ID NO: 36148 - DNA, 3000 bp, Unknown; identical to SEQ ID NO: 3070
  misc_feature (1)..( 3000): 2750-1469P.txt file - cDNA_ID_3092755; gDNA_ID_2926200; Annot_ID_201807

SEQ ID NO: 36149 - DNA, 3003 bp, Unknown; identical to SEQ ID NO: 19522
  misc_feature (1)..( 3003): 2750-1469P.txt file - cDNA_ID_3092760; gDNA_ID_2926200; Annot_ID_201790

SEQ ID NO: 36150 - DNA, 636 bp, Unknown; identical to SEQ ID NO: 3864
  misc_feature (1)..( 636): 2750-1469P.txt file - cDNA_ID_3092768; gDNA_ID_1620671; Annot_ID_164125

SEQ ID NO: 36151 - DNA, 3003 bp, Unknown; identical to SEQ ID NO: 15927
  misc_feature (1)..( 3003): 2750-1469P.txt file - cDNA_ID_3092768; gDNA_ID_2926200; Annot_ID_201781

SEQ ID NO: 36152 - DNA, 3003 bp, Unknown; identical to SEQ ID NO: 18751
  misc_feature (1)..( 3003): 2750-1469P.txt file - cDNA_ID_3092804; gDNA_ID_1620621; Annot_ID_162311

SEQ ID NO: 36153 - DNA, 3000 bp, Unknown; identical to SEQ ID NO: 18752
  misc_feature (1)..( 3000): 2750-1469P.txt file - cDNA_ID_3092804; gDNA_ID_2926201; Annot_ID_201882

SEQ ID NO: 36154 - DNA, 3000 bp, Unknown
  misc_feature (1)..( 3000): 2750-1469P.txt file - cDNA_ID_3092808; gDNA_ID_1620621; Annot_ID_162320
aatacatatgtaagttcttgggagatgattggttagttcaatactagtgtagttcgctggtaaaatggtccgattaattgatactctcactatgttactgcagtttctttcagctattcagattctgacagtcaagatgtccggatgaatatcaatattactggaatcaatacctatgggggaactcttaactccactgctgacaactccactgctgacatgaccctaaatcaaatgaggtgaaattttttatcctattgtgaggtctagattgttttatcttgcataacctgcttaaaattatttcatgattgtagtgacaacacgagttcagcttgcaaaatggttcataccctagttcagttgatgaagactttggacagaatgcccgaagaagtaatgcatttgttacctatcagaggttttcagtttacatcagtttccatattgccaattacagactttgttacttttttgcttctgtccagcgcaccattttgatgaagcttctttactacgaatatgtggtatgctttgctttcttttcgaataatcttatctcactttcctctactctgaaaattgattgcccataagaaaggctgacagctcttatttgaacctttttgcagccaccagattaccagccacctttcttcagaggctgttcagaagaagaagaagctcagtatgtatggccaaagattcctctgagaatggaaattggtaatgttaacagccaacatcacgtgttaactgtaaaggtaatctgattggaagaataggctgctactctttatacagacatgtttctctcgtctttatgatgtccatccattgtggatgatctatgcaggtcaagagcgtgcttgatccttatgatccttgtgaggatgaaaatgataacatgcaagatgatgagaggagtaaaggacctgattctctccatgatgaccagccttgtaaggttttcactaagccgagtaaactcatcttaacagagaacaaagacgctgaccatggagaggttaatgaaggtaaattattagacaaatattaaagcaaaattcgattcattgaatacagaaaagcttcttctaattacacctatctgtgaaatacttcaagatgtcaaacaggatcaggttgaacatcagctagcaaaggtgaaggatacaaaaggaagacctgcctcaattgtaagtgaacaaacagacaaaccataatttttctatttggttatatgctgaaacaaaactaaacatttttcttgtcattggttcaggtgcaaaatcctattctgcagtctcatgaatatgacattcgaaggcttaaagcccgtttacaaagactcgagcgtcatatatctgttccggattctcctcaggagggaatccggaagtggtttgctgctgtttcctcgcaactattctacaaagttatggaagcttgtacacgaagaaaaccaattttgggtgatgcaatactgtcgtcaaccgttaaagtgcaaaatttcaatgcaaaaatttgtagtaaattgttgaagaagcctgcatcgatatacagaaagaaacacttcacactgaacagtgcttccttaagaatttcaggcttggcaggaagcatatttgcgtgggctgttggtttctgtctcttttctgctcagattggacatgtcttcgttcagcctaagaccagaagttctgagtcaaagccaaaagtcaccatggaagaactaggtacgtaaaaaatagatgttgatttggtttatttctgtgtatattatgaatcggagcatgtgtatgttataaaatggttgttgatttggacatttcttcatggaagaagagaagttgacccctccaagttctgaaccgaagtcggcccctccaagttctgaaccgaagtcggcccctccaagttctgaaccactaggtacgtaaaagaatgttttttgtctctctctttgttgatttggtttatttctgtgaatatctatgaatcggagcatgtgtatgttattgcctagttgaatttctggagttgatgatggtaaagagagacaaaaaaagtggcagagaagtcaaataaatcaaaggagaaatctccaacggaggagtcttcttcaaccaccccaaaaccagagaaattggctgttatcagaaggatccttcctgagatatttgctcaacgatgtggtcaaagaaacagtagctttgaggcatttgctcaacgtcggacgacatatgattattacaacatcaggtaattagaaaatcatgattattcattttgtcttatatcttataatagtcactaataaatatctgatttttacaaaatatttttatggtgaaagaaacatctgatggtagcaatgagggcctacaaccaacttcttcaagaatctggtggagctagttgtgtcatgtttcatgacactcctatttttataaatctttcgcgtagtacctatgtcgcaaataaaagattttggttaaccgctaaaagttgaaaagaattgatcaccaaaagcttgtaattcgaatattcggttatgatctgtatctttgctaactcacttgttacctaattgtagttcgaattcgagttctatgtgctcttgttgtcacctgttgtctgtgcaataatgggatcccaacatccccgaggatggccttgtcgttatcaatgggccagatgacagtaaagcgaggttcagtacaaagtgatcatttccgaatcgattcgtatttcgaacgtatctgacacgtgtcaaatcgccgcgtctgtacgcgcgcgtgaagctcaggaaccgaagcgtctcgtaggtttaatgatgacctcgtaggtttgtcgcccaatcgcctctatttatattagattaaaccctcgggaaatcattttccgccgcttgcaagaagaatctaaggtagctctcgctctctcctctgcgaattattttgtactctcgattctttatcgatttttccggcaatg

SEQ ID NO: 36155 - DNA, 3003 bp, Unknown
  misc_feature (1)..( 3003): 2750-1469P.txt file - cDNA_ID_3092808; gDNA_ID_2926201; Annot_ID_201875
aggaatacatatgtaagttcttgggagatgattggttagttcaatactagtgtagttcgctggtaaaatggtccgattaattgatactctcactatgttactgcagtttctttcagctattcagattctgacagtcaagatgtccggatgaatatcaatattactggaatcaatacctatgggggaactcttaactccactgctgacaactccactgctgacatgaccctaaatcaaatgaggtgaaattttttatcctattgtgaggtctagattgttttatcttgcataacctgcttaaaattatttcatgattgtagtgacaacacgagttcagcttgcaaaatggttcataccctagttcagttgatgaagactttggacagaatgcccgaagaagtaatgcatttgttacctatcagaggttttcagtttacatcagtttccatattgccaattacagactttgttacttttttgcttctgtccagcgcaccattttgatgaagcttctttactacgaatatgtggtatgctttgctttcttttcgaataatcttatctcactttcctctactctgaaaattgattgcccataagaaaggctgacagctcttatttgaacctttttgcagccaccagattaccagccacctttcttcagaggctgttcagaagaagaagaagctcagtatgtatggccaaagattcctctgagaatggaaattggtaatgttaacagccaacatcacgtgttaactgtaaaggtaatctgattggaagaataggctgctactctttatacagacatgtttctctcgtctttatgatgtccatccattgtggatgatctatgcaggtcaagagcgtgcttgatccttatgatccttgtgaggatgaaaatgataacatgcaagatgatgagaggagtaaaggacctgattctctccatgatgaccagccttgtaaggttttcactaagccgagtaaactcatcttaacagagaacaaagacgctgaccatggagaggttaatgaaggtaaattattagacaaatattaaagcaaaattcgattcattgaatacagaaaagcttcttctaattacacctatctgtgaaatacttcaagatgtcaaacaggatcaggttgaacatcagctagcaaaggtgaaggatacaaaaggaagacctgcctcaattgtaagtgaacaaacagacaaaccataatttttctatttggttatatgctgaaacaaaactaaacatttttcttgtcattggttcaggtgcaaaatcctattctgcagtctcatgaatatgacattcgaaggcttaaagcccgtttacaaagactcgagcgtcatatatctgttccggattctcctcaggagggaatccggaagtggtttgctgctgtttcctcgcaactattctacaaagttatggaagcttgtacacgaagaaaaccaattttgggtgatgcaatactgtcgtcaaccgttaaagtgcaaaatttcaatgcaaaaatttgtagtaaattgttgaagaagcctgcatcgatatacagaaagaaacacttcacactgaacagtgcttccttaagaatttcaggcttggcaggaagcatatttgcgtgggctgttggtttctgtctcttttctgctcagattggacatgtcttcgttcagcctaagaccagaagttctgagtcaaagccaaaagtcaccatggaagaactaggtacgtaaaaaatagatgttgatttggtttatttctgtgtatattatgaatcggagcatgtgtatgttataaaatggttgttgatttggacatttcttcatggaagaagagaagttgacccctccaagttctgaaccgaagtcggcccctccaagttctgaaccgaagtcggcccctccaagttctgaaccactaggtacgtaaaagaatgttttttgtctctctctttgttgatttggtttatttctgtgaatatctatgaatcggagcatgtgtatgttattgcctagttgaatttctggagttgatgatggtaaagagagacaaaaaaagtggcagagaagtcaaataaatcaaaggagaaatctccaacggaggagtcttcttcaaccaccccaaaaccagagaaattggctgttatcagaaggatccttcctgagatatttgctcaacgatgtggtcaaagaaacagtagctttgaggcatttgctcaacgtcggacgacatatgattattacaacatcaggtaattagaaaatcatgattattcattttgtcttatatcttataatagtcactaataaatatctgatttttacaaaatatttttatggtgaaagaaacatctgatggtagcaatgagggcctacaaccaacttcttcaagaatctggtggagctagttgtgtcatgtttcatgacactcctatttttataaatctttcgcgtagtacctatgtcgcaaataaaagattttggttaaccgctaaaagttgaaaagaattgatcaccaaaagcttgtaattcgaatattcggttatgatctgtatctttgctaactcacttgttacctaattgtagttcgaattcgagttctatgtgctcttgttgtcacctgttgtctgtgcaataatgggatcccaacatccccgaggatggccttgtcgttatcaatgggccagatgacagtaaagcgaggttcagtacaaagtgatcatttccgaatcgattcgtatttcgaacgtatctgacacgtgtcaaatcgccgcgtctgtacgcgcgcgtgaagctcaggaaccgaagcgtctcgtaggtttaatgatgacctcgtaggtttgtcgcccaatcgcctctatttatattagattaaaccctcgggaaatcattttccgccgcttgcaagaagaatctaaggtagctctcgctctctcctctgcgaattattttgtactctcgattctttatcgatttttccggcaatg

SEQ ID NO: 36156 - DNA, 3003 bp, Unknown; identical to SEQ ID NO: 18741
  misc_feature (1)..( 3003): 2750-1469P.txt file - cDNA_ID_3092812; gDNA_ID_1620621; Annot_ID_162322

SEQ ID NO: 36157 - DNA, 3000 bp, Unknown; identical to SEQ ID NO: 18742
  misc_feature (1)..( 3000): 2750-1469P.txt file - cDNA_ID_3092812; gDNA_ID_2926201; Annot_ID_201873

SEQ ID NO: 36158 - DNA, 44 bp, Unknown; identical to SEQ ID NO: 3024
  misc_feature (1)..( 44): 2750-1469P.txt file - cDNA_ID_3092820; gDNA_ID_1620621; Annot_ID_47047

SEQ ID NO: 36159 - DNA, 44 bp, Unknown; identical to SEQ ID NO: 3024
  misc_feature (1)..( 44): 2750-1469P.txt file - cDNA_ID_3092820; gDNA_ID_1620621; Annot_ID_162325

SEQ ID NO: 36160 - DNA, 3000 bp, Unknown; identical to SEQ ID NO: 3056
  misc_feature (1)..( 3000): 2750-1469P.txt file - cDNA_ID_3092820; gDNA_ID_1620622; Annot_ID_162339

SEQ ID NO: 36161 - DNA, 3003 bp, Unknown
  misc_feature (1)..( 3003): 2750-1469P.txt file - cDNA_ID_3092820; gDNA_ID_2926201; Annot_ID_201870
actgtagaatttttagtaagcgtgatgtagccgtcttttcttttcttctttttctgtaacgatatttaaaccgtaaagtcgacgctttttattttttttggttcaaccaaacattttagtattttgatcatatatggatataaattccatccttttagttagtaaacatggtgttgataaaaacaaaattttatatttgaaatgctgctattatataaataaaaggttaaatccacctactataatttatttagctattattaggtggcatgacaagatgtcaagttggtgaatgaggtgcgtctggccttaactagagatgatacccatattttattttcggacgacaatttatgacacttgttgtatcttgttctcctatctttcttttctaatatttacattcgatttatgatcaacaaatggcttcaattgtaaaatgacaagaatttgtagggtcaacgacgtacaagatcattcaactgccgacttcagaagttggtgtggatatacgagagaggaagtcacataaacaaagaacatgaagattcaaagagttgtatgaacatatcagacaaagcaagcctgttcacttttccactatgtatgtaatttatagaacatgatgtcaacaaagattcacacacttcgcaaagcaatgagcttttacattgctctataaataagtatactttttcatatacgtgagttggaaacataagctttttaagccacatgaaaatgctcaggaaaacacaaggtttacaatcagatgaggagataaaaagtcgtggcaacgcgcagaatcgggatggattccttaagagacagatgcacttaaatgcaagatggtagagtaggtccgtggcagagaaaggccactgcaatgtatatgatcaccagtagtagtagtattaagaggaccctgcaagagacaaaaagggttaggaattaggaactatgttcgattcttaaaaaattctcacttgacattacaaatgtggaacttggggtgattaaagtactttttgctatagttaaatgtgttcttaggccaaaaactagttttagtatacagtcttgcaatcataatactgaaaattgtttactaaggttttaggaaacatacgtgagcttgcagtttctccaccagacgttgcttctaaaacgacgagcttgctttctgaaccggaatgtattcccctgcatattggcggttttatcgacaagaagctccaaacgttcacctctatctaggactttgtcaatgttttctatcatgacaccccgcacctatccaaaaccaaaaagaaaaaccaggatgtattgtcaaacagtgaagccaagactcagaaccatgtctctaaacaacttcacaatccgactgaacttgtaagacaaactcatcaaacctgattcatttcacccttaatacgattaatcctatcggcattaggatcattagagtaatagtcaatctgctgactgagaactctagagaattcctcattcattgcataagctagtgctgtatgaacagccctgccataagtccgtacgaatctctggtgaatatcctccaaaaaggcaaaaggaattctccctgacataaaaaagttttgacttttgagttagaaagacattcacatctctctaatgcacagcttctcggatataattgtgttgatgttatgtccaaaaaaatcaaattcattcacatcacaatataagaccaaaggtctcgaattcaataacagagcgatcgttcagagcaaaaaaggattagacttttgaattccactgtcaccaaagttggaaacttcctcaaaattagccatagaagtaaaagaaaggggaggacgtacttccggcggtttcttcggccatacagagaacggtgaggccatcggtgcgtttaacgtggaagacgtaacgatcctgagagtaggagacgttgctgtcgttgtctccagggaccttctcgaggatctgtttggcgatggtgctcgcattcgtagaggtggcggtgaactcagaaagaaccaccgtgccacgagccacgagggcgtacagaatcgccatctccgtcgtcgatccccctgccgaatcaacaaaactcgtgtaaggtcaacgaagaagaaggttttcccgcggaaaccgagccagccagacgaatcgctggatcaatcaatcagagagagagagagagagagagagaaccaattggcttctttttctctctgcatataattgaatctctttctctctctctcctcttggagtttagctggagctggagaccttttcgcctccgctgattacaaatatttaatttcggatagctacgttgatttatttttaaaatactgtattattataaggatcaaaatgaaattttgtcaaaatatcacgggcaaaactaagttagttctttttgttttgtcggaactaatttagttctaataagtaaaaaatataaatatgaaaagaaaacaatttgcttcagtttcgaaaatattgtaccgtgaattgttttataaggattattaatggttaacgctaaattagtttgatatcaaacttataagaaatacaaagaaaacaaacaaattctatcagtttcaaacaaatagagaaatctgagcaaaaagatcgaataattgtaatttatccgtggaagaagatgtgattttaaagtgtaaatttttacgaatatgaaggataaaatgtagggatgtgttcaaatcatcattaaatcagtttttttttttttagtgtggtagtgacgtaccaaacaaaaccaaaaagcggtctatttccttctggtttgaaacgatttgggtcaaaattgggtttcgagtttgaataagatatgagtgaataatatactaactttagccaaagacaaaaaaaaaaaaggaaaattaaaggcagaaaaatgaaaatgacatccaatgagctgagcctaaaccaaacatagccagagataagccttacaaaatg

SEQ ID NO: 36162 - DNA, 3003 bp, Unknown
  misc_feature (1)..( 3003): 2750-1469P.txt file - cDNA_ID_3092858; gDNA_ID_2926202; Annot_ID_201945
actcacacagggcacatcaatttctgcaacctgggtcagtgaataggtttacacatgctatgatgtggaaaggtggaaaagattggaccttggagttccctgataggggccagtggttcctttttaaagagatgcatgaagagtgctacaatagaaatactcgggctgctttagttagaaatattcctattcctggcatccgcatgatagaaagggataattttgatggaacagaaactgaatttattcgcagttcttctaaatattttcggcagactgaaactgatgttgagatggcattagatccttcacgtgttatgtatgacatggacagcgatgatgagcagtgccttttgagaattcgtgagtgttcgagtgctgagaatagtggctcttgtgagatcactgaggacatgtttgagaaggcaatggacatgtttgagaaggcttcatttgtaaagcagcgtgataactttaccttaatcgaaattcaagaattgacggctggagttggatccttggaagcaatggaaacaatatatgagctttggagaacaaagaggcagaggaagggaatgccattgatcaggcatcttcaggtacaatctctgatgccttttcatcttttattatttatttggttttcatgtttttcttgagatttaaaaatctgcatgactaggctcaacatagatctttttggaatcgggggaaatgcagaattgtggacaataaggctatgtctagtagtaggtattacttagtgttcttttcaggatattgaatgatgtgggtgttttatgcaaatggaacgtctattagggggaaaattgcatctttttgcattccagtttgttgtgcacgaagatgtctggaagtccataactgtagcatcttctatagtctgttgattttactccttgttgattagtcttacttgctagctcaacaataatgtagttactctgctgcaatatttttaattttgcctaacgtaaacacttgttttctacccttgcaattcagccacctctatgggaaaaatatcaaagggagctcaaagactgggagttggttatgagcaaagcaaacactccaaattcctgtgggtcgcagaagaaacagtcacctactgagaagccagcgatgtttgctttctgttttaagcctcgaggtttggaagtcaaacacaggggaacaaaacacaggtcacagaagaaactctcagtttatgctcaacatagttctgctttgggagattatgatggctgtaattcatcaggtaactcgtttttacctgcttgatattctataaatcctctattgactctgatttttcaaaatgaagtctgtgtttaatccaacttttccatttctctagcaggaagaagacctgttggttttgtctctggcgacgagaggtttttatattcaaatcaaagctatgagcactcgaatgaattttctgtacatccaggaacatattcccctcgtgacctaggcatgggatatttctcgagcggtggaaatggatatcataggaatcaccaaaacaagtcgcaaagaatcaatgggaagaggaatacgagtgaacgatgggatgcaggctattctgaatgccccagttccaatcttgtctgttactccaacggatctcagcgtcctgatgtggaaggaatacggaatagtacagacattgatgagtacaaattgcgagatgcagctggtgctgcaaggcgagcatgcgctttggcgaagctcaagcgggaaagagcagagagtttgaggtacaaagcagatctagcgatccagaaagctgcagctgctctcatgtgtgcagaggcagttaaagcttcttccgaggacctaggcaacaacaatggggtagaaagctcaagcgaaggatgagtcaatagataccactcttgttaagtctgggtattgtcacctcttgagcaaaagaagagatagtgattcgacatgtcctgttcaacacacgagctggtcttgacacgaattaaaaaacgacccagatgagctccactgtacagaaatttgcctccctctgctttaagtaagctatattttgatgcagcaataacaccgaactgggactctgaaacttgatctcatgtacccatcggctgggaatgttcttagtaggttaagaagagagacaaaaattgaggagatggtaaaaaaaaaaaaaaaaaaaaagagagaaaaaagaaaagaggagattgtaagtaatttggtttattaggcttcttttggtagagagatttagtttgagcaaaaaaaagattattctactgcaagtattttgcggtgctcttcttctccatatttcttctctgccttcttttcaattttagtcaagatcataaagtttgaaaaatattgaaacgaagtcaaacttgcaacacttgccatgtagtcatataattacaaaaattagttacaaatcacatttgtcaatactcttccaaaaatttagtattctcttataatttgtaaaacattgggaaaaatgagagagaagaaaaggtggtgagagaaattccaacggcgggaaatctttgaagttagcagttttgtcggaagatgtctcattcgtttgctggcttcatgatctctctgttacttatttcctaaatttgtcatatcttggacaacctcctgagagaagttctttctcatcattctttccaccccaaattctcttcttcgactggttcctcttctttttgtaaggtttttctcttctctttttttttttgtttgtttgaacattttagagcatcaggggcttgaagcttaaaatttcccatgtttctcgcatgtaacgtaagattaaggatttaaagatgcacgagaataacctcaatgtttttggcttaagatagtaatttcttctcaggtaaatgatgacattgctctttgataggatttctcatttgagatattgtttttcttcatgagagaggcatttttccaagaatg

SEQ ID NO: 36163 - DNA, 1270 bp, Unknown; identical to SEQ ID NO: 8310
  misc_feature (1)..( 1270): 2750-1469P.txt file - cDNA_ID_3092878; gDNA_ID_1971714; Annot_ID_175157

SEQ ID NO: 36164 - DNA, 3000 bp, Unknown; identical to SEQ ID NO: 29003
  misc_feature (1)..( 3000): 2750-1469P.txt file - cDNA_ID_3092878; gDNA_ID_2926203; Annot_ID_201985

SEQ ID NO: 36165 - DNA, 3003 bp, Unknown; identical to SEQ ID NO: 29002
  misc_feature (1)..( 3003): 2750-1469P.txt file - cDNA_ID_3092887; gDNA_ID_1971714; Annot_ID_175154

SEQ ID NO: 36166 - DNA, 3003 bp, Unknown; identical to SEQ ID NO: 29002
  misc_feature (1)..( 3003): 2750-1469P.txt file - cDNA_ID_3092887; gDNA_ID_2926203; Annot_ID_201982

SEQ ID NO: 36167 - DNA, 3000 bp, Unknown; identical to SEQ ID NO: 29001
  misc_feature (1)..( 3000): 2750-1469P.txt file - cDNA_ID_3092891; gDNA_ID_1971714; Annot_ID_175153

SEQ ID NO: 36168 - DNA, 3000 bp, Unknown; identical to SEQ ID NO: 29001
  misc_feature (1)..( 3000): 2750-1469P.txt file - cDNA_ID_3092891; gDNA_ID_2926203; Annot_ID_201981

SEQ ID NO: 36169 - DNA, 3003 bp, Unknown; identical to SEQ ID NO: 29000
  misc_feature (1)..( 3003): 2750-1469P.txt file - cDNA_ID_3092894; gDNA_ID_1971714; Annot_ID_175152

SEQ ID NO: 36170 - DNA, 3003 bp, Unknown; identical to SEQ ID NO: 29000
  misc_feature (1)..( 3003): 2750-1469P.txt file - cDNA_ID_3092894; gDNA_ID_2926203; Annot_ID_201980

SEQ ID NO: 36171 - DNA, 3000 bp, Unknown; identical to SEQ ID NO: 8311
  misc_feature (1)..( 3000): 2750-1469P.txt file - cDNA_ID_3092896; gDNA_ID_2926203; Annot_ID_201979

SEQ ID NO: 36172 - DNA, 3003 bp, Unknown; identical to SEQ ID NO: 28998
  misc_feature (1)..( 3003): 2750-1469P.txt file - cDNA_ID_3092900; gDNA_ID_1971714; Annot_ID_175150

SEQ ID NO: 36173 - DNA, 3003 bp, Unknown; identical to SEQ ID NO: 28998
  misc_feature (1)..( 3003): 2750-1469P.txt file - cDNA_ID_3092900; gDNA_ID_2926203; Annot_ID_201978

SEQ ID NO: 36174 - DNA, 3003 bp, Unknown
  misc_feature (1)..( 3003): 2750-1469P.txt file - cDNA_ID_3092904; gDNA_ID_2926203; Annot_ID_201976
tttgtatatatgactttaaagattgcttacctaaagtttttactcatgcatagatcgacatgagctagttttggggaatacttttagtgctgtgccaggcgcaaaggctccaaacaaggaggttccaccagaggttctcactcctcccttgttggttactttgttatctgttaaatagttttccaattgtatccggatagtgttctacttctccttgtagaaaatctcaagtttttgttactcttgctattctcttggatgttgatttgtaaagcatgtcgttttattgtaggaatttaacagaagagtgtccgaagggttccaagctactccattttggcatcaaggtcacatttgcgatgatggccggtaattatatgattctatgcacaacaagaattcactatattataaatattggatattgagtatttttgttgaaaatttctgtgtttaaatctgacttgacttgttttgtcagtactgactatgcggaaactgtgaaatctgctcgttgggagtatagtactcgtcccgtttacggttggggtgatgttggggccaaacagaagtcaactgcaggctggcctgcagcttttcctgtatttgagcctcattggcagatatgcatggcaggaggcctttccacaggtgtgagctttgcttgattgacttaaagttaataaatagacggttaagtttacttgcctagtactaacagaaaattaagaaagaaaccaccctctttctatcagcagaaactgctattgtagttcttattttttctcttgtatttgcagggtggatagaatggggcggtgaaaggtttgagtttcgggatgcaccttcttattcagagaagaattggggtggaggcttcccaagaaaatggttttgggtaaaacatttcatccttttgctacatttcttgttgcagactttagttagctagtggacctgtgtatacacccacatgtagtatacttgtttgatagctttatttgtcaatgtctctttacaggtccagtgtaatgtctttgaaggggcaactggagaagttgctttaaccgcaggtggcgggttgaggcaattgcctggattgactgagacctatgaaaatgctgcactggtatgcacttataagatcttcttaagcaatgacagtgagtattagaaggcagatagtttacaaaagctctgggcccttgtaaatctgcaggtttgtgtacactatgatggaaaaatgtacgagtttgttccttggaatggtgttgttagatgggaaatgtctccctggggttattggtatataactgcagagaacgaaaaccatgtggtaaatttgttttactagtttcattcagttttacttttgacatcatatcattcccttatggctagattccaacacccgatgaatgtcttgtgacaggtggaactagaggcaagaacaaatgaagcgggtacacctctgcgtgctcctaccacagaagttgggctagctacggcttgcagagatagttgttacggtgaattgaagttgcagatatgggaacggctatatgatggaagtaaaggcaaggtatgtatgctaatgtgatccaatccctgtagttaaaagtcttaacaaatcctaaggcagtgaaagaagattatgaacgtttgttatggttaacaatgatgcaggtgatattagagacaaagagctcaatggcagcagtggagataggaggaggaccgtggtttgggacatggaaaggagatacgagcaacacgcccgagctactaaaacaggctcttcaggtcccattggatcttgaaagcgccttaggtttggtccctttcttcaagccaccgggtctgtaacattgatgagtgttttgtttgttgatagagacccatgtgatgaatgaagccttagtcatgtcattgctagcttcactattatgtatgtatgattttagttcgttcggtccttgtggtaaatgatacgggccagtgtaaagtctagttcaataaaagccttgagtcgcataatttcaatttcaaattgcatcagaatttcatttttactttttaggtatttcttctattttattttttgtttctccactcattgttcctaggtagaaaccacgatctataatggattggtaatgatataggttcgaattgttggatattgtataactatgagtgggaggcaaaaaggagaaaagaagaagttccttaatatcggctcactttgtcttagcatcattacaaatgcactctctctggctcccacaatcttacttttattcttcctcacataaataaacccttctttccgttacactcatatatatgtataaacattttctcacttctaaaatataaaaacatttggtaattttgttttcctaataaagagttaagatctatatatgaacttaaagcagcattttttttccaacaaagcttcaatttaggcaataattaggacacaaatggcaaaaccatcattttgttttatatatatttaaacccgcgaaacccattcgaggcagtcgaaagaaaacaaagaaaaaagcaaagtaaatcgttaacatattttttttttttctacttgtgagttgtgagcttctatctctgttttattatttatcatgttatgtttttaaacttattaatacatgagttaaagttttgggagtagaatgatcttaatagagttgatgatgttagtgatcatgaattatctcctaagctaagaaagactttttgtagcattttagttaaaataaaaagtttctatatcataaatatacaataaaacctttattaaagaagataaaacttgaccaaactgtattttataatgtttctttatgtattagttattaacaaaacaaaaaacgtaaattactttgaagtgtacgaaaaaataaaagaggaatcaattttcatatatagccaaagtcacatagtgattcttctccaatcaaatctctatcaacaatg

SEQ ID NO: 36175 - DNA, 3003 bp, Unknown; identical to SEQ ID NO: 28997
  misc_feature (1)..( 3003): 2750-1469P.txt file - cDNA_ID_3092908; gDNA_ID_2926203; Annot_ID_201972

SEQ ID NO: 36176 - DNA, 3003 bp, Unknown
  misc_feature (1)..( 3003): 2750-1469P.txt file - cDNA_ID_3092928; gDNA_ID_1620704; Annot_ID_165183
tagttgtttatttgataagggtatctcccatagctagttaaaaatgttatttaatatattcgttttggtaccatatgctacaataatcatattatgcagagatcatcgaataacatcacataaggtaagaaagttcatgtaaaaagaaaatgcactaataatcattcacaaacttagcagtagattagcgatcgaaaattgatgtcaccaaatttaacaatctttaaaatgacatcttttaattaacgacgttcattcggagacaaaatgaatttcatcaaaaatgagtcactaaactatttttcaaccactccactaaaaaagttaaacctcattcaaaaactgccacgaaacattcccaccaacaaaagataacaaataatatagactccctcgccttgttgcttcccactacaaaagtaacaagaaaaattgttacaatactaagcatagtattaacgttatgctatatatacaaatctctcgtcggaccaaatattcgcattcatagatttcattacaaattaacgaactattcacagaaagaaataaaacgagatgggaagtggcatgataaggacattggttattctagcaatagctttattcatgatcggttccgacaacgtccacgtggcaaaagcccaggtctgtggagctaacttgtcgggactgatgaacgaatgtcaacgctacgtcagcaacgccggaccaaattctcagccgccgtctcggtcttgttgtgctctaatccgtcccattgacgtaccttgtgcttgccgctacgtttcaagggatgttacgaactatattgatatggacaaagtggtttacgttgctcgttcttgcggcaagaagattccctccggttataaatgtggaagtaagtatctttcttgcttttcttattatagtttcgtaattgttaagcatataataatttggatttgaatctgttataggttacaccattccggcggcttaaaaaggaacgaaaccaacagaatttggatttgctataaaaattaataaaacgtattagtatctgaataatgatgatgatggatgttatcaggattttaggtcttgtagtataagcaaaatggggttgatggtcggaagatataattaatgaaaatatgtttgtgtttttttattttgaacacctaaagtaaacatctgaactagcaaaacgagcaattaaacatctgaccacataaataatccattttttatctctattttaacctcgtagttagataattaatttatgaccaaaaagaaagtaaataactaaaatgagaaaatgaaaaccacgagctcccaaatttcctgcggcttctttagcctcttgtttcgtttatgtaccactttctcgactccacactttataaaccaaatcctccacgaaactccaaacacattgtccaaagatcaatacacactgttttaagaagaatttgaaaagaaaaagaaaaaaagaagatgaatgccggaaagcaagcttcgtgggcggtggcgacggcgatcgcagccgtggaagtgctaaaagaccaaggcgttgctcggtggaactaccttttccgcttactccacaaagaagcaatggctcgcgtccgtaccattacagtcccatctcgtccctctcctcctacgtcttcatcttcggctacttccatcagatccaaacctttgtccaccacaccctttgagacatcctttgagaaagctatgggtcttagctgctttggtcccaccaccgttagattctagatctctatgtactgtgttgtatgtacgcaaatcagaatgtgcatgcgtctatgacttgtttttgtttacccatcacatcattagctaggtccactaaatgttgtacttgttggagtcattattctaacattttgttttcaatattgaaataaatctggttttatatagacataactaaaacaaaccggagtgtttaagccggtttatatttataccacaaagaatcttaatccgctaaatttacatcaccgaaggatggacccttgtgagtcacacaattggtgtgcaaattagaagaaaaacatcaattcattttttattacatggaaacaattttagaattttttttgctatgatacaatgttaccaacccatcattatttgatttatgataataaatttcattatgtaaattttacacatgacctagtgtataaaatagacatactagctggaccataatcagacgaacttaatatcggttaatacactaccggttcattaagcatttagacaaaaaaaaaaaagaagaagaagtccatatacatgcatatatacgaaagtcacatcagaagatcagacatacaagtacaacgactagtcagtggacgcagtttgttgtgtggtgggacaaggtgagaatatgcccacagatatcgctattgctctctttaaccattttggtccaaaacactttgccaacttttttaataaagactgatacaaattttagattgatacaacttaacattaaaaccacccaaataaaacttcgtaatatagataagcatcattgtaccacaaccacacaccaagccaataagtcaacaactactcctaacccttttaaacctaatcaatacaatttaatattagaccgactacgtgatggtgcatatgcttctttttaccaaaacatatatattcaagcaacaattaatacatatttcgattctcaatttaatcaactgaagaaatttcggtcacttgttttaatttttttttgtaaagcttataatttttattttgtaccaacatttaaaaatcaattattttggtgaaattaggatgatagataccgtcaacctacttttgttgaccaaacttgattctaaagaaagaaagcaaaagagagagaacaaaaacgaagacaactctcatcttcttttctctttctttttcctctttctccattgcttgttgattgatgatcttgaagcaaggatcatg

SEQ ID NO: 36177 - DNA, 3003 bp, Unknown; identical to SEQ ID NO: 36176
  misc_feature (1)..( 3003): 2750-1469P.txt file - cDNA_ID_3092928; gDNA_ID_2926204; Annot_ID_202076

SEQ ID NO: 36178 - DNA, 3000 bp, Unknown; identical to SEQ ID NO: 3289
  misc_feature (1)..( 3000): 2750-1469P.txt file - cDNA_ID_3092933; gDNA_ID_1620636; Annot_ID_162916

SEQ ID NO: 36179 - DNA, 3000 bp, Unknown; identical to SEQ ID NO: 3289
  misc_feature (1)..( 3000): 2750-1469P.txt file - cDNA_ID_3092933; gDNA_ID_2926204; Annot_ID_202066

SEQ ID NO: 36180 - DNA, 3003 bp, Unknown; identical to SEQ ID NO: 17199
  misc_feature (1)..( 3003): 2750-1469P.txt file - cDNA_ID_3092942; gDNA_ID_1620636; Annot_ID_162905

SEQ ID NO: 36181 - DNA, 3003 bp, Unknown; identical to SEQ ID NO: 17199
  misc_feature (1)..( 3003): 2750-1469P.txt file - cDNA_ID_3092942; gDNA_ID_2926204; Annot_ID_202055

SEQ ID NO: 36182 - DNA, 3000 bp, Unknown; identical to SEQ ID NO: 3274
  misc_feature (1)..( 3000): 2750-1469P.txt file - cDNA_ID_3092946; gDNA_ID_1620636; Annot_ID_162904

SEQ ID NO: 36183 - DNA, 3000 bp, Unknown; identical to SEQ ID NO: 3274
  misc_feature (1)..( 3000): 2750-1469P.txt file - cDNA_ID_3092946; gDNA_ID_2926204; Annot_ID_202054

SEQ ID NO: 36184 - DNA, 3003 bp, Unknown
  misc_feature (1)..( 3003): 2750-1469P.txt file - cDNA_ID_3092950; gDNA_ID_2926204; Annot_ID_202052
aacaatctcatctccttttctttttcttacttcaacttgttttttttaaggcagtaacaattagtaaggatgaaaataatcacattatcattaagctgagatgtcaaagcgattatgatgagaggaaaagaaaatgaaaataagtattggtaagacatcttagttttaataatcgtatatcaaccaaatttgatcaataattagcttaaaccaacatatcattttagaggcctcaacctcctttgaataattaggctgatactacattctaatgacagatgaataacgtacatctccactttttaaaacaaacaagattatgttatttgatttaggtatccgtatatgccaaatatatttttctggatgtaagaaccacgagtaacatgttgatgatgtgtttaagtggtaaaaggagaggagaaaactaaattttgggactgtgttgagctctttgggcaattgataatattgcaaaatctcaaaagaggctgttttttttttatcaagtaaaaatacacacattgtgtctattatggttttactctttgatcaaatcctgcatgtgttgtgcataacttcttcccggtggaatgaatattacatcttcccaacctgaattcttctcgctcatctacattgattcaattcagatttttattagactaccaggttttcatactttaaggtttctttaaacaaagaagaagcgtgagtacctccattttcctcaacacatcttccagactcccaacctgcaaaacaaaaagattagttccatggtgaagataagaaaactcttaacaaaaccaatgctgtgaaattactttatatattgatctctgatatgcaactttgataacgataaaccttggaattcattttaactcagatatatgaaggcatgtacaatctgaattccgctctttctaaagttttctaagacttttccctttccctcgctgttcctttgaaaacatggtgttatatgtttgcagaacatgtaatcacaaaaaatgctagaaattacatatgatgccaacacagctactagctactcccacttgttagtaaaccatgtctttagatcaaggtgtttgtttctatcttacgtggcctatcgaagattcaaatacatagaaggtaggtatgaatcattaccataatttgttgatctcctcttgatgctctcgtatatttagaaagttccctctctatatcttcctgaaagtggtcacgcagaacaggaaagtaagagttatcttcctctgttttggcttatgagagatctattagtattctttaacgtgggagaagaaactaaccaaccttactgaaatatacagggcagtaacgtctattttttttcctcacaacaagaagctcagactgtagaggccaataacaacagatagatatcaagagaaaacaaagcaaaaacaccaaaacataaggaatccatattggtataatagaaaaacacagaaaatgagtatatcaatttacctgaaaaaccggaactccatcaaacccattcttatttcctgaggatttgagctgagacgcaagaaaatatagcttatggataagattgaaatgccaaataaatgctatagacacatataattaaaagtctgtttagcatgagccaacctctaacgcattctttatttggattggatctggcaagaagcgaaaggaaatcccttcaacttttagcaagtacacctgtaaacaacatcatcttaacttctgggaatgtagctaccacgattacgcaaataacatcaaaaagttccctaaacgtagttataacttataagttccaagccattagagggattataatcatgccatcgttgcattctttcttgtgacgatgttgtcaacattgctacgtgcacaagaacacaatctcccgttcattcaaactgccaacaggtgttcctattaccgtataatataaacaactaaaatgaggccagacatgaacaagtctacttagaatttgagctcctgaaatttgtttgtttcatttgatttaaccaatggcttcttccacattgatctaatgcagtgatcataaggaaagggaactacctggtccagagtaatgggaacaaccttcgcattggttttcaattctcttctccgaagtcgcgcctaaaggagtatattagagaattatgagctcagaaacttcacatttttttaaaaaagttcggaggagaaaaatacaacaaaaagcgaaacctgagcaagaaaagcttcagcatcctcttgtcgaaaacagagcaaaccgatagacttgcctccggtaggatccgagataagaacgaattcgttattggtgttactgactgtaaacaccgacgtcccagcgagagctttagcgacaagagatggactcaacgtcgtcgtcggggttccagacttggattgtgagacggaggcgaaaggcggcggagtaggaagagagaaacgtcgagtagctagggtttcggcgaatcgtttcgtgtcttcgattcgggcggagaggtcggagctgaagcgggtacactggtggtgaatgaaagaagagaaggagaggaaaggattgggtttcactgatgactccatttttggatttgcagagagaagaaagaagtagaagaagaagaagcaatttttgatactatgaagagagtgaagaaaaaggcttcagagcaattcgtttgggcttttttatttgggctttattggacttgattggttttagtttacgtttaatatggcccttgatcaaaagtttggtgacaaagcatttattaactttctaaactcaacttccacaccattctaaacacatgacatgacttacaaaaagcttttgtcactcaaaattcatgtcgatgacatttttttcctccaaatttctcctccttataaaatacttactagatcaagcaaacaacacactaaagaaaacaaaattgttaaaactctcgttaactgaaaaatatg

SEQ ID NO: 36185 - DNA, 3000 bp, Unknown
  misc_feature (1)..( 3000): 2750-1469P.txt file - cDNA_ID_3092958; gDNA_ID_1620636; Annot_ID_162894
attaatttgcaggcttggctctttgtacgcaagccactatgatatatttgtgacacagcatgatgttctgcgagacctagctcttcatttaagcaatgcagggaaagtaaacagaagaaagcggttgctgatgccgaaaagagagttagatcttccaggagattgggaaaggaacaatgatgagcattacattgcccagattgtctctattcatactggcaagtgcttttctacactgcaaatattcttggttctctcatgtaataatcaccaggatcataatgttggtatggattttttattttgttttttgcaggggaaatgaatgaaatgcaatggtttgacatggagttccccaaggcagagattctaatattgaacttctcttcagacaagtatgttcttccgccttttatcagtaagatgagccggcttaaggtcctagtgattatcaacaacggcatgtctcccgcggttctccatgacttttcaatatttgctcatttgtcgaaactaagaagtctctggctagagagggttcacgtccctcaactctccaactcaaccacccccttgaaaaatctccacaagatgtctttgattctgtgcaagatcaataaaagttttgatcaaaccggacttgacgtggcagatatcttcccaaaattgggcgatctgacaatagatcactgtgatgatctcgtggcactaccttcaagcatttgcggactgacctcccttagctgcttaagcataacaaattgtccacgcctcggtgaattgcccaagaacctcagtaagctacaagctctcgaaatcttaaggctatatgcttgccctgagctaaagacattacctggagaaatatgtgagcttcctgggcttaagtatctcgacatctcacaatgtgtcagcctgagttgtcttccagaggaaataggaaagctaaagaagcttgagaagatcgacatgagagaatgttgcttctcggatagaccgagctctgctgtttcactgaagtctctgcgccatgtaatctgcgataccgacgttgcatttatgtgggaagaagttgagaaggctgttccagggttaaagatcgaagctgctgagaaatgcttcagcctagactggcttgacgaataaagtgtaaactcattgtttagagtctggtaagttaaatggcttgtatagagaactctttctactctgttttctaatttctaagttcaataaaggataacttttcataacaaacttctactctctcttttctacatgaaagtttagaaactgaaaagatttgtgaaacaaagctgattctgttccaaattcctcgacaaagatgccaaaataaagaatactaaaagacaagagatagatttctttgttattctgaattgtaacataataaattaggctttgtaatctgagactaataatcatcttgttggcctcctcctacgtatttgactggcagtggcttgataaatgctgtcaaatatccacgtgttttgatcaaatcgaagcttttctaaactgctttgtcttttccttttgccttgtgcaggtttcttaattcggaccaaacttggaacataagagcacacatatgaaccacagtttacgcctgcacgttctccagcctcttcaataatgttaaatgttatgcgatcgaattctctaaaatatccatcctctccaataatgttaaatgttttgcgaccgaactcttcatcaaaccccaaggcgactttcttcttctcctcgtcaatgaagaaacccccatatataaatggaaccattatgttattgttaggttcaatgtcaattctcaagaacttgttccacgacaccatttccgcctcaatcttagtcgtaatccatatctcaagctcatatggatatgaatcgttgtgctgaaataaagccgcaatcttcccttctctaacacaagatgaagtcacatattcatattcattatctataacgttaaccggtagaggcagaagcggaccaaatctctctcttgtaaaatcaaaacagattatatgattgtaaccatctgagttttcttctctagcacaccagtaagtgttccctttgagagagacgccttggacacaagaccaattagacaatatataccaatgtggagtgacatcaagagttgtccataaatcagagtcaaaatcgtagatttcatgccaacaaatgtgcttttcggtgtagcaataatctataaacctcaataatttaaggctacgaccagatttattattctcgtatccaagagcatatctgatattgttcattacgtatggacggtgagaatatctaggtatgatccaccttgtttcctgcctatacggattccaaacaacaatcctagtatcgtctttcaagatgcataacaataaaccctcacagtgaaagacttgagatatcttgacttgttccttaagacaactaagtttacctttaaactctatagatggatcaacgtcatccatgaggacagcgctcatcaaaaaaagattgtaatctatcaacatgatcaccctagattctccttctctcgttgatgtaactttaccaatgtgcatcttcttaaagctctcactattggataaagtattccaacttttgcaagttaatcgcacaactctcatagatgtcatggaaacccttgaaaggatttcttctatcaaatcctttggaagatcggtgatcatcgtcgacgtcgtcattagtttcaaattgcaacaagggtttgactatttacattcaaaaaaacgctttttgttttcctcaagtgtacaccatatataacagttgaagatacaaaagccctaaacaaatctgggccgatagtgggcttcagaatgtagtcggtcttttaatgatattttggtgtcaacccaataactccagtttcatctcaattctcaacatacaagtatctcggtggcaagagcagggagaggaagagagaagatg

SEQ ID NO: 36186 - DNA, 3000 bp, Unknown; identical to SEQ ID NO: 36185
  misc_feature (1)..( 3000): 2750-1469P.txt file - cDNA_ID_3092958; gDNA_ID_2926204; Annot_ID_202044

SEQ ID NO: 36187 - DNA, 3000 bp, Unknown; identical to SEQ ID NO: 3271
  misc_feature (1)..( 3000): 2750-1469P.txt file - cDNA_ID_3092962; gDNA_ID_1620636; Annot_ID_162893

SEQ ID NO: 36188 - DNA, 3000 bp, Unknown; identical to SEQ ID NO: 3271
  misc_feature (1)..( 3000): 2750-1469P.txt file - cDNA_ID_3092962; gDNA_ID_2926204; Annot_ID_202043

SEQ ID NO: 36189 - DNA, 301 bp, Unknown; identical to SEQ ID NO: 3973
  misc_feature (1)..( 301): 2750-1469P.txt file - cDNA_ID_3092966; gDNA_ID_1620677; Annot_ID_164292

SEQ ID NO: 36190 - DNA, 3000 bp, Unknown; identical to SEQ ID NO: 19586
  misc_feature (1)..( 3000): 2750-1469P.txt file - cDNA_ID_3092966; gDNA_ID_2926204; Annot_ID_202042

SEQ ID NO: 36191 - DNA, 3000 bp, Unknown; identical to SEQ ID NO: 3983
  misc_feature (1)..( 3000): 2750-1469P.txt file - cDNA_ID_3092970; gDNA_ID_2926204; Annot_ID_202037

SEQ ID NO: 36192 - DNA, 3003 bp, Unknown; identical to SEQ ID NO: 20920
  misc_feature (1)..( 3003): 2750-1469P.txt file - cDNA_ID_3093003; gDNA_ID_2926205; Annot_ID_202160

SEQ ID NO: 36193 - DNA, 3003 bp, Unknown
  misc_feature (1)..( 3003): 2750-1469P.txt file - cDNA_ID_3093007; gDNA_ID_1620844; Annot_ID_170160
acgagtgatcttattagcctatgagcctcaagacaaaggctttactgatttttgagctttattgaacaggtatgggatgtgttaagcaacgaagaagtggttgacattgtagcttcagctacaagccgggcatcagcggctaggaccttggtgaactcggctgcgcgtgaatggaaactgaagtacccgacttccaaaatggatgattgtgcagtggtatgtttgtttctggatgggaaaatggattctgagtcggattatgatgaacaaggcttctcttcagccacaaatgctgtagaatcagatgatggccaaagatcagaaccatgtctccaaagaaacttcacagttagatcatcatcagatcaagaaaacgagacttatggtaacgtgaatacagagactgatgcagaggatgagaaaacggtaggagatcaaaactggttgggtctacaaggcgtcacacgcgtgaactcacttgtccagcttccgagattctctgaagagaaatcgaagacttgagattagcttttaatgttatttctgaggactgatcttgaagaatgttgtcatttttcgttgttatgcttgagcattgtgcgcagcttgatctgtatttgttttgctggtgtttcgtgtttgatgtatctgtattgcacaatggatttgcctcatcgattctctcttggaatccatgaatcaaatgtgtatatacattgcttttaggtatctctctaaacaaaaaaaaagtatatatgtgcttgtgttcttcatccacctcctgttagagtctatagaatctagaatctacatgctgatatcacctaatcctgtcaagtatttgcaggcacaaattagcttagatgaacactctgaacaaacattcaaacgctcaagactaatttttgaagagagattcttggaaaaaaggaacacttggcaaacctcgcttgagtgagaactggagttcgtttcctctgatgcttgcgcctcagctttttcgttcgagtaacttccagaattcgaaatgaaaatcaggcaaccgatattagcaacacaaaacttctcttcatgatagccacaaagctaatatgtgcaacactttcaaatacattggataaaaaagattgaagttgaagaaggctcacgttgataatatagtgacccatatgagttcaatacaatctacccaaagaagcctttggtctacagggattacaccgtatgtaaccaagtgtgccaatggccagagtttccagcctgcctgcatagacaaaatcatgacataacctttagataaaatcaacagactaactttaagctttatatatgatcacgaagacacagggcaaggagagttaattacagtgagcattggcaaaaatgttgtcttgatttcgctgaaaatgtcagctggagattggaaacgcaagagccctaaaactgtaaagtagatactgttccaaattgcagaccatacggtttgatcaaatgcgacttttgcagggactacccaccattcttgaaaaggaaagagagccttgtacaaagaaaagattttagctttcagcccgttgttaatacaacatatcttgacagagcaaagattgatttttacctcacagaattggtagtaatagtgagacagtgaaccatggagtgtgaatccaacaagacctgatctaagaacacgagttcgatcaaactcaaacagcggttttccttcgtaacactgcataaagttacagccaaaatggtcagagagaactcaaattaagaagctttttagagtatttttagtttcttacttgtgcaatccaatctcctaaagaatacacaattccactaatcgccattttcgccaaaacagggtttgttttgagaatttgttcatacgcaaaccaattatgttcaggtgcatacctaagtatctcgtagagagtccaaccctaagaagaacaacaacaatcgtgatatcaatttcagtataatcccataaaggagcaagctttgcagagatagaagaaccaatcaatcacaagagagataaagaaaaccctaagcttacttgccaatagtcatgatcaatggttaaaagcttagtaaccgcaacggtaccggcggcgagaactatagctgcgttgatacctcgactcatcagccgatctgtatcttctactttatcttctgatagttcttcctctgccttgaaattgtcatttttaacatcgattgcttctctgtcttcaatgatcgatttaacgatcaagtttcttctctctgtaatcaatcgtttctgattcttaaaagggttgattcggggtaatgggcctgcggttttaatccgtgaagaaaccttcccggagacgatgatggtggtgggacaacaacagagagctgccatggacttgcacttctcaaaggaagatactttttctcttctcgttggctctctcacagccaaaggagaggtttttagacttagagaacaaaaaagaagcagcagactttggtgaccaaacggtaggaactgagccgaaccgagtttcggttaaattaaaaccaataaccggtgggttttaatttggttaaaaaccggtttgcacaatctcaaaaccgaagccgaaaacaaaggtcctaccgagatttgaactcgggttactggattcagagtccaatgtcctgaccactagaccataggaccagttgcttcgagtcctaccgttttggtttaagatctagacatgttcaaggactacaccatcgtggtctccgccgatacggcagtctgatcaaaacgattcaagagaatcaggcggaaggttttttctgaaattcataaaatcgggtgatctttgcaatatgcatacgtatatccttggtaaatgtattggctttgtttggttaacgatgttgataggattaggttgtgatcaaattagaaaaaaattgggtcttttctgattttttttggccaattctctgattatgagttttggaatg

SEQ ID NO: 36194 - DNA, 3000 bp, Unknown
  misc_feature (1)..( 3000): 2750-1469P.txt file - cDNA_ID_3093007; gDNA_ID_2926205; Annot_ID_202159
gtgatcttattagcctatgagcctcaagacaaaggctttactgatttttgagctttattgaacaggtatgggatgtgttaagcaacgaagaagtggttgacattgtagcttcagctacaagccgggcatcagcggctaggaccttggtgaactcggctgcgcgtgaatggaaactgaagtacccgacttccaaaatggatgattgtgcagtggtatgtttgtttctggatgggaaaatggattctgagtcggattatgatgaacaaggcttctcttcagccacaaatgctgtagaatcagatgatggccaaagatcagaaccatgtctccaaagaaacttcacagttagatcatcatcagatcaagaaaacgagacttatggtaacgtgaatacagagactgatgcagaggatgagaaaacggtaggagatcaaaactggttgggtctacaaggcgtcacacgcgtgaactcacttgtccagcttccgagattctctgaagagaaatcgaagacttgagattagcttttaatgttatttctgaggactgatcttgaagaatgttgtcatttttcgttgttatgcttgagcattgtgcgcagcttgatctgtatttgttttgctggtgtttcgtgtttgatgtatctgtattgcacaatggatttgcctcatcgattctctcttggaatccatgaatcaaatgtgtatatacattgcttttaggtatctctctaaacaaaaaaaaagtatatatgtgcttgtgttcttcatccacctcctgttagagtctatagaatctagaatctacatgctgatatcacctaatcctgtcaagtatttgcaggcacaaattagcttagatgaacactctgaacaaacattcaaacgctcaagactaatttttgaagagagattcttggaaaaaaggaacacttggcaaacctcgcttgagtgagaactggagttcgtttcctctgatgcttgcgcctcagctttttcgttcgagtaacttccagaattcgaaatgaaaatcaggcaaccgatattagcaacacaaaacttctcttcatgatagccacaaagctaatatgtgcaacactttcaaatacattggataaaaaagattgaagttgaagaaggctcacgttgataatatagtgacccatatgagttcaatacaatctacccaaagaagcctttggtctacagggattacaccgtatgtaaccaagtgtgccaatggccagagtttccagcctgcctgcatagacaaaatcatgacataacctttagataaaatcaacagactaactttaagctttatatatgatcacgaagacacagggcaaggagagttaattacagtgagcattggcaaaaatgttgtcttgatttcgctgaaaatgtcagctggagattggaaacgcaagagccctaaaactgtaaagtagatactgttccaaattgcagaccatacggtttgatcaaatgcgacttttgcagggactacccaccattcttgaaaaggaaagagagccttgtacaaagaaaagattttagctttcagcccgttgttaatacaacatatcttgacagagcaaagattgatttttacctcacagaattggtagtaatagtgagacagtgaaccatggagtgtgaatccaacaagacctgatctaagaacacgagttcgatcaaactcaaacagcggttttccttcgtaacactgcataaagttacagccaaaatggtcagagagaactcaaattaagaagctttttagagtatttttagtttcttacttgtgcaatccaatctcctaaagaatacacaattccactaatcgccattttcgccaaaacagggtttgttttgagaatttgttcatacgcaaaccaattatgttcaggtgcatacctaagtatctcgtagagagtccaaccctaagaagaacaacaacaatcgtgatatcaatttcagtataatcccataaaggagcaagctttgcagagatagaagaaccaatcaatcacaagagagataaagaaaaccctaagcttacttgccaatagtcatgatcaatggttaaaagcttagtaaccgcaacggtaccggcggcgagaactatagctgcgttgatacctcgactcatcagccgatctgtatcttctactttatcttctgatagttcttcctctgccttgaaattgtcatttttaacatcgattgcttctctgtcttcaatgatcgatttaacgatcaagtttcttctctctgtaatcaatcgtttctgattcttaaaagggttgattcggggtaatgggcctgcggttttaatccgtgaagaaaccttcccggagacgatgatggtggtgggacaacaacagagagctgccatggacttgcacttctcaaaggaagatactttttctcttctcgttggctctctcacagccaaaggagaggtttttagacttagagaacaaaaaagaagcagcagactttggtgaccaaacggtaggaactgagccgaaccgagtttcggttaaattaaaaccaataaccggtgggttttaatttggttaaaaaccggtttgcacaatctcaaaaccgaagccgaaaacaaaaggtcctaccgagatttgaactcgggttactggattcagagtccaatgtcctgaccactagaccataggaccagttgcttcgagtcctaccgttttggtttaagatctagacatgttcaaggactacaccatcgtggtctccgccgatacggcagtctgatcaaaacgattcaagagaatcaggcggaaggttttttctgaaattcataaaatcgggtgatctttgcaatatgcatacgtatatccttggtaaatgtattggctttgtttggttaacgatgttgataggattaggttgtgatcaaattagaaaaaaattgggtcttttctgattttttttggccaattctctgattatgagttttggaatg

SEQ ID NO: 36195 - DNA, 3000 bp, Unknown
  misc_feature (1)..( 3000): 2750-1469P.txt file - cDNA_ID_3093019; gDNA_ID_2926205; Annot_ID_202154
tcttatgcatatcgagcagactcaggaatctatacattgaagattgaattgtaaggaagcacttgttcaccagtgaattacggagacaagatgttaagttcttagtcataacaacaaaggggaactaaaacaaagataaacagagtcataaccttaggatgaggcttaagttgattttgcagcaaagacgaggctttttgtgtcttgtggttttggtctctgttcgtataacttttgttcgttgaaatattctactgtaaagtggttatgtttactcgaatccttgaatttgtttgtattcaaaaagtttatagaccttactatgtgtttgtgtttgtgtttgtattccctgcttctatgaattttgtgcttaggattttcacttgaacaattgtaatttactaactagatattgacatgcagtgtacatattattaacttgaaaagtatacatatttttttataacaattattatttgtatatgaataatataatacttgacacataatttttatatatgtaaagcttgaataattcatcttttataattgtatattagtttaatattaaaattcagtattttttcgtggtttggattttttagagataataaagatttaaaccttgcattatctagagattgacctacggtacactccggtttgatatttttgttagaaaattaaagacttttatattaattaatattatttagatataaataacatattcaagaggtataccgaataacaattttaattttggatgtctgatatatcaaagttcttgttcattcgtattcagaatcattttgttctttttatagtatgactctaaacgatttcccatttttttaagtaatgtgggaccttgtacacttactttttttatcgattgagtattatatgtctgttttttaaaatttaaattaaatcaaatatttaaaatctaatattttattaactatatgtattttatatataaagtcaaaataaattatatataaaaacaaatatagtgacagaaaaattatatacttataatattgatatagagagtttaggaaattagccttaatggaatttagttccataaagaaagatttaattgatgataaaaatttaggaaagagttaattcaagtatttaatgcaaattaacgatttgtaagtttttaggcatagaatatttggttgagatagaatttgtaagaccttaaatgttaatagtaaatagtgtagggatttttgccaaaaagtgtaccaaaaatgtatatatagattaaagtcaggtccaataaaccggacttaaccgaaccaaacagattcgatattgtgatttctaattaaatcggacttaacagaactaaacggatcaaaaattttgaatggttaatatttccttcttgcgtataactataaaaccatggcccctttaaaaatatatcaacagcttccagtggctaaccagattcgagggcctgcattagtaagtagatcacatggagactacataacacatatgatcaacatccatcagctaacaagatgaacaatctaatgtcagggccaatgaggcccattcatgatctaatggctactcagcataacttatatcaacatccaatggctaacctaagaatgccgctattcaggaatgccgcaacaggacagccaagatcatttgatttagatggtcagacatatctcaacccacgacaagcactgcctgagctgaatcaacaaatgatgtgacgtgtgcctcagccaacacatcctcaaggatttaaaactagaccatcttcagaacaaggtcaagatcagcagcagcctagatttgattttggtaactgtaaaagaactggtggtgatgactatttagtcaaagatctattcttaagtgtggaacaaggaagatttctcttctggatcttcattatcaactcccaatcaatttcaatacttttcactgaagattaaaaagttcactatagtcttaaagtttctcttttttgaattgcaaatttgtgtaatttcttaaagattatgaaacgttgatgaactattttagtcaagaattattcaaaaggaaaaaaatgaagaataagaagaagaaagaaagagtttctctttttaaacgtttggtttagcaagacaatttagtagagtcaattcaatatattcggtaataatattagtagaacaaatgcacaagtcaataaataaaaacttgttggacaagaaacagaaaggacaaaaacagagtaaatgcctccgactagatcagaagcagactcattgtcgtctccttaatcctcaaaaacaataccatcatcgttatctaatacaaatattagagtattcatttgtatgagtattcttctcccaatgcaccacgtccccatctcgatctcaatctttttgcttctcaagtttttctgcagccggatatccaaaatcatccgcagcctcaagtttagggtttaggataatcagagacaattgatgtttaccgtatctagaaaagttttggttactctatcatgtcaatcgtttatagccaattttactaggtggttctaatgtggtgtggatcaattctcgttagataatgtttcagctttaagcccataagaatgaaatgatgacttgcatgttatgtactaaccaagaagttgaccaaatgttctacttgacgatgatttgagggtacttgtctcagattgtggtttagccctctggttcaggtaaatcaagagcttgatccaatatttttaactaaaacgctgcgtttaaaccctttacaagattacttaatctaaccgttggatcatatcattaacgagagccatcgacggttacgattcttcgactagaggattaagtgatatttgaaccaaatgacacgaacaaacttaccgtgcgtgaatcactgtctctatctttctcttcttcatcagtctctattgatcttgaaacaaataccattgatacaacgatg

SEQ ID NO: 36196 - DNA, 3003 bp, Unknown; identical to SEQ ID NO: 16387
  misc_feature (1)..( 3003): 2750-1469P.txt file - cDNA_ID_3093031; gDNA_ID_2926205; Annot_ID_202123

SEQ ID NO: 36197 - DNA, 3000 bp, Unknown; identical to SEQ ID NO: 20914
  misc_feature (1)..( 3000): 2750-1469P.txt file - cDNA_ID_3093036; gDNA_ID_2926205; Annot_ID_202115

SEQ ID NO: 36198 - DNA, 3003 bp, Unknown; identical to SEQ ID NO: 28641
  misc_feature (1)..( 3003): 2750-1469P.txt file - cDNA_ID_3093074; gDNA_ID_2926206; Annot_ID_202239

SEQ ID NO: 36199 - DNA, 3003 bp, Unknown; identical to SEQ ID NO: 28641
  misc_feature (1)..( 3003): 2750-1469P.txt file - cDNA_ID_3093074; gDNA_ID_2926238; Annot_ID_203949

SEQ ID NO: 36200 - DNA, 3000 bp, Unknown; identical to SEQ ID NO: 33560
  misc_feature (1)..( 3000): 2750-1469P.txt file - cDNA_ID_3093102; gDNA_ID_2926206; Annot_ID_202210

SEQ ID NO: 36201 - DNA, 3000 bp, Unknown; identical to SEQ ID NO: 3245
  misc_feature (1)..( 3000): 2750-1469P.txt file - cDNA_ID_3093106; gDNA_ID_1620634; Annot_ID_162812

SEQ ID NO: 36202 - DNA, 3000 bp, Unknown; identical to SEQ ID NO: 3245
  misc_feature (1)..( 3000): 2750-1469P.txt file - cDNA_ID_3093106; gDNA_ID_2926206; Annot_ID_202209

SEQ ID NO: 36203 - DNA, 3000 bp, Unknown; identical to SEQ ID NO: 3242
  misc_feature (1)..( 3000): 2750-1469P.txt file - cDNA_ID_3093114; gDNA_ID_2926206; Annot_ID_202203

SEQ ID NO: 36204 - DNA, 3000 bp, Unknown
  misc_feature (1)..( 3000): 2750-1469P.txt file - cDNA_ID_3093125; gDNA_ID_2926206; Annot_ID_141728
atctatcttttggttgcgtttacatagtgtttacgttccatgttataattattagctcatattagaaacccagacgtaaacacaaacaaataatcatgtcactatacagaatttacctagtatagaagtccatgatttttgttctttttaccttttaatagaaaagttttgttctttagttttttgggatttaacattcgttttaatatatcttgtagatgttgcagaaaagtgttggtggtaataagatagagcaaacctttccagaaagtacattggattactcacaaggcttctcggctactcagtttcaggtttctctctcttcactatctctctgttaggttctgttgagtacacgtgacttgtctcaagaatctcactatatatgtctttgggtgttgaaacaagcaggacaaaacagcattccaagagcagtgtggttatttgcatatggaaaccagattctaaataaccagttcagtaattttttattattatttctgtagatgttcaactactttgtttattcttactttataaagaatatatcaaatctgactaaaattaactttgaaattcgctggtgaagatcaaactgatgaagagcagcagctattttggacatttgtgaagcttttatggattcaacttgaaatcatttcaagcagtgattaaagtgaaactttaacgtcccagatgtgaaaaataggaaggagttttaagcaaaaagactgatatagaacgaaaaaaaaaaagggttctcaaatctcaactggactgattcttttctctcttttgctttgtaatttcgtcacaaacaagttttccttgtagccgcctttatgtaactcgtggtttacaaattacaacacttcacttccattgcaattttctttcatagtataacaaatttcaatgcctgaataagctttttttttgtgtggggaaaaaaacttccaagaaatatctagcaaaacaaatgatcttaatggttcttttcagagctgctaaattctcaaaagaataattcgaagtagatgacaaagagggcatattcaaaacttataaagaaactaataaaacgtattactttaaatagagcacgaaaacctatatataaccaaaatgctaaccctaaaagtaacacttgaagaatgcgtaacactaacgcaataaaaggggaaaatagaaacttatcaaaatctggttatcggcttgtttttatagtcactcttcatatgcatcagtgtttgagattctgcagattgttgtagcagatcatgtttaaagtccgttatttgtagctcttttgagttactagcgattttggaggtgttaaccggcccaagcatgaataggcctgatggtattctggtccatctgagcttggccgaagttaattgcaaaattaaaattaagtttatattattatgcttttgtctatctcttgactttaattaatcttttaaggttaattggttattggtagttgagggtgtttcagttaaccttaaataaaaaacttaattgacttaaattatagtaaaaaccaaaccaaaccaaatagagatccaaatttaaatgtacataatctaccactttcataatgtaaaaatccaagtgttatcagctgccgcatttgttctgtcttctatatgtcgaatacgagtacataaactacaactttgataatctaattttaggattttaatatgctaggctgttttgcgtttgtcatgagtagggtcgaatcatgccttagccagtcgtactagtatagatggttgtaagttggatttgatgacaactgctttggatttgatgacaagtaactacttaaaagcaatggttaggcagacattaaataggtggtgatctaatgtctaacatctaaaacgttttaattggaatttaaacgagtttagatggtctaattaagcgtttattatgtacataatagaacgtataaaatatcatgattcacagaagtaaatttaaaatgttttaattttagaagtaaatttaaaattcaaactacatcaaaaattcaatagaaatcaacttaaagataaccataaaatcaattcaattgacatcaaataatagaagccatctactttttatgttataaaacttataatgaattttatgtcattataaatcgaaaaactacactgaaatgaacaaaaagtcaaatgacaacagattaatgattatgtaaactgtataatgtcgattaaaaccacataatgccatcaattatttagcacctatcaaataattgtcacggttgtatatatggcgcgcctagaccgccacttaaagcgctatttcaagtattgttacaaacgaagaaggtaggcggtctaatttttaagtctaaaattagatatctttggacgcctcatattacttattgttttactctgtcggatcctatctcacccaaccatacatttgtggcaacagaaattgcctccaaatgcaaaaaaaaaaatcattctttctactgttaatacttcgaaatatacaatttttaaagttaatatgtgtttaaataccattttgatctaaattttgtgttttgtgtttctttctatatatatatgtacgttttccattatatcagaatcgaatcatatctaaccatatatgaattagtctcggtagttgtaatttggaatatttatttcgcttttcaacgttggtaggttcaaaaatacttaagttaagccacgtttaatttaaatacgttcatatttagaatatgtagagttgaaatttataacttaagtatatgttatggaatttgttgacagctattttaaagtagttgggacaaaacaaaaatgtaggtaggtgctcacattaatttcaccttgtaaagcctaaaactataaatcttagtaacacatatgtgatatgtcagttgtactctgttgcattatttctctcactcaaacgtatatacaaacataaattatgtcgacagaaatg

SEQ ID NO: 36205 - DNA, 3000 bp, Unknown; identical to SEQ ID NO: 4409
  misc_feature (1)..( 3000): 2750-1469P.txt file - cDNA_ID_3093125; gDNA_ID_2926206; Annot_ID_202197

SEQ ID NO: 36206 - DNA, 3000 bp, Unknown; identical to SEQ ID NO: 4410
  misc_feature (1)..( 3000): 2750-1469P.txt file - cDNA_ID_3093131; gDNA_ID_1620704; Annot_ID_165198

SEQ ID NO: 36207 - DNA, 3000 bp, Unknown; identical to SEQ ID NO: 4410
  misc_feature (1)..( 3000): 2750-1469P.txt file - cDNA_ID_3093131; gDNA_ID_2926206; Annot_ID_202186

SEQ ID NO: 36208 - DNA, 3000 bp, Unknown; identical to SEQ ID NO: 27874
  misc_feature (1)..( 3000): 2750-1469P.txt file - cDNA_ID_3093168; gDNA_ID_1621108; Annot_ID_171661

SEQ ID NO: 36209 - DNA, 3000 bp, Unknown; identical to SEQ ID NO: 27874
  misc_feature (1)..( 3000): 2750-1469P.txt file - cDNA_ID_3093168; gDNA_ID_2926207; Annot_ID_202318

SEQ ID NO: 36210 - DNA, 3003 bp, Unknown; identical to SEQ ID NO: 18216
  misc_feature (1)..( 3003): 2750-1469P.txt file - cDNA_ID_3093172; gDNA_ID_2926207; Annot_ID_202315

SEQ ID NO: 36211 - DNA, 3 bp, Unknown
  misc_feature (1)..( 3): 2750-1469P.txt file - cDNA_ID_3093183; gDNA_ID_1621108; Annot_ID_171656
tct

SEQ ID NO: 36212 - DNA, 3003 bp, Unknown
  misc_feature (1)..( 3003): 2750-1469P.txt file - cDNA_ID_3093183; gDNA_ID_1620619; Annot_ID_162212
tgtcagcaaaaacgacatcgtttaagctcgacctgttcgtctcgatgtttacgctttgattagttactatttttctgcaattctgtttcttctctgtacatcaccaacaacatttaaattccaatggcgcattttaaatgtcaataataaatcgagatccgtaatttcgaagctacaagcaaaccttcttgtgcttctctaatcattgcgttttccttttaaagagtttctcaaagttttcccttttttttgggcataaaattgtttccttttcctcctatcagtgtgtctgaaaaaaattcaatgtctttatgttctgttcttttctgatctctctgaatctctctctatcgcgacagccatggccgaagacccttctttcctccccaaggtacctttcgttctgtgttctgtgagtggtgttgatctgattagctgatttgttctctagtttcaatcttagctcttagttatttttttgagttatttcatattcttatactctaaatctataaaacttgattctttcagcattataaaataaaaagattctgagattttcttgattttatatagacgaatctgtggtacccatttgacttaaacaaacaaacaagctaattaacacgaggacatataaatgtattgttttttttttttaatgcaggatggttttgtcttgaagcttcctaaaaagtcatcacttgtattgagaatggtcgttctcctctttgtaatggtctgtgctgtgtacatttgctccatttgtcttaagcaaataggagttagtccaaactatggtttcttgaacgttgaagtgtttgagaggccttgtcctgagcctaacatcgaaccgtgggacattccttttgtgcattaccctaaaccaaagacatataacaggtaaagagagatacaaaaagtttgagcctttatcatgttttgagtctaaaagcttgtattgattagtgcttttgtgggttttgaatgttttagggatgaatgttcttgccacccggttaggtactttgcgattctatcgatgcagagatctggtagtggctggtttgagactttgttaaacaatcatactaacataagctccaacggggagatattttctgtgaaagataggagggctaatgtttccaccattttcgagactcttgacaaagtctataatctagactggttgagtagtgcctctaagaacgagtgcacttccgctgttggcttcaagtggatgcttaatcaggtaaagtgattgttattcacggacactgtgacatatctttagtctttcttactcatatgttttcgactcgtctctgtttccatttgagtgcttgaacaaagagattgctatattccatccttatctgttggtcactgttgcttataactaactacttgtgaatttaaagtgataagatcttgttctgttttctagataagagcagcaacgttttcgttttacaaaagatgtgtgttgagaataggacaatttctcaataatgtgtttgcttttgctatatactttgtaaagttgataaacacgttgcagggattggtcttagagaataggacttcttttcttccctcagtgctcttcacttataagggagtttccgagtcaatgtcatttgaaactaacctgttctatttaggtagcttctttctggttgttgatgttcaaaaaagttgcctgaataaaagtttaggttgaaatagtctgtgatttgatgttggaggaacggaagatagctgatgttcccttcttatttgatccataaacctcggttctatgtagcagtaattgaactgataaatgatcacagttattttatctgatgatgaattattaacattgcagggtctaatgaaacatcatgaagaaatagtagaatacttcaaaacccgaggcgtctctgcgattttcctattcagaaaaaacctattgcgccgcatgatatcagtactcgcaaactcttatgacagagatgctaagctactaaacgggactcacaagtctcacacccattcggccaaagaagctgagatattagcaggttacaaaccaatgatcaacacaacacttttaataaatgagctgagacagattcaagaaatgactttgaaagctttgacttacttcaataccactcgacatatccttgtctactacgaagatgttgtcaagaacctcacggtaattattacatatttttttattgaactagttccagttactgattgtttattatcttatatgtgtttttgaatgaagcagagactagacgatgtacaggagtttctaaaggtaccaaaacgtaagttaaagagtaggcaagtgaagattcatggaggttcattgtcaaaacatgtacagaattgggaagaggtcatgaccacacttaaaggaaccaatttcgaaaatttcttacaccaagaattttaatttttttttgtatatatcagaccaaacaaacccttgtaggaaagttttgtttcacttgccttttttcttttttgctgtttgctgtagggtttggcattaattctcttaaatatgaagaagatttaaacaaaatttcgttgaaaattgtttcttcccctgaagagattttttatctaaatttcttaaaagcagaagaatcacaaaattatagtgaaaccgaaagaaaccagagcgatttagtttgatttattttgttcaattcaacatcaataacaccaaaccggtaaaaaccggaaggctaattcgagattgattgatttaaaccggacaaaaccactcaagccgcgtgaccgagtttccaacacattgcagattccagtcccaaaaagaaaagagagttaaaaatgcaaaaacggtgaaggggaagagaagcgaaattgggggattgggaatagcaacgttttgcaaatggtctcttctttgtagctgcaattgcaaagaacactgagagagagagagagtgtgtgtgtgacctttgagagatg

SEQ ID NO: 36213 - DNA, 3003 bp, Unknown; identical to SEQ ID NO: 36212
  misc_feature (1)..( 3003): 2750-1469P.txt file - cDNA_ID_3093183; gDNA_ID_2926207; Annot_ID_202312

SEQ ID NO: 36214 - DNA, 3000 bp, Unknown; identical to SEQ ID NO: 2973
  misc_feature (1)..( 3000): 2750-1469P.txt file - cDNA_ID_3093197; gDNA_ID_1620619; Annot_ID_162198

SEQ ID NO: 36215 - DNA, 3000 bp, Unknown; identical to SEQ ID NO: 2973
  misc_feature (1)..( 3000): 2750-1469P.txt file - cDNA_ID_3093197; gDNA_ID_2926207; Annot_ID_202300

SEQ ID NO: 36216 - DNA, 3003 bp, Unknown
  misc_feature (1)..( 3003): 2750-1469P.txt file - cDNA_ID_3093205; gDNA_ID_1620619; Annot_ID_162190
aagaaagctcatcggtacgctcttttagatataatttgcaactttataaacagcttaaactttactagggatcttcagtttctgtgtcgtatgcttaatcactggaagcctctgactgatggagctcgggtcgctccagactgctaagtcaactggataccctttctgcatatatatacatattcaagagttaaatcacgggaccttctgtattcactaacatagaaacattgcaatatgtcatcgtcttgtaacaaaaagattgtggttatttgcttgctgatgggaaagagacggatttgaataagaacaaagattggagatggtaacaatatctagtaatctgtcctaaaagtgaagaaaactaaccgcagatagagactgaaatgttgcttctctccaacagttttcacgaagaacagttggtgcctcatcttcgccaaacctataatgcattctcgtctctctcaatctcataagcacaccatcaactctcagctattaaaaagcaaatgagtggaagatgaaaatcgaaacgtcaaaacagtcaatgaagatcacatattggtgcgtaatgactttatttttctgactatggattttcctgattgactcacccaaaatcgcaagaggaggaaccatgagcttggcatgactctctgaaaaaacacaaacagacacgcacgcacaggtactgaactcattcaaattgatgttattgtgaaagaatgtgactggaaaaacagactcgaaaatttgatctttaccactttcacagtcagaagtgacactccattgtcagccagttcatcttcatacaaaactacctgaaggagtagagaataagtacatcaaagggcccagaaaaatgtgtgtttgagtttgtatcgataaggtgaccaacctcatcatagaagagaataggttctttaagtgagagagcagccaaatcaatctgatcttcacagttctcccactgaagagtagcttccccctttggattagcttttgcctcaacctgcttcacattaaaaaagcatacagcaatgagcatgaaagtcacacttgattgattatcgtgtgacagacagaaaaagagtgaaaatgagagcaaggcgaaccgtttctttgtctttctcaactacttcacttccacagtatggcgttgtaaacgtgtaatcataatctagtatcacctgctgagacggcttgctgcaagtagatcagagtggtatcagatacaactatcaagcaaagcttccctattgaaaagaataatatcttttgtgatatatttttcagtcaaatcctgaaacttacctcctgaatttccattgtgctgcagcaggaacttcaacaggtggaagcccttcctgcttccaaccagctagtgcgtcaaacgcattaaaatgaatcttagtgttgctacctaagtgtttaaggactaatgcattctcgccaaaaaccatttcaggtaagtgagatgtcttaagctttttttcccacctgtgttacaatcaaacatcacattcgtgaatctcagaagatgctatttacatatttgagataaacagagagctataccaggaaatgtgatgagcagagatcggaacaactaaaatcagtaaccacaaaaactaaaccaaagcaaatacgattttgattttttcacagaatagatcatacactccaccaaaaactaggaaaaactcgaaatcaaggacacaattctgatttccttcgatacgttccactaatacggtgtacacgagctcaaaaacccaaactacactactcagttcatcaaattaacgacgagcacaaatacaaaaccgtaaacacaaatatcacctacaagtaatcacagacaccaacaaattcatcatatatgatcgtatcttatgaggtgagagagatagagattaagtactcttcgacagcgagagaagtgagaatcgtgccgcggagggtttcgatctcccagtcatggatgcgtaaacctcgacgtccgtcgggaagaagctcagccccggaagacttcagaacatctttatcgaccaccgtctccatctgaatcgccggctaatattggcactaccttttctcctccgacgatgtcacttgtgtgaccaaccggactatccaaccaagacatttgacttttgatgggccggcctagtttcattttagtttgaaaaaagaaggtcaatttgattttggtccttaatgggctttaagtttataacgtaggcctttttcataataatgtaatatagctagaatttcatgcttttggaacacactataaaaaaggtcaatattcaatgtttcttttttcattattagtagatttggctaaataaacctctagaggacctagaccaggtttgaaacctgacatggtggaacaccactagcccacttgttctctcaagctcaataatatccatataaatcatcaaaagatgaatcaatcacaaaaattcacaactaatttgcacgatacacctcatgaacaaaatattcgtcgtcattgccactattaacgattcaaagtggtaaaaaaatcaggaagcagtgaaaggtgaaacctcatgaatctctagactctaatgcataaacatatttcattatatatcgtagtagaatactgagacacattgacatatataagtatcaaacagaaattgtataatggtatctttattttattaacacatgtgtgcgtcaatgtgaatcagatagaattagacacactatctttttaatatttaaagttggagccgttttggtcaaaactaatttatgtgcactactcatttatttataggttttttaaaaacacaaaaattgtgaaaaagcttctaagccaggtggcgggttttggtgcaaagtctttgatatgttcggagttgctgcttcgtagagaaaaaacttttctgataacatcggagtaaaaggaaagtaagtcggagtttaatcatcttaagatttgattgaatg

SEQ ID NO: 36217 - DNA, 3003 bp, Unknown; identical to SEQ ID NO: 36216
  misc_feature (1)..( 3003): 2750-1469P.txt file - cDNA_ID_3093205; gDNA_ID_2926207; Annot_ID_202293

SEQ ID NO: 36218 - DNA, 3003 bp, Unknown; identical to SEQ ID NO: 28647
  misc_feature (1)..( 3003): 2750-1469P.txt file - cDNA_ID_3093216; gDNA_ID_2926206; Annot_ID_202244

SEQ ID NO: 36219 - DNA, 733 bp, Unknown
  misc_feature (1)..( 733): 2750-1469P.txt file - cDNA_ID_3093216; gDNA_ID_2926207; Annot_ID_202276
ttctcttggtcgacaattttttgaaatggcgcgacgttgaacaaaaattatacgaacaaagaaagctatttccaggttactgcctttatatttggatgacttgttccaaggggaaactttttttttttttgtctgtcatctgatgatattagaactttcaaaggaaccaagatgattgcaacagctacactgtaatctataaccatcatgccattggacgcatcctagtaaatacataagaaagacactccctttattttggtctccgttcttcagccacaccttataatatcatccacaagataataagtggtgtctagcaaataacaaagcgaagctatatctatatttatttacttattgattgtcgtgaatctatctttaatggtgacatgccatagaattatcactattgtgtggttgtgcttgtaattgtttgtaaaaattttgattttatgaatcaaagattatcaacatctagactttaatagttaaggaaataataatatttaaaaaacgcgtacctaaatctaatgaaaagtcaaaattacggtcaacgccttacgagacgcgtctggttcttgaaagcaagttctgcgttatttcatcatcaatcaaagtcgccattttatttttatttaaagtctcacgtcacggaattatctctctgaattcatcatcttcatcattaccttctttttctcaatctcgattgttttcttccaaattcatg

SEQ ID NO: 36220 - DNA, 3003 bp, Unknown; identical to SEQ ID NO: 28647
  misc_feature (1)..( 3003): 2750-1469P.txt file - cDNA_ID_3093216; gDNA_ID_2926238; Annot_ID_203954

SEQ ID NO: 36221 - DNA, 3003 bp, Unknown
  misc_feature (1)..( 3003): 2750-1469P.txt file - cDNA_ID_3093245; gDNA_ID_2926208; Annot_ID_202411
gagacaaaatcagagtcggtttcctgctttttgattcctctttattaatcagcaaagatcgattccacttctcctctctctctctctctctgttctttaatttagagagaaaaaataagcattcttccttctctgttttcgagcgggaaattctggagatggctatacaagcgcagttgaattacaacgctccgaatgcgaatcaaatcggttttggtgggtccgagttttctttgatcaacaacaatggcgttatcggaatcggtaacgatcagtcttatcttgtcaataatctccagttgcagaaagatttcaaccaacatgctctgtttcatcatcagcatcatcaacaacaacagtctccttctcaaagctttttagctgctcagatggagaaacagaagcaagagatcgatcagttcatcaaaatacaggttcgttatttcgtaatccaaaccaatttttcatcgaaagtttcggtttttaagacgtgggtactgataaagattcaaccttttttgctttgttgataacagaacgagaggttgagatatgtgttgcaagaacagaggaagcgagaaatggagatgattttacggaaaatggagagtaaagctttgcttttgatgagtcagaaggaagaagaaatgtcgaaagcattgaacaagaacatggaactcgaagatctgttgagaaaaatggaaatggagaatcagacgtggcagagaatggctcgtgagaacgaagcaattgtgcaaacgcttaacacaacgctcgaacaggttcgcgagagagccgccacgtgttacgacgctggtgaggcagaggtggaggacgaagggtcgttttgcggcggagaaggagacgggaatagtttgccggcgaagaagatgaagatgagtagttgttgctgcaattgtgggtctaacggagtaacgagagttctgtttctgccgtgtaggcatctctgttgctgcatggattgcgaggaagggcttcttctttgtccgatctgtaatacccccaagaaaagcagaatcgaggccctcattttctagggaaaatcctttcttttctctcaccggaaaaatgcttgcctttgtgttccggtgaacggagagtttttactccgggtagatgacgtggcagggtaatttggtaaaaataggggaggaaaggaaagtgagaatagggaaaggttagaaatagtaaaaggttatctcaagaagtaaattctgattagggttttcattttccctttttgttttttggttctttttccattcaatggagaaaaaaaaggaacccagctggatttgatgaacataattcatattttccttctatctaatgaattttcggatataaagtttgaatgccattctttctatttcaatgataattaacttcttaggatttttaaacacattagtattaaatatcttaatatacattttcctaatgattatatgtataagattttcctatattaaacacttcctaataagcaaaaaactagaaacttttgaccgaaagaataataattctaaactaatatgaaatccaatttaaacatatcttttaaaaaatttcatttataaaaaaatcaattaaatcaaatttaaacatatgtcttttaatttacatagaaagcaaaacaaaaaaagttatattcttttgaacaaaaaaaagaaagcaatgaaaaagtaaaaaaaaagaaaggaagcattatatattaatgggtttgttttgatgtaggaagatggtgaaaagaggtggtagtagaggccgtagacacgcgtattggaggaagctgtaagtattattgggttgctcaacaatcaatatagtacagtgacatgagagcacaatagtaagtaataattccacattaaaaaaatagaaattgaaagagaatcagagtttggcctgccataggatttgagttctcgcactttcctaaacagaaacatgtttcattgaacacttgggcctttcttcttccttcattaaggattctcgatctctgtttcgacagatctgtgctacctaggttttctagatactccctaatacctataaataaacaataagtataaccttattatgtaattagatcgtactactatcaataaacaagattgtagaaaatagtgaaaaaggcaacgcataaagattaattaaatcttatttaagtttcatttgggacaatttaagattattgtcttgttcataggatttatttcatctattagtattacaaacttttttacgcaaacattattatctctatgtatagaatgatttaaacttttaacgtaaacacaaataaacagtcagtcctatgtgctatggatgaggtgattagcattgtagggtgtttcgtgtcatatagctctactagtagagattttgtgtgtcagtgtgtgtttatttacggctttgagtcttcaagacccaattagccttaagaccttagtgattttagactctttgttgaaaagctagaaattgcaaacccaaaccgcctaatgttgctataggttttgatttccgaagtgggtaattaattatgtggattacgtataaacacatggcccggcccattttaccccccaagtgctcggcccaaattgaaagtgggactcactggattgccaactaattttatttaacacgacgtgaagtttggaactaatacgtcaggtattaaaagtacataaacatcatcattactcaatttgctaatggacgaatagagacggaatcaacaaagtaacaaacgacttcaatattttttttatatgttactatgattcgacaaaggattttttttttgttatgaactgaagattattggatttttaatcacaagatgtcaatatcaaaattcaataccatgtctcgattagggatatcaatatcatgatattttaacaactttaactatgtaatttaattcgattatcgtttttgttttaaccttcgtttgatttgtagatg

SEQ ID NO: 36222 - DNA, 3003 bp, Unknown; identical to SEQ ID NO: 21151
  misc_feature (1)..( 3003): 2750-1469P.txt file - cDNA_ID_3093251; gDNA_ID_1620624; Annot_ID_162441

SEQ ID NO: 36223 - DNA, 3003 bp, Unknown; identical to SEQ ID NO: 21151
  misc_feature (1)..( 3003): 2750-1469P.txt file - cDNA_ID_3093251; gDNA_ID_2926208; Annot_ID_202388

SEQ ID NO: 36224 - DNA, 3000 bp, Unknown
  misc_feature (1)..( 3000): 2750-1469P.txt file - cDNA_ID_3093259; gDNA_ID_1620624; Annot_ID_47092
tttgccgagagtaagagagaagagattcacacattctatgggtctaatcattcatcagccaagtcatcacggttgccaagtcttaaagccgtctctcctgctgttacttctgcaactaatagtttattcctggaccacaagaacaatggagtaattgatactcagttcccaggacagagttctggtcaggctactggtacgttgacaatgttgtacttactgtgtcagatttgacacaatcttatgtttgctttctaagaagcttgcattgccaatccattacaatgtttccttaaagttaatttccgtttcaggtgatgtgcaagaagaaaaccttgtggcacacagtaacggtggtgtatcccacattaggaaagatgttaaaggagactggaaatttccaagtgatgggaagcatgtgggtcaccaaattgatgaaagcatgccccagttccctgctcgaaattttgagctacataatagtaatggacgttctccagaaactagtgatgcttacaaccgtttacttagagatggaaggtaataagttttatctggtttgaatcttggctttcctttccttcctcttctgtcactgctaattctttacttggatgttttagtaccaatgagaagttctagattgtttgactttgagagtgttaatatttattataacaggataaaggattgcataagcttgctcgaagatttggaccaaagggatctattggacatggacaaggtacgactgctttcctcagcaatatggatgaaacctttagtattgcttctattgggagtttgtcactgatctgtttttcccaatttcctcacatcagatttatcatgcgagtttctttaaagcctgcaagaagcaaagggctgtcaaggaagcatttcgctttaccaagttgattctaaatccaaccatgagcacattcaatatgttaatgtctgtctgcgcaagctcccaggacatagaaggtgatatttcatatttccagtattaaatcactggtcttattcattttttattctcctagatgttgaattgttacttatgtaggagctcggggagtgttacgtctggtacaagagagcggtatgactgctgattgcaaactttacacaactttaatatcaagttgtgctaaaagtggaaaagttgatgcaatgttcgaggtatagaaaccttcctgtgccggaaagttattttggacaaagatacatatttggctggttctttgaatctctgtcaaaatcatgatgcatgatagatttctggggaaaatcactgatactagtctaatgtttgtctgaatggttctgtatgttattcttggttcccgacagaggaaatgttattattgtctaatcaagcttcaaaatatgactgcactcaaactccatagctctaactctctttctctctgtgtggttatattgtcaggtgttccaccagatgtcaaattctggagtggaagccaatcttcacacatttggtgcacttattgatggctgtgctagagctggacaagtagctaaggcatttggtgcgtatggaattttaaggtctaaggtaagcatgccacaagtttggatgccctcctatcatgtgtttagatttcaaaaaataccctatttcttcatggctacagttttttttttttttaattctgcttatatgttcatttctgctttggaatctcaaatcaattattacattgatgacatgttcgatgcagtagaatgttaagccagaccgggttgtattcaatgccctcatctctgcatgtggtcaatcaggagctgtcgaccgtgcttttgatgtgttagctgaaatgaaggctgagacgcaccctatagaccctgatcatatctcgatcggtgcattgatgaaagcatgctgtaatgctggtcaggtgtgtggctttttttttcctgttacttcttctgttttttgctctttccatctgattgagaataagtttcttgcaggtcgaacgagcaaaagaagtttaccagatgatccataaatatggaatcaggggtactccagaagtgtataccattgctgtgaatagttgcagcaagtctggggactgggattttgcgtgtagcatatacaaggacatgaaagaaaaagacgtgacccctgacgaggtatgtctaacaaattcatttttgagttaaaataagacatatctgctaaaactcatgaaagtcgctgaggcaagtgtttaattacaagaatttatacatacatatttattgaatcttggttttcatcttatgcaggtgttttttagtgcattgattgatgttgcaggacatgcaaaaatgttagacgaggcttttggcattcttcaggatgcaaaatctcaagggatacgtcttggaactatatcatatagctcactgatgggagcttgttgtaacgtatgtgccttttattgctgtagcaggagtttttattattacttacaagttttgagctttctacgtcaaatcattagaatacgtggtggattaaggagaaacagaactttggtgaacatgtagcatcaaaagatccttatttgatcaaagtagtttttgagatgtagtttacattatcttagggttttggaatgttgcgattgcattgactttcttggattaaacttttatggagaaaatactgataatcttattttgttttttacttaggcgaaagattggaagaaagcactggagctctatgaaaaaatcaagtcaatcaaacttagaccaacaatttcaacaatgaatgcccttataactgctttgtgtaagacctccttcaatgctatctttatcttttcccctaaaacaaaagagaaagatgatatagtataagattgaaaagaaaatgtgttatggtattactacacttgcagtatcccatacaaaatatcattagtggtatgactccttaaattatcaacaggtgaaggtaatcaactgcccaaggctatg

SEQ ID NO: 36225 - DNA, 3000 bp, Unknown; identical to SEQ ID NO: 36224
  misc_feature (1)..( 3000): 2750-1469P.txt file - cDNA_ID_3093259; gDNA_ID_2926208; Annot_ID_141831

SEQ ID NO: 36226 - DNA, 3000 bp, Unknown; identical to SEQ ID NO: 3087
  misc_feature (1)..( 3000): 2750-1469P.txt file - cDNA_ID_3093259; gDNA_ID_2926208; Annot_ID_202386

SEQ ID NO: 36227 - DNA, 3003 bp, Unknown; identical to SEQ ID NO: 18198
  misc_feature (1)..( 3003): 2750-1469P.txt file - cDNA_ID_3093263; gDNA_ID_1621108; Annot_ID_171693

SEQ ID NO: 36228 - DNA, 3003 bp, Unknown; identical to SEQ ID NO: 18198
  misc_feature (1)..( 3003): 2750-1469P.txt file - cDNA_ID_3093263; gDNA_ID_2926208; Annot_ID_202374

SEQ ID NO: 36229 - DNA, 3003 bp, Unknown; identical to SEQ ID NO: 33851
  misc_feature (1)..( 3003): 2750-1469P.txt file - cDNA_ID_3093283; gDNA_ID_2926209; Annot_ID_141908

SEQ ID NO: 36230 - DNA, 3003 bp, Unknown; identical to SEQ ID NO: 33851
  misc_feature (1)..( 3003): 2750-1469P.txt file - cDNA_ID_3093283; gDNA_ID_2926209; Annot_ID_202491

SEQ ID NO: 36231 - DNA, 3 bp, Unknown
  misc_feature (1)..( 3): 2750-1469P.txt file - cDNA_ID_3093287; gDNA_ID_1620687; Annot_ID_164638
gaa

SEQ ID NO: 36232 - DNA, 3003 bp, Unknown; identical to SEQ ID NO: 31539
  misc_feature (1)..( 3003): 2750-1469P.txt file - cDNA_ID_3093287; gDNA_ID_2926209; Annot_ID_202480

SEQ ID NO: 36233 - DNA, 3000 bp, Unknown; identical to SEQ ID NO: 19323
  misc_feature (1)..( 3000): 2750-1469P.txt file - cDNA_ID_3093291; gDNA_ID_2926209; Annot_ID_202473

SEQ ID NO: 36234 - DNA, 3003 bp, Unknown
  misc_feature (1)..( 3003): 2750-1469P.txt file - cDNA_ID_3093299; gDNA_ID_1620655; Annot_ID_163622
aacaacgtttagatataaaaaaaacacggatcatttcaaatgggagtcgaggatctgaaggaagtcgacataaacaagttcttaattatataaaaaagtgggcgtcagcttcaagaaacaaagtatcttcccatgtggttcatggtcggctgctaccatatcttcgggacacagcagtgtctgataaggtatcccacacctgcacaagcatgcgtatacatatacgttggttatctcaaaaacagaatttgttatttcttgtaccatcaaaatccctacttacatttagcccctctgagccaccaacagcgagtaagaaggggcagtccgctgagaatgagaccgagaaaacttctccctgtttgatatatcaaagtttggaatggtaaacaaagaaaccagaaacaaacatatggcagcaaaagttcttattcatggctcttacagcatttggcttgtttgtagcaatccatgatggttggttgtttgaaagatcccaaagtttcacactttcatccgcagatcccgtagccaaaagctgcacagctcggatattaaacgactacactatgaatatggtaggagacaagagagaaagagagatatatgtgtgtacattgggggcatgtatgttgtatgatatggaggagacttcactatcatgagcatggataatgaaacttggtgataaatcagaagcacgtgtatcaaagcccttcacagttccatctttgagactcacctaagatggaagaagaaaagttaacgattcacatcagatatctgaatcattcagatgtttgtgttagaagagcaaagaaagcgtaatgcaccacaaaggagtgttcgctgtgaggatcccaagccaatttttcgactttggcctcggtagaccatttcaaacccgagtttgaagggtcccttccatctttctcaaacatatatatatatatatatatatatatataaaagactgatcaacataatgataaaaaaatttcatgtacaagactcaacacataaatggaacaaaacagtcaccaatactacagtacgatcacgagacccactgaggagtacttctggagtataattgttccatgcaaccgcgtgaacctgttagccaaacaacacacaataaataaaccatgagcatgcacagatgctagcttgaaagagcatggaaacagtttcaccttcataccttcttttcgtgatgctccatagtaaccttgcatttccccgtagccacatcccaaaccttcacttttttgtcttcactaccactagcaactatattcctattttcccagttaaaagttaaaaaaaaaagagtctggtaagcaagttctggagattattttcaatcatgaaaccagcgagcttaaacatatgtaccgaaactccttgttccaagcaagatcaattactggaccagtgtgggaatctgatgtctagagtgagagaaagacaactaacatgttacatttggaaaaacagaggagctaaataattttcaaaagttggttgtcacacctgcccggctatccgtcccagttgtacacaaggtagcacctcattcacctgaagcattatataatcagcttacaaatcattatctcatgatggataaaacaaaaggtaaacatcatcaaaaaaacagttaacaagtacatacaaggtcaagatcccatatctctatagaggactccattgtcccgatagctacaaagttccctgcgaacacgaaagcaaaacttgaggaaaatgatcataatctcatccacagctattcttggatacacacaaaccttttccccctcctttgagaggacaatcaagccatgctgtgcacaatggaagctcggatataatcatgtcattgcgaagataaatgttttcggattcctcatatacataaacctcgagatagttgacttcatgtttaatagcagcacagatgatcagtgaatcggttggcctaattgtcaagtcatcgtgatcctctgagtcatagtcaccctaggggatatcaagatcagtatttactattgagtctccacaattagtaagagaaaaattaatggtgtttcttacgtcagtatcctttaggtatggatccatgtcattgcttggataataaaggtgtccctgcccagagctaaacagttcaatctctgagtccaaacgcaagaatgaaggaaactgtacattagcatatatgcaatgaaaatatgcaaatatgtaggaaaaacagaagaaagttatataccatcatcctcttcatcatagttatccatgtcgagttctttcaagaacttgacaacttcatcagcatctgttgaagaagaagaagcaaccttgcttttcccaaaagattttgctacagacttggcatgagtaacttgagcattctgaatttcatcgtccatcttttcttccatacaaggagattcagcagcaacaggcatagcctttgatgcctcttttgggatccatgaaagtgcaactatcgtcattctgcaaaaatcaaaagagatttttacttaataagcgcagctcggttaggaaagcagagaacgccatgaagcaactatgaatgaatcagcaaactagagatgacttttagggtctgtaaacttggcaactaaagagcttacgatccaaaaaggtttcaactttaagaaagagagactccaattcatctatacaagactattgtatatacaatgcactatacaaatgaactatatactatgatagcttactatcagaaacgaaaaccacacaacaacgtaggactcgtcgaagaggagaatccaagaagcttgctctgcttgggaacgcgcggcacaaggaggcaaggaggataaacgagaaacgcttgaaagcaattaaaataagggtttcctcttaacttgccatttttctgttttaaagaaaaatcacttttttattctacagtgtttcattttcatatctcacacgtacgaacgaagaatg

SEQ ID NO: 36235 - DNA, 3000 bp, Unknown
  misc_feature (1)..( 3000): 2750-1469P.txt file - cDNA_ID_3093299; gDNA_ID_2926209; Annot_ID_202468
aacgtttagatataaaaaaaacacggatcatttcaaatgggagtcgaggatctgaaggaagtcgacataaacaagttcttaattatataaaaaagtgggcgtcagcttcaagaaacaaagtatcttcccatgtggttcatggtcggctgctaccatatcttcgggacacagcagtgtctgataaggtatcccacacctgcacaagcatgcgtatacatatacgttggttatctcaaaaacagaatttgttatttcttgtaccatcaaaatccctacttacatttagcccctctgagccaccaacagcgagtaagaaggggcagtccgctgagaatgagaccgagaaaacttctccctgtttgatatatcaaagtttggaatggtaaacaaagaaaccagaaacaaacatatggcagcaaaagttcttattcatggctcttacagcatttggcttgtttgtagcaatccatgatggttggttgtttgaaagatcccaaagtttcacactttcatccgcagatcccgtagccaaaagctgcacagctcggatattaaacgactacactatgaatatggtaggagacaagagagaaagagagatatatgtgtgtacattgggggcatgtatgttgtatgatatggaggagacttcactatcatgagcatggataatgaaacttggtgataaatcagaagcacgtgtatcaaagcccttcacagttccatctttgagactcacctaagatggaagaagaaaagttaacgattcacatcagatatctgaatcattcagatgtttgtgttagaagagcaaagaaagcgtaatgcaccacaaaggagtgttcgctgtgaggatcccaagccaatttttcgactttggcctcggtagaccatttcaaacccgagtttgaagggtcccttccatctttctcaaacatatatatatatatatatatatatatataaaagactgatcaacataatgataaaaaaatttcatgtacaagactcaacacataaatggaacaaaacagtcaccaatactacagtacgatcacgagacccactgaggagtacttctggagtataattgttccatgcaaccgcgtgaacctgttagccaaacaacacacaataaataaaccatgagcatgcacagatgctagcttgaaagagcatggaaacagtttcaccttcataccttcttttcgtgatgctccatagtaaccttgcatttccccgtagccacatcccaaaccttcacttttttgtcttcactaccactagcaactatattcctattttcccagttaaaagttaaaaaaaaaagagtctggtaagcaagttctggagattattttcaatcatgaaaccagcgagcttaaacatatgtaccgaaactccttgttccaagcaagatcaattactggaccagtgtgggaatctgatgtctagagtgagagaaagacaactaacatgttacatttggaaaaacagaggagctaaataattttcaaaagttggttgtcacacctgcccggctatccgtcccagttgtacacaaggtagcacctcattcacctgaagcattatataatcagcttacaaatcattatctcatgatggataaaacaaaaggtaaacatcatcaaaaaaacagttaacaagtacatacaaggtcaagatcccatatctctatagaggactccattgtcccgatagctacaaagttccctgcgaacacgaaagcaaaacttgaggaaaatgatcataatctcatccacagctattcttggatacacacaaaccttttccccctcctttgagaggacaatcaagccatgctgtgcacaatggaagctcggatataatcatgtcattgcgaagataaatgttttcggattcctcatatacataaacctcgagatagttgacttcatgtttaatagcagcacagatgatcagtgaatcggttggcctaattgtcaagtcatcgtgatcctctgagtcatagtcaccctaggggatatcaagatcagtatttactattgagtctccacaattagtaagagaaaaattaatggtgtttcttacgtcagtatcctttaggtatggatccatgtcattgcttggataataaaggtgtccctgcccagagctaaacagttcaatctctgagtccaaacgcaagaatgaaggaaactgtacattagcatatatgcaatgaaaatatgcaaatatgtaggaaaaacagaagaaagttatataccatcatcctcttcatcatagttatccatgtcgagttctttcaagaacttgacaacttcatcagcatctgttgaagaagaagaagcaaccttgcttttcccaaaagattttgctacagacttggcatgagtaacttgagcattctgaatttcatcgtccatcttttcttccatacaaggagattcagcagcaacaggcatagcctttgatgcctcttttgggatccatgaaagtgcaactatcgtcattctgcaaaaatcaaaagagatttttacttaataagcgcagctcggttaggaaagcagagaacgccatgaagcaactatgaatgaatcagcaaactagagatgacttttagggtctgtaaacttggcaactaaagagcttacgatccaaaaaggtttcaactttaagaaagagagactccaattcatctatacaagactattgtatatacaatgcactatacaaatgaactatatactatgatagcttactatcagaaacgaaaaccacacaacaacgtaggactcgtcgaagaggagaatccaagaagcttgctctgcttgggaacgcgcggcacaaggaggcaaggaggataaacgagaaacgcttgaaagcaattaaaataagggtttcctcttaacttgccatttttctgttttaaagaaaaatcacttttttattctacagtgtttcattttcatatctcacacgtacgaacgaagaatg

SEQ ID NO: 36236 - DNA, 3003 bp, Unknown
  misc_feature (1)..( 3003): 2750-1469P.txt file - cDNA_ID_3093303; gDNA_ID_2926209; Annot_ID_202466
tgcagcgtttcaatattttgacaaagatggaagcggtttcataacaattgatgagctacaacaagcgtgtgttgaacatggcatggctgatgttttccttgaagacatcatcaaagaagttgatcaaaacaatgtaagcttatatgatgatctgttccacattcctcgctaggctaatgtcgaggcatcagctgataaaaagtcttatcggttcttatgttggtctgaacaggatggaaagattgattatggtgagtttgtggagatgatgcaaaagggaaatgctggtgttggaagaaggacgatgagaaatagtctaaacattagcatgagagacgcgtagaggttgttttccccggtgtttaatatgttagtgcgatcgtgactgcgaaaatgttcttattcatggaatcaacaacctcaatgctcaccacctagaaggcgatgaaagaagaccaaaccggattcatacctgtggatggttcgagttttgtttaacgactgtgtgattaatcgtcaagtagttttggaggttttttctttacctctttgttgtttgttcattatggccattgttgaagttagtgagctttgttcatcatctgccattgttaaactttgttcacttgtatttgaaaaaaacaaaaatgtctttgtatgttgtgtgatttctaagcatttttactttgaaaatctatttcttcttttctagacgatcacgacccttcatccatatcggactacacaactcgatattgaataaatttatatgagaatagtaccaatggcctatgatgtggaagatgatgagctagcaagtctcaatcatgtaaatgaaagtgctttttctaagtaatctgtatttaaactcaaataaaaccaaaactcaaagctgttccaagcaaattattcattggccacaatctgtaatttggaacattatgcaccaaaaccatttttaatgtattttacatatacaggttttttggtacttctcctatacacatggcatattcatattaacaaaaaatatttattttggtgtcacttttcatattttattagtgtaaaataacctcttcttaagagtaacgtatggcaatttggtcagctttgttatttaaaaattatatgttaattagctaaaatacgatcatttgtacccaaattctcttaatttaaaactagtccgacttgaaagtaaaagtttagtttaaactataatcagaacaataaatatcaatacgccaccgacgatttgctgccaccgacaaatgttttgtcggccacacgcgtctcagttttatggaaccgaactctcgttaatactttgcttttttacataccatttttgttgaaaaccccacaaaatgggaaaataattcggtgaaatattttagatttttagttctacttgtatcatgaaattaagagttcttcgacatagattgttgttatcatcaattatcattatgatcattgtgtatatgaaactatacaacgaaattcagaatcataattagatagaagaatctcatgttgtttttcacattaaaaccaaaaaaaaaaaagaatctcatgttggcgcgtaaaagattaaaacgaaaataacggatttttctatataatttgcatggttattaaaatacaaaaatacaactgcacagccacaaactcgtaaccacaaataaaataaataaattgattaataataatctaggcaaattaattatagcaaaatacaacatcaagtttaaaaaaaaaaagacgaattatacattcattatactccattgcacaaaagtaaaaaaagaacagacaaatcacaaaatctcaaccttatatgaatcattttatcgttgacgcttgtatttgcaagaaagaggaagagaatcttctgaagaaggtcccatgaaattacggatctgagatcggagtttgaagaaaacgtgcattatacttcctctgttttgtgaaccaatcgatttagcttcgtctttgttaagctcaagatctctgatgaatataggttttcttgaaaggatccatgaccaaccccattcccaccattctttcacagagcttcctgcttgttctcccatggcggaaacagatttggatctcgggaatctagctgcgatcgctgctggttggtttgagaggttgagtgatagagaagagagacgacggcggatgagaccaggctcatcgtcggcggtggctgctgcattagggcgttgagaaacggggagggaagtgggtttacgaatctggagagtctccatcattgagctcataacttctttgttcttctttgtgttgagagagattgaagaagaagatgaatgtgaatgtgagagattgattagtgaacacagctctaacacaggctggggttttattccactttatttttgtggggtccatttacttttatgcccccagccaattacattcattttgttgttgctgtttgtttttgtattaaataatttgtattgttatgtttatttgttgatttgtatagttagttgttttgtgtatgaatgaatgcacctataatattggaaatataacaattttatttttagtgaatatagataaacattgttttcaggtagggttccatcacaagtcacaatacaaatttaattaaaaaaattctttgtaattttattttaaaggttattttcccagtacagaaatctgttgaaattgcattggctttgatttttttataataaaaatcagaaaaatgtagcagaatctgtccaatgtccatagccaagcaaatttatgttgacagaaaaaagaacaatcacatacaaaaatccaaaaaagaaaaaagatatcccagacgggcctaatcaggtattagactaaggcccaataaatttcaagcccaaaatcgaaattaagcactttattctttctttttttaatagctatcgagtgtgtatgttcggagaagagatcacagagatctgagagcttgaaacaatg

SEQ ID NO: 36237 - DNA, 3000 bp, Unknown; identical to SEQ ID NO: 28912
  misc_feature (1)..( 3000): 2750-1469P.txt file - cDNA_ID_3093311; gDNA_ID_2926209; Annot_ID_202455

SEQ ID NO: 36238 - DNA, 3000 bp, Unknown; identical to SEQ ID NO: 3911
  misc_feature (1)..( 3000): 2750-1469P.txt file - cDNA_ID_3093332; gDNA_ID_1620674; Annot_ID_48191

SEQ ID NO: 36239 - DNA, 3000 bp, Unknown; identical to SEQ ID NO: 3911
  misc_feature (1)..( 3000): 2750-1469P.txt file - cDNA_ID_3093332; gDNA_ID_1620687; Annot_ID_48492

SEQ ID NO: 36240 - DNA, 3000 bp, Unknown; identical to SEQ ID NO: 3911
  misc_feature (1)..( 3000): 2750-1469P.txt file - cDNA_ID_3093332; gDNA_ID_1620687; Annot_ID_164666

SEQ ID NO: 36241 - DNA, 3000 bp, Unknown; identical to SEQ ID NO: 3911
  misc_feature (1)..( 3000): 2750-1469P.txt file - cDNA_ID_3093332; gDNA_ID_1620674; Annot_ID_164184

SEQ ID NO: 36242 - DNA, 3000 bp, Unknown; identical to SEQ ID NO: 3911
  misc_feature (1)..( 3000): 2750-1469P.txt file - cDNA_ID_3093332; gDNA_ID_2926210; Annot_ID_141922

SEQ ID NO: 36243 - DNA, 3000 bp, Unknown; identical to SEQ ID NO: 3911
  misc_feature (1)..( 3000): 2750-1469P.txt file - cDNA_ID_3093332; gDNA_ID_2926210; Annot_ID_202533

SEQ ID NO: 36244 - DNA, 3000 bp, Unknown; identical to SEQ ID NO: 4483
  misc_feature (1)..( 3000): 2750-1469P.txt file - cDNA_ID_3093338; gDNA_ID_2926210; Annot_ID_202571

SEQ ID NO: 36245 - DNA, 3003 bp, Unknown
  misc_feature (1)..( 3003): 2750-1469P.txt file - cDNA_ID_3093345; gDNA_ID_1620708; Annot_ID_165374
ctcatgattcttgaagaagcaaaacacttttgcatcaacaacaacacaacacaacaaaatctaatattttcaaacctctatggtctgtttaatgcttatgtaccaaggcaatgatattgatatacaaacaacacaacgtccattagcctacttagaactttttttccccttctttctctctttagctgccgttttaactacggttttagcgagtgatgatggcttcatggcactcttggggttaagagcttgtctaatcttgaaaacagtccacgccgttccaaaagcatgccctgctgcgctaagcccttcgtttgtcgcttgtgctgtctttgctccatacctacaagtaacatccaaacattaactatctttttggcatggtatgagcacattctcttgtaaactttttcagttacttacttgtgatcgacgatttcagtagttacatctgaagttgttttcataacgtgtcttcctgctacttcgacagcatcacaaaccttgtctgtcacaaatgggtaaacaaatctttattagtttcaatcatcagaagcctaataaagatagataagagatatacgatatagtcaacttactgaatccatcaagtgttgcaagaaccatttctccaggaagaagcccaaagagtttctgcccagctttgctatttatcactgaactcgagaagaatccagaaactttaacaacaccagagagcacaccattcgccactttctctgtcatttttgtcatcttctttactctgttacatatataactcaaaacctcgataaaaagtttaaaacacaaatatcaaagataagcaaataaaggtcgtaccttttgagacgtttcaaagttccaggactaacttgtctctccttctctgctttggacaacttcttcttcatgaaatcatttccccacatgagtctatccattgtgagatccccacaccataagatccctttaatcaattgaccagaaccagcagcgatcagtttcgctgcaacgccactgtaatcctcaacattcggagccagagtcgtccaataagccgtacactgcttctccaccatctttttcctctttcccttcagctcctccggtgaagtctccttcgccgccgtcaaatccaaaacgttctcttctttctgtttctcctccgctgtgaaactactgtaatcagctaagatcttgtctagcttctcaagcatcggttcttgacctttcgaagccattgttaatccgtagttcaacatctcgttctctgtttcgttgactgaatgatccgatgactcggattctttaacgggtcggagcgagaagaagtaatgagactcatcgactttaacggcgggttcgtctttagtcaacggccattggatctcgtcaccgacgcgagcgaaaaccgcgacggtgatatctccttgaacaagacggagaatctcgagatcgccgcaagcgagctctacgctgtaggatttgtcaatgaggtggaccatcgcgccgtggattgtgagaatcacttcctccgtcgcgagaggaggcgctgaagctgagtcagaggcggtgggatcggggaagatattgttgacaagatcattgacattgattgaaggatagagattattattattagtagaagaggaggaggaagaggacttagggagaggagcaacggtggttgaagtgtcgacggttggataaagcttgggaggagttgcagagcattccattatcgccggtgatttaggaggaggaagacgaagggggaatgaagaagaacaagtgtttggttatttatatgaatttgaaaaagatttggggcagaaatagaaaaagtcagaagattagtgatggaagaaagcgaatctagtttgattaactgttaagtaaccttgctgtcggagtctcggagataggaagacgtgggcgttgcgtgtttcaagaggagcatactttttgactatgaaccgggccggtttaaccttttttttaactattttaggagattttcccgcgctttatccaaatattaaatttgtttatatccaaaatttctttttgttgagtgtatattgtacatttgtttattgttttgccaccttttttagtgtcacactaaacaagaattattcaagtaattaagatgtgtaattgactatgataatggtaatctgtattgactttgttttgccaaatgaaattctatttaacagtaggatcttacctaaaccatggaggaaaactttggtttttttttctattagaaaacataaaaggcaaaaaaaatgattaaaaggtataatcaattatgatgatgaaaattttttcttgtataaaaataagaataagatttaaagggatataacacttatactattttttgtataaaaatatatgtctactaaaaacataatattctgtcacatgttattttctattttgtttaagaagaaatcaattgcataatctcatatcactctatgaagtacaattatttgaaaattaaataatagagttttagatgtcaaaaaaaaaatcaatagagtttttagagtaattaaaactgtataaataagtaagattaagaaaatctatagattttaaaaaaaattgtgcaccaaatctaaagagtgaataagatttatttctaacatacagcttttatcccttgacaattgtcatttgacttttgagttatagcagttgtgttgtcatcttgtgtcacttttaatattaaattacaaaacaagtcctcaattttaaaataattaacatcagtgagatcagaatctaaatgttactgtactttacagttgacaatttaattttcactgtactttgtttgacccccaaaaagtactgtgttaaaaaggcaaaaaaaccaaactaaagttcgccgggaagcgaaatcgtcatcttccctgttttgctgtttagtctgcaagagaaatttcagattccggcggagaaagctataacgattcttcaatg

SEQ ID NO: 36246 - DNA, 3003 bp, Unknown
  misc_feature (1)..( 3003): 2750-1469P.txt file - cDNA_ID_3093345; gDNA_ID_2926210; Annot_ID_202561
tcatgattcttgaagaagcaaaacacttttgcatcaacaacaacacaacacaacaaaatctaatattttcaaacctctatggtctgtttaatgcttatgtaccaaggcaatgatattgatatacaaacaacacaacgtccattagcctacttagaactttttttccccttctttctctctttagctgccgttttaactacggttttagcgagtgatgatggcttcatggcactcttggggttaagagcttgtctaatcttgaaaacagtccacgccgttccaaaagcatgccctgctgcgctaagcccttcgtttgtcgcttgtgctgtctttgctccatacctacaagtaacatccaaacattaactatctttttggcatggtatgagcacattctcttgtaaactttttcagttacttacttgtgatcgacgatttcagtagttacatctgaagttgttttcataacgtgtcttcctgctacttcgacagcatcacaaaccttgtctgtcacaaatgggtaaacaaatctttattagtttcaatcatcagaagcctaataaagatagataagagatatacgatatagtcaacttactgaatccatcaagtgttgcaagaaccatttctccaggaagaagcccaaagagtttctgcccagctttgctatttatcactgaactcgagaagaatccagaaactttaacaacaccagagagcacaccattcgccactttctctgtcatttttgtcatcttctttactctgttacatatataactcaaaacctcgataaaaagtttaaaacacaaatatcaaagataagcaaataaaggtcgtaccttttgagacgtttcaaagttccaggactaacttgtctctccttctctgctttggacaacttcttcttcatgaaatcatttccccacatgagtctatccattgtgagatccccacaccataagatccctttaatcaattgaccagaaccagcagcgatcagtttcgctgcaacgccactgtaatcctcaacattcggagccagagtcgtccaataagccgtacactgcttctccaccatctttttcctctttcccttcagctcctccggtgaagtctccttcgccgccgtcaaatccaaaacgttctcttctttctgtttctcctccgctgtgaaactactgtaatcagctaagatcttgtctagcttctcaagcatcggttcttgacctttcgaagccattgttaatccgtagttcaacatctcgttctctgtttcgttgactgaatgatccgatgactcggattctttaacgggtcggagcgagaagaagtaatgagactcatcgactttaacggcgggttcgtctttagtcaacggccattggatctcgtcaccgacgcgagcgaaaaccgcgacggtgatatctccttgaacaagacggagaatctcgagatcgccgcaagcgagctctacgctgtaggatttgtcaatgaggtggaccatcgcgccgtggattgtgagaatcacttcctccgtcgcgagaggaggcgctgaagctgagtcagaggcggtgggatcggggaagatattgttgacaagatcattgacattgattgaaggatagagattattattattagtagaagaggaggaggaagaggacttagggagaggagcaacggtggttgaagtgtcgacggttggataaagcttgggaggagttgcagagcattccatttatcgccggtgatttaggaggaggaagacgaagggggaatgaagaagaacaagtgtttggttatttatatgaatttgaaaaagatttggggcagaaatagaaaaagtcagaagattagtgatggaagaaagcgaatctagtttgattaactgttaagtaaccttgctgtcggagtctcggagataggaagacgtgggcgttgcgtgtttcaagaggagcatactttttgactatgaaccgggccggtttaaccttttttttaactattttaggagattttcccgcgctttatccaaatattaaatttgtttatatccaaaatttctttttgttgagtgtatattgtacatttgtttattgttttgccaccttttttagtgtcacactaaacaagaattattcaagtaattaagatgtgtaattgactatgataatggtaatctgtattgactttgttttgccaaatgaaattctatttaacagtaggatcttacctaaaccatggaggaaaactttggtttttttttctattagaaaacataaaaggcaaaaaaaatgattaaaaggtataatcaattatgatgatgaaaattttttcttgtataaaaataagaataagatttaaagggatataacacttatactattttttgtataaaaatatatgtctactaaaaacataatattctgtcacatgttattttctattttgtttaagaagaaatcaattgcataatctcatatcactctatgaagtacaattatttgaaaattaaataatagagttttagatgtcaaaaaaaaaatcaatagagtttttagagtaattaaaactgtataaataagtaagattaagaaaatctatagattttaaaaaaaattgtgcaccaaatctaaagagtgaataagatttatttctaacatacagcttttatcccttgacaattgtcatttgacttttgagttatagcagttgtgttgtcatcttgtgtcacttttaatattaaattacaaaacaagtcctcaattttaaaataattaacatcagtgagatcagaatctaaatgttactgtactttacagttgacaatttaattttcactgtactttgtttgacccccaaaaagtactgtgttaaaaaggcaaaaaaaccaaactaaagttcgccgggaagcgaaatcgtcatcttccctgttttgctgtttagtctgcaagagaaatttcagattccggcggagaaagctataacgattcttcaatg

SEQ ID NO: 36247 - DNA, 3000 bp, Unknown; identical to SEQ ID NO: 20102
  misc_feature (1)..( 3000): 2750-1469P.txt file - cDNA_ID_3093347; gDNA_ID_1620708; Annot_ID_165364

SEQ ID NO: 36248 - DNA, 3000 bp, Unknown; identical to SEQ ID NO: 20102
  misc_feature (1)..( 3000): 2750-1469P.txt file - cDNA_ID_3093347; gDNA_ID_1620674; Annot_ID_164205

SEQ ID NO: 36249 - DNA, 3000 bp, Unknown; identical to SEQ ID NO: 20102
  misc_feature (1)..( 3000): 2750-1469P.txt file - cDNA_ID_3093347; gDNA_ID_2926210; Annot_ID_202552

SEQ ID NO: 36250 - DNA, 3000 bp, Unknown; identical to SEQ ID NO: 3925
  misc_feature (1)..( 3000): 2750-1469P.txt file - cDNA_ID_3093351; gDNA_ID_2926210; Annot_ID_202551

SEQ ID NO: 36251 - DNA, 3000 bp, Unknown; identical to SEQ ID NO: 3933
  misc_feature (1)..( 3000): 2750-1469P.txt file - cDNA_ID_3093359; gDNA_ID_2926210; Annot_ID_202538

SEQ ID NO: 36252 - DNA, 3003 bp, Unknown; identical to SEQ ID NO: 18672
  misc_feature (1)..( 3003): 2750-1469P.txt file - cDNA_ID_3093417; gDNA_ID_2926211; Annot_ID_202644

SEQ ID NO: 36253 - DNA, 3003 bp, Unknown
  misc_feature (1)..( 3003): 2750-1469P.txt file - cDNA_ID_3093431; gDNA_ID_1620618; Annot_ID_46964
gcctgagacagaactcattggaaaaactgataaaggacacagagtttcgtttgtcacgaagcctctgtttgataaagcgtgtcttcttgatggtgatgatctgaagaggaatcctggaattggggattttgttgaggttcagatagagaaatcaacgagggcatcgttgtttggggaagctctcgcgattagtaaaatgtccttgtttcacgatgttggtgtcgtcgatgctgttgttgcgtcttgtgcaagttaagttgaacttccgttttctttgtttcgaaagcctttatactttttcttctgtatactttcttcatagttaaaccaaataagttatttacagatgaattttattacttttttgaaaacacaaattgtaactgaaatggatagagaaacatttttgggcatacatgtattcctcccctggttcaacgacatgtttcttcgataaagttgacaaaaaaaaggtagagaaacagtgttgaaaatgtcagcgatgaacagaaagagagatcgtcgtcaatggcgatggttagtgatgatttgactatgacaagtcaataaacactatgctctatgcgatggtaattttatatatatctgttagaaagaaaaaaaaggttcatagctcgaggcatttattaaaaaaaaaaaaaaggtgtaacggcagaaagtagtataaattgaattatttcagtttattttgatggtaatataaatctataaattcaaacaatgttttgttaaatatgtttatacatatatgttaggcagaaagcattccaattaattagttgtggaccgaccttttaattaacatttgtactacctccgctttttatcagagacatatattcgattaattaatttggatattaagtctaaagtttaaagaagggaaagaaaaaaactccaatcacatgtcgtaggaatcacactccccaataataaagttggattagtatttctcaagaacaaagttggtattcacatatctaaatttgtaagatgaaatatacgagtacaaccagaacctaatataatatataggttttggattagtactgtatttctactgatatcgataatcatagtttaataatttagtgtcattggcaaataaaatatttaatacactgattatcataatttatgtgactgacatgtttattataataagatcatggattaatcagtgaacttatgttcatcattgtttccaagtctaaaagcagatctcgatatatatttatatttttcaatgcgcttgatgatatttaattcgacctatagtatcaatcttgggttttactttgtttttaatcatatgctttaccaataagcaatgtttgttcagggaagtggatcctattattgagatttaaacatattgaggcatgcacaagtataataattattcgttattggtgttaagtaactcattttatctgtcaatctataacgaaattatactcatttttttcttctataaatggataaaccaaaaatgaatagaaaataaattaataaataaaaattggttgggggtgagaagtagctatctaatatctaaaaatgagacgagacaaaacggcctaagcgtggcgcaatagccgctcccaatttctgtcccctcatttattcctcactattgttttgaaaattctgttttgttgcaatcttagaattaaatactattaacgtcgacttgaagctacaaattttggaaatttggatccgatgtttataactcatggatcaaataaatgaaagatgcatatgaatctgattttctaatgattttgaaatatgaataatcaaatatttatatatatacatctaataagtaggaaaataatttcataataataatcattgtctaaataatcagacctatataaaaatagaatattatcaagtaaatttatacaaaaatataccattaaaatactctgtatatagaaatatgtgaaactgtatttgatcactgtctatcgttagtcgttccaaaagatcctattgatttaggagtatttagtagtaaatacctttataatgatggacaacttaattaccgtgtgatacagtcaatgaataattaaataagagagcactaaaattaattatgtgtttctattaaaagagaatgttacaataataatcttatttaacaaaaaaaaaaaatattacaagagaatatcattttctattctaaaattagcttatgagaggaattagatatttaattccataaaaattgattttgtagctatatcaaatttcttataaagatggaatgggtaatcagaaaaatatcaatacattgatacatatgtcattatgctgttgaccaaaaaatgtcattatgcttattaagttgttgacatactaaaaattcaagattatactagtaattaactacttaagatgaatttaacgaaaataaaactattttagattttttagcttggtaattaagttgtttttagtgggtttttaagtttaagtatatatgcaatacatatttggattgtatatagtgagatacgggtaaaagtggattttatatcattaattcctctgtttctcccccattgaaaatgacatcaccatggctttaagctctacaaatacaaatatttattctctcactttctctgcctgcatggtttttgagaattgagaaaacccttttaaaattctctatcgatctcatcacaaattttgctatatccacaattcatgtgcttaggcatatagttattcccaagaaaccggtttaactgtttacgtatgcaacctccggcaagcgcaggacttttccggtcgccggaaaatctcccttggccttataattacatggattatttggtcgctggtttcttggttttgacggccggaatacttctccgtccatggctctggttacgtctacgaaactcgaaaacgaaagatggagatgaagaagaagataatgaggagaagaagaagggaatg

SEQ ID NO: 36254 - DNA, 183 bp, Unknown; identical to SEQ ID NO: 3698
  misc_feature (1)..( 183): 2750-1469P.txt file - cDNA_ID_3093431; gDNA_ID_1620656; Annot_ID_47871

SEQ ID NO: 36255 - DNA, 3003 bp, Unknown; identical to SEQ ID NO: 36253
  misc_feature (1)..( 3003): 2750-1469P.txt file - cDNA_ID_3093431; gDNA_ID_1620618; Annot_ID_162151

SEQ ID NO: 36256 - DNA, 3000 bp, Unknown
  misc_feature (1)..( 3000): 2750-1469P.txt file - cDNA_ID_3093431; gDNA_ID_2926211; Annot_ID_141979
tgagacagaactcattggaaaaactgataaaggacacagagtttcgtttgtcacgaagcctctgtttgataaagcgtgtcttcttgatggtgatgatctgaagaggaatcctggaattggggattttgttgaggttcagatagagaaatcaacgagggcatcgttgtttggggaagctctcgcgattagtaaaatgtccttgtttcacgatgttggtgtcgtcgatgctgttgttgcgtcttgtgcaagttaagttgaacttccgttttctttgtttcgaaagcctttatactttttcttctgtatactttcttcatagttaaaccaaataagttatttacagatgaattttattacttttttgaaaacacaaattgtaactgaaatggatagagaaacatttttgggcatacatgtattcctcccctggttcaacgacatgtttcttcgataaagttgacaaaaaaaaggtagagaaacagtgttgaaaatgtcagcgatgaacagaaagagagatcgtcgtcaatggcgatggttagtgatgatttgactatgacaagtcaataaacactatgctctatgcgatggtaattttatatatatctgttagaaagaaaaaaaaggttcatagctcgaggcatttattaaaaaaaaaaaaaaggtgtaacggcagaaagtagtataaattgaattatttcagtttattttgatggtaatataaatctataaattcaaacaatgttttgttaaatatgtttatacatatatgttaggcagaaagcattccaattaattagttgtggaccgaccttttaattaacatttgtactacctccgctttttatcagagacatatattcgattaattaatttggatattaagtctaaagtttaaagaagggaaagaaaaaaactccaatcacatgtcgtaggaatcacactccccaataataaagttggattagtatttctcaagaacaaagttggtattcacatatctaaatttgtaagatgaaatatacgagtacaaccagaacctaatataatatataggttttggattagtactgtatttctactgatatcgataatcatagtttaataatttagtgtcattggcaaataaaatatttaatacactgattatcataatttatgtgactgacatgtttattataataagatcatggattaatcagtgaacttatgttcatcattgtttccaagtctaaaagcagatctcgatatatatttatatttttcaatgcgcttgatgatatttaattcgacctatagtatcaatcttgggttttactttgtttttaatcatatgctttaccaataagcaatgtttgttcagggaagtggatcctattattgagatttaaacatattgaggcatgcacaagtataataattattcgttattggtgttaagtaactcattttatctgtcaatctataacgaaattatactcatttttttcttctataaatggataaaccaaaaatgaatagaaaataaattaataaataaaaattggttgggggtgagaagtagctatctaatatctaaaaatgagacgagacaaaacggcctaagcgtggcgcaatagccgctcccaatttctgtcccctcatttattcctcactattgttttgaaaattctgttttgttgcaatcttagaattaaatactattaacgtcgacttgaagctacaaattttggaaatttggatccgatgtttataactcatggatcaaataaatgaaagatgcatatgaatctgattttctaatgattttgaaatatgaataatcaaatatttatatatatacatctaataagtaggaaaataatttcataataataatcattgtctaaataatcagacctatataaaaatagaatattatcaagtaaatttatacaaaaatataccattaaaatactctgtatatagaaatatgtgaaactgtatttgatcactgtctatcgttagtcgttccaaaagatcctattgatttaggagtatttagtagtaaatacctttataatgatggacaacttaattaccgtgtgatacagtcaatgaataattaaataagagagcactaaaattaattatgtgtttctattaaaagagaatgttacaataataatcttatttaacaaaaaaaaaaaatattacaagagaatatcattttctattctaaaattagcttatgagaggaattagatatttaattccataaaaattgattttgtagctatatcaaatttcttataaagatggaatgggtaatcagaaaaatatcaatacattgatacatatgtcattatgctgttgaccaaaaaatgtcattatgcttattaagttgttgacatactaaaaattcaagattatactagtaattaactacttaagatgaatttaacgaaaataaaactattttagattttttagcttggtaattaagttgtttttagtgggtttttaagtttaagtatatatgcaatacatatttggattgtatatagtgagatacgggtaaaagtggattttatatcattaattcctctgtttctcccccattgaaaatgacatcaccatggctttaagctctacaaatacaaatatttattctctcactttctctgcctgcatggtttttgagaattgagaaaacccttttaaaattctctatcgatctcatcacaaattttgctatatccacaattcatgtgcttaggcatatagttattcccaagaaaccggtttaactgtttacgtatgcaacctccggcaagcgcaggacttttccggtcgccggaaaatctcccttggccttataattacatggattatttggtcgctggtttcttggttttgacggccggaatacttctccgtccatggctctggttacgtctacgaaactcgaaaacgaaagatggagatgaagaagaagataatgaggagaagaagaagggaatg

SEQ ID NO: 36257 - DNA, 3000 bp, Unknown; identical to SEQ ID NO: 36256
  misc_feature (1)..( 3000): 2750-1469P.txt file - cDNA_ID_3093431; gDNA_ID_2926211; Annot_ID_202623

SEQ ID NO: 36258 - DNA, 3003 bp, Unknown; identical to SEQ ID NO: 33690
  misc_feature (1)..( 3003): 2750-1469P.txt file - cDNA_ID_3093443; gDNA_ID_2926211; Annot_ID_202606

SEQ ID NO: 36259 - DNA, 3000 bp, Unknown
  misc_feature (1)..( 3000): 2750-1469P.txt file - cDNA_ID_3093488; gDNA_ID_1620618; Annot_ID_46927
ggctccgctaaaacacaatagagttacaaaccaatttaacattttttgaattttcttgcatagaaactctaaaaaacaaaaccagaagttcgcaagaacatattttttgcttccatgattgcaaaatgaggtatgtgaatagaccgatgagcatatgtcttgatcaacactatcaagtttcaaacaaagaaaaggtaataatacttatcatggtgtgacaaaaacataggagcatcgtttggttttttagcgtttgcaatcatgattagcgcgtcttaaaaactgacgaatgcgtcttattagatatggtttattaatgaaccaaaaaaataggtgcgtactgatatatcttaccggccctattgcaatttttaaaaaaagttagtatatagatcgttagcgttagttcttttgtgaagctacgtacgagatcatagtgaataaaaacatgcatgcaattgagaaaattgtagcaaatagaaagactcagcttgctctttcacgtcttattgggttacgttcctttcaatgaatagctagctaataagcattggtaagttaaaagaattgacctaatcacgtttaccaataaatgagattgcgacaccagtaaataatctgttcacaatttcactaataaacaaatagaagctagtgaccctaaaagtaaaagctttaataaagcatactcgaaatgtttttctcttttcctttttgggtcaacactgaagttgttttatgaaaaaacaattgggacacagcctctctccgtctcgcgcgtcgccatcattgttgaagccaaaaaggccatgcacatctacagaccaatgaatttcagaaatattttgcataattttaaatagaatactaaatatatgatatatggtgctagttttttttttcgttttaaaaaatgctgatattgtattttattgtctgataatatatatctatatatatacatgtaaattttttgtacttaatttaaataaaaactcactatatagtgtgcattcacataaaagatcatttctatatttataatagttaattgttggaattcgttggtttaaaaatccaatagaattccatggatccttctgtagtggattaataggcatgatatcttaaaacagctaagccttaatctttagttgtttaaaataacaattaaagattctcaattactcgattaagacactaatcaccaccacaatctttacgattaaaacattgaacggcaaaacacaacgtggacggtccaaaaatcactcacgtggagtaaaaattagataaactttccataaatataaaaacagtacaatatattgtctctctttgccactttcgaggtccaacctgtctctggttcctctactacatcacataacacgattagagctttaagcacatggttcgcaactaaacagatcttgtcattagctccttagtttaagtttataaatttccataaatagttttcgtaaacgtggcattgctaatttgctatgaacacaagattcgtcaccgatgacagctataaaagaggaggcttttctagattgctcttgggtttggtcctagattcgtggggtttgagtttttaacatattttcaaaagaaaattctcttaattagtcttaatttattgctctaagtttacaatattctttctattttggttcttgcagctttaagcgcgatcttgtattattttcatggtggtccaaactagtacctggcacaacatagaagcatatggtattatttaactaataatgtttttaatcaatcgaagtatacatacattaatttatcggttgatataaaattatatttccttttccagacattaaccaatcagataagatctacattagctctaactaaccacagtataataaataccaaatttttagcatgttcgattcaacattttaaagtacttcttctttaacattaatctaccagtagcgtttgaaatttcaattacttataaccaatagttgaaatttgacttttggtttaactattaactattattctccaaagatatgcttcgcttttcttctaattgtaacattatgattgataattttcatgcaactccttttctctagatcgtaggtaggaggatattaggttaatttgactacgctagagatttaaattagtacgctttcgaacaagtcaaaagacaccatcgggttagccactaagaaagcaatcatcatatacatcaattaattataatactacttatatacctgtactatatacactcatgcataaaaagtaaaaacgattctctctttatcaaatttagattctggatcgttaaaaagtagtaaaaaatgagaaaacttttacaagataaatttgatgagtcaccctcatcatattatagttagaggctaataatttataaataatgtcaaaacaattttctctatgtacatattattacggagcgattacatatatcattcacaactttagtcattttgttaaccctaatataatgtgatatcaaaacggaatattaataacgttatacattacaatttttgtaataaattttgattttaatcactaatcagttacttgttgccattatattgatcggggatcccttattgataggcccaatatgaatgagctcagttatattttgggttttttctcatagcataaatggcccaatgaaagcctattaagtgatcgaaggtcagacgttggactccttgtatgaaaccaacagactaggcccaaattatcaactcaaaattgaccgtaacatatacggcgccgtttttgtagacctgagtgtgataaagtgagctgttaaatcttcacttaaccccatttttaatcacgaaattagagtggtgattaaaaatacaactaaagttgtttcaagtgattgttttcatttatttaaattttaaattaatccaactttatcgttgacggaaaatttgggagagaatattctcgatg

SEQ ID NO: 36260 - DNA, 3000 bp, Unknown; identical to SEQ ID NO: 36259
  misc_feature (1)..( 3000): 2750-1469P.txt file - cDNA_ID_3093488; gDNA_ID_1620618; Annot_ID_162105

SEQ ID NO: 36261 - DNA, 3003 bp, Unknown
  misc_feature (1)..( 3003): 2750-1469P.txt file - cDNA_ID_3093488; gDNA_ID_2926212; Annot_ID_142016
accggctccgctaaaacacaatagagttacaaaccaatttaacattttttgaattttcttgcatagaaactctaaaaaacaaaaccagaagttcgcaagaacatattttttgcttccatgattgcaaaatgaggtatgtgaatagaccgatgagcatatgtcttgatcaacactatcaagtttcaaacaaagaaaaggtaataatacttatcatggtgtgacaaaaacataggagcatcgtttggttttttagcgtttgcaatcatgattagcgcgtcttaaaaactgacgaatgcgtcttattagatatggtttattaatgaaccaaaaaaataggtgcgtactgatatatcttaccggccctattgcaatttttaaaaaaagttagtatatagatcgttagcgttagttcttttgtgaagctacgtacgagatcatagtgaataaaaacatgcatgcaattgagaaaattgtagcaaatagaaagactcagcttgctctttcacgtcttattgggttacgttcctttcaatgaatagctagctaataagcattggtaagttaaaagaattgacctaatcacgtttaccaataaatgagattgcgacaccagtaaataatctgttcacaatttcactaataaacaaatagaagctagtgaccctaaaagtaaaagctttaataaagcatactcgaaatgtttttctcttttcctttttgggtcaacactgaagttgttttatgaaaaaacaattgggacacagcctctctccgtctcgcgcgtcgccatcattgttgaagccaaaaaggccatgcacatctacagaccaatgaatttcagaaatattttgcataattttaaatagaatactaaatatatgatatatggtgctagttttttttttcgttttaaaaaatgctgatattgtattttattgtctgataatatatatctatatatatacatgtaaattttttgtacttaatttaaataaaaactcactatatagtgtgcattcacataaaagatcatttctatatttataatagttaattgttggaattcgttggtttaaaaatccaatagaattccatggatccttctgtagtggattaataggcatgatatcttaaaacagctaagccttaatctttagttgtttaaaataacaattaaagattctcaattactcgattaagacactaatcaccaccacaatctttacgattaaaacattgaacggcaaaacacaacgtggacggtccaaaaatcactcacgtggagtaaaaattagataaactttccataaatataaaaacagtacaatatattgtctctctttgccactttcgaggtccaacctgtctctggttcctctactacatcacataacacgattagagctttaagcacatggttcgcaactaaacagatcttgtcattagctccttagtttaagtttataaatttccataaatagttttcgtaaacgtggcattgctaatttgctatgaacacaagattcgtcaccgatgacagctataaaagaggaggcttttctagattgctcttgggtttggtcctagattcgtggggtttgagtttttaacatattttcaaaagaaaattctcttaattagtcttaatttattgctctaagtttacaatattctttctattttggttcttgcagctttaagcgcgatcttgtattattttcatggtggtccaaactagtacctggcacaacatagaagcatatggtattatttaactaataatgtttttaatcaatcgaagtatacatacattaatttatcggttgatataaaattatatttccttttccagacattaaccaatcagataagatctacattagctctaactaaccacagtataataaataccaaatttttagcatgttcgattcaacattttaaagtacttcttctttaacattaatctaccagtagcgtttgaaatttcaattacttataaccaatagttgaaatttgacttttggtttaactattaactattattctccaaagatatgcttcgcttttcttctaattgtaacattatgattgataattttcatgcaactccttttctctagatcgtaggtaggaggatattaggttaatttgactacgctagagatttaaattagtacgctttcgaacaagtcaaaagacaccatcgggttagccactaagaaagcaatcatcatatacatcaattaattataatactacttatatacctgtactatatacactcatgcataaaaagtaaaaacgattctctctttatcaaatttagattctggatcgttaaaaagtagtaaaaaatgagaaaacttttacaagataaatttgatgagtcaccctcatcatattatagttagaggctaataatttataaataatgtcaaaacaattttctctatgtacatattattacggagcgattacatatatcattcacaactttagtcattttgttaaccctaatataatgtgatatcaaaacggaatattaataacgttatacattacaatttttgtaataaattttgattttaatcactaatcagttacttgttgccattatattgatcggggatcccttattgataggcccaatatgaatgagctcagttatattttgggttttttctcatagcataaatggcccaatgaaagcctattaagtgatcgaaggtcagacgttggactccttgtatgaaaccaacagactaggcccaaattatcaactcaaaattgaccgtaacatatacggcgccgtttttgtagacctgagtgtgataaagtgagctgttaaatcttcacttaaccccatttttaatcacgaaattagagtggtgattaaaaatacaactaaagttgtttcaagtgattgttttcatttatttaaattttaaattaatccaactttatcgttgacggaaaatttgggagagaatattctcgatg

SEQ ID NO: 36262 - DNA, 3003 bp, Unknown; identical to SEQ ID NO: 36261
  misc_feature (1)..( 3003): 2750-1469P.txt file - cDNA_ID_3093488; gDNA_ID_2926212; Annot_ID_202676

SEQ ID NO: 36263 - DNA, 3003 bp, Unknown; identical to SEQ ID NO: 17777
  misc_feature (1)..( 3003): 2750-1469P.txt file - cDNA_ID_3093499; gDNA_ID_2926212; Annot_ID_202717

SEQ ID NO: 36264 - DNA, 3003 bp, Unknown
  misc_feature (1)..( 3003): 2750-1469P.txt file - cDNA_ID_3093515; gDNA_ID_2926212; Annot_ID_202706
agttcccgtatgtgtcacccacgcggaagcagctcatggttgatctcatgtcgacggtggagaatcgcctccaatcacaactccttccctgtaacctccctccagatgtacgaaacttcaataaccctaacggttccgccgaagcatctcttcatatcagatccggcgacaaatcttctccggtacttgcgacgattaactctgtttttcagttatgagatcgaaattgactgttttgcatgcttgttttagagctcaattgcttgattttaagtagaaacagacttcaatttcgatgtaaatcataaccctaaaaaaaaactttttagagaatcttaaagtttgttttgttttgcagattgattttgttataggaagttggatacattgcaagatcccaacaggagtatctttgaatataacaagcatctctggattcttaaactcatcaacaaaagctccaaactttgtggtcgaactaatacagagcagttccaagtcgcttgtgctaatccttgacctcccacatcgtaaagatcttgttcttaacccggattatctcaaggagtattaccaagacactgctcttgattctcatcgacaatctctccttaagctacctgaagttaacccttatgtgtctccttctctctttgtccgttctgctttctctcctactgcttcgatgcttaagattgatgcggaggaagaggataagttggaggagatattgagagatcatgttagtccagctgctaaggaggttctcgaggtttggttggagcggtgtgtgaaggaagaagaagagaagattgtggttggggaagaagagagaatggagttggagagaagagataaaagctttagaaggaagagcatagaggacgatttggatttgcagtttccgagaatgtttggtgaagaagtttcctcccgtgttgtacacgctattaaagaagctttcggtgttctctagattatgtaactatatatatacatcagttaatgttcattgtactaaacatttactttcatcaatgtcacaagaacgcaagatgaccatcaaacaagtcctgttttctcctaagaacgtctttgttgtgaatcatctctgaatcggattccttctgattcattttaatactatgggattgtaaatttatcaatcaagtttctaatttatctgtaaaaaaaagtcttgaattattgtttttctcatggattttaaagtttttttttcactattttacatggatgttttgttaaatttctcgttctctagatcatgtcattttacattagcaaaaccaatataatatatagattaatattaacgaaggaacataaacgtgcaaaactaaaagttttaaagctaaatcgctttcaaaagagttagtaaccagacaaaaaagagacagatcatcggcaactaatctcgtcatcgcatgcatcataaaccaaattaactaaatcatccatttaatccatttgttcttatcagatcatccttttccttcctacacaagaaatggttagtgttttcttttctcgattgtctcttagtttagattctttatccgactactttgttcatcggttttgtttttctttttgtcttccggaaggcgaattacatgtcggaagcagcacagctcagaagaggtctaaagcctaaagggaagacttatgggttgaccaatcagaagagacgagagatcagagagatctttgatcttttcgacatagacggttcaggtaaactattaaaccgattctttatccgatttacaaagttattgctcacatgatttagtgcatcatttcatatgtaggtagcatcgatgctagcgagctcaacgttgctatgaggtcaacggcaatttttctttctttttcaaagttattttcttcaagttctagttaagtatagtactaaaaaattatcagctgattacaggtctcttggatttgagatgaataatcaggtttgtttgttttccttccttttttcttctttgttttaatttcatggtttagatcattgtacgtagaaccaacttgtatttagtttggtcatgttcattgttgcagcaaataaacgaattgatggcagaagtagataaaaaccaaagtggagccatagatttcgacgaatttgtgcatatgatgacaaccaaattcggagaacgagactccatagacgaattgtctaaggcgtttaagatcattgaccacgacaataatgtgaataaatctaaacctgtcattatttcattctttttaatattatctttttttgtttggattgatttcattgtgtttgactggacaacttttggaatgttttaggggaagatttcacctcgtgatataaagatgattgctaaagaattgggagaaaatttcacagataatgatatagaagaaatgatcgaagaagcagaccgtgacagtaagcaaaaacacataataattttgcgttttatctataatcggtccctcaagttcatgtttttgccttaacctacgcagaagatggagaagttaacttggaggagttcatgaagatgatgaagagaacctcttacggctaagtataaatcaattagtaatggttgtgaataatatttgttaatcaccttgatttataataataaagaagtttgatttgtggcttggtcgaataaaaatgtattgttgtataaaaataataatgtaattcacatccattattttgaatatgtaaatgtccttgaacgaacatttgttttatcattttttatgtataaatgtctttgaccaaaaaataaattatgtaaaatatgaaccagaaacgatgttgtttagatctgatacttacatataaccaaacgacgacgttgctagagtaataaatctcaaaagactggaaacgactgcgtataagtccgtgacctggttaccggagcgtaacttctccggcgaattggacaattttgagaaagacggattatggactccatg

SEQ ID NO: 36265 - DNA, 3000 bp, Unknown
  misc_feature (1)..( 3000): 2750-1469P.txt file - cDNA_ID_3093519; gDNA_ID_1621088; Annot_ID_170580
cagtttctctacactttcttcttctccaactctacctctgtttttatatatatactcttgagatatttattttcttaagaagaaaaaaagttaatagtttgttgtaaacaagtgtatttatgtaattaatgcacgtgattatataagtatatggatttatctaaaaaaatattttaccaatttataagaatttgctcttggccaagagaagaaatagcggtccataaaggaaacgtgggtggtgtgagaagattcttgttgttgcccactgtagaataacaaaaaaaaaatcattaattaaaaataaactatagcagtatagcactataaaaatataaaattaagtaatttgattactaaattgtactttgataagatagtgtttcttaaatatgatttttagctataaaagatagagatatattgttatcctgtaaatttaatgaatatttaaagatgtatatttataattgtttgatgtttttctattttattgatttgataaattagatttgtagttgtacacgtttgtttcaagatctaccatgtgattcgcgtttttcttagtagcgtaaaaatcggatggaagattctgtcaaatttttctttgagattctttttccctaccgtgtgaagtagtatttatatggctgtgaatattggttattatttattgatggggtgatggtgatgcgtgattttctcttgtagaaacagtgttgattttagaaaacaattgtgaaaatctcacccacacatgtcattaaaaaacatgtgcatgcatgctcaaaatctctactcattgctgaattatttgttgcaaataatatcttgattttggttttagtttagaccattttcaagtttagtgttctccggatatagaataaacttagattgatttcccttgagaatttgttatacgtaagataaggaatattcatgaaactcataaatgtttctaaatcttttggttgttagagaaactaataacatacgtacggatctcaatatatcacttctatggcaagaaatctgattaacaataattagcaaacctataacactttgtatgataagtccacatcggtaattatagcttgataaaaatttaaaagacatttaatcaaagtaccagaaatcccacaatgccttgtagttaaagactttgtgacttgccaacaatgttaatcgaactctcacagtttttatttattttaaatccatatatgcttaaagtagtcctacaatgatctgaattaaaacaaaaagaaatgacccaaatttatacttaattattacaaattttggtaagacaaaatggtgtgaactctgaagtggtcgccacaaaataaaataaaataaaaaacataaaatggcgtgtgaataaaagaaagactcgtagacgattgaaacatgtcaaatttattcacacggacgttatataaactttgacgtaaccaattgaaatttccaccataaggagtagtgaagtatggtcaatgattaaacgataacaacaattgcatggcgacttctctctctcttttattacttaaaaattgaccgtttaccattattagatgcaccaaccttcattttcattatgattagtatgagttgtttatatgcacaaaaacttataaatgaaggataattgacatatagtcatatagattaatagaggaatgtaaaaaagcacaataaatccttcttttttaactaacaattgtgaaaactatatataacatgtggaagtagttattagagtgaaatggttaaaactattttctaaaaatacgaacgttacttagaatttaaattttgatcaaaggcttcacgtggtaaacacaagagtaatacataaggttaattaagatgaatgttgaaagaaactaacaaatacaaaaagtaaaaataatatatagaataagttaagttattggagtgaatgacaaaataaaataaaaatacatgggacaaagataaacaaaattaatctagggggaaaagaagttacgaacagtaattagaatttcaaatcttcttctcagatttcacgtggtaaacaaaagaagaataaacaagacaaaattgaataatttaataaagaataaaaaatataaaattatattattatggaagtgaatgataaattaagaagttacgaacattaattcgaatttcaaattttattcaggcttcacgtggtaaagtaaacacaagatgaataatttaatgagataaaataaatgggaaaaaggtcatttaaatcaccatttcgccatttgtggtgatttaaatcataaactttgttttttgtgattaaaatgatgtgttgacttcaaataaaattaataactttagttgacaaagccaaattagtcacatccgtacccacaacttcttcatcgacactaactttttcgtgcaagtcatcaagatttccgtcttcatcttcaccgtcttcctcgccagcagcttcgtatccaatttcatcacaatctttatctcaatcttcgtattattcagttaacgttatgactaatttggctttgtcaacgaaagttactgattttatttgaagtcaacacctaattgatgattttaatcataaaaagcaaagttcatgataaatcaccacgaatggcaaagtggtgatttaaatgacatttttcctcctaaaataaacagaatagaatatatgatatacttacagctattgtttgctagtatccaaataaaaaatttgtacacaatcaatttatattcactatgtattttggttttaaaactccatataccttaagctatatgatttagttttatgtttgttaaaaagattcaagcccattatgagggctgagttgttatattataaggcctaattaaacccaattaagataagcccattgattcttatggcccattgattcttatgggcttaccggcaaaaaacatgaatgttcaacacgtgtcaccaatcgcggagctacaatg

SEQ ID NO: 36266 - DNA, 3003 bp, Unknown
  misc_feature (1)..( 3003): 2750-1469P.txt file - cDNA_ID_3093519; gDNA_ID_2926212; Annot_ID_202700
aaacagtttctctacactttcttcttctccaactctacctctgtttttatatatatactcttgagatatttattttcttaagaagaaaaaaagttaatagtttgttgtaaacaagtgtatttatgtaattaatgcacgtgattatataagtatatggatttatctaaaaaaatattttaccaatttataagaatttgctcttggccaagagaagaaatagcggtccataaaggaaacgtgggtggtgtgagaagattcttgttgttgcccactgtagaataacaaaaaaaaaatcattaattaaaaataaactatagcagtatagcactataaaaatataaaattaagtaatttgattactaaattgtactttgataagatagtgtttcttaaatatgatttttagctataaaagatagagatatattgttatcctgtaaatttaatgaatatttaaagatgtatatttataattgtttgatgtttttctattttattgatttgataaattagatttgtagttgtacacgtttgtttcaagatctaccatgtgattcgcgtttttcttagtagcgtaaaaatcggatggaagattctgtcaaatttttctttgagattctttttccctaccgtgtgaagtagtatttatatggctgtgaatattggttattatttattgatggggtgatggtgatgcgtgattttctcttgtagaaacagtgttgattttagaaaacaattgtgaaaatctcacccacacatgtcattaaaaaacatgtgcatgcatgctcaaaatctctactcattgctgaattatttgttgcaaataatatcttgattttggttttagtttagaccattttcaagtttagtgttctccggatatagaataaacttagattgatttcccttgagaatttgttatacgtaagataaggaatattcatgaaactcataaatgtttctaaatcttttggttgttagagaaactaataacatacgtacggatctcaatatatcacttctatggcaagaaatctgattaacaataattagcaaacctataacactttgtatgataagtccacatcggtaattatagcttgataaaaatttaaaagacatttaatcaaagtaccagaaatcccacaatgccttgtagttaaagactttgtgacttgccaacaatgttaatcgaactctcacagtttttatttattttaaatccatatatgcttaaagtagtcctacaatgatctgaattaaaacaaaaagaaatgacccaaatttatacttaattattacaaattttggtaagacaaaatggtgtgaactctgaagtggtcgccacaaaataaaataaaataaaaaacataaaatggcgtgtgaataaaagaaagactcgtagacgattgaaacatgtcaaatttattcacacggacgttatataaactttgacgtaaccaattgaaatttccaccataaggagtagtgaagtatggtcaatgattaaacgataacaacaattgcatggcgacttctctctctcttttattacttaaaaattgaccgtttaccattattagatgcaccaaccttcattttcattatgattagtatgagttgtttatatgcacaaaaacttataaatgaaggataattgacatatagtcatatagattaatagaggaatgtaaaaaagcacaataaatccttcttttttaactaacaattgtgaaaactatatataacatgtggaagtagttattagagtgaaatggttaaaactattttctaaaaatacgaacgttacttagaatttaaattttgatcaaaggcttcacgtggtaaacacaagagtaatacataaggttaattaagatgaatgttgaaagaaactaacaaatacaaaaagtaaaaataatatatagaataagttaagttattggagtgaatgacaaaataaaataaaaatacatgggacaaagataaacaaaattaatctagggggaaaagaagttacgaacagtaattagaatttcaaatcttcttctcagatttcacgtggtaaacaaaagaagaataaacaagacaaaattgaataatttaataaagaataaaaaatataaaattatattattatggaagtgaatgataaattaagaagttacgaacattaattcgaatttcaaattttattcaggcttcacgtggtaaagtaaacacaagatgaataatttaatgagataaaataaatgggaaaaaggtcatttaaatcaccatttcgccatttgtggtgatttaaatcataaactttgttttttgtgattaaaatgatgtgttgacttcaaataaaattaataactttagttgacaaagccaaattagtcacatccgtacccacaacttcttcatcgacactaactttttcgtgcaagtcatcaagatttccgtcttcatcttcaccgtcttcctcgccagcagcttcgtatccaatttcatcacaatctttatctcaatcttcgtattattcagttaacgttatgactaatttggctttgtcaacgaaagttactgattttatttgaagtcaacacctaattgatgattttaatcataaaaagcaaagttcatgataaatcaccacgaatggcaaagtggtgatttaaatgacatttttcctcctaaaataaacagaatagaatatatgatatacttacagctattgtttgctagtatccaaataaaaaatttgtacacaatcaatttatattcactatgtattttggttttaaaactccatataccttaagctatatgatttagttttatgtttgttaaaaagattcaagcccattatgagggctgagttgttatattataaggcctaattaaacccaattaagataagcccattgattcttatggcccattgattcttatgggcttaccggcaaaaaacatgaatgttcaacacgtgtcaccaatcgcggagctacaatg

SEQ ID NO: 36267 - DNA, 3003 bp, Unknown; identical to SEQ ID NO: 17754
  misc_feature (1)..( 3003): 2750-1469P.txt file - cDNA_ID_3093523; gDNA_ID_1621088; Annot_ID_170582

SEQ ID NO: 36268 - DNA, 3000 bp, Unknown; identical to SEQ ID NO: 17755
  misc_feature (1)..( 3000): 2750-1469P.txt file - cDNA_ID_3093523; gDNA_ID_2926212; Annot_ID_202699

SEQ ID NO: 36269 - DNA, 3000 bp, Unknown; identical to SEQ ID NO: 6292
  misc_feature (1)..( 3000): 2750-1469P.txt file - cDNA_ID_3093527; gDNA_ID_1621088; Annot_ID_170583

SEQ ID NO: 36270 - DNA, 3003 bp, Unknown; identical to SEQ ID NO: 16916
  misc_feature (1)..( 3003): 2750-1469P.txt file - cDNA_ID_3093527; gDNA_ID_2926212; Annot_ID_202698

SEQ ID NO: 36271 - DNA, 3003 bp, Unknown
  misc_feature (1)..( 3003): 2750-1469P.txt file - cDNA_ID_3093548; gDNA_ID_2926212; Annot_ID_202680
ttgttgttgtttaggtcccaacaaaagtgaacaaaaaagacaggccacatggtgggggtccattatcctccccgctcgtggaggtttcctttttatatcacctaactcaacacaacaaactcttaaactaatcacaataattaagaaaccaaactaaaattaaactctggtctatggaaagctaagtggatatcatattactacatccgcaaagatattaactctttacaaaccgattttttcctgtgatcaattaagatattatatatctctaagaacattatcatcatcacagtgataaattaagtataaacggagaatgtaacggtatgtttaaggttcgacccttttcgaccttcctcgaccatgcgagctccggctccaatgtactgtacaatgctgaagattttctctgttatggtccacaaggagactgatctgatcttttaccaccattttcaaactgatttcatgtttcgatttaccggtttttcagcatctggctttagtgccaccgagagtgagttcgagatcttctacgccaacttcatgaatcatttcgccttcccacggcttaactgttccattctcaaactcaaactctgcccctctcccattcattccggacattccccagtctgaccttttcatatcaatggccatagaagtttgctgaacaaggttaaatgttggtgaagtaggagcagtagattggaaattgatccaccttcctgaatcctcgatcgaatcctcctcggactcatcacattccggtattgtaggtggcgtttggtgaccagcacgacgagtctagatggagcagagatagcgaaaagcggatgtctcaaaacgtgtaaagacccgccatttggtaattgctctgaagtaagtttccgcttcgaaccacgagaagtaggagatgacaacggaggagtcacaggcgcactgttggatattctaagaggtggaaggttagcaggaatcgaagaagcgatgttgtgtaggaacggaagaagaaggtatgaagaagggtttccgtcatagcgagatggactcgggaaggatgatgagactggacttccgtggtacgaaggtgcaggacttggaaaagctgatgattgtggacttggttggattgatgaatttgtgctgaagtttgtaggagttcctgaaatatctgatgctggtggctaaacccctgtttccacaagaatcaaccattttagtgaccaagactagactaaatcaaaaccacatgatgatgcaaccgtcaaagtcaatgttttagtcaagactcaagaagcaaaagagatttccccaaaatttctcaataatcaaacttacatgatctatagaattagatgatccaaagcagaaaccatcgaattcataatcagttctaatcactacgaagaccagatttcaatccaaatagggggaaattgaaaattcaacccaatcgaacagtgaaaagtgaaatccaaatcgcaagatctcaagagtctctaacaattcgattgaattaaaacacaacaatcgcacagattcatcgattgaattatgagtaattgagagaagctcagattccgatctaaaaattgaaatccggaattttcagttttaccttgcgataagtggtgccatcgtcttcgacgatccaaccagcttcgagacagagagctttaagaacctcgttgttatcgcagtgcttaggaagcttatagttaccttgagctctaagaccagagtaaatcttagcagtgatggctcttcttcttctttctctcttcttattgttctctctctctttccacgtcggagtacgtcccgacgatgatcctcctcctcctcctcctcctccggcggccattgaagagctctgaatctctgaatctatctctaagtctttgtcagactggcgcacgagggatagagagagagagacgaagctttctttttagtttttttgtttttttttttgttttgggtgtgtgtgtgagtctgaagcggattggctgtaactttcattcattaagtataaataaattcaaatattcatttgtctccacacgtgtggtctgtttctacacgtgtgatcgatttatttctggaagtcagcttccacgtgtcctatttatgtaacgcacgagctgtggtcccttccccgttgtttccctcccgtccactgttcaatgaattcggatctttccttcttcttttttttcgtattttctttaatttaaatttgtatcttaaaaacaaaaacaaaaagcgttgtaagaattaagaatcagtataaaaactggatatactaacgattttgcattgttttttatgacgacatattgcacattttcatattgtaacgcattaatacaactcacaaaagctttacaccaaatttgatgttatttcttggagttgtcaaaacgtaattcgaaactgatctcattttcctaacataatttttaacctagtatagcatctaaagagttttaaaacggtcatattggattttagaaaatgacgaacaaattattccaaaaattacatgtttatttgattttcccaaattcattgatgtgaattaaaaaaatgtatccacataattagggaagctagctaaaacattttttagtaatattaaaaaggatggaaataagataacaaacagcaatttggctattgtggtcggagcacgtgcggttccagttaggcgtgagcaaagccaggaagcagaatcacccagctggactcatgccattattatttttttagccaactaattaatatagtactttaacaaatcctatttacatatttgttaaattttcacaaccttaaattaataaaagtaatttcataaaatgtcatttgttattattgcagacaatcaaatgaaacaaaaaaaagttcctaataattgtgtttattattttattttattaaaccacgtcttctcatttatagtcacaaatccaaaaactactaaagtttaaaatg

SEQ ID NO: 36272 - DNA, 3000 bp, Unknown; identical to SEQ ID NO: 3373
  misc_feature (1)..( 3000): 2750-1469P.txt file - cDNA_ID_3093580; gDNA_ID_1620643; Annot_ID_163112

SEQ ID NO: 36273 - DNA, 3000 bp, Unknown; identical to SEQ ID NO: 3373
  misc_feature (1)..( 3000): 2750-1469P.txt file - cDNA_ID_3093580; gDNA_ID_2926213; Annot_ID_202790

SEQ ID NO: 36274 - DNA, 3003 bp, Unknown; identical to SEQ ID NO: 17794
  misc_feature (1)..( 3003): 2750-1469P.txt file - cDNA_ID_3093606; gDNA_ID_1621088; Annot_ID_170541

SEQ ID NO: 36275 - DNA, 3000 bp, Unknown; identical to SEQ ID NO: 17795
  misc_feature (1)..( 3000): 2750-1469P.txt file - cDNA_ID_3093606; gDNA_ID_2926213; Annot_ID_202752

SEQ ID NO: 36276 - DNA, 3000 bp, Unknown; identical to SEQ ID NO: 3473
  misc_feature (1)..( 3000): 2750-1469P.txt file - cDNA_ID_3093650; gDNA_ID_2926214; Annot_ID_202845

SEQ ID NO: 36277 - DNA, 3003 bp, Unknown
  misc_feature (1)..( 3003): 2750-1469P.txt file - cDNA_ID_3093654; gDNA_ID_2926214; Annot_ID_202837
aacctattttcaagacgatttctgacaaataccaattttatggatgaaagttacatcacacacgtacgtatgcatctacttacatatatgtgaactttatgtatgaaaatatttgctggtttatttgagagacaaagatacgtttgatacataaatccattagccgatagacaaaaattcagccgctttgctgtcgtttcttcgaacgtcgccgttttcattcacattggattttgggttgtacttttttttattataaaaatgattaattttattagtgaccaccggtgattttctgtgtcctagtacttgtttcagtagagttctttttggtatttattagtgatacatattttttaaattttaatataacagcaagaaaaatcataaccaaatctgtactactttgaattgatatagtactgaaactataattcctattcaaatataatccttattttccaacgggaaattttcagagaaacagtaaaacctgggccatggtaaaaaaaaatacacattatactgtacatggagaatgatatgatatatgtaaagagtaaaacctagaaaatgtaatattaccaaatgatgatagtctagcaatcaaatcatcaagatatctacttaaagccagtgatcaatttctacttaaagcattgtcttcgttttaagtcagatttaacattaggaatataaacttgtcgaaattaatatgggattggacaaagcctattcataaagaaaactgaagagtgtgagagttgatgggattgaacatatggaaagagaggaagggaggtgacaaaacaaaagaagagaagatgtgtctttgtgtggggtttactaatttcacaaatcaagcaaagcaaacagtcttgattctctacactgttcttcctttgaatgactttactattgttttgttttcatttcatttattacttaataatgcaacccatatatagttgaataataatttttaaaaatacatatttggaatttggtggagactcaagtgtcaatcaaagtcggtacactgccaccatgctactgcttgaactaatcttctcaatgacaacgccgctccgaatattttatacaatatcttctatatgattcactatatatctaacttatatactacaatacacattatgctaatatccaaaggttcgatggaaaatactgttgtatttatacaagactcattccaaaaacatatcataacattctcagtagttgaattccaaaaattaaggtttgcatctagtctgcgatctgctaaagagtctcaaaatcgtagttaaaatgagtggtttgtcgtaaattcgtcttgattttggtattttgaagatggagcattttaccattgtgaatcctttaccaaaacttcttagttacgaatactttgggtttgtgataaaattttgtgcccttcaaatattttaatatatgtgtagttgtgtataccaacagatctcaaaacactattatttcgctataaaaagtttttgaaattgggaaaaatgcattttgtttggagactattaattgcacattgtatcacgatcgagaaaaccattaaaagcaaagtgacaaaatgaaaagactcaaaaagatgaaacaacaaagaaggaagaaaaatgagagttccaaagcaaaaatactttggccattccgatctctttttgtttctgcgtctcaccgtttacttaactgttttcgatcccttccctgttgcatcacttccttggaacaagtattaagaccaaagaaaataaaaaaggttaagagatttatgcatattggagagaaatcgttaaagcacagagttgacaaggtacagtcacgtggaagcattttggacatatcgataataatctctttctctgtttcaatgatcttattcgacgtcaattgctccatacctcattcattgttcttgtacgacacaggcctttgttcataataatatactatatggtatatggttaatatatactatcttatttcgtaactcaaaaagaaatatgattaatcgtcaaccatatcacctcgttacataaaagctagtggttttgctttttctaaaaaaccatcgtgttactatatcgtatctagtattttacaagatctatagtttaaatactgatattttctgaaaaacaaaaaaaattgaaatttgtatacttatatactatagaagaatgcagagaatagttattttcaaagagttgaggacaaaacttacggggacaaaaaagtggatcgaggagattccagtggtccaatattgattttggatagtggatatgaatatgcgcacgcaatagccaatacatctcaaaaagtcatttttttgtcaacatctcaaatgttttatgcaccaatattcaaatgaattctcgactctacgttgttagtggatacatctgcggttaattacaaatgtaacatacacgcataccatggaaatatatatatacacatatggaatttatggtataaccaccaccatgacatttgtaccattataccataaaaatcatgaaatcgtgtccaacaatatgatcattttagattggactatctacaattatatgtatgaaacgtacgtggtactcgatgagtacgtacatggtttaaagcttacacgggatgggaattttgaaaaagctatgatgggctcttaaattcgttgaaagcttacaatagatgaaacaaagaaaacctgcatacatcaagtacgtactataattacactaaggaatgaaaagaaatcatcaaggctttcatgaagtatccgtatcaataatttgtttaggttacagaaattgactacaactaatttttatttttacggttccatgcaaattaatccattttaaacaaatcctccattgttttgtataatgttggagattagtaggattagtcggataatatggcataaacataatatgatgctaaattctaaagaaacgatatgaataaataatg

SEQ ID NO: 36278 - DNA, 3003 bp, Unknown; identical to SEQ ID NO: 20253
  misc_feature (1)..( 3003): 2750-1469P.txt file - cDNA_ID_3093661; gDNA_ID_1620720; Annot_ID_165769

SEQ ID NO: 36279 - DNA, 3003 bp, Unknown; identical to SEQ ID NO: 20253
  misc_feature (1)..( 3003): 2750-1469P.txt file - cDNA_ID_3093661; gDNA_ID_2926214; Annot_ID_202830

SEQ ID NO: 36280 - DNA, 3000 bp, Unknown; identical to SEQ ID NO: 33630
  misc_feature (1)..( 3000): 2750-1469P.txt file - cDNA_ID_3093698; gDNA_ID_2926215; Annot_ID_202946

SEQ ID NO: 36281 - DNA, 3000 bp, Unknown; identical to SEQ ID NO: 19257
  misc_feature (1)..( 3000): 2750-1469P.txt file - cDNA_ID_3093728; gDNA_ID_1620652; Annot_ID_163495

SEQ ID NO: 36282 - DNA, 3000 bp, Unknown; identical to SEQ ID NO: 19257
  misc_feature (1)..( 3000): 2750-1469P.txt file - cDNA_ID_3093728; gDNA_ID_2926215; Annot_ID_202915

SEQ ID NO: 36283 - DNA, 3000 bp, Unknown; identical to SEQ ID NO: 3576
  misc_feature (1)..( 3000): 2750-1469P.txt file - cDNA_ID_3093733; gDNA_ID_2926215; Annot_ID_202913

SEQ ID NO: 36284 - DNA, 3003 bp, Unknown; identical to SEQ ID NO: 19267
  misc_feature (1)..( 3003): 2750-1469P.txt file - cDNA_ID_3093739; gDNA_ID_1620652; Annot_ID_163483

SEQ ID NO: 36285 - DNA, 3003 bp, Unknown; identical to SEQ ID NO: 19267
  misc_feature (1)..( 3003): 2750-1469P.txt file - cDNA_ID_3093739; gDNA_ID_2926215; Annot_ID_202904

SEQ ID NO: 36286 - DNA, 3000 bp, Unknown; identical to SEQ ID NO: 19167
  misc_feature (1)..( 3000): 2750-1469P.txt file - cDNA_ID_3093742; gDNA_ID_2926215; Annot_ID_202900

SEQ ID NO: 36287 - DNA, 3003 bp, Unknown
  misc_feature (1)..( 3003): 2750-1469P.txt file - cDNA_ID_3093746; gDNA_ID_1620648; Annot_ID_163356
tcgtatttgtaagaatttataaacaaaaagcaatgattaaaacatttacaatgacattatgacaatgaattcgaatgtacttttcaagtcactcgtaaaagaatataaattttttaagagataacataagacttttaaatcgataagtgaataacatagagtttgtcattttaatacaaatcactgccgataattagactgaaatggaagaaaatcagacggagacaatgatgtccttaaggggaagaagagtgaaatgaggtagcggtttgaggtggatgagaacatgtgtatacgatgatgactcttgtttgatgggacaaccgtgagtcgacttatccagcgtcccatctctatagacaaacacattttcgtcctcttccatgcgacgccactttctgttgttatctttggcacgttgcagcggcattcccctgcatcatcaacattcattatccatctagatgtaaatgagaaagtgggcatatatccacgtgtgtacctgacatggaagagatcagagacatcaagaaagaaggtcagtgcgtcaataaaagcctggtaggtggtgatatggaggccgtcgatgtggggatagggcagcctgggcctggtggtggtggtggtgggagaagagaggaaaacgtactctttgaatcctcctcctgctccggtggcctgagcgacgaagcccatggtggacatgattggttcaagctcctcgtgcgtcataacaggcttgaaggttctcgtgtgccacaaggccagtttcctcatactgcactcctccatcatctctctcgagatccacaagtgagtgagtgtagggattatggttacaattagtttggtttttctttcttttgcccttgttatttcatttattcaccaaactgccattcctttctgccacgtggccttcttcatcccatttgtgagcaattcaatttagtaatccatttgctgctctgtagtggaagtagttgttgttgttgttgcagaagaatccgaatccaattcaatgagtcttcttcgtcttctcctcgttgttgttgttcttcatctttctgcggtggccggcgacgacgccatcgtctccagattccaggagtacctccgaatcaacacggttcagcccaacccggaatactacaaagccgttgactttataatatctcaggcgaaaccactgtccctcgaatctcagacgatcgaatttgtaaaaggaaagccgcttctcctcctcaaatgggttggctccgacccaaccctacctgcctttctcctcaactcccacaccgatgtcgttcccttcgaggactccaagtggactcaccatccgctccaagctcacatggaccaccatggcgacatctatgccaggggttcccaggacatgaagtgcgtcgggatgcagtacctcgaggccatacgcaagctccaggcttctggcttcaagccactccgatccgtctatctctccttcgtccccgatgaagagattggcggccacgatggcgcagagaagtttgctgaatcccaattattcaagagcttgaacatcgcaatcgtgctcgacgaaggtaaacactcttctggatttgattcttgattataacagccaagcatcatcttatacaacaaagtgaatcaggcctgccatcgcctactgagagttacagagtattctatggagagaggagtccctggtggctggtgattaaggctaaaggtccacctggccacggtgccaagctctatgacaactctgccatggagaatctgctcaaaagcattgagagtattcgcagattcagagcttctcagttcgatcttctcaaagctggtgggatagctgaaggcgatgttgtctctgtgaacatggccttcctcaaggctggcacaccttctccaactgtaactacttttttcttcattcatattatgtatgattccaaagttgatgtctttatctgagaatctggctctttctttatcctcaagggtttcgtaatgaatctgcaaccatctgaggcagaagctggtttcgacattcgtgttccacccagcgttgatgctgaagcactcgaaagacgtttagtggaggaatgggctccagcagcacgaaacatgtcctttgaggtaatttcttggccacctgtatctctttctcaatgaatttgaagaaactgtccagtcttgaagccaagtagcaacacaaagtcccctttttttatgaacaaagtctactcgacaactttaactaattaagatgttagctggggcagttcaagcagaagcttacggggaagcaattccttacagcagcagatgattcaaatccttggtgggggctcttggaaaatgctgttaaggaagccggaggtaggaccagtaagcctgagattttccctgcatcaacggatgctcgctactttcgcaaggctggcgtgcctgcctttgggttctctcccatatcaaacaccccgagtctgcttcatgaccacaatgaggtacatacatgttgatactcactttgctcattgttggaggatcatcattcatgttgtttatctgtgttgcagtatttgggtaaagctgagtacttgaaaggcattgaggtgtatgtttcaatcatcaaagcttatgcatcatatgaaagcaaaagtggttcacgagatgagttatgagggtctcaacacagcccattcaagtcttcctttcgcaaatttgtacaatcaataagatctgaatccatcctgtgtttgttgtggtaaatcagagacatcttgttcttgttgtgagacagttggcattggcaaattgtattattcattcctgctttttcaatgcttcttcttttttctccttgtgtttcctcgtcgttgatgggccgtacaaattaggcccattagcatgatccagtacgaaatccatttaatgtaaacccaaccagtcctcctatctcttcgttcgtgactctctctgctctgctcccaaatg

SEQ ID NO: 36288 - DNA, 3003 bp, Unknown; identical to SEQ ID NO: 36287
  misc_feature (1)..( 3003): 2750-1469P.txt file - cDNA_ID_3093746; gDNA_ID_2926215; Annot_ID_202898

SEQ ID NO: 36289 - DNA, 3003 bp, Unknown
  misc_feature (1)..( 3003): 2750-1469P.txt file - cDNA_ID_3093752; gDNA_ID_2926215; Annot_ID_202897
ttgaatctagcaatgttatagtctctaattttgccttgctccagaataatgatctaactccgtctctcactactgtattttctcctgttttcaggtagtgacggatctctaccgaatccatcagcagtcattgttggcatcgcacgttactgttatactggagatactctcatcaatctcatcacatgcccaccagttaaattctgatttgatattgcagaagaaagtgaggagagcgtgctctatcctggagctctctgaacctcccatgcttcatttcgaaaatgacacgtttcagaactacctggacattcttcaagccatagtgacaaataatccaggagtgtcgttggagctaaacgtagagtctcagctgatgacagtgtgtatgcaaatactgaagatgtacctgaaatgcactttgtttcagggtgatgagttggaagaaaccaggcagcccaaaaactggattctacccatgggagcagcctcgaaggaagaagcagcagcgagatctcccctagtggttgcagtgctgaaggctctgagggaactgaaaagagattcattcaagaggtatgcaccgaatttcttcccattgttggtggagcttgtgcggagcgagcacagctcttcacaagtcccacaagtcttaagcacagtgttccatacatgtatgggtgcaatgatggatgaataatagggtggttataagtgggttttgacattcgagcacctgaaggatattgattaacaagcagacacaaatcactcttttcttcttttgttttttcttctcgacggagatgcgagatttacaggttttgtgctgttgattgatagtgctgatataaagtaattgattactgtttgtagaaactaagaaaagaatggtgagattaggagggtcattgcattttgtctgcaatgcctattttcttccttccagtcgtgatcaatgtgcataatatactctcacacagctaaatgcggtccaagtaaggattgtgaaggatatattatataaaaagaaaaaagaaaagagaagacaaagatgagccactcgtggaaagtcatttatacctccttgaaatgaagtgatgatatctaatgactccaaagtcataataaagtcaccgaaagtgaatcatgatttgaagaagataaaggagtcaggagtggaactgctttccttggtatgtcattccgaagcgccaatacggaggagccacatcataagaggcaatggttttgccgcctttgagagtaacctcgaaagagagagactgtccgatgagatcgagagaggagtgccagttctgtccccagtttctggccattgggatccaagccgttgtgtggcccttcactttcacaccaaccacttccccgtcgaggcccacattgcttatcaacacctggaaaaagtgggagctcccgctcaagctgaatctcaacccgcctctccgcccacacttgaccctcctatactgtataggtatcatctcagctctggtttctgcgatccctgtgaaggcggcatgagatagttccaagtgttcctttgggaagttgcaccaacctccgtaatcggaggagagtcccgaattgggaggacagaaatcggtggcggtgaccaccacggaggggctgccttgaagacaccaacggatgtggttcacgcaccgcacttctagacaagctccgcagctgcttcccctgttgaacagcttcccgctcaggcctgcgctgtagccggcaaagctgctctgcctcagatctccatacccacaagcgcctcctatcagaaccaattagtctagttagtcctgatgaaagaagaaagaaaaataggggggagagagagaaaagagaaccagtagcgacggaggaggagccgtctctgtctctagaaagcgtggctgtggctatcttccagtcatcttcggcagtggcttgaaagaggcggcagagaatgaagaagaggcacaatgcgagttgctgaagcccagaatccatgaacaagaagtgttgttgggatcctcacagtcagtcacaggtggcagacaaaagtgatgcgtttgagagagttttgggggttccttttgatcatcaggctccgcttttcaagacttgtggggatgcgacaaaagattgctctgacatgttttgactttgacagtccgtttcagaccaattataataaaaaaacaaaaaagggaacaactatacgttttccaggcccatctcattcggaggcccactttcaatacgacacagaatcaagacaagagacgcaagacgaacttcttgagcccttttgttaattcaatgggccctcactaagaagcccataataaaataaaataagttctattttcaaacattgtactattactttttgtaccggccgtgtttattcaattctcgtatttgtaagaatttataaacaaaaagcaatgattaaaacatttacaatgacattatgacaatgaattcgaatgtacttttcaagtcactcgtaaaagaatataaattttttaagagataacataagacttttaaatcgataagtgaataacatagagtttgtcattttaatacaaatcactgccgataattagactgaaatggaagaaaatcagacggagacaatgatgtccttaaggggaagaagagtgaaatgaggtagcggtttgaggtggatgagaacatgtgtatacgatgatgactcttgtttgatgggacaaccgtgagtcgacttatccagcgtcccatctctatagacaaacacattttcgtcctcttccatgcgacgccactttctgttgttatctttggcacgttgcagcggcattcccctgcatcatcaacattcattatccatctagatgtaaatgagaaagtgggcatatatccacgtgtgtacctgacatggaagagatcagagacatcaagaaagaaggtcagtgcgtcaataaaagcctggtaggtggtgatatg

SEQ ID NO: 36290 - DNA, 3003 bp, Unknown; identical to SEQ ID NO: 19170
  misc_feature (1)..( 3003): 2750-1469P.txt file - cDNA_ID_3093756; gDNA_ID_2926215; Annot_ID_202895

SEQ ID NO: 36291 - DNA, 3003 bp, Unknown; identical to SEQ ID NO: 33624
  misc_feature (1)..( 3003): 2750-1469P.txt file - cDNA_ID_3093767; gDNA_ID_2926215; Annot_ID_202891

SEQ ID NO: 36292 - DNA, 3000 bp, Unknown; identical to SEQ ID NO: 3493
  misc_feature (1)..( 3000): 2750-1469P.txt file - cDNA_ID_3093771; gDNA_ID_2926215; Annot_ID_202887

SEQ ID NO: 36293 - DNA, 3000 bp, Unknown; identical to SEQ ID NO: 31934
  misc_feature (1)..( 3000): 2750-1469P.txt file - cDNA_ID_3093780; gDNA_ID_2926216; Annot_ID_203021

SEQ ID NO: 36294 - DNA, 3003 bp, Unknown; identical to SEQ ID NO: 23836
  misc_feature (1)..( 3003): 2750-1469P.txt file - cDNA_ID_3093815; gDNA_ID_2926216; Annot_ID_203001

SEQ ID NO: 36295 - DNA, 3000 bp, Unknown; identical to SEQ ID NO: 4815
  misc_feature (1)..( 3000): 2750-1469P.txt file - cDNA_ID_3093846; gDNA_ID_1620734; Annot_ID_49445

SEQ ID NO: 36296 - DNA, 3000 bp, Unknown; identical to SEQ ID NO: 4815
  misc_feature (1)..( 3000): 2750-1469P.txt file - cDNA_ID_3093846; gDNA_ID_1620734; Annot_ID_166199

SEQ ID NO: 36297 - DNA, 3000 bp, Unknown; identical to SEQ ID NO: 4815
  misc_feature (1)..( 3000): 2750-1469P.txt file - cDNA_ID_3093846; gDNA_ID_2926217; Annot_ID_142247

SEQ ID NO: 36298 - DNA, 3000 bp, Unknown; identical to SEQ ID NO: 4815
  misc_feature (1)..( 3000): 2750-1469P.txt file - cDNA_ID_3093846; gDNA_ID_2926217; Annot_ID_203028

SEQ ID NO: 36299 - DNA, 3000 bp, Unknown; identical to SEQ ID NO: 4556
  misc_feature (1)..( 3000): 2750-1469P.txt file - cDNA_ID_3093877; gDNA_ID_2926217; Annot_ID_203082

SEQ ID NO: 36300 - DNA, 3003 bp, Unknown; identical to SEQ ID NO: 19091
  misc_feature (1)..( 3003): 2750-1469P.txt file - cDNA_ID_3093898; gDNA_ID_1620644; Annot_ID_163162

SEQ ID NO: 36301 - DNA, 3003 bp, Unknown; identical to SEQ ID NO: 19091
  misc_feature (1)..( 3003): 2750-1469P.txt file - cDNA_ID_3093898; gDNA_ID_2926217; Annot_ID_203060

SEQ ID NO: 36302 - DNA, 3000 bp, Unknown; identical to SEQ ID NO: 3388
  misc_feature (1)..( 3000): 2750-1469P.txt file - cDNA_ID_3093904; gDNA_ID_1620644; Annot_ID_163161

SEQ ID NO: 36303 - DNA, 3000 bp, Unknown; identical to SEQ ID NO: 3388
  misc_feature (1)..( 3000): 2750-1469P.txt file - cDNA_ID_3093904; gDNA_ID_2926217; Annot_ID_203059

SEQ ID NO: 36304 - DNA, 3003 bp, Unknown; identical to SEQ ID NO: 19095
  misc_feature (1)..( 3003): 2750-1469P.txt file - cDNA_ID_3093915; gDNA_ID_2926217; Annot_ID_203056

SEQ ID NO: 36305 - DNA, 3003 bp, Unknown; identical to SEQ ID NO: 19099
  misc_feature (1)..( 3003): 2750-1469P.txt file - cDNA_ID_3093930; gDNA_ID_1620644; Annot_ID_163149

SEQ ID NO: 36306 - DNA, 3003 bp, Unknown; identical to SEQ ID NO: 19099
  misc_feature (1)..( 3003): 2750-1469P.txt file - cDNA_ID_3093930; gDNA_ID_2926217; Annot_ID_203047

SEQ ID NO: 36307 - DNA, 3003 bp, Unknown; identical to SEQ ID NO: 16295
  misc_feature (1)..( 3003): 2750-1469P.txt file - cDNA_ID_3093937; gDNA_ID_2926217; Annot_ID_203043

SEQ ID NO: 36308 - DNA, 3003 bp, Unknown
  misc_feature (1)..( 3003): 2750-1469P.txt file - cDNA_ID_3093998; gDNA_ID_1971813; Annot_ID_175833
atagtcaccaaagataaggtacgatccctcgtgttatgattattgaaacgacaacgacaaataaccaatatataggacacataatatgatgctttctagtttatattcatatatatgttctctccttagtgtatgaatgaaaacatagctagataaaaatcaagcttcacctaattagtgtattcccccaaatttctcaattctcactaatggctttggtcagcttacttgaaatctccattgctttcttttgtttccttatctttcgaattttcctgatcagcaagaaaccacaccgttcatttctcacaaactggccgctcctgggcatgcttccgggtttacttaccgtgctccctcgagtttacgactttataaccgaggttcttgaggacggcaacttaaactatcttttcataggcccttttttagggggcatcgacatgttgttcaccgttgatcctgctaatatccatcacatcatgagctcaaactttgcgaattacccgaaaggaaccgaattcaagaagttatttgacgttttgggagatgggattttcaacgcggattcagatttgtggaaggatctaaggaaatcttctcaaagcatgatgaatcatcccgattttcaaaggttttcattagctacaagcttgagtaagctagagaaagggcttgtgccacttcttgatcatgttgctaaagagaaactcgtcgtggacttacaagatgttttccaaagattcacgtttgacactacctttgttttagcaaccgggtatgatccaggttgtctctcggtggaaatgccggaaatcgagtttgcaagagccttagacgatgcagaggaagctattttctacagacatttcaagccggaggtggtgtggaagatgcaaagattgattggggttggagctgagttgaagctgaaaagagctcacgcgattttcgatcgtgtttgctctaagtgcatagcttctaagagagatgagatcagccaagggattgattcttcttcttctaaagatttgttgatgtcttctataaatgttgacacgactaagtacaagttgttgaatccaagtgatgacagattccttagagacacaatcttgtccttcatgttagctggtagagacacaacaggctcagcgctcacttggttcttctggcttctatgcaataaccaagaagccatgaccaagattcgtcaagaaatcaacacaaatctatttccaagaaacaagaccgacgacggttctgtttcttatgattctgattcattcaatccccaagaggtaaagaagttggtgtatttacacggcgcggtttgtgaagccctcaggctctatccacctgttccctttaaccacaagtctcctgctaaacccgacgtgcttccaagcggccacaaagtcaaggccaattcgaggattttgttctgtctttactcattagggagaatgaaatcggtttggggagaagatgcaatggaatttaaaccggagagatggatttctgagagtggaagatcggtacatgagccatcttataagttcctatcgtttaacgccggtccaagaacttgtttggggaaagaagtggctatgacgcaaatgaagacagtggctgtgaaaatcatacaaaattatgacattaatgtcgttgaagggcacaagatcaagccagctccttcggttattctccacatgaagcatggtcttaaagtcactgtctctaaaagatgtttgtcttgaatgttttaactagaatgtagaaactgtggcagttgacgaagatgatttctatgatatgaagacatctcaaatcatgcatcctgaaatataatgttattgttaaacataatttctaaaatttaagtaaaatatataaatgttggtaagaaaattaataatttcctttttattttaagtgtagagttaaatcctatactcaagttataaatacaaattagccgaaaacattaatgttttttgcacgttatatagatcttctttttttttttttgtgtgtgtggaaatgcacgttatatagatcatgttgaaaattttagaaagataaaaaaagctgactaatgatatcttctctaaatgttcattattttttttttggtatgacagatgtaaaatcttcctttgttatggtatattttatgaatattagtcaatgcagttaaccaattcattgcagattccaaaaaaatctgaaaaacagtagaagaagagatatttgtctcaattaataccgttagatcaataaaattgattgtattctataaaagaataatcttaaacgagatatatacatacgatttagacaaatatattgaccttttaaagtaactaatcatatatatccataataaccagattgaaataaaaactattaatagtatttttttccttccaaacaacacaaattcttgcagatgttttagaggtatcatgattatttggaaatctttataaaagataagctaaccggatatgtattttgtggttatattctaaattcatgtaaatttatgttaaaacaaataactaattttgttttttttggtcaaaaaacaaataactaattaagtaagaatatatcacatgcattggtttccaacggatgattagactcattacaaagctacaataaccaaacaaacaaaagaggacataatcccaaagaaagtaagatcttattccatttataattattcagatgatagagacacatcaccgatacctcaaagacgcacacatgaaatgctttatatatccaacataagagtaaaatcaagtatcatcaacaagctgcaatttggtgtatctcaaaaggagaaaaatacattttaatttatctctaatggttttcataagcttgtttgaaatctccattgctttcttttgttttctcctcttccgacatttcttgatcaacaagaaaactcaccgcttgtgtcccacaaactggccattctttggtatg

SEQ ID NO: 36309 - DNA, 3003 bp, Unknown; identical to SEQ ID NO: 36308
  misc_feature (1)..( 3003): 2750-1469P.txt file - cDNA_ID_3093998; gDNA_ID_2926218; Annot_ID_203137

SEQ ID NO: 36310 - DNA, 3000 bp, Unknown; identical to SEQ ID NO: 19358
  misc_feature (1)..( 3000): 2750-1469P.txt file - cDNA_ID_3094003; gDNA_ID_1971813; Annot_ID_175830

SEQ ID NO: 36311 - DNA, 3000 bp, Unknown; identical to SEQ ID NO: 19358
  misc_feature (1)..( 3000): 2750-1469P.txt file - cDNA_ID_3094003; gDNA_ID_2926218; Annot_ID_203134

SEQ ID NO: 36312 - DNA, 3003 bp, Unknown
  misc_feature (1)..( 3003): 2750-1469P.txt file - cDNA_ID_3094008; gDNA_ID_1971813; Annot_ID_175829
gcacatattaattaattcctccctctaatgcattagtactttcattatccatttagaagactttttttgtttctgtttcaaaaaaccagttaactaaaatttaatttatatgcatggttaaacggtcaacaaaattattttacattcactcgtgttgattttctagtcggtaaaaactaaaaaggaacctcgtcaataatagtaacatcagttagtcgttacatcatgagtaagtatcgtaattggcgccgtacgtttgttgattaaccatacaaaaaaaaagaatgataattatgtgatttcttatacactaactaacattcagtaattaaatctttgtttataccacagcgatataaattatgtgaatgataattatgtgatttcttatgttttgaatccgtaataattaaccgaacatgtttgataatcatatttaacaaaatctttgtttataccacagcgatataaattaaatgattagggacggtactaatattacagttgaatatgtattatagtttgtaagagatttgatgtgcatgtgtttatttatagtttgtacattcattttcccttgagcgtaaggacagcgtcactatgacatcacatcggtccgtgagaatgatagtataacgaatatgcacgtaactcgtaatgacataggtttctttttaaaccgttgatgttcgtgtgtgtttagtatcatatgatttacatttggccaaaacgacggaaattggaatttactaaaaaaaattggggaaaaagttttttttttataagtaataatatgaatctgtttaatgggccttcagaagtggggaagagattggagtgtgggttggcgaatgtaatcatttcgtttttattatatttttactttgtttttgttcgtatatgtatttgaaattttacattattcgttttcacatccatcacctttcttcctctcgctttacacagtttcaataattacattttcagtgatctctgtacaattgctagtttcattttaagctttatgtctaactaggaccgtaactacgactagttttgtccggttcgttcggactgttcccatagatttgagtaaccggcaaatcggataggattgacaaacaaaacttgtggtttgtttacgaaatctagaatcagcaatttggtgcctagacgagttgaaaataaaacagtaataatgagttacttagaaccgtaaacaattcagtttagcgagtgaagctggaggaatgagtccattgtctacacatgtatctaatctaatactaaaaaacattgatctcgttgactttctaacaaacaaaaaaatcggaacacaacatacttataaagttgacttttgggttaatcacaactaatgaaacccaccaaaaagggaataatagaatctttatcgtacaaatttacaacacatatatatgtgcataacaatttataaagatttagtttaatataagggacagctaaggaaagaaaagaagatttttaaaaggaagaagatttttttctgaaagaaatataagagcggggcatgaagataaatgatgacaccatgcggggactctgcgtctgttaagagttataatttgacaacattatattgatccgaccatccaaagctgtcttgtaatgtccttcctctgtcactttatgcgacttctctcaatgcctctcttatttcttctctacgcctatctctttgcatatagttttcttttgtcatatccgtaaaaaaactacagattttttttcgggttcatttaagtccaaaaatatatgttgatggttctacataactctcattgttcctttttaagtaataagtaccttcttatatttatttatttgctctaattaagcaagtaacttcaaattaaaacattaggtaccaacaattatggtcttgagggtaaaaaagacgataaaaaagcctcagtgacaaatgtcaaaacatgggaaaagaattgtaacactaattaatccacaatcaagtgaaactgaaaaccctaacatggagggaccaacaaatgattggacataactgcaccaatcaaaaacttaattctgagtttattttggcataatttagtttggtgatacgcaactgggtcccattttaatatgacataatttagagtaaattatactatgaataaaaaaaagaccttaccataaaagtcattcgttattattacttatgtttgccattacaagtttatatccatttcctttattttcccggaaatattttttcaacgaccaagcagagaagttacgttacagtattatacaaagaacatttacacacattacccaaggaaggtgcaggctcgggccacttatgggccattgaacttgtacaaatatttatttagcccatgtaagaaatatcgaggagatattttgtttacataaagcccagaaagcccaattagtttggttgataattttttataacaaaaaaaacaaaattccacgtaagcacagaaacagacgactgacacggtggtccgtgaaggcgtgaaccgaatcatcgacggaggaaaccaccaatgatttctccatctcacgtcgtcaaatgtttcatcatcatcttcatcatctttcgtacgacttctttttttttttttttggtttttttttcccttcccaatcgaagtagcgatgccttcgcgatagctctctgcttcatctcgccactcatctcaacctcttgatttgggtctctcttgctcttgctcttgctcttgatctctctcaaggtattttattgttctctgaattgtttccctggatcgaatttgttctagggttttaaggttatagctcgaaatcgccgttgctcgctgttttagcatctccttttcacgttactgtgttcgttggtgctgtgattggtgttgagttgggttataagttcgttgttcttattgaattttgatatgtgcttttgcttgtgtatagtgttaagcaaataggatg

SEQ ID NO: 36313 - DNA, 3003 bp, Unknown; identical to SEQ ID NO: 36312
  misc_feature (1)..( 3003): 2750-1469P.txt file - cDNA_ID_3094008; gDNA_ID_2926218; Annot_ID_203133

SEQ ID NO: 36314 - DNA, 3000 bp, Unknown; identical to SEQ ID NO: 4554
  misc_feature (1)..( 3000): 2750-1469P.txt file - cDNA_ID_3094034; gDNA_ID_2926218; Annot_ID_203112

SEQ ID NO: 36315 - DNA, 3000 bp, Unknown; identical to SEQ ID NO: 8928
  misc_feature (1)..( 3000): 2750-1469P.txt file - cDNA_ID_3094084; gDNA_ID_1971923; Annot_ID_177220

SEQ ID NO: 36316 - DNA, 3000 bp, Unknown; identical to SEQ ID NO: 8928
  misc_feature (1)..( 3000): 2750-1469P.txt file - cDNA_ID_3094084; gDNA_ID_2926219; Annot_ID_203228

SEQ ID NO: 36317 - DNA, 3003 bp, Unknown
  misc_feature (1)..( 3003): 2750-1469P.txt file - cDNA_ID_3094100; gDNA_ID_1971923; Annot_ID_58554
atggtgttgagttgtttagtttagtttcaaaggcatcactctttgatgtaagctagactaagagtagtttgtttgaaaagagtatttgtattctgatgttgtgaggatttgttgcaaggtaatgtgtaaagactatcttcaagaaaggaaagaacttgtggaagctctgcataagggtagaagattcgccaatcttccaaagataacacaggtgatctctctctctctctctcagttcatacaaatctatataaatttaaagattatcattgtttgaatcctggtaacattgatatgcagccgacattgatgatatggggagaggaagatcaagtatttccagttgaattagctcatagattgaaaaggttttctaatttcattatcacatttttccataatcatcatcatttttttctaaatgaattgtcttgtgttgttgtttcagatatttaggggaagacagagcacaattggtgttactgaagaagacaggacatgcgattaatgaagagaaaccaaaagagatgtacaaacacatgaaatcttttctttgcactgacgcaatgattcctcagaatcaccagatcaatgctaagagactcatgttagcaaacttgatatccccagatcagcagatcaacaagtgatgttactgcagaaaaaaaaaaagtgttgttagaagacataatagttaatcatgtttttagcttgtccctaaatgtgatttgtatcgttattgttaaagaaagacattgcttctaatagttggaattaagaatacttttatttcaagaaagtaataatcatgttcttgaagcttgccttttctttctcataaggttgtcaattttatttaatctcgtagtactaaaatgatatatatatatatatatatatatatatattttttttttttctcatttgatcaaataaaattatattgggttgctttaattttcagccctatactagttgaaatctcaacattccaccctaaacttttaggcacttgaaaaaccaccataaataattttaatctcgataaaactacatgtactttcggatttgttcttaaaactacgcctccaattgaaccgaccagttaaccgataattatacatccggtttgacttacccataatttaaccgaaactaatccgattttgactctattttagcctaattttgacccacacaaaatgtaaataaattgtcttattaagaagtaaaagtatttttattaatttgtatttgtgataaataattaaaaatattaaattattacttaattttagcaaaacttaatatgacaaaatataccccaaattatattttgagctacattttgttataaaattttgataatatacaaacatatacattttccttttggcaatcatttatatttttttataaatctaaagctatgtcttttttaaaacaaaaatattcatttttcttgaaattataatatatgacctttgaactctatatgtaatgaaattcaaaatatatgccaaatttatttttatagatatccgtaaacaccacaatcaaagtatatattatggtatttataaatttatttttctttatagattcagttttctttttatatattcaagatgagttatatatgtatatatatatatatatatttatatgattatggtgtttttaaaaagaaaatgacctttgaattattaaatttagagtatataccaaatacatttatatatataacaccattgtatttataaaaagaatttgttgtctattttgttatattattttgcggtatattttgtttattaccaaaatatatactaaaattttattatgtaattttgtgtggtatattttgttattttattattttggtaaaattaattaatttatttttaattttttataaaaataaatgaaaataaataaaatgtatttttcttctaaagaatatattttttgggtataaattgggttaaaatagagtcaaaatcggattagttttggtcaaaccggatgtataattatcggttaactggttggttcaattggaggcgtagttttaagaacaaatccgaaagtacatgtagttttatcgagattaaaattgtttatggtagtttttcaagtggctaaaagtttcgggtggaatgttgagattctaactagtatagggctgaaaatttaggcaacccaattatatttactaaaactactaataaatgataacgaaaaacaaattgtaaaaatagtttaatttaaggggtaaagttggaagttggaagagtgagagagagttgtcttgtttcatttgagtctactcgttttttcttatctatcgcaaaactctcccgtcgtcaccattcgattacggtatgattcagcttctctcgtttgattagagtcatccatagaatgttgtttttctatgttttccttcacttgtcttgatttttcctctaactaaatggtggtggctccaagctcgtgtttttacagatttgttcactcgaatttctttagaaagctgtgatttttttctgcttagtggttgaagaattcgtatgtttcgtaatgggtgcaagcttatttgcggtgaaagtgaaactctttttgtctcgggtcgaaatttcatgaaaattgcatataatcttcttaggtttttaaagctttcaactttcggtttgtttgttgaagaaattgggttttgttagctgaatctagttcttgtgttgcagggagtgtaatggctcttatacaatttggaagttcatgtgttgctcaatgggggattcttcgtcctcggtttgctgttaaagctttttatccaagcagattggagtctcaccaagacaagtatgattgttgtagaattttaatgctttgttgagttatattattatctgaaaggctaattgaattgtttttcttttgttaaccttttgcagttgcatcagccaaataaattgtctgggagcttcaaggtcgagtatg

SEQ ID NO: 36318 - DNA, 3003 bp, Unknown
  misc_feature (1)..( 3003): 2750-1469P.txt file - cDNA_ID_3094100; gDNA_ID_1971923; Annot_ID_177207
catgtaagtcttcaccttttttcactcttactatttctatttttctatgatgattgatgcttgtgaaatgttaataatgggaatctttcatatataggctcgtttattgttgattagggatggaatgaaataatcttccgatgaagcttagtatcaataagtttagtccttttgtgtattctttcatttaaatgggcccaccacatacttttgagttttacagacaaaatgtttgtgtgattattatggtgttgagttgtttagtttagtttcaaaggcatcactctttgatgtaagctagactaagagtagtttgtttgaaaagagtatttgtattctgatgttgtgaggatttgttgcaaggtaatgtgtaaagactatcttcaagaaaggaaagaacttgtggaagctctgcataagggtagaagattcgccaatcttccaaagataacacaggtgatctctctctctctctctcagttcatacaaatctatataaatttaaagattatcattgtttgaatcctggtaacattgatatgcagccgacattgatgatatggggagaggaagatcaagtatttccagttgaattagctcatagattgaaaaggttttctaatttcattatcacatttttccataatcatcatcatttttttctaaatgaattgtcttgtgttgttgtttcagatatttaggggaagacagagcacaattggtgttactgaagaagacaggacatgcgattaatgaagagaaaccaaaagagatgtacaaacacatgaaatcttttctttgcactgacgcaatgattcctcagaatcaccagatcaatgctaagagactcatgttagcaaacttgatatccccagatcagcagatcaacaagtgatgttactgcagaaaaaaaaaaagtgttgttagaagacataatagttaatcatgtttttagcttgtccctaaatgtgatttgtatcgttattgttaaagaaagacattgcttctaatagttggaattaagaatacttttatttcaagaaagtaataatcatgttcttgaagcttgccttttctttctcataaggttgtcaattttatttaatctcgtagtactaaaatgatatatatatatatatatatatatatatattttttttttttctcatttgatcaaataaaattatattgggttgctttaattttcagccctatactagttgaaatctcaacattccaccctaaacttttaggcacttgaaaaaccaccataaataattttaatctcgataaaactacatgtactttcggatttgttcttaaaactacgcctccaattgaaccgaccagttaaccgataattatacatccggtttgacttacccataatttaaccgaaactaatccgattttgactctattttagcctaattttgacccacacaaaatgtaaataaattgtcttattaagaagtaaaagtatttttattaatttgtatttgtgataaataattaaaaatattaaattattacttaattttagcaaaacttaatatgacaaaatataccccaaattatattttgagctacattttgttataaaattttgataatatacaaacatatacattttccttttggcaatcatttatatttttttataaatctaaagctatgtcttttttaaaacaaaaatattcatttttcttgaaattataatatatgacctttgaactctatatgtaatgaaattcaaaatatatgccaaatttatttttatagatatccgtaaacaccacaatcaaagtatatattatggtatttataaatttatttttctttatagattcagttttctttttatatattcaagatgagttatatatgtatatatatatatatatatttatatgattatggtgtttttaaaaagaaaatgacctttgaattattaaatttagagtatataccaaatacatttatatatataacaccattgtatttataaaaagaatttgttgtctattttgttatattattttgcggtatattttgtttattaccaaaatatatactaaaattttattatgtaattttgtgtggtatattttgttattttattattttggtaaaattaattaatttatttttaattttttataaaaataaatgaaaataaataaaatgtatttttcttctaaagaatatattttttgggtataaattgggttaaaatagagtcaaaatcggattagttttggtcaaaccggatgtataattatcggttaactggttggttcaattggaggcgtagttttaagaacaaatccgaaagtacatgtagttttatcgagattaaaattgtttatggtagtttttcaagtggctaaaagtttcgggtggaatgttgagattctaactagtatagggctgaaaatttaggcaacccaattatatttactaaaactactaataaatgataacgaaaaacaaattgtaaaaatagtttaatttaaggggtaaagttggaagttggaagagtgagagagagttgtcttgtttcatttgagtctactcgttttttcttatctatcgcaaaactctcccgtcgtcaccattcgattacggtatgattcagcttctctcgtttgattagagtcatccatagaatgttgtttttctatgttttccttcacttgtcttgatttttcctctaactaaatggtggtggctccaagctcgtgtttttacagatttgttcactcgaatttctttagaaagctgtgatttttttctgcttagtggttgaagaattcgtatgtttcgtaatgggtgcaagcttatttgcggtgaaagtgaaactctttttgtctcgggtcgaaatttcatgaaaattgcatataatcttcttaggtttttaaagctttcaactttcggtttgtttgttgaagaaattgggttttgttagctgaatctagttcttgtgttgcagggagtgtaatg

SEQ ID NO: 36319 - DNA, 3003 bp, Unknown; identical to SEQ ID NO: 36317
  misc_feature (1)..( 3003): 2750-1469P.txt file - cDNA_ID_3094100; gDNA_ID_2926219; Annot_ID_142366

SEQ ID NO: 36320 - DNA, 3003 bp, Unknown; identical to SEQ ID NO: 36318
  misc_feature (1)..( 3003): 2750-1469P.txt file - cDNA_ID_3094100; gDNA_ID_2926219; Annot_ID_203217

SEQ ID NO: 36321 - DNA, 3003 bp, Unknown
  misc_feature (1)..( 3003): 2750-1469P.txt file - cDNA_ID_3094105; gDNA_ID_1971923; Annot_ID_177206
tttgtttttactgttaatataaagctctgtttcggttttctggtgaccaacaaacataaaatggtttgttatttaattacaaaaaggcccattagagaaatattgcaatgttgcgtcgtctcttgaaacccaatcttgttgttactctacgcaaactctcttcttcttccgcaagctacgtcgatcgtcatattagtgtgattctctgcgatcagagcttgagcttagagtctctgcgcaaacacaacgctcttatcatcaccggaggactctcggaaaacatcttcgtcgcatcgaagctaatttcatcttacgcttcttacgggaaacccaatttgtcttccagagtcttccatttggttactcgaagagatatctttctttggaattctattatcaaagcacatttctccaatggggattatgctcgatccttgtgtttcttcttctcaatgctcttgtctggccaatcccctgatcatttcactgctcccatggttgtttctgcttgtgcggagcttttgtggtttcatgttgggactttcgttcacgggcttgttttgaaacatggaggttttgatagaaacactgctgtgggagcttcctttgtgtatttctactcaaagtgtgggtttttacaagatgcgtgtcttgtgttcgacgaaatgcctgacagagatgttgttgcttggactgccattatatctgggcatgtgcagaacggcgagagcgagggaggtttgggttatctttgcaagatgcatagtgctggttctgatgttgataagccgaatcccagaacattggaatgcggattccaagcttgttctaatctgggagctttgaaagaaggaagatgtcttcatggatttgcggtgaaaaatggtttagcttcttccaagtttgtccagtcttccatgttttcattctattcgaaatctgggaatccatccgaggcttatctttctttccgtgaacttggggatgaagatatgttttcatggacttcgattatagcgtcactggcgagatcaggtgacatggaggaaagttttgatatgttctgggaaatgcagaacaagggaatgcacccagatggggttgtcattagctgtttgattaatgaactaggtaagatgatgcttgtccctcagggtaaagcctttcacgggttcgtcataagacattgtttctctttagacagtacagtttgcaattccttgttatcgatgtactgcaaattcgagcttctgtctgtggctgagaagcttttctgtaggataagcgaagaaggaaacaaagaagcttggaatacaatgcttaaaggctatggtaaaatgaaatgtcacgtaaagtgtatcgagttatttagaaaaattcagaatcttggaattgaaatcgactctgccagcgcaacctctgtcatatcttcttgttcccacataggagcggtgctactagggaagtcgttgcattgctatgttgtcaaaactagcctggatcttaccatctcagtggtcaattccctcattgatttgtatggaaaaatgggagacttgactgtagcttggaggatgttttgtgaagcagatactaacgttatcacttggaacgcaatgattgcgtcttatgttcactgtgagcaatccgaaaaagccattgcattgttcgatagaatggtttctgagaatttcaaacccagctcaataactttggtgactctgcttatggcttgtgtcaatactggctctctggagagaggacagatgattcatcggtacatcactgaaacagagcacgagatgaatctttctctttcagctgctctcattgacatgtacgcgaaatgtggccaccttgaaaagtcacgagaactgtttgatgctggaaatcagaaggatgccgtttgttggaatgtgatgatatcaggttatggaatgcacggagatgttgaatcggccatagcactttttgatcaaatggaagagtctgatgttaaaccaaccggacctacatttcttgcgcttctatcggcttgcacgcacgctggtttagtagaacaagggaaaaaactatttctcaagatgcatcagtacgatgtgaaacccaacttaaagcattactcttgtcttgtggatcttctttccaggtctggtaatttggaggaagctgaaagcacagtcatgtctatgccattctcaccagacggggtcatatggggaacattgttgagctcatgcatgacccatggggagtttgagatgggaattcgaatggcagaacgtgcggttgctagtgatccgcagaacgatgggtattatataatgcttgcgaacatgtacagtgctgcaggtaagtgggaagaagcggaaagggcacgagagatgatgagggaaagcggagttggtaagagagctggtcatagtgtagtctaataatctttgatacaatgaatatccttgtgattcatctgtttgaaacacatgttcaatggacaatgatgcatagattagaagattaattagctcaccaaataagtaaaattacgagtcgattacgaccactttaattttggttacacacattgatcatgacttgttttgaagaagaaacaatttacgtaaagaataaacaaaaatgggagcagacacgtttcctttcccttggaatattttacatagatttgcattcactgtatcagaaaaaaaaaaaaaatatatatatatatatatatattttacattagtaattttatactatttgtctctatcacatacaactttattattttttaattcttgtgggaataaaatttcaaaggcaggaacgggaagtccaccaaaaaggtgttattgtaaggaatcaaaacatgtcacgtaatcactaagaattatattgtaattatttttaatccaattcttattaattaccttttttttattaaggtcacttgtacttgtctctgtctctgcaagtctcatcagaagaggaagagaatcaatg

SEQ ID NO: 36322 - DNA, 3003 bp, Unknown; identical to SEQ ID NO: 36321
  misc_feature (1)..( 3003): 2750-1469P.txt file - cDNA_ID_3094105; gDNA_ID_2926219; Annot_ID_203216

SEQ ID NO: 36323 - DNA, 3003 bp, Unknown
  misc_feature (1)..( 3003): 2750-1469P.txt file - cDNA_ID_3094132; gDNA_ID_2926220; Annot_ID_142404
ttttttttccttcctttttaacttttaatataaaatggcaacgaaacaaaagaagaaaatgtatgaagtatgaactatcaagcaacggaaagatggttttcgttttaatttacttacgagtttaggaccattaaattatttaatcaaacctaataataagttgtacttgtaccgaaataaacggttccaatttcgaataaactataaatggaaagtaaaaattccataaattccatatagacaccatcgtctccaacctttttcttcttctccgtaacctaaaactctgtctaattataaatccaaccaaaacaaaaaaaaagtccatcatcttcttcttatgtcttcaatgcataagaaaggtacaagcagagacgtaaatagccaagcatttacaaaactaacgaaagtagaaactattccagatccagacatttacgacataacctacgtagatatctctccctccgaaggctcctcttcaccattatccaaatcaccatggtccgttcaagtcgatccatccgccgtagattctccgtatcattcggtgaaagttacgacggatacaaccaaagaaaaatcaaccaaccactctcctaatattctcttggggtcacttgttcgcgaagaaggtcatatctattcattagctacatcaggagatttactctacacaggatctgattccaagaacattagggtttggaaaaaccatgttgagttctcgagttttaaatcgaatagtggattggttaaagccattgttcttgctggagataaaatctttaccggtcatcaagatggtaagatccgtgtgtggaaagctgcatctaaagaatcaaacgttcatcgtcgtgtaggtacaatgcctaaccttctcgattatataagaaactccattgttccttcttcttacttcaacttcacgcgacgtaatcgtagcagtgctgcgttagggtttcgtcatttagacgcgatttcttgtcttgcgttaagcgaagataaacggttgttgtactctggttcttgggataaaacgtttaaggtttggagagtttcggatttgcggtgtgtggaatctgtgaacgctcatgaagatgcggtaaacgctgtcgtttccggttttgacggtttggtttttaccggttcagctgatggaacggttaaggtttggagaagagaagatcaagcgaaggatacgaaacatttcttctctgagacgttattgaaacaagactgtgccgttacggcgatcgctgtagatcaaagcgcgacgttagtttattgtggttcgtctgacggaaccgttaatttttgggaacgtgagaataatatgaaaaacggcggcgttttgaaaggtcataaactcgccgtgctttgtcttgtcgcggcggggaatttgatgtttagtggttctgctgatttagggatacgtgtgtggaggagaccagaaggtggaggtgagcatgtttgtctttcggttttgaccggacatgctggtccggtgaagtgtttggcggtggagagagatcaagaatcggtttccggtgagagacggtggattgtgtatagtgggagtttagatagatcggtgaagatgtggcgtgtgtcggagagttcaccgccgatggtgaatcaagagtttaagttgccggatcagtttggtggtggtggtggtggtggtccggcggagttaacggtggctcctagcttctcggctcaagggaggattagtccacaaaaatagttgtttgttttttgtatgtaaccaacatcgaactattcaaacgtgtatgtaattgtaatttcttctgttaaaagagattttgatccaacaagattcaagcatttttcatttcgtggagttccggttcaccttaaccgggaatctgacaaaacattacttacttccatcaaaactgtaaaatttcagtcagtgaaatgattattcaaatattcatgttcagaaactctaatgatcataagacaagaatgatctcataatctgaatttttcaattgcatgtattagctagagaacaaaaaatcggtactgatttgaaggcctaaaaagtctatgttgtttagaacgttcaaatatcttaccatgggaatgaaagtggacacgagtcatgtgatcatccttttggcaccattgttttgtcttctaatcgaacacgtagtgtcattttcatatcttcaatcgtatattttgttactactagtcaagtttcttcttatataagaaaatgggacatgatggattatgatttaagtgttccaacggtaggtaatgaagttaattcgactttttttaatcattttaataatgagatgtttggtgcgtcatacataaaacacaacatcaggtctcatcattaggcccttttttagtaatattcaatgttttcttttacattttcatatcacggatccaagtaattaagaaaacaaaaaacaaaaaacgaacctaatttatatacacatttcaacatattaatagttggtagtagtaggagataaattgatatctagttaaataatcttataagttttgagataattggtcggcgttacgactgtattatatacttctttttacccggttagtattttcctaatgagaaaaaataaataaatcgattcatgaaataaaataattttgaaggatgatgacatgatgtaatagagttaagagtagataccatgaaacaagggtattttattttcaaactttctaaaccataaagcacaacacaacagtattggtgtcctaactttatctgtcttctaataaatattaaatagaagaaataaaatcgaaacatgttgaccataaaaaaggttttgtttgttaaacaacccggtttcaaatctaacacatgaggttgcttctcatacgttcttaactagtagcagcagagttatctatataaactcttctttgtcatagaacaataaaaaccaaaaatcaattttcagaaaccatttcgtgacaatg

SEQ ID NO: 36324 - DNA, 3003 bp, Unknown; identical to SEQ ID NO: 36323
  misc_feature (1)..( 3003): 2750-1469P.txt file - cDNA_ID_3094132; gDNA_ID_2926220; Annot_ID_203282

SEQ ID NO: 36325 - DNA, 3000 bp, Unknown; identical to SEQ ID NO: 28803
  misc_feature (1)..( 3000): 2750-1469P.txt file - cDNA_ID_3094141; gDNA_ID_2926220; Annot_ID_203280

SEQ ID NO: 36326 - DNA, 3000 bp, Unknown
  misc_feature (1)..( 3000): 2750-1469P.txt file - cDNA_ID_3094150; gDNA_ID_2926220; Annot_ID_203278
gcatccatgtttgatgatttttcatcgtcctctcttgatgccttttttgatccttctcgtggcttggtgaacgtccctggtttgacagtgggtaagcaatgagcattcgtggtatcattaccttaaattttggcttccatatgtattaaatctcaattaaggtggaaatataatttgcttctatctgttgtaggcaccttcaaactcctcagcaaacttattgacaacaaaggattgtcagggacaagacgttactttggtgatcttgggaaaactgtaagtatcatatagtatatggctgatgaattttctagctttttccattcaacctcttatgcaaataccatgttgcagctaagaacagcaggatccaatgtcgtctttgttgctctcactgaaatctccgattctgttctgaggggtgcagaaatgaaaggtgttgatggactggtgaggactcatctacttattatccggtaggttgaatttaattaccactatcgtctttcttataatctccctctcttctctcaggttagcggtttccaccatggaatccttaaactggcaatggaaccgtctgtgataggaacagctttgatggaaggtggccctgatagaacaattaagcttgatcgtaaccccggtattgatgaggtgatattttatgccttgtcttctactttcaatttaaatattttcatttttatagagtataaaagagaactgagaaaactctatgcgtagagctttttctaatgtccatctacgtgtatgctcaaattcactcctttgcagttatacatcgaaggataccttcaagctatgttggatacaatgtataggcaagagtatctcagagtcaaagtcattgacgatcaggtaaataatatttctcgaacttagttttgctttgccattccaataaaagaaaacgtaaaccgattcattatgtttccaagagatgattaataccaacatatttccgttactgaccgaacatatttcacttataggttttcctgaaaaacctcccaccaagcaattctctcatagatgagatgatagaccgtgttaaagattttctcgaaagcaggggtttactcaaaggagatccctcaagctctcgtcctcgtcgccgtctccatggagacaaggtttaattccaatcccttttctctgcataaacataaacaccctcagtcatgtgaatatctctctcaatatgatcacaggaatggaagatcggaccaacggtgttgacattgtgtgaacatctattcgtcagttttgcaattcgcatattgaaacagcacgccactaaggccattacaagtctaaggccaaagaaagaagaagcagaggccgagacaagtgacagtggttccaatactgcaatggtaccagtagttagtgacaataagaagaagaaaatgaagttcatgtggaaagctggtattgggaacttcgttgcttcaggtatcgtagcttacatcgacggacgtttgtgccgacaaattcctaatccaattgctcgccggattgtgagtgggtttttgttaagttttctcgataaaagcagtgaacaataatcacttcctctgtatatatattcttctataatagaaccattacataaaataaaagcaataaagctcctttacgtttgttttcctcttctctgcatcaatcacgattcatcaacataggactatgagaccgatttcgaagtcttctgcatccgaggtgtgatatatcggccaatatagttttaatggggttattaaacttgtcccccaagcaaagacatgtaatttgttgatcagaagttcagaacagttttgtaaacaagattctactcaacttggcgtgaccaataagaggaataaaaatggaatgagagacgttgaacattgatcatcaaaattatgagaaccaatcaactaaaattactcaagtgattcattacaaataccttgaagaaaagtaacgttttggactgaatacgtacattcagtcagaagcagccttgtctgcaaggaccatgtatcaacagcctcaagtcttgtgaatccaactcctcttggaatctttttagaatctgtaggagaaatttgagaacattcgccaatgatccgttgtctggacactcgtccgtcttcttttctgcgtaagatttcgactttgtattgtcatcaccatctctgaaaaactactcatacttggtgatctgcaacaagttgctcttgtcatgaggccaaacatcactagtatcatccacaattacgacactttgcttatcagccacaacaagctcaagtgtcttcttactaggactttctttactggttatgactcgatctccaaagtaaactttgtccggatcaatcaacttcaacacggtctgtgcgtaagtgaataaccccattgtgtaaacatgcatagtgaaatgctcgttggctcctaatagaaattcatgaagaaaaggtcgaagtttaatgatatactcattggaatggcctttgttgaatctccataaatctagccttgaatcgacttgttcgagtagatacttctcctttttagaaatttacgaaacaagagtcgaatggataagcgtgtggtccaaatcaaggactaggtgaagcttcttctccgtcttcttccccttcttcttctcatcgagattcaagtgttgtaatctcttgacagatttatcaagtatttattataagaaaaaggaaatatatatgtggcgatctcaaataaaccgacgtacattatattgatcaaaaataataataatcaaaattgtaatttccttttttccgaaatacaatcccatctcaaaatttggaaacatctctctatatataatagacgagtagtctcatcacccacattattcatcaatatccctctgttttctctcgagtttcttctagccctagtttcttaagtacgttttctctgcgttgtttttctctcaaacacacaatg

SEQ ID NO: 36327 - DNA, 3000 bp, Unknown; identical to SEQ ID NO: 28800
  misc_feature (1)..( 3000): 2750-1469P.txt file - cDNA_ID_3094211; gDNA_ID_2926220; Annot_ID_203260

SEQ ID NO: 36328 - DNA, 3000 bp, Unknown; identical to SEQ ID NO: 28799
  misc_feature (1)..( 3000): 2750-1469P.txt file - cDNA_ID_3094220; gDNA_ID_2926220; Annot_ID_203258

SEQ ID NO: 36329 - DNA, 3000 bp, Unknown; identical to SEQ ID NO: 15118
  misc_feature (1)..( 3000): 2750-1469P.txt file - cDNA_ID_3094250; gDNA_ID_2926041; Annot_ID_196080

SEQ ID NO: 36330 - DNA, 3003 bp, Unknown
  misc_feature (1)..( 3003): 2750-1469P.txt file - cDNA_ID_3094275; gDNA_ID_2926042; Annot_ID_196087
ctccgccgccaccacggccgcagacgcctcctactttcgtgccagaagaaactcagccacagactcctccgccgccaaatcaacatcaaactcgttccatcttcacacctacccctcaagtaatttcctttctactttgcatttctgtcgaaaagttttcatttttaccaaggaaattgatagacttttaggcctaaaatttgtactctttattgaaattttttggtgggtttgtttgaaattagttaggatctctaagttggtaagttaaagtttccaaatttatgtttggctgcagcaaacgttggcatcattgaattcaacaaagtacacaaacaagttctttctgctgctcttcatctttcacaaggttgtggctattgggtttgtaggcttccttgtcttcagaggcgttcaaggtctaattggatcaaatggtagcgtcaaaaggaaagagaaaaagatcctcagattcttacttccacaagtcgaagctgcatcgctcttgagcatcattcttgcattcctttggcaaatggcattcaggatttggcctgatttcatgattcacttcatactttggagtacgtttttgatgtctttatcctcaggaatcctcttactgtgtttccagatgccagccactgatgctgttggggtttgcctcattgccttctcaattggcaatggtttatatgcttgctgggtcactcgtagaatcaagttctgttctaagattttggtcaagtcgttagaacctgtttccaagttctcggatttgaatttgcccacctactacatgctagctgctggtttcctctggatgtctatgtggattttcggtgtcatcggtgccttgaacttctattttccgccacttgtgattattggtttggtgttaagtctggcttggacgacagaagtgatgaggaatattgttaatctaactgtgagccgggtcattgctttgtactatcttaggggaatgcagtctagtaccaggtttagtttccaaagggccttgtctcgtaacctcgggagcgcgtgtttaggatctttgtttgttccaacaatagaagccttaagaatcttggcaagaggattaaatttgctaaagggtgaagatgagttcatgttttgctgcgctaattgctgtctcagactcatggacttcatatttgaacatggcaatggctgggcctttgtacaggtactataaactaattctttaaaccatgccactcccactctcttttcttaattctttaaacctgctgcagtcattttgtttctatataatatcttcttacagagaatcagtctagtaatagtattaaaatcaagttgattgtggtgggtcttattttttatatcatttctgatatgagaatcttgcatcatcttgacaagtcgaggcacaaccacatgctctttttgcatttatagtaattattttgaattagaaaaatagtcatattgaatcaatagtattgagctttgagtggtaacaacagacggaacaaacttagactagatcactttttcaccattcgaaagtgttttgtaccattggttgtttacttgtttaaaccgtattgttgttacagatagcggcttatgggaaaggatttgtgagggcatcgcaagacacatggaaactgtttgaggatgaagatatggttgaaatagtagatgcagacataacaagctccatatgcttccttacaggcatctgcagcggctgcgtttgtttaattgtcgcagccgcttggactcacacagtttacaaaccttttacagccaccatctctttacttgccttcttcattggatacctcatggtaaattacactttgaacttttcaactctaaaatgtttgattcaaatagtattctcatcatattttttggattgttggtaacagaccaggatctctatggcattgcctcacgcctgcgtaggttgctactacacgtgctatgccgaaaatccggaaagcagattcttcgaagacaaagtgataaaaactaggcaagatatgatcaaaagtggccgtgttgccgttaccagtaccacccctagagttcgccgtgctctagcttagcctgatcatctttttttccttggtgctaaattttcagaatgaaataactagttttttttttaaaatgtatttaaatttgaaaatgtaatttaattacagaaagagtgaagagccaaccaatatcagtaggggtggggaagaaattgtggatagagataagctcgtgacatggacacaatccaactaatgacccaaaagccaagttggttgagagctttttaactttttattttttcctttgttgttgttgagacccctcaattactttctgtacataatttattcttttgttccttcctgtatatgggtatattcctttcttggttttggaaagtagtgtagttttgaactttaatgaactattagtaatagtggtacatcttgttaaagtacttcaagctttagctagctttctgtatatgggtatatatttctttctcttacttagcttcattgagttcagcaacagtgatctctttctacttataaaattttttagtcttaaaggcccatcttgaaagaatttgaaacttttacaagaatcctatcagttttataacatcttactacaaacaatcataggcccatcagtttttcagttatcaaagcagagaggcccattttacaattatactaaacgtcatatgatctccattcttcagagaaacaagtccaatcttatcatttacatgaaatctaaaacccgccacgtgattcgtcgattacacagaacccatatacctgaagaaaaaagaaaaaaagaaaaaaaaaagcgaaattgttgtttgaacgtgtggtcgaattttatcgtggcgctgaattagcatccacaagtgaagaaaacagagagagaaagacagagagatctctctctccttcacacacacagatacacatg

SEQ ID NO: 36331 - DNA, 2267 bp, Unknown; identical to SEQ ID NO: 15119
  misc_feature (1)..( 2267): 2750-1469P.txt file - cDNA_ID_3094280; gDNA_ID_2926042; Annot_ID_196086

SEQ ID NO: 36332 - DNA, 3000 bp, Unknown
  misc_feature (1)..( 3000): 2750-1469P.txt file - cDNA_ID_3094289; gDNA_ID_2926046; Annot_ID_196094
tattgggattgaagaaaaaacgtgtaaagtaaaactctgttgggaaagttatttaatgagtcaactgatgaagttcgaattttttccaaaaaagagaaaaatagacgaacaaattagcgtataaatactaataccatataaatagattaaacgcaagatgaatctatctcatgtaaaactttatgaaaatatagtagacaaaaataaaaaaagagatacgttgttcaaagaagcaactcactaaatatcctatatatatgaattactggtttaaataacctaattacagtttacaggagttttatatggatgttgtccaatgtcgtaagctcataatcttagacttgttatgtttatttcaatagaagcgtgtagactaaaccgcaattggcaactcgagtgttccgtctgtatctccgcatcgaatgagagatacatgcttatgtaatatagttcagcgcgggcatgtttgtatctgcatttagtgattgtgcaaacaaaaatcaaatgatcaaagtagttaatgcctccagtgaagcatctcggaagctgtacacgagaggaagttttcttcaaagaaataatcagttgactcggtttaattgttacgtgtcacctagtgttgtaggttaaggatgaaatttatctccaccagattgcaaatttatttttatttactcgtcaatctatttcatcttcgttgtatatggtcaacgaaactattagattacaatcaattgattttataattattactaaggtatgaataatttcaacaccaccaattagctatagtttcgatctgcactttgacactaaattataatttttataatttagtgtatcaacgtgacatcatgtatgtgataattagcttacattatcttatactagtttgtaaacaaatactggccattggtggaggaaaattatgtgcactaaacaacaaatgagcatccattatagcttagactaaagaatatttgcattatatgtaatgagtctcatatttaagtaaatggcaattctaaaattttttcactagctagataaaaacacatcaatactttttattgatctaccattggtggtcagatgataattcgattcaatgtttagcctaaacatattctttctgaccgattaaaaaccaagtgaacgttttgttttggtcgatctatcccaagattagttggactttgttccaaatttcttgatgagcaaacacaaaagtgtaaattgtttcttattattgttgtcatgtaccatatatatatatttgacaaaataacctagtatagtagtagtagtatatatataattatatatatatatattaatattagtttcagtttgtttattttacaattatacacttctcactctaattggttatcaaagattcatgtttccttcacttgggttgtttcttttacctgtttcgataatattgatgactacatatatatccggttggagtcaaaatgttgaaagaatcgaatttagctcaatctttgaagttggcgtttagtttttgaaattaaagatttctctgcaatattttaattgaaaatcaatattgaaggacttttctgtaatataaatctattttaaaggttattttcaaacctgtataagattcgacaccgaaacatttgacattttcgataacgtggtgaggtcactgtgtgaccttccaagtaaaactccataattttcttagtattcgagacgacttaattgagtcatattaattaagtgatacataatatctctatatttttttggtcgaagatacataacaattttacggataaaatatttggagatttacatgctttcagattcagttttaatactcgtgtacatctgtcttcaaatcccacttaaccgaatagaaaagtattcgcgtatactgtttgttggtcaaaaaatagtcacaaaaagttttcaaaaatagatatcattgtttcacaacttttcttttaaggaaaaaaaaacactttttatactggaaaaactcaacaacaacgtcccctgccgttatatttgaaaaggattaatcatgctcacatgtaaatatttttcttatacgaaaaagtagttatccttattcaacttcgtgtttgtcaagtagctcgaagaatatttttgttcactaccgttggcttgtactaatctaatacttttatagtaggcccttaacaccatacaaatgtccaagtaggtatattcttcaatttttatttgattaaacaaattgagataaactattggcgttgaccgatcttggttttcattgcctcgattttgctgttttatatttggtttcttcttgctggttgggatgctgtttttgaactgtgaggtagtcttcatttgttataagaagagctgctatcttgatgctgtggattagaatttccccgtcgtttagccatttctgcaagcttttctttatcttggattgatggtgggcaatgtctcatgtgctagattctggttatagtttttgattttccatggttcagtttctattttcttatgcatttaaagtaatgtttgttagcttcccatacttttgggctttagtctccgaggatttttgttatccgtcgacttagtttttgagattatcttgttaatcgtcagctttaactttgtaaactctatctataatctatctttcagtaaaaaaaaaataaaaaaaattgagagaaacataatttatgagacaaaaagatattaaacatactctgtaaccgttaagctgttttcagcccaatgtcatgaaacccattattgaatttagttcttaataggcttatatagtcacataataatattgggctaagttacttggcccattaaatcatttcccgtggtaggttccagaaacatatcataaaccctagcagaaactctttcctctctcgtcgtctcaaatctcttcttccttcttcttctctctcgattcaagataatccacacgcaaaaatg

SEQ ID NO: 36333 - DNA, 55 bp, Unknown; identical to SEQ ID NO: 15122
  misc_feature (1)..( 55): 2750-1469P.txt file - cDNA_ID_3094296; gDNA_ID_2926046; Annot_ID_196092

SEQ ID NO: 36334 - DNA, 3000 bp, Unknown; identical to SEQ ID NO: 15126
  misc_feature (1)..( 3000): 2750-1469P.txt file - cDNA_ID_3094333; gDNA_ID_2926048; Annot_ID_196103

SEQ ID NO: 36335 - DNA, 3003 bp, Unknown
  misc_feature (1)..( 3003): 2750-1469P.txt file - cDNA_ID_3094340; gDNA_ID_2926049; Annot_ID_196110
tcgatgaaacactctttatgagttacgtaagaaggtgctactttagatggtaaaagacaaaactgctgaatgatagtttgatacagcgtgtatttgttgttgcacaatcctagtgcgtacacgaaaaaataaacagtactcgaaagtcgaaagtataaccagctcgaacaagtaaaatcctctagctggatattcgttattggaattttagaaaaatgattctctcaaagtgtaaacttgtggaaataaaatatatagcaaagtcgttgacataaaatatcacaaaagtcattctcgactctacaaatatatacttactagattttaatccgcggtacataaaagtttgtaaattgtatctatctataaaatatttttattttgtaatttacaattgttattaagtaacatcttgccaaacccgtcccgccaacccgtcccataaaaaaaccatttcttttattaatgttaatcttatttatgatatgtttatgaattattgtctaaatattttgtaattttgtagtaattaaatgctatcaaatatctctgcggtttgatgattataatcgaattgttataatcatggagaaaatcaatatcaaaaatgataattttgaagtaattaaatgatagtaaatattttggaagttttattttagtaactaatgtggagagttttaggaaagattgttaaatgtcaaatatttatttcgaagatgttttttttaattattaaaaacaaacattaaaattcagtggcagccattgtaaataagtcccaactacagaatttatttcacaaaataactgcaaaaatgtatatatagattctaagagaaaaatattaaactaacatatatttgtaaattgcaatagtattgacttatccgattatgtaacttttattttttttaattaagtatcttgatactacatatcttatcgatatgggatatgtatgaacgatttctgtttattttgttcttatttatgtgaatgcaacgatttaatttctttatttacggtctttctctcgcaatttctggaattctgcatagtggggatcatcagcctagttgacacggttacaaactgacagtgaccacctacaactattaaagagacttcattcaattctacaatattctagttaaactaaaagtttgcttcacattgtaacagacataaatccccaaaattatgggcctacaatttgcaataacttgtttatattgcacttctgtttttttttgtttatggtataagagttaatcatttggtcaacttcttaattgtatgtgtttgtacattgatctacttgtaatttttagcttattaattattatatggtgatgttggcccaatttcatcatggatagaatttaacctccactttttcaactctaacatcagttataaattgacttaaaaattaactacgtcactttccaaaaatatttttcaaaactcaacgcaaaacacatcatacaaattagacaatgggaaaacacgcgtttataatgacatttttgttcatgaagtgacaaatcatttcttcttcctttactgatctgacaattaaaaagcccgactcatccaagttttataatcaaattctaaacatccaagtttataatctaatcccctagaatcattctaaccgaccaaacttaaccggttgttttgtctcacatattttagttttatgtaattattatcactcgttaaacgcgttcctcgtcgattctgtttgactcgtatctctctatcattcaatcaacacacaataataagttgaataaaatatccaaaaatggtatataatataaatataaagataatggaaaggaagaggattgcatgggctaaaatacatacgatggaagttttagtggtgcacatcacaactttagtgcaagaaagaacatccaaacaatattatttttattatacagcttggaatgataaaaaataataatctaaaagctaagtttgacttgtttgcaaaataaaataactgagatgattacatttcggatcaaaccccaatcttcactttttaaaaaacttgtccaaaatccaacttttatatgactacatggtgataattcgcatgatataattactaattatgcatgttggataatgcagtaaattacactttaccagttaaaatagtttatattataaattactctttcggtttccaattactaaatcttttgagttttcacacacatgacacatcaaaaagaaagttacaataacaaaattatctatatgaattgttatttggtattttaaatagggaatggtagaggtgaaccatgaaaaaacttaagtgaaaatttataaatttgtgaaacttttcaatacattaatcagtttgaaacggaaggaaataattattttatgagtactcgaacaaccctatataccttaagaaaaagcacaaaaataatgaagaaaccctaataagaatttgaaacggaaggaattttaattataactagtagaactatataagtttctatatttacttacctaaataaatttaaataaacactacaataaatagtgtagaaactctctactcttttggttttccctttgtttcgtttctatattttattttttgagttcattagaaatacaaaaatggttcaaatctaacggtgctacaaatttcttcacaaggaaaagacactgtaacaaaattgaaattgccataacagtcgcaggaaaaaccatagtactactagtaacatgaatcatgatctgtctgacaatgacaacaaaagaatctgcctatagacttcatttatatattttcctcttttcacattatcagtctttattctttttaaaaattattttcatacttataacgtcaaattcacatttcttctctctatataaaccacactaactttacatctctcttacaaactccaagagcctcggagcattcgaaaagttcgccggaaaaacaaaaacatg

SEQ ID NO: 36336 - DNA, 3003 bp, Unknown
  misc_feature (1)..( 3003): 2750-1469P.txt file - cDNA_ID_3094368; gDNA_ID_2926051; Annot_ID_196119
tgaagaggtaaagaagaaatccgtcaaagagcaaatcatcaaagagccaaccgtgaaaggtaagagaggtagaaaacctgtagaggcgaaaaagttgaccatataactacatcctgctcttgttattaatgagaagggagaagctgatgaaacaaaattacctgctcttaatgtgaagagagagtgttgttgtctccaaaaaagctgaggaagtcactgacaatgatggttagaaggaaggtgacagtgacgtatgagatgtcacataccagtttatcggtgaaaacggaagcacgttccctgagtctgatgatgatgaggattgatataatcgaagctttaaagacgcagagtattaagctgtctacggatggtagtgcattgaatccactctttaatctctcaacacgggtttttcctaatactggagacaacagactgaagtgcatgaggaagaattgtgtgccttcagctggaatatatgatcctctatcaccggctgatacagccaaattgtagaaacttaaggattacttatccccattctagtatgaccctttataccttattaagttgttaattacaacttgttaacattatttctgtatattaacttgtgtttatttgttaggaatctcccattgggcagggcaacaaacgatgttgatttctacagggttatcatctccgaaagaaagcactgaccaaccagagaatatggatggttgttcgatagtgtaagtattacattagcagagttattagtgtgttttgtcagagttttactacattatggctgagttattggtgtgttatgctacattatggctgagttattagtgtgttttgtctaagttatgttatattgtgtctgggttattattttgttttgtctgagttttttttttgtacaacatgtggctgcgttatatagagtcctcaggaataggtacaagcgaaatctctgcccattccacaacaaacgcattgcatttctagacacgtgattcgtgtctttttgggttagagagtatgtacagtgcaaaatataaaagaagatgtttaaattcaaagacaccccgtatgaaaagatagttaatggtttgcttccagataatcaacagacaaatatgaagtgaatagaagatgtgaatcacttgtatttgattccccaaaccagaggcgatcactaggtggcactacacatggaccagattaaggggcacattgattgctatgatatcattgtgggataagttacaagaaactgaatagaattgattagaatgttgtaggccgtttacgagaatgattccagcaatgatgaacgtgctaattcctactacaatcggtgaacataggtttgagcagtttacattcaaaaggagtagtgtctccagggtccctcaaaacgtacaagttggagctgcggcgtgtactcgtgttaattttttgaatgtctaacgcttggtataactttcaatgacatatgtgatttcaacctatacaggttaagatggcagcatatatctacaataaggcacctaatctgcttggacagtttaggattttgacttgggataattatattaacttttgaatcgtatttttttcaacaatccataagaccaatgaattttgttttctttataatggtttgatttcaaactaattttcatatcttggcattttcagataattaaattggaattttacattacaattattcttctcatagaatcaaaatgataaatctatattaaatatgttactatattccaaacttttttggtttagttttatggacttactatattgtgcataactcaaattaaattaagacattttcacttgggatcactatattaatttttgaaccgtatttttttcaacaaactataaggccaatgaattttgttttcttgtaatggtttgattttaaactaattttcatatcttggcctttttagataattttatattagaactattcttctcataaaatccaaatgataaatctaaattaaatatattgcaaatcttccgaacttttgtttggtttagttttatagacttgctatattatgcataactcaaattacatttaaaaactccatttgtcaaacattaggttttaacaaatacctccataatccccatgtggctttctagtacaattatttgtcaaacctacgatctatcttcattttagaatttctgagatttctctcacagcctataaatcaagtacaacattaggtttatagcatgatctccaacattaagaataatcaagtttttaccatttgttgttatttccaacttaacatgatcaaaactaaatgcgtggagtctttatgtcctcgacataacattatgtaaatactttttgactaaaaatagtaccattcacccttctaactctatgtcaatttgactacaaaaacattttgacaaaaaaatgaacgattacaaattacactgatggaaaatatacttagtcgaataaccaccaacggttgaatgtaaatgtggagttccaattattaatcatttttttcggcactcaattcacgaatgtgaatcaccactaacgcatctaggaatatatatagtaaggtatacaacttattttttaatcaaaacaaaaaaatatttgtagatttttgggacctttggttttccttaaaatagataagggaatattggaggatagatatgaatctatatgaattagaatttaaggtcttaaatccctttgtgataaggtttgggatacctatattttaggatctgtgtttatctcctgtggaaactctcttgtataaatacgaacgtgagttcatcaataaaagcaagtcactttgataaccaattctacatggtatcaaagagctgagatcatcaaaatcatcttcaaaaattttgtgttcttaagttaagaattcttaaattgtttcctttctctgttgagttgatagtcttgtgtgtcaagtaacaatg

SEQ ID NO: 36337 - DNA, 3003 bp, Unknown
  misc_feature (1)..( 3003): 2750-1469P.txt file - cDNA_ID_3094390; gDNA_ID_2926052; Annot_ID_196123
gcatgattcgatctgctttggagagaccgtagcgaccaccgtaaccaccatatctggctatgcaacaacctcccctaccgtccatgatctctctctgtatatatctttctctcttaataggttttagtgggagctttgaagaataatgaagagaggtgtgtgtgaaggggtttatatagggactctgaagatgacaagtgttgggttgatacgcgtgtctttgtctagaatacgcttatcaccgttgcacttgcacatgctctttttccttctgtaatggacatgaaaaatgaatcgaatttatgtttaaaactattttctaaaacgacaaaaaaaactattcaaaaatggcatgacatagaaatataattaaacttgtactattttttttttatcacaaattaagcagtacttattgtaatttaatgttttaaaaatggtcggtgttttgttattggaaaattcgaagttctcagtatattggtctaattaatatttgacatgaaggtatatatttgattcttatattcggttgttcaatcaaagcgcggatgaaaaaaatatgatgttagcattcgagatttttataattagacgtatacataaggaacggaattgagaacctaatctggtctaatagtatataattaattagtaggtcccgtggttagctaataatcactttgacccttgtgtttactactttagtacctgaatagtatactaatttgtttggcctaaaaacagataatcatgaataaatgccaaaattaggttaaaatatagtacatcgaaatgaaaaaaaaaaggtaatgttaggcatggtccaagagatgagggttcatacattatcattgaccgattctgaatttaatttagtggaatataatcttaatcaactaaaggtgatcgtgactctagatctcaaatctttattaacgggacaaggtcgatgatctcatgtccaaagaggaattttgtgccaatgaagttaggccacctcttttatgaaagggaaagaaggaacattggatggcgtataaataaaaatcatgagggagtgacggtatcatggagccatcttaaatataatcatacaattgattcggaaaaagtatatatggacatgagagtcaaaatcttattaaaaatccaatatagtaacatagaaataaagtagattcggaaggcagttcgagatggcatcaagaaaaatctgatgggtttgtgttgcgttgtacgttgcacgcaagaggacacgtagagatatgtaattagcttatcaacttacaactataatttacacaaacaatctcattatttaattaaccaaggcttaataattagtccatatatatttatacattcatgaatgtggacgaaactgatgactgatgttgagacttgagagttaggtttgattctttaacattcgatatctcatcttccatttttcgttattacatattttgttgcaaggaaaacacgatataccgtatagagttgatgtagctaaagttttaattcaacaatgtaatcttgatcattaaagtatagatgattttagtggttctacttgacgtccctacagatagtaaatgcaattatcaaaaacatgtcatagttactaaaagaagaaggatgcacaaatacaatctttttgggttggatcagatcaaattatatttggcttaaagacattgattactacgtatatattaaacaaatgaataaaattgactacctttgctctcaccctcacctgctgattctatacctaattaattatataatacgatagccaacagtttcaacataaaaccaccatcgaaacatactactgatataatatgcatatgggacaaatgaaaaatgaaaaatataacggatgaataacgaaaaatgaaaaatatcattaatgatataatatgcatatgggacaaagcaatcttatccgttacggactatataacatatcatttcttaatcatatattatatacgtatatatataatcgtatatcatcagtaatatatttgttgtaagaaaaacacatactgtatatacatgaccaaaaacatttcgctttatgcattgatgtaaaaaaattaaaactatacataaacacatcaaaaattacagacacttaacagatgtaccatgtttttttaagaatcaatagttacaaaatttgagaaaaaggtgatattttgtcatttcgttggatatgaaggaaccaatgataaaacatcgttagttactaattcaaacaacaaaaaaaagaaccccgaatttaaatgctcaccatcgacaaaccttggctatttattttataaatataagacaagtactaaatcctatcaacactaaacaataaaatcgaacatgttcacccaattataatctgacagctgaagaagataaggaaatactaaatatagagaggttcgatgacagagagaaaaaggtagactgaatcaccatcaaaaccacgcccaagaaccctaattggggaaagtggccaaatgaattctcgccacgtgtggatctgatggtgtcagagtcggtaaagtttaaaaaaggtaatgtgtgatgtctcgataagggcttttaaactggtcgttttgtctgggacacttgtacagttttggaaaggaggacccatgactagggcattctttagttaattttaaacttgataaatcagtatttcgtttctatatatttgtttatgaaattctgtatcattagagaaatcagatgatgtggcaatcattatctgttctctttaatcgaccaaaggttcgaacaaaatatcattgttggttatctgatatagagaaaactaatttagaaacctcgttttgaaaaattccaactacaatatgagatttgattctacaggagtttggaatatgggaaagggaatttacaaaagtgattgttgaaacattaccgattgttaaatggtaatagacagctgaagctgcacaatgacatatg

SEQ ID NO: 36338 - DNA, 3000 bp, Unknown; identical to SEQ ID NO: 15131
  misc_feature (1)..( 3000): 2750-1469P.txt file - cDNA_ID_3094396; gDNA_ID_2926052; Annot_ID_196121

SEQ ID NO: 36339 - DNA, 3003 bp, Unknown
  misc_feature (1)..( 3003): 2750-1469P.txt file - cDNA_ID_3094412; gDNA_ID_2926053; Annot_ID_196131
atactaccacgagtgaaatcctagaattgacgggcttgattcgatattaatatgggatggtgtactacgggtgatattttagaattgactggtttgggttgataataatttgcgatagaattaggagtgaaatcttagaatgacaattaaaatataattatacaattaaatactaccaagggtgaaatcctagaattgacgggtttgattcgatattaatatgggatggtgtactacgagtgaaatccgagaaacaacaatcaaaatacaattatacaatattaaacatttaacaaaataaacaaatacaacttaaaactttaaaatttgagttataaaatttcttctcgcggtaaattatacattaaatcaaacaatagcataaatttattaaattatcctaaaaaatattcaattattttttatttaataaaaatatagacccgcagtataccgcgggttaatatctagtagataaactatttatttttcactatcattattaaactttttgtcataagtttggtaaaccgtaaaggcgtaaactaggttttattttaactaggtgaacatacgtgctacatgggaattgttgttttatatatatatatatatattcaaaatcataatcttttttactatcataaatacatacacaacatagtatatattgacaatgatatgtagttatgtttacttacatgtggtttgtaacttgagtatttgactaacttgaatctaaacaaacaattccttattcaacttactctctcatgatctaatactccagccacgcacatcatgatagactcatgattaaatactaaattgacataatttaaacaaaatatttgtaataactaattatttgtttcaagttttttgacaatctgacattctttgacttcaattgtcataaatggaaataagttgtctgtgtatcatgaataaacacaaactcaatttagtatgcagtgttcaactcatcaactctatcatctgttcttacatacaaagtagacacattatttatgcagtcaaagagaaagagaaatatgatcacaagaaatggtagtaacaaaaaaaaaaagagaaaagatcatgaaaaaaagtctatgatgttccacaacaaccttttcctttagattcagtctcttctccagcaacaacaatcttagttccttgcaaaagagaagagtctcctccagattctccttcctcattagcaacaagattctttttactcacaattcgatatatttccgtcaaaaccgtgaggaacgaaggctcaacattgtttgaatccaaggctgatgtctccatgaaaaacagattttctctttgagcaaattctttagcatcctcggttggtacagctcgaagtgtcccgagatcagttttgtttcctattagcataatcacaatgtttttgtcagcatgtcctctcaattcttctaaccatctcgctacatgatcaaacgactgtcgttttgttatatcgtaaactaacattgcccctactgctcctctgtagtatgcactcgtcaccgctcgatacctaaacaaaatctccacaatcagaaatattgatctcatggtacgaagagttcttactatgaacctattcgtttgacaatcgttggcgactacgacatgttattatgttcactgaataaataagccactacaaattttggtctatatacgacaaagttttggtcaaagtccttagcgactgccaagcgaaattcgaagcaaccaaaattttcaacttctaagaactaaaacaaggatctacgatggtaaattatagataggaaaatttaccgttcttgaccagcagtgtcccatatctgagctttgatagttttacgatcgatttcaagtgttcttgtctgaaactcgacaccgatcgttgctttagattcgatactgaactcgtttcttgaaaacctagcgagaagctgagatttaccaacagcagagtcgccgatcaagactaccttgaacacataatctatcttctgattgaaattgctctgaaattttgacatcgttcacaccaaaatcacaagcttatagattttagaggcgatagaaatgacttagttgtaatataagatctctgatgtaataagaagaggagagatctaaaagatgaaagtgggttgcgacttgtgaagcatcgggagacgtgaagggaagaaacgaggagggaacaccaacgaaagtgggtcccgccttttgtttcctttttcttttcattcctttttgacgtcattcttttttttttttttgcaaatctcagcgaccacaaaaaaacacacttaaaatccaatttcaccctctctcgtctacctccggtcgtctcgccgttctcctcctcctccactatagctgcctgtattcgtcttctctatcaccgtaagttatctttcgatgctttctaagctattcctcttcttctttagatattcttcaacatcgtcgcttagacccagccggtacaacattgtgctaaaattatgcttaattcggttcagtgatttctctcctgtgacaggatttttcctaatccgttttacttattctttggtcttattaaataaaattcgaaaactttgattaggtctggaattgatgttttttaagtttgacatttaacttgtttgaacaatgttttgtatcttctgcagtcaagttccgctttatgattagtttgagttaagataaacctgttgaaatgttatcttgttttgatacaaaaggtctttgatttgaatcaatccataagaacgagcttgagactcagttatgtggcatgttaaagttcatatatgattgagactgagtgatggattatatgcaattgtttttctactgtttcataccattatggtaccaaaagtacttaaattcaattgtgtcgtgaagctaatgtttactacattctttgtgtagctcgttatctggatctgaaatattaggtgatacgaagccatg

SEQ ID NO: 36340 - DNA, 3000 bp, Unknown; identical to SEQ ID NO: 15133
  misc_feature (1)..( 3000): 2750-1469P.txt file - cDNA_ID_3094428; gDNA_ID_2926053; Annot_ID_196127

SEQ ID NO: 36341 - DNA, 3000 bp, Unknown; identical to SEQ ID NO: 15134
  misc_feature (1)..( 3000): 2750-1469P.txt file - cDNA_ID_3094442; gDNA_ID_2926054; Annot_ID_196135

SEQ ID NO: 36342 - DNA, 3000 bp, Unknown; identical to SEQ ID NO: 15137
  misc_feature (1)..( 3000): 2750-1469P.txt file - cDNA_ID_3094468; gDNA_ID_2926056; Annot_ID_196144

SEQ ID NO: 36343 - DNA, 3000 bp, Unknown; identical to SEQ ID NO: 15138
  misc_feature (1)..( 3000): 2750-1469P.txt file - cDNA_ID_3094495; gDNA_ID_2926057; Annot_ID_196149

SEQ ID NO: 36344 - DNA, 3003 bp, Unknown
  misc_feature (1)..( 3003): 2750-1469P.txt file - cDNA_ID_3094505; gDNA_ID_2926058; Annot_ID_196160
caattttccactgtaatttaacatcaaaactcacacaaaacttccatcaatcgcaagccaatgaaaaccctaaaaatcacgaaccttaacaattgtatcatttcaaatcaatccagagcatcaattgcacagtagagtaaaagacccaaatcaaatcctaagattacgatcaaaatcgtaaagatgaaagaaatcgaaatcgagcgaaacctttattgagcttgattacaaacttcttagtaggttgcggaagtgtagctttcttccgagagagattagcggcggcgggagttggatcttcctccatatgaaagccaacaaccttgtcggcggtattagggtgttgaggggaatggtggaggtcgtttttggcctttttcatcggaggagaagagtaagaagagtcgtcggaggcagaagcggcggagaaagtagagcgtttggtaggaagagacatgaaaatgggtgaaaattgtgtgagagaatcacgaagaggaagaagaagacatcaatcctaaataataacaaccctttctctctaccaaaagcgcactgtgcactctctctctttttttttttgctcaaacctacgcgaaaactcgcgatttagacccgacccgagaaatgaagattttttgtttatttatatactctgaataaaatcagaattattttatttatacattcataaatcataattactatatgataaaaaaaatattattgataaaaatagacatataccgcaatgattagatgtgcgttgttttaatggttactaatcacaaaagtgaaaaacaaaaaaataaaaaataataatcaattgttgcctgttttgtatggttattttttataactacttttaaattttaactactttttatttttagtttttgacaactgataaatcatatctattgtatatttttagagtcgaatttttattaagtcattttacgatttaaagaataaagaatcgatcacacgagtcgatgcttgatatttagatcatttttgatatatatttttatttttattttaaagaaaattgagttgattttttttccatatatttcttttattttttaaaaaaaactattttaaaagaatatattagaataaaatgcctataaaatagactcacctataacgtggagaatggagataaaaatagagatgattaaatacttttagcagtcggtaatttcaggcagaaaattgtgtgatgttaaaagacatgaacgaagaatcatcacttgacaatatgaataaatataatatgatcgatgtcatggattagccaatgtggggcgtgttgacttgctgctccacagggtttttggacttccggtttagggtttggttctgattacaaaatatgggcttatcaaattatttacaggagttaatactttgggcctgattacaaaggtttaaccgaagcctatcaagcagataagagacgagatgagattgttagagcatctccatcggcaaaagtggtagagagtatctcaaaaagtaaataaattaatattttaatcaaattaatatattttaattagtttgaagtaaatgaactattaattgaatgacaactctcaataaatgctgagaatagtctctcttgccagtttctccacttttctcttcttctctcatactttttctctttttaattattatttaattgatgagtatctcaatcagatattccgatggagatggtcttacaagtgttaccgagacgtaccaattggcgaactcatataacttgtgctgttgtgcgaatgtgttttgattagtgagggttcttgggccaaaaaacatggctggtttttaagtcgcaattgcaaggatgaatattattacagccacagcctcaacgactgcatggtcttaaaactttttattacatgttgattagcctatggaattgtataattactaatacaaaatggtgttcattacattctcacctcgcttaaacttactaataatttttttttatttctttaatccctcattaacatgtcaacacatttattttttctttattcatgtttcaagactatagaatttctcaattaatcccaattgatactaataatagcaaattgtaagtctcttggatcgttggatcaatattttcacatgcaaacatgtgaaaatgaggagttattgaaaaattgtaagcttgacataaaacaaacaattgaacaattttagctttgaatggtttgtacatggaacactgattaataagattgcggattaaaaccgcttctgtttcaccatttatatattctaatcggtagtcatgctgagatataaaagtaaaaataaaattgttgtggactgttttttcttccaaaatttacatcgtaataaaaatagaaatcttatgcaaaaattataaagatttttttttagcttttactaaaaaataaaataagatttgtttttagtaacgctttaccttaaaaagctgctagagtttctaactttcagtttattatcatcagcacaaactcttatgaagatcttctatttcttcttcatcctcttcaacaccaatcactctcaccaaaaatgaataataaataaaccataaatctctcttttatccaatgggaaaattcatcacaaccacactatctccaccgctctatgcccgatcaaagcttctctgtttttcacttctctacttattcagtacaatctttctgttcctctacgtatctctctcaagaaaccaatgcatctttcgatattcgccatttgatccgattcaagcaaaacttttctcttatccttcttcttatggtgaacataaatatgctcttcccactcatcgatcttcttgttcttcccctattttcttttcaggtaattaactatttcttcatttaagaaaaataaaataaaactatttcttcatttttaatatttttactaaattttgatttttagataaaataaactttttgatcagtggccatg

SEQ ID NO: 36345 - DNA, 3000 bp, Unknown; identical to SEQ ID NO: 15141
  misc_feature (1)..( 3000): 2750-1469P.txt file - cDNA_ID_3094509; gDNA_ID_2926058; Annot_ID_196159

SEQ ID NO: 36346 - DNA, 3000 bp, Unknown; identical to SEQ ID NO: 15139
  misc_feature (1)..( 3000): 2750-1469P.txt file - cDNA_ID_3094514; gDNA_ID_2926058; Annot_ID_196158

SEQ ID NO: 36347 - DNA, 3003 bp, Unknown
  misc_feature (1)..( 3003): 2750-1469P.txt file - cDNA_ID_3094555; gDNA_ID_2926060; Annot_ID_196176
tccctcttctatttctaatctacacaaactggagattctagatgttaaattctgctctatgctacaagttattcccaccaacatcaacttagcatctcttgagagactcgacgtgagtggttgctcacgattgagaacttttccagatatctccagtaacatcaagacactcattttcggaaatataaagatagaagatgtccctccatcagttggatgttggtctcgtcttgatcaacttcacattagcagccgaagcctcaagagattgatgcatgtaccaccatgtataactttgctatctctgagaggtagtggtatagagaggattacagattgcgtcataggtctcactcgtctacattggctgaatgtcgatagctgcagaaaactcaagtcaattctgggtctcccctcctccctcaaggtcctagatgcaaatgattgtgtatcactcaagagagtacgcttctctttccataacccaatgcacacactcgatttcaacaactgtttgaaactggatgaagaagcaaaaagaggaatcatacaacgatcagtgtccaggtacatatgcttaccatgtaaaaagatccctgaagagttcactcacaaagcaacaggcaaatccataaccatccctctggcacctggtactctctctgcttcctcaaggtttaaggcttccattctcattttgccagttgagagctacgaaactgaaggtataagttgtagtataagaaccaaaggaggtgttgaagttcattgctgcgagcttccatatcactttttgcgtgttcggtcagaacacctgtttatatttcatggtgacttgtttccccaaggaaacaaataccatgaagtggatgtgactatgagcgagattacatttgagttcagccacactaaaatcggtgacaagattattgagtgtggtgtacagatcatgacagagggagctgagggtgacagtagcagggaattggaagttttgaaactgagagtagcagcagcccagttgggagatttgttgggaaatttgaatttggaggcaacaacaatcaccacacagatggaaatggagatggaaactatgaagcagaaggttccaagttctctcaagatgaaaacatcaaaaccagcaaacgttggttttatgagttggcttcggaagcttggtcagtgaagaagatgaattctcatggagtctcatgaagaccaaaccagtttttggcactttcttagctccttaatcatcttcataaggtactctctcttaaataacagatggagatggagaatatgagcctgaagctgttaagctctgtaaatgtagatgaaaacatccttggttgttggatttagtttgggaagtttaagggtagacgaagaagtacaaaacatgcaacttaggtcgtaggtcttcccattaaccagcataagtatttggcatacactagagaccagtttccttaatttctgttgttgatgtgttgtgtggattgctgtagaagatatattgctctgttctttagtcgtcgcgaattctttgggaacaatcttaagagatggatttatctgagtttgcagagtgatgttagaattgattctggttagaatgtagattgccttagccatagaacgtaaacgttagaagcttatgtgaatcaagctatcaacgcttaacattatattctttctgtttcaggtaggagattgggaatttcgacgcagcacctgattctccagtgatcaaatctaagtccacacaaagagaccatattgtccaatcagttccagatacttggtgcattgccttctgttgtgagcataaaacggcaaaccctatgaaagaaggttgatagcattagagaaaacagagcattgcagctcacacagtccacccatgaactgatgatttttccggattgattgcatcttagaatcataatcctgtttccattggccttaattagctgtttaagtactaagaaaagtcttgttaccttgtgatctagttaattagctgtttaaatactaagaaaaatcttgttaccttgtgaattacttaagaatcataatcttacattagtgagttactttatacagtctacaattggccttgaacttacattcagggagtgatatggcggctgagactggtctataaaagctgctcctggttcaagcctcctaaaatggtcatttgaatgaatcttgtattattgattcgtgtttttactttctactttttagtaattactttttgccagattgattgatcttataatcataacaattgtaactctgtaataactttcttcaacatctcttttactatgaaaccaagaatagtagcagcaaccaaccaaaccaataataaacatcaaatctttaagaaataatattcggattacccaaataatcaaaccttaaggatggggtctcaacgacttttgggggaaacattttgtttttgtatttttctctacagtgacaaattcctttgaaatttcagttccgtatatagcttatccaaaacatcaaattaagcatcgtgatccataattagaagcttgtcattcccaaaagcagaatttagtttcttgtcgaataggtaaatatcaaatttcaacgtttgcaaagaaagtttggttcttcattcttgatgttcaaatggtcaattcgatattattgttaattaacttaatacaaatattctccttttcaaaccaaatattcaataataatatgtacgaaaatagtcattggtcctcgacgactataacaaaacacagagtcgtcgaaatttctcttctccttttcgtattttttcagttccagttacattccaatttcttcgaaacttctcttctcattttacgcgtttttgcttcaataaataatccaaaggatcggagcttgcttttcaaatcatactttcttcaataccagtctaagaatactttcttcaagttcaagcatttgtgatctctcatg

SEQ ID NO: 36348 - DNA, 3000 bp, Unknown; identical to SEQ ID NO: 15148
  misc_feature (1)..( 3000): 2750-1469P.txt file - cDNA_ID_3094574; gDNA_ID_2926061; Annot_ID_196180

SEQ ID NO: 36349 - DNA, 2518 bp, Unknown; identical to SEQ ID NO: 15147
  misc_feature (1)..( 2518): 2750-1469P.txt file - cDNA_ID_3094580; gDNA_ID_2926061; Annot_ID_196179

SEQ ID NO: 36350 - DNA, 3003 bp, Unknown
  misc_feature (1)..( 3003): 2750-1469P.txt file - cDNA_ID_3094600; gDNA_ID_2926062; Annot_ID_196184
acaaattgatgcaatatgtaacattatatatgagcattctttcagtccggtttatcccctctataaagtcctctattgatgctgtatctaattcgtagttttgaaatggtttggtgtttctaatgaattttttttttgttcatgatatctccagcatgtcaaagatcattgatcgttacgaaatacatcatgctgatgaacttgaagccttagtaagttagctacgaatatcattaaaattcttctggatgcagtttttgatgttatgaagggatagaagcactggtcgaacctgagataactcaatgttttgaatttttcgtactggacttaattctctctagttacagttattgcatttttcggaaaactcacaatctttctgaccattcccttcgttttctccatgtgcaggatcttgcagaaaaaactcggaattatctgccactcaaagagttactagaaatagtccaaaggttagcacaaagacacttttatctccctcttcttctgatgaaaaatacttttttttttcttttcttttggcgaattatgaatacagcaagcttgaagaatcaaatgtcgataatgcaagtgtggatactttaatttctctggaggaacagctcgagactgctctgtccgtaactagagctaggaaggtattttgtactgctactaagtgatcaaaccaattatcccaaatttgttttgttaattagttagatctgactacaagtatagtcttttgatattttcgtaatgtcttgttgtagacagaactaatgatgggggaagtgaagtcccttcaaaaaacggttagtacttttgttttttatttgctatcaaagctatattgtagggtaatgctgattttttaatactattaacctcggattctgcagatcctgtaaccaagtttaactctagatatatctctaggtcctgatttattcttggctttatttagatgaaaccctaattagaacccaaaaaaaaagcacttataaacttgtgatcaaattcgacttttctccctcgatgaatcaccgaattggatgaggatcatgctcagatagctttagaacttgttagaaattaatgaccttatgatcttgtccaaacaggagaacttgctgagagaagagaaccagactttggctagccaggtgacaaaaacatctcttgaagctaattcatcagttgatacacaataaaaatagaaattacacttgcgttaaacatatatatataaaagttgaaggactttgattgatgttaggcattttttttgtgaaacccccatatatcttaaaatctatgataaaagtcctttcaaaattcaaatttcttgttactatttagttgaatgatcagttttaattaatgaaattttccaaaaaaaaacagcctttttacaatatagattgatttcttgttaatgtttgttagctgtaggaaaataatataagaaagtttcttacaggtggggaagaagacgtttctggttatagaaggtgacagaggaatgtcatgggaaaatggctccggcaacaaagtacgggagactcttccgctgctcaagtaatcaccatcatcaacggctgagctttcaccttaaacttacagcctgattcagaagtttttacaaatttgtaaattataaaaagcttcataataatctcaacctttttatcttcctcgcgccaatgtggaaattaaggttaaaaataaaataaaacagaagctcatgcgaaagaattgtaaaactaagataaagctatagtagatctttattgtaccttcgtagacgatataagatttattcgtgtgtttgtctttttgtctgcaagtacggattggatttaaagttttactttcttcagcgtgaagaaccctagacatagagcttcttaattcttttggttttacttatttagttgttagttatttgattacttgcacgtgacgtggcatagtgattttttccttttccaagtttatcagttctacttttgaggaactcaaaagactattcttccagaaagaaagaatatggcagaaaaatacttgtcttggctgtgcttccagcttcggcccattgaggcccatcagaagttgttttcattttttgtttcatttgcagctgttactgtcttactgataagtaaattagtaatataatatatttctgtttaacttggttcgaatttttgggttttggaaaacatattaatatcggattggtttggctttggattcatcttcgagttttgaatgtttgaattttaattttgcgggttatttgtttccaatcaaaacaagtttatcggtcagttttagggtcagaaccaaaattaaaataagcctaggatcctgagaatgacaagtcacgagcggaatatcgtcatatgatataagactaacaaaaacatattgaagctctctgatctttcctctagattcgtaagagatagacagattgaaagtttgaaacatacaaacacagaacgattgacgacagccaagaacaagtattagacttaccagtgatactaattgtatccaaaatggataaccttaacttattagttcttaatacatcaaaacatgtgaaacaaacaatataaaactgccgggaagaaggagtaaaactcgcttaaaaccaatttctgttcggtagggatgatcatcggaccggtctaaaccgactggattaaaagtttcattttaacaacactccccctaaggaatttcaacaagcgtaaaactaaaataaataactattacatgcctcttcctcgcttcaaaacggcaccgtttccacttgttattatttttctctctatcgtctaacaaaaaaaaaaactgacttgggattttttttcatttgtctagcccaaaagaagaagatagaaacgaagaaaaaaagcaaacacattttgggtccccggtggttaggatcaaattagggcacaaaccttatcggagaaagaagccatg

SEQ ID NO: 36351 - DNA, 3003 bp, Unknown
  misc_feature (1)..( 3003): 2750-1469P.txt file - cDNA_ID_3094607; gDNA_ID_2926063; Annot_ID_196193
atgtggtcgatatattaagcttttggtccaaaaaagaattgggacttataagcccataggccctttaatttgtgtagaaattgttcatcttacttcatgacaaacaatcaactctctaaaaacttgattatgtatggattttgataataattcccttcaaattgcaagtggaagaatacgtaaaaacataatattaagaaactttaattcagcatgaagaaaaaagttggtaaacatagcagtgaactctatgaatctttaaccatggaatttcaagagattccaccaaaaacacttcaagttattctatgaggaaataaaaatactggaggaccgtataacaacctacatgcaagttaagagttttcaacaattacccatatccaatcgtcacaagatccgtatccaatccttctatttttagtttctataaattttattataagctataattttaaatgaagtactagattttaacccgcggtacaccgcggggacaattaattttttaatatatataaaagtttgcaaattgtatctatatataaaatatttttattttaaagtttacaattgttattaagtaatgtcctgtcaaactcgtcccgtaaaaaacctatttattttattaatgttgattttatttatgatatgtttataaatcattgtataaatattttgtaattttgtagtaattaactgctatcaaatatttatgcagtttgatgcttataatcgaattgttataatcatgaaaaaagcaatatcaaaaatgataattttgtagtgtttaaatgatattaaatattttggaagttttattttagtaactaattgtgtagttaatgtggagagatttcgggaagatagttaaatatcaaatatttaattcgaagatttactttctaattatcaaaaataattattaaatattagtggcaaccactgtaaataagtcccaacttgaagatttatttcacaaaatggctgcaaaaatgtatatatagatactaattttggatgaatttcattaaattcacttgtatatttttttattataacgtaaaataatttagttacaattttatataattaggatccaatccctctattttagtatctataagttttaatgttttattaatgtaaaataatttagatataatttaattattagtatctaattttttattataatataaaatagttttttttgttttttttggcaaaaaatgtaaaatagtttatttattactttaaattagtatccaatcccacagcactgtatggctgaagttatccacaactcacctacctatacaagcatacacgtgatgatatcatgctaatcacttctgaaggaacaatgccgaaaattaaaccttattatgcattcattaacatccgaatccatttttctactttgacaaaatgaacaatatccacatgccagcatctagctagatgcagacctggtaaggcaccaatgggtttgaaaccttcctccatattgttccaatttgtatatattgcatttcaaaaaaccagaaatatttactgtaccattcacgatcgacccaaaggatttgaacccaatctcatagcctaatgaatcgtattcaaaattgatatgcaccatgagaaactggtatcataaacaaaaactgatatgcaaattaattaattaaatcacacatatgctatattttctctatgggctggactggtgttttgttttaattattatgataagaagaattgcaccaaaaaaaaaaaagaaaaaaaaaaagaagaaaatcgtatctttttgttctacctatacagacacataatgcatcattttagtttttgggacaaagacataatgcatcaacgtgtcagcaatatatgaaacgtgaagaatgttttgtctgagtctgagtaaaattactagaaattaaaattagtaagactgactaattacaaatatcccaagtctgtgtttattctaagacaactactagaaaacttaactatattagactaccaactaggcaacaaatatcacaaagaatatcgtatgtcacctacctggaggtgcataccacgtgattttatccccattttagatatggtcatatcgattagttattgtatataaaaaaaaaattcttacaggctataaactattatgctacaaattttggtaaaaacctattacttgttattccgtttccaaaacatattatggctatattaaagtgtgtataaatgagttaaaacatttttaacaacaaataaatgtaaaaaaaatgagtttaacatcgttgtaagtaaacttaggatttgtttgttacctcaaacttaaatattattccctctgtttctaactaagtgtagtttaaaggttttttatttttttcagtataagtattgttttcacttttcgatgcaaacattaaatgtatttaatagtttttaaccaattatattttacatcatattttttattggttggattagttgtaattggtgatattttttttaaaaaaagataaatcaaatgagatttatatattttcttaatttgcgtgcaaaaactttaaattaaaaatattaagaaacagagagagtatcttttctatacataggtatatcacttatatatatatatatgtatacagctaaatatttatgtaaaaatgtaaacatacgaaactgtttatagaaagtataatattctaaaataagatatcaaacacagtataatatttaattttaaagaagatactattttgcgtttaatgttttcatcgaatataatttcttattccgctaactcaaatgtttattatttttaacatcaaaatgtttctaatactaaaaagtttaataaataaaaaaatctctctataaatagataaattatatcgtataatgttcaaaacaattcccacactatctttcctccacattaaagtaaagtatctctctcttttttctcctacgtactccatagtgatg

SEQ ID NO: 36352 - DNA, 3003 bp, Unknown
  misc_feature (1)..( 3003): 2750-1469P.txt file - cDNA_ID_3094611; gDNA_ID_2926063; Annot_ID_196192
aaacaacaaaataagaaaaatactatacttgatataatttgcttagctaagaattcaaaatataaattaaactatcgattgggtcaaatttagtacccttttcataaaatctcttttaacatactatatagtaaggatatatactgctggcataaaattactaatgtctatttgtaacagtgggtattaggtaacaacttttataattaataggttgaaaaatatctgtttaatattaacatataatataatttataggttgaaaaatatctgtttaatataacatataaagtatatatatctatataatttgcttttagaaattgatatattgaaatggtttaacagcctggcaaaaaacttcagtaaaattgtccactttagtttgccaaccgttgaggaaaaacagagttataaacacttagtcaaactagaaaaagactcttgtctttttggtatccatcatccaatcatagtttgactcaattaaatctaaattatttgttttgtttcaataaaatataaatcaatctcttttcgtcaacacatatatagtagcatacttttatttatttactgcctccttcacgcatataagaaatgagttgttgttttcctaataattcttattatggatgcaattataatactgatcagaaaatatacaataattgcctgtctaagaggtgacgcatgagaaatattcagtgatactaataatttctggtgcaaaaatgtttaaaagcaattatgagtatatatcgttcttaattgcgtctggaaaccatggaacaccaatgagtcaatactgttttccctcttatgctaattattccatactattttctacatatgcattgaacattacaactcaagggcagacgtaggagaaagggattgatgcaatcgtaaattgacaaaagaattaaaaagccaaagatcacctgcagttcaaattctttattattttcattaaccactcaataaattacgtgtttttaattaattttacctagaaaaaaatattgttgacattatttgcctcgacaaagcttcacccaaaatccagtccctagtacttcacatgataacacgatttactcgagtcaaaatccgacgtataagactacaaatatagaccatcaaccatttgactaaagacaccttttcttatatagaaaatataaaattaaaataaagatattaatatgcatatttttaactacaacatcacatatatatttagaatattgtttttgattatattttacattaaaagagtagaatattgaggatactaatttgacattcttcacggcatataacatctagaagttgtaaggcacatacatacatagcttaattacaatgtgtattattatttaccatgtttaatttcagatttgtatttaaaaattaatttttttttaataattacttatcaacctaatatcctatatgtttgggctgtagtgaatttgcagcccaatttggagattttaaacccttaatttatcttacaagactagacaacatttcaacaataacaactaagttaccagttttacaagaaaaagagagaggttatttccctataattatgactaaaagaatgtaactacacgtataagttccttttgtaacacatgtaaatgtaatatagcaaatgtaaggagtacaccacgaatcaggaaacttttgtttggccatttgtaccatattacttgcacatttgtggaaatgagtgtgtgactatatctgcatgcgtaaatcaaacacatgtaccttaaatgatgtaaaacagtagatctatcaattgtacacatatatatggatacatcgatgggtcattatagctctgaagttgattagtcgggccaaaaatacacctgatcatcatgatattcatatatgtatagatatatagagcacatatcacgaaactcatctatgtacatatatttatatgtttgtgtgaaaaaataattcaaaagatttattcatgcatgcaagtgtccatcaaagtagtacgaatgaataattatgaagggttcttttggcactttactaaatgtaataatgaaaaacaacattggtaagtcaactcgtgatgatacatttttggttaatagaatttcacaaaaattgagttttgtttttttgtcactttataatcagacagttccatatagttcactggtccgtccaatgcaatcttctcttccaacatgttttcttccttttatccgtgtaatatcaacaccacttgggactgttttttttttctttttcctttttacttttgaaattcatgatgaaaactaactagcaagttgatgtgcatatgtatgaaaatacatttggacgaatgatcaaatcaagaaacctgctgataattttagttaatgacttttttttttgtcaactcattacaaagttctggattttaaatatttgcatttctcttgatattaatgattcaattttgattgtttggagtttggaccatgcgtatgctgacaaccaagttactctggaattactctggattttggtagggatattccagactaaccccaagttatgaaataaaagacattgaaatcctcataaagaagggataaataaagtttatcttttgaacagttaatttgttttaacgtaattttatcaaacgaagcgcgagctaaaataaaatgaataattggaaatctaattttttcaaacacgaacaataaatatgcatgcatgtcaatcatgttgacttctccatacccatagctttagagacaaaatgaaataaataattggttctccagataataatatataataataattgatagggtgtgtccaaatccaagtctcttattaaaagggcacatattcaactactcctccataaacacaaaaagtccatcctaaaaaaagcaagtaagagataacaatttctctctttttcttttctcttcttcaaacttcaattcactaacgagagaaatg

SEQ ID NO: 36353 - DNA, 3000 bp, Unknown; identical to SEQ ID NO: 15154
  misc_feature (1)..( 3000): 2750-1469P.txt file - cDNA_ID_3094627; gDNA_ID_2926064; Annot_ID_196200

SEQ ID NO: 36354 - DNA, 3000 bp, Unknown; identical to SEQ ID NO: 15153
  misc_feature (1)..( 3000): 2750-1469P.txt file - cDNA_ID_3094632; gDNA_ID_2926064; Annot_ID_196199

SEQ ID NO: 36355 - DNA, 3003 bp, Unknown
  misc_feature (1)..( 3003): 2750-1469P.txt file - cDNA_ID_3094636; gDNA_ID_2926064; Annot_ID_196198
atacatttaaccagagaatatgaggtcttcatctagaatgtcaacttaaaaatatgatttataatcaacgaatttcggtgatatcaaatcatcagaactttatgaaaataaattgaataaatcatcagaagcatatcctaagatgaagtaaaaataatttatagttaagataaaaaaaaaagcaaagaaataatagaggaaataatttgttatatattaaaataaaataaagcagtaataatgttgcctttgcgtgagcttgacaaaagtcaacctgagaatggctttgtcttgctgcgtggaatacaagagacatccatcatcatcattttccagctcgaacaaatgattctctccatctatttctcttctttttattttattataactattagtattttctttcattcgcacgatttttttacatctccctcaaccgtttaatatgttaaattgtttacagtaaccatataacataactactacatttcgttttacataatttttttgaatatttcactttaaaatgctttgacgttcttaatcttttacctatctatatgatggttggtttaatacacggttatatcttaaaacataataaaaaaaaatcattatatgattttaaaataaaatatgtatatcagaaacaccctacacacgacggcagatgatatttatcattattgtaaaaattaaaaattttaaaaaaattaaaataagctaattggttgtagaagtagaacaataatttagagcacgcgtaagaaacaattgcatgattagtgtccgcctccgaaagctaactaacaatggggtttagttggtgttgttcatattttatttcatttgtatattactttctttcttttctttcattttctcttaaacttttggttttatatgcagttttcttttttctctttgttgctgactcgctgtcttattattttgttattgtcttgcagttgttgggtttacatcatcatgtcctactagcatataagatagtctaaaattaatgtattagggtcttaacaacaatgatttataatattttaaacaataataacaaggattcagtgattgtttaagctctatttttgtctcttaagtataacatgcatgcatccaaatcataacaacaatattgtcggaagtttgttcaagaaaaatatcacaagttacataaaatggatagtgcggccattggggatagaatctgagcttcttaataaaattgtcactttttcataagtagcataaactacccaaatcacaaaaatccacattaaactatccattcctcattattttttttgggttttcttcaagtgaccattttccgaagaagctcatatagtttatgggctatgttggcttaatgcagttgcttaccttctatgctttagtttggttattttcgctttgaacatggttgtatcaaaacacctttgtcacattttctcaaagtctcttactccctgattattaccgttagaaactgaaagatatgtaagggtaaccaagtccttgtaaccataataagagaggagatttggattaaaaggtcttccttcgttaagcttggaatagaacacaaataggttcgaatacaacaatgcataaatcaaacaaccaaactaaagcatagaaatcaattatcaaaactctcattgaacataagtagttattcatgtctaatctcgaaggagagtattattagagtgtaatacacaatttctgaaaatcgataattaagttgatttatatgtagatttgtttaatcaaggaaaataagttgacaacaaatcaacaatatgtgactgccgacacaaattgattagtaataccaattaataagaaaaaaggtagaatacgaccttcaattataaaattggttagtatatcacattcacttagttattcttaattaattataataaacctctcaaatcctcacgtttagaaacaatattatattcacgatttagagcttaaccatatcgataattacacacactcatatcattatcgcatatcgcagatttttctctcttcaaaattagctttgattattcacatcataaacaggcctagaacaaagtctcttgacccagcataaggtgttatataggcccataaagcccaatctttctaactctcttcgcaggtcttctccgcatacaagagataaacccgtagccgttagattcaggttttgctgattagcttattcatctccaccgtcaatttaatttaattgttttggttcaggaactggacaaaatattaattaatttcaagttctaatctttcttcttctccaactaaactactgtagctagctatctccagttctacgttctttctattaataaaatcttcttcttcttctctttttggttgattcccaccattgaacctctcacgaattcgtcgtcgtatcatcagattctgctcgaatagctgaatttgtttaatcagatagtgttcctcttgatctatcgctactagatttgttgtgcgtttgttttctttgctgataatttgcaaattctctgcttatgatctcgaggtagtaatgtctgttcttctctcccttattgttcattttttaactcgttgcttatcggatctgatccatttcgctctctttctctgatcgtgatctctcgattttatcctgctcgtatctctcgattttatcctgctcttattggtggatttttggttttggaggtttagatttcatgtcgtaggttttggattttattttctggcatcattacttggtgttgtgaatccaattcctcagttaaatctgcattggctgacaaaagttttgcttcatttttttttttgttgggtttcaggtaatggccacagagcctttgcacctggtttttatactgccgtgttttggtattggtgcagtgtaagaaattgattgtcaaaggaaaatatttgctttttctctgaggagaggggacgagtaagatg

SEQ ID NO: 36356 - DNA, 3003 bp, Unknown
  misc_feature (1)..( 3003): 2750-1469P.txt file - cDNA_ID_3094658; gDNA_ID_2926067; Annot_ID_196214
aagtattttttataatctttgtatctatcaaaatcacggtaacatatgtaattggtacttgataattaatttttatcatctttgtatctatcaaaatcatggtaacattagtattagacttttaaatatgatacattcttatttgactataaaatatgtttactccattaatatttagatatacatttgaaatcataattggtaagaaaaagttgtttacctttttaccagtaagtttattgcaacatgtcattaaaacatagtccattcaaattctaattcataattttaaggtttgaacatgaataacatttcaacctatgaaagtttagaaatcatttgataaacttttatattcattatagcaatttaattcttgaaaattggtaatcttagattcctttgactaatcaaaaacttggtaatgttgagatatatataagtgatcaatctagtgagggggtggccatacataggtgtattagtgcttatgagttggtaagaaatatagtctcaagaaatctcttcttctcttctttagtctccgcatgattattatctcgacataatcatgtaaaagatttatgatttaatataaaactattacatagatgatttgttttaatatatattttttctaaatattctagataccggaactttcgagaaagagataatatcacaaaaaaacagcaaatagtaaggtaaaattttcattattcttatttaaacattttttttaataacatatggattcacccaaatgttataatatccatggatatagatatccatattatataagatttatgaaagtatatctttgtatttaattttttttatataagtcacataatatgagaacaatattttctaaaactatacaaaatagattatataaatcttgaaaaagaccatgtattttgatttaaagattaagatctctggatgttcatcttcatatttatttttgtattatatatttatattgtaattagtttttgttatttataatatcaacaaattcagatccggataattgtttctcgaggtaattcgaatcggaacatctcgaaattttaaagtatctagttctgtgtcgactttattgtattatatcattatttacacacaggaaataagttctaagcatatgatattttcagtagcaaaactttttcttatataagctattaaatattttttttcataaaatatactttcagtttttagaaaatttataattggtaaaaatttatttacaaagagcgggagccaggaaaaaagaattgttattatttcaagtgtaattttcttaaacgttgacattttttttgattatatactatacattgatcaaaatacacacgtgcaaaattttaatctaatcattaataaatttgatcttttttattttaccgttacgtttgaaattataatataacgatgattattattttctatatatcaaaccaaaaatagctatttatacaatccaaatctttttctttttttaatcacacaaatcattaacatttgatgaagttgtttctttttcaatctccatcaagatcattaaaaatatcattttacaataaaaaaaaattaggggttaaaacataaataaaacagaaagtataggggacaaataacacaaaaacaccaccacgtccgccaccaaaagttttaactttcacacgaagctagccatgtcactctctgctcttcttgaccattgactttttttagagatacagagatatgtcttactatttaatttcctcattttgcaaaatggtaagaacgaaaaagaataccgtcattgagggtaaaaccgtaaatattaggatacaaacgagggcaatttaggtataaaagaggatgataaatacgtggtaataggtcaccaccaccaagctcttcttatgttcatcccaaaaaagctttaataaaaaaataatcgtttctctatgaagaagaagacgacgacggaagaggaagacctagcatcgccgacgatttatttttgaattttcttagtctaagatatctccggcgaggagacgtagattcatcgatctaatattcatcgatctcgttcttgtggctttttaaatcgcccagacttttaagagacgctggatttgatatccgagaagagccgtttgataaatacgtaatcgattcgagcggtggatagtgaaattacggcggaggagttgaatcggatctcggtggtggtgtgtttctgtatttgagtgaggaggaaggagaaatataaaaagtaggtggagactcaggtatatgaaaaccctaagttctttgattactactgctctttgtttattggttcaatcaaggagagatctgttttgcttatggacgtcaatggaagatcccttaggctgcgatacgcttcgaatattcttttcgccatggaagatcccttaggtttctgcaattttcttgggagatctcttaatcatgagaacgatttctttttaactcatcttcctcaggaacttagtggacatgagtctagcctttacccttctgatttggctcatctatatgatagaattaggacacgatgatactctgattttgggcaagtttaatggatcttggcttcacgcggccattcaagtttttccagaatcttcgatttggccaagggcagtgatctgaagtcagatttaatcggactagaaacatgaataaatacttgttttgtatgcttttaatgtcaaaactctggaggtttttttcagacttatagcgcaatctgtcttaaggtaaaggctcatagagtctttaacttgactgtctagctatgaagtttttttgcctgcagtgactctattattgtatactagaagtaggcaatagctcttgcttatgttttttttttaatatggtttactaatgaaaggttattgcttgcaggtgaggtaagcgttcataaaacaaaaatcaagttttgtgggagtgcattgaagcatg

SEQ ID NO: 36357 - DNA, 3003 bp, Unknown
  misc_feature (1)..( 3003): 2750-1469P.txt file - cDNA_ID_3094661; gDNA_ID_2926067; Annot_ID_196213
ttgatttcatggtggctgcgcttcgatcgaggatagcttctccagtgacggaattgtatgggaaggagcatttaatctcgactcaattgctctacgagctctctccttgtttcaaactcggtttcgaggccgcgaatctcgccattctcgacgccgccgataacaacgacggtggaatgatgataccgcacgttatcgatttcgatatcggagaaggtggacaatacgttaaccttctccgtacattatccacgcgccggaatggtaaaagtcagagtcagaattctccggtggttaagatcaccgccgtggcgaacaacgtttacggatgtttagtcgatgacggtggagaagagaggttaaaagccgtcggagatttgttgagccaactcggtgatcgactcggtatctccgtaagtttcaacgtggtgacgagtttacgactcggtgatctgaatcgtgaatctctcgggtgtgatcccgacgagactttggctgtgaacttagctttcaagctttatcgtgttcccgacgaaagcgtatgcacggagaatccaagagacgaacttctccggcgcgtgaagggacttaaaccgcgcgtggttactctagtggagcaagaaatgaattcgaatacggcgccgtttttagggagagtgagtgagtcatgcgcgtgttacggtgcgttgcttgagtcggtcgagtctacggttcctagtacgaattccgaccgtgccaaagttgaggaaggaattggccggaagctagtaaacgcggtggcgtgcgaaggaatcgatcgtatagagcggtgcgaggtgttcgggaaatggcgaatgcggatgagcatggctgggtttgagttaatgccattgagtgagaagatagcggagtcgatgaagagtcgtggaaaccgagtccacccgggctttaccgttaaagaagataacggaggtgtgtgctttggttggatgggacgggcactcactgtcgcatccgcttggcgttaacttcacacactcttttttttcttcttattattaccatattattattaattttcgagattattctgatattattatcattgtgattttccatttcgaaaagtgtaggaatcttatgtaacaaagaaaaaaaaaagacttttatgtttttctaataataaaagaaagagtgattgggttctttaatattctatattttgtaatatatcttagaatcacgaagatatcatagaatttatgccttaaaaagatgtaatatctgaggaaattttgcaaaagaatctcgcaggtggagcaataacaacttgacaaataatgtgattcttagacctcatacctatgaattattttattagactattaacaagtgaattactacatggtattgtaacttgtcatgttggatatgaaattctttcttacagataatcatattgtatatatgcgtgtgataaaaatttatgattggactcagttttaacgtgagtgaatgtgttggtgagaatataagctaaacaatactagtatacttagaggaaacaatgtatggcgacttttgtggtcatggaccttatagttcaattattttaacactaataaaagttggcattcgatgggtccatatccgatggcattcgatgttcttattttatattatgcttataaagtatccatctttacgcgagacttgtaaaatccgtgtccttggaatattttaaggcatatatgaaatataacaaacctggtcattagaaaaagataatattattattgtttggtgcaagctgtttgcggctaaaattatgcaaaatctttttgaaagacctctcttcttaacctcttgtttgttaattaagatgatttctttctaatatacgcaactaataccgtgttgagtgtttgattggattgttagattgttttccaagaaaaatcacatagacaaaattttatccataatttcttcatagaacaaattgagataaactttttgatcaagccaagtatgtaatgttaccaaatatataaataaaaaacgaaattttcatttattcattcgaaatgctacgaggtcttaacacttcctggtcctatctgaatttgtgatgtaaccaactttcctgatgaccacattacattatacattcatatgaaataaatgttacattcatttagttagagaattttaatgctttgttttttgaataaactgaaaagttcatttatgactcacacatcttatgcagttgacgttggtatatctttcacttgatctgaagtacctagtagctgcaagaaaagaaagtaacaaaagacttacacacgcttgcaataaatgtaagatggttagaaaaatgtggccatgtaggcctagtgcattatattattggagcactaataagtcaatatattcttaagaaaatatgcgatgtatttcaatatggtttggtgtggttcatcttcaaatatattatacagacaatatagagattatttgaaaaataattcttcttagggatcaagcatgaagcaatataaaaaaaaaaatggctcttgttgaaaggtaaaccaagcatgagtttctcgagagtttataaatggttagttttaatagtttacacaataacttatttatatcaatgtggattcttgtattagaagagtaaattgttgcttaaaaagctagaaaaaataaatcaattttgtattttgttagtattatgataacaactaacaatgtaatggcttgagtattaatattaagttttatgtgtccagtccaacgggcaagaaatgtaaaagaacccagactctcactttattgggcttataggtccaattaataaaacttaatgggcttatccacacaacgagtttacgaggagactgtgagagtttgttttcacagtcatcatcatctctaagaaacaaacttgtatgacctttaagcagcaaaaaaagaaaaaaccacaaaacttctctgaaaggtggataaatg

SEQ ID NO: 36358 - DNA, 3 bp, Unknown
  misc_feature (1)..( 3): 2750-1469P.txt file - cDNA_ID_3094746; gDNA_ID_2926071; Annot_ID_196233
ggg

SEQ ID NO: 36359 - DNA, 3000 bp, Unknown; identical to SEQ ID NO: 15163
  misc_feature (1)..( 3000): 2750-1469P.txt file - cDNA_ID_3094800; gDNA_ID_2926073; Annot_ID_196251

SEQ ID NO: 36360 - DNA, 1625 bp, Unknown; identical to SEQ ID NO: 15164
  misc_feature (1)..( 1625): 2750-1469P.txt file - cDNA_ID_3094800; gDNA_ID_2926073; Annot_ID_196255

SEQ ID NO: 36361 - DNA, 3003 bp, Unknown
  misc_feature (1)..( 3003): 2750-1469P.txt file - cDNA_ID_3094841; gDNA_ID_2926077; Annot_ID_196268
caatagtatcgcctaatctctcgcagaaatctcttcttgttgtaatctgtgaaatcatctagttccacatctgcagctaggtaattgactatgtcagcataccatgggtagtccttttcgattgttgtggcggcactgttttcagtcggtaaccaatttcttgtcagattaggagggtgtcaatcgacatcttgagtggtgtcggtcgacaccatcgagcaataccgagtagcatccttttctttatagtgaatgtcgatcgacataggtggagtgtcgatcgacactgtagctcgattatgcaacacaacaattttgcagtcatggtcctcagctgtatctatcatgcaaatgttttcctcaggcaaggaatcattaatgggaacatcatctttaattctaatacgtgacaagtgatccgttacaccattttcaactcctttcttatctcgtacctcgatgtcaaattcttgaagaagtaaaatccatctcaaaagtcttggcttagcatcttttttttttcatcagatacttcagggctgcatggtttgtatggacaatcactttagatccaacaagacaagatctgaacttctcgaaagcgaacactacaactaacaactctttctctactgttgcatagttcatctgagcgtaatcaagtgtcctactggcataatagatgtcgtggactttcttatccttcctctgccgtagaacagctccaactgcaaaatcactcgcatcacacatttcttcgaaaggcaaatcccagtatggtggttgaactatcggtgcgctgatcaaggcttgttttatctgctggaagccatcatgacaatcttgtttaaactcgaactggacttccttgtagagtagagctgtcaatggtctggggattttgctaaaatctttgatgaaaatcgtctgtagaaccagcatgaccaaggaaactcctctctaggacaaaaattccactattctgagttttcaggtcgtggtccctttctataattctgaatttgaagccactgatattataagctgaaaactttataaccttactagatggactaggtgcaaggcaatgaatatcagcaaaaatgccatcgaggctgttcttttctaccttttgcttaatccattgactaaaatggatatgcacatgtcgatctatatctatcatatgtcctctttttcaacgtcgtaattgtgatctgcttaattcactcttaaatacgctacacattttcaaagggagacaaatattaccattataaatgaccacagtcaatcaaaaactgtcagcctaaaatagaaaacttacttgcgatagtcatctaagaatgaacattcaactagaatgtatttgtgtgcttgctgcctctctataggactaagtgtatccaatctggaagcaccaacatgcaacatgtctcccaagaaaaggaaaactttgtggaatttgtgattcagacctaaatcatgctccaccacagagtgatcatccactctcccaatacgattaaatcttgtttctacatcatcaagatacatagagcaaaacgtaacacactcatcagcaatgtattgctcataaattgatcctttaggttgtgttcgatttctgtaacgcccgtgaaccagaaaatcggttagggtttatttttaaatcatccggtttaattggttgggttaattggaaatcctagagtgtgcctataaaagaaggaaactcgaaattagggctttagttagccacttttcgttttataaaggagaaaaagagagaaaaggagaaggagcagaatcgttagggtttgggagaaatcagtttcgtcatatcaaatcgtggtaaaaggtaacgaaatttggtagcgttattcccaagtcctttatcgttattctacagtttacagaattggatttggattaaaattggttgagttattcgcagtttcgtgagacacgttttctcagacgcgaattaggaccagcggagattgaaactgagatcgtggtcttgtctgttttccgatcgtcacgagattttgtgggcagctttgtgacgtctgcatctaggatttcattggagcgattgaatagttaacggttattttgtattttagggtttcgtctttgagactgcttgtttctggtttttcctgtccactttgcttcaaggttgcttttggttgtggacttgttgtagaacgtttctggactgtttcagacgcaaggagagtctctcctgggtttaattgctattagaatcaatttgttaaggtgagtgcgtgaccatgagcttatctgagcgattgggttgtgtgatttgttttgtgtgatgatatgtaggtgtggtgaatgtgttttgggtgaattgttcaatgactggtttgtttgtattgtattcgtgattatacccttttatttgcttgtgtgtatagctcgtagatcggaggatcgcctcactaagtatttatgataatacttacgcatctcattgtgttgttgatgcaggtaaagataaagtgtgatcgtagaatcatggcaaggaagagaggatgatctaggaactcgtttgttttatttttggtgtttttggttattggaacccggttaggattgtcagttattcttggttttgttggtcgaattatttatttattcataaaatagtatttttgacttgcggtttaattattatgttattggttggtttaattagatatttatgggaatatttaattatatatttaaaaaaaaaaatgggtcgggttgtttcaatttggtatcagagcgattacggttctaggatgtgtagaaaaattaattgatgaattattttcctgatgattgattatggagtgtttagtcaattgtgtgttgttggagtcctaacatcatcttctccgagccttaaatgagattccacggtaagttgtttgtgatatattcgtttgttttagtttcttagccatttgttcttgagtagcgcagatg

SEQ ID NO: 36362 - DNA, 2388 bp, Unknown; identical to SEQ ID NO: 15170
  misc_feature (1)..( 2388): 2750-1469P.txt file - cDNA_ID_3094882; gDNA_ID_2926078; Annot_ID_196300

SEQ ID NO: 36363 - DNA, 3003 bp, Unknown
  misc_feature (1)..( 3003): 2750-1469P.txt file - cDNA_ID_3094887; gDNA_ID_2926078; Annot_ID_196298
ccagatataaaaaatcttatctaataattaataaatctaaaaagtagcacgagaaaggaaacaaatttcgaaaatcaatgggttatgtgaataaaaggaacacaatataatatttgttttggaaaataaatgaaatctaaaaattatataatagggatcacttcggattataatgagatacatgagagattggcgggcacatattgatgaaattttccttgtgtgattatattttatatatagccatcaaccatttgtgacttcttatgaatgaatatccataaggatttgtgagagatcaaaataaacaaatgactatatatgtccatggcgtagaaaaataagcacaagaaagataagaaaactaaacgacataggataaaagaggaagaaaagagagctcggaggtgaaaataatcatacttttatttttttgtgacttcttatgaatacataaggggttttataactacaattatatcataaagtttaagcatactctaagagtattatgatatatatataactcaacgatacaataacacaatgcaagttgttttgggaatcaccatttatattgcttttggtatttatgaatagaagcgacgtataggtagaaaccatcaggattgatttgccatagacaagaaccatcgggtttgcatcttgatttgtctctatcgagatcaaagaggacgaaaggagtcattttggccgatgatgagaagatgacgcaattccatctagttgattggtcggtgtcaaacataagcacgtaagtctcacctcgaaataacacctgagacgaagtatctaatttggacgaggtgcatcttatggtgaacggatgagagtcaagtgcaaggttgttggttacctttacggtgaagactggagccgtgaaagataacgaagaagtaaaggctaaggctaaggagacaaggaagaggctatatgctttggtggatatcatctttagttttgttttacacactatatatcaatattcgagtgaatcatatatatatataagaaacttctttgactcacaatgtaatgatcttaccatgtaatcttttaataataaaaatgagtcaagtcaagcaatgagtcaagtcaagtcaagaaatttatcaaaaggaaattaataatgaaatatgcataaaaggaccacgaatcagaaaagagttaacaaactagccatggtatgagtgtacaccatcgctcttcgattacaattactcgtatacccatttaagcattttatttgttgaatgctatttgtttctggcataaccgtggggattacaaaccgggatgacaaatagagaaagaatgcgaataagcagaaaatgttaggatacctattctataagaaaacaagaatttgttgacaaaagaaagaaagttcgctaaaagagttatttagtgtctcaaaataaagagatcattgtttccacaaatagctagcatataatcatcaaaaatacaagaatgagatatttacaaaaaaaaataaaaaaaattaatacattttatcacaacacactagtgaactaaaatccatagacatatacaccatcagtgatggtccatccccatgcgagtggattacaaatatataatttaacataagtgtgtaaacggagaaaaactaggtttacaagcgttttcttttttcctaagacggaggtgatgttgttgaagtgttacgttggaaactgtatgatgacgaaactctatcaaaaaagacgaaaggatgatgaaacgcaatggttaccacaattatttcagattttaagaatgagataatttcataattaaaaaaaaaaaaaaaaatttatgatgatgttaagtatcggttcttaaagtgataacatcgagttagccaactttcgtatatgtgatatgaagaagaaaaaaaattgaatcatacgtatgttttcgttacgacacctaaaccaagttcttttctgtgatttcttcttatgaactaaatcatatcataaatttaaaaataccttagaaatcttataattatattatattatacgactgaacgatacaataacacaatgcatattgtttggtgtatcaccaattgaattgcttttggtatttctgaatagaagcgacatataggtaaagaccatcaggattgatttgccatagacaaaaaccatcggatctgcatcttgatttgtctctattaagatcaaagatgacgaaactactctttcttgctcccgatgagatgtcacaagtccatttaactgatcggtttgtgtcaaacccaaactcggaactctgaccttgagatacaacagcagaccaaatatctttttgtggcgagatgcaacttatggagatcggattagagccaggtgcaaggttgttgcttatctttatggtgaagactggagccgccaaagataaccaagaggtcgttaaggctaaggagaccaggaagaggctatatgctttggtggatatcatcttttgtttgtatcaatatttgtgtgaattaatcatttatataagaaacttatttgactcccatatatagtaatgatctaattaccatacataattatcaaaaagatagaaaaagagtcaaaatcaataaattagtaactaaattaaaaactgattcttaaagagtactctaattaattagagagaaatttacaaactagtgtttggtagactattaaaaataaaataaaatgaatcaacaccatttttcattctcttcaagaatcccattaaaagtcaaaaccatgtttgggctaggaaaaatatgtttgggctttagtaggcccaactacccaaaataaccacataaagtaaacggttatcattaatgggcggttactaatacttaataaatataaatatagttaaattaatatcatttctagagcttatcctaatttctctccctttcgaaaatcgaaacaaatcggtgcgattactccgttttgaatttcaccggcgacgatg

SEQ ID NO: 36364 - DNA, 3003 bp, Unknown
  misc_feature (1)..( 3003): 2750-1469P.txt file - cDNA_ID_3094899; gDNA_ID_2926078; Annot_ID_196295
gggtcgggtcgtagatcatcgggtcgtccggtgtaggaagatgaagagtactgggaagaggaagagagagagaggaggaaacatagagagagaaacgcggtggtgaggattatgtaaagagtgactctcggttgctccggtgtgtgctgcattttctcacggcggcgcgtgaaacttcgacggctagagaagaaagctaactgtagtatgtaatggtcacagtacgcatcgaactctgaagatagaatctttttttcttatatagtttaattaattatgtagcttattacttaatggtaacgactaacgacgatattattactaaataatttgattctataatttccattacatcataacactgaatagatgattttattacacattttacaaatttgtaataatcaagttcttgagcggcttcttcgccattcttggtcaaaattttaatatatgagagaagagcaattgcagcatattttcactgaaatggtcaaattccaaatatttcaaaaaatacgtctcaacatatgtaactaaagcaagacaatatatcttgcaacgactcaagtactaataaacttatgtacaagacaacagaagagcaagcatgaatgatattgggttgttctctattgatgaatggatcaaaagttttgtgtaaaaaaataggaaagatctaagctaatggaaacgtagcttaccaaaatgttctcgtactgaatgtgaatggccaactaagcagcgacaaaaaatgtctacccatcaaaaataaagtatgtgagatcatacaagcacaagatggtgtggaagaaaagtaattaatcaaccatttgggtcagataaaagattttatgttgcttaacaagcgtaactacatttatacatatttataaaagtacaaaatacacaagcaaaaagaatacaaatcgacacttaataaccaatttccaagatatttgagatcaatgtcaatatcgtatcatcatatacatgaacatacatttcaattgtagatttatgtgtcacatcgttagccaaaatagtatactaactaatatgaagtcttgagcatatattgatcacttaaagaactgctttaagatatatcttccttaccatcatcaactcaccataattcaacataacatttgatagatgagcttaaaatcttaagaagaacaaaccaaacctacatcttataacaagctagttagtatttgaccgtcaatccacaagtaaacataaatcttaacgtatgagactatgagtaagcatcaacacaatatcagatttgaaacaaaatggttttgaatggtaatctcgcatcgaggatagaccctgaaattttggtggtctaaaaattttctaaaagttttacaaatttgggagcctatgtataaaagtaaaactaaattagaggcctttttgtaaatacatgttttatggaaattcacaaaccattgtttctcctatttgtttaaagacgacactgtcattgtgatatatcgttttgacaattaccgattttaaaaacgttattaaaatttttttagcttttagagatacaacattatggtcagcaatgaaagctaacattatggttaatgaacaagaggagaacataaatgtcaaaaaataaacattaagaaagtggtaacgtttgattctaatgaattgtgttactttcatgatataaattgaatttagatcgaatcttgtctttgtttaaccaaaacaaaaaaaatctaatcaatccaatttgagagagaagtcataacttttttaacacattgttgacttaagtatcttctaaagatatattcaaatcagatttattttctaactataaattacaaaaatgttaattaaagatttctaatgttgtactccctccgtcctactaagatgaattttttagaaatttcacattctttaagaaatattgtataaagacaattttaacctcttaatatactttaaaaataataataaatatttatctaattatttagtaagggtaaaacaggaaaaaaaagtttataacattaagaagatttgaataacattaaaaagatttgaataattagaatcttgaacttgacaatatttaaggtaaatcgcatcaaaaaaaaaaaaaggttatcccttaattttgaattcataatggcgtaattgtcacaaactcacaactgtgtaatattcacacctttatttttaattataggttttttattttaaaagtaatgaaattcacttttgctttcaaaataattcatagtgtagtgcgcgtagatcatacatatccccaatctaccccgcaagttgcggtggcaattttcataaagtcaaaaaagtattcaacacgtgtcgttccactattcgtccaacactcacgccctcgtaatcctattggttcatatgcatcaccctcttggtcactcaattatattatcacccttcaactttatccataatcacgtgaatgccattacactaaaaacagtaatcaaacttttttatgttaataaaataagaaaatctaatgagagtataagatcaaaaagcgtctatcataagtacggtcgatcttctccttctattttataaggtccactgaagtaaataacaaaacaacgactcacttttggaataattacactcacaccattcaatcacgccgttgattttggtgactaatattaaactcagtggaccgcgttacacttgattgtggcttcaatatacgttataggaaaaagtgaatttaaaaggcaaaggaaaaaaaccattttgtgtcatccccttccccacttccaaccaaaattaatttaaaatgtcaaatattttttcattttcctcttttcgaaattaaagaaaaccctaaacgccgttgtctgatattgagagagagagagagattaaaaacttcttctggttccttttatcaacattttttctctctcttaaaacttcgaagcgatttttgatttacagactatg

SEQ ID NO: 36365 - DNA, 3000 bp, Unknown; identical to SEQ ID NO: 15173
  misc_feature (1)..( 3000): 2750-1469P.txt file - cDNA_ID_3094904; gDNA_ID_2926078; Annot_ID_196294

SEQ ID NO: 36366 - DNA, 3000 bp, Unknown; identical to SEQ ID NO: 15168
  misc_feature (1)..( 3000): 2750-1469P.txt file - cDNA_ID_3094909; gDNA_ID_2926078; Annot_ID_196293

SEQ ID NO: 36367 - DNA, 3003 bp, Unknown
  misc_feature (1)..( 3003): 2750-1469P.txt file - cDNA_ID_3094950; gDNA_ID_2926078; Annot_ID_196284
aaagccatacgcaacggtattaacggtaaatttgctatagttccacatacaaacattatgtgtgagtcatttggattgtacgtttggtattcgggtcgagctatttgcatgtggtgaggttgtatgaaactatctgctaaaaaacatttagtcttacgaggccagaactagtcggacatttaccctgccactaaagtaaattaaggtaaacctaatttcagaagctattaaacaatgttttcaccaaaagaacgactaaaattagggagacagagcactaagtaataattagggattcttgtaataaaaggaaaatatgagatatacttaacaaataattaaggacagatagaggagccggattaatagggaagttcacgtgaaggcacagcttaaaccagctgagccaaacacatatactaaattctcattctcacaaacaaaaatcgtgggtccaatcttgattatgtggctgtaaaacctaaaaacataaactattcacatgaataagattttgattagacaacagtcttacttttgtctcttcctctataagattaatctgacccttgagccactcaaaaacaggtatgtctatattcatttcctaatgtgacatctacacacatattatctcttttttttttaatcatgtgactgtagaaactgattagtaaatagtaataggaaaacaaaatacttagtatagagttatatagagtatagagagagggatgggtccaaatagttgatgatggaccatgtgaaaaaaacaatgaaagcccacaccattaattgtggtaaaggatgagaatctagtgttgtagttttccatgtccttaaacggttaaacctatcttctaacaaaattctccaccttcccttctgacatctcccatcacttctctcttaatttattccatccattccaccaaatttttagtttcactttttttactgtagtgtgtttacacttgtgagtgagtgaaaaagtaaagctagagaggttactgttttgagatgctctttttagaaagggccatatataaatggtagtgtagtagtactagtggagcttcttcatatacaattttgacttctcttcattgaatgtaggagagaggctctttacatcataaataaaacaagaacacagctttcagagagatagagtgagattctccttcattaacatattcttcttcatgttataagaagaagaagaagaagtgtccaaaaggattagagatgggtggatgcacaagcaagcaagagaggagaggtgtgagaagtgtgaaggagacatcaaaagaccaaagcagaggaagaagacacctgataaaagagagagatgagagagagaaagtgatgtttcttcagcttaaagaggcggagagagagtggagaaaagagaggaagaagctgagagaggaagtgagaagactaaggaagaagctagaggaaagagaagaagcaaagacaacaacaacagaggaaagagagtattggaagtgggtggttgaggagatgtgtgtagagagagcagtgagagatgaagccgttgagaaatggaaacaactctatttagctatcaagaatgagcttgatcatctcatctcccacactacttcttcctccggtaaaataaactcaacttatttcaacttaaaattagaaaaagtaaataggatctttaaagtgtgtgtttgtaggagaagcaatcatgcaaaggaaacttgaggaacaagaagaagaagaaacagaagcaaagagagttgaagtattgagagatgaagttagagttaaagaagagacagttgagacacttgaagagcaaatagttttgatggatagacaaaagtatgagaaagaaagagagattgacttattgagacagagtctaaggattcttggaagcaagaagaaaaagaagacaggatcattcgcatcaatgaatctgttgatattgaagaccaaatgtgtcgaatgtacataaacactttttactcaaatagtcttctgcaaacagtcatatctcgtcagagaatcttgatccacaatgtcatatttatttctcttttggttattttacaatttttattttggaaatatagtaaatcatagcactatgagttcaaaaagcacatgtcccatgaaagatttgcacaaatcgtttttttttttttttgttggagttagatacaattctttagcaataatgataatgaaccatttttccaaagaacagaaactgtggaaaaaaacttactagacactaaaagtctaaaacaccacttgcttttttatagcccaagaaacttctagttctaattaagaatgtccaacttccggttcggttactgaaaattatcaaatttttgttagatgagataaagaagtgaatcctacaagaaatatatcatgtggttcggtttggtacaattttgatttctgctagggttttatcctttttagcaaaatttactttaatttccgtagtaaaaaagaagaagttttagttggtttatttcttatttttgcttcgattacggcatttaattttagcaatatttcattaacaaaaaaaaacaattctaattggtttatttctacttctttttctgtcttggtttgatctctattactatattgattatgaaaaaaatatgaaaccaaaaccatttattatgtcttcaattccatttttaacccaattatttcactacaattgtaataaccggttattgcacccctaattataactatttaagcaatcgcatataccaaaccagcgagttaaaccaaattgtttcccaaattatgctaaacgacagcgttttcacaaattaccaaaaaaacctatttttctgtatctatctgaattcagagtcctgaccattttatctcactctcacaaagtcttcacttttgaagtgtctcctccacacgcactgcgccgccaaaaaacccttctttaaaccctttcctcctcgcgccgtcatg

SEQ ID NO: 36368 - DNA, 3003 bp, Unknown
  misc_feature (1)..( 3003): 2750-1469P.txt file - cDNA_ID_3094961; gDNA_ID_2926078; Annot_ID_196281
actctatatgatctaaaactaaatcagtagaagaaaactaatgaagaaccttgggcatgagactgagaaagacgttcaatttcttcagaaactttggcactttcagcctccacagactgaagctcatttctcaagtactccaagtaagcatctgtcagatttccatcacttaatttcaccattatttgactttcatacttcatcttaatctcacaggaaacaacagagcaaacctgaatcttcaacatccaataaatcaacatcgccgtattcttcaacaatctctttcacctttggctacacgaaaacgaaattagcaatctaatcgaaaattagacaaatttgaaaaacggaaaagggttctcgaaatctcgcaattacttcaaactgaagaacaaaatcttgaaccaccagagtctcgtaatcggaactacacgattctacaggctcttctctgcaattccggggaaagaaatcgagctctttcacgcgcctgagaaaaatgagaacaaatagatgaacaaagcagcacaaaaatcaatgaaagaaagagacgaaagagaagtagaaaacctgcgaatctcttggagatcgagagatccgtcgtgggtttcttcttccattgaagaaagctttagtcttggggattcattttggcgctactgttagagaactgaagagagtgtagttgtgaagttgaaagcagagaagacgatttcaattttcaaatgggaaaggtgaaagagaaacggaagagaaacataactctccccgaggtttatacttttcttcaacattaacccctgaattctatttgaatcaatttgacccagagggttgaagttaattgcaattccggttcaatttattatgaccaatcgtaacgtattgaaccagaagactctttaattttaatctgtaacgtttacttccccttttaaaaaaaaagaaaaaaaaaacttaattaaatttaatcaaaatcataattatatatcagtgagtatgttccctcagctcccaaattcgaccctctagtagccacatctgctttattttattttatctttcagtaaatctgcccccattaaaatgtccaataaaaaatcttccttacttcagggtagagattttgatatttacatatagttattcttattgtaccgattgtatcgaatatttatatacttggatatatctttgtacatcaaatggagtcaataataatatcaagaacggtgaagaaactgccagctagagggatgagattgattgatgcagttatcaaagtggattgcaacaactctttcatgtgaatgtgatcttaatatcatgtcacacaaatacataatctgtttctactaattgcgttttgtgtaaaagattaataatacttcacatcttaattactctttaaacgaatcattgatctttcatgaaaggaaaagaaggttctagtctttgtcagaaatccataatccaatcttgtaaaaggcaaacagtttttgtcctaaaagatttgacgagcaacgaatcggttcattcccagccgttggattgatttaaatactcaggaaaagtcatcccaaaaaggtgggaacttgccactccacatcaccatggcacgtggtaagcttacagaggaaaacttcaatattggtttactttctccaccactcaacattttgtttgttcgtgcatgttgttttgtgtccgtgtattatctattaatctatgttagacatttttttcttcttttttcgtcaaggatattcctttttatgtttaaagtattgtgtacatatataaaaaaatattgcatattagattattgacttgaatcgaaggatttttaaaaaaaaaaaaactgtttgtagagaagaaaaatcgaaaactacttgtattcatcagaattaaaaaaaaaaagtcagtctaaaaatataccctaataaactgacatacctatttcaacgatacaattctataatgagttattaaattgatttgatttcgtattctctaaaatatactcatagacatagcagaaactagttaatttgcttatatgttcatattcttgtacatcatgtgatctcacgtggaataaaaataatgtgaccatctctaattctctacttcacttagtatctaagtatccactgtgataccttgttttctgctcaaagttgtacatgcgtagattaataaatacatttcaccccttcaattgatcccaaaagcctctacaagacagccaaaacaaatcaaggattgcgcaaagcattcaagtttcgaaacaataatttttttaatggttgacaaaaagcaataatttgtaaagcgattcataggtcagcttctaaatgttctcgaaataactcgaaccaacacctaaaccatttgttctaacgataatagacgaacgtattagagactcgttaggaaaacactacttgtatatattcacttttacatacatatttgtttccttcatatatttatttatttacataacaaaccaatatgaaaaacgtacgtttcatgaaagagaacgttgtagaacactatcaccgtttgcttgtaagaaaaaggcttatctcacctataaactcgtgagtcatatttatactcttaacaataataaataaaataaaactctattttggtaaccacaaaaaatattctgaggctaaaagcgcgtctgctggaaagttcacgcgctctgctaaccccaccgtccattctgactcttttagatcttaaccgtgtctttatccacatcatacgtttatacacgtgtcacacgatcacctattctataaaaaacattattttaatcttatcctttttatgcttcccctataaattatcttctcttcctccttctccgatctctcctccgtcacacaaaacttccgatttcaaaaaaacaatttgaaatttgtcaaaaggaatattctgacgatcgattcttgattcgttttctcgcgtatagagagaaaaatg

SEQ ID NO: 36369 - DNA, 3000 bp, Unknown; identical to SEQ ID NO: 15175
  misc_feature (1)..( 3000): 2750-1469P.txt file - cDNA_ID_3094966; gDNA_ID_2926078; Annot_ID_196280

SEQ ID NO: 36370 - DNA, 3000 bp, Unknown; identical to SEQ ID NO: 15174
  misc_feature (1)..( 3000): 2750-1469P.txt file - cDNA_ID_3094978; gDNA_ID_2926078; Annot_ID_196278

SEQ ID NO: 36371 - DNA, 3003 bp, Unknown
  misc_feature (1)..( 3003): 2750-1469P.txt file - cDNA_ID_3094999; gDNA_ID_2926078; Annot_ID_196273
gttgccaccacgttggcttgattatatcagctgcttcattaaataagatgtcctaaaggcccaatatgtcccagaagcccattacaaggttggtaataataagaagaggcatgtggtttgggggttcaaaaagatgcgtatatagtattttatagtatcttttttttttttttttttgtaaaggaaaaaatttattatagtatcttacttatatgctctcaacgatttctacattatgtgttagggataatcatattagcaagcccattatgaagattctaacaagtagtttaggtaagtaatcctagtagtttgtattaaaagagtggaatggaaaaaggtttaggcaattaggcatcatatcagattattatcagccattcacataacttccttctctgtttaagttctacctactaaatgcatttgtacatgttttaggcttttagcaagttaatctttaaaaatattttaaatttttaatgagaagcatttttgtagaatattcaagaaagtcttttctgcaggaaggagatacacagcagttgaaaatgaaaaggagaaacgtcacatacccaatttatcataagagatatgttttttttttttttggacaactcataagagatatgtcttcataatattttcactcttcttttccgttttatctaaacgtttttttcttttggcttttaactcttcttttcttaagttgaacatgttttattctattctagtaaatcattgggactatccatcgatgtataatcctatattattattattatattatttttatttttgtataatcctatatttagtaatatatatagaattttataaacttagatgtacaaatacaattatatatataacatcggtccataattttcttaggctatatagcatattagcatagctgataaattaattatgtccttcctaattataagactcgaaccgaaggtctagttatttcccctgttaagacttaagagcttctcaaacattcatgagtatagggtttttgatttatataataattttagagagaaaaccccagtagttctgctgataatatcaattggagtaattttggatgttcaggatcgatcctatatatatatattttgaagagaatttggattaatcgatatttagtgggtcagttatgtatgtttcttggcgtgaagctaagccattaaattctcaggccggcttttccaccgacacggtatcaaaataaaatttacataccagacattactttatagatgttcaacaaaatgttcatgtgattcccaacatacaaacctaacgtacgtgaaaattggttgggtcattcactgaagttgagttgtcaaaagatattgggaccaaactaatgttgataaagtacataagtcacacacaccaaaaaacaagtcacacatatcagtagacacaaccttatactaatatttcctgaccattaatattcacatcaactatagacactagaacgaattaagtcacatttacttgcaaaagaaacttacaaatcacatcaatctagacatatcaacctattggctcttgatagtgaacttacaaaatataccatattagtatataaaaggaatatttactaggtggaattgtaataattacaacgtaattaattagagaaaaagtactaatcaaatcaacatagagatacataggcgcctagacgacccacaatacgaaggtacaaagttcgaaagctgcaactacaaaaatataatgacaggtaagacaacgtatacaattcgagctgagacctaaccttaaatttaatcgacattgtcgcacaccactttcttttccatgattcatttcaatgtgaatttatgtcatttcatattttttcaagatgatatgactcatcagtgtcgtttggtgtgacgttggatagagccaccttgcgaatgttcccaattttgggaagtcactcaaagaaaaagatgtgtgtctccggaacttatcaggataaggatcgaacctctcatctacctatctatctacgcttggccgtgcgtggcatcatagttcgctgatttctgcaaacggagacatcaattttccagttcaagaaatttaaatggaacggttagcaggactagtaccatcatgccccatgtatatatgttaataaaaaatatatatatccacaacttttgtttccaacgtgcatctaatccctaattaaacctagtacgtacttgcaatcattggttaactataaagttcaatgggatattaaaagaaaactcaattgattaccaaaaatggttgctcatatattaagttattaatggtttatctttctgaaattattagtagtttggtactgatcatatctcataagtcataactaaaaccgtttgtatatgtcaaatttatatagctaattaagcaatatttcattatttctttcccaatacaattcttctacatatttacaaatatgagacgatgagtatatgtactatagatagacatacacaacaacatatatggttttccaacacatttatacaacaatgccgttggttacgtagccttctttaggataaaaaacaattaacaatggggtcacgttcacctacaggtgacgcaaacacctattgtctctatgataatattatgcataacaacgtgaatgaattaatacaatcacaatctataaagcaagggtgaaagagagaaagacacgtagccgaacattaacaaatttgaaagaataaaaactcttaagaacacaaaaatatttctatatatatcctacatagctaagaccgaaatatcactcagaatcatctttgtcaatatttctctaccatcttttgtctcatagccatgggtctagttcaagaagagggaagcggtcctgttcatggctttcggttatcaaccgtgagtgcgtccctgccgtcagagacaggtacgacccacgagcccaccggtttagacctcgccatg

SEQ ID NO: 36372 - DNA, 3000 bp, Unknown; identical to SEQ ID NO: 15182
  misc_feature (1)..( 3000): 2750-1469P.txt file - cDNA_ID_3095071; gDNA_ID_2926079; Annot_ID_196326

SEQ ID NO: 36373 - DNA, 3000 bp, Unknown; identical to SEQ ID NO: 15185
  misc_feature (1)..( 3000): 2750-1469P.txt file - cDNA_ID_3095074; gDNA_ID_2926079; Annot_ID_196325

SEQ ID NO: 36374 - DNA, 3003 bp, Unknown
  misc_feature (1)..( 3003): 2750-1469P.txt file - cDNA_ID_3095081; gDNA_ID_2926079; Annot_ID_196323
gcccatttattcaggcccacttgtacttaaatgacgaaattaccccgttagctgtcgaatacgagatatatcgcgtcgtttgctttcacttgtgtcttgtgtgttctgccaaagtttctctgcagcttctcctcttctcagaaattagggttccgtctcaaattacgagcagatctcgtactctctggtaatgatttctcgtttcttatactttgtttataccgaagtatcgattcgcttgcatgtctcgtcatctttgtaccgattctgatttgaagtttctagggtttaccatcgcgcaattacgatttgtagatatgttgtttgcgagtagagatcaattgaaattaccttcgtggatttgtctcgtaagcgcgaaccatgtttagagaaacgagttcagatttgcttcacgcttaattattgtgttgtagctgtgtatatcttctggatctgctgcgtgtgtttggtttttctgggagtcaagtcatattaacgttgttcaaaaacacttttggctgtttgttttagaagatgtctgaagatccggagtaccgttgcttcattggtgggcttgcttggacaacgtctgatcgtggtctcagagatgcctttgagaagtatggtcacctcgttgaggccaaggtaaattttttatctctctttcctcagtggctctctgttcttctggttactgaaacttagaagctttgttctgtttcgccttcagattcaaacactgaagctttgatatgttttgtaatttgtttgctttctgcaactctgtttatggtgaggcgtgtctgtttagtaactgacttcttttagtggctatcagctcttctgattgctgagacattgaagctttgagtgatttgttcattttcttgctctttgcaaatctgtttgtagtgttgtctgtttgataattttatttgaaatttatcttactaccttatttttattgccataactattatgagagataaaccttatctattgatacacaggtggttcttgacaagttttctggtcgctcccgtggttttggattcatcactttcgatgagaaaaaagctatggatgaagctattgcagcaatgaatggaatggatttggatgggcgaactatcactgttgataaagctcagcctcatcagggtggtgcaggcagagataatgatggtgaccgtggtcgagaccgtggatatgatcgtgatcgcagtcgtccctctggtgggcgaggtggtggagattgctttaaatgtggcaagcctggacattttgcaagagagtgtccttctgaaagtagtagagatggtggtggaaggttcagctcaaaggatgataggtacagttcgaaggacgataggtatggtgcaaaagatgataggtatggtgcaaaggaggataggtatggtgcaaaggatgataggtacagctccaaggatgataggtacagctccaaggatgataggtatggtagtagggatggtggaggtagtcgctatggacctgatcgcagtggtgaacgcgctggaggacgcagccgggatggtggcagccgtggagctccaggaggtgagaggcacagtcgtgctccatatgaccgccccagagctggtggtttccactagaattctactccaaagggtatgtatgcattctgttattttaactttttctattgtatcccttcaaagttaagttctggtaagacttttgttgaagtcgctttatatcttcttttgcagttaaagaagttgaaggtttctgctttcagctcgtgtcaagtcaaagttacgcttgatggtctattttcttcaatgtatttggatagctcgagaaagaagatgtgttctctattttggccctaaactcaagagtcgactatgttcctaaagtgctctctctccttttgatatgttgatccctatggaaaccttgtgcttggttggtttgagacaatttgagatgtgctactttatgcttatcgtaatgaatgcgtgggttatcccccaacaccaaatatgcaaaagcctcaggtacgtgattgatctccacggaatatccgaggtcgacatttggtaaaattcaaatgttgttatatatggggatatgccgtttattgattctggtaaacaatgatgcaggatggtctgatactcgggtttagccgtgaaaattaaagactgatctataaaacttgtgatgggattgggaaatatacattgctgattgatacttggctactggaactcaaacatcccttcatgagcaacaaattgtcattttcaggaaaaagattgactttgtgcaattttagatcttggcaagtcaaatccaatagttttcttcaactagggaaatttctacagccaaatggtctctggttggctcgtctagtatagctcactgggtttatcttcgatctattctttgtgggttcttcgtgcctcttcgtctactttgtttcttgctcgtgacctctacctctgcctttgattctcaagctctaaactccaggaattgggaaatggtgttaatgtatatatagttaatatacgcttgaataggtatccttactttgataatttgttgaaattgcatacataaataggtcacacgagttatgtcgggaaaacactgacttgattattttatacaagtgaatagtatatgtatggttagaacttagatgcatgactagttcgttcaccttctttcacaattttgtattgcatacatacatacattgcttaggtgaatatataatcaatttaccataaataaatgactttgtaagtctcataatttaagactttgtttctaacataaagaaagactttgtagaacatatgagttggtgtatagcttaaacgttgactcaattatttgatagaaatcgaatagcatagctattcgacgccactattcggttactcgtacctcgaccacaccaaattaagaacacttaccggaagaagataaaaggagaaaatg

SEQ ID NO: 36375 - DNA, 3003 bp, Unknown
  misc_feature (1)..( 3003): 2750-1469P.txt file - cDNA_ID_3095086; gDNA_ID_2926079; Annot_ID_196322
tgcagttggtacaatagatgcatttaggctcatcatatctttaagtttaaccaaatttggtgaatcgatgttatactaatttctaaatctcgggttttcgacaggtcttcctctagggaaggatggtaagaagaaaacgaagaacaaccaaatgtgggatatctttaactactactacacagttcccagattttgaagaagacttagagcagcgttaatttcattaataaaatattcataaaaaaccctaatctttgttctttttttgttggtccatcttcggaatcggagctttgttgtttcgttttggtcttctctactcagcgaaggcgtgtctcaagagaatgtgtctcttcttgttattatattgttagacattttcgaatgttgattgttatattttttgtagctattcctggagtctctcatctccttttgatgtattttgttaacacaattatttgccagtaaccctatttgtattggaacaacaagaaagacaaaaacgaaattgtttagcatacaacaagaagaaaaaaacacaaaactaattgcttacacatacttccctctatacttaggttttggatctttgaaggctttggaatcagtgtcaatctgagaagaatcaatgggtttgaatatagaggagtgaatattaccatcctctaaccacttaagatgattctctctaaactctaaatgcattaaacgagcagcttcttcaacctcttcactataaggctctactttcaccatcgttagcagaacccgactgtaccgcgagctcaggatctgttcagatacagctactaacttgaaacacgggtgctccgggaacttaacctcgctgccagtctcatctctcaaaaccgggaagaaaaagacgagcctgcctttcatcaccaacattcttgcagcaagatgaagtagatcatgaacacactccactagactatatgcaccagtggatggaatgtgatctgttcttttgtcatcagggacagtgtaaggatccactgttcctctaaggattttcctaccaccggatttacgtccaccagcacgaaccccgtaaggtggatcgcagataattgcatcaaagatctggaccaatagatacataagacataaactcagtgatctctctactcaatataccaaagataataatgaaagaactgagatatagagcattacctcctttagccccgatcgccaaggaggaacgttattatccattctaagtaaagctaccggcattggtaatccatactgcataagtattaacagatgtaagaaccagtgatatcgaaagaaacataacaatagaagtcacacactcatactaacctgtttgaaattgctccaaacattacaatctggaccacgtccatcacgcactactctgatatcgatatctgcaccctaatacaacaactcttttatcagttcgagattcagaaaccacaaaaggaaatcaataaactaagggaaaggttgcaaaccattgtcattgcgccaaagcgtgcagcagaaacaagaatgctcccagtaccaacaaaaggatcatacacaagttttcccgaagtagctttcgcttgattagccattaagaaagccatttcagcatccatagcagttggaccaaggtaagtacgagatttcaactgaaatgtaggtaaaagcttcctatcagcaaaaccaacctccctcccaaaaaatatccttctctgtagaataggttgaagtccattgttctcttcagattcaatcatttccattagaaaaaagttatgatctgggttcttcaagttaacacgaccctgcaacaaccaaatcaccaaagaatcaaaacaatgaagataaacaccaaaagagattgaaacaagaaagtggaatcagacctcaaatggtatataagtaaacgactggattcgatctttctgctcgtcaaaagttaaagcctttccaaaagtttcaacagagattctaaaagttgaatcagaagtgagaaatggaagctttcgagaatcagggtagctttgaatcgagtctttaagctcttcataacaagttccttcaccccaaagctcatacattcctttcaccaatatgcttcgtttagcaatgttacgagcgatttcttcagatgaaagttgaacgaaatggaatggagtatcgttatggtgattttcaggtagacgccattggagagactcattctctgcaatctcttctccgaagagttcagctaaagcttccacttctggctttctgaagtctaatagcctgtgatagaagacacacagaaaccacatctctctctctctctctttcccctgaaacgaaaaccctaatttgacaacagaactgagaaagaagacgaagacggagaaggaagaaacgaagaacgacggcgactaaaaccttttcttcaaaacccttatacatgggcccaataaagcccatttattcaggcccacttgtacttaaatgacgaaattaccccgttagctgtcgaatacgagatatatcgcgtcgtttgctttcacttgtgtcttgtgtgttctgccaaagtttctctgcagcttctcctcttctcagaaattagggttccgtctcaaattacgagcagatctcgtactctctggtaatgatttctcgtttcttatactttgtttataccgaagtatcgattcgcttgcatgtctcgtcatctttgtaccgattctgatttgaagtttctagggtttaccatcgcgcaattacgatttgtagatatgttgtttgcgagtagagatcaattgaaattaccttcgtggatttgtctcgtaagcgcgaaccatgtttagagaaacgagttcagatttgcttcacgcttaattattgtgttgtagctgtgtatatcttctggatctgctgcgtgtgtttggtttttctgggagtcaagtcatattaacgttgttcaaaaacacttttggctgtttgttttagaagatg

SEQ ID NO: 36376 - DNA, 3000 bp, Unknown
  misc_feature (1)..( 3000): 2750-1469P.txt file - cDNA_ID_3095091; gDNA_ID_2926079; Annot_ID_196321
tacaaagtctttctttatgttagaaacaaagtcttaaattatgagacttacaaagtcatttatttatggtaaattgattatatattcacctaagcaatgtatgtatgtatgcaatacaaaattgtgaaagaaggtgaacgaactagtcatgcatctaagttctaaccatacatatactattcacttgtataaaataatcaagtcagtgttttcccgacataactcgtgtgacctatttatgtatgcaatttcaacaaattatcaaagtaaggatacctattcaagcgtatattaactatatatacattaacaccatttcccaattcctggagtttagagcttgagaatcaaaggcagaggtagaggtcacgagcaagaaacaaagtagacgaagaggcacgaagaacccacaaagaatagatcgaagataaacccagtgagctatactagacgagccaaccagagaccatttggctgtagaaatttccctagttgaagaaaactattggatttgacttgccaagatctaaaattgcacaaagtcaatctttttcctgaaaatgacaatttgttgctcatgaagggatgtttgagttccagtagccaagtatcaatcagcaatgtatatttcccaatcccatcacaagttttatagatcagtctttaattttcacggctaaacccgagtatcagaccatcctgcatcattgtttaccagaatcaataaacggcatatccccatatataacaacatttgaattttaccaaatgtcgacctcggatattccgtggagatcaatcacgtacctgaggcttttgcatatttggtgttgggggataacccacgcattcattacgataagcataaagtagcacatctcaaattgtctcaaaccaaccaagcacaaggtttccatagggatcaacatatcaaaaggagagagagcactttaggaacatagtcgactcttgagtttagggccaaaatagagaacacatcttctttctcgagctatccaaatacattgaagaaaatagaccatcaagcgtaactttgacttgacacgagctgaaagcagaaaccttcaacttctttaactgcaaaagaagatataaagcgacttcaacaaaagtcttaccagaacttaactttgaagggatacaatagaaaaagttaaaataacagaatgcatacataccctttggagtagaattctagtggaaaccaccagctctggggcggtcatatggagcacgactgtgcctctcacctcctggagctccacggctgccaccatcccggctgcgtcctccagcgcgttcaccactgcgatcaggtccatagcgactacctccaccatccctactaccatacctatcatccttggagctgtacctatcatccttggagctgtacctatcatcctttgcaccatacctatcctcctttgcaccatacctatcatcttttgcaccatacctatcgtccttcgaactgtacctatcatcctttgagctgaaccttccaccaccatctctactactttcagaaggacactctcttgcaaaatgtccaggcttgccacatttaaagcaatctccaccacctcgcccaccagagggacgactgcgatcacgatcatatccacggtctcgaccacggtcaccatcattatctctgcctgcaccaccctgatgaggctgagctttatcaacagtgatagttcgcccatccaaatccattccattcattgctgcaatagcttcatccatagcttttttctcatcgaaagtgatgaatccaaaaccacgggagcgaccagaaaacttgtcaagaaccacctgtgtatcaatagataaggtttatctctcataatagttatggcaataaaaataaggtagtaagataaatttcaaataaaattatcaaacagacaacactacaaacagatttgcaaagagcaagaaaatgaacaaatcactcaaagcttcaatgtctcagcaatcagaagagctgatagccactaaaagaagtcagttactaaacagacacgcctcaccataaacagagttgcagaaagcaaacaaattacaaaacatatcaaagcttcagtgtttgaatctgaaggcgaaacagaacaaagcttctaagtttcagtaaccagaagaacagagagccactgaggaaagagagataaaaaatttaccttggcctcaacgaggtgaccatacttctcaaaggcatctctgagaccacgatcagacgttgtccaagcaagcccaccaatgaagcaacggtactccggatcttcagacatcttctaaaacaaacagccaaaagtgtttttgaacaacgttaatatgacttgactcccagaaaaaccaaacacacgcagcagatccagaagatatacacagctacaacacaataattaagcgtgaagcaaatctgaactcgtttctctaaacatggttcgcgcttacgagacaaatccacgaaggtaatttcaattgatctctactcgcaaacaacatatctacaaatcgtaattgcgcgatggtaaaccctagaaacttcaaatcagaatcggtacaaagatgacgagacatgcaagcgaatcgatacttcggtataaacaaagtataagaaacgagaaatcattaccagagagtacgagatctgctcgtaatttgagacggaaccctaatttctgagaagaggagaagctgcagagaaactttggcagaacacacaagacacaagtgaaagcaaacgacgcgatatatctcgtattcgacagctaacggggtaatttcgtcatttaagtacaagtgggcctgaataaatgggctttattgggcccatgtataagggttttgaagaaaaggttttagtcgccgtcgttcttcgtttcttccttctccgtcttcgtcttctttctcagttctgttgtcaaattagggttttcgtttcaggggaaagagagagagagagagatg

SEQ ID NO: 36377 - DNA, 3003 bp, Unknown
  misc_feature (1)..( 3003): 2750-1469P.txt file - cDNA_ID_3095096; gDNA_ID_2926079; Annot_ID_196320
gttcccggatctttcctcgacgataatcctagcaattctacgtaaagataacttgcatgagaatctaaccgaatcattacttctttgttaaacttcaacttgtcaccatgataaacctttatcacttgtgtttggtctcgttcttcagggtctgtatatagcacaactacgtacttcttaaagccctcgtaacgtttcagaagagttttgtcatcgcttgcgaatgctcctaccctcacgattaaatctgttgtttcgtcttcattaatttttcttttccctttgctaatcattagtcttcgtttcttcgccgctgcttgccccaagttcttcatcatctctagagaacaaagtgaattaagatttggagttttagggttttatatacaattatttcctcttttttctagggtttattctaaatatgtttttccttttttctttgcatggtgataatgatgaaattatatactccctctgtttctgaatatttgtattttaagggttttacacacaaattaataaaacatacaaatctcatttaatttatctcttacctagaaaaacatcattaattacaactaatctaaccaataaaaaaatatgatgtaaaatataattggttaaaaactattaaatatatttaatgtttgcatagaaaagtgaaaacaacacttatattgaaaaaaataaaaaacttttaaactacacttaattagaaacagagggagtatatgaaaattggtcaagtctctccacataaatgacatatcatcacacaacaaagtgacatatgtcattcgatgttttttaaattaataaaactaataaaattaaataagcaaattaaatatatcatcaattctactcttaattgatttctccaaaataaaaataaaaaataaaattatgtaaacaaattaagtactactttcattatactctttttattttattaattttttatcatcaataatcatgactaatttttttattgtgttgtaattgtttgctacctaacctcttattagtttagtaatttaattttgagtatttgataaccttgacattcaagttttttcaaataataaaccttcaaaatattagacctaccaaataatgtaatacacgatcatttctcttatattgatatatgcaatgacagacgatataaaagtattgactttaatgatactttaatttttgcattctttttattcttttcatatgaatactcttgaaatcttgttcagtttatatcaattctatatatttaatcatgagcctataacatagttgttggagtattatatctagaaaataaataaaaccataaatagtttatttataatcaagttgaacaattttcaaattatccaagacacgatcatttctctaatattgatatatgcaatgacaaaagatccaaaagtgttgacttcaatgacattcaatttttgctatctttttatctttttgtacgaatactcttcagatctttttcagttgatgtcaatcgaaactttaatcatgagtctgtcacaatgttgttgaagtacataaaacaaggaattgatttatttataatcaagttaggaaaattttaaaccacaaaaattacatagttacacagaattgtatcaaaatatcattattgttgttatatgtattcatgaagtgaaaaaatattaaaatcttacaaataatcagctttatacacacaaatatataaattgatatttcaagtcacaaatgaatctaaccataaaaattgtaactacatattatagatctaattttattaacaatacaagaataaacaaatagtaaatataaattagcataaagaacaatcaatgtaatttttttttaacaattttcataacaacgctagggtaatcatctagttagaattgatttagttatgaattatgatgtgtgatttggtgagtgtaagtcactcgcttctcatgtaaactataatatattgaatctcctctctcttctctttttcgcaactttcacagagaggtagtttttgatgtttgccggccggaatattttccggtgaatagccgtcccgagtggctcggacttctgcccggtatctttcagctttgatagtggagatagccggtttacgtctggcaaacccaatttctatgaatggttttggccgggtttttatcttttctcgccgtcgatcggtttataccgattgcttttcacttttatttcaataatttctacagatctgagttaggaattgatttttaggtactagatcctaaaaattaataattctggcttgtgattttggaaacctcgatttgcaggaaatctatcaagcggttatttcttggttgaaagattgaagaatattccgatgcatattaccattcccttatgttgtgttctttaggagttccgttcagtgttatttcggtggtaaacaaaaaaatttcgtgcgatgtttcgacgatattttcttcaccggattctgggcttctcgacggcaaggttgatgtcgttaaatttctgatgatgacttatcggcatgtgttacagttgaattctaaagtcaacacgtgttttcggataagagtccaacgttaagaatctttttgctgtacatgttactctaatgggctattgttgggctccaattttcttgctgcacaatcgttgtaggctttaagtcttgtatcttttgtttaataaaattcacttgggaaaaaaaaaaaaagtcactcgcttctacagcgcgtgatggcttgtttctccacccatctctccttcgttgagaagcatgcaccaaaaaaaaaaaaaggcttcaaagagaataaatcccaaaaaatttcaatctttacgcaaaaggaataaacatttctgtgacggtttcaaggtttcatcggaaccctagatctaatactttttcccgatttgaatttgcgatttcagatctgagagaattagtcaaattctgaaatttcaaaattgatg

SEQ ID NO: 36378 - DNA, 3003 bp, Unknown
  misc_feature (1)..( 3003): 2750-1469P.txt file - cDNA_ID_3095105; gDNA_ID_2926079; Annot_ID_196318
tgaacattcgcaaacattgacgttttcttaggaaccttgaaaggttcaatgtattgagttgctatgagtgtgttgtaatagtaaagctcgaatgtcacatagctaaactccacactacttttcttgcttgggtttgtgacgtttgctaaaatggttagatcaccgtttagaagaaaacccatgtcgagataagcagcgtttaggttagcagctgagatgtcgacgtaaggtgagcgaggacggtagacgaggtaaacgattaggatgataagaccgccgagaataagaatgacccagaatattgcacagcaaaatgcagctgaccatgtcattgcgtttgtctctcttgagggtggtggtaaccgtgggccacggcggtgatgcggggatggtgttggagcggttctccatggacttggtttgggtattggaggtaatgttgatccataaccccctccgttgcgttgtggtgcttgtggtggtggaggtcgttgttgttgattatcttcagggcttaatagcaatggtcttttcgatgagttttgagtttttcgtggtggaagtctctcctctgggcttaatggtacaggtattacagaatgtttcggttcttggattggattttcacggtggcgaccacgagtcttgattaggattcctggtggagctactgggtgaggttgcgtggttttgtggtgcgatttttttgggtgcggaatgggcgggatgtgtggttggttcgaagatgtttgtgaggtagaagcaccaccgcttttgagatgtggattctgcgatggaattcgcgcaaaatgagggttagtttcatggtgatgatgatgagacatttagatgaagaagctaaaaagcatcaaaggaaactaagttaagtaagacttgagatgaaagaatgagaacagagagattttgaactgttttaagtttctaaatgagatagagagagggagagaataacttggtgacaagttcaagtaaggattctttgttgtagaaaacaaaataaagaaggaaagtgatagcacgaagcaagtaatctttgttgtagattccttgcactaaaattaaaatcagtttctaatctcatgaaaaagtataaaaacattctctgtatctttttctcattcaaaagtttttttaagaaaattgtaattactcggtccaatttatctaaaacccaaataaaaagatctcgattttaggagagacagggttaaggacttacagtaacagtcatgaatatgtcaatctttctacttcagctcactccaggggaaagatgttgattctcagagcaacttacgaaaacttgtcgaatatgtcagtaaactatgaacatgttaagatatgtctcccatagatcaagaaggccgcagattagttagcgcaaatctgatgcgaaacacgttgcttctgcaggtagatactctgttctctgctcaatttctgcagcatcaaacatgaaaccaactctgcaatgccggttactgcaaacgttgacaaagacaactaccaatcgagcctgaccaaacagatactagtaaaaaagctggaagcaaactgaaaactaaacccatacaaaaggtattttccacgatcttcggtgcaattgttcttcctatatctcttatccccattctttggcatggcatggtatatagtaacatgaatatacataaaatgaaagtgtaaacgcctggaaagagctaacctacgctttacacgcgaagaaagcagaacaatctcagagtaatcatggccggaacaagaaacacaattcaagcacagagacccacagaacacagtcatacagagtgcaggagaagcaacgcacttgccctgaaacaactttcaatacatgtactcctaagatctgatgttctttctcaagatcattgaaaacttacgaaagagaagccatagagtaaacaactaatcaaatccaaaattccaattccacattgattcaactcatcaaaagttcaaaatgtaaaactgtgttatatcacacacagatactagtactgatcaacatagcagcactcttgcttcacctcagctctcataaacctctgcaaagaataacaataagaaatacgcaagatcttactaaactaaacaacaccattaaaaccctaaaaaatgtgaagcttttgagaaaaatcagaaaacattacctgactttcttgatgaggattgattggagttttcgagcaaagtcaatggatttgattctgcgttcaagattcttcctagcgagaaccttcttctccgaattcttaatgtgatgagtctgagtccctttgatcagcctctccattccactcgattgcatcttcttctgcaaaatcgtcagtgccttgtctaaatcattggagaacaccttcactcttatccctcgctcttgctgcaactgctggtttagactcggacgagtcaccaaccccgtaactcgcttcgctatcgtgttcatctcttttacttgttttctgaaaaagtatgtttctgaaaacgtaaatgagattgacgagagacagtgataggatctgaattcgacttaccggtcggaatctcgccggagagaatcaaagagccaatttgagtgatgatggagaatgtctaggttaaaaaagaggcgatggaggaaatgagataaaaaccagagaatttactaatataggggtggttatgtaagttttatgagatatagggatgtttttgtaaatatccttaaatctaatcttctgtttgattcagagagtattgactttaaagaagaacattcaagcctttcaaaaaaaaaaagcttctttaatttctctctctctctgtggagtgttcgaatctccaagctctctctcaaatggcagcgtccacatagtagagctgaagaagcactgtatctatctacagagaaagtgaagaggaagaaaaggaagagaggatatagaaattaagctggcgacttttagtccgaggcgagcaatg

SEQ ID NO: 36379 - DNA, 3000 bp, Unknown; identical to SEQ ID NO: 15179
  misc_feature (1)..( 3000): 2750-1469P.txt file - cDNA_ID_3095127; gDNA_ID_2926079; Annot_ID_196312

SEQ ID NO: 36380 - DNA, 3003 bp, Unknown
  misc_feature (1)..( 3003): 2750-1469P.txt file - cDNA_ID_3095157; gDNA_ID_2926080; Annot_ID_196350
aaatgaaactcctgagatatttctttcgtctacttaataacatatcgtgtaggtttttaaccaaaaaaaaatcaaaacacatgacgggtcggaccataaattaagttgttaatttttttgcatcaaaagtttttgacctttttaataggaaaaaataataataataggtagagttatttgtgagaccgtagactagggggtgaaaatacagaaggagagaggggaaaaaaatgaaagatgcatgcaaaataaaagaaaaggatgggaatatgatttgatgtaaagcctgtgacaactctcccttttaaatatttttcaacgcgacgttaccttattgcagacatgacgcgtctatatcctatccgtccattttttttcttcagatgctgatggatggatgtgatttcttcttatgatttgatgcatccatgcacctctttctttcttcatatttgtttttttctctctaataagttttggattaaatgtactaatgcgtttagaattatcgttaaaagtatcttgtaaacagacaaaatccaagtagtatccaataagctaaaggtctaaagtgtttcataaagttaaatttatcgtctttttctttaggctgacgtagaatcccctgaatttcacagtcacgcacgcattgcatgctcaaaagacaaatgtcgtccaataatatcatatagatcctaaacaagttttagcaaaattattacaatcctatacacacacatatatattcgttttgtgtgatgtattgtacacatcaacatcaactctatctgtcactagctactgtcaaatatcacatcagttgcttgtagaacaggagaaacacagatcattaaaataaaggaccttttttattttcctcttcttttctcttcctttatctttcaacatttgggaactctagggttttgttatttttagagctttcttcttgtgccgacaatggatgttgatgtgtttaacggttgggggaggccaagatttgaagatgaatcccttatgccacctgggtttaggtttcatccaactgatgaagagctgatcacttactatctcctcaagaaggttcttgactctaatttctcttgtgccgccatttctcaagttgatctcaacaagtctgagccttgggagcttcctggtaagcccacttaactcaagtcaacccaccttctgtttcacaggatgcactcaaaaacttttacaaaacttgataataagtcccatctctagatttttgcttaaatcgtcataaaccctagtttcatcaaggccaacttattagactttcctctgttcttattgccatatccaaattctaggactttatttctgtgataatgtgctagatgagtagatgttaatgtagcatgatataggcttagtggagacactgttagaactctttaattaaactttcattagttttgaaactaaaccagtccttgttcggttctgaaacagagtctctacgtagttataaatcttgctaacgactttgttataaattattaatatttgatcaagttttaaagaaatcaaactcttgttcaactttatatcaacccttcacatgagtgaccagtccttgttcggttctaaaacagagtcctccttactctgtttgtaactttcacttataccatttgagcagagaaagcgaaaatgggggagaaggagtggtacttcttcacactaagagaccgtaaatacccaacgggactgagaacgaacagagcaacagaagctggttactggaaagccactggtaaagacagagagatcaaaagctcaaagacaaaatcacttctcgggatgaagaaaactcttgtcttttacaaaggcagagctcctaaaggagagaagagttgttgggtcatgcatgagtatcgccttgacggcaaattctcttaccattacatttcctcctccgctaaggtaaagtattaaatctctatatatcaatccacttttctcatacatattataatcaaaatatgttttcttttacactaggatgaatgggttctctgtaaagtttgtctgaaaagcggcgtagttagtagagagacgaacttgatctcttcttcttcttcttctgccgtcaccggagagttctcctctgccggttctgcaattgctccgatcatcaatacctttgcgacggagcacgtgtcctgtttctccaataactctgctgctcataccgatgcgagctttcatacattccttcccgctccaccgccgtcactgcccccacgtcagccacgtcacgtcggtgatggcgtggcgtttggtcagtttctggatttgggatcatcgggacagattgatttcgatgcagcagcagcagcgttctttccgaatctaccttctctgcctcccacggttcttcctcctcctccgtcatttgcaatgtacggtggaggctcccccgccgtgagtgtgtggccgtttactctctgatcgccatgcggtcattaaactatctttactatcttttaatctaagagaaaaactaccttgggttgcttaatattagtggctttgtattagtctcgaatcatttcctcgtagcattttgctgttgtacgtgtttgtagtaacgtctttgtgcatgtttttaaacatgaacctgctaagtacttatttgtagaggtttgtccttcggtgataagattttaaatttttaagtgatgcagaagcaacatgaaacattacaattgtaatatgacaatttcgaatcgcatggataacaaatagtcaaaacactagtcatattgctcactctaatgggccttatcatttaaatgggccaggccttatcatttaaatgggccaggccttatttaaagagttttccaattgccacgcgtttgatgcagtgtttagagtggtcatcaagaggtcttttttgtctctcattcagcttgctcgcaacgaaacatattttgttggaaaaaaaaaacaaaggaaatcgccatg

SEQ ID NO: 36381 - DNA, 3000 bp, Unknown; identical to SEQ ID NO: 15190
  misc_feature (1)..( 3000): 2750-1469P.txt file - cDNA_ID_3095172; gDNA_ID_2926080; Annot_ID_196347

SEQ ID NO: 36382 - DNA, 3000 bp, Unknown; identical to SEQ ID NO: 15191
  misc_feature (1)..( 3000): 2750-1469P.txt file - cDNA_ID_3095177; gDNA_ID_2926080; Annot_ID_196346

SEQ ID NO: 36383 - DNA, 3000 bp, Unknown; identical to SEQ ID NO: 15188
  misc_feature (1)..( 3000): 2750-1469P.txt file - cDNA_ID_3095182; gDNA_ID_2926080; Annot_ID_196345

SEQ ID NO: 36384 - DNA, 3003 bp, Unknown
  misc_feature (1)..( 3003): 2750-1469P.txt file - cDNA_ID_3095235; gDNA_ID_2926081; Annot_ID_196375
gaaaacgttaatgcatataatgacttgcaacaagccaacaatgcgtaagagcttcttaagatttgaacataataatttgcaacactgtcaataacccgtacttcaaaatcaaactttattagaatatatagcgaatgaagtaatgaaccatggtacttcaaatgtactactatcttttagagttagggttgaattgtataaaggatattcttaagcaatgtttggttagtttagtgtttgctttagctaggttagtttagtgtttgctttagctaagtaagacttaggcgtgggcattcgggttcagttcttttttttcgggtatcgagtctattcgggtaagaggttgagaaccattcggatattctaaaaatttggtttggatcaggttcgggtcgattcggttattttagtaaaaatttaaaaataaccaaaaatacccaaaatattttcgggttcagatcggattcggtttttttactcatatatacctaaatctacccgaaataccagattaccgataaatatattggttactttttatccaaatataaccaaatgtaagcaaaatacttaagttacctaaaaaaaatctataacattggttacttttatcccaaatatatccaaatgtatatgaattactaaaaaaatctagtatatttggatttataattttaattttgggtgtttgagatattacaaatataaatataactaatattttaaggtttacatttgtattcgggtacccacaagtattagattcggttcgagtttggttcgggtttttttgggtagtgagttctaggactcattcgggtaattttaaaaatcgggttcggtttggttcggttatttttcggattttcggttcggatattcggttctggatattataaaactaatacttaataaaattagatttattttgttacatgtatatacatggttatatatatgcacacagggggaaaaagtcgaaataaagtgataagaaaaagggttttgataacttgattgctgtagagggaaagtatcatcagcttttcgttttggggagacgaatctttgtttcttttttcgtgtttttcaatgttacttataactccattttctatattgctataacaatctagcattactcttttataacacacacacacacacacgaataatcgagtatctaatttgttttatacaacagaacaattactgtattaaacagagttccacaacacttaactatggtcaaataaagtttatgtacttgttttcttttaacttttgtagttgaatgttcaaatgactaaatgagtaaaacatgtacactatcaataactttaatacgttgacaaaaaacaatggtctagtacaaacaatataagatattgatttagatgcatggcacaattttggacatgaaaatcgaggcaagtattagaatacaatagtacatgattgataggtataaaaatacgtacgagtagtcactattgaaactcataatgtatttgtatcattgtcctctaatttaccagcagctaggataattgcatacatgcgtacaaaggaagagtcatcttcttttttattcgttttttaaaaccgtacatttctttaaattctcgattccacctttttctttttttactctatttaaacttttatttttgttgtttacttttacttttctttatatgaatagaccaaacggtcaaatatttggggccccttcttttgcatgatttttagtaaatttctttttgattaatggttgtgattttaatgtgggttaataaagtaaagcttaaagtctcataattacagcatgggtttaaagttataaaaattgtttaaatagcttattattctatattgttctcatttcaacattcagattattactgccataacttttactttttcttttacaactatttaaaaaaaaaatctcagcctttttcttcttttgtcctttagtggtcagtctaatattgttttccccaatttttactgacattatattattattactcaaaataacccgatcatacaattaaatcaaaatttaccaggacgagtagtgttaatagatttacttaagacacgtgttacataattattggattaaaatcagtttccaaaaaacgaataatccattttcggatatgcccgatattccacggtagtggaggacaaaaacgtaatttcggtattaccacaattactgacacgtctccagtaaaaaggattcaccaccacgctaagatgaaaacgacaaaaaaataaaaaaaccatctcctcccattaaaacggtaaaacaattaatatccgacgtggcatttacagtgcctagtcagcttttttacctttgaagtctcttcagcttcggacctctctctcttactcctttataagattaagccaacctctctttacccacacaatccacacacacacacataagaaaagaaattaacaaattatcacaaaaatacgttttcttgtataataatttttctctagatttgtcgcttaccttttgaaattctccggcgatgaatctcgccgggaaaaggaatattccggttattatttctgtttccgttactagtgactcttaccatcgccgtcatgtcttccgtgaacatcgtcggacctgaaaaatccttctcctagactttttttttttctttcttctctttgtattattattctttgcttcgtttttgtgaagaagatgatccgctgatttcagaagttttcttcttctggattttagctgagaggtttttggtagattctgtttcttcttcttcctctgtggttttcgaatccagttttggaatttttgaagattttgtttagtttctgttgaagagatctgagatatttgaacgaagcagagtgtatatgaaatcaaatctgtgaaaatttctttgaatttgaattgactttggacttgtgagagaagttagatcttcttcttcgtgagctatg

SEQ ID NO: 36385 - DNA, 3003 bp, Unknown
  misc_feature (1)..( 3003): 2750-1469P.txt file - cDNA_ID_3095242; gDNA_ID_2926081; Annot_ID_196373
tcgtggctttaccggtaactttttgggcaatccaaccgagcccatcatacaatccttctccagtaaccgcacaacttgcttgaatatgccaatcatggttcttgatactgtgaaggttaagtgcatccgtgatctcagcaggagtcattgcgtctttcagatcctgtttgtttgcaaaaactagtatgaccgagttttgaagatcctcatgaccaagtaacctggctagctcatctttcatgaaagagattctggctctgtctgtgctatctataaccacaatcacagcatgtgttccacgatagtatgttgcccatgaagttcttagcctatcttgcccaccaagatcccatacctaaagacaacatatcataaaagtaaacatcgcctcaaatattcgattgccagtgtccaacagttagtttttgacaggaaacaattcaaactttagtaagtttagttacgtttatattcatcattgagttttgacatataagaacacatgcagattgtcataaaacagagatgaattcatctcaggccatgactttgaccactgtataaagatgttccaaacagtcctctggcaaaaaaactaagctaatgggaaatagcaaacagttcctccggtataacaaacaagctagataaacaacatctacaaaaatttactatacaaaaccataaatcgcacatacgaaaacgttcattatgagtttctgacaccttctcaaccaatcatgacaagaacttagacaaaaacatcatccatttttcaacgagaaaaatgcacacacccaagcaagaaacatagctagggacaataacacaatcaaaagatggcaatggcaaatttaagaaacatccataaagtttcaaacttctaaaacacgtccctagataagaagctaagaaacaacttcacccaaatgaataaagaaagagtccagtacctcaaagcgaatattcttgtagacaagctcttcaacattgctaccaacagtaggatgagtagtaacaacttcacccaaatgaagtttataaagcgtcgtcgttttaccagcattatccaaaccaacaacaacaatcttatactcttttgcaggaaacatcatgaaccaaaacctcgacatgaatgctcccatctcctccaatttctatcacaaacaagatcctaatcaaataaaacacatcattacttttacgatcaaattgttctacaaacagagtgaaatcgagaaaccctaaagatacatcctttaaattgacccatcaattttacaaacccaagtaattgaatcagagaagcccagatcagatttggatacaacgatcccagattcgataaagttaaccaaatctaaattatatatatacaaatcgggaaatttgtgatcaaaccttgaatcagctagaatctgaagattgcagaggtaagaatcggagatcaaaaaaagttcttcttctactattttgtaagcttttgaggttccttccttaaagcagatgggtggagagaagaagaagaagaaaagtatgcgggaaacaatgtcaaaactgtaaatatgatgatctaaattattaataacttttaatataacaaatattaaaatgaaaactatatagtaatgttttcttttacttacccaaacggctgcagcctctaccgtaatggcaccgaacacgtcaccgccattagccacgacgccaaagacgaacattgttgaagacttgaaatccacaaagatgtttttaaacgagaaaaaaaaaaactcaaacgggcttagggcctttccatatattttagattataacaattacattttctcggcccacagaagtatataaaattaaatagaagtaaattatattgaggatttaaaataacaaatttaattataatttgaaatcatggttataatacgatcgtgtgaaatgttaattaaatgcttatattgattattttattattaaatttgtgctaattttggtaacgaatcttatttttgttattgtatacgatgatttaaaatatatatatatatatatatatatatatatatatatatatatatataatagttctagaaaagtctaattggattttttagatcctatcatagttgatagttctctttttgtatatggctagcaatgcggaatcgactctctacattagattcaatgaaggcttggaatgtgaacttgaatcgaacatgtgtgttatgtaacactcttatcgagacacgagagcacttgtttttcagctgtaagtactcgtcggcagtctggtcctccctagcgaaaccactactctagtgacgattctctacaatatggcaagctctagtcattattattacttctgatcactgtaacagaatccatatattcttcctctaatacagttttcaaataatggttcattcgatttggcgagaacgcaataaaaaaaacacacaataaaactctgattcttatcacacatcttcctaagtgaatagataagctggaaaaaaaaaaaactctcaatcatttgaaaggagaaatatagtagatacgaaccaaatctccaaacatggtttgcatctaaaagtccttaaaacctctcttgtataatctaatttcaaaacaattttggaaaagttacatttgatgtatcctaactttattttttcttggtcgaatttaatattttattaaaaataataatagtaataatcacaaaatctaatttgatcattcttaggtgggtaggtacacttattttacatacagcctcgacggcaccaaaacatagaatatatatataaatacaaatacaaatattccaaatataacctctctcccaaagtcctatcatatcagaaaaaaaaaaaaaaatccaaattcaacactctcacacttcgatatctccgccttcattctcctcagagccaactgtcctgagatttcgatttcgatttctccgatctctcttcctccgtcgccggcgaaaccatg

SEQ ID NO: 36386 - DNA, 3000 bp, Unknown
  misc_feature (1)..( 3000): 2750-1469P.txt file - cDNA_ID_3095246; gDNA_ID_2926081; Annot_ID_196372
aagagctctgcatacttggacgattctctgttgagctgctggaacttgctcaagaggtatctgagctcccagatctcctcttgcaaccatggccccatctgatgctagaataatttcttccaaattggtcagtgaatcgatactctcgatctttgcaatcactccaatttccctgcatcatagttgaatacaacatcaaaataaaactataactaaagatggtgaatacatgacgcaaaacccaatcccaaagtagatcatatgtttcctgtacagtagtatgatgtgttgatattgagcatgtttacttaccctccacgggaacgagcagcaagataacttttaaggtgattaatgacttcagccgacttgacaaacgatacagcaatgaaatccacaccttcagcaattccaaaatcaatatccaaccagtcctgaatataaagaattgaggtatcatcagtgaaaatgagtatgttttccctcaggtatcatctgttttgctaacatggactcatctagtttccaaaagtgtacatcttcaccattgctttgatccctcccaaatttaccaagtaaagtgaatcataattcaaagcttaaagggaagatacaaaattacaaaccttggaagaaattgttggaagcatggcattacgctctcgtacaagacttccatctctccaaaacgtcaagttagctcgaggaagcaacaatccaggatcggtacatagacacttaacatcaggaccaatcttctcaatcacttcaaatctcaccatcccaccatcaaccaaaagttcatccccaactcttacatctacaccacacacaaagaccaaatgattcctatttcatacgcagtcaccataatattcatctaatgttttcacttccacttttacataaacataattgcatataccttcagcgaaaccatcgtagctaacactaatggtacgttcaggacgagaagaatcaaaagctctaacagtgaaagtccaaacctcaccatcctgtaaaaatgtcatcaccaccaaagcttaaacatctaaatcacaaacacagcaatgtctacatcgaattcaaatcaaaataagaagagattaaacaacctctgctttagctgaagcttcaccaccaagatctcccatatgaatctcactaccttcagtatccatcataatagcaaccgcaaagcctttctcctcattaagcctccgaacactacgaatcacaccgcggtgccaatcacgcgtaccgtgacacatattaagccttgccacattcatacctcccacagcaagcgcctcaagctgctcaaatccacaagtcgccggtccgatcgtacagatcagcttcgtcctcctcgtacttctaaatccattctccttaagctcagcttccgtcacagtatcaacctcaatcccagacgtatcagtcgtaaccgccgtagcgacaacggatctctcatcagacttcacagcaccagtaccgttaggtgagagaagtacttgcgaggatgatgatgaggacgatgaatcgagatccggtgaaggagatgatgacgaggaggctctgatggaagtgtatttgatggttgttagagggaagcgacggaaggagatagaggagagaggacggttgaattgtgagtgagggagatggagaaggtgaggagtgtgtgaaggagtggagaattgaatagactgagacatggtttcgccggcgacggaggaagagagatcggagaaatcgaaatcgaaatctcaggacagttggctctgaggagaatgaaggcggagatatcgaagtgtgagagtgttgaatttggatttttttttttttttctgatatgataggactttgggagagaggttatatttggaatatttgtatttgtatttatatatatattctatgttttggtgccgtcgaggctgtatgtaaaataagtgtacctacccacctaagaatgatcaaattagattttgtgattattactattattatttttaataaaatattaaattcgaccaagaaaaaataaagttaggatacatcaaatgtaacttttccaaaattgttttgaaattagattatacaagagaggttttaaggacttttagatgcaaaccatgtttggagatttggttcgtatctactatatttctcctttcaaatgattgagagttttttttttttccagcttatctattcacttaggaagatgtgtgataagaatcagagttttattgtgtgttttttttattgcgttctcgccaaatcgaatgaaccattatttgaaaactgtattagaggaagaatatatggattctgttacagtgatcagaagtaataataatgactagagcttgccatattgtagagaatcgtcactagagtagtggtttcgctagggaggaccagactgccgacgagtacttacagctgaaaaacaagtgctctcgtgtctcgataagagtgttacataacacacatgttcgattcaagttcacattccaagccttcattgaatctaatgtagagagtcgattccgcattgctagccatatacaaaaagagaactatcaactatgataggatctaaaaaatccaattagacttttctagaactattatatatatatatatatatatatatatatatatatatatatatatattttaaatcatcgtatacaataacaaaaataagattcgttaccaaaattagcacaaatttaataataaaataatcaatataagcatttaattaacatttcacacgatcgtattataaccatgatttcaaattataattaaatttgttattttaaatcctcaatataatttacttctatttaattttatatacttctgtgggccgagaaaatgtaattgttataatctaaaatatatggaaaggccctaagcccgtttgagtttttttttttctcgtttaaaaacatctttgtggatttcaagtcttcaacaatg

SEQ ID NO: 36387 - DNA, 3003 bp, Unknown
  misc_feature (1)..( 3003): 2750-1469P.txt file - cDNA_ID_3095251; gDNA_ID_2926081; Annot_ID_196371
tagaagagatactctcaagacttccattgaagtctacgagagcagtgagatcgacttgcaaaaagtgggactctttattcaaaaatcggagctttattagtaaagcagcagcagcaagagaaggagagtctcagatggtcgtgttgatggatcacaatcttcatttagtgagcttcttcttcggcagtgatacttctgtagagattaaaggtaaacgtatttgtctaaacgacgattcagattcagaacaagtcaagatatctcaagtttttcactgtgagggtttgttgttatgtatcttgaaagatgataactttagtcttgttgtttggaacccgtattggggacaaacaaggtggatcaaacccagatgttctttcgaaataccccagggatgtgacatgtacaggtacgctattggatacgacaacaagagacgcaaccacaagatcttgaggtttatagattatgaattccattaccctcgagacaacgttgttttgtggtatgaaatctatgattttgagtctgatttatggacgactcttgatgttactactccacattggttgataaattgtggtaaccgtggtgttactctcaagggaaacacttactggtgtgctaaaaaaaggaactctgacctttttctcaatgctgatcatataatctgttttgatttcacaagtgagaggtttggtccgcttctgcttttgccgtttagtgatttggatggtgttgttactctagcttgtgttagagaggagaagcttgcggctttagtttgtcacgaggatgttgttgaggtttggattacgattaagattgaggccaatgaggtattgtggagcaagttcttgacagtgaatgttgatttgggtgatgagattccgagttcactgacatatggtagttttttcatcgacgaggagaagaaagttgctatgatttttgataaaactttggatcgcggcgacacagttcacatcatgggagaggctggatatggtggacaagttgatctcggagaaccggttaataaaagacgttgcccacttgtgtgctcttatgttccgagtttagtgcaaatcaagaaacctgcaggattccaaaggaaacagcaaagcaagttagaaaagcgtcaatatgttcgaaacatatcgaaacttcgcgcacttaaaacccaaagttcttggacattaagtatgtcacttgaatgtcatcaacagtaagatttatgtttcttggctcgtacttcgatttattactgctatgttttagactgatactttactaaatattacatggcttcatcaggagcttggtagagtgagaaagcattgccagccgatttttgcccgtatagctccgtctcagtttgtttcgggccattgttgaaaggacttcctgtgcgcttttttgtcgatcaatagtttagaccgctcttttttgttgccactttcttgcttaggggagtctttagatcgagttttcttcatcttcttactaagagcctcatcgcttaaggtttagttgatgcgatgaatctcgaaaggattatgcttccatgtttttttcctttttttggcatgggaccatgtttgtaggttttgcttcttgtaactcctaaactttcattttatatgatatttacattcttatcaaaaaaaaaaatatatatattacatggcttcatgctaaaggacatgatattaatcagatttttaaaatttaaagatggtggaacctcaggttttcgataatataatttagagatagcttctgttatctggcctagtctctacaaagtttttaaaaccgaaccagcgactcgactagatggcattgtcgatatatctatctagcagaatttcagtagcagagtctttttagtgagagggtcaggtgcattatcagtccttggaaacatcaaagacaagagcaagttgttcatgctcaaactaaaagattaccatccaccattttgggatatatattcaacttcttactctttgacatcttggaagtcttccacatcctcttcttcttaggtcgttatcttcataaacatcttcttcagtcaaatctgcctcaccttctgagtagcaaatattttaaaccagaccatttgtacttctgactattcttctgtccgatatgtatctctttagaagatcttggtgcataatggcctaatggggatcatcattaattaggaaataaaaatcaattcttatatgtgctgagaaaaaaaaaaaaaagctttgaagttaaaactagaaataataaaacatattggattaaagataattaatgtggatccatggaatgatcgatcatgacgagaaataaaatattatggggaatatataaagaaagaaaaatgtgcaagatgattagtatgaaaataacattcccttagtttcacaatataagtgttttggagaaatttttgtttcgaatgttttcaaaattttatgcaaattatagatttttttatttttataattatatatatatattatatggtctattttatgattggttaactttttaaaaaaataaacatgagttattgaggtttcaagaagaaagttttatgtttatggccatcaagactgaaataatgttttgtttttcttatttccgtcgactttcgtctttttcaaaatcgcaacttttatatatatttttttctctcgcctttcgatcatcggaaaagctctttttcaagtctccccaactcataactttgaattttctatttgccccctcataaaatttgcttctattctctttgtttgttggagttctcaagatctgtttgattctgaatccttgtaatttttgtatccaaccagtaacaaatggggttttgtgaaggtttatgagtttcccatattcaaatggcgatcttttagtctgagtaaaattgtggttcttatctgtttttgttaaagtttcgatttttattttgagggttgaattcgagaaattttgatg

SEQ ID NO: 36388 - DNA, 3000 bp, Unknown; identical to SEQ ID NO: 15197
  misc_feature (1)..( 3000): 2750-1469P.txt file - cDNA_ID_3095263; gDNA_ID_2926081; Annot_ID_196368

SEQ ID NO: 36389 - DNA, 3000 bp, Unknown; identical to SEQ ID NO: 15193
  misc_feature (1)..( 3000): 2750-1469P.txt file - cDNA_ID_3095271; gDNA_ID_2926081; Annot_ID_196366

SEQ ID NO: 36390 - DNA, 3003 bp, Unknown
  misc_feature (1)..( 3003): 2750-1469P.txt file - cDNA_ID_3095277; gDNA_ID_2926081; Annot_ID_196364
agcaaagtctaacccaaaaaatacattaagggaaatttttcagcttaatatcaaccaatttagagatttctaaaaaagaaaattaaaactttttttagagatttatatttttaaaagagatataaaattgcctacagaaaatcttcaaataagccaaaccagctcagtttatgaatcattaaaatgaaacttccttaccaatataatttcaaacgaaaaaaaaattccgtatcgaatttttttgtaaagaaactcattttagtgggtttttataagctagactgatgaatttggtcgaagtacagcttattggcatctaactcattaaatgcaaatatcatacaaaattcgtaattacatgtaaatttcttccaaaattcgtaattacatgtatgtaataatctaattttgtgtgtgttagtgatattagaaatattattgaaaaaataatataggcatcgtgtgcaattttcaattaccttcacaaatgaagaaacattccgagcatatctccttggcataatgagtgggattttagagttaagccaacgaaatttgggcctaatttttcatcaaatacttgggcctagtcatcggttatgtcattgctacttatataagacccataggtataccgataaagtcttcatattgagatccaaaggccgggatcgaacaagttttgttcttattgaatcagcgttagacgcagccttgtctttattatgttcttcttcatccgttagaaaaagtatccgtatgatgtccattcgtttcatttgtaataatttgatgaagtcttcttaaagacatttggattggagttagaatgttccttcttttatttttcttcaggacacttggagtctcggattagtcaagagacttcgatcatattttctttatcacctcttcttcaatttatatggatcatctttaggaaaactataacgtgttaattgtgaaattatgatacaaactttataattcataaataaatatgtctgtgcatagtttttttttttaaattatccggataatgattatgagagaaaagcaggtaggtcgatcatgaatgtttaattttggcacatgttgaatgtgaggtcccagccaccaataaactgatcaagtcctacattatccaattcctttaattaccttaaagtatttacaaaatttgaattagtcaaatctttgagttaagacaccaaatgattttacaaaactcgaataatataagaagagtatacttgttgtaaccttggagtactacgaattcaacaatttgatgaagtgaaaacatagttaagaaatgattgggagattattcatctaaagctaccagtctaccaactttccagttttgacaatatttaccacgtggccctgaggaacatcattgtcagtttatcaaacactccatatttcgtggcagcttcgggtcaagaatccaaattggtattgtcacttggtcaggtcaaagttgaggagcttttatatatagtataatcaatgagtcggctaaaatgtaaaatacatgttctaaattaaacgtaataaattactataatcgtatcaaatttatccctcttatcaaattagtactttcgagtttcgatattgtttttctttctctgggaaactatatatatttacatttctagaaagaaagaaaaaaactatatattacattttatacgtgctaagcctagaaaagattaattacaaagaaattatacattttattgatcaagtggtgcttaaagcagtaaaaacaatttgaactcataaatcgtaaatacgtcgacatatttcgtgatctccattaatttttctttttttaaagattgacgcaaaataatattctgaaaatgaaaaagtaaaataagaggggacaaatattcgagatgtgacgtggcagatcgagtggtttaaatattctattagcaagtggtttgtgtaataagcaaatgggtggtcgaacctgaccgtattcttggatctattcaactgtagcatcagtccaccttccttacctcatctttcctaactttttaatacctttttaatttgctaaaaacatcactactatttatatttgatctctaattactgtttcaactctgaatattccgtaatccttatattaatatgtccaaaaatatataatttctggactttcccttgagatgggaatatgaaagaattgcatcatttacctaatcatatgaacacaaatagatattggaaaaaatgtggttttatttttcatgttttgttcgattatctttatctttatcccaaaaaaaaaaaaatcattcgattatatctaaaattcaaaatagattacagaaatataatttattagcaaaacggcatgtttaaagcgtttgaagttattaaatcattagtaagaatatataagaatgtaattagtggaaatacatagtaagtatcattggtttttgccacatatggtgagcaattttttattttaagaagggaaaatcaatttgtacatagatttatgtcacttattcaattgaataatacagaaggatttaaagtctaaagtaaaaacaggcaaaataataatatgtttttttctttgatcgctcagattatcgtattaaaatttggattatgacataacaacgataataatacaaactagttggttatgaactctgaataaattattttaaagaaagaatactactatttaattataaaatgactctgcatcatatcaataaggtaacctcgttattataaacgtcacactacacactattagtattttaattacacagtgaaaaaatttaattaattactaatctctgtccaggtacataatattattccaagatacggtccttcgttactataaactctataaaaaccaattttcacttccaattgaattgggaacaaaccaaatctctatctctctccattagagcttgaagcagccatagcctaacaaaaccttcaacaatg

SEQ ID NO: 36391 - DNA, 3003 bp, Unknown
  misc_feature (1)..( 3003): 2750-1469P.txt file - cDNA_ID_3095311; gDNA_ID_2926082; Annot_ID_196398
tgtaggtagaagaaacgaatatgccgtttatgtggattttatactgattattgaggagaatgattatatgattaaagattctaacaatcgtaatcgaatatacagaagattataaaggaatatgcgtgtaacaatgtagatttcgttgagatatagaactaaacgtgttctgcctaagattttggtaagattgcaatcttcatggtccaccgaaaatgtagattttgctgtgatcgaaagcccattaaacgtaacccacccatctgaataaaacgcggatcctgtttacttaagtttttgtcttggacgattttaccctttagcatgaagaacaaaatccaaaattgaaatcaaaattggggacaaattagacaaaaattcaatttgtacttctcttttaataataagaggatttgatattattgttttattaagttattgttacaatgatactttatttaatgaggaaaatatataaaatatattttattaataaataattaaagtaaacaaatagaaaaagaagtaaaatccaaatcaaatagaatgttgtgaaatagaaataaaagccaaagccaaagtgttacgaagaaacaaaataaaaccatagtctaaagcatagcaatttcaattgcttgaagacgtttctcgatcgaggagtaaattctcatcacgactcttcttcaattcattttcaagttcatcaactcggtgggctaacgttcctacttcttcttcagtaggttgtggggaaaccgatgaaccattcaaatacacgaccttgttttgatattccaacaatctataaaaaaaaacacaagtacatatataatgagatgtattttaactcctcataaaatataatctataaatttgccttaagatagatttcgtttttctcctcttggctgagattatctactgtcaaaacttctccattgggagactccatttcagacaatcgctcttgcacaagttcatcaattttttccgcaactagccgggctctttcatcaacatacgtaccatcagatttttggtgttttttttttcatcacaacaatgaaggaagagtcttcattgtttgccacctataaggaaaacattagacaatgtaagaaatagtgttaatctttaaaaaacaaaaaattgttatcaataattttaaagaaaatatagaaacattaccaaggcatcttgcactttagcaaaagaacgtgaacctgattgataagtgtgtattttgcatgttttgagcatccatttgtcatcactttagcatcatatcatcacttttcatctccatctcttgaccaccactcgatcacatcactcgacccagaggtcgagtgtcttcatcctattgccagaccagtactcgacctcatcattctacctggaagtcgagtatcaccatcgccaccactcgaatgcatactcgatgacaagcttcagagccttcttcattccgcactgaaccagacactcgagcacaaggaagaaaagaagactccagctattcactcgacctcccactccaccacatgggtcgagtacagttcttaatccgtcccaatactgcgtcgttttgagtattagggtttcgggatatttggctataagtagtatgtacttcacattttcgcagacaagtttttatctagttttatttccgcagaccttgtgttctagaccttttgtaatctggatttctctttatctattcagtattcagtattcagcttttgttcttgatttcgtttactgttgttcattctgtcatcatcctgctgttacactgttgttatcatgttttcaacttgttcaacgtttatgctttctgttatgatgtctaagtagtgaataggtttctgaggatgggttagagtagtgtagaattctcagtatgctaggtgattgagtattgattgataaatcccttatggattagttgttctaaatgcctattgctttctgatcaactggaatttgagcccagacatttccgcgcccaaaaggtgttcgatgaaatgtctgaaccactaattccagagattcgtgaccctgtaccaaggtattggttgcaaggagcgttttggctttaacttgttgattcgtaatgcctgttaggttagctctcgtcaatggtgattgagtctgggactaggttaacttgagagtctctattgcggtggcacttagatttggttaatgaacttgttgtctagggttaatttattgagcatgttaatcacctgtaaactgaggaaacgaaactactcaattaccccatcctcgggaattctttatctgattgattttattgtttactctattgctgtttactgcatcctgtcatttgttgcttagtttctgcaattctttactgttactcgacctgatactcgaccacccagttgtctggcgacagactgtgcagtcgagtatacctgttacattatctgtctgttactcaacctgtcactcgacccacccagtgctctgcaacgagctgtgttagtcgagtgtttctttgtttctgcttgatgttctgttttctgcatgttcacttaggactgctagaacgcaccaaaacctgttattgcttggcttgacttagtgacttctgatcacatcttgattgttagcatcacacctatttggattgacaaccttcagtactaccacgacatgatagtgctttaggattaattgatcttaaaaacctattatcaatttggagctgttgcaaattgggtgtttgtttgttacatttgagatttcagacttgcttagatcaagttctttttcaattttcttttcggttactaactatgtgtttttctcgttgtcttcttgatccaggtacacctctactgtatacgaactcgatcaacaggcaatcagaacctccttttcaatgaaaacatcgaccgcatagctcgcaaactcaaagaaaggagaaacacagtcaaccttgtacctcagcaaccactcgaaatg

SEQ ID NO: 36392 - DNA, 3000 bp, Unknown
  misc_feature (1)..( 3000): 2750-1469P.txt file - cDNA_ID_3095332; gDNA_ID_2926082; Annot_ID_196392
taagagacatgttttaagtaactaaatgcgacggtttgagactatagtttcgtcgtagttagggacgaaacggatacgtagtatcgatcactcattaagacgttttacagacaaaagttttactaagtaattgtgactgataaaggacattttattagtaacttaatgcggcattttgagactatattttcgacataataagggacgaaattgatacgtagtatcggtcacgaattatgacggtttgagggcaaaaaatttggtcagtatttgtgacatttaggatacgtttatggatcgttacatttggtgactatattgcttctcaattcaaacgtcacaatgtaagtgacgattttgttacgaaaaaaagttgtgacgagtgtattgcaactgtttgcaaaacgtcacggatgcgtatcaatacttttattgtgacaaaacatttattattatgagtaaatatttggtcataataaaatcattttcttgtagcggtgttgacgctttgttgtgatctgactcatgagaaagagaaacaagcattggtcattgaaggggaacgcaaacagattagaggcaagaagggataatcagatctagagaagacaaagaagaataagaaatcgaaaagaaaacggagatgaaggtcgaaacatgacagacgagaaatcatcatcaccacgaaggagaaacagtggcaaagtgatttcttgttcttaatacttatgagaagtattaagtgaagaagactgaaccagatcgaagctaagcgaagcaaagaaagaagaaaaagagaaaagaggaaggaggaagaacagtttcaagatggggttttatgagactcattcccgtcaatacatagagaattagataacgagtaaggtgtcctcggaaagagtacatttccaaaaatccacatccattgacggagtttgaatcggatttatattcaagaggttatgagtatttctttctggacaagtaactgtagaagctgtccaaatctatgccaagtataaatgcagaacactgtgtgactattagttttgtgatgcatttttccgatgaacccaaaaggaattagatcaatatcaagacgtctataaaaatatcttgcctcaagaaactcagaatagctgatatcttgtccatcagatttaatctccatccaaaattgaccttgaaattttgcctagaattatctcaagttgcagaaatttagaaaacagttctgatgcagcatcttcagaaagacgtgcgagattcatgtgctttcagatcgggaataaacttggtggatgcgttcatgatactattggctacatttgcaacggtgggattacatttttaacggttagttattgacttatgtgtatgtttctgagacagatttataaagagtaaataatgacgagtttgtgttgttggttgggtaaatgagctcggtttgaacttaaaccttgcaggaggcttcatgaattgtaggctaaggtcttcgttgatggataaccaagatggtgatcaataataagttgttcgagccatgctagtaattgtctaaacgggaaaaagagaagtgagttggtctttgtaacgcccgtgaaccggaaaatcggttagggtttctttttaaatcatccgatttaattggttgggttaattggaaaccctagagtgtgcctataaaagaaggaaactcgaaattagggctttagttagtcacttttcgttttataaaggagaaaaagagagaaaaggagaaggagcagaatcgttagggtttgggagaaataagtttcgtcatatcaaatcgtggtaaaacctaacgacatttggtagagttatttccaagtcctttatcgttattttccagtttacagaattggatttggattaaaattggttgagttattcacagttttgtgagacacgttttctcagacgcgaattaggaccagcggagattgaaactgagatcgtggtctcgtcggtttttcgatcggcacgagattttgtgggcagctttgtgacgtctgcatctagggtttcaccggagcgattcaatagttaacggttagtttgtattttagggtttcgtatttgagactgcttgtttctggtttttcctgtccagtttgcttcaaggttgcttttggttgtggacttgttgtaggacgtttctggactgtttcagacgcaaggagagtctctcttgggtttcattactattagaatcaagttgttaaggtgagtgcgtgaccatgagcttatctgagcgattgggttgtgtgatttgttttgtgtgatgatatgcaggtgtggtgaatgtgttttgggtgaattgttcaatgacttgtttgtttgtattgtattcgtgattacacccttttatttgcttgtgtgtatagctcgtagatgggaggatcgcctcactaagtatttatgataatacttacgcatctcattgtgttgttgatgcaggtaaagataaagtgtgatcgtggaatcatggcaaggaagagaggatgatctaggaactcgtttgttttattttggtgtttttggtttttggaacccggttaggattgttagttattcttggttttgttggtcgaattatttatttattcataaaatagtatttttgacttgcggtttaattgttattttattggttggtttaattagatatttatgggaatatttaattatattttaaaaacaaaatgggtcgggttgttttaatttggtatcagagcgatcacagttctaggatgtatagaataattaattgatgaattattttcctgatgattgatgtgggattagctagggtgttagcatactgagggttgattatagagtgcttagtcaattgtgtgtgttggagtcctagcatcatcttcttcgagccttaaatgagattccacggtaagttgtttgtgatatattcgttgttctagtttcttagccttttgttcttgagtagcgcagatg

SEQ ID NO: 36393 - DNA, 3003 bp, Unknown
  misc_feature (1)..( 3003): 2750-1469P.txt file - cDNA_ID_3095377; gDNA_ID_2926083; Annot_ID_196408
agcctatctcgggtaataatattattttttggtattataatatattgaatcaaataaactaatttggaaattgtgtatatatgcatgcactcgtatgttgatacaatatatgtgtataaatgattactttttgatgatgagggtattgatgcttgtatgggtttaaagttataaggaagagtttcaaaacgtgaaaagattcactgtttaataatacattaatctctatatatatctacacacatatacatatatggattgtatatgactagcaccaaaatcgttaagacatttttattttacatgagatgcttattatattcaagattatatgttaataaatgatgtgtttatataggtatgatgttcattttgggatacaagacccttatgaagattgtgtagcgacgatgaggctttacacgagaatgagatatcagaaacacaagattgaagcttaccctttagccgccgatgcgcagaaccgtagcaaccaggtggcttggaggcagagtgaggccgagaggatgtctcctgatgaaatgctctcaatctctcgttccgactattactgctggtgcttagactcactagcttaatttctaaacttatggggttatttaagtggtctcttaaaattagtaattcttcaaacttttccagagatttttaatttagtagtgtaatgtcgaataacattggttatgattttgtagtagtatctaaattttcgagtgtgtgttgtgtgagatgcctagattgttattgaactttgtaataatgcattaatctcaattattgattaattgactgctttttttccaatcacacattacttaaaatatgattccattacttgatatttaaattttagaagaatatacatttctgttaaatatattaaacacttttattttttaaaaggtatgagttaaaaaaatcaactttaatactagataaaaaaaacgaaaattgaaagaaagcaaaatattagaaaaactagcacaaaacatactgatatcttattgtataaattttattttcaaagttagtccagtcattaataagatcaccacacatgactcataacttaaacaatatgtaacaaacttttcatcttgtgtggcttttccttcatatcatataaaagatttggacagtcaatcatatacataataaaaaataaccttattttttgtagtaattacataggtatgccattagaaataaaaatttaaagagtaaattaattcatctttttaaaggttaataatgtttaagacaataaattttgtgatatggcatataatattttgaataactttaacactaactaattgaatattttcaataaataatcatactcgcactcattagtcataacatcatcaatttaattctttttttatgggattattatatgtacttgatgactaaaactttgagaatattttcatgaataatatgaatttcttcaattgattacaatatttatcaaaaacagcagttaccaaaaataatagtttcatattaaattttacacgttggtcatatagggaatccttgcgtactgcattctgcatggcatgtcagcacagtgaatcagcatgtgatataattttactataagtagagcattcatcagtcgtgaattttcggaatatatattgatgataacgtcggttgttaaatgacacaaaaataatgacgtcgttttgagaaccgttgtaacatcgtcgtaacaacaatatagaaaagacacaagcataaaaaagaagcctacgcaacaattactacaacatcaatctccatattgaattgtcttctgatatacaataccattccatgccaagcagactgagactttataagtatgtgaagcatctcacgagagttctcagtcaaatgcaactcaacaaagaaatcataagaaagcattgagaagcaaattagttcatgaaccacatcacatcagcatcctggagaccaaaaaaggaagacagtgaatcactcaatagaagaactgataagttcttgctttcagtgccaagagtgtaagaaacataccgcaaaaacagactactaaacccttttcaagaacaatccgaaggaaattgattcttctccacatcatttagcatccaaagcaatgaccaccatctttagttacagctctacgcagcacatctaaagctttcttgttcttttaccaattctaaaaatctcaaagaagagatcgattccagatacaagagctgcataagattcattcaaagttgtcaaaattacagtaccatttttttacggaggaatgacaagttatgagagtgtatcttttcgggtaaacattgtaacgtagtgaaagttgagagtgaattgcgtaacaaccgatagaatgaaccaaaaagaaaaaaagaacatcttttctatcgcccaaaaataaatctaagggttttctatttattaggtgtatattgtcttttctagtactaaaacaataatggctaagtctcatcctcacaagagattaaggttgagaatatattgtattgttgttagcataaacaaaaatagatgaaaccaatttctaccaaattcatttttttttaagccatttagagtacattgggtaacaagtatttcaactaaattactctaagacaattctttctatcttttatgagctgaaatatggaccacttttcttttctgttctttgtggataataaaaccaaacttcactgaattatatcttcaattcacattgcactaaatttttagattgatctcaaaataaagtttttttcctaaatattgtcgtttatcgaatacaattaattaaaggataaattgattaagttgctttgctttgtatataagaccaccatcgctccctcctctttcatcagttaagataatataaattcagtaattaagagagaagaaataaatacaaaaatgttggttaaagttttctcttttttcatccttatgataataatg

SEQ ID NO: 36394 - DNA, 3003 bp, Unknown
  misc_feature (1)..( 3003): 2750-1469P.txt file - cDNA_ID_3095382; gDNA_ID_2926083; Annot_ID_196407
caccttgataatggtgcaactgtaatgtctggaagctcagatatcgtcttcgaggagttacacgaaggatcctgatgacaaataaaacataagtttcttttttattataaaaaaaacaaaagggaaaaacaaaaaatcaagaaatattgagttctttaagtaagtttttctttttgtgagtctaatacaaaagtatagaaacgaatacttacattctgtgggtttacacactagacgtaaaatgaaatttcattaattaactataataacaacgtcaataacataagtaaacaacttgtagttgaacttttatttttcttactaaactttctaattgaagggtatatttttgttaattttgttaacgtatctttaatcgaaggtattttaggtattaaatgtagataaatttttttgttttaatttagaaatccaaaacaaattcaatgtatattagagcttaatagtacaataggatttttatatgtaattggatttcttttgtgagtctatatatgaatagatgcagtcatgaaacatgacaaaagagcatccgaactttggggaatatgctaactttttcttactaaaaatatgaatatggatgtgcatggacacatcttaactgtagaatgtgctgtaattgagaagaaaaatattgtggtgattaattcatttcaaagcctacatttctattatgcatattagaaactatttatcaaaaattcattaaaaaagaggtttcgaatcaaattatagatgaacgtgttgaaggaatattttcaacaaggaaaaagctttgaaagtttaaatgaataaattggattttgttagtcaagaaaagagataggtgtatatgcatggtctgataccaaaggaccatctttgcttttgttctttaacacaattatatgcatgaataatacccttttttttattatcaaatttggaatcttttaggatcaaacactataaactagaatcttagacttggcccatatttcctcggtcaaaagatagtaagcttctaaaaaaacttcaaacctttcaagcaaaatatttttttaagtcaaaattaagaatctaaaacatatgtaccattttgcagtctgatttatactgcaaaatttggtcactcaaaattcgagacaatattttgtttgcgtttaaattgaatactgatatttattgttaagaagatatcatggttccttttcgaattaattcacacacattcatacacaaaatagagaacatgaagctctgaatccatgtgaagttaaattagcatatccaaagaagattgaaatgcgtgacgtcgtaagtttaagctacatttttgtaaactaagagtaaacttgcagaaaaatattacttatattttcttagaaagccctacatattatttatcaaccgctaatgtgaactatggacacaaacgcaacataccgacatgcatacgcaagagcatgatattgcaacagttaaaagaaaagcctttatgaaaaaagtaaaccttatcttcagcgcgtaaataagataagataaagatgatctttgagtcaattaataaatttattttttctttttgaatttctgtcacagaatttttttgttctttattattttgataaaacaaataattttttacagtagtgtgctataagacaatcgttaattgaagtagagagatactgactagtaagaatttgatggaacatgaattcttaaataatatatatatatatctttaagtttataagacaattttcgaaactactttatctttctaattttctttatatgtaatataaatatttgaataaatgatacaaaataattattttattttaacatcaaacgaactttgattaatttgaagagtgatccttgtggaagatttgtacaaaaaaactaggaagaaataaatggtgtataaaattcacattgtttggtattaagttctttgtcaatcaatcagccgcttcgttgttgttccttgaaacccatgtgaaggtagaatttgtgaacttttctgccaggttatagactttaaaattcttcatttctctattgataatatgtggtatttgcttgttatctccttcaaaagtgacattccaaatcctcgtatccaagtgtgttgcagttccgcctcaatgacgatattacaggctttgcctctactttgtgttgcttcaacaaataatcctctatcatctcgtataatctagccagctttttcatttttcccagtccgtaggagactacaatcataattacattttaaaaaactacttgatgtggtttacgccattgttggtattcttgtgtatataaaatgatttttttttcttagtacatgtacatacaaacttcattttttcaacaaaaaaacaaattttagtgtattgaaggctttttaaaaattcgaaaatgaagtgaatgatgtaagaacattttctaatattttagagattattcataaaccttttattggtatttttgaaagttatataaacaatcgtaattgcttgatggtttgtatttttgatcctttgtatttttatgtgagcctttgtatatttgtttttcttccctacacctacttagtgttggctagctagttatctgtgtgagattttcttgtttataaacttgatcgacatcacattttcacacacacacgtgcatacaataatagcatcttcgttatcgtccaaaacaaatgacaactaaaaattatgattccttttaccatgaaaagcgaccccatcgcattaaggcatctacttcaatttctgttcgtctctaacggtcatatatgagaatggtcagctttgcttttcttcatcctgcttttatgaatattcatctataaataccttctcacaccttctccattcttcacatactcacacactcagctatcaagaagagaacaaactctctcaactctttcgttctcaagtatttgcttgcaagtgtctgatacgtacaatg

SEQ ID NO: 36395 - DNA, 3000 bp, Unknown; identical to SEQ ID NO: 15201
  misc_feature (1)..( 3000): 2750-1469P.txt file - cDNA_ID_3095390; gDNA_ID_2926083; Annot_ID_196405

SEQ ID NO: 36396 - DNA, 343 bp, Unknown; identical to SEQ ID NO: 15206
  misc_feature (1)..( 343): 2750-1469P.txt file - cDNA_ID_3095417; gDNA_ID_2926084; Annot_ID_196426

SEQ ID NO: 36397 - DNA, 620 bp, Unknown
  misc_feature (1)..( 620): 2750-1469P.txt file - cDNA_ID_3095417; gDNA_ID_1591346; Annot_ID_150858
gatgaagagctctattcgaattcaagtgagttctgtctatcttcttgtctacttctcaattttagggttatataatyttatctattaaactctaattaggttcaatttagtttgactttttttttcccttttactcaatttaggttctatttgggtttatgtgagacattgtgtggttttatttccagggagaattggtaccagttttagtttcgggttaattcttctcattgtttatctctacttccatgattggtcttcttcacttatgatctcaaagatcaatcttttcaattgctcttggattctgagtttaatggataacaagatttgctatgaatggtttcacactactgttggaagatctatagaatgagcaatattgctcgttgagcagagaatatataaaatatataacaaagaaacttgatagattaaaatcaaatccaatttgttgttattttcgttttcgtgtgcagatgtttccagttaggaggtttaagtctagttattattacagtttcttttttacttgtttgctaattttactctatttcataaacttgttatctacagatattcttttgatgtttggtgcttactagttggggatggaaatg

SEQ ID NO: 36398 - DNA, 3000 bp, Unknown; identical to SEQ ID NO: 15205
  misc_feature (1)..( 3000): 2750-1469P.txt file - cDNA_ID_3095426; gDNA_ID_2926084; Annot_ID_196423

SEQ ID NO: 36399 - DNA, 3000 bp, Unknown; identical to SEQ ID NO: 15207
  misc_feature (1)..( 3000): 2750-1469P.txt file - cDNA_ID_3095432; gDNA_ID_2926084; Annot_ID_196422

SEQ ID NO: 36400 - DNA, 3000 bp, Unknown; identical to SEQ ID NO: 15204
  misc_feature (1)..( 3000): 2750-1469P.txt file - cDNA_ID_3095438; gDNA_ID_2926084; Annot_ID_196420

SEQ ID NO: 36401 - DNA, 3000 bp, Unknown
  misc_feature (1)..( 3000): 2750-1469P.txt file - cDNA_ID_3095455; gDNA_ID_2926084; Annot_ID_196414
acaacatatatcatatcaccaattttgagtttgtttcttttaataacaattttaagttgtttattagtgagaatcaaaatttaagtttcaatctttggttagtctttcaatctttttttttttccttacaaaagtttggcattgatgccctgagtgctttcattatgtgttatattatctatctattgccaaagttgttggttacaaatctcagtcactcattatcatcattctcaaagtacaaaatttatttttactttgtataatgggttgtcaactttttttttcttttggtatttgtgtggttcttaggttgataatgaatcattttctatatatagcaaagagagtcaatgctcttttagattaccattcattcgcgcaatttcctttcatggaaatgtgtctggaaaattatgtgtttgtctccacttttttaatttcacaggcatactcaatattgacttttcttccttttcatattcttcattttagttattttttttcatttgcccccaaaaaaaaaagtttttttttcctaaaattctcgagatcacaaaaaacgaatctagaattttcttgtttggacgacaacgaaattaaataataattctctaagaaaagaaaagattgctactttacaaatttgtgtaggtatactagaaattcaaatgtcgccacaaaatttctgaataaagcgtcaccaattttttttttcaattagtcacaaaatttcaactaataagtctgaaatagaattatgaaaatcatcctctaattttttttttaaacagcttgaaacgtttattaaaacgttagtctaaacatactatctcggttcaaacgattttattaataattcaattacaatcgccttttgtaaaatacatcataaattttaagttggttatctcactttcgtttacaggaatgaagagaaatggttctatatcaaatattatttcttagcgaatcgaacaaattatcgcgacaagcttaatgggatgagtaacaagttgatgtagagcttctttgaggtttagggatagagatagcctatgtttctactttcacgcttaagttaaggagatttgacaacaccacattttcatattattgtttatatatataaaagtaaatgaacacatcttcatattgatcatataaatataatagcaattgaaaacacagaatgcctaagttttattagaaacatatatgcatatatccaagtgtaagtagctatacgaccgttgttgtcttcaaattataccttattcaatattgtaacttcagaaaatgatgttttagcttggtgggaaaaacttcagaaaaaggaaaatacttgaagccactatatggtgcgaaatgtaagaggataaaagtcatatatatatactagttttttttttcatttttttgggcaacaaagtcatatacttcacttaatttctactattagaactccacatttacgaagaacttattattcatatcagtcatctaataactgaatagttttatccagttgattattttaatggtctttctcacgtctttttttcttattgctcagcttctcatatatatatgaaatgattataaattgcttattttttgaaaaaatatatttccaatcctacattatcaatgtctgcatttcaaccttaattttacgagtttacttagaaattgatgttcttttccctgacgatgtaacatcttgatgctctttttttttcgtttttttttgtttttaatcatttaaaacctttataaatggcttcgagtcttcgacaacactcaaataatgtccaagttactaagtttgttgttccatgcttcaccactaaaatatggtttatgatgtaataggttgttgtacatataaacgtacatcttatttctgtgccatttttttttaatgtatataggtgcattatcctaaagacgtcatgtcttgatatggtttacggaaagtttgatttttatcgaattttaacacttcaacaatcgacataatggaaggttaattatataagttatctagagaccagtacttctatacatattgggttgtgattctgtttactcctaagaataaatatggaatgttttctgtaccaaggcaaaaagtatattaattcaaaaaaattagataacaatattaaaatcagatcatgctcagaaaacatatactcaaattcatagtcgactaatccttgaaatgatggatggtttacttttggatgatggatttgataatttatcaaacgtgtacttattggagcttagtattgttcttaaaagtttgatgtcacacaatgtcgaattgggaaaaagatataacaaaataggttttgacaattataattgcacaaacacaatcacacaaagacacatttatggatgtatagggaaatcaatatatttgtgtgtgcgtgtgtgactacatatatgtacatagataaggttgtgttgtgtatcatgggtttgttaggttggctgtactctataaagttttttggtatatcatcatgacaagaaactggggacccttaaaactctatgatgtgataataatatcttctgtcaacaccattttcaaaaacttataatgtgatccaattccaaattcatgaagaatatttcaagataaatatgggatcaattcaataaatatataaaggagaaaaagggaatataacctgactatttggaaccataaatgacataaagataagttcatacgacttttgtggctcatcaaaggccatcatcgtcctctatatgcaatttagtgctttatagtacaaaaccttccacttccctttgtccaaagttttccaatttaatttataaacaggaataatattatctaaataataaagtgaaaaataactatcattgtccaaataatttggtcgttgatcatgttactacaaagaaatgaaatccttagtagaagtatatatatatatttgtaacacactcaaaatg

SEQ ID NO: 36402 - DNA, 3003 bp, Unknown
  misc_feature (1)..( 3003): 2750-1469P.txt file - cDNA_ID_3095497; gDNA_ID_2926085; Annot_ID_196439
tcagaatcttctcccgtagagacgaagaagctgtttataactggtatactaacacttgagattgtatgcatgaattgggtcacatagccatataacatgttatagtgacaaaatctccatagcatttaaaggaacaaacacataccatataactggtacagtgacatgatggatgtgctgttggaagcttatagagatgaaaatacagagtataaaatcacaagaaaccatatcaagtccgtgatcgtggtaaatgctcctctcttaggtggattcgtgagtgaacactattgctttgacctgactaagaaacgtttcggttgtgaattcgggtgaaacctttgaataaatgtttggaatccctaaatgtttctgtttgctactacaggatcttattgttgtaggcactgacaccttaacgcaaacaatacagtggacaatggaggagctcactaacaaccctaacattctggagagattgcgaatcgattgtagggcttaacaacgttaataaaaaaaactgatctaccaaacctctcttactagcaagcggtagtcaaagaagggctaagattgcatccaaagccggccataaggccaagcaagcaaaacacatgcttgcggccgcctagaatatcatttagtttcgggcattttctagttaagttcttgtcgtctaatagtttaaactcaatgagttcgacccttgaaagtgaagtttaaacataaaaatattttacaaccaaatcatgaaattaaatatattatgtggcctattttttttccttagcttgtagcctcgcgaaactcggagacgtgaactcaatgggttttgcataccagagaagacaatatttgttgtcaatgcttatgccatgatgagagatcctgattttttgggaagattttgaggagtttaatcctgaggatttaaaaaacatgaagctaattatttataaatacaatataatcgattattaataaacatacaaaaaaagggtgaattattatgattttaaaacacttgaaaattgaaatattgtattcgattatgtacagccaaaataaagaagccacgagacttagtaagcattatattaatatcaagtgatcatgatgatcacaaatatagacagcgaaactgaaaatgtcagagatacgagagatgtgtgttaaatgaaatcgtatatcgttatttaagaaaattttaaaaagttttaaagaactaaaatcctaaattttactcctacaatcaaatagattttttttgacgtattatctgatcggttcaactaatccaccgaatcactggttaatagcaaattttctaagttttctgattttaaaattgccagctgacgttaaaactaaacccaaacaaacaaaaaaaatatactaaagtcaattatgtaaagccaaaacaaagaaaccacgagagttagaaaacattatattaataataaaatatcaagtgattagtgatcatgacaatcagaaacaaagacaaaaaaaagaccgaccggtttgttgcgctaaagttagacgagagatgtcacaaaatatgagagaggtgtgttaagtagtatatcactatttgagaaagattcaaaaattttaaaagtaattaaaatatattaaagtcataattttgaccggtttgttgcgctagacagaagtatattattttgggcgattatcacgagttattaaagtattgaaacacaagtaatgaacaccggttatttaagtattaatttgatcaatggttgtacaaagaaacttatgaattaataaaaggagaccgtgtatcaggtgaatcggactgtttttccagttatgcaaataccaaatcttttaggttaccttcaaggcttcaaatactatttttaaacttgataactggtatgcttaacatttgagattgcatgcatgcttttgcttttgaacttacatagtagaatctgttattacagtgacaaattctccatagagtttaaaggaaaactaagcgtttattgaataatgatgattacttttgcttcctctcaatttgttgcctacaccttaactcactcagaagataacatttacgaatacatcatgtttcttggttttgtgaactagtctacacatctgagaaaacattacgtgcagcatttgaagggttttgtgaactagttgaaggtactcatgatttgctatccaattcaaaagtaagaaaaataatatcattgggaaaagatagataatcacagccctataactctcctctgcagtcaaaattattatggacaagatatcagaaggctatgcctttcgagctagagtacacgaaaaaggaagccgcaagagctgcattaaaagagctaaatggaaaggtaaagctagattaccaaaccgatcaggcaaaactgaagtcaaccaagtttggggttctagtatcgagtattaggtgatgcaaccatggggatttgagatgcttcaggccaagaaagaaaaggcaagcaatgtcatttttcacactagatcaagctttatgaggctggagtgttccaacttccaactctgcaaatagcaaaagacatttggttacgtttaacgaggacattaccctaatatctaaatatttcacatgcacatatctaaatacccactatgcatgtgacatctctgcaaatatttcacatgcacatatctataaaattggattttacaagattccggccgaattaaagggcctactgatagtgaagtaatgtatagttaatcaccttgggcgatgaacacgcttaacgcaagttattaaactactactattcatttttatcagaaaagaacttctgatctacttatatataaaaacacttcagatgtacttatatcacgttcttttagagagaaacgtattactttatgtttaggtaataaacaaagtatggattcattataaaagattactctgtttcatttgcctctgcactttcatcaacaatggcagcaatg

SEQ ID NO: 36403 - DNA, 3003 bp, Unknown
  misc_feature (1)..( 3003): 2750-1469P.txt file - cDNA_ID_3095511; gDNA_ID_2926085; Annot_ID_196436
tttcgtttctatattttggtttttttatgttttaagatcagagtcagtccaaccttcagcttcctccttgccttgcgtttcgtctaggtcctcgccttgagtttcatctaggtcgacctcttcagtctggtcgggacctcctgctgaatctgaggagttgtttgccgcatctgtgatgtttacaggttgctgattctccatcaaaccagaaagtgctagctttggtgaccactcaaggacatcatcaatgatgttggacatccttctttggtacctgtatgaacaaaactcatcacaattcaacctctactgcactaaattcaaatgagtagagtacaattagtttaagcgatatttaaaggtggacgagaaggcagtgtatacctggcccgagcagcttcatcaggggcatgacgcctaagcagcatgacaacaacaatagccactactgtgtagaaaagtcgagatgtccacttgggcggttcttcctcgtctttctttggccagaaacggaacagttccttcaatgtggcttcctcagctagaatgttggggaagaaccagacacgctttcccaaaagaatccacatagcaccgaaagcaactgctctcactgcaagaggtaatcaagaaggactaatctcagtataagccaagttaaaactacatgagtatatgacccccttcagtttagtagctatcgctagtaaataatactcccaagaaaatgactctcgaaggtgcaattacaaaaatattaaacagagtatttgtgtaatagagcttaccgaaaagtaaggagagaatcatcagaagaatgcccgcacatgagtagagtacaattagtttgcaacggtgtggatacacaggaaacaaacaaattgcaagagtcaatacaggccagaagaaggacaaaagcgtttgccatagcggatgccgtttttcgaacgtccatgcaaaaaaggcatcattttcagagaaagattgatcgtcctgcatcaaaaaagaaaaatgaaatcaaaagcgctgatatacttgcactgatgaatgcatatcttactcaaaataaaaacaaaacaagaaccaaagagaatgatggtgaaagggttgaatagcaattttctctaagaaacaaacttcaacatacaagacaacaagttcaatagcatatgaagcaacaccaaaatcaacttacacggaaaatctccaaatgagcaggccaagtagagagctttttcttcccgggacgaagagttttagtaacacgatcacagcggaccaaaaggttctttcccaacaaaacattggcaatatcgtctgtgtcaaggtctttatcttcttccagaatatctttaaagtcagggttattcttcataaagctcacaaaatctttccctctaaagtattcaactcgtgcttgctccataacagcccatctggattctaatcccttgtggtctctaactttctcagcaaacaactgaaaactatccttcttcacagcttgcttctagtaaagtaaagacaacaataagcatttgagcatatcaatcactaaatgcaaaggatcatcatttaacagtaccaaggccaaaacaaaaaaattcaaattctcgccacacaagtgattcaattaacattccagagattataattcacaagtcacacaaccaaaacagtaaaatttacgagcattaacatacaatttagcaaaacttaactatgaaaaaggcctatataatcatgcaatcgcaggtcaaatgctccatcagagaccaaaacagatcaaacaaaaggaaacgtaacctaagaacaaatttttataaaagagattagagagaaatgagagaggagagcaaaccctaggttgagaatcagaaccagaatctctaacggaagtagatgcagatcccgatgatcgtttaaccctcttcttctcggctccgaccggcttcttcatctctctccctcttcttccgagtcggagagtttttttttttcgatttttcttttacagatccaatgttttttgttttgttataacagaacaaaaaaaaaaattctggttttttgggtaaacccgtagagttaagattgcaataccggtttatagtagaccggttaactaacctagatttattaccaagtgctattaaaataacgtagactaactttgaaaattttggaatctaaaaagtatttcatttttctcacatttcaagattgatgtttgactaacatttatacatttaccttataaaaagatttccacaacttcaaattatattggatctttcttcataactaaaaaaatcaacaaattagacgtttagacctttttatctaagtaaaattagacctaagattatcatttaaaaatattttcagtacaaatgataatgtgatttttatgattagaaactttaacttacacatctttttatgttgaacgattttatgattgacggtttatcgataccacactcacgattaaaaaattttactttttagtttttactgattgaactatagcgatcaactctgtatgtatgctagagattttcggtaagcttgtctttgttaatacgagaaatttgtattctatgaatcgaacctcatattcatttatgatatacaatcactttaattttaaacttaagtgttacaatagaaaaaagcataatttttagtagaatatgatctagtgatgatataatagacggtttgcaatagaaaatgtgtttactcatgattaaaagagagaaaacgaaactataaattgctcagctttcacttgattagaattttactttttaacgggccaattcatgtccaaattataggccttttaacggcctatactttttgatatgcttagcttttttacttatccactccaaattcccaaaaagcccctgagtttttcggattttacattttctaccagagtggagaaaaaaaacagagaagaggaaacaaagcaagcaaaaaagagttgccatg

SEQ ID NO: 36404 - DNA, 3000 bp, Unknown
  misc_feature (1)..( 3000): 2750-1469P.txt file - cDNA_ID_3095515; gDNA_ID_2926085; Annot_ID_196435
tacatctactactatcatccacccgttgataatctgcacagagaaaaaagaaacaccataacatctgtgaatcaacggtcatgtttagattttactttgagttgataacaaagattttgctttaagatctcgaaaatctagatttacctttccattcatctcttttagtgcagtgcctgcggcttcctctgtcgtgtactctagaaaggcatagccctttgatctcttcgatattttgtccataattattttgactgcagaggaatgttctagggctgtgattatctatcttttcctaatgataaattttttaaacccttggataggatagcaaatcatgagtaccttccactagttcaccaaacccttcaaatgctgcacgtaatgtcttctcagatgtgtagaaagacagtcctaaaccaagatacatgatctattagtaaatgttatcttctgaatgagcttagttcgtaaattaagatgcaggcaatgaattgggggaagcatgatttttccttaaaatgctatggatattgtgtcactataacagattatgctatgtgaccaaaagaatgcatacaatctcaagtattaagcataccagttataaacagcttctttgtctttacgggaggagactctgaatcatcttgatctcttgaatcttgcgtactatcgccttttgtgaaaaagaaagagagccaaagttactacaatgtgagattatacactgatattcatcaaaatcagctacacaaagattctaaacaatatcgtagaacattattttcaatccataagatcagtattcaagacagaccttcatagtctttgtttagtgactcgaaactgttatcaggaacaacagcaagaacaccaggtacgcctgcattaatttaaacaccatctcttattctgttagcttaattcaggacaaacattgttgtctaattttttcattagctaaactcacaaaccagctaactccacagcacttctttcatcgagatcacaacaaaatccgaaatcagactgccaggaaacatgataaagacacatctgtgcatccttctcactgcaaagaaaagagtcaaagttgcagttctaaaagctgaaggaaataataccttcccttaaggcagaataaataaaaaagaaacttacttccacaaaaccttggatagcaattgaacacaatgatcaaccatctgtgctttagtaacaatcccaactcctggcttatctattcgtaccatccaatgttttactgtcccatgatcaaacaatgaaacacctttatggctaccaatgccataattcttcttctctgaactgtaatcctgttcaggtctaatagacactactccaggtaaacctaagttcgtagataaccaattaaaacacctaagtaactaaccatagaaacagaatctgaaactctctgtgatagaatactcactagcgagctgtcgtgaagcatcttcgtcgatatgacaacaaaacccgaaatgggtatcaaaggaagcatcatatatactcacttgcgcatctttttcgctgcaaacaacagaatcagtaccaatagtaagcagaaagttgaagcacaaagctcaaaagaaacaaacaagcaatgaaaaagaacccactttcccagtactttcgcaagaatctcgacataataatctaccatggctgatttggaagaaacccaatgcggaggtttatccaataacaccatccaatagctgtttcgagtaagaacagtagaagaaggcggtgcggaaattgcagaagatgagaagacgaggtgtgatgatgacaaggaagttttccgaaaagtcccgaaatttaagttgggagaataaaatgaagggaagaatctgttattgataatgtgtgaggaggaagagttggagatggggacgaagaaggaagtggaagcaataagagcttccatggcaactcttttttgcttgctttgtttcctcttctctgttttttttctccactctggtagaaaatgtaaaatccgaaaaactcaggggctttttgggaatttggagtggataagtaaaaaagctaagcatatcaaaaagtataggccgttaaaaggcctataatttggacatgaattggcccgttaaaaagtaaaattctaatcaagtgaaagctgagcaatttatagtttcgttttctctcttttaatcatgagtaaacacattttctattgcaaaccgtctattatatcatcactagatcatattctactaaaaattatgcttttttctattgtaacacttaagtttaaaattaaagtgattgtatatcataaatgaatatgaggttcgattcatagaatacaaatttctcgtattaacaaagacaagcttaccgaaaatctctagcatacatacagagttgatcgctatagttcaatcagtaaaaactaaaaagtaaaattttttaatcgtgagtgtggtatcgataaaccgtcaatcataaaatcgttcaacataaaaagatgtgtaagttaaagtttctaatcataaaaatcacattatcatttgtactgaaaatatttttaaatgataatcttaggtctaattttacttagataaaaaggtctaaacgtctaatttgttgatttttttagttatgaagaaagatccaatataatttgaagttgtggaaatctttttataaggtaaatgtataaatgttagtcaaacatcaatcttgaaatgtgagaaaaatgaaatactttttagattccaaaattttcaaagttagtctacgttattttaatagcacttggtaataaatctaggttagttaaccggtctactataaaccggtattgcaatcttaactctacgggtttacccaaaaaaccagaatttttttttttgttctgttataacaaaacaaaaaacattggatctgtaaaagaaaaatcgaaaaaaaaaaactctccgactcggaagaagagggagagagatg

SEQ ID NO: 36405 - DNA, 3000 bp, Unknown; identical to SEQ ID NO: 15214
  misc_feature (1)..( 3000): 2750-1469P.txt file - cDNA_ID_3095555; gDNA_ID_2926086; Annot_ID_196461

SEQ ID NO: 36406 - DNA, 3000 bp, Unknown; identical to SEQ ID NO: 15213
  misc_feature (1)..( 3000): 2750-1469P.txt file - cDNA_ID_3095561; gDNA_ID_2926086; Annot_ID_196459

SEQ ID NO: 36407 - DNA, 3003 bp, Unknown
  misc_feature (1)..( 3003): 2750-1469P.txt file - cDNA_ID_3095566; gDNA_ID_2926086; Annot_ID_196458
agcacatgaaggtgaagagggtgcagattacatatgaagatgttatcaactccatagaggctgaatacgacggagacactcataaccctcaccatcacggcactcctggcaagaaatctgacggcgtaagggtttaacaatgttgtaaaacctaacttttcacataaaagatatttacatgagtagcaaaaaaaataatctgacggcgttagctagtactcttcacgaccttctccatatatactacatctttcaatttatggatgttgcaatgggtttagtttggtcggtctcggtcttgtggtcttgactcttgacgggttgccttagtttgattaactgacacttaattactaaatgaaaagaaaaaatgatgggtcctgctaggtctaataatagcatataaaaatgaattagggctaggaaaattttggtctactatatttttgtttataatgatttatttattgtatactttgatcgaactaatgtaatatatttgtttttgtaggtgagcttgagcccagacgagtacataacagatgttactggctactacaaaactacaggggctgaagatgctatagcagcattggcttttaagaccaacaaaactgaatatggtccttacggaaacaaaacaaggaaccaattctccattcatgctcctaaagataatcagatagctggtttccaaggaattagcagcaatgttctcaactctattgacgtccactttgctcccttaccttcctcttcgtcgtcatcgtccagtttgagtcaagccaacaaagttgatgctcaaggtgggaaaggaggaacatcatgggacgatggtgctcatgatcatgtaagacgagtgtacattggacaaggtgattctggtgtcacttatgtcaagttcgagtacgagaaggacgataagaaggaatcacgcgaacacggaaagaagacccttctaggagcagaagtggtgagtatgtttagttcctttcctatattataactagaaagttcaaatccgttgtactttagttatattatgaccgatcttgccaaagaattaacttatttgaaatctctgtatagtttgaggttgatccagacgactacatcacatcagtggaagtgcaatctgacaggatatttgggcaagacacggaagttatcacctccttaatcttcaaaacatccaaagggaaattctcaccgccctttggactcgagggttcacagaaatatgaactcaaggacaagaatggtggtaaactcgttgggttccatgggcgagtaggcggcgaacttcttaatgctctgggagcttatttcgctccttcatccggtcgtggtaccccttcagccactcagccacctggatcagctcaaccaactggatcagctggtgctaagaaactagaagcaaaaggtggtaacgtgggaaatccatgggacgatggtcctcatgaaggtgtgaggaaagtgtatataggtcagggtgattctggtgtatcatacgtcaagtttgtctacgacaaggactctaaggaggtccccggaaatgatcatgggaaaagaacactacttgcacctgaagaggtcaaatatgtatacacatagaagaaccagcatataacctcatttctaaattattgtttcatattagattttttttttgttttttttttttgcagttccttcttgaatatccaaacgaatatataacatcggtggagcttaactatgacaaaatatttggaactgaaggtgaaatcataacgatgcttaggttcacaacgaacaagcgaacctctccaccttttggacttgaaggtgccaaaagcgtcctactcaaagaagacggccacaagatagttggcttccatggcaaagcgggtgctgacataattcaccaagttggagtccatgtcaagcctatttccaagtgaagtttgtaatattttctcaagtcccggtctaataaaaatgagctatcaaaaaatctctgttctagaaattgtcattgtacttgtgtaaatggtaataaggtctttgacaatatgctacttgtgtgtttgtttgtgtttcaatgtctccttatactgtactggattggagtctgtaacactgtttcaacggtttctaagacgtatatataaaatcttggttacgttgattcatataatcatatatctaatttgcaaagtggacagttgtgggttgtggcaaacgtggttgtggcggtcgacgaatcatccattggagaagactagtggcataacacatcactaattctctctttcttatccatggttattactttcgctctacttttaaaaactatatgatccaaaagatcatatatgatttgttaccctgcaatttaatttgaaaaccttttatctaaaaaagagatttatttcttataatatgattctgttttggcatgaaatggatcaaaattaaaataacgcatacaaatttcattttcttattattgaaaattaatggataagaatcttcataaattttaaataatttcattttataatatttataaaaaaatattctaatggtttgatgcataatggattaaaatattccatttatcctattttataaaattggttaaaatcatatattaagaaataagaaatatttttcatttatgaatattcagtcaataaaagaaaaagaatactgcccaattcatcataaactattaaattaacataaattatgtataaaactagagaaaaccttatgaaatagaataaaaataaaagcctaaaacatcttatatattataaaagccttaagtataaagctaaagagaaactgcaaatttgaggtcaatacttttacaacctttttgtgtagaaccacaaattttaaagtttttgtttttatagtgttattgctttcttattagacctttttttttctttgttacggattgttcttcttcttcagagcacacaagctctgagatcccatcaataaatg

SEQ ID NO: 36408 - DNA, 3003 bp, Unknown
  misc_feature (1)..( 3003): 2750-1469P.txt file - cDNA_ID_3095580; gDNA_ID_2926086; Annot_ID_196455
ttttggtcaatagtaactagatttaatctcttaaatattttattgctaagtcctcttcttgaccaaacgtcccggctatataatcatcctctcaccatggttccaagtttcaacagcaaattggtttagttcaataagattttcacattcacacatcttaaagctgcaatgaaaaccgggtcagcaaaatccaacatcctcctatatgtttttgttctctcacttgtcttgtctccaatacttccatgtcaagccgctagtgtgcttctaggaggtaagctagttatctatgaatatcctccactatactgtatgtatgactctctctctctttcagttttttagagggattaatgattttatttttcactgaaaaggtggagggcgtaagctgatggcgccgtcaccaccaattcgcatgtgtccacagtgtgtatgttgtgcaccggctccacctgattcttgctgcccatgtcgttgtccaggcggcgcctgaagactgacgtttgctctcaatcaaatgggttattttgatgtgttaaatatgtgtaatctttataatatgtatatataagtaaataaaaagtgtaatctttgtattgtgaataaaataaccttgggttatgttgaatagttttactataagctagttttgatagtaacacacttttatacattgttttcttagttggtgataatgggatcacaaaagatttgatattatttggaaagaatgtttgacaaaaaatattaagaataaatgattcttgtttttagaaaatcgtgtgaaaaaccctcttcattatcccataaccgatacgtatcatttcaatcttcatcttcgtcacttacttacgaaatctcaaatgaccttttcccattattttatgttttaattgatttgcatatttgttgtgttgtgcatgtatatatagacttgactataagcatttgaatgtaataaccaatactcacttgtacatgaatttttttttatagttcttcaagatgacgagtaaacatgtttatttttgtaaaagtccactttgtacagtaacacgcagccaaacagcgcatgagaaaaaagaagtaaaaatgtattttccatcgttcatagttcaaagtagagtgtagagatgtgcctcttccggtcctatcactggttttgaagctacaagtaagagataacaaactttcatgagtgttactacagcgccgtcattcatccgaaactgagatgtgagtgacaaataagattgatgaaaccaccaaagtggtgtcgtggaggaaggtcttagctctaccactaagccaagcaagatagtcgaaacttcacataaacgagttaatccggttgcgatgacacttttttctaagagaatttgctaaaactcaaagtattactgcaattaattgtcttctacactacaagactatatgaagtgtaaagtctcttgattgagtgaaaaagttaaaacttgaaaaattaaatttttcttcggaccaatcctgaaaacgtgtttgcgaaatgttaatacatacgtgagatcacacctagttttgtagaaaatatatcaactatattttttctgtgacaaaaagttttatattatattaatttggatttccaagtagatatgcaactttgactaaaaaaaaatataatttgattaagaatataatttgcaactcgaatatgcattattataaagagttcctattatcaacaattggaaaaattcgctatgagtcacatgacaagatcacaagatagcatacttcgagccttcaattactacagacaaaagtatttaatagtatcgtacctttgactttaaacatcctttgtatgttaacaatattactgacgtcttaagataattcaagagtggcaaaaaatccatgcacaaaagctttaactacattatctcaaattaaaaacaggattcaaacaacaacaaaagttgaacaaaaagagtaaaagaccatgggaaaatgtattattttcgtcaattcttatctccttattttatctactaacattctataaatacacacttagacatataagcttatagaaaccaaaaaccatactcaagactcattatgactagctctatgaagaaaatgattcttatcattttcatcacaaccatggttttatctccgacaagttttatctcttgtctcgcaggtaagtaaactgcttagttaactgatttaatttgagaatttacctatcaatttagagttttttttatgtatctctattcgcatatgaagatgttcatgctactgaaagtcccaccgaaccagcaggcaagaacattgacaaacctcatcactaaataatcagaacattaatgagagcattttcaatattaatttatcttatttgtaaacattttttaatgattattttgtagcctctcacgttactggaggtgataaagtagcatgtcctgcttgccgctgctgtgaaggcccaaaacctccaccgggaacttgttgccgttgttgttaaatgttaattaagctcaaaaatcaacttcctcgtaaactttagttaagcctcttaattactattagggttcaatatctacttatgttgttgtagtgttgtgtattcgtacttgtcttgaccaaataaaagtgtagctagccgcttaaatccatccgttgttaggatggtgctttggccaaagtgattcgaatataccttttatacacaaatacatgtttagaatgatgtgttattgtgttacacttttaattggtctttaattttcacacaaacatgcatgaataaatattctaacatatcatagagagtgttccacatcaaaaccaatttatagtggttcatggtaaaaaaaaatcatgagtctggtataaaaaaaacttaccataacatcatgagtatgttgtgtgatagtgacatcaaagagattgtgaaaatactaagattagaaaataatttgagaaaacatcagaaaaaaaatg

SEQ ID NO: 36409 - DNA, 3003 bp, Unknown
  misc_feature (1)..( 3003): 2750-1469P.txt file - cDNA_ID_3095585; gDNA_ID_2926086; Annot_ID_196454
atatgttttatttctcgcactggtcttgtctccaacacttccatgtcaagcagctagtgtccctctaggaggtaagctaattaatctctgaaatttctcccatctactatcactctctctgttttggtttttcatagggagaaattgatttattaatggaaaagtgaagggcgtaagatgatggcgccaccaccacctattctcatgtgtacacagtgtgcatgttgtgcaccggctccacccggttcttgctgccgttgtggctgttctggtggtccctgaagactctgacttatgctatccaatgtgctatccaaggtccttaattccttataatatgtatgaacacgtaaacaaaaagtgtattctgtgttttgaataataaaacctttgggttctgctcagtacttatatgtttataagttagttttgatgtcctccttggagagttgatgaactactgtaaaaaattaaaaatgtcgaaatcctagagttcacaacaatgtcgaagttaatctttcgggttatgaatgtaaaaccatgtttacaatacatgcatctttgtttgaagtttataaaagtcagctaaaaatggtacaaggttatttcttcatctatgcttgtacagaatttttaggtgctagcaaaggctcttctatcatcgtttaatatgaactcgttacacaaagtcatctcatgcaaactacctcaaggtcaactaatcgcaatagttgcaacatgtatttattgcaatatctatcaggtagatggtgatatcagaagatagtgtatatcaattaccgtgtgaaatcaaaatatagctgcatcatcaaaactaatggcttattttggtcaatagtaactagatttaatctcttaaatattttattgctaagtcctcttcttgaccaaacgtcccggctatataatcatcctctcaccatggttccaagtttcaacagcaaattggtttagttcaataagattttcacattcacacatcttaaagctgcaatgaaaaccgggtcagcaaaatccaacatcctcctatatgtttttgttctctcacttgtcttgtctccaatacttccatgtcaagccgctagtgtgcttctaggaggtaagctagttatctatgaatatcctccactatactgtatgtatgactctctctctctttcagttttttagagggattaatgattttatttttcactgaaaaggtggagggcgtaagctgatggcgccgtcaccaccaattcgcatgtgtccacagtgtgtatgttgtgcaccggctccacctgattcttgctgcccatgtcgttgtccaggcggcgcctgaagactgacgtttgctctcaatcaaatgggttattttgatgtgttaaatatgtgtaatctttataatatgtatatataagtaaataaaaagtgtaatctttgtattgtgaataaaataaccttgggttatgttgaatagttttactataagctagttttgatagtaacacacttttatacattgttttcttagttggtgataatgggatcacaaaagatttgatattatttggaaagaatgtttgacaaaaaatattaagaataaatgattcttgtttttagaaaatcgtgtgaaaaaccctcttcattatcccataaccgatacgtatcatttcaatcttcatcttcgtcacttacttacgaaatctcaaatgaccttttcccattattttatgttttaattgatttgcatatttgttgtgttgtgcatgtatatatagacttgactataagcatttgaatgtaataaccaatactcacttgtacatgaatttttttttatagttcttcaagatgacgagtaaacatgtttatttttgtaaaagtccactttgtacagtaacacgcagccaaacagcgcatgagaaaaaagaagtaaaaatgtattttccatcgttcatagttcaaagtagagtgtagagatgtgcctcttccggtcctatcactggttttgaagctacaagtaagagataacaaactttcatgagtgttactacagcgccgtcattcatccgaaactgagatgtgagtgacaaataagattgatgaaaccaccaaagtggtgtcgtggaggaaggtcttagctctaccactaagccaagcaagatagtcgaaacttcacataaacgagttaatccggttgcgatgacacttttttctaagagaatttgctaaaactcaaagtattactgcaattaattgtcttctacactacaagactatatgaagtgtaaagtctcttgattgagtgaaaaagttaaaacttgaaaaattaaatttttcttcggaccaatcctgaaaacgtgtttgcgaaatgttaatacatacgtgagatcacacctagttttgtagaaaatatatcaactatattttttctgtgacaaaaagttttatattatattaatttggatttccaagtagatatgcaactttgactaaaaaaaaatataatttgattaagaatataatttgcaactcgaatatgcattattataaagagttcctattatcaacaattggaaaaattcgctatgagtcacatgacaagatcacaagatagcatacttcgagccttcaattactacagacaaaagtatttaatagtatcgtacctttgactttaaacatcctttgtatgttaacaatattactgacgtcttaagataattcaagagtggcaaaaaatccatgcacaaaagctttaactacattatctcaaattaaaaacaggattcaaacaacaacaaaagttgaacaaaaagagtaaaagaccatgggaaaatgtattattttcgtcaattcttatctccttattttatctactaacattctataaatacacacttagacatataagcttatagaaaccaaaaaccatactcaagactcattatgactagctctatgaagaaaatgattcttatcattttcatcacaaccatg

SEQ ID NO: 36410 - DNA, 3000 bp, Unknown; identical to SEQ ID NO: 15223
  misc_feature (1)..( 3000): 2750-1469P.txt file - cDNA_ID_3095633; gDNA_ID_2926087; Annot_ID_196482

SEQ ID NO: 36411 - DNA, 3003 bp, Unknown
  misc_feature (1)..( 3003): 2750-1469P.txt file - cDNA_ID_3095638; gDNA_ID_2926087; Annot_ID_196480
aatggggctaggattaggctaggtggccatcgtaaaaagatacacttaaagagaaataaaatagactgctgcagaagagagttaagaaaaggaaccagacaaaaacaacactttaagtagagagcttcagttttgcaagtcatagtgcgttagttaaaaattggtcctaataaagagaactcatgatttatcagattcactattcagggatgttatttttcgaacaaattgaacaaatacaagcaattacttcttaggcagagtagtaacctggtgagtcaaagcatatgccatcgctctctcacgcttagctgcagcttcctgcctctttagcagcttggcttgaatttgttcaacagatccaatgctatcgcaccaaccttcctgaaagatgataacacatagtcaacatgactgttattaaaggccaaccagaagataaacaaatacaaagtttgtaaacaacttagacaagtgacaggcacctctatttctcgaactcgggcttcatctgctaactgttgttgaagtgtctgctgactcgtctcactttccaattccaaggcgagacgaacacgtcttgcgcgtacacgagcctgaactcttaccaacgcttgcatgcatcgaagcgttacagcagcttgttttctcacagcatgtcctctaacaagggcttgaagtctaaccaatcccttcaacgctcgtaaagccctcctagcctaataaatatatcatcttccttatcaatccactcttctttttaaaaccaatgaactagcatcactaaaccataagtaaagcaacttaataaggcaaattgataccagaaatccccgataagccgtttggatacgcgttgcagcccgattttccctactttgttcgtcataagcaacacccccatatgattgtagtgaagttgaagtagagaccccagtatcaaccatactacgcgtattggaatcttcaaatccatcttgaaacttttcaaagtcaaaatcaactgaattctttctcccaaacctactcttggtagcaaccttcaccttcatcagttaaacaaacacagaaatgaaccaacattggcataattaagacaaaaagaaagaaactcttgtaataatcttcctttgaagtactcacattttcatctttcttggaagacctagacttatcagatttagtaaaaccaaccaatgctttaatccatctccctgaagctcccattctatctcaattccaacgatcagcaacataaaacaacacaaaacctgcaaaattgccaatttagcaactaaattattcaaaacagtaaagctttctcctttttgataacaaaatagacaaaaatggaaactttaattgagttcactaaattctcctgacaatgttggatccttaatattaaaaccaagaaatttagtaatgaacactaacaaaaaatccaaactttgcaaaattgagacacatcgaggagaagcaaaattcaaaaactttacaccggcggcgaaggaaagatcgccgatgagatctttaaagagagtgagtggcgacttcgtgatcttttcttcttcagtcagtgagcgtctttctcggctactttactttttcctctctctctctactctacaaaaagaaaaaggtccatactttattctctctctaggggatatgtgtgtgaacgaacatatacagatagataggaattgacttgattgatcgtttcgttttccctctcctctctcagatacgattgattgaatgatagattagattgcacgccgtacgcgtgctctattcttcaatttggcggcgttttttgacctcgaaacggcacgcagttttagtttgaaatatgtttgattctcttttttaattaatgcatgcatttatgtgtgtaagtcttgtttgcagtctgatattttgaatggagaagacaaaataagttgacgtgtcacctaattatatgatgtcactagtttttgtaatgttggatcattattagtatcttttttaatctaaattaaagataattattattttttcgtttacttttgttagacgtaacaactatcacatggttatgtaataatcttatggaaactcgtatattaaaataatttttactccagtttttcctactatccctccttagaaattgaaatatgccatcaaatttggctactttttctgttagttgggttggcctagttggtgtttttatttagtaaatgaaaaataaaaagataaaaacaaacacacaaagaaaagttattagaatatgtcctacataaaattttatttatgtatagaataatatataaatatatggtaaaatttccacttgaagtaatttttaagtatgagttaggctcatactaatatgctataaacctaaagttttaatgtgtctcgattgtgaaccatatatagatgtccagtcccataaccttaacgtttcagatgtccatttctaaacgcgagggaagaagtgtattaaaatgtgttccacatcgagacataatttttttttcttcaaattggagtgattttttttactatatttctccattttatttatttcagcagaaaatataataaaattttaattgatatttttatggtatggctgctatatacaactagcctcttatttgttttttctttcccttgctactactgcaccagttacaacctattattattatctctgtgagagagcagcaaaatgatttgtttccctttaaaataaaataaatcaaaaataatattaagaaaatgactcaatgacacgtcactggaaaaaatcaaatggaactcgaaaagattaaataaataaaaagatataaggcatcatcatcatcaattcatcatcctctgttttgtaaccaatctcagctctccctctcaaacaatccaggattcttcagattcctctcctttgatcctctctttaacaatctctctctctctgttttcttcgatccgttgtaggagaaaatg

SEQ ID NO: 36412 - DNA, 3000 bp, Unknown; identical to SEQ ID NO: 15224
  misc_feature (1)..( 3000): 2750-1469P.txt file - cDNA_ID_3095643; gDNA_ID_2926087; Annot_ID_196479

SEQ ID NO: 36413 - DNA, 3003 bp, Unknown
  misc_feature (1)..( 3003): 2750-1469P.txt file - cDNA_ID_3095648; gDNA_ID_2926087; Annot_ID_196478
cttcatctttccctgatttatagatgcacttctcaaacttaggcataaaattatcatgttgcttaacaacttgaccaagattctcagaaaccttcatcaatacatgccaaagaaaaaggcaatgccgtgtattggggaagatttcgggaacaatggagttcattacaacgtctagctcagtgatcaaaacctttggagcttgtccaccgattgctctcagccaggtctccattaaccaagaatatgttgctgcactctcatcggatattaaggcgcacccaaggaccatatactggtagtgctggttcactccaacaaaaatagcaagtggcatcttgtacttgtttcttacgtaggtggtgtctagagaaacaacatcacaaaaactgccatagttatgcctgctctttgcatctacccaaaatacattcttcactcgctgatcatcgcccagatctactgcataaaagaagttggaattcaaggattgcatccgtgacaagaagtcaagcaggattttgaaatcccctgtttccactgataaagtccgacctttttcaaaagaacttttcgaatcgctttttagacttataacagttttgtactcagcaaactgcttagccattgcagcatatatctttctggtctgttcactcacagcttgtgcaggtaaaagctcatgattatgctccctcacaaagctgtgaattacccatttcccatccggccttctcttaacatgcatactagctttgcaatcggttttcgcacatgttctcctaccagccatattctctggatcttgcttactttgtctagctcgtggccgattaaaagatttgtcatattctcttttagtaccatacctagagcaagcaaacttcgcatcaataaactctcttgtagttttcgatctacgactgttctgtatcgcagtgttaaaccccatagctcgagaatactcctggtaaaacgaatacgcttcaccgtgtgactcaaactccataccattaagaggttcaagattcataccctcagtgtactcaaccaactccccagttggaacacccatgcctacactgtcatcagtattaacctcaacagaaacatcctcaattttgccaatatccatatcttcttcattgtgtaacacattatcaagtcctctatcctcatcatctcctttgcaaaggtcacctgaatgtagtcgaagatctatatccatgacaaacctatagtctcaggcaaaacaaacgtcttacaacactgcaagacaaaatctaggtctcagtacatatatctaggtcaaaatgtatactaaagtcacacacaaaagatgtaacaaaccagagaaacccatcaaaattcaatctttctatgatgataaatcgagaaagtatacacattttgcccttacaattgcagaaaaaagcaacttgcagctaaattcttagtgggtatttcatcacataaacgaaatcctcaaatccaattcctaaaacgaagctgatcaaaactactgtataacccaatcatttgtgttggttatcactataaaacaaaaacaaaaaataaaaatgaaaactttacctcgtacgaaacagaagatatacgaatcggagcagaaactgagaaaaggccgtctctttttaatctcttcgtcgtcgagaggaggaagaagaagaagacaacacgcgccaatcgggtgcgagttggggtatcgatctgcgaaaaggagatagagaagaagaagagagaaagagaagaaaaattggtgagtggtgttcacgcgatctgaggaagcgagtgggcggaagatccacgattcgttcttttggtgtctagggtttcttcttcttcttctctctgtctaaacgcatcaccatgttttttgataataataatatctctatccatttatttatgttattaataaaataaaattagaaagaaaaaaaaaaactgtttttgtttgaaattttgtgcaacgcgcatgccaaaacaaaaattggagggaagcgtgaataatgggaatgatgagatttacttacatctataagagtagacttgtttaggcttttaaaatttgtttggtccactctaagactaagacttgtttgaattattttattttgtatttctaagtatttactatggtgaaaactgaaacattacggtgaattacaaaaaaaaatcatagtaaactattcaaaatatttttttgttatttacaaactatcagttttgaatttggactatatatatatatatatattagtaaatgcttttaccaactttcaatagccaagagccaattggtatgactatttcagaattggattaatttattatatttgatccaaaataaaaagatcaatagccgtccaaaaaaataaataaatcaatagccactcattagcatgagtcactgttctttttaattttgtacatatagattagctcagtcttaaaaaccatagttataattagtcccactaatgttaaaaagtttggtaaaaaaaaaattatttcctaacttttttttacatattagctacaataaaataaataccatttttggaaatattttatgaattcaaaataaatttcataaaatatcataatcaatagccaatagccagttggtaatttactatttccgacatgatttaatttaatacagcatatattttttgacaaaaagccagccaatatcctgaaatttaattataattatgccaaaattatttataataccaaaattatttataattaattatccactaatgtaaaagttgggtcaaccatttggacttaattaagactaaacctgccacagtaacagagagagacgatattttctcagtccctttcccttttcaacgagcaacaacactcttcacttaatcgctccggcggtggcgaacggcaacgtgacggtgacgttgtcggaaaattagagtttgtttatctttgcttattgttgttggagaagaaggtatg

SEQ ID NO: 36414 - DNA, 3000 bp, Unknown; identical to SEQ ID NO: 15220
  misc_feature (1)..( 3000): 2750-1469P.txt file - cDNA_ID_3095655; gDNA_ID_2926087; Annot_ID_196476

SEQ ID NO: 36415 - DNA, 49 bp, Unknown; identical to SEQ ID NO: 15232
  misc_feature (1)..( 49): 2750-1469P.txt file - cDNA_ID_3095690; gDNA_ID_2926088; Annot_ID_196518

SEQ ID NO: 36416 - DNA, 3000 bp, Unknown; identical to SEQ ID NO: 15233
  misc_feature (1)..( 3000): 2750-1469P.txt file - cDNA_ID_3095710; gDNA_ID_2926088; Annot_ID_196514

SEQ ID NO: 36417 - DNA, 3003 bp, Unknown
  misc_feature (1)..( 3003): 2750-1469P.txt file - cDNA_ID_3095725; gDNA_ID_2926088; Annot_ID_196510
taatttctaatttttcaaatttcatttttctcagtattaatgcattaactaaaaatactataatttagtattgttatattaaccttaataaatattaattaaactaataatgtaacttaataaataggtatttattattatatgatttctaacataacaaaaaaaagggaaaataacaatatagaaaattagaaactatttatcattatccattatttgatcaaactggcactagtatatcgattatttgagccaaacatatatcaattattttgttcaaaaagtctaactaattgaagaggtaaggttgtataaggaaattttggtatagaaaatagacaaataatatatcgaagaaaagtgtgctaagtgtcttttggcttgtggggtattttgggtgcgccttcgtgcgaaattccattaggccacctttcttatttcacatatatttacacatttttgtcatgattatacaggatacatgcatgcccatatatatcatgtaaagatatgcatgagaagacatgtacttgtatacaaatgtgtgtacacatgccaatacgtagctatagttgtgacttgtgaaaatcagttgattattctattttagatgtcgtcgaatcaaatgaccttttgaaattcggtataattagatatctacaacaatatatagtgtagtaattaatggctacgatactatatatacgtacgcggatcagaacggtttcttgggactttgaaaaaatatggtttgcttttgatttggttggtatgagaacagaaattagttagccaaaatgtattttgttctattttatttggaaataaaccaaaactaagtctatagaattgaggctgacccgggccagcaacctaaataaacagagtcaattataggaccggctctatacattaatgttaaccttggagtacattacgtaatgaaacgaagctctacaagaaaagtatgatacacttatctaatgctaattcaatctcctcatgattagaccacaagcgcatcttctcactttcatataaacgtatgtcatattaaatagtgtgtgtatgactatgagcggtataatatattagaatccaaggaagtgagattctttagccgcttgaatactttggcgatcgttgattgtattgagcctaaaaagctaatcttttcattttgtaattatagatcaaaccttttgactaatgccaaacaagataatttcccattctctttttattcactttataatagtgttgtcaaaaatattaattcttttgggaaacctatgattcttttatcatatctattaacgccatttttaagcttttcatacaagcaatacctaacacgggagctatcttattaccttatgatgatcgtcacttttaattgtataatcaatttgataaagaaaaaagggatagatacaatacaaattagtgctttgatcatatctaattattgcatgagtgtctttaatttaaggtcgtgaatctttggaaatccgagaggttttttgacttaagtaattgaaagcttttatttatctattattttatttgtagctttttgtaaaaaattgaaacttgtaaaatctgtatagtatttgtttgctcaaaaaagtcaccaagattgagaattgacagaaatagaataataaaatgaacaatttgaaatcaacaagagccaaataatatgcatatataattttgggaattgtggtgttgttttcatttggaccatatctccatgtgaagaaccacttgaccaggagaatatttttgtcccaattgatttcacaatctctagggttttggatagctgagaacatgatcctttgtcctctttacgaaattgatgcaaaaccacttaacaatttgtcccttcgttgaaatttatgctttcgatttttatttgggggggttaggggagggggtgaaatttatggacaatgtgtaaagtataaggaacaacgacacatatatatgctgttagttaggaaatgttaaaattgaacaaactttatagcaatcaaatctttataagtactcagtatttcattaatgcccacatgaccattgactgaagccaacatcaacaagagggtatgcttcaaaatcaaactcaaatctatcaaaagctataaaatatattcacaagtgagttaatgcataattttggtaaatataatctgcataattggtttctctaccaatgatttgcttctttgtttggcgttagatttcgcctccaacattctcacaaagatctctcattgttgcttctataataatagtggctcatcagccccaaaccagctttgcagctactacagaacaacaaaaacatagcactctttgatagttagatagttagattaccagggaatgtcatgaaggtggttctctgataaaaaaacattgtcactttaaaatggagataaagtttctaactttaatcttatgcaaaagaagaggtaaaaccagcagggtcctctcataggtgtcgacaagtgatattacacactgtagaggagattcatggaccaccaaatgcaagtcttaggtcttctcacatggagatattgcaatcatttactcaccagaaatatataagtcgaaaagacaaccgaaatgctatatctgtaagcaatgacccctgctcactaaggagtgagtgagaggtagttgagtgtgaaattgagaaagacacacatagatgacaatgccgatcaggtttacgcaataataataaaaaggcccaacccactaaaatctattagcaaaagcccaatttcagtccatatatgacgaaacgttaaccgtcagggttttactacttgggagaagacggaggcctcttaaatcttaatgctaacagacgaataataatacgccacgtgtataattgaaccgtcaccgccttatcgttaccgctgtcataaacgaatagctattttcgtgctcggaaaaagcagagtaaagctttaaaaaatg

SEQ ID NO: 36418 - DNA, 3000 bp, Unknown; identical to SEQ ID NO: 15229
  misc_feature (1)..( 3000): 2750-1469P.txt file - cDNA_ID_3095744; gDNA_ID_2926088; Annot_ID_196506

SEQ ID NO: 36419 - DNA, 3003 bp, Unknown
  misc_feature (1)..( 3003): 2750-1469P.txt file - cDNA_ID_3095749; gDNA_ID_2926088; Annot_ID_196504
aaaaagtgtatagttaatgtgtgtgacaggaggagactgatagcagctgtgacagcattggccgccgttgaagatgtgtcccgtgacggtgacagagctaacgtcaaaggacgttcgggacctacaataattaagccctaacttagattaattatctcaactcttttaacactaatcagattcaaacacaaaccaacatattgaagtattgaactatattcacagataaaagaatatataacttgttccaaattctaaaatagacaaataatgaaacttgatttaagagagatcgtgggatcatgcgtcgtggaaatttgcatagaggaggaccacatgatctaaggattttagtttttaaaatttttgtagtaataatgagagaaagtaaaaaaagaaaagaaaagagagtgaaattagagagataatgattaggggatggaatcggaccccacggaggtttactagatgacaccgaacctgaactactcacctgtgattgtgctctgttctatacttacacattttggaccatttcctctttattttgtgtcttacacattattctaattgtaattaacttccatatcttatactaataatccgatctcatttattctactttgtttgatttcatgcaaagccaatcacgggttcttgttaaagaatttgttttttttatataattaacaataagtaatggtgcgtcgtttagtcttgaatgattcttaatcaatagattattgtaaattacaagaacaaaactatgcatttcaagtattttaatgcaactttcaaaatttgatcagatgtgtcggctgtgactatacgtacttgtttttttttaattgtcaactttgaaaattttatttaaaatctaagtacttgtttagaaaatcacgtttatgagatggagactgcgtttgattcaaatttgtcatatattacaacgttgcttatcgtttcccgaggtaacaacggacggtatgtcagcttggaggattttggtgatcgagagggtatttatgtgaaactaaaatatggtgtcataaagctacaaaattttaaatttcaaactaaagagttttactacattattaaactacttctgctaaaggagaaaagtagaaagaacaaaacaggctatctttcagttcaagcaatttttgagctaagcaagcaatttcaaatgtcttgttattaccaatagattgtaaacaaaaaataattacaccaccccaagtaataacatgacattttcttatggtatttaagtaagcattttaacgaatttaatttcatttacatcacataattagttttattttagaaaaagtagtagacaaaactatacaaaattctaaggagattgagttatgaccctaagcctattcaagctgtacataaattgttagtcacaaaatttgagtctttcacttttcagattgtagtccctcccatattcaaaactgggacctataaaggtaaagtttggcttccccaaagcctaaactaaatctctccaaagtcaaaaactaataatattttaaatctgagattagtatttgtttattctccaaatgcatgttttgctaaagaattagcagctgatcaaagcttaaaaaaaatatgtaaaggaaacactttggtgggtatcataaccaaatgtgttggactatggattaaaagttcaaactagatattattataagattaattatttgaaaaggcccaaaacatattctactatattttttttttatgaaatcatgaagagtagcattggaaaagacacaacagataatagtaataaccagaagatggtaattttgttgttactacaaagcaacacagaagcaaagagagactagtagactagagaagaaaaaccaaaaaccctaaaaaaagaaaaagagagagattgttttcacattttcgcggttttcttcttctccttgtatttatctctgaagtcgtgcttttgatgtgaaaggagaagaagcttgaagacagacaactttaaagttgacgaaaccaatgcttctggtaatatcattttcttcacaattgtttgtgttcttcttcttcgtctggtctcactcctatagttttgtttaatcgttttcgtggcggtgaaattcatgagagcttaactggtgaatcttttttttggttctgtaataattttataatcttctttctctggcagtttgcgacgaaactaatttaatatataaatgtaaatctagcagccattcttattggtttattgttgaaatctctacgaaaattcctttttattcgatttcgtggttttaatcttcaccattacgatttttcttcagctccttctctctttcaattcaatttttactctttttgtatattgcaggtgaagttttgagcttttgagcgatcttttgggtcttgctcttgctcttgaggcagagaacccatagacagttgttttgtctgtttgttggtgtcagatccaaaatcaagaggctgttatagctttgacttggaagtgatttgacacaatgaaggaagaagattcaaaaaaaataagagggtaggaatctatttggtcgcttttgcttcctcctattctggggagaatttgggatcttggagttgaatccgttgtgagaagaaggatctttttgagcttgtgtactgtgtcctctcagttgattcatcgcagagagaagaggtcctgtcatgtctatgagttttgtattcatctgaaaggtcttactggaatgacttatcaaaggggagagtctttggttcctgtcttgatttccaacttggtgggggcataggccaaataatgcaaacctaaaatccttgtttcttccagaatcttgtgagctttttaatctctccaacaaagtacaatttctctgaggattgtgttattacacagagaaaacaaaaagagggtccaagaaaatctcttgcattctcttctcctctctctggtattggtatcttcaaatg

SEQ ID NO: 36420 - DNA, 3000 bp, Unknown; identical to SEQ ID NO: 15236
  misc_feature (1)..( 3000): 2750-1469P.txt file - cDNA_ID_3095766; gDNA_ID_2926088; Annot_ID_196499

SEQ ID NO: 36421 - DNA, 3003 bp, Unknown
  misc_feature (1)..( 3003): 2750-1469P.txt file - cDNA_ID_3095770; gDNA_ID_2926088; Annot_ID_196498
ttgtgtaagaaaaaaaacatattgatctcccaattcaccacttgcatccttccacgttgataagagtcaaccaaactccattaaacaaagaaagcttacgactaattgacgagagttgatggcctagtgatctttaaaacttcgataactgagactacgatggagtagattgtaatctatagtgtgctacacttcaaccacaatactaatgagtaacgtagatataacctagcgtacgtagtttcatttgcatacctttaaaatttctaatcttgaaatgaaatgaaaccgctatcaagaaagaaagaaaaactaacttgatcgaactatagaaattctcaatatatagcatcctataaaatccttggaataatactttcgaaaaagtactggtatccactatcaaactatgcagagtacgaactaataatatacatcgattggtctttatcacacgtttataaaaaaaaagaatccaacaaatcccaatattgtgtgttttaactgatcacaactcacaatatccaatggatcaatcatattttatggagaaatctcaaaagaaaacgtgccttatttcatctctatttatacacacacaaaacactcgtttatttatagcacaaaccttcatctagagacacaaaaaccacaacatgactaacctcatccttatcttcgccgcacaaatcctccttttctatgccgttgcttccgtcggagatgaattgggaagaaccatgaacgggaaacaccttggcccttacaaaaaggagaaactcactcatctccgagtctattggcacaactctgtaaacggtagaaaccctagctccgtgatgatccaacagccggtcttgaactcttccttatccggatcgatcaccatgatggacgatccactaacattcgatgtgccaaggaatgcgactgtggtgggccaagcccaagggatgtacgtagcagcggcccaaggagagataggcttcttgatggtgatgaactttgctttcactacggggaagtacaatgggagtacgataacgattcttgggcggaacgtggtgatgtcgaaggttagggaaatgccggtggtcggaggtagtggaatctttcgatttgctagaggttatgtcgaggctcgcaccaagtcgtttgatctcaaggccggtgttgccaatctacatatacatttttgcagccattttaacaaataaatcttagagttgaacttatttacaacccaatgccattagcattaaatttttttttcaaaataattaattttacattaaattcttaatttaaattgtcaatcacattatcaatcaaatttaatccaaacaaactgcacatcaatcctttaaaattagcataaaagtattttgttaacaatattttaaaacaaagttttttgtttaaataaatattgttcttactaaacgttttttgtttaaataaacaaatcatgtatttgaacttatttacaatgtcatgctactgacattaattattcaggcatgaaaatatttaattaaagatttaaatcttctaaattcttgcttttagaattattatatcattacctaaaaggcaaaaaatattaattttttaattattattatttatatatttaaaattcataaaacactattaatatttaaatttataaaaagtttaatatatcaaaaaaattaacatcattatataatatatagagtttaaaaaatctcaaaaaaaaaatcgtcatattttgtgattcaaaattttaagaatgaacatatattaactaattggcgaaaaatgtatggattcaacgtcccgcaacgaataaaatattttgacaatgattcataaatatattataaataagatcaacattaataaaataaataaattttttttgtggacgggtttggcgggacgagtttgacaggatgttacttagtaacaattgtaaactataaaataatttacaaatttttacatatattaattttaaaaaatgaattgtctccgcggtgaatctagtgttgaatataattgttatattctgcattactgaaataattaagtttggaatattgttcatttgatttcattacttatttgtttttatgtctcgttttgttatgagagtgttattgtcttttcccaagttaaataatgtattttatcttgtaatggtttgattttattcatctaaaaaataaataaataagtagttgtttatatatacattaaacatacattttttggtcaaattaagtggcacaaaggctctactccgcgttaatttggaaaatcatcaactgattagcgaataaattatttgaaattttgatagaaaataaatgttcaaataaatataatgattagttagcccaatcacgagctaatcaaaccttaaaaaaaaaacaccaaatcaaacctatttattgtctaaaaccaattttgatattacacggagaaattaaataatacatttagctacttttttgtttgaaatagaaaagacattcaaaatagtaaacatataaaaccattgtaagaaaagaaatcaaattttttatttcttaacaaaaacgtgaaacgtttgtttccaaattagtcgcaagtcacggaccgtgtgacgcaaaaaaagtccattcacatcattattacataatttttgtcataaggaaaattaatttgatttttccaaatttttttggttcttcctcttcagaatatctgacgtggcataaatatcgcctttttcacatcgcctgtcttcttttctctctccattttgggaactttcatccataaacttctatttttctcatcgcaaacttgaaccgtcgtaaccctaaatcgccatcttcatcatcggcaaatcgaatctccgattatatatcaaatagcttaccaaatccgacatgacccaggccctcgttttcggaggactataatgatcggactcttcgtgtcccgtctcgattgcatggggtttgagctatg

SEQ ID NO: 36422 - DNA, 3000 bp, Unknown
  misc_feature (1)..( 3000): 2750-1469P.txt file - cDNA_ID_3095788; gDNA_ID_2926088; Annot_ID_196494
caaatttcgatacttgatactaaatttatgaaaagaaaagcaattttctattcgttgtaacttggaagtcatttctttttcttttttttgttcatactcaacttttgatttgtttttttcttttgaggagacttcttctccgtcctttttcctcggccactatttgaatttgaacccatttagcatgttattgaatattgtagagcgcgttatacagtatattatagtagttcgaaaacaaattatctaattgagttaagttgcctaccaacaacgtggcaggatgtaattggcagagttcttttatttgttgactattttatttgatgatacttccaagttccaagtcttattttgtctgatgggcttaatatagttgtatctcacaatcacctacgttacatatacatatgctcgttaaaaaggaaaacaatgggccgatgatgttcatttaaggccattaagatattttaaaaaggaattgcctctttcaatactcgcttggccattagattaagaccaaacggtagtgtgagatgtagcaaatacaaaaacaaaaatcacgtcaaaaaaaaaagaagtatcaaaatctattaaaagacatagtcccccaaaaatcatccatcactttaagcagacaaaatccaacaaaaagtattttatcaaacattaaaaaagagaggcataataattcatcactatcatcaataatgcaagacataacagctgtactcaacagtagcatctcctgacttttgatcaaaccacatggtccgagcctcgacataacctctagcaaaccggaagagtccacttcctccaatcaccggcatctccctaaccttggtcaacacagcgttccggccaagaatcgcgatcgaacttccgttatacttccctgtcttgaacgcaaagttcatcaccataagcgcagatgcatcacgttgaccagtagcagcgtagatcccttgcgcttgtcccactaaagtcgaattcaccgcgacctccgtagttaatcggttatcgatcacagtgaccgatccgaagaaggaagagttggagataggagggttgatcacgaccgaactagggtttgagccgcttaaaatgtcgtgccagtagacacggaaatgagtgagtttctccttacggaggccaaaatgttttttgtcaatggtttttgcaaagttttcgcctttacgggcggaaacaacggctgcgatgaggaggatttgggtgacgatgatgaggatgagttttgccatgagtggagaatgtggtatgtgttttttttcttcttcttgatggtgtctatgtctagactatatatagtagaagaagacgatggcgtaggtaccgaaatattaaatatttgtgccacgaaaacatgggcggtattattattacaagtcgtcgtattattcgagccataaaccaataattgtacatgcaattaagcttaaacaaatgattttttaaataataacttttctctattacttttgatattcttacttttctctcggccgtactaattattcaaaaaaagaccaagacttgtagtctattattacactgtaacaagaaataattaaagaccttttaaagatgttcatacttcatactttttttggaaaatattttaaagatgttgataccgaatttactaatttagtttgattacagtttgctctttcgtttatacattgaaaaaatggtaatgaactatttttagatttagcagttattgcagttaatatatgaaaaaggtaaaattactttcactaaattttcttatgagtggaatttatttaggttaaacaacaactattgaattatgatattttgtgagcaagtagacaatatatccataatccattgctttattttgagctagagatttgccatatttgaattggcaacatggcactgcgccaatggcggcagaatattattttgttgacacggtataccgaaagttttccttttgtcgcggtcaatgggtctcgttcatactttcatgtttctttttgatacaaaaaaattcaaagtgtttggtgtagaccatcttccaaagtcttttcttaatcaacccgttataattgacaatcataatatatattgatgaataagacatgatgtcaacgttacatgtattggttagctagtccctttcaaagtgtttgggtgtagtttgaaagttgctatcaaacaatgacatttgtgaattgtgatacataaatttgaaaatcaatccatatgggttaacatcaatcaatattcattttgggccacattagcatacttcccttgggcctggcccacttcagatgtaatttgtttctatcatgaatggtccctcttcagcacgaattgcaatgtggattttattctctattctcattggctgagaagtgcataaaattagtcagaaaaaaatccaaagtttccttttaacacatgttttggagtccacaaaatttgatatttatttattgtatagaaaaaagaccaatccctataaggtttaaaatctaggcctaataatcagcatcatatacttagtgccattgcctattcatcatcacttcaacattcaccaccaccgtcgctgtcgaaaaccccaccttcaccgtcgtatactctgcatctccctcgccgagctcccatatagtgtggtacgagatccttttcttcttcttatcctctcttgtttctcttcttaatcgtctttcgagatgggttgattccgatacactcgtatgttgtggatgaaattgttcgattctagtttatgagttgttgcatgttggtacccttaattgtatagctgttttacttgtcaattagctctgttattatatgcgtctgtctactaggtttaatctccattcatgattttgccaaaacccaacatcctttaaagacttctcttttgattacctcgtgagcctaattgttgacttgtgtatcttgtatgtaatattctcaagagagatg

SEQ ID NO: 36423 - DNA, 588 bp, Unknown; identical to SEQ ID NO: 15240
  misc_feature (1)..( 588): 2750-1469P.txt file - cDNA_ID_3095839; gDNA_ID_2926090; Annot_ID_196552

SEQ ID NO: 36424 - DNA, 3000 bp, Unknown
  misc_feature (1)..( 3000): 2750-1469P.txt file - cDNA_ID_3095848; gDNA_ID_2926090; Annot_ID_196550
caatatctgcttggggacatgctatattacatgcagcaggattagttcgcatcaggccaacaagtaatcataagttctctccatctcaactggttctcggtcaggaaccaaatatttcccatctcaaagtttttggatgtgctgtatatgttccaattgctccaccacagcgatataagatgggacctcaaagaaggttgagagtatatgttggttatgattccccatcaataattaagtatctcgagctatctacaggagatttattcaaagctcgattcgcagactgtcattttaatgagtctgttttctcaacattagggggagaaaataaacagtcgggaagtgatatactttggaatgaattatcaatgtcttatcttgatcctcggactaaagggtgtgaattaaaagtacaaaagataattcatttacagagtttagcaaatcagctgccagatgcattcactacccaaaaagtgtgatcaaatcacatataccggctgcaaatgctccaataagaataaatatcccaaaaggacaaaatcaaactgcaaatgagtctaaggcacgtttaaagcgtggtagacctattggttccaaatattaaaatcctcgaaaaagaaaaggggcagaaattggcatagataaaacagaggaaataattacaaatgaagaatctccagaagagaccttagacatgacacagaaagaaattcaggtacctgacaatgaagagatctcaattagttatgtcatgtctggaataaaatggaaccgaaagcaaatcgacgtcgatgatatttttgaatgcaatgtagcagttgatgttatggatgaggatcatgaaccaacatctattgaagagtgtacacaaagaagtgattggccaaaatggaatgaagccatagatgcagaattaaaatctctggcaaagagagaagtgtttggatcattaaactcctgaatttgcatatccaatacagtgttaaaacactccacttgataatgatgcaagttggtcatgttgcttttttttcttggctttcttggatcaacaaattctccatccataatgacaaactcaatgtcatgatccttacaaaaagaaaaaacttcattaagaaaagaatcccatccatcatctctgagcttgaataactgttgcttggtggatttcactagtgacatagcattcagaatgtcttggtctttcctttgtagagccactgataaactatttgtgagtccaagaataagcaacatcaactgtaagtagaacacaaagtcaaaggtattaaagtacttgagaagaccattagcttgtcgtcttttggtactatcagttccatcatcttcgatccactcaagcactttaatgataacagagaataaatcaactaaccggagtaatgttgtgtagtgagtaccccaacgagtattaccgggtctctgtagtgaaagtttctgattcaatccttttcccgtcttaatttcaccttgattgattctttcctccagctttttccgaaattcatctcgaaccctatcctttctcttacaagaagctccaaccacatttatcaagacagaaatcatatcaaagaaatctccaatttcaaaatgttttttagcaactgccacgacgactaactgaagctgatgcgcaaagcagtggatataatatgcagaactattttctctcaaaattagagatctcaacccgttgaattcacctttcatattacttgcaccatcatagccttgtcctcttaactgttttatactcaatccaagtttagcaaacaatgaatcaatagcacatttcagagatgcaaaaaatgttttcttaacatggataagaccaataaatctttctttcactgtcccatgtttatcaacaaaacaaaaaaaccactgccatttgttctttatcagaaatatctgcagattcatccaccatcaaccaaaatacatcatgatcaacttcttgaattatagatctaatcacttcttccgcaaagcaatgcactatatctttttgaattttgggacatgccatctgattattttttggagcattctccaacacaattttacttacagcctcattttgccctgcagtatatttcacaagctctaagaaattctccctgtttgctgaatccactgactcatcatggcctcgaaaaggtaatccttgtcgtactaaatatctacaacaatcaattgaagcgttcaatctgattttgtattctcttttgactatgtcatcttgcttataaaaagcatgaagaattgattgaccttgcctcatcaaacaatcagccctttttaatgcattattgtgaaagctattcaccaatcccacgtgttcgcgtaaactctgaggatttttccaagtatcgaaacctttcgtcacaaacgtatcactcccacctttattttcagtgtaatctctaaacaagtagcaaaccaaacagtaagctttatccttttttacaatgtattcttaccaaccactatagagatcaaaccactctggattaaatcgtctcatttttttttctgatagtgttttaggaaaatcatgcccacgagattgataaggacctttaatcagatatttgcgtcttacctcatctctttcattaggatgatagtccaaaatatgtttcctatcgccaggatccgaaggcaaatcttctggaatagcttccggaatattttctggaatatcttgtgacgttgattcatgctttcttttgaaaaatctatgaattgttccctaataagaatagttatatgaacatattagaaaccaaatttatattaaaaatttgttaacgaacgaattatcaaactacaaaaaaatatgtcttgcataaataatcataacgaataatttgataaaactaacagttttgtttcattcggtctactacagttttaatattagttaatcacaaaagagaataagagatacttacgttagacatg

SEQ ID NO: 36425 - DNA, 3000 bp, Unknown; identical to SEQ ID NO: 15244
  misc_feature (1)..( 3000): 2750-1469P.txt file - cDNA_ID_3095855; gDNA_ID_2926090; Annot_ID_196546

SEQ ID NO: 36426 - DNA, 3003 bp, Unknown
  misc_feature (1)..( 3003): 2750-1469P.txt file - cDNA_ID_3095863; gDNA_ID_2926090; Annot_ID_196544
aaaggtatcaactttcattgtttaaccaagccaattatcagcttcaatctgatacattttttcgtgaaattgacattgagttttaaccattcgattcgtgcccttctttggattgttacttcaactacttcgattttggttttggaatctcttttgtgaataaagcttttggcttttttgatttttgtctctgaatcctcatgtttaggctatggtatggtaatctctagtctcttaatcaattttgaactgatagagaatcttatgaattgtgaataaagattgtggcttgtttgcttttggctctgaaacctcatgttaaggctctatgctcatctttctagtctcttaatcaattttgcttctttagtttttaactgagaaaattctatgaattatgaataaagattgtggctttgtttggttttggctctgtcccttatgtttaggctatgttcatctctaattcctaacctgtttgcatctgtagttgttaactgatagagaattttataatttgggtggcaggagaaagagaaagtgggataagccagcggagcaacttgttgcggctggagttgcgtttcctcagttacttcctttaggcaacactatgaatgttccttctatgtcaccattgctccaaacgctttcggtgcctctagcagttccaaaagttaatcaagtaaatgactcttacgctcttgcggtgtttgttatacttattttcgggtctaacctttttctcacttagctattgcattatgtactatggtatagatgatatgtcatgttttcatctagtttggtgtcttgatgtatgttcttagtgaattgtaataccttcttaaaattgttgcatcacttgaatcatgttgtcccatgattagtagttttaccatgtattggtccagttccctctggtcatgtatgagactccacaagcacccgaaatatactgtgtttgtgactttaacattattgcctttatactgaacgagctgtttttcgtggatacgtcttttgtctccttttatcctgtaattcaaacatggtgattcgttgtaatttttcttgcatgtggtatctagcctaaaatccaggatgaggtgatcatagcgcgagaaattgttatcaacgatgctgaggcttctcttaggcacaggcttaccaaacgctcaactcaagaagatgtatgtgtaactttgctatgcgtattagttacacttttcctatctctagtttaacttctattcgtcgtgcagattcagaggtctaccggtgctgtggtgattactaggtttgtacaacatccaactcatggagaagaaagtcttacaataatctttctagattcaattgtttaacttcttttgtaggggcaagtatcgtcctccaaatgcacctcctgatggtgaaaagccattatatcttcacatatctgccgctgcccaggtttgttatcctttttggcctaaaggatagactctataatatggcagaaagtaaaacgtttgtggcttaaagaaattcccatattcatatttgagaagctttatttgaccgcctagctttgagatgttggcctggtttttacgtatgttattgcagttgcagttaaaagagactacagaacgtatcttagcagttgatcgtgcagcagctatgattgaggagatgatgaaacagaaatcaatttcacagatcggatcagttggtttacagacggtcaaggtatatactgcgtgacacttcttttttgtagttatgaaattggaacagtaagaaattaaaccatatttccagatgctgagcacatgcgtatatttgggtttcgaagctgacccatcatctaatgttgctgctcgtattcgtgggcctaatgtgagtcttccttcaatatctccccccttgcttctttctaatttacaccaaaagaattgaatctacagtctaatatcaatcaagagaagggttagccatttggtgttaggttttcatctttgattaatagttgcacttttttttatttgtctcaatccatgaattcgagagattctaatgttgaagctctctctgacatctccgtgcaatcgggagagaactttttttgtgttggtggtggttggctttcgtacatgcaggatcagtatataaatcacattatgaatgaaacaggagcaactgttgtattaagagggcgtggttcaggaagccttgagaatcaacatggagatggtaatatttccttcgtttgtgtttttatttgcctacttatgaaggtgttatttacctcaaggtggatgtatctgaatgatattgttaatgtaaatccctttaacgcattatggtagaagcacagctaccgctgcatctattattatccggcagcaacccaaagagcatcgacgatgcaaaacgtttagctgagaatcttatggatacaatcagtgtagaatttggggcttcaaggttaatttttccttctatgtcttctatattatattcagaagcatgttcctacatctttgtcatttcatttgctgatctgtaattgtatttggttttgctacaaaatgtttcagggtttcctcaagcaaggtgtatggtgcagtaccaccaccacagcaactgatttctggagctccgggttctgaccaggagaaccaaaatttgatttcaacgtatggtttgatgacatcgatacccatcacagcaccaccatacgctgttagttcgtttccagttactccagcaacaagtctttatcctcagtttccagtaatgcaatctctaggaatatcaaatggtggcccctcgcagcccgtggctggaggaactagctatagtgggtatgctggaatataccctcaagccacaccattgcaacaagttgctcaagtccttaagcaatcaatttctcctgttatctctactgtgccccctactatgttgacagctacgtccttatcgatcccaagtgataatgcaagtaatgaaatg

SEQ ID NO: 36427 - DNA, 3003 bp, Unknown
  misc_feature (1)..( 3003): 2750-1469P.txt file - cDNA_ID_3095868; gDNA_ID_2926090; Annot_ID_196543
gtttgttttgttatatattttaaattatataactgtattttaattgttagttataggatttcacccattgtataccgtctcgtattactataaacccaaatccgtcttacctcagtgaaattaaatatatttaatggattttaccagtggtatactgtctcatattactatcgatccaaacccgtcctaccatctaaccccgttcagtaaaattaaacattattttattatttttgttttaataatactttaattttaaaaatatataattcatatcaatttaaattttttatttaaatgcttatttaattgttataaagttcatatattataatattctaaacccgtcctgccatctaatcccgttcggtgaaattaaatattattttttatttttcgtttaaataatatttttattaaaagatttataattcaaatcaatttaaaaggtgtctttcaaatggttatttaatttttatagatttctcattttataaatattctaaacattttttcctataaatattataaacgtttaattaaataactacaatatttaccttttaataaagtataatattaataatattgtgaatgattatgtgtagctaattttaagaaatttgatttgaagttttttgtttggattaaatttgaatgataacgtgattgatattttaaatcaagaattaaaaatcaaatcaaataattaagaatttaatgccaatggcatgccattgtaaataagttccaactatacgatttattttacaaaatggctgcaaaaatgtatatgtagatttaattacagtttttgaattgtctagtcatgatgtaaactcttaaatttaattaaagacaaaattgtgttgtctttaaaagagagtatgtttcagaaaataaaaataatatatgttacgttcttataaatgataaacataaattagatatgatatagaaatatttaaggttaatttaaaagatattatcatgattatagaaaatattggtaggaataaataacgagcctaatttcaaccaactatattacattgagacttgaagctacgattttttgaaaccagtatgaatctccataatttcgttttctacaattcttatataattcatatttgattttgattacactgttttaaattttattccaaaataatgttttctacaatcttggtaagattcatgttcactttcgatgttcattgtatgtaacgttatttatgatatttattattatttagactatgatatgtgatgcataaataaaattccgtggaatttagattcgattttggtattttatagttataatgattggattcatattcgatttgattatgtattatgatattgtaatttgaatatgatataattgtatattgtgtgtactgaattttgattgcggtgttcactgtgtttgatttttctttatccattctatatcaatattcaatacattttgtcctttgttttttttggtcgaaaatatattacgtctttatgatttacttctacgatttcttaaacgagtatacatcttcaaaacatttgttcttcataactttgtagtaagaacctaaccttattgttgaaaaaaaaatttcatatgcgcttactgatacccaaatcataagagatcaagcaaacatatcagatttctgttcttggtggttcagtgatatatgtcaaattaaatctaagaccactctctcaaatctctcttaatataacacttaaggatcgatttctacaaagttttttattcaaacataaaattatttatctcataattaagcaaaaccaaatgagtaaattaaaaacaaaaaaaatagattaaattgattgtaaattcagatgattaaaacgtcatatttaggaaagttctcaagaaatagataaacagtagatttaccaattagataggattattagcaactgttttagaactcaaatcacaaaagtataactttgttcgtaacttatgtttcaatgaaatcatttagttctttgatttttcaactttatcttagatttcgaatttttgttctattttaagtccaaaaacaagaaaagcctttttaaaattaaaaaaaataaatattgacggcaggaccaaaacgaagttgtagttgaaggagttcaaggaggagttgctgaaaacaaaaatgaggttgcagctgaatgagctcatttccatgagattcacattgctgatatatgggcaaatgacaactggttgttttactatgatggagttgatatgctacaatggtgctactagtgtcagtatacttcagcctcgtgtgttggaaggaaacactattaaagctgcacaaatagttatatatgtgtttgcatgcttatagttttaaacttgtattatttcatattaactaaaatcttaaattaattgacgagtgcacaaaatgttcaacttgttagaagtgttatgagttagttttagtaatttactactgaaccactagaaagttttaatagttttttacggacaaaatttataatatgatcgatatcacggaaactactatcgaccattctaccggataagtgattaagaaagtattatctgaaattattttaataattaaaaataaatccaattaccaaaaacattaaaaatatttttaagctaattatctcctaaaataataatccatatgctcaacatttttttacatgcacctctcatttttcactttctcaataaaactccaaaattatttttatttataaataaatcccaactctttcctatctatcaaattaacccaattttagtttagagagcccaaaatttctaatgagacccaaagtttctcaattttcgtaagggcaaaaaagaaaagtttttagaccgtccgattttgaatcctttaatctcttccaagaattctgaattcttctcttcgtagtctttgaatcctaaagtaacaatctttcgtttcagagcacgtctgtaagatg

SEQ ID NO: 36428 - DNA, 3000 bp, Unknown
  misc_feature (1)..( 3000): 2750-1469P.txt file - cDNA_ID_3095903; gDNA_ID_2926090; Annot_ID_196535
agaagattttgacacataacagtaaagggattaagtttcagattctttcgaatcccgagtttttggcggaaggaaccgcgattaaggacctatttaatccggaccgtgttcttatcggagggcgggaaaccccagaagggtttaaagcggtgcagactctcaagaatgtgtatgcacactgggttcctgaaggccaaatcataacaaccaatctctggtctgctgagctgtccaagcttgcggcaaacgctttcttggctcaaaggatttcatcagtgaatgctatgtcggctctgtgtgaagccacaggcgcagatgtcacgcaagtgtcttacgcggttggtacagactcaaggattggtcccaagttcttgaactcgagtgttggattcggtggttcgtgtttccagaaggacattctgaatcttgtctacatctgtgagtgcaacggactcccggaagtggcagagtactggaagcaagtcatcaagatcaatgactaccagaagagccggttcgtgaaccgtgttgtttcctccatgttcaactctgtatcaaacaagaagattgcggttctcggtttcgcattcaagaaagacaccggtgacacaagggagactccagccatcgatgtgtgcaagggtcttttagaagacaaagcaaggctaagcatttacgacccacaagtgactgaggatcagatccagagggatttatccatgaacaagttcgactgggaccatcctctacatttgcagccaatgagcccaacaacagtgaaacaagtgaccgttacttgggacgcatacgaagcaactaaggacgctcacggtatctgcatcatgaccgagtgggatgagttcaagaaccttgatttccagaagatctttgacaacatgcagaaaccagctttcgtgttcgatggaagaaacattatgaatctgcaaaagctaagggagattggtttcattgtttactccattggtaagcctctcgacgactggctcaaggacatgcctgccgttgcctaatgatgttcattgctgactctttcgtcctccatcatttgtgcttttcttcttcttgtggtttgtctttaagacttgttatatttcttacaatatgtttgttatgttctctggtgtgtgttttgttttttttggtattactttcatatttttttggtcgaagaggacttgtattcgacaatgtcgcttcaattttgttgtttccttagaaactaaataaatattggtttatattggagtaaaatgtgtttgtactttgtagttaatcgttgaaagttttgccacttattgagctttgtctgcgagagttgactcggaagaatatttgcacattgttcatagagaatcacatgatatctcttctctggtggattaggaaccaaacgcatcttgtaaaagtttccaggttggagattctgatttctgagtgacacctaacgattccatatttaaagctttatgtttttgtatgtctctcattgcgattggtattttttgtttaagtaaatatgcataaatccattcgtagaggcattccttacagtactagtgaccacatattaaccttttaggtacgcacaccgaagttggctacataacttgggtgagtattccaatctgtaatgtgaatagtttaccatatcacatatagctctgataccataaaaaactatatgtgaataatattaaaaatcttatacacaaaattttcttttaaatggttagtctaattgtaatttaaaaatatcgaaataataagttgcaattttttttttttttttttgggtctttgaaaagaaaatataatgtcaaatactttaatttttccaagtaaatcgaaacataagattgatatttttcttttatataagaaaattaaattagatttaatattattaaatgagtgtttcatattatatttttcagaaaaagagtttttattaattaaccaaataccaataatttacttaaaaacttgtattgaatccaaatgtttcccaaaaaaaaaatatttaattgggattgacaaaaatagcaccaacaaaattttttcttccaaaaataacaactttttgaaaaatttcacaagtagctttcaaaattttaattaaatattaaatataaataattaattttatttaaataaataaaaataaaaattttccgctaaaaatttttcgtcaaattttctgccaaaacaattcggtaataaattttcccgcaaaaaaaattttccgtcaaatttttcttgtaaaaaaacttgaggaagctaactacgacattcgtgaggatttcacggaattcaggaaagattttacaaaaaaaattttcgtaaaattcttcctgaatttcgaaaaagaaaaattcgggaattcaggaaaaattctacaaaattcaggaagggttacaaaagaaaaaaattataaatttcgtgaaacctttcctgaattgcttaaaatctttcctatattttgtaaaaaaaattctgaatttttttttgtaggtaaaatgtgggcggcgtaattatttttggtggaaaaattttgacggaaattattttgtagaaaaatattgttgaaaatttttggtatgaatttttgtatttttttaaatgttagttgtaataattaaaaattaaataattatttgagtgttatttatgttcacaaaacttttgaatggtatttttatcaaaaaaaactttaaaattatgttaattatgaaaattctctatttaatttttttcacccaaataaataaatacataaaaatgtccaaatatttgtgtgtttctcttttaattattgtttcccatttaaagtaaaaaaatctggtagcagcgttacaattcgcgagaaagacaaaacacaagtttcttcttcttgggattggctatttccagaaatccaagtcaataatcaaagtccaaacaaaaaaatcctctcccaatctccgcttcactcttctcatg

SEQ ID NO: 36429 - DNA, 2615 bp, Unknown; identical to SEQ ID NO: 15239
  misc_feature (1)..( 2615): 2750-1469P.txt file - cDNA_ID_3095920; gDNA_ID_2926090; Annot_ID_196531

SEQ ID NO: 36430 - DNA, 3003 bp, Unknown
  misc_feature (1)..( 3003): 2750-1469P.txt file - cDNA_ID_3095931; gDNA_ID_2926091; Annot_ID_196564
tatgtcgaaagagctcgcactacaaaatttatgaggatctctttgccacttaagacaagaatttggctgaccatgtatttagccgtttttgaagtctatctcgtacaaatgattacacttaagttttagaaccatgaattttctgaggtaaacccaagtaagtccccatacctgacagtattgtccacgtcatggccaaacattacagatgacttagcagcattgagctgttgtcttgaagcctcgccataaatgctgagaatattgataatctcttgaccctgagatggatctactttgtagaaaaaaggactatcatctgcaaacagtaaatgggatgtagatggacttgcacgagatatttgaaggccttgaatccgcccattccactctgcatctttaaggtttgctactaaaacttccgtacataagataaataggaaaggggaaataggatcgccttgtcggatttccctcgttggtttaatgaaaccccttggtgccccatttaggaggactctatacgaaacttaggagatgcaaaaaattatcatgtttacccatttctgcacaaaccccatctttaacatgagtgcacgtaaaaatgaccactccactcagtcataagctttactcatatcagtctttatacccataaacttatttctgcatgccggattggtccgtagagcatggaagttttcttgggctataaaaatattatctgtgataagtctccctgccacaaaggctgattgagtctcgaatattaaatccggaagaatttcttgagacagcaacttaatacttttgaaataaccttgtagcttacattacaaaggctcactcggctctttagtagactacattgtccattaggaatacaactatgatcaagacatatggtcttcaaaacccacatctgcagatccgaattatatgatcagtagacataccagtcacaacccttcttttgagcacacctaaaacttattttatccttctcccacctattttgcttaatgtttagcctattcttcatagcataatgtaacataacctctttgaactcaaacccagtgaaaaatgttttacctataactaacttatcacctgatgccaacctaattttcctatctttagtgaccacgggatcctaatctgcatcacaactctctggtatttcatcacgccgaatctgaaactcatcaaaccaatttgccacggcttcctctatctcgaactcgaacctctccattatgtcttcttcacacagatctttcgtctcttttctccccgatttcttctctctttgccttacttcagaatcaacatcgtccttctcgccttcatgtcgtttcctgttccttcggctttcatctccatctttctcacccttactttcattgtcggagtcgtctcctccatcattgtcactatcgccgtctccctcatcgccgctttcactttcactgtccgccgtttcgacctcattccactctccggaccctcaaaatcaggatcatctggatcgctctgatacactaaatcttcctcgtgttcataactcgacgaagccccataccagaatgacataatttcaaagaaaacccataaatctcaaaaatccccctttctctctagaaccctaatttttcaatcgatcgaacaatcgattgggtttggttttttttgggaaaacaaaacaaaggtgaaacgacgtcgtttcaagaagaatcatgattacttatgtgggtaatcgtaattgtggaacagtaaacgcgattttgtggttaaacccgctttaataactagtttaattggaggcatattttctcggatgaatccaaaaatatacaatatttgtttcagaaatattaaagttgatgattgtatttcacgaagaatatacatcagtttataaataatttaggttggaaaattcaaaaaaccttatatacatcagttttacatttttttttttcgtccagttttaccgaacttactgctatgactgtaattaggcaattattaatttactcatataattatcaaataataaattacgcttttttaaaaaaaaatcgttttggtaattttgcaattaataaaacccaaagataatcttctctcccctgactctcgtttcctctctctttctctcttcctttacagagaaagcagagagagagacaaagggaaagctaaatccgtgacccggatccgaaataatcgggttttcaaaatctaattcctcttatcttctctcttcttcttcttcctgggttcttcccaaaattcaatttcattaaaagggcactgccctttatcatgcctaaaattctcaggtacctaatcaagattcttctttaaattcctccacattgtgttcggatctattctaattccgctacgtatgaaacatgatcgtcatagattcgtaaagtttgagtcttttttttttggtagtgtctgattatttgaataaagttttgatttttatttgatgattctgtttcctgttttcaacgtttttttctcattgatgatgttgacgttatgaagtcatatttttatgtttaagatttgtatctgaaagtgattgaattttaccaattagtgttggttttgttatttgagaattctctgtttgagatttttcttatgagtatagtttttaatattgagatttgttgttgttgttgttgttgttgttgttacatgttattgtgtcccacttactcttttaattgggtacactttttgagctggctacattattttatagttgagagattgttttattgtatttgacttggttgttgattcttcaaaacttggtcccaatgttagtaataagacagaatgaaacaactagtttctctatgtgggtcttaactatctttatttgaaagctgtgtttatatgttgcagatttcttattcttatacttacattacatgtttttgttgaacaggatctaaataaaagtatagaacaatg

SEQ ID NO: 36431 - DNA, 3003 bp, Unknown
  misc_feature (1)..( 3003): 2750-1469P.txt file - cDNA_ID_3095944; gDNA_ID_2926092; Annot_ID_196576
aaggggtttaaaagacttacaagagttttttaaagatttttaaagggtttaaaagtgttttaaaatatttataagatttataagggatttttaaagggttttaaaagatgtacaagagttcttaaaagattttaaaagaatttataagaaaaccctttaaaaactttggtaaatctttttaaaaccttttgtaaaggttcacaagagttttaaaatggttcaaataaagttgtaaatgttttaaatacttacaattctctttctaagagttaaaaaatgcttgtaaaaactttataagagttttaaaagcatttacaaaggtttaaaatccttgtaaatcattttaaaacactttaaaaactcttgtaaatcatgttttacctttttataagcttttaaaatccttgtaatcattctataccacttacttatcctttaaaaacgattgtaaaccatgcaaaccctttttaaaatcccttgtaaatcattctttgatacttacttatgctttgaaaacgattgtaaatcatgttaacccctttttaaatcccttgtaaattattcaatgccacttacttatgctttaaaacgattgtaaaccatacaaacacttttaaaatcccttgtaaattattctatgtcacttacttatgctttaaaaacgattgtaaatcatgttttacccttttataagcttttaaaatcccttgtaaatcattccaatgccacttacttatgcttaaaaaacattgtaaaccatgctaaccctttttaaaaatccttgtaaatcattctatgccacttacctatgctttaaaaacgattgtaaatcatgttttacccttttataagcttttaaaatctcttgtaaatcattcaatgccacttacttatgcttaaaaaacgattgtaaaccatgctaaccctttttaaatcccttgtaaatcattctatgccacttacttatgctttaaaacgattgtaaatcatgtttcaccattttataagcttttaaaatccattgtaatcattcaatgccacttacttatgcttaaaaaacaattgtaaatcttataaaactattataaaaagttttaaaatgatttacaaaggtttaaaaaggggttttaaagtatatacttatgtttttaaagactttataaagattttaagaggttttaaaatgatttacaagggtttttagcaactaccaaatcttttaaaaaactttacaagttttttaaaagagtttttaaaaaatttacaaggatttttaaaagcattttttttggctgggaaaaaaatttaacgagaaaaaattttggcgggtttttttttttttggcgggaaaaaaagtttggcggaattttttttttggcgggagaaataaattttggggccaaaaatttagcggaaaactttcagtttccaattacatgttcttattagatgagggtaatttggtcattctgttcaagggaagagatatttttaaaaatgaacaatataaaagggtattgttgcaaaagggtagtaaaaaaagggtagttttgcaaatctccctattttctaatgaaaagaagaagttaatattttttaattgataatacaaaaaaaaagaagatttttctggttttagtttaaaattttatatcttaaaactttttaatcattttgtacattcttagtttagtttagaaattgaaaaagctaactattataaaaatcaatatattaaatatatatgcaaaatatattatagtagatatagagtttgttttttattttacaacaccaaataaaactacatttttaatactaaaaataaattaaaaatataatttttgtaagtcaacgccgatcgacgtaagagttaattgaccggttaacctgaaaagtatgtttatgatgttgactacatgactctatatatttcgtatatgtgaccatgcaatccatatacatcaggtagcttattgtcctttagtttagttggcatgtgtggccatgtgttcagctatactttagatagctaataatattttttttcaaaaagtaaccaaaaatcctacaaattaaaaatgtctccaacatacatacatgtgcatatttgcaaaagcacacacaagttcctcacttaaattccgacaaaactctgttcgccgccacatgttctccgcattacaaaactcttctgatcgcacccttgactctcccaacgtctcctctccacttttctagtgtcttttctgcttggaatcataaatttccggcttcttgttccgtggtgagtttgtaatctatgttttgctctgtagactttaaagcctgtttcttttctatctatgagttcgttttcgagttgcgtttaattttgacttatttttttcggaatctgatgttgtactcttgttgacatttctaaagcaatgatatctatgctcaaataagcttattaagagaaatataaaactgaaattagatagctcattaagagctttattattcaaagaaactaaaagaggaaagattactttgttgtcaccaagagcacaatgattcaattgatacttttataaagatgagaagaagagttgttttgagacaattctcaaacttaccatcaaagttctccttacataactaaatatatgagtcactatcttgctaacccttgttacatggcccatttcatgggcttttgggttactcatgagacactatattgggcttcatatggatcctctaacatctattagacttaagggcccagaccatagttagggttttcaatggaaggagtaaattttgtcaaaattgaatctgggtttggtcctacttgttgctcttttggtgttcttagttcctccttgatgaatccttctcttttaccaatcacatagtttctgagtatactttatgttgatgactgttctatatgatgatactaatgatttgaatcatgtgcaagtgtgtgtgtgtgtgtgtgtgtgttgttgaatg

SEQ ID NO: 36432 - DNA, 3003 bp, Unknown
  misc_feature (1)..( 3003): 2750-1469P.txt file - cDNA_ID_3095950; gDNA_ID_2926092; Annot_ID_196588
cttctactggctaagaagaatcctgtccagcttgtcattcagcgctttgatctccttcctgtgtttgtcatcagagtcagttgtgcctctgatagttctgtcgcagtcctcgttgtaattaccatctgattgagcaaggttctcaaccaattcccaaccttcttcaacatctttgttctggaaattcccattgctggcggtatccagaagcattctgatccgtggtagaactcttctgtatagagtgctgagcagagaagctttcttgaagccatgatgagggcattggttggtgtaacccttgaaacgctcccatgcttcacagaagctttcaccagtcttctgtgaaaagccagaaatctcatttctaggtcttgcagttctggcattggagaagaactttgctagaaaagccttcttgcaatcatcctaggtggtgattgagtcatggggcagattcttttcccagatgttaacatagaaatttatttatgttagatatttcataataaaatttcgatatatcataactcattccattattttagtagattatatttaaccagccttctactgtaagtattatatatatatatcagttttaggaaatccaattagagtatttacaatttataattttgttttattgttttaaaagacaagaagtttttaattgagagagatagtgagagacaaattattattcttgtcaaccttcttctctatattgtcgggtaacaaaatttaaccttgtttttttatctattatgtatttatattttatttgaaatatcaactaaaactatttttaaatgttccaaattaaaatatataattttttttggttatatacaaaattatacattccaaataataaatgtatgaaattgaatttagatattcaagttctaacccgttactcaatgagagtttttgttaaatttattcttgtttaaaagaaatatattactcaaatctgtattttgactgttataattttttcttcttagattgaaacatttaaatttgattttaaaaatttaaatcatggcatgtgcagacaaaaatctaattttcattattatattgatgatatgatgatttatttgtttaataaaaatagaatcaaataaagatgaatggtgaagtataatgatgaaaaacaaaatcatatatcatcaaacaaataggccaattgattagtctaatttctaatcataatgaacaacaagtttcattaattgaggaaatacgattcataatatcttttttaaaaaaaactgaagtcgaaaacgtaagttatgtgtatgattcaaaattgataatttattaaatttgggaaaattccccaaaaaaccagaactatttaaaaatctgcaagaaaaccacctgaatttttttctttatcaaaaagcacacaaacaaatttgggttggaaataaaatacacgatctattatttttccgattacctcccttcgccgtaacggactgttaacgacgttaaccaaataatcaaacggtgttagttttatttagtatttgccaaaaaaaatacatgaacttttttcttctcataaaaatacacaaactaacttaattggaaatataaaacagggtctatttttattttttcgatttccgtaatcaaattgtcaaatgtggttaattttatttacaaaatattcttaaaaaacttgactattaaagcaatcctttaaaaccttaattttttgagtaatatcaactaaaatcatgttattgatgggtatgttttatcctaaattactaatatatttttcaaattctatcagatatttagattcgatgtaagcaacattaaattaaaaaaaattaccccctttattcccaaaggttctttttattaatttcttcaatttattgtggttaaattctgaaatggatatatgtgttatgttaaaactaggattcaaaataggttcaatattgataatgggctttgcccactctccgacactctctcttattcctgaatccaaaatcgtccttaactttcttttctttagattttgctccaaaatgtctccttatctccattgttgtcccactacatagagtacctgaaaagacactaagaagactcgataaataacataaaaactcaaaatcgtatacctaaaacatagataaaaatcagtgaaagtaaggatatatcaactcccccagacttagcttttgcttgcctccaacaaaacacaaaagccaaacccgtggaagaggttttgaaaacaaaggaactcccaacattctctagcctattgccatgatcatccaaactaagtccatatgccttacaagtctaatcaaatcctaaccaacatgtacttctctgcaagcttacacaacattctagattccatacctaaattccacaactatatctaccaggcttttatcgctgggtctcatcaaacaagctaacattcaagatccttttagactcattcatgtactacaccataataaatcgaccattctttatataaattttttctttggtgttctttttctcaccaagacttattctttttagagagtaaacaaaggagaactcgcatactggatcgacaccctcagcatttttccaacctttgtaattgatcattccaaatcatatatataatagcagagttttctctcctctaaaagtgtccacgtcactacatctttttaatgtggagcccacatgtttttactctgccttcacatttttttctatgcgtgaaatagatttagtgatgtttatggggccacgatttggtcaaaaagcccatgagccaaagaaccaaatagacttagtgatgtgtatcgggccaagatttagtcaaaaaacctatgaaccgaaaggacctaagaaaacccagttaaaattgcaaaccctcgatttcattttctccaattcgatcgacgcaattcagaggaccacgaaagagaaaaagagtgtttcagtcactgccccatg

SEQ ID NO: 36433 - DNA, 3003 bp, Unknown
  misc_feature (1)..( 3003): 2750-1469P.txt file - cDNA_ID_3095980; gDNA_ID_2926092; Annot_ID_196580
gctaaatatgcctcacatcctttcccgatcatcctttcagcctggattgccgagattaccaagcttcacgaggttgttcttattccttgaaattttaacataccttcgtccctcttgaattgtatccgtcctcggtgacaatctatgtgagccttgtacttccccaaccagtccatctctaagataacatcgtgtttctttagtggaacaatgattaggttcactacaaccgagatgccccgaacaagtccggtaggatacattgcctttctgccggccgctcgtaccattccataatccgtgtttggttctttcctgaacccagctgattgaaccaattccagactaacaaaacaatgtgtagccccataatcaaatagagtgtgcgtttctacgtcacctactctcaaggtccctacacattcccttagaatgttgagtacctcccctttcccatatgcatgatgcaatgcaaatgcagttatagaaataatgaatagggagttgcgagaacgtaccagtgatcgccctgaagtttccagcatcattagcttcctccgacaactcataaactcgcggtgccacggcttgccgctttgggggaggcggcagtacgtttcccccacgattgtccctttgtccgccttgcttctccgcagtcagcttagggcactcccgctttagatgtccaaccttcccgcaatagaaacaagtccttgtctcttcaccgagaaccttggactgtcctggttccattctcgggaagctctggatcgcatggtccttgcttccacactggccacatgcacctatggccttccagcaagttccgctgtggctcttaccacaggtcacacattccccggtcttagcatcggacttggtgttatccaccttgtcgaatttccttttcttatccgcgggttgggtgggttgattgttctggatcggagctttctcccgattcaagtacctttcttcctcaattccttcctcaatcatcactgccctttcaactaattcgaaaaccgagttgaatgtccggaccaaacaatggttgcggatctctatccttagtctgcggataaatcggcgcacttgggcttgttcctcctcaagttcacggcccacataacgcctaaggcggttaaactcctcatcatattcacgcaccgtgcgattcccttgaactaggtcaaggtacacacattcaagcctgtcccaagcctccggtggaaagtacttcttgttaaactcgttttcgaaatccgtaaaggaccggacctcgtcccctctgcgtttcttgacggttaaccaccagttataggcgtctccttcaaggaagtggaccgcaatgtccctttgggaatcctcagggcagcgagtagacttgaagttccttttgagtctactcctccactcatcggccacaatcgggtccgtactgcccatgaagtgtctcgtgcccagccttgagacatgttcgagaaggctcagatagtctccccttttccgcccatgattcggttgcagattcacttccacaacttccgagtcatcgtcattttggttatccactctttggaccactggatccgctacaacggccttggttaatgtggctagttgcgccatcaatcccttcatcaaatcccactcttcttgggtcgttggagtattgttccggttatatgtgctgtcccttgcaccgctactctccgatgcttcctcatttatggacttcttcccggtctcaggttcagctgagtctgtcccatcgagcatcgtcccgattctagttttctcgttgatcattgtttcctcctcaaccaaagtctcctcgacaatgcccttgtccttcttactctttcccgttttgctgctcttacccatctgcgaaacctccaaagttaatccacataactcatagtaaaatcgcaaaagagtaaagaacaactaccgcgagattctcaagccgacgagtggtgataccccttaacccaatacctagtcctagaaccaagcacgcgcatcagtccggccgattctcggcaggttagttaagacccgccggtcctccgctgagccgcgtccccgcctcagccgatcccttgcctggaccgagtcttgtgtaggatgcacatgacctgattctacccaacccactagtcgttcctttcaaggaatcccgactcatctataacgcatcctagaatccttagactcgaggtctaggattccctaaccttccttcacgttgttcggtcgatctgattcggtagtccagctaccgaatcctccgactatttattctcccgagagggccagagtttaatggtgagtttccggtgtttttctgtgtcttgtggtgtcccaaatggtcatgggagtcgttccttatataggggacaaatagatgctttccgaatcaacacatccgttccttgcacctttccgaagagttgcacctttccgaagagttgtatctcttcgcccttaactgctcgcccttctccaccctttgggcaagcagccattcgaccataaccgcccaagtaaccgtccggataaccgcccagctggtcggacagtcgaccagttaccttgagctcaaccgtcactcgtccaggtgcctcgagcttaactgtcactcgtccagctgcccgagctagactgtcactcgacctgagtaaccgtcactccttccagctgagcttgagcttcgggtgagctgacccagctgattcccttatgatcctagcttagcctgcatgatttcccctttgtccgagcttatggccagctccttctcacttgtctgagactccaccttcttctctcggaccaagtcctagccaacgatcctattgaagatcgcgggcgatacaagtttggacagaggtacgcaacatcaacaacctgatttgctcctgtcagatcctaaagctacctagctcacaaacacagcaacaacagtgtactctctttgttcactcaccaatg

SEQ ID NO: 36434 - DNA, 3000 bp, Unknown
  misc_feature (1)..( 3000): 2750-1469P.txt file - cDNA_ID_3095999; gDNA_ID_2926092; Annot_ID_196575
accttggcaacccaagcaaccagataacataagtggtatctgaaaaatctacttcgtccttttcatttgtttgttatgtgatacagaaaaaaagaaaaagagaagagattgagagaagaaagaaaaagagatgagagagagaggagagaaggagagatttagaatgaggtggagagaaaaggataaatatgttattattatatataatatagagagtatagcagtttttttgtcttgtgttactttcttaatttataagtttttgttagttattcttgcaaatttcccttgcaacaatacccttttatcttttccatttttaaaaatatccctttccctgaacacaatgaccaaattaccctcatctaataggaatatgtaattggaaactgaaattttcccgccaaacaaaaatttccgccaaacttttttcccgccaaaaaaacatatcccgccaaattttttattcgtaacaaattttttctcagccaaacaaattcttttaaaaatccttgtaaaatttttttgcgggaaatagatttacaagggattttaaaagggttttaaaagatttacaaggaattttaaaatggttttaaaatatttacaaaggattttaaaagatttacaagagattttaaaagggtttaaacgatttacaaggaatttgaaaaaggttttaaaatatttacaatggatttaaaaaaaatattttaaatggttttaaaaatatttacacgaattttaaaaggtgtcttcttgtaaattctttaaaaatcttttaaaaaccattgtacatcttttaaaacccttttaacccctttcaaaatctcttgtaaatcttttaaaaccattttaaaatctcttataagtattttaaaacactattaaatcctttaaaaagttttaaaaaaaccattgtaaatcttttaaacccctttaaaatctcttgtaaatattttaaaaccctttaaaaatctcttgcaaatcttttacaaccttttaaaatcccttgtaaataatttaaaactcttttaagacaattttaaaccctttcaaaatctttaaaaaacctttataaatctttaaaaaacctttgtaaatctttaaaagccctttaaatcctttctaaatcttttaaacccttttaaaatcccttgtaaatcatttaaaacccttttaaaatcctttgtaaatattttaaaaccctcttaaatcccttttaaaatctcttgttattcaatttccagccaaaaatttttttttgcgggaacaaaatgtggcgggaaattgttttttcgaaaacatttggcgggaatttttttttcaaaatttttttgcgggaaatttattttgaaatattttagacgaaaaatattaatatttcattttgttaacctaaaacaatttccaaataggggtaaaatgatcattaaaaatttaaagaggataaaaatgaaaatggttaaaaaaaatggtagagttgaaaaggggcatcatgaaaagggcattaaaagaatttttcattaattaattgataaattaataaattttattttatatacacgtttttggttgtgtattaagtcttttgcgattttaagtacttgtgacgggattggatagttttgggcttcctcgtgtcaaaacgggcaagaggagttaatttttacgattctggcggtctacttccagcggtccacctccatatgtgcttgactgccagttttaccgaagattctagcaatctacttccatcggtctaccttcatttgttgctcaactgccaatcttaccgaagattctggcggtctacttccatcggtctacctccatttgttgctcgaccgccggtttcggttttctttaaccgaatttattttctattttctatatttgggtataaaaccccagaaacctaatttcattgtcaaggcttctttttctacaacttttctagagcttttctttgtaagcaactttgggagaaggatccatcctctttgacactttggagaagatttctaatccctattctttatatttaattaatcttttatgtcttcttcaactctttgtgttgtttattttactatgaaccagtagtctcttaattgggttttagggttctaagtaggggattcaataaattgatggtctgattgttgtttggagttctttatcttttagttctttgattcccatgttcttaatgctagaataggattgattaccctgttttagattctaggcttttctatgcatcaaaagtgttcgatagaatgcctgaaccaatgtgaattgagcaatggatttctagccaacaataatgaacctaattctaatgcgaatttgagtagaaaattacaaatgaaagtttagtagtcaagtagtcaaatttagtgattaatgtcttgagagagaattagtctaaacgtgtgttcatgttcgagaacggttctttgtgctgaattccttgtctaatatttccattaatcattgatctctgaaataccgtatggctcaatgctttttattatataactttaatcgtttattttcttacattttaatttataatcgagaaaaccaaacaaacaaccttttcgctttagctaagaacgagtctcggaaatctttagagtatctttggtccttgtggattgaccttgcatatactacctttcagttaagtgtatcgagcatttactcgagtaaccaagttggcgccgttgtcggggacaaattgcgttacctaaagatttaggattagtttttagtctaaagcatttttatttactgttaatgattatcatttccatgttttctttggtgttttcaggtgtatgacccatagccaaggctcatcacacctagtacactaccacgaggatatcggaaagtttgaaagagagaataagaaaaagaagcagttatcagtgcagagagaagctgaaatggttgaccgtgccgctgctaagaatctcctgaatgaggatg

SEQ ID NO: 36435 - DNA, 3003 bp, Unknown
  misc_feature (1)..( 3003): 2750-1469P.txt file - cDNA_ID_3096020; gDNA_ID_2926092; Annot_ID_196568
aattcaacattttcccgccaaaaacgacattcaacattttcccgccaaaacgcaatttaacatcttcccgtcaaataacgcgattcaaaattttccgtcaacaaatgatttcacatttttccgccaaaaacgacattcaacattttctcgccaaaaaggatttcacattttccggtcaaaaatgcaatttaacattttcccgccaaaaatgatattcaatattttttcgccaaaaacgcaatttaacattttcccatcaaatatatatgtaatacataaaataaatacaatttaaaatatatttatgagggatttttctgccaaacacgacttgtgatcttcacaaatagtagattggatccatctatgagggatttttattggacatctctaaaacaacgtcttcggctcgtactccaagcttctctttaactttacttgcaaactctttgtacatcattgaatctcgcaggcaaactaatcgattttcctccatagtttcagattctaaattccaaaccaacggatcgaccttcacccattctcttataacgagcataacatgctcttaagcagtcatttatgcagcgtttacggttggtaggaggagaatcaatcaagtcctgattttttggttatttcaataataaacactaggcctgggcaaaatacccgaatccaaagaactgaactgaacccgacccgaaaagcccgatccgaacccgaacccaaaattttaaaatatccgaacgaatcctaaactttaaaacccaaaaacccgaacccaaatctgattgaacttgaacctgatcaagtacccgaacatatctaaaatatatatacatagaaataatttaatagtaacaatcatatttacaacaacttaattgcctaaatgtttttggattttaacctattttgtatatttttgggtaatttaattatttttgattgattcggataaaaaatactcaaattcttttagaagttgtgtattttcaagtaatttgaatatattttgatacaaaattttgagttttggatactccgggtaaacccgaatccgaacccaaaaaactcgatcccaaccagacccatacctaaagtcttaaaatacccgaacagctcttaaattttttctagtcatgatagttgtatctttaacataaatcttatagcaaaactatactttttttttttttttttttttttttgataaaccctatcggctaatccggtcaaccccggtagaaacgcaccgaagtacttcagagtggactttttcccgaaggaccaccacactgtctgtcccgagtttggatgctttccgactaatgccagggggtagtcaggccgcctgcatttctgactaccaggtaaatcaattgggccaaagcccaactgacagacttcccaaacaaatgtgatttttgtttccaggagcatcgaacccaggtctgaaagtttcacccttccccaaatcttctcctaccactggaccacagatgcttggacagcaaaactatacttgatattctaaatttatcaatttgctcttgtgaacctcatattagcctagagaaactttgaaattctttcaagaagttctatgtagaatacagttttagtaacatttattagccatttcgattaagattattgttagcaaaaagtttttttttttatatatataagaaaaactatgttttagatacaatgtgagttaggcttcttaaattttaaaagttaaatacatttatacttaaaaatagttagaaattcaaatttatacataaatatgtcaatttgaaccttatacccattaaatatttggtgttagatatcaaaataaaagaaaattaaccatttgttacttatattgaattggatattgttacatgtatttatgtttttttttgtttaattttgaaacgttgataaaaaccattaaatttaagttttgtactatatttatttgtcgaaaatataattgtcattaaatataacgttaactttatttttaaaatacgttgttatttttatttcgtatatagaggtaaggtaacttcattttttaaataacaaatacaaatcattctttattacgatttgtttagttaaacaaaaatatttcttgtatatttcaatcataagtagatatgtctaaatttaactctcagattactatgctattcattgttttagctttggtgtgtgcgtttgttccggctttctcaatcgaagaagcggaagcaaatttattatggaaaacttgtcttgttaaaattactcctaagtgtgcgttggatataatcgctgctgtctttgaaaatggaacaatgcatgatccttgttacaacgatctcgtcaaagaaggaaaagtgtgtcacgatacgcttattaaatatattgctgataaacccatgttaattgcccacgaaactgaatacttgaagaaaagtgatgacttatggaaacattgtgtctcaatatccaaaagtgcttgaaatatgtaatattttttactgttttgatcaataaattggtattttctgttattgaagttttcttcactcaaacatttatattttcactttactacaatttcaatcaaagcgaatttcgttctaaaaaaatgtaacataaatttatgattttctattatcacttaaaacaaagtttcttatgaatagcgaaataataataattcaatatttaattattaagaggcgctctaaacattatttttagagaattgtttttttgtattttctttttaatgagattaatatctttttcataatttaacgaagtttaacttttttcaaagcatttggagaacttatttctttaaattccggaaaaaaagaatttaaaatctttatcattattctataattcagtgaccttagccaaaaacctcaaacaaataagcaaatcattttcaagcagatttacaaattttaaatttgaatttcaatgcacaaaacgaaaaacttgatg

SEQ ID NO: 36436 - DNA, 3003 bp, Unknown
  misc_feature (1)..( 3003): 2750-1469P.txt file - cDNA_ID_3096040; gDNA_ID_2926093; Annot_ID_196596
tcttaaatgattataagagactttggttccaaactcgagcttttaaaaattgtcgaagaagaagatatgtggtcagtgtttgcaacggaaatagattcttttacgtaatcattttagatgttttgcgatatcactatacctagaaagttgaatatccgagctgacacccttgcaaaagggtttattttcgagatgtcattttttctatataaattctcgggttccgaagtgattggctcttgatgcctaccttttcgaacctgtttaataatatatagaatattttgtcgtaaaaaagaaaaaaatcccgatttcccgctgcggtatattgttttctgaaaggcgattctaactaagtgttgtttatatgttgtcatttggattgaaaaacgaaaaatcatctctaacatacatacatatcgtaaaatgaacataaattcatggaacctagaaaatcgatttgctatagttgtcgtgtctaatcacagtaacgaattaacacgacaatcatttaacaacatttgatctcattcgctgattgatacgatactcaaaggagcattatttagtcacggtcgtcgactgccatagaaatctatatataacaattaatattattatgccacctacatctcgtaaatacttcctcacatttcttgtgtactgttgttacaacgaatgagtgccaaccaatgattaaactaaacttactaaatatttgtacacatatattattataattcctccatatttataagaattaaacttcgtaaattcattgtcaattttttcaagaaaatacaaagcgtgaaagttgtctacttgtctggtcggccagaagcgcagagtcgacttcgtattcattgtttatcatcgtattactctcccacatattaataatcttattcttatccaaattatttgcttttgcgtacacatttcacgaaagtttctaaaattgtttttcttgtaaaataccatataaataaagcgtacgtaaatacgaaacacatcgtgatagtgagctatatatataatttagatgttaatttgatgatatatacatatatctccattttcttccctattgatgtgttatttgttattatttactcctccaatgtaatttattagaaataaagcgtatgtaaatacgaaacacaaattagtcagttttccgtcgtccaaaatacaatgtcaattaaaaaaaaattatagaaaaaaagtaaagacactttaataatagttttatatattaacagaatgtttcaggtttactgcaaaataataaaaataggccacatagcgctcttgtttgttttcacagtttctagttctaccatttggtaaatctctaatataaaattttcaatattaattgttttaaaatcatatgaaccacgaggggacacgtgtcggatacaaagacaaccaattggatcagatctggtcttcgataggacaagtattcctgggaccagagagagagagagagagggacaagatcgccgttcaatagactctttcttcctattaatcacgtggtgaggtacttaccacgtgtttatattattggcttcttacgtgaaccaatctcatggtcctagttttcacatacatcgttttcctttgtgttgttgtttttctatatgacaataactttgtatctcttttatggtttatataatgtatatgcatgcaatgattaagttctcaatattacgattactctcttggaaacaaaaattctcgtataaactaaagatttgcaaacttcaaaagattatagaagaacaagttgtataaaagtgtttgtttgatcacttcaagagttggagtttttgtgattgtgaccattagagcatccacattggtgattctctagaaatgtctttacaataattattataaaaattaatattattctaattttgagtcatttattagttctgtatgatgtctttaaagatacaaaaatgtctctatagagatatgaaagacacaggtctcccactgtaccattttcttttttttttttctttttcttttaaaaatttaaagacactgttatttttttatgcaatagggatggtctcccactgtaccatttttttttttttttttaaaaaaaaaattaaagacactgttatttttatacaatggggatggtcttagatctccagaagatacggcgtattgaaaagtactgctgatctgtccaatgtaagggctgagttggaactaaccttcaatccactgagcgacatttgtcaatttcaaccaaaacaacaccaactggatgattatattgttttcttgttatttgattttcttgatgatatgtacaaaactataagtcttttttggtatcaatttagaccattagctaggacgcaacaatatgaaaccgtatcgctataagacattttaaacctagattttaatagttctactttcaaacaaatccgatagtttactcggcctcctatatcaaacaaatgaatcactatacaaggccacatagaaaaatcttatccctacgttatacaaatacaaattcacaatttttatttataataaaaaattcgcaatttgattagaacctttggttgttatttattgtacacataatattaaaatggtcaatcattgtctcgtcttgtagtttagcatatgtatggattacatagttttctgtctgttaccctctcacaagcataagcgtcgtctcgccaaaattagacactattcatatacacaaatatagatacgtatataaatatgtagacatttacaacttataaaagaaaattaaataaaaaacaaaagtcggcaaaccaatttgcatgaaataattataataattttttaaagaaataaccaaccaccaagaagtgctttgttaacagagaaagctctgtaagaaccttaaaaaggttctgttgcagaggttccgaccaaaagccagagtttcatctttatgtgaacaaagacagagagatg

SEQ ID NO: 36437 - DNA, 3000 bp, Unknown; identical to SEQ ID NO: 15252
  misc_feature (1)..( 3000): 2750-1469P.txt file - cDNA_ID_3096047; gDNA_ID_2926093; Annot_ID_196593

SEQ ID NO: 36438 - DNA, 3000 bp, Unknown
  misc_feature (1)..( 3000): 2750-1469P.txt file - cDNA_ID_3096052; gDNA_ID_2926093; Annot_ID_196592
tacgatctttgttgtttcagtacgaaagaaaaaattactgaaatagaaatctgaatatgctttatttgattctgatttagtttgcaatttttaatctttagttcactgtttcaataaatgattgttactgtttgattctgatttagttttgggctaaaaatttacagagagggaatgtcaaaagtgcactaggccaggattttacatagagatgttgacgctaggagaagatcaaatcggtagaattggggcaagctctagctggtctaggtcgaagaagcttcgggttcatcgctacgagattcctgatctaaacgtagaacctagtttggattgggatggggaagaaacaggggaggccactaaggctctgagcagtacatgtttgaaacctaaggatgcagattattgtttactaaatgttcctcagctcgtatacgagttagaggtcgagatactcgcacgcgtgccgcgtttcgagtattggaaactaaagttacttaataaggggttttcgcgtttgctaaagagtgatgagattttcaaggtgaggcgcgagcgcggtgtagttgaaccgtctgtctttatgttgtcgagtggtgatacgtgttggacgatgtttgacaagggctttgggaactgccagaagcttccggaacttccttctgacatatgcttcctccatggagataaagaatcgctttgcgctggaactcatttgattgtcactgggaaagaggagaagagcattgcgctatggcggtacgagttggagacgagcaaatggttcaaaggtcccgcgatgatcacaccgcgaatcttgtttgcttctgctacttgtgggactgttgtgtttgtagctggtgggttgaaaattgaaggaaacgggaccatggaagttgtggacagcgttgagaagtatgactctaagaccaaaacgtggacgcttctacgcggaatgcataagcggcggaaattctgctctgggtgttacttgcgtggcaagttttatgttctcggaggccgggatgagaatggtcaaaacctaacttgcggagaaagttacgacgagaagacgaacacatgggaactcataccggacattctcaaagacatgtctttctcttctgtccaatctccaccgctcatcgcagtggttggggatgatctttactcattggaaacctcggcgaacgagctccgcgtttatgatgcaaatgcaaactcttggaagaagcttggagatgtgcccgtgagggctaagtctaatggaggatggggcgttgcgtttaagtcacttggagataagttgcttgtgattggagcatcagccggtccgtctagggccgagacaatgtcggtttacacgagccgtccatccgcaaatcctgcgaacaagctgtattgggaggagtctaaacgttgctgtggcgttaggttcaatcattttatcctaaactgttgtgtaatgattgcgtaagggcaaaaactttgcgaagctgtggttttgtgtgtgtgtgattgaatagaacggtgctattgtgggttatcttctgattcagagtctatcttgagtttttggtgaacgctagtgattgctcattttgtgatatatcttaagcttttgcaagattgtgttaaaaataagaaaggttgttatatctgaataattcgaaacaatctgtctaaatcgaatgagcttgtttcaattcaattagaattgtttatatatcgaaaacttggtagttattagttcaaaaattttagttaatttattgctttagaaatccttagtgatttaaaaaaatcatatatgaacttgagaaaacaaaaacatccttagttttagtttggtttctttttgctagagaatttagattttttaaatggatcaaataaaatgttttttttaaatgggttaaatttttagaaaactaatttccgaatttttagggaaactaatttccaaattcttgagaggctaaaaaacagaatctacaaaatctaaaactacctcaaaagcttaatggattttaattttagaaaatatagctcaaatgagatgataagtgactcgaataaaggggaaaatgtgatatttatctaaaaccaaaactcttcgtgaagatgcagcattttacactattattcgttgtgtaatattctcatgtatttgcagttttgttatgcaacatacttctactactaatgtgcgatggtgttgtttctattagactgtaatgtgaggcttaagattggatgcaacaaagcaagtcggcatcgttgttacaaaacatatttttacaatgaattggcaaaataaatcactatatatacccaaaaatttgaattatatattcaaatattgagaaagtttagcttcttgatagtggtgttaatggaataaaaaaatagattctagatattaagataaaaagaataattaagaaaaattaagtatatgtaatccaatatatatggagagtcttctgtcagataatagatatattttattttataataacataaaactgtattttgatttttgctaaaatttggtgataatgtgaattaaattataagataactaatccaaattttaagaaaaaatgagtgatttaaaatagatttttatacattaatttatttaaaagaagtaattaatatgtaaaagggaatgttacactattaggcacttttagaaaatctttttacgtttgaggcactttctaaggttcagacacttttccttatttctagaagataaaaggacaattatatcctttcaaaattaaaccataaattgcttaaccagttcgattggttttgctgtgttatctaataaaacacacgtgtaatacatgttctttctatttcgtgccggttgagatctcgacatgagaaagggagtaatctcacaattacagcaaataaatggatatttttttaaaataaataatatatagtgtcgctcttcatctctaaaatcaaattcttatg

SEQ ID NO: 36439 - DNA, 3003 bp, Unknown
  misc_feature (1)..( 3003): 2750-1469P.txt file - cDNA_ID_3096072; gDNA_ID_2926094; Annot_ID_196614
aataaaaattaattcagcttctttctaacttttcttaacttagtaaaaataatattttaatttaaaataatgttaaaattgaaaattaagaaccaattggggttgctcttacaagaatgggaaaattaaatagaaaaaaaatgaaatcgagggactgtaacgagaaagacatttggttatatgttgttgtctctgtcacataaaaaagtaaatgtggcatttgttcccatatcccatacatgttaatatacacgtatttacttcttcaactttttagtttttctcttttgaagtagagtatgtgaaaagaagagggctaatgtggaaaataggatcacaacttcacaaggatcaaggatgctattgcacttctttaatgtctattgattattgataaagatttttttctttacttctttaattttttttttcttatagctcttccagatgtcccgttgacatttatttgtagttaattattggcatagctttattcaaaataaagggataaatgtgttttattattctttgtagcttccataggtaagagcatctccaatggaaaagctttttctatggttctcttcattttttaaaattaaatttttaaaaaaacttacaagagagcttttggattttctttttagtttttcattctccaataatagtttctcttacacaaattctctaaagaaaggaaattattttactattattttattaataataattattgcaaatcataaaatattaaaaatacattattttgaaatattttaaaatagatattccaaaaaggaaaattgaaataacgatcagttgttctgttgattgatgatacgatgatgcatctattgagattgataacgttagaaacgagatccaacagagtaatatccataacagaacacaagaataaaaaaagaataaaaggcaaaaaaaaaattgttaaaaattttaaacagattaattatagcttgccacgtagcaggctcctcaagttaaaaaaaaagctcttctctccatattaatgtattttcatttatttttattacaattaaattagagaacccgtgatttttgagcagagaacctcctattggaagtgctctaagttcgtcgtagacaaagttaatcaccgtcctggtattaaccacacgacctcaaatagacatagattttttttttcttttacctttttaaatagagagttatagttataacctttctatatatctttgtttttatggaacttcgttcttattaatttacaacgtttctatgttttacttataaactatttatctatctctatttacttatcagttgatcgattttgattcttaatttgtaacatgtgtttttatggattttgcttaaatctttttatttatctgaagccgaaaaatcttatatgttgtttgatgtagaggggttgaagtctcctatcatttatgtttttttgcttaaatggttcttttgtgacattaattattaagttgctctattttatgcgtatgtgtgttttaccatcgaagcagtagtagctgactatactggacgaatccctaaccttttttttttcgtccggaatccctaacctacgtttaaaatttgaggcagactttagtgttgctaataatagtttagggttaatatcattggtttgtaaaaaaaaagaagaaatcattgacttatgtaagtttttattattgtgtgtcgtttgatatgtcaatgttgacttcatgtgtctaaagatgattcattatcttctttggccaaacaaaaactatttgtctgcatatccgaataaaaattatttactttgcactgattttggtggagaattaaactttgaaaatgttccctaccaaaaaagaaaactttgaaaatgtttattttattgcaagcatgcgttaatattttttttccaagatttcatatccactcatctacaacttgatagattttgttctttcacattacaaaatatgcatttgtaagaaattaatacaatactagaatcttctcatggaaaatacccacgatgaaagatatgttcatgtcatgagctcaatgtttgagcttcctttcaatttcagttttagaattttagcatataaaagtttctaaatttttaatgtaatcactaatttgattgagaaccaacttttatcattgcacaaaagaatacaaaataaaaaatattttaccttgtgttatgtaccttcaaaaaccaagtaagtactatatgatgttttactattttctgaatttcgtatttgaaatcaaatttctgtcaatagtaattatttttttttgaaaaattacagcaattataaagtcttttatatattagatacttattattaccaacatcaatatatatatatataattaatattctgacaactattattaatcatactctctatgttttttattaatgtatattaaaggattttccacatattatgatatgattatagatgcaatatttttgtgatttataattttgaattttttataactcgaaatcatctgtatttaattattattttttgaagtttataattcattaaaaataactaataaatattgcattgagaacttaaaatatctttttttttgaaataaaacaattcctaaacatagagtaacaaaaataaaaagagagtatatatatttcaccaaaatataagataactgattaaaaaactattagtatatagtacatttcaccaaaatatataaaacaatctactactttaaaaataataattaagctctctcgaacttaaaaattgcatagcacaaaccgagactaattgattcaaccgagactaaaccggagaataagcctaaaccagaaccctcggaatcatttagaaggatagtcttgttgtatcacagcgagacagcttctcttccccatcttctctcgctgcttcttcgatcattgaagcatccacccagaaaaaccctaattctcctgacaaaatg

SEQ ID NO: 36440 - DNA, 3000 bp, Unknown; identical to SEQ ID NO: 15257
  misc_feature (1)..( 3000): 2750-1469P.txt file - cDNA_ID_3096082; gDNA_ID_2926094; Annot_ID_196612

SEQ ID NO: 36441 - DNA, 3000 bp, Unknown; identical to SEQ ID NO: 15256
  misc_feature (1)..( 3000): 2750-1469P.txt file - cDNA_ID_3096096; gDNA_ID_2926094; Annot_ID_196606

SEQ ID NO: 36442 - DNA, 3000 bp, Unknown; identical to SEQ ID NO: 15255
  misc_feature (1)..( 3000): 2750-1469P.txt file - cDNA_ID_3096101; gDNA_ID_2926094; Annot_ID_196605

SEQ ID NO: 36443 - DNA, 2324 bp, Unknown; identical to SEQ ID NO: 15262
  misc_feature (1)..( 2324): 2750-1469P.txt file - cDNA_ID_3096137; gDNA_ID_2926095; Annot_ID_196637

SEQ ID NO: 36444 - DNA, 3003 bp, Unknown
  misc_feature (1)..( 3003): 2750-1469P.txt file - cDNA_ID_3096143; gDNA_ID_2926095; Annot_ID_196636
tgtaagcacttatttttaataaaatggttttaattgatttttatatttaaataaagggttcaattaataaattaaagaggaaatacatttttttaaaactattaatctaactacatttttaaccactcttaaaaatcattttcagatcattattggttatatattaagtttcgttgggacgaacacaaaaagacaattaataaaagaagacataaacattatctaaagatgtgtcttatcatttctgttagttgaacaaataaaaaataacaaagaccaaagagatttttatttttgaatttgttggtattctccttcttgcaaagatctaaaatagcacagctcctcgagtaacacgtgtcataatttcacgacttcatcgtatctattctcatctaaatttatggaaacatcactttcacacttccacaacaagccacacattccaaataaccaaaccaagctactaattattcttccaataagaaaatatttacatctaaatccttaatttataagagcatttaacctaaataaactattttgtaactattaatatatatgcaccctaccaaaaaaatctaatatctatgcatatttctatttatagaacagttaaataaaaaaatgtttagggcttgttctatgcaaactgaaagtctttttttatgttatgataagttcccgtttcttctttcttttttgggtaatattagaaagtaaccatagaattgaaaagaatgtagtaactaaccattgtcagtttatatgtgagtaaataaccttatgacggcataagaaaatacaaaaatatccttgcaagttgaaccaaaagcaagagtatgaaaatagcatgatatttataaaaaaggtgacattttataatgtgttataagaataaataatatgttatatgaaaaagtagcatgttgacagagaaagatttccagttataacgtgtaattcgaaaaagtagcatggtacaaaagaaaataacatacaatttaaaaagaaaacataacgacgatgattccaagaaagaatcaaaatcgaacaaaataaatagcacgatatttatcaaaaaagtgacattttataatgtgctattagaataaataatttgttatatggaaaaatagcatgttgtttgagagagattttcaattataacgtgtaattcgagaaagtagcatggtaaaaaagaaaataacatacaatttaaaaagaaaacataacgacggagattccaagaaagaatcaaaatcgaacaaaataaaatgagaaatcttctgcaaattgagggaaagatgatccgtcaatataaataacgtttagcagcctaaatttatcgaaaaagagacttggtggttgtgatggtggaagatgtggtggttgtggtggtggaagaaagagagatgagtggtggtttgttcggattcatcaaaagtttttcgccatataatcatctaagtgttctgtgtgattttgtaaaatagcatgtaatacatataaaattcgacaatgggtataaaagtaattgcaaatgatgaaagagagtgtattctgacaccatagttactttgttaattcttttacaattcatagtcattttgtgcatattctcttcttttttttaggtaagaatatgactttctatttcaattcaaaagttcttgttatccaacaaaatagttaccatggatttgtatttatactatactctaatgttattgaaataagatttagaacatctttaaatcgtaatacagtgacaatgattatgtcatttaaattaacaaaatttgatctataccaaaaagtttgataacacaagataacttgattgtttagattcaaactcaagcatcaaatgtccttaaagtagaacttaggaaaaatgattagcaactgcataaaaagactccatcatataatcaaactttaaaaatatcttattagctatacacaatattgtcattatataagcacatctctaaacaaacataaatcatattgtaaacaccataaccattatacttaccattttttttgtgtcaaaatccattatacttactatgtatctacagaaaaagacgccatcacatatggaaacttgaaaaatatcttattagctatacaaaatattgtcatcgtatatgcacatttctaaacaaatataagttatgttacaaaacaccataatcattatatttacttcttttttttttctcgaaacctattaaacttactatttatgtgtaatggttgccaaaattcagaattaaccgagattgactagtgctgataaaaaactatattatttatttttaaacacataattaaatacatttctccaacacaaatattttatatactattgaaaatgttttaaccaaataaaaataatatttactctcttttaaatattcaaaactctagctattttaacatatcattttgtaagaaaattatatgaaactcaaaaatcacaataactcagtgaataaaattaaattaaaagagctactcacttatgactatgaagagtcatgctcatgaacaaaagaattaaaaaaagaaaacacgtgctaatgcttctcctcctcctcctccacatcgccgggttttcctcttcctcccccgtgaaaactgcatttatatcaattcttcagattccccaaaccctaaattctctctctctcccaatttttctccgtcgttttcccccaaatttcctctcttttttatgtcttcaaacttcaaatccaatcttcttctctctccagctcattgactcaaccaaatctagatcaaagtttgaatttttaaaacctttcttttttttgttgcttccttccaaaaaaaaaaacgtttcttttttttttcttcttcttcttccttctgcatctgaaagtttgtatttttcctgggtttttacctttcttggtttgaatagacaaaagggttttcaaaattctgtagatttcattgttacaaaaaatg

SEQ ID NO: 36445 - DNA, 3000 bp, Unknown; identical to SEQ ID NO: 15263
  misc_feature (1)..( 3000): 2750-1469P.txt file - cDNA_ID_3096156; gDNA_ID_2926095; Annot_ID_196632

SEQ ID NO: 36446 - DNA, 3003 bp, Unknown
  misc_feature (1)..( 3003): 2750-1469P.txt file - cDNA_ID_3096161; gDNA_ID_2926095; Annot_ID_196631
gaaatatattggctaacaaaggggaaaacacacaaatttcgacctaaatatatataatccaacgatggtgagaatgagaaagtatgcttacgacggtttaaagaaccaaataacccgttatttacgctacttctctatttttaagaggagataacaaaactcaattacaaaaaaaaaaataacaagaaaaacttgagaagtataactagttgtttatatccatcggacataaccgcaaaggatgcgaccagttgtgaggagaaaagtgctttactccctgccatcggacgtctcactcaagaccatttacgtcaacttgcccaaaagacaattactttccaataccactcagcaaaaaattcacaagcaaatttttctgataagaaaagtctttgtttggtttagtttatttataaacaaagagtaaccgttgacgttgagtatttatcacccaattaatctttctatattgaactagtcgtggagtagttcactcacctaattttttcttttatcatccacttttagttaaaaagtaaaaaagccattaatgtgaaacattgtttatacataactgatgtgatacagtttaaaatgaatttttgtatcaaattatctgtttttacatttgcgtatcgaaaaatttaaaataaagagaaatttgtgaactcatccttatcgctctgaaatttttccaaatattttgaaaatgcttgtcatttagttgaaaaacacataatcttcaccacatatgaaaaatctgtaaaaataattactaatcatacatttcactcacctaattttttaataaaaatataataaaatacaattttgactagcaaaataaaaatggtttgataataacacgttcgcaaaatttgatccatgacctaaaaaagagtttgttgttatagtttccacaaaaaaattgggatactattcattttacatggcaagaaacgtaaaggaaccgaatcataataaacaaatgaaagatacttagagctaagcattaagcatcccattttgcgacaggatttgacgcattatgcttacctccattttaaaatttgatatctcttgtcaaatctttatttatatatattatacatgatatgtataaatatttcacgaagaaacaaagtatagatgcttcttattgtctgatcagatctctactttttattgagaatcttgtatcaaatatggttctttttgagccaaacacgccaactttcaataatcttcactttgctgactactacttcatgttgattaacatacttattccaaattacggctctaaagaaagtgaaactaattaaaacgtgcgtgttgatacttgatagtatatatacttcttacgcatcgcctgattagatatttgtttttattaggattccatgagagctatattgcatggttaattggataaatggtcagagagacgattaggattaaagtaaatgacaaggacatttttgattatttctcgattatcatggtgggtgtaatttaacatgctgtttaattgaacgaagatactgtactaatattttacacgccctaagtaagactcactttatcccattttatatagatttttttaagaaataataaacattttatcatgataaaaattcaaccaatagaaaaaatacggcagaattcaaatagtcataaaatatcaaattaatagttatgcatagaaactataaaaaaaaaaaaccttataacaaaccatcaatatattgcgacaaaggcagttataagtaatctcaaggtaatataacatgcttatacatccatattacaaaactcatggataaattataatgggttttctgcaaaagaacctttcaagtcaatctcgtttgcaagtttaccctccaaatccgagttatgcaagtcaaccccatcatctctaaagtcatccgcaatacagccttcatgtatatcgataacgtggcactcaataactctgtttaaaaacataagggttttatggaaaaaaaactctcaatataaatttgttttgcaaaataaaccttcatgtcaaataaatacagatcaaactacaatctaaaaatctcatgaaatataccccttttgtgtatcgatgacatgacagtcgatacccattcagagcatgtgcaataggtatagattttatgagtcgtttatttaagattttctgctatcacaattccattaataataattttatatttttatctattcactattctcgatcctggtttatctaaacatagtaaataatttttcttattttttattcatgataaatcaattacttatttaatttaacgttctataatttatatttcttttaataatttattcaattaatacttaaataataaagggtgtgctggtaaatttcaatataaaaagagtaagcatagttttttcaaatttgcataaatcatttgaactcgttattttcttaattatataaatggtatgtctttcactttgtacggagtatcccaatgtggggtacataaatattaagagaaaaaaagagatcaagcttactagtttaagcgttaataattatactgactgaccaatctacttgttcatgtagctctaatgttattaattaatatatagtcttagattgatctaattaatgtctgtgtatgatgtcactttgtgatgatggaagtcatgagagcttccattacttaactctctctctctctctctatctatttttacggtcatgtatagtgtaatcaacaataacaagaaaaagccaagttcaaagcactatactattagttaaagacaaatgcgataatgatacgattctgagcattacttgagtcacaatatatagtcacaccctcatcaaattctttctatcttaccaacttctgaaaaaaaagaaaaaaaccaaaagacaagtaaatacatatataaatatacactcacacacacacacatatattgatatacttataatcataaatcatg

SEQ ID NO: 36447 - DNA, 3000 bp, Unknown; identical to SEQ ID NO: 15264
  misc_feature (1)..( 3000): 2750-1469P.txt file - cDNA_ID_3096189; gDNA_ID_2926095; Annot_ID_196624

SEQ ID NO: 36448 - DNA, 3003 bp, Unknown; identical to SEQ ID NO: 20730
  misc_feature (1)..( 3003): 2750-1469P.txt file - cDNA_ID_3096224; gDNA_ID_1620808; Annot_ID_168930

SEQ ID NO: 36449 - DNA, 3003 bp, Unknown
  misc_feature (1)..( 3003): 2750-1469P.txt file - cDNA_ID_3096237; gDNA_ID_2926108; Annot_ID_196653
acgatatgctttcttcatcttcttctgatcaaatcaatcgcctcgctgtttccgtcgagggaccctacggccctagttccactgatttcctacggtaattcacttaaatcacaaacagagaagttcaacattctgtttcttccgacacaagtaacattgatgctctgtttttcttccaacacaagtaaaatgctctgtttttctttaagtgcagacatgaatctctggtgatggtgagtggagccagtggaattacaccgtttatctccatagtccgcgacctattctacatgagttcaacgcacaaatgtaaaatccccaagatgaccctgatctgcgcgttcaaaaactcttccgacctatccatgctcgacctaattctacccacctctggtctcaccaccgacatggcctcgtttgtagatatccagatcaaagccttcgtcacccgagaagagaaaacatcagtaaaagaatcaactcacaataggaatatcatcaaaacccgacatttcaaaccaaacgtctcagaccagcccatctcaccaatcctcgggcccaactcttggctctgtcttgcagccatcctctcttcttccttcatgatctttattgtcatcatcgcaatcatcacgagatatcacattcacccaatcgatcaaaactcggaaaagtacacttgggcttataaatcgctcatttaccttgtatcaatctccattaccgtggtgactacttctacggctgctatgttgtggaacaaaaaaaagtactatgcgaaaaatgaccaatatgtcgacaacttatctccggtgattatcgagagctcgccgcagcaattgatatcgcaatctaccgacattcattacggagagaggcctaaccttaacagtaagtctatttataacattttcatagagtaaaatgctgagttctaactctgtttattctattgtgtgaaacagagcttctagttggtttaaagggttcgagcgtgggaattcttgtgtgtggtccgaagaagatgagacaaaaggtagcgaagatctgttcttttggttctgctgagaatcttcactttgaatctattagttttagctggtgaattttaaattcagactgatgttttatcatagatgtttgggttacaaaagaactaggtggcttcgagagttcataactctaaacatgtcctagtactaatttatccgtctccggtctcctagtagactagtactaatattaaaatgtgaagcgatatatgagtcacatgttggcaggatttaaagtttgacagatctatatgcggtggatacgagttcggttagctgaaatttgtagaacaagcatttatgtcatgaacgtttctgaatggttttataatggtaattagtgaatggtttaagacattctttaggcagtcatgtagttttgtaatatcaaggaaaattggcttggctctgaatatgatttttttttctgaattggcttgttcgaatcctcaagatgattttttgaaatgtaaagttgcattttctgatataatttttttttgttgccttttataaataatcatcttttctttaacatttggttgccttttattaaaaatcatcttttctgattttttttggtcaactaatgtaacaccttttctttaacattttttttaaaaaaataaaacgcaaatgaagtcatggtaacccttttgactttcacaataccattcagtgacatctttcttacttaatattccgctgtcatgtcccactttggttaacatttgaggaatttcatcagtaaaaatcgaaaagatataaaggcatcaaaggagaaaccttaaaaagtcaaaatagagacacaagaagtgtttctttgtaggcttagatgagaagaagaaactaaggaaactgtattcctaaagtaaatactacttccttcattcctatgataatcaattattaaaagatatggagtcgcttaccaaatcataaaaccggtaacccaaatctaggaaattttattgtggaataaataacaaagcctttattttatttaaatagaacaagataaaacaccaaaaataatagctatgttctgaagtcttgaccaaactactgatacgggatctcacctagattacttacaatgtaggtgtaaaccgagtttttaaccaaactaaaacgaattaagcgacaattagttacggaagcttaaactctacatagattgatagattaaaaaacccttgaacaaaaaaagaatccaaattcagcttgaagtagattcaaccaaaccgaaataattttttaaaaatatgaattttgtttcagtttgaatttcatttgattttccaaaaattcacaaaccaaaccaaaaactgaatatcacttgtagctgtacctataaattattagagcattaaatctatctcaccaccgccaaactcaacgtgtgttaatcttttaaccctaaacttctaaattaaaaaatagacgacttttttacttatttcttcttcttccccaccatctttttttgtgctctatgttctcaactaatctcatttaattcaccacatacagctgcatcaaacatatatatatatgcatgtatttatgtacttatacacatacatacatatgatcatttaatgaaattcattaaatgaaactattcctttcgctgcaaaattaggtaccagtaaagcataaacaccactttaccacttcttgaattccaaatctgaaagctctgtcattatatatgtataaaccaatttaaacatatacatgtctcaccgataacaacggaggttcattaatgagggtttgattatgatacttacgagtgacagattgtgaatatcaaagagaagcttcttcctcccttttttctccctataaatttccgtagaaaaatcattcattcgcatctcttctcttctcaaaaatcaccacatttctttacttctctgggaaacaataataaaagagctacatg

SEQ ID NO: 36450 - DNA, 3003 bp, Unknown
  misc_feature (1)..( 3003): 2750-1469P.txt file - cDNA_ID_3096242; gDNA_ID_2926108; Annot_ID_196652
cataagtttctccttcatcgctctccctggtttctacatcttcttagtcgatcgtttccttcggtttcttcagtcacgtgaaaatgttcgcttgctcgctgctcggattcttccttccgacactatggagctcactttctccaaaaactctagtgagtaccttttgtccaattggctaattgtatatgaaaagttcacccttactggatattgatctaattctaaactattctttttgttttatagagttggtttatagcccgacgagcataatgtttgtgaacataccgagcatttcaaagctgcaatggcatccgtttacgataacttccagtagcaaactcgaaccagagaagctaagtattgttatcaagaaagaaggcaaatggtcaactaagcttcaccagaggctttcttcttctgatcagatcgaccgacttgctgtttctgtagaaggtccttacggccctgcttccgccgatttcttaaggtgatttgtttatatacactttctcaatcacctatctaataactttatattcagatttgttaagagtcctggaaacttgattgacttgcatttcaagaaacattgatttcatactttttttttttttgctttctaggcatgaagctttggttatggtgtgcggaggaagcgggataactccgtttatctctgttattcgtgatttgatcgccacaagccaaaaggaaacatgcaaaatcccaaaaataactctcatttgtgcgtttaagaagtcttcagagatctccatgctcgatcttgtcttgccattatccggtcttgagactgaactatcctccgacattaacatcaaaatcgaagccttcataacccgagataatgatgcaggagatgaagcaaaagctgggaaaatcaaaactctctggttcaaaccaagtctttcagaccaatccatctcatcaatcctcggaccaaactcatggctttggctcggtgcaattctcgcatcttcgttcttgatcttcatgataattattggtatcatcactaggtattacatttacccgatcgaccacaacaccaacaagatctattctttgacttcaaaaaccatcatatatatcttggtcatctccgtgagcataatggcgacttgtagtgcggctatgttgtggaacaagaagaagtatggtaaagttgaaagtaaacaggtccaaaacgtcgaccgtccatctccaacatcttctcctacctcatcatggggttacaattccttgagagaaatcgaaagtacgccacaagaatcgctcgtgcaacgcaccaatctgcattttggagaaagacctaatctcaagagtaatatatacatgaccttcttttaatttctctatctctatcttatatataaggaattgttattctaattatgttttttgttggtttatatgagcagaacttctacttgatgtggaaggttcgagtgtgggagttcttgtttgtggtcctaagaagatgagacaaaaggttgcggaaatatgttcctctggtttggctgagaatcttcattttgaatctatcagtttcagctggtgattgcgtatataactctgttttcactatgtgttgtgcaatttgcttgagttgcaagttaataaggtggccctgtgatttgacctatctttgtgtgctttacattgacttttcctgttttttgtttttctttatcctcttctaggaatattcagtgttaaaaaaaaaacttcctttcaaaagttccggaatatcctttttttgtttgtaacacaaggcatacagcttttgtaaattgtaaatgttgaaatataatactcatgttgggtcatatatatgattttatctctatttttcagttaaacatacttacgaaaaagtcaatttgctcgaaacgagttgggttatacacagatgtgagctacatgtaaattaatatttggatctatcagaatttatctgtcaaatacagaaatactatcttgcagatagcacaaattacctaattgttggttaaaaagacaagaagaagttacgtgaacataaaaaaaaaaaaccgtttcaattgacatgtcactaattattcgatttaagtaagaggaagtacaagaacaaattaaagaactcacctatatatacatccgtttatttaaaatctgtgttattgtgtaactctgctacaatttagtgggtaactaacaaaaaatatcatggttaaatttggtgttctgaggaaatttaatgtaaaattcataaatttacgtgtgattttttgataattgattattcaaaactcagtacaaggaataaaatcgaaaaagaaaaaaaaacgtaaagataatagaaatatacgtctacacgcatcggcgtacaaactcaatgattctgctttccgttgaatttgctaattttaagcccaaaactatagaattgcgttttcaatgtgaaatgaggaaattacacactttacctagactcttccacgagtcaagcctgttttgtaagtcagcagtaaaatgaagctgtaaatcacaaattaattataaaaagattcaattataatttctctggataatattattattttaaaataataataaaataatttcttattggtttatacaccagaccatattttcatataaatttaattattattttaagaaaataatattatgcatagaaaaatgacttaaatatcatttcttttatataagagtatattattttatatatatactctatatctttaaacatctcaagttctcaacatatttaattattggatcttttctgcatttagcataaaactactaattacattggtgtaattagcatatatatatgctggaaaaaaatatctttctatatatatgctggaaacaaatatagcacatatatatgggttttgtaaaattcattgcaaactccatttcgctttgttttttcttctcatttcttggaagttcatctctggtgccatg

SEQ ID NO: 36451 - DNA, 3003 bp, Unknown; identical to SEQ ID NO: 36450
  misc_feature (1)..( 3003): 2750-1469P.txt file - cDNA_ID_3096242; gDNA_ID_2926108; Annot_ID_138555

SEQ ID NO: 36452 - DNA, 1019 bp, Unknown; identical to SEQ ID NO: 15270
  misc_feature (1)..( 1019): 2750-1469P.txt file - cDNA_ID_3096248; gDNA_ID_2926108; Annot_ID_196651

SEQ ID NO: 36453 - DNA, 2231 bp, Unknown; identical to SEQ ID NO: 15272
  misc_feature (1)..( 2231): 2750-1469P.txt file - cDNA_ID_3096257; gDNA_ID_2926109; Annot_ID_196658
  misc_feature (569)..(569): n is a, c, g, or t
  misc_feature (1467)..(1467): n is a, c, g, or t
  misc_feature (1480)..(1480): n is a, c, g, or t
  misc_feature (1497)..(1497): n is a, c, g, or t
  misc_feature (1501)..(1501): n is a, c, g, or t
  misc_feature (1529)..(1529): n is a, c, g, or t
  misc_feature (1562)..(1562): n is a, c, g, or t
  misc_feature (1565)..(1565): n is a, c, g, or t
  misc_feature (1580)..(1580): n is a, c, g, or t
  misc_feature (1589)..(1589): n is a, c, g, or t
  misc_feature (1614)..(1614): n is a, c, g, or t
  misc_feature (1622)..(1622): n is a, c, g, or t
  misc_feature (1639)..(1639): n is a, c, g, or t
  misc_feature (1655)..(1655): n is a, c, g, or t
  misc_feature (1687)..(1687): n is a, c, g, or t
  misc_feature (1702)..(1702): n is a, c, g, or t
  misc_feature (1706)..(1706): n is a, c, g, or t
  misc_feature (1709)..(1709): n is a, c, g, or t
  misc_feature (1753)..(1753): n is a, c, g, or t
  misc_feature (1797)..(1797): n is a, c, g, or t
  misc_feature (1814)..(1814): n is a, c, g, or t

SEQ ID NO: 36454 - DNA, 582 bp, Unknown; identical to SEQ ID NO: 15274
  misc_feature (1)..( 582): 2750-1469P.txt file - cDNA_ID_3096271; gDNA_ID_2926110; Annot_ID_196664

SEQ ID NO: 36455 - DNA, 3000 bp, Unknown; identical to SEQ ID NO: 15273
  misc_feature (1)..( 3000): 2750-1469P.txt file - cDNA_ID_3096275; gDNA_ID_2926110; Annot_ID_196663

SEQ ID NO: 36456 - DNA, 3003 bp, Unknown
  misc_feature (1)..( 3003): 2750-1469P.txt file - cDNA_ID_3096285; gDNA_ID_2926111; Annot_ID_196670
aagcaaaaaaccgagttatggtttatcgaatgagatggtgcgattctgtataatcatcttaggggtcaaacctcaaactgtttttcaatgtctgtctccccaccgccatcaagtttcttcacagtgactgaggatttttcatcgagacaagctctgtaaaggcatccacgaccacctcggctcaacacattactatcactaaacttgtttgttgcagattccagcaattgatattcatacacagggatggttcctttcctcacagaatcaatcttgtgtacagtcggtttcgtggttacactcttcaccgaatcttcagataaccaaagcaccaaaataagccataacaaaaccaaggaaattacaaaaatataaagagatagaattgaataccggatttgcgtttgataccggtgaagctgttcttcatattcctgtacctccatagcaagagatacacaaggaacatgactgtgacacagagcagagatgatgagactataagagcaattagaatcttcttgttcaagtcctcgcgaagcaccactttaacaatgggaggtcctgagcaaagttaaatttaaataagggataaaattcaatttatttgcttaattatcggaaagttttcagttttaattgggaaacagtatcaattcaactaaattcaattcctttatgaaagtatgagcaaacacatttcgacaatttcaagaactagtaagacccaatcaccaaatattgatatttttgttcttaggggcaacatggagaaaatttggaaaggggaaactaataagtacctggggattgagctcccattcgtggagaagcctgagaaatggggatttcgggggaagcaccagaaacgtagacaacggaagattcttgtgatttagtagcagtggagaagaagaagaaaccaagaagaacccaaatgggtagcaaatgacgaaggagacacatatttaattttgttgtctggtatcaacaaatatgcagagaaaagacaaaaagagagagagagagagataaagagtacgaagctgcttcgtgttctatctaattcttttatggagatggtgaaaaatgctagagattatctttgtctggaggagatgtagacaagagacactgttggagttgggaaacagagagagagaaggacaaaggttttaggtgtttggtcttcatgtggcagttatgaaaaggtggacaaaaaggctaataaagcagcaaagagtgcctaatcccagacgtggtgataagacgtggagttgtggagagagtgaggaggaggatgtgtagttagcaaaacagtttcttcccattagccaatctttaaaattttgattttctctctaccattacaacaatttaacatcccaatgttagagatgatgctgatactactagttgacaaatagaattaaaccttttatacgtaaagctaacagatttttatctattaattaaagccttgttcctttttctttaacgtatagttatactatatctttattaaattagaaaaatcaagaatacaaagaaagtacataaagcaatcaaagtacaatccaattacataaatggtgtttttaatgttccttcatattcataagtttagtcttttaatttccaagaaaaaaaaaatacatcttgtcgtaaaagaaattattatttttaatcagattaataaaatggtgtgatatatggaaagaatatggattgagaatggattgtgtaatctctcgatagagttgtttgcatcgaggcacagtaatccaaatgattcgattgggtcactccccaaattcaattcatgcggatttagtgaacaaaacgacaagtcatggtttaatagagtgcatccaagaattttattctttttattttaaaaaaatacagacgacaaaggtccaaaagtttgagcattattcatgtgaactctctatgtctgtcctcttcaaactttaattaccgacacaagtggtcactgactagtcacaactgtacagttgaataacaactagacttattgagggccttacaagaataatgagccttttatatcttattgggtcaatacaagcccagttttgaaattttgaaatgaatcagtcgttaggcccaatatctgttggaaaaacaaatatagttattgggccattaaggaataaaaagccacaacaagcccagtttcgaaattttaaaattggataaggttaaaagccagctgccagcgaaattgaaggatgatatatagttagttacatactgtgtttgttgttagtttgatttgagctaatcttcatcaaatccatcatccatggatttacctgaagaatgttgggaattaatctgcaaagctatcgatgaagacgattatcgattcctggaatctgtttcactcgtatcaaccttgttcctctcaatcaccaatcgcgttcgctctactttcgtcgtcaccgatcgagctgttcctttactcaatcgtcatctccttcgattccgcaacttgaagcgaatcaggttctctgatttcactcaggatctcaattcgattcttctccaggtttctcgttccggtttggatttcgaatcggtagatgtctcgcaaacgcgctatttcccagattttgagatgaagaatgtcaaggaattgaaatgttatggagttggaggttttagtgatagcgatctggtttccatcggagtgaattttccgttacaaaattagagtagctctcatgtcagtattggtggtaattaatgccattctccgtttctttttctaatctccgagtcgaccctgagtataaagtatttttaccaatttcatttcaattttattgtataatcggttttatagaaaaaaatgtgattcattaatttaagttttaggtcacacagccaataagagttaaaagagtaattaattaaggattttaaaaactaagaaaatgaggtgaaaacttaaaacaaaacagaataacaacaatg

SEQ ID NO: 36457 - DNA, 3003 bp, Unknown
  misc_feature (1)..( 3003): 2750-1469P.txt file - cDNA_ID_3096331; gDNA_ID_2926114; Annot_ID_196687
ttactaaaatcatagaaagtaaataaattataaccaagtgctaaagagtttttataatcttgttattagttattctataatttagtgaagtttctcaaacaatatatctatttgatgattttttcatgattttattttgtgaagaaaaatgtataaaattataaactaataacacaatagtttaattcattaacaatcatacattttttttaattaaacaacacaaaaaatttattgactttattaaattttgattctaataaaatcagatttatgaaaattttaaaagacttttaatttacaaatcaaaaactaataatacattttaacagaaattaataaagttttgattgaataacaagagtcaaaagatctactaaagtttttaaaacaatatttcaatcacaaaccattttaggtgattttatttattttaatataatttctttctataggcagtagtgtggaccataaaattactgttaatttacttcctaaaaaggattatttaattgcaagattctaaactggattattcccacaatacacctttgtaaataaaaaccattaatccttcacaaatacagagtcgtgaacttaacgtctctctctattcctctgcttctctctttctccctgtgaaaaaatggactcggtggctctctactgcaccgctggtctcattgccggcgccgtctactggttcatatgcgtcctaggtccagcagaacgaaaaggcaaacgagcctctgatctctccggcggctcaatctccgcagaaaaagtcaaagacaactataaccaatactggtctttcttccgcaaaccaaaagagatcgaatcagccgagaaagtaacactgcttcgtcgacacgttctcacaatcttgtcactgatatctacgagtggggatggggacaatctttccatttctctcctcatgtccctggaaaatccgacaaagacgccacaagaatccacgaagaaatggccgtcgatctcatcaaagtgaaaccgggacaaaagattcttgacgctggttgcggcgtgggtgggccgatgagagccatcgcgtcccattccaaggcccaagtcactggaatcactatcaacgagtaccaagtgcaacgagccaagcttcacaacaagaaagctggacttgattctctctgcaacgtcgtttgtggtaactttttaaagatgccgttcgatgaaaacacgtttgacggagcttactcgatcgaagctacgtgtcacgctcctaagctcgaagaagtatactcggagatcttcagagtgatgaaaccaggatctttgttcgtgtcctacgaatgggtcaccactgaaaaatacagagacgatgacgaagaacacaaggacgtgattcaagggatcgagagaggagacgcacttcctggactaagaagctacgctgatatagccgtgacggcgaagaaagttgggtttgaggtagtgaaggagaaagatttggctaaaccaccgtctaaaccgtggtggaaccggttaaagatgggaaggattgcttattggagaaaccatgttgtggttgtgattctttctgctattggggttgctcctaaaggaactgttgatgttcataagatgttgtttaagactgctgattatttgaccagaggtggtgagactggaatcttctctccgatgcatatcattctctgtagaaaaccagagaaagcttctgaatgaatgattgagaatcttcttccttgttctcgtttttcttcttctttctttctaagttcatgttttgccccttaagaatctctttgtcgtcgtattaatgttatcactttgttgtttattgtatttttttttttcaatttgatttgtttaaattgatgatggatcactggaaattagtttttcgctcttcttaaatagtttctgaaagaattagccgggaaattctattggagtgatcctttacctttttaaaattttgtagagtttacaagtctctgtttagttttaatttctaagatcaaactcggaataaaccggattagcacgtctatagagttgcataaacttttagtatcatcaatgagggtagtttggtaagtccttaggtgtcacattgtgtctgtagtagtgagtcgggagtggtcgtgtgggattttgtgggctgtccgataatgcatatgttattgtcgtcaactgtctgatatattaatctatgtatcttttaaagatttgattttgatttattttaggcttatggtttgtcgcattgcggtagtgggtagcagcgtggtcgcacgaactccggcttaccttagaaaacgatattttatttagttatttagtttttttttttccaatttgttttgtgcattactaaaaagattgtgtcatttgtgtgtaaaagtttactaaaacactgggtcatttctatagtgggcttttataatgatgggcttaaggccaatttttattggtttacctcacttccagttccaccgggagtggatatatgcttatattcgtacgtgacatcaacaataatacgcgtatacatgtgtaagtcaatggaccaatttgggtcgaagctgtgaaaattgtcccaacttatggagagcttgcggaaatctttttggttcctttttggccaatacatttccgcttaccagttggaaaggaacccaacatggccgaattttaaccaacgggtcaaattaggccttacttggattgctgggtggaatttttcaagaattgccaacaactttgaacaaaaattaactttgaatttgcttttagaaacaggcaattctcacccaaggttcaacatattccctttttatatccccacggaaaaaaaatctaattcaacagtgaacacaatcccacacaagtttaaacaagtggacataaaagtcttggacccattttaaaacatctatccacattaaatcattcactgatctctaaccaatcccacacacactaccacaaacaatg

SEQ ID NO: 36458 - DNA, 3003 bp, Unknown
  misc_feature (1)..( 3003): 2750-1469P.txt file - cDNA_ID_3096333; gDNA_ID_2926114; Annot_ID_196686
gctcaaaacctaagacattatccaccatcagtagatccacttccgccaccagggcgccacctaagctcgctttgaagtcctctttgaaggatttcggtgtcatcgcagtggcaacagcagcttcgatcgttttagctggaaatgcgatggccatggaggttcttttaggatccgacgacggttcccttgctttcgtaccatctgaattcacggtggctaaaggagagaagatcgtgttcaagaacaacgcagggttcccacataacgtggtgttcgacgaagacgagatccctagtggtgtggacgcaagcaagatctcgatggatgagacagcgcttctaaatggtgcaggggagacttacgaggttactttgacagagccaggctcttacggtttctattgtgcgccgcaccagggtgctggtatggttgggaaactcaccgtcaagtaaattgtctagatattctcttgttcgagtaggagcttacatattcatgatttataaatctaatttggaagagaatgttggattgataaagaggatcatataatgtttactatcataagttactggtttcagtggctcttttgtacattttaagtcacggtaatacaatccgataacctttctctgtgtccgtgtaaagagcttttagtttgaataaagtttgttttaggtgtatctgcgttgggtttacttgccttactttggtcccaacgtttgagtcttttagaggcccagcacgcctatatatcacaaattgggcctaacgactcatgttttttggggaaatataggaaacaggtttagctaggtcttacgcaaccactactgacccacccaaaaaaattgcattaacaaatcacgagaaagagagaatatcacgtgatgaaatcattattgattttaaatagcaaaaatgaagacggatcatggatccattaccaagggtcaggcagggaaaaatgtctatttcggtcgcctggtttgatttgatcttttgctgaaggaacagggaaagagacaaataacacagatcagcacactcatatatagctgatatgtaaccgagactctctttctcgtagagagttccacgttgaatatgattcccatatcttgacaagtctagttgcaattctgaattaattaatatgaatagtttacattggtaatgcgaagaaaaagctctcaaacagttgtcacattttgtgttctagagaaaagcacaaagtgattattaacatatttgaaggtttcatctctcttatctgtgtgtatatcagttatatataatgtttaaaatgtataaatcatgatttcgacaagcttcaaaaatagtttcttcgaatataacagctggagatggattgtcgtatgtgcattatggtctacagttggaattattagagtaaattatatatcgggttcataaaatacgataaaattggaccaatctataacgaatttgtcctcactcacacattaattatgtcgtgtgagcaaatagatcacgtgagtgatgttataaaaacaagctgtaatatggagtgatcaagattcgtgttaacatagagacagattgctaacacatcgtagacatgtgatacgatcatatgagtcatgcatgtgatacgaccaatttaccaaaaacaaaattttaatttaaacaataattgggatacctaaaggaccagctaattaattagttattaaatgagctcacggatcctggacaaaagtgtaacgattgtagtgcctttttttccttggtaatcagagttttatcattaggatataggttaatccgtatcaagaaaagtatcctacctaaacctaacgcattcgagaccataacaaaaaatcaacgtcacggacttatacccggaccgagagcttcaagccttcaaacatttcattggctatatttttccttaattcatgattcaatgttatactacacagtctcaattctatgaaaacaaatctgaagtcgtacggagagcgagagatacatacgattacagtatatgaaaaaatgttaggtgactttcacattaaaaatatattataaggagctggcctgaccctacaacgtggaaagagtgaaatgcttgtagaacttattaaggatatcacaaaaagaaaaatctctcagatatatgagttcaagatcgcaaaataatgatctcatggcatttatattcacatgtactcatgtagatctggatctataaataattgtagtttttcattgtgataactgatttgagaaaacaaatataaacgcaagaaaaattgtgatgttacaaggtgttattggattataatttaaaagtaattttgatgcctttactaaaatcatagaaagtaaataaattataaccaagtgctaaagagtttttataatcttgttattagttattctataatttagtgaagtttctcaaacaatatatctatttgatgattttttcatgattttattttgtgaagaaaaatgtataaaattataaactaataacacaatagtttaattcattaacaatcatacattttttttaattaaacaacacaaaaaatttattgactttattaaattttgattctaataaaatcagatttatgaaaattttaaaagacttttaatttacaaatcaaaaactaataatacattttaacagaaattaataaagttttgattgaataacaagagtcaaaagatctactaaagtttttaaaacaatatttcaatcacaaaccattttaggtgattttatttattttaatataatttctttctataggcagtagtgtggaccataaaattactgttaatttacttcctaaaaaggattatttaattgcaagattctaaactggattattcccacaatacacctttgtaaataaaaaccattaatccttcacaaatacagagtcgtgaacttaacgtctctctctattcctctgcttctctctttctccctgtgaaaaaatg

SEQ ID NO: 36459 - DNA, 3000 bp, Unknown
  misc_feature (1)..( 3000): 2750-1469P.txt file - cDNA_ID_3096352; gDNA_ID_2926114; Annot_ID_196682
ggataacaaatcaattcattagtgtcaccttacaacacaaaaatatactaatttgattaaaaagttacaaaaatggtgggattaaccaacaataacaaaaacaatgttcaaaatcttcaaactaagcttccatcattttgcttagagactatgacttgctctttcaatcaattttcttatgaacaagaacttggtctgtgttttgtccacagctgccaaagtttaggtctggatagtttctatagttcaaggaatgtaaccaaagagccatatttccgtattttcgctctgtagcgccgatatgagaatagatatgcttcaatttgaatgcttcagcttcttctttgtatgcttccatggacacttcttcatgactgtcttcaaagtttctgttataagacgtgaagaagcattcgtccagataaagtccaacttctggcgccattggtacagttatattcacatccctggttacataatttccgaactgagtatcaaaacaaacaaaactatagacattgcgaagcttcaaaccaagaaaaaggagaagcttacttgctgaaagcactttggataagtgattcagaagcacaattccgcatgattgcaacagcaagacccatcatcttccgaatctgatgaagcataaagcttttgcctaagacttcacacttgataaagtcaatcccatcaagattaatcacagtattagcagtgaaggagatgatttgacgattcgcagtcggaacatctgcttttgttcttgtagtgaagttatggaaattatatgatccaacataacaacttagtattctactgaacctttccttttccttttcaccataacaaaacttgctctttaccttagtctctgatgaatttgtattcaatttacaactgtcttcttgtatcctacctacttcaacatctactgagcataagccagctaaattagaactcaaagcttcaatcttgatgtcacttcttaatgcactagagttgttcgacgaaatgtctgactgaaaatccaatgatttagtcccaaagttggtacctttccatttacccacaagacctgggaggaatcttacgacctctctctgagcactcaaagcacttaacatattcctctcccggacccaaactagccattactgtttctctatcacgatgcgagattggatcaagagcaaacactggaagcagatacacataccttcttcgatcgcaaaacttcttggagctaaacgacggcgttacatgcttgtaaccgaagattctaatctgattagggagatttgaattgagacgattcacgaatccaagtggatcaacgataaagcgacctgaaactacttgtccaacagcactaactcctttatctgtccgtgcagatcgtgcaaaatcgtatagttttggcttgcctctaatgactccggtacagctccggcatgaaacaaagcttcttcgagctcgcctttcaatggttttcgcgccgggattcttttgcattccttggtatcctacaccacaaaacgcgaagattatagcaactttttgaggctccgtgacacctccgtcgcaggacaagtctatttcctcatcggtggtagttgtcaacatattgagctacttctgatctgattctcaatcaggaacctcgaaccgggggaaatctctcggttttcaaactcctgagcctccattatagtaacaagagttcatcgaactctctattttccagctttcctctgcaacaacgttaatggctaccgcacaaaagtcgaaacccttgaagacgactgaggtatgcttctctacgacggcgtttttgatatcagaccgctctttgaactgggcctatgaattttgttttatatatgggcttattagtctcaagcccaaatgtttctcttataattcaagtcaaatttgaaaaagtcaactatatccattgagcacacatctttggaaatacagtctgttctagtgggcaaaagaaagagagaaaattatagccgttctaattgtatcaaagtatgaaactttcaaatctccttgaggtataggcgttgttgtcttgctgatggtacacgcgtcgtatgaaaaagcgtacacaaatcttatttcaattgaagttatcgactttattctaacagtcaacgcgtgtctagatttttccttcaggtggacggagaaagaaaaaaaaaaactacttaggcaaattcatgaatcttcgctttctcgattgagatttaaataaccctcacataatccaaaagagagaaaaatagacatagctctttaatctctgagatcctctgctcaagtcgctttacagcattcactacttcacggaaagaaggtattgtaatcctataataggctcatctctcgatgaaataccgtagaatcgaatcgacactttgtgtttgtgggtatagtccaatttgctctctttaattcttcttcttcattgtaacatttataaaaggtttgttttttgtgtggccgaaagttgtttgacacttgattctgattcgtttgggatcagaaactgtttaatcacttcacgttctctcttcggctctatatatatatatgtaggattgtttctttaagggacttgtgtgatttagcttcttcgtttccttggtatttgatcttcttttatgtgtgtgatcttgttaaacagaattttggttagcctataatcaatctcaaattggaaacagaattttgtttttgtttcatttgatctgtcatgaaacaaatgttgctcttcactgatttttttatcttagtggaaatgtttggaatttaggatcttttgattaattagtttgcctgcttcagaacacatactggtttgtgtcctcaatacgcttattacttattgttttggatctctctgaaatggtatcattctgtatgcaggtaatcgttctgttttttcgttgattactgtttgaggttttcattgaatcttgtctcgacatg

SEQ ID NO: 36460 - DNA, 389 bp, Unknown
  misc_feature (1)..( 389): 2750-1469P.txt file - cDNA_ID_3096356; gDNA_ID_2936587; Annot_ID_143893
ttcactgagaagcactaattgcgaaggtgttgttagaggtgggtttagtgtatgcttattcgttctttaggtttagatatcattctacttgagtagatgcttgatggttttggcttctctggtttcattagttttgtgtcaattttgagaatgctatgtctaattcaattttgagaatgctatgactaattcaatttgagaaagtgcatgtagttcaattttaaactatctttctctctggggaaaacagattctgaggcttagttatgttcataaattgctttgagtaaacatttttcatgcagttgttatagttcagttacttgtgtatattgaccttgtttactgtggtcaggtattttgctgcatctacgcttgtcctgataatg

SEQ ID NO: 36461 - DNA, 3003 bp, Unknown
  misc_feature (1)..( 3003): 2750-1469P.txt file - cDNA_ID_3096360; gDNA_ID_2936587; Annot_ID_143892
cttgagtccaattgcattcaactgggtcgaagccaatacttggtcttcagtttagttacctgctagtaacaatctcttccataattcccatatatctcttataaaagttatgtttccacaaatctacagaaactgttgtatgctcgtcataataaaagggtatatatgatatgtatccagggtttattctttacttaaaactggtccaaacaaaaatgtttggtaataatttcaaattcttataataattgttattatgattcttgattggtttgagttgtggataaaattttttgagtacttaattcattcaattttcactagacatgtttatatttttaatttatattgaagtttgccagattaattaaggaaacacaaacgactaaaaaaaaaaaaaaaaaacacaaacgactacgttaggtgtgaaaacaaaattgaatttgtacgtctctaacgaccaaatgactatcaaatgacaggcaaacagttttcttaacggaaaaaatacagtaaaaataagaaaaaaccgtttgatcatgtttataaaaaattgaagtgggctaattttgtcaaattgatttagctaatgaaacgggcctaagtgggtctattttaagcaagtatacaaaagcttcattaccggaagcccatattctcgccaatcacatataagaggccactatcgtaagcccatatattatctaagaggccactgtggtctgtggggtgatttaaattccatctagggttttgactattgtgtatgtcacctatctttcctctcgcgtctctcccctttactcaggttagctgcttatatccggctgatcgctggatataatttgacttttaactcttctcgtttgtttcgttggtgattgagtttgaaaagttgtgttgtgccgttgttacagaaatggcgaaatcgaagaatcacacggcgcacaatcagtctgccaaggcgcataagaacggaatcaagaagccaaggagacaccgtcacacaccaaccagaggagtaagagtctctgttacattttaaacctataaacgattacagattctgatgttacattttaaagctataaacaattttcagattcggatgttaccttccaagtttgatatttaatctatttttgtgaaatgttgcagatggatcctaaattcctaagaaaccagaggtatgcaaggaagcacaacgtcaagagtggcgagaatgctggtgtcgaagagtagatcttttgatcgtctgattgacagtttaagttttttttatgaatttcacttgtttagacaaaggaaccaatgttctacaatcagggattatgtctatccagattctcttatatattttgcatgttacttgatttgatgcaattctttcacttgttcgtttatgttcatgtagacctataatctgaaagctgaacctgatttacatatataggtttgtctggcctttacttgaatcaatctggttttattcaccgatgcctgttacttttctagctttcacatttcatgaaaactccaaatggttctattatcatttgaaaataaccagatttgagtgtatatctattgccaatacgtcaaagacaaaatcttattttgcattattgattggaaatttgggtagacgccaacaatggtcttaaattggtttaatatacttgcaacacaatttgtcaaattgtaaaattatatgattttttttcgttctggtgatatgaaagtaaagtgaaaataatttgataaagtggtgatgacgaaagaacccttgtttaagcacacgaaggttacaaagctcgtgtcgtggtttcgattcctttgtctcgccttttagttgcacttcggatagatctaccaactacctaatgccacgtggttatttctttgaccacataagcctatacacttcagagcatcactaatctcacggcaacaatgatcaaattcccacctggcgcattttcattggatttaactttcttttacacagacaaaacatttctgcttgtcatttcttctacgtcacaggctgtcgtttttaaagagagcgaaccgactcgcggcaaaggagcgcgtgggtgtcgctcgatggccttttagtgaatacaaagggcaagtaagggtattaatggaatttagttcataacgtatgaagaattatattatttttctgctgctttaattttttttttctttttttttttctcctctctcttctctcttctttcgcgtttcgaaggttggggaaagctttcgcagaagaaaataaaagctagagagagaatgtcaatgtttttttgatgctccgtctggcaattagggtttcttttttctttgatttcgtccccttcgagaactgaatctcccgcctatatcgacgccgtctaattcctatcatttctcgttgctccaaaaccctaactttactaccgtcggtcattattttcactttctcggctcgatttggtgttggaggttggtaatcagttatgggcgctccggaaaagtctcaatctaataccaattcgatgcaggtgtctctctagctctagctttgttttcctttattggctcacttgattcgagctgggtttgtcttgattagtataatttattgtagagcttctgtattcatattaaatcactcctgcttctgagctgtgttatttattgatgaaattcatggtgaccacaattcaataggtatctcagttttaagagcacacagaagatgagatttgtaatttgactagtttctatggttcacttgttgtgtattagtttcagtggggtttagcgtagggcgtagcgtagttctctagtttctgtgggtgtttgtcctcttttgaacagtgtaccatagccgataatttagagtagctattcgaccatgtggtagaccttacttcttcagataaaacggatctcaattattgagacactagaaagttgcgttgttttgacgaattgtgttgaattgagatg

SEQ ID NO: 36462 - DNA, 3003 bp, Unknown; identical to SEQ ID NO: 27395
  misc_feature (1)..( 3003): 2750-1469P.txt file - cDNA_ID_3096365; gDNA_ID_2936587; Annot_ID_143891

SEQ ID NO: 36463 - DNA, 3003 bp, Unknown; identical to SEQ ID NO: 27575
  misc_feature (1)..( 3003): 2750-1469P.txt file - cDNA_ID_3096369; gDNA_ID_2936587; Annot_ID_195144

SEQ ID NO: 36464 - DNA, 3000 bp, Unknown
  misc_feature (1)..( 3000): 2750-1469P.txt file - cDNA_ID_3096378; gDNA_ID_2936587; Annot_ID_143886
cttttatgatttttattttagtttgaggcagcttgggctctaacaaacattgcatctggaacatcggatcacactaaggttgtaatcgatcacaatgctgttccaatctttgttcagcttcttgcttcccctagcgatgatgttcgtgaacaggtatggaacttctgatgactacagaatgtcttctcatttattatgagagattatgcaattgaaaattttgtgaaaccctgatcttaagatttcgctctaacctgcaggctgtatgggctttgggtaacgttgctggtgattcaccacggtgccgtgatcttgttcttggatgtggggcactgcttccgctgctcaatcagcttaatgagcatgctaaattgtccatgcttcgaaatgccacttggaccttgtcaaacttctgtcgtggcaagcctcagcctcactttgaccaggtctatttttttcccctccaagcttgtttcgtcaatgtttatgtctagtattcttctaacatatgaagcatgtttaacaggtcaaacctgctcttcccgcccttgaacgactaattcattcagatgatgaagaagtcttgacagatgcctgttgggctctttcttacctctctgatgggaccaatgacaaaatccagactgtcatccaggccggtgttgtcccaaaacttgttgaacttctcctgtcagtaccattttataattcccttatttcatgtccacttcacacatttgttgacaaataacttgataccttgctcttgatttttagccatcattctccatctgtgctaattcctgctcttcgcactgttggaaatatagttactggagatgatatacaaacacaggtatggatctaaatcctgtctattgaatttctcacagtatttcggttttgcacattgtatatgatagtatatatttttcctactatgccaaagaatatctttgtggttatgcaattctttggcctttaggaataggtctgaagataccactagaacttttcattaattgaaccgatagcaaaaacatgtcgaagttagtgatataccatgcatatcatctaatccaagactggtaattgcgatgaggtgttgttcaaatgtatggcaccctgttgctattattcatatccaacattttatgtgaaaaatgggagtattgaatgcttatcatgagattctccctctgttgccactctgtccatattagcagataggatgcagtgccttttttgctatatattgcttgtgtttgagttttgttacaattaattcttgttttaaagtttaaaccaacaacatgcacaaattttttgcttggtgaaatttggtttttcatgagtttagcaaaggtgatttttctatatctgaaatagtttacatcgttttacttggaaatctgattttacttcttctccagtgcgtgatcaatagtggtgctctaccttgtcttgccaacctgctcactcaaaaccataagaaaagcataaagaaggaagcttgctggacgatttcaaacatcacagcaggcaacaaagatcagatccaggtaggcaattagtactgtttcatcatatgttttgtaccgtttcccatccagacttctatacctattcattaattgtgttgtttttcccctgatggttgcagacggtagttgaggctaatttgatttccccgttggtgagtctgcttcaaaatgctgaatttgacattaagaaggaagctgcatgggcaatttcaaatgcaacttcaggtggttctcatgatcaaataaagtatgtcactgtcttttttgcgttcctctaacttccagtttcttctctcatatatatactttgtgtatatatatattgatgttctgttcccgttggttatacagatacctggtggagcaagggtgcataaaaccattatgcgatctcctggtttgcccagatccaagaatcataactgtctgccttgaaggattggaaaacattttgaaggtgggagaggcagagaagaacttgggtcacacaggagacatgaactattacgctcagctgattgatgatgcagaagggctagaaaagatcgagaaccttcagagccatgacaacaatgagatctatgagaaggctgttaaaattctggagacatactggcttgaagaggaagatgatgagacacagcaacctccaggtgttgatggttctcaggctgggttccagtttggagggaatcaagctccagtaccatccggaggattcaacttcagctgaaggtaaataaaagtaaaaattcttaaatttctaacaacgtctcttgatgaaaacatgcaaaatctgatatttagatcaatataaacccacaggaatggaattggaagcttgcaacttgagaatggtgaaaggtcagagtcagtcagagtctagtttcactgccatggttatactccaggtctggtctggtctggtctcagaggtttgtaccgggtggtcggtttaaaagtacagcgtctgagaaagtgtttggttcattgtccagggctatttttttgaaatgactggtacaccggtcgtgagtcgacctttgtgttgtttttaaattttggagggttataaaaacttacagtggagtcttttgtttttgtgttgacaacagtttgtatgtcggttaaaaaattgaaaccataaaccctttattggtcttaatatgtttggtgtctgatttcctaaggaaaggtttttttttttttggtcaaacctaaggaagggtttatcttcgagttataaagactcgaatctttatttgaattatgaagtaaagtatacataaaacagcaataaattattatgaatttgactttacctgagcaagtaaattgtaaaaagacaagaactaatgaactattagtatatgtccagttcaattgccttatcgtctaaaacccctcaaaagctaaaactgaaatcattttgaagcagaaatcgatttccaaaatg

SEQ ID NO: 36465 - DNA, 3003 bp, Unknown
  misc_feature (1)..( 3003): 2750-1469P.txt file - cDNA_ID_3096391; gDNA_ID_2936587; Annot_ID_195138
ctacatgtcttaagttcttgttttgttgttgctatatatatcttggtttagtgctcacggctagttgcttgtcgtttaaagagaggaatcaatgcttggctattgtatccacacctgagcctctaaagagttaaacagacagattcttgtgtgacggaggatgatgcagtgatttattgcttcaagtgaacttgtactgatcgattggcagagtggtgatgggtcaaaaacattatactcagattcaacaatggcaaccggttggggtgatgatgaattgaaacattacaagaagtaagaaaaaaagggcaatgtcctggtcttagtggacaatgaccggataaaaaggttcgagataaatattaggatttaagaaacgaccacatcctttcccttatataaccgattctctcagtgtcccaacccttagctctcaaaatctgaaaaaacaaaaaaacgagacagtgatgaagtgaagatgtaataatatagtagtgtctatcaagttcttcgtgatttttgtgtttaccttccatctcacaatacgaaactagggtttagctctgctttcctgtctgtcatttttctcttcaaaagatctaacgagtttctttttgtggtcaaattgggccgcagcccgttttctttggaataatacttattggatcgaatattgttatttgtcaaaactatttttcatacagagttggaacaatactcagccctgtttgtttgattatttggcatttacatccaaatgatctatttagatgatgcatttgaataatgtttgtttgattatttagtattttatctaaatgatgcatttaaatgaatatttctttgtttgatcattttgtaattcatctacattctcattctaataaaaatgactaaaatacccattctataattttaacaaatgacaaatatttaacatcattaccaaatataattttaataaagaaatgattttacggttttggcggaaaaatatgattttacagttttggcgagaaatatgattttgtggttttggcggaaaatataattttacggttttggtggaaaaatatgataataaggttttggcggaaaaacatgattttgtagttttggcgggaaaaatacaattttacgattttggcgtgaaaatacgattttacggttttggcgggaaaatacaattttaggttttggcgggaaaaatatgattttacggttttggcgggaaaatacgattttgcggttttggcgggaaaatacgattttacggttttggcgggaaaatatgattttacggttttggcggaaaaaatatgattttgcggtttggtgggaaaatatgattttacggttttggcgagaaatatgattttgtgattttggcggaaaaacatgattttatggtttttgcgggaaaatatgattttgcggttttttggactaaatcatctccatccaaatggttcgatcaagttcatccaaatgagtttcacaaattagtctaaatttacaaagtcattcagatggaccatccaaatgattcatccaaatgatctgttaatttgtcaaaaacaaacatcatttttcatccagatgatctggatgaaaaaacaaactggaccttactatttgaaaataatactatagaattaatttaattttaattagacgaaattagaggacatgaaatgccaggctggcaaattaacgtatgattggagtgggacccatacccgccctgtcagtccacatgctccgctctactcgtcttcttcacatttactgcttccttcaatcttattctaaccatttcttctacatcttttatttttcaagtcgaatgttctatttcctattcagattatttttaaatttcattgtatctgagctttattttcttccgaaattttataatttccaatgattttctttataaaaaatcaactacataagtaattattggttcctaaaaacctatatagtagtatagattcaaaaaaaaaaaaaagggaacagatcataaaatttgcctaatctagtttttcaggacttaaaaagaatgttctcattagtaaatatgaattttcagattacttataaacatatgggtcttattttcccattagaatataagataaatatgtacattttattgactaatttagaataataatatttgaacggtgataaatctaaaagataagggaaaaacagtcagagacatatatgtaaacattttgaaaaattaatataaaaatcttaatttgagcacaaaaaatataattgaaacagaacataaaaacaaaaaaaaatatcaaacacatgccttgtctaaacaaaactacaataatattttcatattattattttgttggcaaggcacacagcttaaaacagccatattaacttatctcttggttttttcttcctcaccctctcgtcgtctcttctctctccaaagccgagaagatttgtcggcgataatacgttaccagatcccattaatcaatatgaagacatattcgacattaattgcttaaatagtgtatagtattgattatacattaatgattactattttctctcttttcccacaatcaatttctttctctatatatcttattttatattcctatttcgcattattaacaaaatcaatttatttgcgcatataaggctgtcatttcggcgtcaatcttcttccttccttatttttctttcttctaaaaattatttatttatgtttctgtaaataaaaattcgtttttttctgtcaatcatactgttttgtctcagaataaaaaaaaaaaaccttcactgttttgtgtggtgtggttacgaagaaagaactcttctccttctccttcttattctttctcttcttcttctctctctctctctctctgagtgtctggttacatttggcgcgaaaagttcttcactttatagcttttttatctctttaattatccgacagcttcgttacaaataaagatg

SEQ ID NO: 36466 - DNA, 3003 bp, Unknown
  misc_feature (1)..( 3003): 2750-1469P.txt file - cDNA_ID_3096391; gDNA_ID_2936587; Annot_ID_143882
tcccaacccttagctctcaaaatctgaaaaaacaaaaaaacgagacagtgatgaagtgaagatgtaataatatagtagtgtctatcaagttcttcgtgatttttgtgtttaccttccatctcacaatacgaaactagggtttagctctgctttcctgtctgtcatttttctcttcaaaagatctaacgagtttctttttgtggtcaaattgggccgcagcccgttttctttggaataatacttattggatcgaatattgttatttgtcaaaactatttttcatacagagttggaacaatactcagccctgtttgtttgattatttggcatttacatccaaatgatctatttagatgatgcatttgaataatgtttgtttgattatttagtattttatctaaatgatgcatttaaatgaatatttctttgtttgatcattttgtaattcatctacattctcattctaataaaaatgactaaaatacccattctataattttaacaaatgacaaatatttaacatcattaccaaatataattttaataaagaaatgattttacggttttggcggaaaaatatgattttacagttttggcgagaaatatgattttgtggttttggcggaaaatataattttacggttttggtggaaaaatatgataataaggttttggcggaaaaacatgattttgtagttttggcgggaaaaatacaattttacgattttggcgtgaaaatacgattttacggttttggcgggaaaatacaattttaggttttggcgggaaaaatatgattttacggttttggcgggaaaatacgattttgcggttttggcgggaaaatacgattttacggttttggcgggaaaatatgattttacggttttggcggaaaaaatatgattttgcggtttggtgggaaaatatgattttacggttttggcgagaaatatgattttgtgattttggcggaaaaacatgattttatggtttttgcgggaaaatatgattttgcggttttttggactaaatcatctccatccaaatggttcgatcaagttcatccaaatgagtttcacaaattagtctaaatttacaaagtcattcagatggaccatccaaatgattcatccaaatgatctgttaatttgtcaaaaacaaacatcatttttcatccagatgatctggatgaaaaaacaaactggaccttactatttgaaaataatactatagaattaatttaattttaattagacgaaattagaggacatgaaatgccaggctggcaaattaacgtatgattggagtgggacccatacccgccctgtcagtccacatgctccgctctactcgtcttcttcacatttactgcttccttcaatcttattctaaccatttcttctacatcttttatttttcaagtcgaatgttctatttcctattcagattatttttaaatttcattgtatctgagctttattttcttccgaaattttataatttccaatgattttctttataaaaaatcaactacataagtaattattggttcctaaaaacctatatagtagtatagattcaaaaaaaaaaaaaagggaacagatcataaaatttgcctaatctagtttttcaggacttaaaaagaatgttctcattagtaaatatgaattttcagattacttataaacatatgggtcttattttcccattagaatataagataaatatgtacattttattgactaatttagaataataatatttgaacggtgataaatctaaaagataagggaaaaacagtcagagacatatatgtaaacattttgaaaaattaatataaaaatcttaatttgagcacaaaaaatataattgaaacagaacataaaaacaaaaaaaaatatcaaacacatgccttgtctaaacaaaactacaataatattttcatattattattttgttggcaaggcacacagcttaaaacagccatattaacttatctcttggttttttcttcctcaccctctcgtcgtctcttctctctccaaagccgagaagatttgtcggcgataatacgttaccagatcccattaatcaatatgaagacatattcgacattaattgcttaaatagtgtatagtattgattatacattaatgattactattttctctcttttcccacaatcaatttctttctctatatatcttattttatattcctatttcgcattattaacaaaatcaatttatttgcgcatataaggctgtcatttcggcgtcaatcttcttccttccttatttttctttcttctaaaaattatttatttatgtttctgtaaataaaaattcgtttttttctgtcaatcatactgttttgtctcagaataaaaaaaaaaaaccttcactgttttgtgtggtgtggttacgaagaaagaactcttctccttctccttcttattctttctcttcttcttctctctctctctctctctgagtgtctggttacatttggcgcgaaaagttcttcactttatagcttttttatctctttaattatccgacagcttcgttacaaataaagatgtcagtaagtgcgttctctctttttgcttctctcttaactaccattacattacatacctcttctttctaggttgtccctttctcggaattgctcttcttcatcgtttctttaactatttacttctctatttttcatcattccgttggatcggattctaaacagtttgacaaacctggatctgtaattctaactcagattcttctgttgtagcaggtggtaacaatcttgatactggcattaaccagtgttattcccatttacgcaaacgttcacggcgccgggaaaatatgcgacgaacttggccggcgatcattgagtacaagaccacacagtgtctccattacagattttggagctgttggagatggcaaaacgctcaacactcttgcgtttcaaaacgccgttttctatcttatg

SEQ ID NO: 36467 - DNA, 3000 bp, Unknown
  misc_feature (1)..( 3000): 2750-1469P.txt file - cDNA_ID_3096403; gDNA_ID_2936587; Annot_ID_143878
tcgagaacgagaagagagcgtaggaaatgaagaagaatatgaagtagaggaagagagggttttgtttaggagtgtcgataatgttcgccgtgtgctgataagagccatcgccggtgagggtttcggcttctgttcttcttcggtccttctctttgcagaagctttgagaaactatatgggcttagtgggcctttgatttatactttttagatgggctattaaaaaatttctctacattaaattccttagtttagtagttaaaagtttcccaacagaaaaatactttaaatcttcttgtcaaatacttcaacactcctaattgaaacactttcagtgttaaaaaaatgtttcaattatcgcttgtcaaattgtttgttcattcttaagtgttttcagaaagaaaatttcgtcctcgttagctataaaacgtattcattttgtattagctttcttaatgtgaatatgacgtcctaagtcaaatcacctaatctaaaattttgatttgagttagcaaaatgtccatcaagttaattcatggataacttttccaacctatatatggttagtaattagtaattatctttggctttttttggatgcatataaaatcacaatgacgataataacgatgattatcaaaatcaaaatggttactgtatttactatttataaaaaaagaaaacatagaattatctctccaaaaataagaaaagtagataaacatttctgaaattgctgtaaggtcaaaagtaaaaagaaaattatccaaaagaaaggttatgcgactttccgtaaatggaattgttggtatgaatgcgtgtatttgtgttttagagagctattcttgttgatgaatctctgaggagcagagcgagatagaggagagtgaaggaacatcatgggaagcagcacgggcgatcttgtgacacgtatccaatcagctcaccgtttcgatcacgatgccttgtttcgttttgccgccgacaacgtctctggctttccgaccaacccttcccaattcaaagtctcacaggtatgttttccaatcgccgaggttttttctccggtaagaaagaaacttttatctgactgtgttttgttttggtttggtttacatacagttcggacatgggcagtcgaatccaacgtttctgatagaggttggctcagggagttccttgaaacgatacgttttgaggaagaagcctcctggcaagcttcttcaatctgctcatgctgttgatcgagagtttcaggtatcaatcaattaataatctttacctctgtaaaattcattgtaactgttcatactcgatttttgaagaagatgaaattttgttgtttctagtaccgttttgaaatgcagaatcattgtaactttttgtgatgctgcttataagagatacggtatcaactaaaggtagatgctttttttgcttaatactttgatggtggttggtttatgtaggtgcttcgggctttaggtgaacatacacaggttcctgttcctaaagtcttctgcttatgcactgaccctgctgtcattgggactgctttttacattatggagtttatggaaggacgtattttcattgatccaaagttgccggtaagatattctctgttatgtgaatgtgtatgtacggtttttttagcttgagatgtgactcattgtaaacgaaaggtgtaaatttgtgtgtgtttcatcggttttgatttagaatgtagcacctgaaaggagaaatgcgatctatcgtgcaaccgccaaagccttggcatctcttcactctgctgatgtggatgccattggtcttgagaaatatggtcggcgaggcaattactgcaaaagacaggtttgttctttatttggggctggtgaatttccaaatcactactcactagtttgatgttctcttaatgcttatatgctcttgctaaagttttttcttttggatacctccatttcagatagataggtggttcaaacaatatttggcttcaacaagtgaaggtaaacctgaaaggaatccaaagatgtttgagcttgttgattggttacgcaaaaacatccccgcggaagattcaactggagcaacatcaggccttgtccatggagactttcgcattgacaatctcgtttttcatccttctgaggtcttaatactttcaagatcttttgttttctgatccttggatagtctcggagacttaactgaaaatatcttaaactgtaggatcgagttattggaataattgactgggaattgtccacgcttgggaaccaaatgtgtgatgttgcatacagctgcatggtaataacctattcttgtttgttgtattgtactcataaagcagttttctttgcttcctgctctgatatacagttcatttgtgttggcagcattacattgtgaatgttcagctcgataaggagcatgttagtgaaggttttgaaactactgggcttccagaaggaatgctttcgatgccagaatttctcttagaatactgttctgcatcggtattgtcctgcaacaacatgtagtctttaaaaggaatcaagtcaggtgttccttgtacattgcctatattttctcaatttctgttgtagtgacatattggcaaatgaactttagggaaaaccatggcctgctgcaaactggaagttctacgtagcgttctccttatttcgggctgcttcaatctacacaggggtgtacagtagatggttaatggtattccccgggcatatttttgaattctaagattctttattatgcagttgtagagccattgacattgtgttgatcatgcaggggaatgcttctgccggtgaaagagcgcgaaatacaggggttcaagctaatgagcttgtagagtctgccttgggttatattgcacgtgaaaatgttcttccagaacaccctccatctggtaatcgacctctttgagattcaagtttgttaaggataactgtttattttacatttcttatatatg

SEQ ID NO: 36468 - DNA, 3000 bp, Unknown
  misc_feature (1)..( 3000): 2750-1469P.txt file - cDNA_ID_3096411; gDNA_ID_2936587; Annot_ID_143876
atccatgagagagctttatttatgaggagacacatacccggatcttgttctccttctgcctatcttgaagtgcgttaatggcaggactcaagctgcaaaagcatgaagttcatataacgaatgacaaaaccacgtatcaaatgttttaacacgcttcactaaccagtattcgatcaacttgcacatggaggcttgatatgttgatgtgttgtgaatgaaagcaagaggatgaactcgcccatctctagagaagaaacagaaggagctttagcactaaaatctctatgattagggtatgaaaaagattaattgaaaacctcatgttttgctgcactgattggtagtacgctgctcgttcctcctcgtacagtactcgttgcaggcttttaaaagatgctaaaggtgaattgactggaagaagggatgaagttggcaaaacatgaagtgggacttcttttctaacataccccgcaccactgcacgtaaattcctaagcttagtaattacgtaattgaaaaattgtagtgttcataagcctagaagcgtatgttgagaaatacctggtatctaaatttgaacggagcattgcctcttgcatactttcagacatgtccatcgagtcaattcctatagttgtgctgctgagattgcctgatttgtgagtttcatctctgccggtgatattggcctcaatattgtttgtaaagaaaggcccaaaatctgaaacccgtcctccaccctagtcagccacatacacatacaaaactcaaacatcaatgtgtatatacattgcagccaatggttcagtcagaaatagtaccatgattgtcttgagaattttgaataatgatgcagatattacaatttgtcaactttcattaagctcgagtaaaatgctatatagcatttggaaaaagagaccttagatccggaagttgtagcagtatcaattgtgtctagctcgggcttagaagaagaggatcgctggtatatcgagtccgaagaactagatgaagattctatatcgatgacagaatctttattagcaagaaccaggctcattgatttaggaatactattcggctttccatcagaagactggaaagcgataacttggattctaccaacctggaaacatcaacaaagccagttcagcaaacaggagaagtaatcctgaaaagtttcaacttgctaatccactcatagaaagcaaataccaaccttgttagcatcttcactaaaacaggaaaatatgaggccaataaaaccagaatctaaaagctgatacatagcttgtgtccgaacatctgcaggacataaatatgaggaacaagatcataaaaaaaatcataaaaagttacaatgatgatgatacataccgacatgggaaggaagaacggtaatatgaggatgggagtggtaccatccaatgacccgtgtagttctgcccgttgatatcgtcattctgtgtcagagaggttagttaaggaagacaacaaaacactcttgttttaaccaaaccatcatatctaaaagacacaagaagaaccacacatagagaccatcaatctgaaaatagcaagtttacaaaaaggatatatcagcctgagcagaagcagcagccaattgttcaggattggtttcaactcgatccttctgccgatcagatcgtggctgaggcgatgctccccagatcatagctgtggcactttcgccgttctttgagtactaagtcaatttccaataccacaaacaagatttgaaagtcagcgattgattttgattatctgggaattgttcaagccttaaaatatcatcaaaaacagagcggcaaaaagccaaacttttggactgaattcaattaaattagagtaatatcgaatccaagtaagatgaaacattcgctgcagagtaaaagtaaagcgtagacgaagagaagatgaagaaatagtgtgaacctcgatgtcgccgagaaggagacccatgatttcttcggtctcggtggataatgcgtgagtgaggcaagtcaaccagacatcctccgacatatttacgcatgtcagagacattattacttcttccgaagagatctttcaaacttaatgcagatgagcttcttcgagaattcgatttgaattttgcctctttcggacgaaactgaggaaagcagaagaaagaatcctacattaattatgtgtcggaacgtgtaatttagcacagttccgatggcgcgatatgagaaattagggttgtgtttgtgaattttgggggagaaatagataactacgtcgttgtacaaacggaccttgcccgaattacacccgcctttttttagaattagaaagcaggttcgtgggctttaaaatttacaagggtttttggtacattattaaacatcactacttcactagtagttaacagggatgatgatttgcactgtgacattcaacagtactaaacccttattcttcatctctaaatcaacaatttcccccatttagtaagaatcattcgaatcacatattctcttaagaaaatcatcaagattacgattaatatgtatctcacacttcatcccacaaattcatgaccatacttactattcataggctatcataaaatccggaaaccagatcattttagattgggaaaaaaaaaccttactaaagacagaaaatgtaacatagcctcatgttctttcctaaaaccccagaaatagtattacaactcttttctatattaaccccatcgatctttcgattcatttgttctaagcattgtgtataccaaacacgaaaagatcccttccccctaaaaaaaaaataaaaaaattcagagctagaaggggcctcatagttatagccacagttataggccccatctgctccatttttaacatgtgtagaaaatcatattagaaaagtaggaaaaaatacttgagcaaagatacctttttcgacctttagaatttttgtgaatatataggaaacagaaaaaatg

SEQ ID NO: 36469 - DNA, 3000 bp, Unknown
  misc_feature (1)..( 3000): 2750-1469P.txt file - cDNA_ID_3096416; gDNA_ID_2936587; Annot_ID_143875
acgaaaagatcccttccccctaaaaaaaaaataaaaaaattcagagctagaaggggcctcatagttatagccacagttataggccccatctgctccatttttaacatgtgtagaaaatcatattagaaaagtaggaaaaaatacttgagcaaagatacctttttcgacctttagaatttttgtgaatatataggaaacagaaaaaatgggttctgatggtgacaagaagaagaaattcatcgtcgccggtagtgtctccggttttctagtcatcatggttgtctctgtagccgttgtaacgtctaaacactctcccaaagacgatgaaaatcatatcagaaaaaccaccaaagcggttcaagcagtttgtgcacccactgacttcaaagacacttgtgttaacagcttaatgggtgcttctcccgattccgatgaccctgtcgacctcatcaaactcggcttcaaggtcactatcaaatccatcaacgaaagcctggaaaaggcctctggagatatcaaagccaaggctgacaagaacccagaagcaaagggtgctttcgagctgtgtgagaagctgatgattgatgctatcgatgacttgaagaagtgtatggatcatggattctcggttgatcagatcgaggtctttgttgaggatctacgggtttggctaagtggctccatcgcattccagcaaacatgtatggattcctttggggaaattaagtctaatcttatgcaagacatgctcaagatcttcaaaacatcaagagagcttagtagcaatagccttgccatggttactagaatctccactcttatcccaaactccaaccttacaggtatcttttcaatttactaaagagatctccaaactaatccataaccaaccagtcagaatcattggacagtaatgtgatgcttcaaaccaggactaaccggagctttagcaaagtacgcgagaaagcttctgtctacagaagatagtatcccaacttgggttggaccagaggcacgacggctcatggcagctcaaggaggaggacctggacctgtgaaggctaatgccgtggtggctcaagacggaactggacagttcaagactatcaccgatgctctaaatgctgtgcctaaaggcaacaaagtgccattcatcattcacatcaaagaaggtatctacaaggagaaagttacggtcaccaagaaaatgcctcacgtaactttcatcggcgatgggccaaacaagactctaatcaccggtagtctcaatttcggtatcggcaaggtcaagaccttcctaacagccacaatcagtgagtttcaatctccaaactctaaaagtccacaaagagagattctaaacattaccaaattattgtttcgcagcaatcgaaggcgaccacttcacagcgaagaacatcggaatcgagaacacagctggaccagaaggaggacaagcggtggcgttaagagtctcggctgattacgccgtattccacagctgtcaaatcgacgggcaccaagacacgttatacgttcactctcaccggcaattctaccgtgactgcacagtctcgggcaccgtcgatttcatcttcggagacgcgaaatgcatcctccagaactgtaaaatcgtcgtccgaaaacctaacaaaggtcaaacgtgtatggttacagctcagggacgaagtaacgtccgtgaatcgacaggattggtgctccatggctgccatataacgggagatccagcgtatattccgatgaaatctgtgaataaagcttacttaggaagaccgtggaaggagttctcgaggacaatcattatgaaaacgacgatcgatgacgtcatcgatccggcgggatggcttccctggagtggagattttgcgctcaagacgctatactacgccgagcatatgaatactgggcctggatcgaatcaggcccaaagagttaaatggcccggaattaagaaactaacgccccaagatgctcttttatacactggcgacagattcttacgtggcgatacgtggatcccacaaacacaagttccgtatacagctaaagtgtaggagattccaaattttgtaaattgatttaatttgtaaatgttttaaaactaaaaactgtttgaagaatgattaattgattatgtcatagtgtggaagctgatcaaaaccctgattatatagaatagaaaaggcctatcgatatctcaatgttacacgaataaggcacttattacgattacttataatatctgaatgccttttaattggataatataaataaatactgacgagtttttaattaattaaaacatttaggagatgcatgtgttatatagattcacgtgatggtgatgcacatgtatcgtccttcgagattgagagcgcctggctacatccaatattgaatcccttcgtctttgaagtttgaatggtgaaaacaataacatattaacattcctcgcttcgggaactaaaaccatgactttatagcgtacgatgcagtaagtaccatttacgtgtctttttctgcttattgttatatggagagttattttcgcattgttaaatatagacgtataattagttattcgttaggtactggaatatgatatgattgattaatttttcttttttgtggtatgaaatgtaaagacgaatgataaaattgtaatgactaaaaaaggaattgaaaaggagatgaattatcatgtatgggccatttataaaagtaaaaaaaaaaaaaaaacttagaaaaatacgggttgtttgaaaatgacagaatagacgactctcgttgcattgaatttgagtgaaccccacactctctttcaagtctcaacggccatctccattctcttctatctcttcttcacaaaactctttcacccatttttcctccattaaacaacaaacgacctcgtaagaaaaatgtcaaacatttccccaatcttctccatctccaactctcaacatttcagcgactatg

SEQ ID NO: 36470 - DNA, 3000 bp, Unknown
  misc_feature (1)..( 3000): 2750-1469P.txt file - cDNA_ID_3096428; gDNA_ID_2936587; Annot_ID_195131
tattaaccccatcgatctttcgattcatttgttctaagcattgtgtataccaaacacgaaaagatcccttccccctaaaaaaaaaataaaaaaattcagagctagaaggggcctcatagttatagccacagttataggccccatctgctccatttttaacatgtgtagaaaatcatattagaaaagtaggaaaaaatacttgagcaaagatacctttttcgacctttagaatttttgtgaatatataggaaacagaaaaaatgggttctgatggtgacaagaagaagaaattcatcgtcgccggtagtgtctccggttttctagtcatcatggttgtctctgtagccgttgtaacgtctaaacactctcccaaagacgatgaaaatcatatcagaaaaaccaccaaagcggttcaagcagtttgtgcacccactgacttcaaagacacttgtgttaacagcttaatgggtgcttctcccgattccgatgaccctgtcgacctcatcaaactcggcttcaaggtcactatcaaatccatcaacgaaagcctggaaaaggcctctggagatatcaaagccaaggctgacaagaacccagaagcaaagggtgctttcgagctgtgtgagaagctgatgattgatgctatcgatgacttgaagaagtgtatggatcatggattctcggttgatcagatcgaggtctttgttgaggatctacgggtttggctaagtggctccatcgcattccagcaaacatgtatggattcctttggggaaattaagtctaatcttatgcaagacatgctcaagatcttcaaaacatcaagagagcttagtagcaatagccttgccatggttactagaatctccactcttatcccaaactccaaccttacaggtatcttttcaatttactaaagagatctccaaactaatccataaccaaccagtcagaatcattggacagtaatgtgatgcttcaaaccaggactaaccggagctttagcaaagtacgcgagaaagcttctgtctacagaagatagtatcccaacttgggttggaccagaggcacgacggctcatggcagctcaaggaggaggacctggacctgtgaaggctaatgccgtggtggctcaagacggaactggacagttcaagactatcaccgatgctctaaatgctgtgcctaaaggcaacaaagtgccattcatcattcacatcaaagaaggtatctacaaggagaaagttacggtcaccaagaaaatgcctcacgtaactttcatcggcgatgggccaaacaagactctaatcaccggtagtctcaatttcggtatcggcaaggtcaagaccttcctaacagccacaatcagtgagtttcaatctccaaactctaaaagtccacaaagagagattctaaacattaccaaattattgtttcgcagcaatcgaaggcgaccacttcacagcgaagaacatcggaatcgagaacacagctggaccagaaggaggacaagcggtggcgttaagagtctcggctgattacgccgtattccacagctgtcaaatcgacgggcaccaagacacgttatacgttcactctcaccggcaattctaccgtgactgcacagtctcgggcaccgtcgatttcatcttcggagacgcgaaatgcatcctccagaactgtaaaatcgtcgtccgaaaacctaacaaaggtcaaacgtgtatggttacagctcagggacgaagtaacgtccgtgaatcgacaggattggtgctccatggctgccatataacgggagatccagcgtatattccgatgaaatctgtgaataaagcttacttaggaagaccgtggaaggagttctcgaggacaatcattatgaaaacgacgatcgatgacgtcatcgatccggcgggatggcttccctggagtggagattttgcgctcaagacgctatactacgccgagcatatgaatactgggcctggatcgaatcaggcccaaagagttaaatggcccggaattaagaaactaacgccccaagatgctcttttatacactggcgacagattcttacgtggcgatacgtggatcccacaaacacaagttccgtatacagctaaagtgtaggagattccaaattttgtaaattgatttaatttgtaaatgttttaaaactaaaaactgtttgaagaatgattaattgattatgtcatagtgtggaagctgatcaaaaccctgattatatagaatagaaaaggcctatcgatatctcaatgttacacgaataaggcacttattacgattacttataatatctgaatgccttttaattggataatataaataaatactgacgagtttttaattaattaaaacatttaggagatgcatgtgttatatagattcacgtgatggtgatgcacatgtatcgtccttcgagattgagagcgcctggctacatccaatattgaatcccttcgtctttgaagtttgaatggtgaaaacaataacatattaacattcctcgcttcgggaactaaaaccatgactttatagcgtacgatgcagtaagtaccatttacgtgtctttttctgcttattgttatatggagagttattttcgcattgttaaatatagacgtataattagttattcgttaggtactggaatatgatatgattgattaatttttcttttttgtggtatgaaatgtaaagacgaatgataaaattgtaatgactaaaaaaggaattgaaaaggagatgaattatcatgtatgggccatttataaaagtaaaaaaaaaaaaaaaacttagaaaaatacgggttgtttgaaaatgacagaatagacgactctcgttgcattgaatttgagtgaaccccacactctctttcaagtctcaacggccatctccattctcttctatctcttcttcacaaaactctttcacccatttttcctccattaaacaacaaacgacctcgtaagaaaaatg

SEQ ID NO: 36471 - DNA, 3000 bp, Unknown; identical to SEQ ID NO: 36464
  misc_feature (1)..( 3000): 2750-1469P.txt file - cDNA_ID_3096461; gDNA_ID_2936587; Annot_ID_195141

SEQ ID NO: 36472 - DNA, 3003 bp, Unknown
  misc_feature (1)..( 3003): 2750-1469P.txt file - cDNA_ID_3096465; gDNA_ID_2936587; Annot_ID_195139
tttgtctcagaataaaaaaaaaaaaccttcactgttttgtgtggtgtggttacgaagaaagaactcttctccttctccttcttattctttctcttcttcttctctctctctctctctctgagtgtctggttacatttggcgcgaaaagttcttcactttatagcttttttatctctttaattatccgacagcttcgttacaaataaagatgtcagtaagtgcgttctctctttttgcttctctcttaactaccattacattacatacctcttctttctaggttgtccctttctcggaattgctcttcttcatcgtttctttaactatttacttctctatttttcatcattccgttggatcggattctaaacagtttgacaaacctggatctgtaattctaactcagattcttctgttgtagcaggtggtaacaatcttgatactggcattaaccagtgttattcccatttacgcaaacgttcacggcgccgggaaaatatgcgacgaacttggccggcgatcattgagtacaagaccacacagtgtctccattacagattttggagctgttggagatggcaaaacgctcaacactcttgcgtttcaaaacgccgttttctatcttatgtctttcgccgacaaaggtggggcccagctctatgttccgccgggacattggctcaccgggagttttagcctcaccagccacctcactctctttctcgaaaacggcgccgttatagtcgcttctcaggtatattacaatgcttctttctcattctcacatttatcccaaacttttaaatttatccaaaaaccccaaatttttacttcaaaaggatccatcgcattgggaagtggttgatcctttaccttcatacggaaggggaattgatttgcctgggaagcgatacaagagtttgatcaacggtaacaagctacatgatgttgttgtaacaggtaacaaactatgctttatacatttttatttcattttcacttgttacaatatccttcaaattataatatggttactccatccttttccttggttaggtgataatggaactatagatggtcaaggcttggtttggtgggatcggtttacttctcattccttaaagtataaccgtcctcacctcatcgagtttctttcttctgaaaatgtaattgtctccaatcttacgttcttgaatgctcctgcttattcaatctattcaatctactctaggtaagagatagttcaacactatctaggcctcaacctttttttggtttttttgaatgataaagtcttgactctaatactgtccttgtgcagccatgtatatattcataagatattggcccattcttctcctaaatctccttatacaatcggtattgtaccaggttagttgtctctacttcttctagactaaaaccctttttgttgtgtctaagcatagaagaacgaaatgtcttatgttttgttatgtttctcagattcttctgattacgtctgcatccaaaactctaccattaacgtggggtatgacgcgatttccctcaaaagcggttgggatgaatatggaattgcctattctcgtcccactgaaaatgttcatataagaaatgtgtaccttcgaggagcttctggttcctctatctcctttggcagtgaaatgtctggtggaatatctgatgtcgtggttgataacgctcatatacactactcgttaaccggcattgcctttagaaccacaaaaggcagaggtggttatatcaaagagatcgatatttcaaacatcgatatgttgagaataggtactgccattgttgctaatggtagctttggatctcaccctgatgataaatatgatgtgaatgctctcccacttgtgagtcacatcagattaagcaacatttctggagagaacattggcattgcggggaaattgtttgggatcaaagaatctccatttagctcagtgactttgtcgaatgtttctttgtcgatgagctcaggttcttctgtttcttggcaatgctcctacgtttacgggtcctcggagtcagtcattcctgaaccgtgtcccgagctgaagagagatgctgatgcttacggtagagctgcagtctagtgaaacagactgcaaaagaaaaaagaaaaaaaaagcaagaaacatttcttgggattctttgataggattcaattcatcaatcatttcatattttgtggagttagagaaggtcagattctttcctcaagtaaaccacattgtctttagatcatacatgttcctttcggttattctggtttcctatttttatgttgtttgcatattctgagataagaaatctgtacaggttcatttcttcattcatgtgtaaacaaagaaattttgtttcagcagttttccacaagccattaataataaaaaggagagatagtttcatttttccagaaattttatttgaattatctcttatcaagcttcaaagcttaatctcttggttatcagtgacttatcagttatcaatcttccaaacataacccaaaaagcggaccaaagataatacgaaaacgccaagaaaacagaatttattttggctctaaccaaaacgtactaactttttatttgagtcagcaaactttcgactccaacaacttttttactattttgaatatatgaaagtctcaatgaaaggaaagtactctgtttccggttatgcacataaaggttccaaggtacaaatgacaattatatatggatgcaactctgcatcctcttataacttacaatattttgcatcatacattgaaaccactcctaacaattccaacctgagatcctcaagtctcatgcaccaaccacaacaaggcaatggatttataacgagaaattagaaatcgtcttcaagcatggttgacaacaacaagcctcgcacaaactcactctttttcgccttctcctgatcttcacctgaaagtggagcttcttgaatgtctctgcataaatg

SEQ ID NO: 36473 - DNA, 3003 bp, Unknown
  misc_feature (1)..( 3003): 2750-1469P.txt file - cDNA_ID_3096471; gDNA_ID_2936587; Annot_ID_195135
cttgatcaacttctgccttaactccaatacttttctgttggggatgaatctcccgcttccatccacaaggctttcatacgacggagacacgtctctttgaactgcatccatatataagaaatgtaaaataaacagttatccttaacaaacttgaatctcaaagaggtcgattaccagatggagggtgttctggaagaacattttcacgtgcaatataacccaaggcagactctacaagctcattagcttgaacccctgtatttcgcgctctttcaccggcagaagcattcccctgcatgatcaacacaatgtcaatggctctacaactgcataataaagaatcttagaattcaaaaatatgcccggggaataccattaaccatctactgtacacccctgtgtagattgaagcagcccgaaataaggagaacgctacgtagaacttccagtttgcagcaggccatggttttccctaaagttcatttgccaatatgtcactacaacagaaattgagaaaatataggcaatgtacaaggaacacctgacttgattccttttaaagactacatgttgttgcaggacaataccgatgcagaacagtattctaagagaaattctggcatcgaaagcattccttctggaagcccagtagtttcaaaaccttcactaacatgctccttatcgagctgaacattcacaatgtaatgctgccaacacaaatgaactgtatatcagagcaggaagcaaagaaaactgctttatgagtacaatacaacaaacaagaataggttattaccatgcagctgtatgcaacatcacacatttggttcccaagcgtggacaattcccagtcaattattccaataactcgatcctacagtttaagatattttcagttaagtctccgagactatccaaggatcagaaaacaaaagatcttgaaagtattaagacctcagaaggatgaaaaacgagattgtcaatgcgaaagtctccatggacaaggcctgatgttgctccagttgaatcttccgcggggatgtttttgcgtaaccaatcaacaagctcaaacatctttggattcctttcaggtttaccttcacttgttgaagccaaatattgtttgaaccacctatctatctgaaatggaggtatccaaaagaaaaaactttagcaagagcatataagcattaagagaacatcaaactagtgagtagtgatttggaaattcaccagccccaaataaagaacaaacctgtcttttgcagtaattgcctcgccgaccatatttctcaagaccaatggcatccacatcagcagagtgaagagatgccaaggctttggcggttgcacgatagatcgcatttctcctttcaggtgctacattctaaatcaaaaccgatgaaacacacacaaatttacacctttcgtttacaatgagtcacatctcaagctaaaaaaaccgtacatacacattcacataacagagaatatcttaccggcaactttggatcaatgaaaatacgtccttccataaactccataatgtaaaaagcagtcccaatgacagcagggtcagtgcataagcagaagactttaggaacaggaacctgtgtatgttcacctaaagcccgaagcacctacataaaccaaccaccatcaaagtattaagcaaaaaaagcatctacctttagttgataccgtatctcttataagcagcatcacaaaaagttacaatgattctgcatttcaaaacggtactagaaacaacaaaatttcatcttcttcaaaaatcgagtatgaacagttacaatgaattttacagaggtaaagattattaattgattgatacctgaaactctcgatcaacagcatgagcagattgaagaagcttgccaggaggcttcttcctcaaaacgtatcgtttcaaggaactccctgagccaacctctatcagaaacgttggattcgactgcccatgtccgaactgtatgtaaaccaaaccaaaacaaaacacagtcagataaaagtttctttcttaccggagaaaaaacctcggcgattggaaaacatacctgtgagactttgaattgggaagggttggtcggaaagccagagacgttgtcggcggcaaaacgaaacaaggcatcgtgatcgaaacggtgagctgattggatacgtgtcacaagatcgcccgtgctgcttcccatgatgttccttcactctcctctatctcgctctgctcctcagagattcatcaacaagaatagctctctaaaacacaaatacacgcattcataccaacaattccatttacggaaagtcgcataacctttcttttggataattttctttttacttttgaccttacagcaatttcagaaatgtttatctacttttcttatttttggagagataattctatgttttctttttttataaatagtaaatacagtaaccattttgattttgataatcatcgttattatcgtcattgtgattttatatgcatccaaaaaaagccaaagataattactaattactaaccatatataggttggaaaagttatccatgaattaacttgatggacattttgctaactcaaatcaaaattttagattaggtgatttgacttaggacgtcatattcacattaagaaagctaatacaaaatgaatacgttttatagctaacgaggacgaaattttctttctgaaaacacttaagaatgaacaaacaatttgacaagcgataattgaaacatttttttaacactgaaagtgtttcaattaggagtgttgaagtatttgacaagaagatttaaagtatttttctgttgggaaacttttaactactaaactaaggaatttaatgtagagaaattttttaatagcccatctaaaaagtataaatcaaaggcccactaagcccatatagtttctcaaagcttctgcaaagagaaggaccgaagaagaacagaagccgaaaccctcaccggcgatg

SEQ ID NO: 36474 - DNA, 3003 bp, Unknown; identical to SEQ ID NO: 36473
  misc_feature (1)..( 3003): 2750-1469P.txt file - cDNA_ID_3096471; gDNA_ID_2936587; Annot_ID_143880

SEQ ID NO: 36475 - DNA, 3000 bp, Unknown
  misc_feature (1)..( 3000): 2750-1469P.txt file - cDNA_ID_3096476; gDNA_ID_2936587; Annot_ID_195134
tgttgtaaaaatccctaatccaaaactatttcgtggattttagggaaaaaagagaattcgaacaaggtcgtcgtcgtcgtcggatttgtagatcatcatggagttctctttgatcgcagatacagtcacagtttgcacggctaagcaaggtatcgcgtttgggaaatctcttcttcaaaggttggatttggccaatcacatttctttcgccgattccgttgttgatcatcaatctcccggtggaggaatcgttcaagcatcggcgattattttccccgtcgatgcaattgctcctccaccggtcagatctagctcttataagacaattcgccggatccgtaaaaagcgacgaaccaggcgagtttcgtttggtggagatggagatgacgcaggagattttggtcgttttctgttagaaggtgatttcggtggtagcgacggtccatttggatttggaggcggaggaaacgatggaggcggaaagggatggaactacggcggcggcggcggtggtttcgggagggataattgggatgggtcttcgttttcgtcttggtcagatccagcgatggaatttgtgtatgaagtgatttgctggatcgcgttgtctaattgtgtgcactttgcgttcaagaggatagtgaggatcgtgaccgacggtgaaagggagaagttgaacattgcattatctccggtatgctgacaaattcgtggtcgtggtgatgattcctggttaaaagtattcttaatctcggttccaattacatcatatgatctctcgtgtgtatatatattacattgtacatatttatttaatttctccttcgcaagttcacattagatttttataatttgttctgtttagagtagtgtttagtcatcattagagacatgaatgatgattgatttgtttgattaagtggataaaaactgaaaagtctctcacatgagtgtttaagacaagcatgtaaataccataatcctaataaactccatccattacataatgcattgttcatgtttaatattaagcactgggcttgttgaactctcccggatttactggagaatgaagacccatggatggctctctcctctcaacctgcattgtctcacggcgcctatcataccttggcctaggacggggtctagtatgacgctgttccgtgaacctgtactgtggtctgggtatgacctttccttcaacgtacaagtcacctgaacatgagagccaaagacagatggtatcagtattaagaaccatatctcagtacccaatcattcagacaaaatctacaaacgttacacacctccgtagtctttgtttggtacatcgagataggaatccggcagcacccagagaacaccaggcaatgctaatgaatcacacaactctagatcagatttctcaaacagtaaaatatgttctcattttatagtactagagacagacaataactgcgataaaacaaagatcaagagaagtttcctcctagctgttgaacagagcagtaccaaacagagaaagccttttacgataaatctcaacatcataagtaaacaactagaaaagctatgtcagagcaaaaaaggcttaaaaacctaattgcaaatatggagaagttgatacctttgactttgcaagagagctcttcagagatcaaagcaccaaagccagtgtaggtcgaagtacaaacagagtaaatcttcttcttggcctcttcctcactatagtttaaccattattacccacaaaatgcaaatccgtcaatccccaaatgcacaagaaaacatttgagagtcaaaatcaaatgaaaaggaacttgccagccaaggacggaagttaaggttttgacataagaattgatcatctcttcttcagtaggtttaggatcagtgaactccatgacgatgagccagtgctcataatcgcacccatcaagaagaatcgtctccttcggcggacggttgctccaattcggcgaaggatcattcagcggcgagtatccggacccggatgtcttgggtcgggtcgagatgtaacacgggcccaggctggttcgggaagaggaaaccttttcaattagaggcatggcgaatcgagaacgagaagagagcgtaggaaatgaagaagaatatgaagtagaggaagagagggttttgtttaggagtgtcgataatgttcgccgtgtgctgataagagccatcgccggtgagggtttcggcttctgttcttcttcggtccttctctttgcagaagctttgagaaactatatgggcttagtgggcctttgatttatactttttagatgggctattaaaaaatttctctacattaaattccttagtttagtagttaaaagtttcccaacagaaaaatactttaaatcttcttgtcaaatacttcaacactcctaattgaaacactttcagtgttaaaaaaatgtttcaattatcgcttgtcaaattgtttgttcattcttaagtgttttcagaaagaaaatttcgtcctcgttagctataaaacgtattcattttgtattagctttcttaatgtgaatatgacgtcctaagtcaaatcacctaatctaaaattttgatttgagttagcaaaatgtccatcaagttaattcatggataacttttccaacctatatatggttagtaattagtaattatctttggctttttttggatgcatataaaatcacaatgacgataataacgatgattatcaaaatcaaaatggttactgtatttactatttataaaaaaagaaaacatagaattatctctccaaaaataagaaaagtagataaacatttctgaaattgctgtaaggtcaaaagtaaaaagaaaattatccaaaagaaaggttatgcgactttccgtaaatggaattgttggtatgaatgcgtgtatttgtgttttagagagctattcttgttgatgaatctctgaggagcagagcgagatagaggagagtgaaggaacatcatg

SEQ ID NO: 36476 - DNA, 3000 bp, Unknown; identical to SEQ ID NO: 36468
  misc_feature (1)..( 3000): 2750-1469P.txt file - cDNA_ID_3096485; gDNA_ID_2936587; Annot_ID_195132

SEQ ID NO: 36477 - DNA, 3003 bp, Unknown
  misc_feature (1)..( 3003): 2750-1469P.txt file - cDNA_ID_3096492; gDNA_ID_2936547; Annot_ID_193915
cgataacaccaccaccttcttgtcttcttacgtgtcatacacgaaaaacacgaggttctcgaaccctaacaacaaaaacctactagccatcgtagtggcgaaagatgtatctcatgttcaggcaacggtggtctgcgcaaagtccaatggtatccagatccgtatccgaagcggtggtcatgacaacgaaggactttcttacgtgtcgtctgtgccatttgtcattcttgatatgcacaaactgagggatattactgtcgacgtgtcaagcaagaaagcatgggtccaagctggtgcgaccttgggagagctctacgtgaagatcgatgaggcaagccaaacgttagcgttccctgctggcatttgcgctacggtaggagctggaggacacataagcggtggagggtatggaaatctgatgagaaaattcggaaccacagtggatcatgtcattgatgctgaattagttgatgtcaacggcaagctcttgaatcgatctaccatgggagaagatctcttttgggcgattcgcggcggtggtggtgcgagtttcggagttatactctcttggaaaataaacctcgtggaggttccaaagatctttacagtgtttcaggttaacaaaacattggaacaaggaggcactgatgttgtctacaagtggcagcttgtcgctaacaaattccctgataatcttttcttgagagcaatgcctcaggtagtaaatggaacaaaacacggcgagagaaccatcgcgattgtattctgggctcagttcttgggtcgaaccgatgagctgatggagataatgaaccagagctttcctgaattagggctaagacgtgaagattgtcaagaaatgagctggcttaacacgacgttgttttgggctatgttaccagcgggtactccgaagaccgtccttctaggtagacctacggatccagtattctttaagagtaaatcggattacgtcaaaaagccaatccccaaagaaggactggagaagatttggaagacaatgttgaaattcaacaatattgtgtggctgcacttcaacccttacggtggaatgatggatcggattccgtcaaacgccacagcgtttcctcaccggaaaggaaacttgttcaaggttcaatactataccacatggttggacccaaacgccacagagagtaacctgagtattatgaaggagctctacgaggttgcagaaccgtacgtgtcaagtaacccgagagaggccttctttaattacagagacattgatattggaagcaatccaagcggtgagacagacgtggatgaggctaagatctatggatacaagtatttcttggggaatttgaagagattgatggatgttaaagctaagagtgatcctgagaatttcttcaaaaacgaacagagtattccccctcttttatcaagggtgaggagagacgacgaattgtaattgttagaagaaaattatgtttaccttaactctgcatagataaaaggttgaaatattggattgtatgctctaaattttactagaaatttgaaatgtacactacaatattttaaaatttgttcggtatcttattattctctcaaaaagactttttgcacttaattaataattaaaattttgagaaaaagaacaaaataaaataattaggaaacatagtttttacaaatattattaaaaaatctagaaaaactattcattttaaaaaaattatactcaaaaagttttttttttctttcttggtgaaaacagatgatgataaaactaaaactaataattatgaaataaactatgacttttaattatgtaataatttagataacgattcgtttaatattacaggctcatcattcgtcagtcattgactcgccataacaaatgcatatcctaaaacatttcctacgggtacaaaatttccaacatgaatatattttttcgtaattgagacacatagcttgtaatattcgaaaagtcttgaaagtttggcattctcacggatagatggcacagtacaaaaactatgtacgtagttagcgcaaaaaatcagctatcatacatataacataccgaattcacaaatgatataacatcgccatctatggtaggtataattttatgtatttttgtatcataaatctttttacaataacaatttatactgcattaatatatatttgtgtaccgtcatatttagggttataatatatgcgtatataatagtttttgagaattattatatataatttagttatgacattttatatatgatataattcactcttttaaaacaaatattttttgggtacggtagaagtattgaactgttttttattggctattatatgtggttttacattttagagagctatatatattgatatacctaatcttgtgatattgcatactataaacaaaaacatatcgaaataaaaatcatttaacataaaatctgattccaatctaacatacagtacataagtttataaaatcattcatcatacataacgcaagtgtgcatctaaaatacataatacaagtcatattgattagcttagtcttaaacttatggatggaccattagaaatcaaagattgcagttaataaatatattgggccatggaatgctatgactgggccgggtcataagaaaccaatccggaggaagcgaacagaaaataattttgtttcccgtattactgtaccggttcaaccgtcccggtatattgaatcgaaccaaaatgtggcaaaacctaatttctttttttcctaagagagtttttatttttattttctcagaaccagaataaggagacgaaaggagcacaggcccagagacccccccataaacatcgtctctgagaaaggtgctgttcgaattgagctcgatcttaactacttctgttgttgaatttcttgccccgttcggaaaaattgagcttaaactactttgaagaaaccttgtggaatttttggggatgccatcaatg

SEQ ID NO: 36478 - DNA, 3003 bp, Unknown
  misc_feature (1)..( 3003): 2750-1469P.txt file - cDNA_ID_3096522; gDNA_ID_2936547; Annot_ID_193909
accttctctgtttcagagacccacattgctttgagtactcaaaatctaacatttacaagtcatcacacaataatatctgaacttttctttacttaagccttagggtattctgcttattagtacccaagaaatatcataaagagtataaattgtcgatcatcatatcagaataatctcctctctctctaacaaactcgcaaactcacatttgtggtactctcagtgttagacaagtccgatcaagtttaagcagtcatggcggttttgcttcctctgtttcttctctctttcatgtttacctattcaagtaagttctttctatcttctttgaacatttctttgtcccttggcattaagactcaaaatggttccgacattttcgcttcttggttacgttttccttgtaatgctaatccgagatatctgttttgtacagacgcggcggtttgtgtgtgcaaggacgctaacgagctggatcttcagaaggtgatagacttcgcatgtggaggaggtgctgactgtgcacagattcagacgaccggagcttgttatcaaccaaacaccctcaagaaccactgtgacgttgccgttaacagctactatcaaaagaaagcttccaccggtgccacatgtgacttcaacggcgccgccgtcatctccacttcccctccttcgagtattccttccattaaaaccacaacttcttttcatcaaatgtgtatctttttttttttttgctgattctttatttactctgttcttgcagctacgtcaagctgtttatctagttctaggtatgtttcacatcaccttgccttagagtttagattagggttatttccctctgttttcgtttgcttagtgttttctttagatcagtaatgagctctctgatgattctagtcgttgaaatagttcagtcatttgtctactaatgtgtgacagaatctttattactgatttattaccaaaatattaattatatcttcttaaaaattgtgatgatgatttaagtgtgtttataagagtaacctttttgtagttccaacggaacccccactgccggatatccatccaccggaaattcaaccacagcaagtccaggcaccacaaatccatccacaggcaattcaacaaacagcacactacccactaatgataagccgacttcatctacgataacgtttcctgacagtactactatgggaccatctagcagcacgagtggtgatcccaacggtggagaagagctatccgtcagaaccacgacgatcatcttactgactaccatcgctgccgtggcattgagggtttaggtaagatcatctcaagatgatgacgaggacgcttatttgttgtggacggctgagataatgccaagttaattagagcctatctttcttcccaccgaattttaatctttaatttccaattaggattgtgactctcgctcgtcttcttaagtattttggtttatagaaaatcttaatcaagagcttttttcttgctttcttttgtaaatccagaaaaaatgagatgctctttgggttgtattatttttacttataattatgccttcgccaataaagataacatgtttctctttgatagtttcttggttgtttgctaagaagaaaatgttgctacaaggatttcaggttttttttttattttatatttaataacagatgtttggtgttagtgcaccacttatcaattctcaatactataatgtttaatatggtttgtggtaacaattaacacgatctttatcaaggtgttccagaaagcgcaaattgtgatgtttttactctctttttttgggtagttcaatggacttttagttaaaattgttttaaggccttcattccaatgcccaccatcatgatgattttgttctttttttcacctgctttccaatgtatttattactgtaatgtaaagagacttgttcattttcttttagtgaacattgagagtaacatctgcggaatagcagcatatggatcatacagttttaacatcttagaagcgtgtgacaaattctttattctaaaccaaataacaaaattttaacatattagagaaaatggtaattgtaatatctcatttttaaaaagaacagcaataatctttatccttcaaggtaggtttggacgtttggatatttgggttggcttttttggttttagatttagaaatataggacccatttatttatttcaaaacttcagattcggttcagatttaggtttaacgaagtatttaaatataaaaaaatatcaaaaagtatttatattcgattctatgcgaactactagaaaatattcaaaaatctacaaaacccaagtatttttatccgaatatagccaaaagtatttaaaatacccaaaaacatcttaacctccaaatattgtaggcacttaggttattataagtataaatagtactagtaatattcatgatgaaagctaagtgagttcataaaattcaatgttgaatacaataaatagggacaaaatcattgttttctttggtttaaatagtatttttgaatctgatttatatgaatcaattgaatctaacttgtatgaaattattgaatgggagatactagcatcttggtcgctaaatgagataatattttgtgatactttgtgtaacatccttcttataatatgaagaaatgaggtcaataagatttacacatcaagaaaaagaaagctacttgttgtagtgattaataaaaacttcgattatgtccttttttcttaattgataagcttgttgtgagtgatttgtacttgttctgaaatttgaatagatatgcagactttacaagctagtgaagtctagtggaataaaatttctgaagttgtacatttttcaaaacaaaatttacaagaaaaaaaagattaacaaatctttaactgtaagtgtatttctttgtaagttctttgttagcttaactaattgttatgttaacatcattttctgacaatg

SEQ ID NO: 36479 - DNA, 3000 bp, Unknown
  misc_feature (1)..( 3000): 2750-1469P.txt file - cDNA_ID_3096530; gDNA_ID_2936547; Annot_ID_193907
aaagctcttgattaagattttctataaaccaaaatacttaagaagacgagcgagagtcacaatcctaattggaaattaaagattaaaattcggtgggaagaaagataggctctaattaacttggcattatctcagccgtccacaacaaataagcgtcctcgtcatcatcttgagatgatcttacctaaaccctcaatgccacggcagcgatggtagtcagtaagatgatcgtcgtggttctgacggatagctcttctccaccgttgggatcaccactcgtgctgctagatggtcccatagtagtactgtcaggaaacgttatcgtagatgaagtcggcttatcattagtgggtagtgtgctgtttgttgaattgcctgtggatggatttgtggtgcctggacttgctgtggttgaatttccggtggatggatatccggcagtgggggttccgttggaactacaaaaaggttactcttataaacacacttaaatcatcatcacaatttttaagaagatataattaatattttggtaataaatcagtaataaagattctgtcacacattagtagacaaatgactgaactatttcaacgactagaatcatcagagagctcattactgatctaaagaaaacactaagcaaacgaaaacagagggaaataaccctaatctaaactctaaggcaaggtgatgtgaaacatacctagaactagataaacagcttgacgtagctgcaagaacagagtaaataaagaatcagcaaaaaaaaaaaaagatacacatttgatgaaaagaagttgtggttttaatggaaggaatactcgaaggaggggaagtggagatgacggcggcgccgttgaagtcacatgtggcaccggtggaagctttcttttgatagtagctgttaacggcaacgtcacagtggttcttgagggtgtttggttgataacaagctccggtcgtctgaatctgtgcacagtcagcacctcctccacatgcgaagtctatcaccttctgaagatccagctcgttagcgtccttgcacacacaaaccgccgcgtctgtacaaaacagatatctcggattagcattacaaggaaaacgtaaccaagaagcgaaaatgtcggaaccattttgagtcttaatgccaagggacaaagaaatgttcaaagaagatagaaagaacttacttgaataggtaaacatgaaagagagaagaaacagaggaagcaaaaccgccatgactgcttaaacttgatcggacttgtctaacactgagagtaccacaaatgtgagtttgcgagtttgttagagagagaggagattattctgatatgatgatcgacaatttatactctttatgatatttcttgggtactaataagcagaataccctaaggcttaagtaaagaaaagttcagatattattgtgtgatgacttgtaaatgttagattttgagtactcaaagcaatgtgggtctctgaaacagagaaggtgaaaagcattcctgtcgtctagtcaatgtgtgactgtggtcggtcgacgcacgtaatattgtaggctttatgtgaaaaactagctttgttaattgttattcttactaatttgtcacctaagtttacgtacatctgatgcattcttttttaggatttagataagagtctagctttccacaaagacaacaaaagatgcatgcacacgtttgcaaatgtaaaatgttatttaacatattataagataaaataagataaagatgtttttaaagtaaagtaatttgattttgaagcactaaccgatggaaaataatggagaaaaacagggaaaagaacacaaaacaattggaaatagtatacactctttaaaggcaaaaacttaagtattaagtactttttaaaggcaaagcggctaagcgagggagccatgtgcaggacaaactttgcatccgcattacaaaacgtgtgattgtgttacaacgtacaagtcacaaagtcacacaaataatccgaaatggtgttgacagggcgaccagaaatagctataaaccttacctagctctaacgtaagtaatcactttttccttctcagtaatttatttttattgcttctctttgactctggagatggactcaacctcttatacaagctccatggccgattaagggactttgttggaccgaactccatgaataatatgccgtaatcttagataaaaattccttcttatcattctatttaatttaaatggatgttttcctatcatgctgatgtcaagtatgaaactcatcaccaacaataaccatgagcgaaagatctcgcttaaatttgttgcaaactgaatcgctaataccgaataagcgaaaaatatcccaacaccaaccattaaaaagtgatttgacgttatatacatccttaacttatataaaaaccaagcgtttaaaactaaaaccaacaaaaacacacttgtaagaagaaaaaccatagcatgtccattgcacatatgaggaaggtgtctttagcaacatttaaaaaatttaaattacaaaatattaataattaaatgtgagaggtctttaaattaaagacatcttttcaaaaaaaggtcttcaccaagacatttagacacaatgtttttaatttaaagacacacctaaacattaaataatatatcttctgtttaaatattaaattttaattgtggaagactccctcatatgatgtatgtgtggtttctttgaaaaatcaaggtttgggctatatctattaatgggctgggctttatactaaaagactaaaacatgtcgaggagtcaaagacaacttctgaaaaaaagacatcagatttcttggataatctctaaaatgccactgccgtcatcgagaacagatcgtcacgaccggagttagtagtgtctaaaaactcatctgagagagaagaactcagaaaaccctaaacacagataaaccccaaaactcaaaaaccaaatctttccaacaatg

SEQ ID NO: 36480 - DNA, 3003 bp, Unknown
  misc_feature (1)..( 3003): 2750-1469P.txt file - cDNA_ID_3096538; gDNA_ID_2936547; Annot_ID_193905
catcattcccgtcgcagccttgtaccctaatcgcttccgccgctacaatcaggacttgccacaacttgccttccagctttaaatctaaggaccaaaggttgtacttcttctcatcgtcttcttcatcatcaactgtcttttctacgcgtttgacatgtccgttgtccccatatgataatctgatagagtactattatcattatgctagtggtttgataagcattggatgtaatcgaaagcaaatcgtaactaaccccagcactggtagattcataactttaccaagtgtcagaagaagaagagtggtcgtgaaaagttttttcgggtatgatccagttagtgatcaatacaaagtctcgtgcatgacggaaagacgtcatggccttcgacaagacccatcatctgaacatcaagtgttcacattgggagaaaaaaagccatggaaaatgatagattgtactagcattcctgatcaccgtccttggtctaacggtgtgtgcatagatggttttgtgtattacgttgctaaaactggacaaggtatgtcacaactgagcttaatgagatatgctctgagggctgacaatttgaatctttttactagtttacctgaagagcttcgaactctaaaactatctggtgacactttattgaactatgaagggaatgtagcatggccactccagttacatcttatatttaatgtgtgggttatggatcaggatggcgaaaaacatgaatggttgaagaaaataactttcaatattgaaccttggaagagttcatctcgctatctagacgttagaggcactactcatacgggtgagtttattcttgcaccatcgcactatcctgatgatgagttttatgtcttccattacaatctcggcaagaatagctttacaaagaagaaacttcaagttcgtatttacaatgttagaattgtgtctacgtcttcaataattggtctctatctctccttctctctcttgtagtcatcttctctccatacctctggaatatatcagccaaatcaaacaaactcacttctctaagtttcttagccatctcttcaaacataaccacaccttcctcattagaataataatgcaagaacttgctataatcaaacctaggaacttcaagccctctcttcaacgttctctcaatatactttgtagtttccaaccgtttccccgccttgatcatacctccaacgaatatcgtatcgaaattcactaacgggtccggccctttccttccccttctccccaaatgtccttgcaacaacataagatacgtatgcattattggctcgcaccctctctgtatcatcttcctgaaaacctctgttgcttcgcttgcccgtttaatcttcaccaacccttttatcaacccatgatagatactaatatccggattctcaaccccttccaccaacccataagcctctacaactcttcgtttaaccaacagtccatagattaacgacgcccaagttaagttatccacataaacacctctctcacgcatttcatcgaacaccttacgtgccatatcaatcctaccgtttttacacaaccaatcaatcatcaccctgtagaaacccccatccaaatcaccacctcttttcgaaaccataacataaaacaccttagaagcttcatcaaactgattcttcttcagaagtgtttccataatctttttaccagcttcgatatcaacatcaaatccttcatccatcatcaaattccaaagcttagcagcttcaatcaaatcaccaacatcacaaaacccttgtatcatcgtcctataagtaatctcatcaggtttaataaactccttcagcttaataaaaacaaacttagcttcttcaacaagcttctccttacacagagtctccactcctctattcatcgtttccacattatacaaatacccaaaaccgttcatcaaatggaaatagtttacacatttcttcaactctctagcagaagcaagtgttttcaacacaatccgaaatgtcttatcgttaaccaatccacgttttccgatctcttgagctaattcccagaaaagatccatgtttcttgagttcccgatgattgctagcatcttattagaggtagtggaagtgtgggtgaaatcagggtggtgagtttgagaatagaggaagaaacggtgtacaggacgccacgagagtgggaaattgttgcagacttggaggaagaactcgtgagttagttgaaatttggtggaggagagtttagagacgagacgtgaatcaggtgagttctgttgctggtagagaattgtacagactcggagaagatggtcttggtttatcggtgtgattgtggttggagttagctcggtggagaagaagcggtggttgagaatgaagcatcgccgaattgagtttccgatgttaatcatcctccgagaagtcacgacggccacagccataagtttcccggccaatggagaaaacaaaagacaagaactaaattaaataaaaaaaattagggtaaaattataagaggctacaaagaagcccatctaagcctatgtctaaaaatgagtgggaaaatggagatgcgggggatcgaaccccgtgcctctcgcatgcaaagcgagcgctctaccatttgagctacatccccgttgatgtttaaatacgtaaccaaaaacatatataggattagataaaacggtgtcgttagggagcgaaaagttcgttaagttagttagaaagaatagcgaggaaaaacccaggaatttcgcagacacagaggtgtgttcggatctcaaggttgagattcagtcttcttccgccatttgcgaaccatcttcgaaactctttttatatttctctctttccctcccatctctttcgattattttatttatctcaccaaggaaaacaaaacacaaaacaaacaaacaaacaaacccataaatcaagatctctgttttcagacagattattatcggaacaaaatg

SEQ ID NO: 36481 - DNA, 3000 bp, Unknown
  misc_feature (1)..( 3000): 2750-1469P.txt file - cDNA_ID_3096558; gDNA_ID_2936547; Annot_ID_193900
tttgctgcgtgtcttcatgatcaatcgctcttgtttcgaaaccctaaaaaaggctctccgtctaggcgtctactctttgctttgctcttttctagcaactagtaaaactatatatatataaccaatgggcttgttgagtcagattttacaagcccaagataaagtctcatcagaagcccacttaagtaagtagagattttgtgtcgagaacatcaatatatatatgaaattaatccacaaatcagctaaatcttggtgacagtttcttttcctcttttacatcttttgttcaacaaagcttcatatgacctatcttatttcttagcttatatatatctatcttattaagttattcaagatcatcaatcttcttgctttggatttgcttacagaattaaaccaggagtgtaaagacgttaactgaaacacctatataaccttacacacttgttatatattatacaaaaattgatcagagtattgttcatgacggtaaaacttggggggaaaaaaaaaaagaccaatctagttgtcactgcaagtttgctttttcatctagggtctgcaatctcttaatccgcttctgagaacttcttcatccagtttgtgtcctgcaatatattcaatgccttgaatcagtaagcgagtgttgggagcaataatgttaactatgatgcaaaaaggagatatgacctataaatactattttgtttgttcgattctcttcctcgctccattttcgagctggcactatctcatatatatctctaacggcctgcgcatattcaataacaaattctgagaggatcataagaccttactcatgttttaattcatgactacagactacattacctgcaaaatatgcatctggtctgagttttgaatgctcaacacagccttgcaacggtatacatccatctccgattttttatcccacagaatttcctccagccataaacgaacctgtcaaaccgagaacaagttggtgtatcacgaacaacaatatttcttaactacttgtccaagaatgttcaatacatttttgctaccttatcgaggtttataggttgcggttcgctgatgcatagagtccttactccactatcgtgaagatctgtcgtcgttaatgatttatttgcttccagcagggattccagacgactaacatgctaatttcaacagtaaacaaggaagataagttcagtttttacagtcaaaagcataattagtaatcaagacgagaagagaagtttcagagacttaacagttgaatcatatgcctggcagtttaatatattggacaaatcaacttggcacctaacagatcggatgacattggcgagcgagttgatggaatgaatctccttctctaattcatcagactcctcttgagaaatcaagtccaccttgttcattattatcgtgtcctgcaaaacgaattaaaaaagtcatgtcatgatgtagagggccataagtcagtgtacccattggttgtcagaaaatggttaccgcaaatgctatttgattaaaggcctcaggaaacgaggatgagtcacgacgctcattgagctgaaaacgaagattctttgcatccacgacctgttcaagcagctaggtcagtaaatgcatttggaacaagatacctaagcaataaattagtggaaacagggagacagtacacaacctgagacatttatgttacaaagagctaaccagaaaaaagaaagatcactagctatgttttactaagagaaataatggtgtcaatagcataattctatgttttacaattcatctgatgtgtacaagatgataggagaagtataaagagcagcttcaagcttaacaaaggagaagtgaataagatactcacagtaacaatacagtcaagcttgacttctgattctaactggtcatccaaccaaagaatagaagccaatggagctgggtttgctaaacctgttgtctccaataatatatgatcaagcctgcatagaagaaagaaaaagcagaacgtctaataagtgaaagatacattcttctccaaaatgcaagtaataatactacaatttcggcgatatatgtgcctatggtttgtaaagccatcaccaatcttagagctttaggcctaacaatcatcacgaatatctcagtgtgtctagaaattagatagaagatcataaatttgagctgaaccagcgtttaaagagagatagagaaacaaagcacctgtcttttctctgaacaagctgctcgagagcttgaacaagactatgcttgacagtacaacaaacacagccattagcgagctcaacccattcttcaacaatggcaccttcttctccttcgttaatcatagccctctcaactccaatctcttccccaaactcattcaaaatcacagctattctcttcccgtgtttcccgttcaatatataattcacaagctggtgcaaaatcaatcagattacacaccacaatcaaaaaccaaaacccaacacgtaaatcagtgaaaggaagggacttacagtggattttcccgcgccgagatagccagtgataacagacacaccaactgaaacagtatcgcttgatgagtgaacctttccgacagaaacatccggatggatttgaacagccatcggtggttcttcatcatcatcttccattttcactccctcagcttcttccttcagcatcgccggtatatgcagagacgccgtaaaagacagagctccatatatgggccgagctcacattagcttggttcggttcggttcggtttggttaaaatgtcaaacgactcaaaaccctaatttttaacaaacaaattcttagtctcctctgctcgattcttgcatctgagagaagagcaagaactaaagttctctcgttgtcttttgttttgaaagagagcattttttggccctttagtctccatttctctctgctccttctaaggttataaggttttttttagtctttggttaaacgatg

SEQ ID NO: 36482 - DNA, 3000 bp, Unknown
  misc_feature (1)..( 3000): 2750-1469P.txt file - cDNA_ID_3096570; gDNA_ID_2936547; Annot_ID_193896
ataaaatgtcaataatacccttatttaatttatggaattacaccaaaaaccacatctcatcttcagcttttcctcgacacaaaacagagaaaatcaaaattttgatcttgtgatctcgccgtcgtcgacgagaatcggtcgccggagatctcgtcggatccatcgctggagtgtaacaggtttgtgttgctctctctctctctctctctctctctctctctctctctctctctctctctctctctctctctctctctctctctctctctctctctctctctctctctctctctcgcttcctctctctcgctccatgtctctctcgttgtttctctttgtatccttcttgcaatcacttgttctagggtttgatcctccgtggttacattgtttgtttgtgggtttgctttgctttactccgtggctactttgattcttcgattagctttagtttatggctttgtgttgctttgcttgctttgtattgcttttgattcttcgattagctttagtttacagctttgttttgcttatattgctttgtgttgctttgtgtttttgatgcagaaagctaggatccagatttggcttgaaggatttaaggattgaaggaagaatcactgtaagtgattcatctttggttggtctctaagctcacgtctatcaatcacaatagtttgctcttgcttgtttcagatctttgcttggtctatgggaatctaatggtttctcttctccatttgctcttgcttgtttcagatccgttttctctttagggattttgctgcaacggcactgtggttcaggattcagaacttggacaggtaggttatatcaaaacactcttaacaacatgagacatcaaatgccacacacgctcacagaatctctcatataagaagaagcaatgccaattcgttagttttgatttttcgttagttataataacaaatatgtacattagtagagtaatcaagtatttactacaccgtgggttagttatagattcaaattaagtggtatttgtagccaatacattagttagcacatgacttcgaatccttttagtatttaatcattttctttttagttgatctgatgcaaacaagggtagataagtatcatattttcagctttcaaaaccacaaaccatttactgtgtcttctttatcattgagaccatgtagcttattgatatgaaatttttaacatctttctggaatgacaatcttctctgtttctaggctttgtttatttgtctctaaaggttctggattcaacttctgaacaaggtagtagtccacaagaaggatctttcttacgtgagttttttgttcctcttctctctgtctcttttctgatttcagtatcccaagtgtgatcttattttcttgccctctgttatataattggtgttattgattgattcttcattcatttatcgatgaagggttggttttcatttgtgttgaattggatctttgtttgaggcttctttttattgttcggatgattatgatttggtcatttactggaaattgagaatttttcgattcagttccatagagtaatggtatagactatagagtaaaggaaatcgaagaagtttgctttgtttaatggaaactgttggggaaaggatcattgtcctatttcgctccatggtgagtttaatggtggatgatttgctgaagcgttttattcgattcctttggttttgtatttggttctcattgaattcatataggactgatattgataaagattagtctgaggctttgagctagtgcatttgtttgattgatgaatgaaactgtcatgttgaatttgttggtatgatattaatttgtctgtgcaggtcccaaaccggaggttgttgaagctgaataatgttgtgtgcctcattgatctcttgatgtaagaagctgaataatgttgtgtgcagattgggacaaagcaatggcgttactatgacaaaaccaaactctctttttcaaactctactttgattaatatgagaatgtagctatttattatttgttacttaacagagggcattttagttatttacatatatatgagaatgtgaatgatccatccaaatgatcaaacaaacaaagctccatctaaatgaatcatttagatgaattagcaaataatcaaacaaacatcattaagatgaatcatccaaatggattatttggatggatcatttggatgataattccaaatgatcaaacaaacaggaccttaatcttgaaatcttccatgtattaaagttgagttattcttaccaatagttaacaaccccaaaatagtgatagacttttagttaaagaaatcaagaaaacaattgttcaatgcataagtggttccataccagtcatcaacacctacaaatactcttgattttcttttaaacaaatattagatatcctacatgaaaaattttagctctcaacaaatcaaaataaagaaaagttataattaatttggaatacaacaaaaaaaaattacaattatttaagcaaatttttatatttaacagtatttaaaattgactagattttttgttgagtaaccttatattttcatttgatcaaatcaatttaacatcaaatatcatccatataacttctcacttactttataccatacgtataattgaatttacttttcatatttgtttttgtctagcttcatgtatgcatctcaatattaacaacagtggttatcatattattatttcttttgtctaaaaaaacaaaaaatttgtcacttttttctttggctcggatcagaagattttaggtctctctttcctttcctatatatagtagtaccccttacatagctttttccacttgcactcctctttttctttctttctttcttgttggtctctcttacttctttcttattcatctaaaacaatttcgatccatttacacataaatatatgtaactggccgtagaagaaacacattgaaggaagagatg

SEQ ID NO: 36483 - DNA, 3000 bp, Unknown
  misc_feature (1)..( 3000): 2750-1469P.txt file - cDNA_ID_3096584; gDNA_ID_2936547; Annot_ID_193893
acaaggtgtttgatttaacgccgcactttcttatatagccaatcatcgacttgtagttgttgtaaattgtcactttgttgtttctattaaaggttttgtctttgtataattgactgatttacgtagactatatcttcttggctttgtactttaacaggagacgttttgaaaatcagaaatggtgaagatatgctgcataggagctggttatgtgggtggtccaaccatggcggtgatggctcttaagtgtcctgagattgaagtagtcgttgtggatatctctgaaccaaggatcaatgcttggaacagtgataggcttcctatttacgagccgggattggaagatgtggtgaaacaatgcagagggaaaaacctcttctttagcacagacgtggagaaacatgtatttgagagtgatattgtatttgtctcagttaacactccaaccaaaacacaaggtcttggtgctggcaaagctgctgatcttacttactgggagagtgctgctcggatgatcgctgatgtctccaaatctagcaaaatcgttgttgagaaatccacggttcctgtgaggacagcagaggctattgaaaagatactgacacataacagcaaaggcatagagtttcagattctctctaaccctgaatttcttgctgagggtactgcaattaaggatctttataacccagaccgtgtgttgattggtggtagggatactgcagcagggcaaaaggctattaaagctttaagagatgtttatgctcattgggttccagtggaacaaatcatttgcacgaacctgtggtccgctgagctctctaagcttgcagcaaatgcattcttagctcagaggatatcatctgtcaatgccatgtcagctctatgtgaggcaactggcgctgatgttacacaagttgcgcatgccgtgggtacagatactagaattggtccaaagttcttgaatgctagtgttggttttggtggatcatgtttccaaaaggacatcctaaatcttatctatatttgtgaatgcaacggcttgcccgaagcagctaattactggaaacaagtcgtaaaggtgaacgactatcagaaaatacggtttgcaaaccgggttgtttcttcaatgtttaacacagtctcgggcaagaaaatcgcgatcctcggttttgccttcaagaaggacacaggtgacacgagagagactccagcgattgatgtttgtaacagattagttgcagacaaggccaagctgagcatatacgacccacaagttcttgaagaacagatcagaagagatctttccatggctaggtttgactgggaccaccctgttcctcttcagcagattaaagctgaaggtatctcagagcaagtgaatgtcgtctcagatgcttacgaggcaactaaagatgcgcacggcctatgtgtcttaaccgaatgggatgagtttaaatccttggacttcaagaaaatctttgacaatatgcagaaaccagcttttgtgttcgatggtaggaatgttgttgatgcagtgaagctgcgtgagatcggtttcatcgtctactccattggtaaaccgcttgattcatggctcaaggatatgcctgctgtggcatgaaggtgccaacttcaaccaaactatatgtcttttctaaaatatagtatcttaagattccttataaattctgttgtaaccaagctgaaacaatgatatgtatttgctgaatctgccttagctggaatagtatatgaatttctttgactatttgccttaccataatagtatgctaaaatcctcaacaaattaattgaaattttggattaattgtgacattggaaaagataaggaatgaagtgtaaaacttacaaagcaataaggacttgataaaaaaagtgtattgcttttaaatttggggtccagctcgattttagggaagtttgcgggtcaaattcgaattagtgttttgggccggctttgtttagaaaaaatagatccaggaacctatatccactttttcgatattatcttctctcgtcttcttccccaaaagtttcatcgtaaatccaaatttttctgtctttttctttaattttattgggattttttctaaattattcttgctattgatatcatctaattctcgttcccctctatctattgatactaattttatttcgattgtcaaaaaaaaaaaaatctagggttagggtacttgatctcttctctagttgtttaatatcttgatctatcgttttctttcactatttacatcaattttgataaatattcctttcgattttgatgtcaatttcatgtttttcgcccccgattgagatctagggttcatattaatcgatctagcttagggctttccagatctgtaaattgttagagggttttctctgagtttgtataggtttgatcaattcttatccaattcatacttgatttggttaatttttgggtagttggagtctagggttagggtttcttctgatttggggattttttatttttccagcttaagcttttaaaagcctgaaattcctattggttatccctatttttagtctattggtggcgttctagtatggttctatctttttgaagttggcctaaaactttatctgagcttacttctttagagaggtgagtaatatactacatgttaactggacatttgttcctgtctgaactgttttttaagcattagttctttgttgtggtggatgtgtgttaaactagcatgatagtatagttattgtcttaataggaacgtttacagatagccatcctacataaggtttgtataaggtttcttgcatgcatttgctataactttgtggaggaatccgaatcttatcatttacttgtttcactgtcaagtgcgaatgttgttgttttactgttccattgtctgaattttcctttcattctcttattcgttcttagagtttattgcatttgattaccaattatgcaagttgaaaatg

SEQ ID NO: 36484 - DNA, 1726 bp, Unknown
  misc_feature (1)..( 1726): 2750-1469P.txt file - cDNA_ID_3096599; gDNA_ID_2936547; Annot_ID_193890
ttttaacaaaaacaattttatgcgtaatctctacatatgcataattatacaattatagttgatgtagtttaaaaactacaaaacaacaacgtccattaagcagttatgagtttcgatgttaggtataaatatctttatcttataacaatatatgatagagtgtaacgtttacaaagcagacaagatagaaggaaaagcttgtgtcatttattctacgactgcttgaatatcttgtatttgtagaattgatttgtaggttctaatggatgatgtgaaacacgaatggtaaaacaaggtttttgctttagatctttggataactgggtggtattttcactacatataagacaataattcaatgcttacaatgatttattgtctaattatcttataacttagtcaaaagtttctcgctcatctacaaggaaattaaacaaatgtaattcaaaatttcaaacgattaataccatatttactcttaatgacagatttactccaattcaaaaaataataagggaaccacttaaatgcatgcttaagaaaacataaacatgtaaagaaaatgattagatcatgaaataaaaaggaaagaaagaataaaaaaaaaagaaaacagagaagaagaccgagtgttgacaaaatatcatgtcactgttattagaagcctattaaattttttatttttattaaatagaaaaacaccaaatccgagaaaaattaatataaaaaaaaacaatataaaaggtcttattcttttatttacttcattcgttaaagaatctgagagatagaaaagccagagaaatatatatagagagagatagagagagagttggcccatcggatcgaagaagaagaagaagacggcttaagctttcttcttccattgaggatttttgattcatttggcactctctcttttttttgttattatttacttgagatttttctctattgattaaaaaaaaaaaaatcagagtgaatctaggaaacacttttcttttttaatttattgttcattttttccgataatctgtctctgatttagggagattttttatctgttcaaattgcgatcagaagatgtgggtctgaggtaatatctctatcaccagatttctatatatttttattttttggatatttaattattcatttggttcgtctctcttttttatatatatagttgatttgatttgccatttctgaatttttcatggattattgtttgatgaaattaggttagtcgtttaagtcaattgatccagaatctaagctttggtttttgattttgattatgattataatttataaatgtgaatttgtgacagtgaatttattcgattcttttttttttttgtttgttaaattctcgtaaatggttttggtttttattgggattagtttgcgtgtaatctggtttatatcattgatgattcgattaagatgcagtttctctatttgcagaatcttcttcttcgcttttagatacgacaaaaatatatttatactagcagagatgatcatctcatagtttgcttttatgtgttaatgttgtttcacgttgtgtttgtggttctgtgattgtacttgtatgttatgagtttgcatatgtatcagttagtggagtgtttattcaatgagggatctcagtgaagtgtttttttggtcagtgaatcgtggagatgcaacgtatgggcggcgatattagacgtgtttcgcaatg

SEQ ID NO: 36485 - DNA, 3000 bp, Unknown
  misc_feature (1)..( 3000): 2750-1469P.txt file - cDNA_ID_3096667; gDNA_ID_2936548; Annot_ID_193956
tgctgcttcatgattgcgtatgttttacattgtaaggtttatttataagcaagttgttacaatgagtgagtggtgctaacaagggcttgtttaatgatgttacaagtacagtatattcgatgtgcaatgagtgactatggatgttacaatgtcactgaaccacctattgatgcccccagagatccactgtacaaatctgagagggagatatccaaggtacatattggaccatgtacattgatgttaaatccattaggtctttgatgcagggagtcttgagcaacatgtattaacaaggatgtacttagttttgatttgacaacatttttggaaaccacaccaggaaatatgttttttaagcattaaggatgagatcaacacgaaactacttagtttagtagttacagtttctgatacaaattgtcttcatcgtgtttattttttatgcaggttttcttgacaaaacattaccggaacagaaggacaaacgatccagaatttgtgctagatcttgaagagatatatgttattgattccaagacaaagtcaatcaccagagccagagttctggtatgactaattcttatcttccaagttatttaagcattattaacaaagttctcattccgagtctgagcacaaacctcaaccgtagaccatagccaattgggttttttgacatattcttatagaatatttttcatgctataacactaatgaaatgctggtttatattagtgctatttatgcctctagttctgaatcagatatcttgagttatgagttctttaaatactgtgcatagctcaaagctatgaagacaatcttctttccgatgttaaggttttagattgtttcaggtgacagttccgggaggaagaaaaagggataggaaggatgacttgcttgtgatacgagataatggaacctcctttaagatcatacacgtggtacctttccatttccaaatgaccaaatccatttcatctggcagtcatttgtattccttcatctagctttactcatcttcactctatgtctatatatttccattctttcagggtgaaagagatgacccaacaacggtaatagaaagagaagagtggaccaagactagagaagacatggagaaacatctcaggaagctacgagacttcagtgtctcaaattggttctagaagaactcgagagacaccaaacgacaagtcagcataactttcttcctgagatggaaaacgagagcagatgatctaaatcgatgatatggtggagggtatacaattttggtgacctcaggtactgcactagcagcagagatggatgtgttattagatgaatatgggcctctagaaaaaagtgtgtagatgcaatagtttgatggactaacattcaatgactagagaagctagcttatttgcaagttttgaggtgtttaattcaagttttcaattgatgattatgatggcttgtattattcttgtgatgagatattttcatattcaagattggaacaaagtgtttgtatttgagaaattgggatggtgttgactgttgttgagtggactagttagaacttgtagccggcgtgtcgttttagttatacgaagctactaaaaacgacaggtagtctgttattctaaactttttgatgtaattaatgatgacatcaggaaaagacacgtgtacggtatcatgttcggtcgattggattttcacgtgagtgggattacaaatgtcaaagtcgccgacagagcagtcatgttgtgtggttggttccattggcccattctgtgaccaccgaacattaacttccctattcagttttttaatacaaatatctttatttattgccacacttgaaaaattacatgaatcacttagaatgacacgtaaaacaaaataaatgcaccaacagttcggtgatatggaattcgttaggtatataagaaattaagaatagttgtaaaacacgattgtgttcaatattatggaatgaaaattgcgatagaatggtcagaacgatcgatttgacatatgccaaaccaacaaggtagagaaggaaatgatcaaatcttaaaacaattcaattgagtcgaagaaacaaaaacatgtgcacgataaaatgaattgcacgataaaataaagaagattgacgtgagaaagaatagtcaaatggaataaaaataacgataaggtatgtgcatcaaccgttgaatttgtaagtaagtatggttttggtgggctacatttctaataagcatctttgatttgtcaatctacctattaaaatacatacacaatggacaaggaatgattcatataaaaacaaaggaataaaatcacataattatgataatttgttatctcattgccggaacctcatttatggtacttttatacatggcacaacattctattaatcgataacggtggaccatattccccgtatttaatacgtagatttcttcttctactgtttggtatggtaccaatctcttaagttaattatgtaacataaattcagataaaagaaaatgtttgtgttgcatatattttttttttgtataaaataatctacaatagggaataaataaagttaatttcatgaatgtatctgaaatatttttaaattaattaaaatgagcaaaaaaaagaaaagatatatctatatatattttttataatttgttatttgttaggttgataattaatgagagagtgtactgtgaagactaaatattaaattatgtattttatttatctaaatggcaacgaaatgaaaattctcatatgtctgctcctccattcttactcttctctctttctcagaagctgcaaaaccagagagtgagagagaatagagattcacttttgtgagcgttgcgatgattttgtgcctcgtggaatcatcacactacaacgtattcacctgaaattcagacaaaacagtttgaggaaactgggaagtgataagataagagagtgatagagagagagatg

SEQ ID NO: 36486 - DNA, 3000 bp, Unknown
  misc_feature (1)..( 3000): 2750-1469P.txt file - cDNA_ID_3096672; gDNA_ID_2936548; Annot_ID_193955
cacttgttcctgcaaaatttccagaagatttgaccccattcattacaatgctggtaaaagaactgcctgaatttagaccaggttggcctttgctttgtcgtgtagcttcttcagatgtattagcttctgctccgagaagttcttcgttccgaaagataccagttgtgcagtgggtgctgaagctgcccgctaggaccaattctgttgttggaagctcagacacaaagcagattggttttgattcttctgaatctgaagaaaatgataagttgtctagctcaaacgttgaaaggcaagcaattgttcctgatgaatctatgatcgtgaaatgttctcttgatcatagctcaggtagatttccagagaatgtagagggtcttcaggcaaggatctccacatcttgccagttttttacgtataaggaacttgtgtcggtgacatccaatttctgtgctggtttgttcctctcttctcataattaagctaccgctttgttttgaactttcttaagactcttgtcatttccttttgtctaaataagaaaagcaatgtactttcagataatttcatcggaaaaggaggcagcagccgggtttttagaggttatctgccaaatggaagagaggttgcagtgaaaattctcaaacgaaccgaatgtgtcttgaaggattttgtggcagagattgacattatcacaaccttacaccataagaacgttatttcccttttaggttattgctttgaaaacaataacctgttactagtatataattatctctcaagaggaagccttgaagagaatcttcacggtaagcctctgaccatttagccacttgcagattttcttgtgttctggttctaacaatcaaggtttgagattgagattaggcaacaaaaaagacctggttgcatttcgttggaacgagagatataaggtggccgtgggaatagctgaagcgttggactatctgcataacgatgctccacaacctgttattcacagagatgttaagtcatctaacatattattgtctgatgattttgaaccacaagtaagtttcttttagtttccaatgtttacatcgaagaggaaaaattcacgagatactaaaaagagaaatcttgttcacagctttctgactttgggcttgcaaagtgggcgtcggaatccacaactcagataatctgctccgatgtcgcaggcacctttgggtgaggaaaaaaaatatatatatgttgatgctgcgtgaaagttgtttaggagataacaatcttgaaaatgttctacgtttcttgttgcagctacttagctccagagtactttatgtatggtaagatgaacaataagatagatgtctatgcttacggcgttgtactcctcgaacttctttctggaagaaaaccggttaatagcgaatctccaaaggctcaagacagtcttgttatgtgggtatgtggatactaccggcaaaatgttcttacattgaaatgtctaagctttctttgttattgctaaacagacatgcatgtacacttgcaggcgaagccaattctggatgataaagaatattcacagctattggactcgagtttgcaagatgacaacaatagtgaccagatggagaagatggcgttagcagccactctttgtataagacataaccctcaaactaggccaacgatgggaatggtgagtcaattcttaatcctccatttcattgccagtttcatcattttagagatggctactatatcaaacaagttattaacacgatatgtcttttggaaatgcaggtcttagagcttcttaaaggtgacgtagagatgctaaaatgggcaaagctacaagttagtaacccgttagaggattcaatgctactcaaggacgagaaattgcggaggtctaatctgcagtcacatctaaacctagcattccttgacatggaagatgactctctttccatgggaagcatggagcaaggcatctccgtggaggagtatcttaaaggcaggacaagccgttcatcaagcttcaactgagccattatttttgttcactacaacaaatcacaattgcaatactcaacaatgtgagatggtgaaaaaaaagagttctcctgtgtgtgagtgagtgtaaagtgtatatttaagaaaatgtgtttcttttcattgtcatggtctcatgggtggtggatgagaggtggatttgtgtgggttttattgccctcctccctcccttggtttaggggttatagttatagcgttcaaaggtttcgtgtgttttatgcaatgttttttacttgggaacatcagagacatgtaatttgtattccttgatcctaatggatcaaagtgaattttcttgtcttgtaatgctcgaacgtgtctcactgttatcaatagaataacattatcttgttgaaatacaattttacatatattcgagagtgcctatcacaatcttaaagattttggcaatcttatcataactctataatttggaagacaaaaccatatgcgactgagtcaatctataatatgtggtaagagatgacataagtatttttttcttgtcctattcaaactttgattgagtttgaaagaaacatgaccggatgtaataatttttctgataactaattctttgataatgtacccacattttttttttgtgtcagcaacatgtgtatttggtagatttgaatctagacaattgacacagattttagctgaagaacggaaacttatacaatacggcccataataaatgcagtggcccaataagattagggaaaagagagagttacgaagaagatataaaaaccggttaccgaaaatcggaacgattcgagaactaaattgattcgtgtgtattatactatttttatcgccgttttcgtgttgcgtgcgttttcatcagaagacgaagaataagaagaagacgacgctgtggttcaaaagatctaaaatttctcaaggctaaaatccaaatcagccatg

SEQ ID NO: 36487 - DNA, 3003 bp, Unknown
  misc_feature (1)..( 3003): 2750-1469P.txt file - cDNA_ID_3096677; gDNA_ID_2936548; Annot_ID_193954
atatgtttatcaagttctgtagcatcacatatataatatcttgaagtccccaaaaatatttaataaccagttgtaccatgggaaccaagaaaaaccaattcatgtcggtttaacaagattagagaatcctaaaacgaaacaacataagatattcccaactaaaagcacacgacataaccatacgaaataaatcttcaattcatgattatggtatcaagcattatatactttgaacaaaactgaaataattagcagattacattgaaactgtttacaaaacttcttcacaatgatcatacgctaattaaacagtttttttgccacaaacttcttcacaatttttttgtaataaacagtttcactatattttctcttcatctctttcttggatttatttatgttagtgagctactaatctgattttgcagaaagaattaagaaacatatatacgaagccatttatgaagttagttttcatttgcaaattccgttttggtctgttaatatggctagtgttttttttcttcttttaaatgggtttgaagggtttattatatatcacgtgtaaaacagttgaccataatgctaaaaattatgcatcatacagagaaactactaaagaaacaaaatagtcaaatattcagctaattataacagaaatctagtcatatcgtcacaatgatcacacgctatactatttatcgccacaaccttttttctctccacatggcttgaaattgtcatagattatgttatttctgacgttttgtgcgttcatataagacttggattccctagaacttttaagtcgaacaatttgataaacaaacaaaaaaaggcaatcctttggacattttagcttaagctggattgaaactaatacactgaaaattgataatccatacatatatatctactaacggctttagtgagaagagccatttcattaccaaaattaataatttatcatagtataaaagctagacagtttatacatcaacacatcggataagcaaagatatactttacatatagtgattgcaatttgcaaataacacatcaaacatgtaaaaggactacacacacatgtcacatgtgtatcaccatcattagacatgtaagatcatgttcttgaattcttcaaagtcaacaaaaccatcaagattcttgtcatgaactcgaatcattctcccacaatcccaagcctttgcctcctcctcaaaccctagccgttccaacacatcacgaagctcctccgctgaaatataaccatctccgttcacatcgaacacattaaacgccctcgcaatcgcttcatcattatcagcaacaacatcaatattcttcttagatcctttgctatctaaaacagcgtcgtagtagaaccgaaggaactcgtctaaatcgaggctctgtttaccaacgatcagttcaagctcatcgggagtgtgttcggcccaaccgagtttatcaagaatccaaaggagctcgtcgagggtcacaagcccgtcttggttcttgtcgagcgtcttgaacattcttcggagatcgtttgtagttatgaatgaacaatccatttgatcagagaagggtagtttggatcttttggttatgttgaggaaatgtgtaaatctatttattgagaaattgtgcaatctttatcgtctataaaacatatatacacgtacagcaacatatttatatgattagtgtgtacggaagagattaaagcggaggaaggttcccggaaatgggttatgaaacgactaattttatgaaaaatgatgtttctagaagaaaagtcaataaacatgacatttagctaattttcttgtgtcaactatgacatatagctacttttatatgaaaatttgatagcgtatttaattatcatctttgattttttttaatattaagtaaaaacagtataagaatgaaaaaattaacttgataatataaccggataatctcatttactttctgccatagaaaaatgaaaagtctaacctaaatcgcaattttgtactaacaaagaataacacacctttgcgacattgcaaagctttctaaactatattattataccttgtattttgatagataaatagtattaatgtgctatggaaaaaaaaagttaaaaaacagtagattctaatactctatgtagtagagtggtgtcatcataatcttagtttgacatatggaatgttcggtaacgttctcgagttccgtggctaagtcgtacggtccccatttagtagatatttatcaccggccacatccacatacatacccatccacaattttccagtggatttttccctgtgaacagcaaaagcaaaacgataatgcttatagttttcatgtggattagataaataagaggaaaattatagcattgtctttgcatctccaaccaaatcctatttcctaccataattttttcatttaactatttatacaaaaataatgaacaaaagcctgagcccaatttacaaagttgggccttattatttatgggcctgaaatgaaataatcaattatgaccaaacacaaaagctctcttatgactgtagtaactaactgtcaatgtctctacagtagtacagtgagtcggaatgtgagctacggcgtgatgttcgatgagagaagttaattccttttctaaatttagggtttctcttcatcgagatgtttcttttaaatgatattcttcttctttcagtaatggaataatagcttctgtacgaaagatctttctggcatttgtaagtgaacccattccactcttcttgcatttgtaagtgttttctaaatttctactcctgcatgctctaatttggccccaacgagaatttgtgtgtttgagtggtcattgaatcgaactcaaatttagcatttttaggattttgagtcaattctagtttaggattcgtctctaatgtttaatttagtgaaggctatgtcattttcaggaatctgattgttttccgtttaaagatg

SEQ ID NO: 36488 - DNA, 3000 bp, Unknown
  misc_feature (1)..( 3000): 2750-1469P.txt file - cDNA_ID_3096685; gDNA_ID_2936548; Annot_ID_193952
gattgcgagggcgtttaatgtgttcgatgtgaacggagatggttatatttcagcggaggagcttcgtgatgtgttggaacggctagggtttgaggaggaggcaaaggcttgggattgtgggagaatgattcgagttcatgacaagaatcttgatggttttgttgactttgaagaattcaagaacatgatcttacatgtctaatgatggtgatacacatgtgacatgtgtgtgtagtccttttacatgtttgatgtgttatttgcaaattgcaatcactatatgtaaagtatatctttgcttatccgatgtgttgatgtataaactgtctagcttttatactatgataaattattaattttggtaatgaaatggctcttctcactaaagccgttagtagatatatatgtatggattatcaattttcagtgtattagtttcaatccagcttaagctaaaatgtccaaaggattgcctttttttgtttgtttatcaaattgttcgacttaaaagttctagggaatccaagtcttatatgaacgcacaaaacgtcagaaataacataatctatgacaatttcaagccatgtggagagaaaaaaggttgtggcgataaatagtatagcgtgtgatcattgtgacgatatgactagatttctgttataattagctgaatatttgactattttgtttctttagtagtttctctgtatgatgcataatttttagcattatggtcaactgttttacacgtgatatataataaacccttcaaacccatttaaaagaagaaaaaaaacactagccatattaacagaccaaaacggaatttgcaaatgaaaactaacttcataaatggcttcgtatatatgtttcttaattctttctgcaaaatcagattagtagctcactaacataaataaatccaagaaagagatgaagagaaaatatagtgaaactgtttattacaaaaaaattgtgaagaagtttgtggcaaaaaaactgtttaattagcgtatgatcattgtgaagaagttttgtaaacagtttcaatgtaatctgctaattatttcagttttgttcaaagtatataatgcttgataccataatcatgaattgaagatttatttcgtatggttatgtcgtgtgcttttagttgggaatatcttatgttgtttcgttttaggattctctaatcttgttaaaccgacatgaattggtttttcttggttcccatggtacaactggttattaaatatttttggggacttcaagatattatatatgtgatgctacagaacttgataaacatatgtatttaattttcgaacatgacatatgtaacctttttaactgaagctagaccatgtgggtaaacaagtactagtatctatctactcaagaaaaacctaaaagttttatctcaaatgagaaaaccatcatgatgccaaaattggcaagtaggttggcatttgattctgtgcatatgaaattaaaggatccgtatgtgttgggtgatgcagagattcattaaatgtggatataacttctaaactacccaaaatttatctacatttaatcatcttaccatccacggccaatattcatatctccttgggtttaaaagtttttgtgtacactcacagtcaggctcacaatgtcacaagaatcactcagcttttgacaattaatatgataagaacaaacttcttgatattcaattttggttacaagtgtacagttgtgtctttgtatatgtaattgttttataactaccaaattttctataaataatcttgttttctagtggacgatatatataatttaaaagagtttagagttaaatttaaattgttggtttacatatcctaagctagagtttgggttgatgtgttattcatcttgtatttttagggttcagggttaatcagtgtacaatgaaatatggttgttaaagatctattttttttattagtattgatcgtatgtataaaactataaaaatggttaactaattagaacaactgttttaatatttcatgtgatcaaaagttttaatttggaaaatattgcgtggatgagtcatatcatatctatatacttagttatttggagaagaaaaaaaaatcaatactcaacagtcaacactcaaacataaatatgagaaagtacaagtcgctcaaccaatcctcacaaatgcgtactcataaccgtacgcaaaactaacatcatgtggagtgtggacgttgacactagaaatcaatgctataagatatgtgtaaggttttcaaatagtttaatttaagatgctcttttttagtaccaaatgtgtaataccaaactaacatcacgcgagaatattttagattgattatccataaataatttactcgtttgatttgatgtatccatgcatgcatatataattccctatcatcttaacctcatatgaacattttttataatgaatgaaaaaaaaaaatattctactaatgaatataataaatattcggaacgatgaaacattagttcagttagctccttcgaccgtagttcaactaagaacttgtcgtcacaattttggaagctttataaaatagagagttcgttgggtccgtccaacttttgttagttgcctagttggtaaactttgtcctttatttattgcccacctccatttttatatactcacgtcactcaccaataaattttggttaaaagaaaaaaagagagagatttcttcttatttattaaccaaatttagtattttgataagttaagaaattaaagaagatttgtttatttcacttcatcaagctgatttcgtgggccagaagtgatcaattatagttaccaaaaataaaacaaaatgacctaaactccaacaccaccttcatgaagttgaaaacattttgaagatttttataaatacatccaaccccctaaccttttcacaaacctcatacccatacaatacaaaacattaacaaaaatcaaagtatg

SEQ ID NO: 36489 - DNA, 3000 bp, Unknown
  misc_feature (1)..( 3000): 2750-1469P.txt file - cDNA_ID_3096715; gDNA_ID_2936548; Annot_ID_193944
tgaggacacagtacttgacaaaggtgataaatctattccgccaaaagcaccacgtggcagagattatcaagacgtcatggacgtccgatgacggcaaagcgcagacatatgacatcatcgaagtcatacattacccaacaaacgaacggttgatcgccgacatagatatgtacgacgggcttcaccaagtcatggaaattcctgaaaacctcgagaaggatgtgccggtcgcgttcgtcggaaccggcgatgatatacgccgtctcgtagcaactatttccgacgaaggagttgaggaagcccttctatctaaatggcttgcccgtaacggtatctaagcccgatgggctgtttcctaggttattttagttacacattgtcgtttaaatttgcgcacgtaatatatagacaattccgtcgtggtttcgcttagtcatgtatagatacttccgttgtcgtttcactgttatagacactcttaactaattaatcagtaataaaaaaaagatttaagattaagatgtctctctctcttataattaataaaggacttccattttataactctctctgtctcttaatatttctgacttgtatcacataaacgacattaggcaaacagtcatatatgttatgatatatctcttttaaaatctgttgacatattcacattgaatttccaaaagtgggtcatgcaaaagcgtacgtacgtacaaacggtcagatactcagatatgttccaactatgaatctatgatctcaaccaatgtatgagtaatgaacgcttaacaacatgaacaccgctcatgcatacattaattgccatcgttatatatatggcgtggagatatctgaatataaaccacctttcgtaaagcttttttttttgtcaaagtacaaatatttctgatttgtataacacactacacacggctcctggttcctcaatggaggagaaccttagtagtgtatgatggtgacataaaacaacaaaaggtatacccaaatttggttaaataaattatcaattagcgtgtggaaaaagaagaagaagttaaggaaaaggcagagcagatagaaggtcacgatcacaatgcaaatcaaattacaagatgagaaaagagattcaattgcaaaatattattctttaaaaaaaaaaaaatggtatttagtagccaacaaccaatcgacgctgtataaaattgttttgccttatgaataacaacttaatcataatagccatctttagattaattaatgcatgttcgctatgtattttaattctttttgttaaaaagaaagtttagaacatttatgctttttttccgaaaacatttgtttgactaattaataacactatatatttacgtttattgagttttattagtgagtactagtttaatattaagacatctttaaacaatatttttttttgtttttcgataaacttagaaattatgtactgcatgtactcgataataataccgcgtttaaagcgttaatcacacctcttaaatagagttgaactagtgactttgatggctctcagaaacactaaatgttacaatcctttgtaaaatttgttggatagtgtagtagtaaccgagagaaaacgtcaaaatgatagcacaaattcatagactcttgtattttattttattttcttgtattaaaatggtttgtcagcaaaaaagtattattttaattcgtatgaaacccaaatttcaggtcgaataaattaagagaaatttatccaattgttttccaaaacttagtaggaataaatctatcaaagaacctaatttgaaagtaacttgacgaagaagaaacggaaaagaaaccaaataaactattatagtaagacataaataaaacaaattcgtttgtaatttattatttccaaatttgaatttacgatttttttcttctagaatttagttgtttttttgataaagaaaaataagtttcattgacattagaaattgttatgtaagctaaaataatttataacatagcatattttattttgtttttgttcttgttctaacgtttgaagagagagagaaagacagagagtagaaacctgcaagcgggcaatgtggatctttcttgcaaagcaggacatgaactgattctggagcagtggtaaaaatccagatcttctcctattaatcttgtatgatgtaaggagaaaaatttagtaaatctatccaagactcacaaaaataagaataagagatgatgaaacttatacttgaagttaccatcgaaatcgaaccagtttggattgaagtctttatcttcaaagaagagagtaacactagaacgcccatcggctaaagtttcaatgcaatgtgggagtgttttgactgcaccatagaaagagtctcaaacactcgaaaatctctctttcttattcatacacagttgtatttgtgaaaatgagaataagagattagggtttttgaatctttcctaatcttctcaatggttctctgtttactacccaacaaatacgaaagattatgaacactttttttctcccattttatcaataaaagttttttttttttttgctttgaacttgcacaaacgcctagattgtataacgtttgataatacataatgggtcgtttaaaattataaataggcctattatgggcttagaagtagatttagtaaacaaccgacaaaacagaagttataggtttaaatttaagacattaaattaaattagaagattgttataggtttgcggaaaacaagatcagatgggactgaccataggaacgtcgggccgtatacgaactcttcttctgagcccataatgggcctttctcagaaattaatttatttccatgagaacgttgccgtttcactaacaccaaacgttatgttctcgtcatctatcatctatgcaagatctaagcgaaaacaaaaaaaaatgccttaaaacatttgaagaagcaaaacgaagaaacagtgagagagatagaaatg

SEQ ID NO: 36490 - DNA, 3000 bp, Unknown
  misc_feature (1)..( 3000): 2750-1469P.txt file - cDNA_ID_3096732; gDNA_ID_2936548; Annot_ID_193940
gaaaagattttcactaggaagtgggatgtttggttctaaacgcatgcaaaatccggctgcgccatggaattttgttttggattcatatttattagtctccgacagcatgtcccatgatttcaaaagctctaataatttagtcattacttattagtatcaaatattaatattcatataaggataaaatgtcttaaggacaaaatctatatttcactaatattgcactagataacttaatttaaaaacaaaagattgaaatccccgtgttgtctacatagatttcttctatgatctaatttattctactagtattgtttcgtcttaactctcaaggtatcacggatgggaatatatcttaggacagggaataaaaaaagaagaagtaaaagttattagagttgaaagtaactaaaagaagaaggaaatccttgaatgatgatcagtggaatttgtaaagaaaagttaccaacaaaaagaatacaagtagagtattaatcaggatattaaagtcgtagtctatactctatagagaaaaacaaacaactccacgtttctacaaatcaaagagcttttgggcccgacgaagccgagacagagaaattgaagacaagatgtcgtaacctgtgtgtaaaaatcaagcccataattgaaattgggttgagctggtttgtagatgcaaatatacaaactttaaataaagaagcaaatatataaagaagcaaggtttaaagtaaaactttgatggaaaatccttgattagtggaacgatttttatcattttagatatttgtttatcatttttctatcaatttatgtaaatggcaatggcaagaaaaatagtggaacgatttttattcatattatttagtgatttactatttttatttttattttcaattataacaaaacaatgcattttagtataatagaaattcgaaatatcctgattctatcttctaaatttcaattctctagcttttctttcatttctcgaagccacaatcgtgaggctgatgagattgcaaagtttgctcttagaacaattgtaccggccggtttgtagtttttaattgaaggaaaaatttgtctaaaaaagaaattcgaaaatatacaaatttggtaagaaaaattcggatatttaaaattcgtaactttatatattgaaaaccttttatgtgtgtttgacaattgattttaaaaaaataaagataaatatttagaaacaaaagtgtttggtgatagagatactagaattaaaaaagaaaaagtaaaatagttgaggaaaattatgggatttccacataagtacatagactctcttttaaattatggaagataaactgtatttaagattttacattatcatgaattcactaacaataatcaacttaaaaacaagatacattacataagctagcagatcaacaaaaaaatcaacatagatttaaaaagtaatattttgataaagaaattgcatggcaaacatttaaataacatatttaacaatatattaaaataaaaacaaattaataaatctatcaatcatgagatgtaaaaaaaaaaaaacatgtgaatattattgtgtttagtcttgcaagtcattgaattgtttgagcaatttatgttcacaagtaatactagcattaatcatcaattctttgaaaaatttcatcagattatcatttgattatactatttgattaatgcaattgtttatgtggactatcatatttaccttaaaccgttcattatcttattctttttttttggtatcaagaccattcctcttcatggttgtcttgcttcctcaaagaccaagaatgattatgtgacaagtagacgatctaaaatactttatgtaccacttgataagatttgatcggttcggtttaatcggttctgtttaatcggttctgaccgaactttcagggctactataaagtcaaaaataatatgcaatataaacctttaatttatttacatttattataagtaacaataaatataatagatttagattaaataaatatttttaatatcttttgatgtaaaaaaaactttcatggctagacaccttaaatgtagagaaaactctttgagtatatatgtgatttatattgcatatattttttttatcaaccaaaattaattgtctaaatggttatctacttcacttttaactgaaagtaaatatataattaataatcatgattcatgagttttaacccaagtttggtaaaaataatcatgattcatcacttttaacccaagtttgtagagaaacgatagatttaaaatatagtaggtttctataagaaaataatatatgggttataatacaaaactgaaaatacaaattaaagttgataaagacgaaagtaaatgcgaaatttctgaatataatgatatttttggttgatatgcattgtataagtatattgaaattgaccataattttgtttataatcttttttcctatacaaaaggaattatatacgtcaaggtaagcttaacatggctaatacacacacctaataaaagggagtaagagaggatatcagtttcacgaacaagtctgtcctacatcaactccacacaagggatctcggtctaaatcccttgatcagtttaggaacatacttaccaaactcttctttaaagtataatgaggttgaattgaatcacaaacgaagttagggaagtagaattgatgaacgcataactccacgaccataactaaccccaataaacgtgcgtacctaaccatagtctctccttgcaacaatggtttttctttataactttcatatcaacacgattcgtttaaattatggattaagagcctcagtacaattaatagctaataatcatatgacacgtggatatcgttgaattaaagtaaactttctcttcttcttatttattacgattgatatatactgatctcttgtcttcttcactctccaacggttctgtactatcttcagagcttcgagaatg

SEQ ID NO: 36491 - DNA, 3003 bp, Unknown
  misc_feature (1)..( 3003): 2750-1469P.txt file - cDNA_ID_3096741; gDNA_ID_2936548; Annot_ID_193938
atcggagatgaaattcataccggaatcatcttcaaggaggattccatgttaccgggttcttgacgaagacggacgaatcatccccgatagcgattttattccggtacagaaatttcgagaatgtatatcaaaattgatatgagtttggtttagttctaaccgataataatttatgactgggaaggtgagtgagaaactcgctgttagaatgtacgaacaaatggcgacgctacaagtaatggatcacatcttctacgaagctcaacgtcaaggaagaatatctttttatcttacttccgtcggagaagaagccattaacatcgcttcagcagctgctctcagtcctgacgacgtcgttttacctcaggtaaaccgttgcgttcacctccactaatctcatttgcttctgtttgattgaaccgggaagttcaatgtttggtacagtaccgagaacctggagttcttttgtggcgtggcttcacgttggaggagtttgctaatcagtgttttgggaacaaagctgattatggcaaaggcagacaaatgccaattcattacggttccaatcgtcttaattacttcactatctcctctccaattgcgtaagaatctctgaacattaaccattttgattgttcttttgtttacatgtttttgctgaatctgttttctgatgttgattcttcagcacgcaacttcctcaagctgctggagttggttattctttgaaaatggacaagaagaatgcttgtactgttacattcatcggagatggtggcacaagcgaggtttataatctttattaattctcatttctttccataagaatcaacatttcaagaattgaaatttatttagtcttttggggtttggttgtttgggactagggagattttcacgccggattgaattttgcggccgtaatggaagctccggttgtgtttatatgtcggaacaacggttgggcgattagtactcatatctcagaacagtttagaagtatgaaactaacttaacttcctctgtttttcattacaaattagaccaaaacaaatcctctgttttaatgtgagcttatgtggtttgattacaggtgatggaatagttgtgaaaggtcaagcttacggtatccgaagcatccgtgtggacggtaacgatgcacttgcggtttatagtgctgtacgctcagctcgagaaatggctgtaacagaacaaagacctgttctcattgaggtaaaaaaatcacactagagatttatctcaaagtttacaactcttgaatttggtgaaataagattgttgttgcttttgttttgcggcagatgatgacatatagagtaggacatcattctacatcagatgattcaactaagtacagggcggcggatgaaatccagtactggaaaatgtcgagaaaccctgtgaatagatttcggaaatgggtcgaagataacggatggtggagtgaggaagatgaatccaagctaagatctaacgcaagaaaacaggtagagattctgaaaaccgctacgttatattgatgttgagattgaaattattttaaccgttttaatcggttgtgtgtgttttgtagcttctgcaagcgattcaggctgcggagaagtgggagaaacaaccattgacagagttgtttaacgatgtatatgatgttaaaccgaagaacctagaagagcaagaacttggtttgaaggaattagtaaagaaacaacctcaagattatcctcctggctttcatgtttgaatctagaggaactgtgtggttaaaatacctcatatagtatcatgtccatatcgacttctcattgcagactatttatattgtccacgtatcgaatagtaatcaagtatcaatgtagagaccagcatttggagcatcatgaaatggccttgagaatgttattttcatggtccggctgacccttaaccggttcaaactggagtaaatgagtgaatgttaatgctcgagaatgggtgaggctccgttaatcgttaagaaaaaaacgtgcctacctagccaaatgacatcttcctcttttgtgtttagcacaagtgaatgatccaaatatcatctacctaatatgacccataaaatagtatgtgattgtctttggatgttatcccataacataacttaaatttgggatgcatgcatatattatatacttcatataaaatgagtggacctcataagttgcggtttcgatttttatcaaaaacaacagttgtccactttttgattttgacacacccacattcaagcatctcctttcttctatattattactcaaagaataacaccccctaaggataacaccattacacaaatcaattctcagttaatcatttgtttcaatatatgttagtacttaagaaatattcgaatagttttacgtattcaaattttataaattcaatgaatgtttaattaccaagtcattttggcttggaatctattcaattattcaaaaaaataaataaaaaatactgcattttaacgtatcagccagtcaatatattacacgtgtcataaagcattacccacacgtttctcctgcctctttccctttcatttttttttttcattttttttgtttcttctcttgttgttgttatcttcttctagctagctctgtgaaacacttcaaatgaacaaatatatcaaataataatagtgtaattaagtcggaggaaaacaacaagaacccagaaagaggaacgaagaaactaattcaaaggtatgatcttttattctttgagagaattatgttttctttgtagcaaatcctctggtcttacgtttagtcactgaatttgttccacttctggaaaaatctagacaccagagcaatctatgaactttaatttccaatcactaccgtcttttgaggttgtaaaatcggtaaatggcagatttttcactctcattcctttgtggtgataggatcaagttcaccgcttcattttagtcattaaacaaagatg

SEQ ID NO: 36492 - DNA, 3003 bp, Unknown
  misc_feature (1)..( 3003): 2750-1469P.txt file - cDNA_ID_3096746; gDNA_ID_2936548; Annot_ID_193937
atgggaccactctcgtaccaattctttcacagcagctttctctttgaacaaaaacatgacactccttttaaggcaaagattgttattattggttttaggcttttgataactaaaggtaaaaaaaaaatcaagtagattctaaacactaaacaccactgtacattagaattcaaaatccaagagttgtgagagactaatcagtgcacaactgcacattaatctctatttacataacttaaaaccatatccaaaaggatacttaggcttttgcagaagcaaaaatttatcggaaaagtgatcatctttgtgtccgttctctgagctgttcctcctgaagattagactgcaaacactgactcgagtgtatgcgtttatcaagctctgcttcttaagccaataaatctttgtttcagatactgaggaattagtttcttgaatgtaagaaaagagaagcagctacttttttcatccctgcaaaatacagcagacagtttcaaacatcaaacctcgagagtttcaataaatggcaacaagatttgcataatgagactaggaatcattcagatagatattcttgaatcaaaacttcactaaaattgtagtctagacagtttcatttctaacggggaagataaagagcttcactcacaccattcacactctttcaaaaggtcatcaactagacaacaacattttcatacaaccaacaagatagtaaaagactcacgtgatgaaaaaacacaatgaaaaagtggaaacaatcaaaagtcagctttttcttttcttggcaaacaaaaactttcatcaaatcttattagcaaagcaaatccaagtagtattgcgtaagtaagatatgaaagatgaaaactttgattcttcagtttgaaaacataccttaagctgcttcggctcctaatactgttgttgctactgctactaccactcctctttgtgctcgattcagacattctattccaccattctttatcctctactttcacagtctcctcagagatcgaaggtctcggtgaaaccttacaagcctcatcctttttcttcttcttcttcttcttagtcgtatccttcatagctcctaaactaaccagaaacataattttgagaagaaacccactattatttcctcctccactcctattcggatcaacccgtttatcactcttcgtcttcctcacaactttactctgcctatttgctctcttaggcaattcatcgaacaccttccgttcattctcttgattcaccttaacttcaacaagatccttcaatgaaagctcgtaacacgactcaggcatcttactaaccatttccataagctcccgttgaccacgagcaatagcctgtgctttagaatccggcgaaagactccagtaatcttccggccggtgaaaaggaggaggactcttcgggggactggttctccacaaagtaggcgaacagacaccggaatctgagtgatcatcattgggaatactcggaaaacacaaatgggtattgaaggatttagcagaagaaggatctaacatcgtcgatgaatttgcaagactggatttttaaaaactcaagttttattgagaaacaagtttataacgattaacaagggaaacaaacaaaaaagatatcttgcttgacccgttctataaggattattgtattactaagagaaataaagtttcttttttctatctttgctattggggctttaatttaaaacgtcacgttgttctcagagtggttaaatagtccctatttaatatgaggacgttgttgttgttgctgtccaattttggggtttaatttaatttgcagatcgtattcgtaccggatttgaggaagtgtttacttaatggattagagttgttaaaagtcaagtgcttctagatcatcttcccataaaaagtcatcaactcttctagagtaattgattagtgtactcgtcaattgtcattaattgatgttcgagcatgctcacacttaaacaggttagaagagtatattttgtttcacgattatggtaaattcttagtattacaattggattgacaataaatagttgtacaattggtaaactttcaggagcgttgttggcctttgtaatgttttgagtcttttaatgtttgtgaaaagcataatcgacgattaagcgtgttttagacttttagtactagaagatgcgtgtttcattactttattccgttgcagatttcaagggaatctgatatactaatcattcaacgtgctcctcgtttatggccgtctatagttgtgaaagaaatagagaattgactttgggatgttgttccaaaataatgttatgaaatttagtagcgagaggcccaataaaatcttagaaaggcccaaaaaaaaatgggttagatccactcgaaagtggagagccttaaggtcaggacccgaaggtcaaccccgtctctgtcagaggagatgccaaccatctctcctttctatgaacacaatcgaatccactagtctttctatatatatacacaaaccaaaaactaccaaagttccgatgcggtattatttatatgagtttgcaagaaaaattccactactcatgccacttttaagatttcttttctgtgtcgttaattttggacacgtgaatatattatagtaggaaaaaatcatatcatataaatgaaaatataatagataatctagcattaaagttttttagatattgatgaattttttataattagtataccaccacttttaatatatttgtctaaatatcaatcatttagttagtttaaatatgaaaaaaactttcacaaattaaaatatggccaagaaatgatagagttccacgcgtcaactcttttctatttttacattatgcttttaaatggatgagcagtataaataatacatgtacatcttaaatcttaatcaatcaataatacaacctatagtatttacttttaaaaaataaaaaatacaagaagtagagaaaacaaaatg

SEQ ID NO: 36493 - DNA, 3000 bp, Unknown
  misc_feature (1)..( 3000): 2750-1469P.txt file - cDNA_ID_3096751; gDNA_ID_2936548; Annot_ID_193936
atttagattatgtctcaagctagaaacaagggttttggatctagcaaaccagatcgccatatctgtcaaaaaatggacaaagaagagaagaagagaagaaaatggagaagagtagagaagaagaagagagaagttgtcgtttttaacgatgtttaagggcaaaggattagaaggacgacaagtgcatgtatttccttgtcggacttgacatgtcatccgtatccatctccaacttctttttcttttcttaaaatgattatttatcttcctctctttttgggatttttagtttttacactaattatagtggacaaatactattgaaaaattaaaaaaatcaaaatgaaatattgacagaagttgtaacacctacattagcaaatcatttaaagattttttcaacaaccaaaccaaactgtacttgtgctttttattgaattttgatctttatccaacgatagcaaaattgtaaagtcacctacttgcgtgtcatttatatctttctttgaattttccatgacgtccgtgaaaaacaaagaaaaaaaaaagcttttttattgataccacgagaaaacatttttccatttatagtgtagttgaaagttacacaacaatcaccataaacgatttgatgatggtggaattggtatttaaagattcattggtatgtaacatctaacctaacagtaaagctttcttggacctaaactggtatgtatcatgtatggcttggactaacatcatcactagtagggggtttgttaaagattgtgtgtttcgtatctaaaaatgtgggaacagagttactgacttcagattgtcgttgattctgtggaagcatctcttaatcaactagtgtgtgtgatatgctctcctttgagcaaattccacattatttaatgacatactagtataccacacaattgttcaatttgttgaacaaaccaattacctcaaattcttgctcatttgtagcaaaactattttaccatccagttccatgccattacatctaattgtaccattgtattaaacactttttcagtctaacttaatgttcaacacttcatatctgagtcgaaatcaatgacatcatagctaactaaaataattatgttccaaagtgttcaagttatataatctaaaaatgttttatcaccgatttaagtacgcacgaatgtttgaaatttaggagtcgatatcttattgaaatggttaaatgggaatattgaattataagaattttaggataaagataacaatataaggaagcctagacatgtctcgccctatattataagataaaaatcatatttttgttatttgtgttcaccagaattcatggttccaactgcaaccggtggagtcctcccgcatattccaagacatttgagacactctgcaacaaaggaagtgggtagacagtgcttatggcacaacacttggcactctttgtccgactttgcttcgcctcccatcgtaaataacgccattagtagcatcgtgatccacaccacactcatgatcttcttcatcctcattttgttttctctacttcttgtattttttattttttaaaagtaaatactataggttgtattattgattgattaagatttaagatgtacatgtattatttatactgctcatccatttaaaagcataatgtaaaaatagaaaagagttgacgcgtggaactctatcatttcttggccatattttaatttgtgaaagtttttttcatatttaaactaactaaatgattgatatttagacaaatatattaaaagtggtggtatactaattataaaaaattcatcaatatctaaaaaactttaatgctagattatctattatattttcatttatatgatatgattttttcctactataatatattcacgtgtccaaaattaacgacacagaaaagaaatcttaaaagtggcatgagtagtggaatttttcttgcaaactcatataaataataccgcatcggaactttggtagtttttggtttgtgtatatatatagaaagactagtggattcgattgtgttcatagaaaggagagatggttggcatctcctctgacagagacggggttgaccttcgggtcctgaccttaaggctctccactttcgagtggatctaacccatttttttttgggcctttctaagattttattgggcctctcgctactaaatttcataacattattttggaacaacatcccaaagtcaattctctatttctttcacaactatagacggccataaacgaggagcacgttgaatgattagtatatcagattcccttgaaatctgcaacggaataaagtaatgaaacacgcatcttctagtactaaaagtctaaaacacgcttaatcgtcgattatgcttttcacaaacattaaaagactcaaaacattacaaaggccaacaacgctcctgaaagtttaccaattgtacaactatttattgtcaatccaattgtaatactaagaatttaccataatcgtgaaacaaaatatactcttctaacctgtttaagtgtgagcatgctcgaacatcaattaatgacaattgacgagtacactaatcaattactctagaagagttgatgactttttatgggaagatgatctagaagcacttgacttttaacaactctaatccattaagtaaacacttcctcaaatccggtacgaatacgatctgcaaattaaattaaaccccaaaattggacagcaacaacaacaacgtcctcatattaaatagggactatttaaccactctgagaacaacgtgacgttttaaattaaagccccaatagcaaagatagaaaaaagaaactttatttctcttagtaatacaataatccttatagaacgggtcaagcaagatatcttttttgtttgtttcccttgttaatcgttataaacttgtttctcaataaaacttgagtttttaaaaatccagtcttgcaaattcatcgacgatg

SEQ ID NO: 36494 - DNA, 3000 bp, Unknown
  misc_feature (1)..( 3000): 2750-1469P.txt file - cDNA_ID_3096755; gDNA_ID_2936548; Annot_ID_193935
caaaatatactcttctaacctgtttaagtgtgagcatgctcgaacatcaattaatgacaattgacgagtacactaatcaattactctagaagagttgatgactttttatgggaagatgatctagaagcacttgacttttaacaactctaatccattaagtaaacacttcctcaaatccggtacgaatacgatctgcaaattaaattaaaccccaaaattggacagcaacaacaacaacgtcctcatattaaatagggactatttaaccactctgagaacaacgtgacgttttaaattaaagccccaatagcaaagatagaaaaaagaaactttatttctcttagtaatacaataatccttatagaacgggtcaagcaagatatcttttttgtttgtttcccttgttaatcgttataaacttgtttctcaataaaacttgagtttttaaaaatccagtcttgcaaattcatcgacgatgttagatccttcttctgctaaatccttcaatacccatttgtgttttccgagtattcccaatgatgatcactcagattccggtgtctgttcgcctactttgtggagaaccagtcccccgaagagtcctcctccttttcaccggccggaagattactggagtctttcgccggattctaaagcacaggctattgctcgtggtcaacgggagcttatggaaatggttagtaagatgcctgagtcgtgttacgagctttcattgaaggatcttgttgaagttaaggtgaatcaagagaatgaacggaaggtgttcgatgaattgcctaagagagcaaataggcagagtaaagttgtgaggaagacgaagagtgataaacgggttgatccgaataggagtggaggaggaaataatagtgggtttcttctcaaaattatgtttctggttagtttaggagctatgaaggatacgactaagaagaagaagaagaagaaaaaggatgaggcttgtaaggtttcaccgagaccttcgatctctgaggagactgtgaaagtagaggataaagaatggtggaatagaatgtctgaatcgagcacaaagaggagtggtagtagcagtagcaacaacagtattaggagccgaagcagcttaaggtatgttttcaaactgaagaatcaaagttttcatctttcatatcttacttacgcaatactacttggatttgctttgctaataagatttgatgaaagtttttgtttgccaagaaaagaaaaagctgacttttgattgtttccactttttcattgtgttttttcatcacgtgagtcttttactatcttgttggttgtatgaaaatgttgttgtctagttgatgaccttttgaaagagtgtgaatggtgtgagtgaagctctttatcttccccgttagaaatgaaactgtctagactacaattttagtgaagttttgattcaagaatatctatctgaatgattcctagtctcattatgcaaatcttgttgccatttattgaaactctcgaggtttgatgtttgaaactgtctgctgtattttgcagggatgaaaaaagtagctgcttctcttttcttacattcaagaaactaattcctcagtatctgaaacaaagatttattggcttaagaagcagagcttgataaacgcatacactcgagtcagtgtttgcagtctaatcttcaggaggaacagctcagagaacggacacaaagatgatcacttttccgataaatttttgcttctgcaaaagcctaagtatccttttggatatggttttaagttatgtaaatagagattaatgtgcagttgtgcactgattagtctctcacaactcttggattttgaattctaatgtacagtggtgtttagtgtttagaatctacttgattttttttttacctttagttatcaaaagcctaaaaccaataataacaatctttgccttaaaaggagtgtcatgtttttgttcaaagagaaagctgctgtgaaagaattggtacgagagtggtcccattgtggacttatgagacagaatatttgttttggagttgttgttccatccaaacgcgcgtcttcatttcctgcgtttgggaaacgcgtttaccgtggtttgcgataagaaaagtcaacaatgaaagcgatttgggaaatttcttggtatacagttgctattggctaatgatcattacttacgacctaaacttattatattccactaatgttaacgaaaagaataattaagattcttattttaatttgcgtcaccgactgttactttatcatatagagagacaaaagccaaagcacaaaacttttgcattgtcttgcaaaaataatagaacaaagaagtcgcagttgattttatggacggctaaggctgatgatgacctgacacaaaactccgatcgtgttcgattacaagtttagatttttctgagaacccttataattgtttcaacttttggatcttcacacgcataaattttcgcttcgtctttcatcatctgttctcaagtttagagtctatagtcaggtaaaggtctttgcctttgttttagttcaattatgatttctgtttatgttgtgttctcttcttccttgttttccagatgtagacacattatgggtttaatttgaaactcttgccaatactttgattcatactttcttatttatgttttgtccttgaatttggatttggttatttgatggcttaatctgtcctgtgtatctattgaattgccttcttttaagagtctgttgtataattgaatgcttctggcttcgtgatctggtctaatttacaagctggtttgtgaattgtgatagcctttgtttgttttcagagtctgatcacagtgatattgataaagtgtttgatctttaacttgcatgttatatctggaattaagagattatgttaatggtttttgaacctgtgttcattaggaaacttggaactttaggatttgattgaaaaagcaatcttgcgatg

SEQ ID NO: 36495 - DNA, 1928 bp, Unknown
  misc_feature (1)..( 1928): 2750-1469P.txt file - cDNA_ID_3096776; gDNA_ID_2936548; Annot_ID_193930
gaattcatcttacaatagaggataacatctttaatcttctcatctctgtcttcctctaccatcgaactacaaccggaagaattagccggagaagattttattgagtggatggaactgctcttccttgtcactttcttagatcttcctcgttgctcaccttccgccgccacgtcaaagcacatacacagccgcataaatggtttcaggaatccaaaagttcttccacttgtttttggttgtgacattgttcaaagatgaaaactacaaagatcgctcaagaaatggaatcttaagaatacgaatccacgacggtggtgtctagagtcgagagatgtaaaatgtagaagatttaagtgtatcttttagtttcttacagattagggataatgactatatataaacatacaaaaggtaattacaattttgtgttttgattctttcgttattttgtttctataacaaaaagtagggcattttctgaaaattagaaagttttggtctttctagagattttttgaaggaccgtgatgtgtgttagtaatagtaatagttatttccttatttgaatgagcttattaatgtattttactaatttgttaagttttgaattgatgttaccggctaaatttgagaattcaattactgttaccacatttgtgggatacaaaatctgcggtataatatcgttattcaaaaacaaaaagaatgaacatttattgttgagaaaaatattggcgaaatcgatgctatcctttgattgaagcaatcttatagcattggtaagatttttgtttccaactactagcttttgctaagaataactatccgactttatcgctatcttttcgacttttttcgtttgcaatatattagcaaaataaatcatgcatgtaataataatataactgaaataatgataaatgatgttataagaagaaagaaagaaaattacataaatgctgcaagagtaacttgtctgtccaaaggtatgaaaataaaaaaggtagctagggcccaaaagcccaaaatacatgctgcaccatgtttctaggtcaaagcagcaacgcaatctcgagtctcgttatagtattccacttttcattgcttcatcacacgatcagatctagatcaaaggtttgggacatttaccacaacaatgtggctcttcctatatcaatcagctcaatgacggttttgtgtcttattctaataatctatatataaccgcttgccattccaatgatgaagagggtagaaatctcgaagagcaaccttttcgtaaacttgttgctctttagattttgatgaaccgcacctaagttcttagctgtcgaatctagcgcctaattaagcttgcctctcaagtcccaacgttttcaacccttcgatagatagcgattagcgaaccaacatgaagatcaatattaattggtggaataaattcacaaatatgagattttaatgattagtcaatgtagttaaaatcataaacccaaaacttttatgataacaaaacttgagtaacaagtaatattttttgtttgtatcaactaaatatacgcaagtactcctatcacaattaagtcaaaatcactttcgagtcaaactcgaattaataatacagctatgatgaataaatgccatccggaaaaaaagaattaaggtttgacttcctattatttcacaatttataagtaatttgtactcgtatatatattttaatcctaacagtactacattatcgtcaacccaaaataatattgggatcggagcttaccatagatctagtttttaaggctgcccaatcaaacttgtaggtggtgatcgacgatgataaaataacaattgagggttgttttaataataataaaatgctaaaaaataataaatacagaagagaattctacttgggggaataagaaagaatg

SEQ ID NO: 36496 - DNA, 676 bp, Unknown
  misc_feature (1)..( 676): 2750-1469P.txt file - cDNA_ID_3096788; gDNA_ID_2936549; Annot_ID_194000
ttccaagaaagatatggttaggtctcaactttatttacatttttagtatcctaagttatctcatgttttctttttccgcttggtattgcttgagtaatggtgtttagtaattgagtttggttgtgcattttattctttgaagtatattggtagctacagccctagttgagaagaatgagtgaataagtttgccactttggtatgatgtacttatctaaatctgtcagatggttaccagatcaatagtatttcttcttgatattgcttgagtaatggtgtttagtaattgagtttgattgtacattttattcttcgaagtatattggtagctacagccctagttgagaagaatgagtgaataagtttgccatgtacttatctaaatctgtcgaatggttaccacatcaataatatttctagtgaaataaataattttgataattgatgcatcgagatacagtaataaatgtggcattactctgtatggattttaaaatttttataagatacggtttctttgttttgttgtgttagacatcatcttataacttgcaaatccataaagctttcaagcacggaatgaatcatcttcagtctatgaatcctgcagatataatcaatatcagaaaaaataaattctggagcttgtttatgaatcatgcgtcagttagtaatg

SEQ ID NO: 36497 - DNA, 3003 bp, Unknown
  misc_feature (1)..( 3003): 2750-1469P.txt file - cDNA_ID_3096808; gDNA_ID_2936549; Annot_ID_193995
tacagcggcagttacagctgagtttagggtatgttgcgtttgactaaagacaaaatggctgagttatgacaaaacgacgaaattatgagtataatttagcctatagttatggctgatttataaaatatgtctaagttatgagataatccagcctacgttacggctgagttaataaaatttgtctgagttatgagaatttcaagcataacccacacaacgttatggctgagttatgagaaaacggctaagttatttcctcgacacggctaatttatcatttttcggctggctgagttatcaaagatgccttagttatgggatgtcgttatggctgagttattttcgagtgtcataaatcagccgtagagagctggattagcggataacttggccttgttaagcctgacttattagcaaaagattaattactataatatcatgcaattacaaccgaattattaaacgatacggctgagttaaagattttcggttgagttacgacattagaaggctgaattaacttggcatttttttgtttttaattactgtaatagtattcatcttgcgactgacttatagctttgcttgatagctgattgatttaggcaaatttacatgttcgtttggtggcttacttgccacttcatcaattaaaaaatgacgtctgatgcaacattccatgtcatcatcatcaacggaaatacaaaacatccctagttttttcaacttctctcttcttctttgtgttgtttttcacccgagttgtctttaacctgtgtctttcacatcaccagaacttttaattcgtcatcgtcttcctcatttttcttcattttctttaatccttctctcgatatgcttgcctccgattgttgtaaaccagcaagaaaggcccaagaaaattaggattacattatctttggaagtcggcattggaaataaacgccttagaaagcaacatgcatgttctctatctaaacaagttgggtataatgctaaaacttgtcggacatagtattgtttgcaagaattttctttctcttctttatttattagcagtaatatgtagttcgtgacaaatcacctatcattatagactctaagaaccataacacattataactcattgagttttaacctttcgtgacaaatcagccatacgcattataactcaactgtaacatgtaaggttcggtaaatttacatgtcacggctgagttatatgtttcagtaaagatgaaaggttgtgtaaattatatgttacagctgatttataatgcttcagagaagacgaaaggttcggtaaatttacatgtcacagttgagttatatgtttcaggaaagatgaaaggttgtgtaaattatatgttacagctgagttataatgcttcagggaagacgaaaggtttggtaaattaacatgttacgattgagttatatgcttcatgaaagaagaagggtttgtaaattatatgttacgacttagttttaatgctttggagaagacgaaaggttcggtaaatttacatgtcacagctgagttatatgcttcaggaaagacgaaaggtttggtaaatttacatgtcacggttgagttatatgcttcaaagaagacaaaaggtttggtaattacatgtcacggctgagttatatgctttagagaagacgaaatgttttgtaaattatatgttacgactgatttgtcacgatttacatattacgactgagttacatcacattacagctgagttataatacatatcggaaaataatatttttgggaagaaaatataaaatttattggtcaaataacaacaatcaaattaaaaacttaagaatatatttaagggagacatatgaggaagactaaactgtatgaattaaaacatagatagaagtagaagagtcactagtcaacaaaactgtatgaatcaaaacatcgatagatgtagaaatgtctccaaatagatcgattgagaggaagactaaaagagaatcatgtaaatccaaagaaaaagagtagctattactgctttcaactcaaacctgtaacaaatcatgtagaattccatagacctctttgatttggatttttatttttgatgtttttcgtgaacgaggttgcgtgtagatctgacgaagcttttgatttgggaccctatagcaagcgttgtggctctgaggtctaggaagatccagcccaatcatataatttgaagacctatgtccatgttgtacccaagttgcaattattagatctaaaagcttttcttggattttgagacaaaaaaaaagaggagggaaataaaatgattttgaggagtgtgagattggtgacgtgagttaatgacatggacagtcaaatttttatttattattttttattaaaaataaaataatcaagagtgttaattgtaattacacaaatactcaaaatatatgagtaatttttaaaacatgtataatatcactacaagaaaacagacaaacaacgactacagaaagcaacaacagatgtagtcgtcgtttttggcgactacgtcacgacagttttacgacacatatacgacaacctgaacattagtagtcaaatagtcgttattttacgactaaatatgttagtcggcaaatactcgtatagtaacgactatttaacgattatattattgaagggagacgtttgtcgttacatagtcgcaaatggacgactacaatttccgactgcgacagttagtcgccaaatcggcgactaaaatacgacacatttctgtaatcgtaaaatagtcgcaactgagtcgcagagtagtcgcattaagttgttggaaaacgttttccgcattgccaagtaggtacacctaatttgtttgttgtagtcgtaaattagtcataaaaattcgtctatataatcaaaattcacgacaatcttctttcaccaacaaatcaaaacaacaatcaaaaggaaaaaaaaacggaaaaaatagaaatttagtttattctataatg

SEQ ID NO: 36498 - DNA, 3003 bp, Unknown
  misc_feature (1)..( 3003): 2750-1469P.txt file - cDNA_ID_3096874; gDNA_ID_2936549; Annot_ID_193981
atctcctttgcataaagttatattctgtgtattagtgtctcatttctcgttgccattcaacactctgaattaggatactgtgtggtgttttgcaaaactgctcttgtgctatgactctggctaatgatttcggatattcgaccgctatgtcttcatcttattcagctcttcatactagtgtagaagacagataccacaagttgcctaactctttttgggtttcatcaggtcaggaactgatgaataaccctgtaccgtgtcagtcggtctctggtggcaattctggtggttatttgtttccttcttcctctggatactgcaatgtttcagctgtcttgcctcatggaaggaatttgcaaaaccagccacctgtttccaccgtgcctagagacagattggctatgcaggattgtcctttgatagctcaatcctcgttgattaatcatcaccctcaagagttcatagatccacttcatgagttctttgatttctctgatcatgttcctgttcagaatctacaagcagagagtagtggagtaagggtggactcatccgtggaacttcataagaaaagtgaatggcaagattgggcagatcagctgatttctgttgacgatggttctgagccaaattggtctgaacttcttggagattcaagttcccacaatccaaattcagaggttcagtttctctagccatatatggtctctatgtttgttggttgtccttatgttatttaatcagtgttttgcataattggtatcagatacctacaccatttttggatgtaccaaggctagatataacagctaaccagcagcaacagatggtttcatcagaggaccagctcagcggcagaaactcatcatctagtgtagcaacatctaaacaacgtatgcgttggacaccagaacttcacgaggcattcgttgaagctgttaatcagcttggtggtagtgaacgtgcgtaagctttctccttctattgttcctgaaaataattgctcaaggatgttaaccgtacactgattcttctataatttccatcataggagccacccctaaggctgttttgaagctcttgaataaccctggcttgaccatttatcatgtaaaaagccatttgcaggtttgttcttatccatatactattttgttattgtatctcatactgcttctctgctaagctaatttctcatttctcaccgtctttctgttgaacttcttttctacagaaatatagaacggcaaggtataaaccggagacttcggaagttacaggtaaggagttaaaatactttaacataatactactgcactttttctaagctttaaagtattggtcactctctagaagaacctaaactctcgacaaacagcttacgaatgtatgaactttatttatttcttgcacaggagaacctcaagagaagaagatgacatctattgaagatatcaaatctcttgacatgaaaacgtaagaatcttcagtcttctgactgcataacaaaccagtaatctttcttcgtattcttcagatattcttgtatgtatattttgctagatgattatgttactatttcttttccaggagcgttgagatcacacaagctctacggttacaaatggaagtgcagaaacgtctccacgagcagctcgaggtaatgattttacatgcctaactgctaaaaaactatccttctttacctgatttcgaacttagatagagtagtagttgtgaatatcatgagtattatctgattttgtctaaaccatatgccagatccaacggtcactgcagttacagattgaaaaacagggccggtacctacagatgatgttcgagaaacaacaaaagatacaagacaacaagagctcttcttcagaagcatcaccaaagcaatgcaatggttcatttgcagaagttgaagttggtcttgagacactaacaggggaccaaaatgaatctgcttcagcatcaaggaaacgtgtcagagaagattaaagcatgtttaatttgatctcgtttgacgaaacatgtttattgggaattaattgtggaaaccaactccagttttgttaaaagaatctgtttctttcttagctctgtattgttctagtttagaagcagttgatttggccttgcatggctgcaacactaactaaagagtaaagactaattgtgtatatctacatatacatttttggggacgatttgtgtcgaaaaatcctttttcaatttttgatattgtatgtttagtccctacaaaatcaatcagacaagatattttctttaggacaatgaccaaatttttgattaacaattaagatattgcactaactacttacctaaacatagatattgttaattactaccctaataaattgcacaaatcaatccctaaaactataccgaattcattaatgctaaaatcctaattaacaaaatccggaaatcaatcataactaaccatatttacaattacttgattcgaaaataattttagttttaaatgctaatgatatcttaccaaaatttattcttcttttatcaattgcaacacaaaatccggtaagtaactatgcattaatttttgttacctcaaataaacatacaatatactagagaaatctgtatttttgttcttaattggctttattcctaaaaatatttatacaaaattttgtttttgatttgaaaatatataaatcgtatatgtagttataacaaaaaactattttcaaatcaaatagaattctagaataaaccgtaataatattttaatgccatatctaaaaaactctataaattgatatattgttctaacaaatcaatatttaataagaataaattaattttattcacgttttaatttaatgctaataaaaaataatttattctaatggtttttagttatgacattaaagatttattgccaaaaatgaaataattcgaatgctaacaataaacataaatgtgatcgagttctttcctacaaaaatg

SEQ ID NO: 36499 - DNA, 3003 bp, Unknown
  misc_feature (1)..( 3003): 2750-1469P.txt file - cDNA_ID_3096878; gDNA_ID_2936549; Annot_ID_193980
taaacattttagctaataacataagagtgcaccatatttatttaataggggaatgtaccatatgacccgaatgcacttttacccaaatccaccaaaaaagtcttgcaaaaatactatactgataagaaacgatagtctgttttgataggtataagattagcaaatatattagttagcttaaattagttaaagaatacaaattgaaaaggtatattatactttattcgaatatagtatcaaaacttatataacatagtgttgttgtttatagttctgattcaatttcattggtttgattggtttaatcagactaaggacattggaccaggcggttatctccggttttgggatggctgagtaaaccgaaagatgatgaagtaaagaggagtctctaactgcagtggagggtcttcggttctcacgggataaggttttaaccaacccgagtttgttataaagtcatcatcactttcttcttcctttgtaattcttgttcttagagagagagagtaacagagagagaatccgccattgttgtaagctcaagtttgagcataactcttcctttgatctagtgaatttgccggattgattcggctccggacgtaggttagatcacaccaatctagctgaaccgggttaacaaattgagtcttgtgttcttctttacttgttcgttcgtgttcttgagctgagttcattgtgagaatcggagattgaatctataacacatagagatttgataaatttttaattgttgaattcttttttttgtgctaatttttatgtgattaagatttatttgatttcatatataaaatactaaattgttttacgaacttatttgtttataatttggtaacagatagatattcgaatattcaatatattttgcttcagtttagaaaatctttgatgatccgtctttagatccaataagccctataatctagatattaacctgcagtataccgcagataggtttatattttagttaaactaaaattttttattgtaaagatgatttaaaaatatataatattattttattttattttaaatgtatagtaaactgtgagttgtatatgttttgttgatattatctatattgtttaatgtttaagattatacacttgtagtttgattgttaatttaagagttccaactgtagtataccatcttgtattaatattgatctaaaccgtcaattctaggattttccagcttgtattaaaaattgaatcacatcatacacataaaaaaatctaatatattattaattattgtagtatataagattataaattttcaatataatatgtatgaaattgaatataaatatctcaaattatgacccgttactcagtagaaagttttcttaaatctatttttcatccgttataatatttattcatgtattgaacagtttatattcgtttttaaaaattcaaattatgcatatgcaaaaaaactctaattcttttttttttataatgatgatattattttttcgcaaaaatagaatcatataaagatgagaagtgaactataataattaataaaaaattaatatgataatttagatatcaaatctaatttgttgattttaattggttatttttttaaaaattaataatgtatttcgtttttctaattaaattaaattaattaaaatttatatatcaaatcttatatgttgattttgattggttattatttttggaaattaataatgtatttcgttctttaattaaattagtatttgactttctaatctttaaagagataaattaatttattctttaaatttttatttctaatagcatacctatgtaattacttacaaaaattaaggttacatttaaaatgtacttcccaaataatatagtaggatatgacattattataaattgtattctattgtaatgatatggttagaataactagttacttaattaaagtttttttttggttatacactcaaatttccgtatctaatatgcctaaatccgaagatctttaccaatttgtgcctattttaataagatactcttcaaacaaaacaacaataaaaatgtaggtcccttaattccttaattttgcactttgcacagccaccagtgaggcagagatcttctacgacagagataatacaactttcgtactcaacaaaaatctcagtcgttgataaaatacacgtgttaaaatctaacggtcttgataaattaaaggaaaaaacaaaagctggaaacaacagagacgtaaaaacgatagtttaggaaaacaaaacaaaaaagtgttctttgatcaatcaataatcattcatcagggccctgtgttctctgagtcaagtaagattcttttcgacgattccatttactctttgattagggttttatcattctcaatcagggttttagtttaaacatcgaattaagcactggattagctgattttgtgtgatttgatttcaaagttcacagcttttagtttctctgatcctaatttatgatttgaagtttctatcaaaaggtttgatttttatgttgactttgtgatgatgttaaaccccatttagctttggatcctagaattgtctttaggattgtaaagttttagtttttattgaatttgattctgttcatggtagcttcttctttaacacgtctctttggtttcatcaaaagccatatttaactttgcctaagtggacataaatttcattctctgagtactgattccatatcctttatgtaatgtcctttcactatccacatgtagatgcttctccatgtagagtttgtgatctagagcaaaacaaaaacgttagaaatattcttgagagattgtttcttttgactagatagtaagggaattgattcaatggttcatctcctttgcataaagttatattctgtgtattagtgtctcatttctcgttgccattcaacactctgaattaggatactgtgtggtgttttgcaaaactgctcttgtgctatg

SEQ ID NO: 36500 - DNA, 3000 bp, Unknown
  misc_feature (1)..( 3000): 2750-1469P.txt file - cDNA_ID_3096976; gDNA_ID_2936550; Annot_ID_194029
ggaaatctaataataacaattgtttgacatttcatttattataatgaaaaataaaaatatttatttctattcaacccatattgaaactcatgtgtaatggattcatggaaatatctaataaaagataaataaaaaaaagtttaacagtaatcttaaactattgaaagcaaattatcttaatgaaaaattttaatttgtataattcaaaatcatgaatcaaatgtattattaaacatgctgcgtattaattgttttaatataacttttgagggaaaatccagtaaaaaaaaatcttcaaggtgacaaattttttatttgctcttaattttcttacaatataatacaaaacaaagttaaggaaacaactcagtaatatgatagtttaactttaaactcctaattttattatgcattatatggatatgtaatatcaaatatcaatttctttttgttgttttaagttcttaaagagaatatttaatttattctaatttaacttacatgacgtctttcatatttatcaaattttatatgatttaattttccctttgaaccgatattctgagatctttagtcaagtaagagaattttccattgagagacatcttaaatcatatgctttaaattttcatatgtgaagaaggttcatttattatttcgacttccaaaaaatttcgaaaaaaaaattcccgccaaattttgttttcaaaaatatttttcccgccaattttttttttttttggcgggaaatagatttacaagggattttaaaagaattttaaaagatttacaagagattttaaaagcgtgatttacaagggattttaaaaggtttttaaaagatttataagggattttaaaaaggttttaaaagatttacaagagattttaaagggatttaaaagatttacaaaggtcttttaaagatttttaaagggtttaaaattgttttaaaaagattttaaaatatttacaagaaattttaaaagggttttacaatatttacaagggattttaaatggctttaaaagatttacaaaggatttgtaaagattttaaagggtttaaaagtgttctgaaagatttacaagggattttaaaaccttttaaaattacttgtaaatttttttaaacccttttaaaatcccttgtaaatcttttaaaattcttttaaaatctcttgtaaatcttttaaaactcttttaaaatcccttgtaaatctatttgccgctaaaaaatatttacaaggatttttaaaatcatttttttggctgaggaaaaatttgttacgaaaaaaattttggcgggaatttttttttggcgggaaaaaagtttggcttaaacttttttttaggcgggaaaaaaaaattttggcgccaaaaaattggcgggaaaagttcagtttccaattacatgtttctattagatgagggtaatttggtcattttgttcaagggaaagggtagtttttaaaaatggacaacataaaagggtattgttgcaaaagggtagtgaaaaaagggtagttttgcaaatcttccttgttattttagtacacttatcatattttatatgacttttgttttcctcaaaactgacattcttagatctttagttaagttggtagattttccattgaaacttatcttaaattataggctttgaatttttaaacgtgaagaaggttcatctattttttgactttcaagacaattgataatacatgcatattcattttcacaaaaagaaaaatacattcttgaatattttaagttcttatatagtaaaatataccgttttcacaacaaaaaaaaaaaatcagtttagtgcattgaacatttttaatcaactaaagtgtctttttaacacatcataataatttgtaaacatcaaaattgaaattttatttaattttgagcgatatattaacaatttttaaataaattatatatataatttaacgtctttcaatatatttatcagattttatatgacttattttttttgagccgacatataagatctttagtcaagttagagggtttttcattgaaagttatcttaaatcgtaggctttaaatttttaaatgtgaagaaggttcatctattgttttgactttcaagaaaattggtaatacatgcatttgcatttttaaaaaacaaatactgaataatttatgtttatttttttggaagaaaaacttactgtttcacaaaaaaataatttaaaattaagtgcataacttttaatcaactaaaatgtctttgtaaaaaacattttgtaaacatcaaaattgctataattaattattttgagcgatatattaacaattatagataagttttatatataatttaatataaatattattttatattcaaaactaaaatcgaatatataatacacgcatcgcgtggacaacttctagttaaaaataaattttagttttgtggtatttttggaaaatcaaaacttacagtgatatttctaagaattgcgtaagcggcaaaaaacacaaactttgacgtgtttgttttatttgcgggactttgcctcatagtggtccaccccacttaccaaaaaaatccatgaaacatacttattttcataagtatttttttaaaaatccacttatataagtatctaaaaaatatgataaatccacttatataagtataaatcgtcaaattaacaacgcttacttttataatttaaaacaaaaatcaagattagaaagcagtcgacgaacccccacacaattattctgattcatgtccggcggctagaattttttttgttttaaaaagattaatgagaaattgtaatactttacatatacatatgaagtacgaacagtacaagcttgttcccatctctttctttcttctttcctctttctctctcagtctcttcttatctccctctcttctcaatcgcttggtctctttgagaattgagattctttttggtttgtcccgagaagaaaaagaagagaaatg

SEQ ID NO: 36501 - DNA, 3003 bp, Unknown
  misc_feature (1)..( 3003): 2750-1469P.txt file - cDNA_ID_3096981; gDNA_ID_2936550; Annot_ID_194028
tgacccctgtgcaacgttgacaccctttactcgataattggtctaattttttttttgaaaattttctagatcgacgatgtgcaatttgtgcattgtttgcaactccgacgattggaaacctaaatttccggtacaaatttaattaaaccggatggtttggtttattatatgttctatattattctggtttggagaatcatttcttctcttctaaaaccctttgcgtctcttctctagagaatctctcggttgctccaatggctggcttattggttactattaatcactgaatctcacaaattgatttcgcaagctgactcctttgaagccatggcgattctgctcagatcaattctcaaaaatcaaactttgtttaagactctcttgaaacctcaatgcgcgcctttgattgtctccagaaactttacatcggaagaagcttataagaagccactctctgttttcttcgaagaggctgttggattgagacccaaatcagaaacgagcgaaatcgaagaagaagaagaagaaggcaacgagttgaagagaaagcttttggaattggaaaggaaactcatagaactgaagaaatcggaacctgtgagaaagaaaaaacagaagggagaggttgtgatatcagagcaaaacgagaaaaggcataatctttacaagttgtttaagggagatgaagagaaagaggtaaagaaacatagtaaggaaaaggaggacgtaattagggtttataaggagcttcctatagagatggtgtcgtttgtgaggcttctgcataaagaagggtatttgaacaaggctaatttcattactggagaaaagttggatatggggaatcttgatgaagagtatgctagaacttttgttaagtttgctgccgaaagatttggaaaggattaccaggagatagcaaagtgagaatctttttacttctgtattgatcatatattgtgtttattctgttagattgttaaaattttggatcagtgatcctccttaggcttcgtttagagaaaatgtatgtgaaaaatgttcatcttcagctgaaaaacttgtcagtgagtttgcattgtagtatatgtaacatttcgtgtggagtataggttggggttggaaaaggaggggttcactgctagttctttaggaatgaggaatcttttgtgatgaattgagctcttgtagtttgatcgcacgctacttgtagcattggttgagaaattctgatgtaagaagttgttaatacatttgtagatgctttaaatggagttatttggactgtcgagttttagaatctcttgtacggtcttgattgccataccctgcagcatttcattttatttgctcttagttaaattgttgtttggaaaattgatggataaagattagggttcgtttagagaaatgttcttcatgggtctctgatgaaaaacttgggcatgttctggtgaaaacttctcagtacgcagttcatttctatacagtgcgaaactgcttagcgtttgcattgttgcatgtttaacatttcttggggagtatagtggagttgggaaaggaggggttcagtgctagttctaatggaatgaggaatcttatgtgatgaattgatgtctcgtgtttcggtcataggctagttgtcgcattggtagagagattctgatgtaagaagtgattaatacattcgttgatgcctcaaatgtatggtcttatttggcttcatccctgaagcagtattttgttcgccccttagctattgttgcagctaggcagtttgaaattgattcaatcattctattgtctccacggctttttataacctcaaatttaacttacacaggtggttatcaggtagtgacctgaagaagattgtgctctttggttgcccgagtttggaaaaaagggcggtattcgctgctaaaacattgcgcaactttttcgatatccatgagaataatgtaagcctatcacacaccacactgtctctatctcattttgtaactcaccaacagcatctaaccaagtctttttttgttgcataataggtgtgcgagaaatgcgtgttaaaagagaagtgcaagtttccaaaccagagtgtatgggatggcaaaacaaagcacttgcacttgtctgttgtgatgaaagtcatcacactatatccattagacttgactcatccgaagctacaagttcctcaagaggtacaagactcagtttcaagattgctgacggagattcagaacctaagccgaactatctgtactcctctcgcatgagttaacattatcaaatatttgtttgtagtaaacatcaatctagtgatcttgcaaatggaagttgaaccaaaaaagactcttatgaagaaaaatccttcacttctactttcacttgcaacagctaagggtacagatcccataagtagttagttatgttttcagcttttatctcgattttgtgcccctaaatcatctgttgaagaagatattttttcactgagaacaaaggaatatcattgtgaaccttatggctgagccagaaactttctggataagtatgaaaggaatgggtcttgttcagaagagacaaaggcttgcctgaaaaacaagcctatcatcaagagccacaggcattcctatcaaacgtggcggtaaggtgattgatttgtttgcgtctttcttcactttaaagttcactctcgctagattccatagcatctccatacttaggattttttgttaaactctccaagagaaaaacataaagttccaacctttttagtttccaacttctcttgaaacctaattttgattacagtgagtggatatcgtaaatttgtggctttctcgagtttctgagattttgagctaaacactctgcttaaacctcaagttcttacctttttactcttagtagagttgcaaagtttaatcctttgataaaatctcccgagattccgagtttgtctcgcatgaggatttgaataccgaagaaaaaatg

SEQ ID NO: 36502 - DNA, 3003 bp, Unknown
  misc_feature (1)..( 3003): 2750-1469P.txt file - cDNA_ID_3096985; gDNA_ID_2936550; Annot_ID_194027
accaatctcccacatatcaagacaagaaccatcacttcccatttccatagagctaggtcccaaagtgtcttgccacgcaagtaaggtatgactaggctacaaatcaaactagcaatgatcaaaatcagaaatatccattctataataacccaaacacaaatcttctccttccttaaaccttcaggtaaatcctcctctgagaagggatcttcctcttcttccaaatccttggatcctccttggtttggagttcccggtttagtgtttctcccactaaacccgggatttagattcccggaccttggagtccgacccgaaaccatatccggatacgtcggagtaggaggatccatcaatctagatctagtcttcatcttcatcaaagtcttagtcctcatcgtcgatctattagaggtacacttcacaacctctgatccatctactctgttttcttcatcttcactactatcaccatctttaacagacggagaaagcgtgactctgttctgtctccgtctaatcgcatcaccggttccattacgataactcgccgtcactggcgcggttactggtgaagcagaaccggaaactgccgttgacgacagaggaggaaccgtatttttttgaagctcaggcatgttagcttccatgtcgagagagatttcatcaccggaagctttttgcttgttgagaaattgatttataagcttcgacggtggatctggctcctccgatttctcactactccgccgcatgaaatcaaagcttccgtcgtcttcttcacctccgggtggtttagagctcttatcattatgccagaagttaatgcttgactctctccaaaacttttctgagtcaccattgtcttcaccgtcgatccttacaacaaaatctcgccgttgatcagttgaatcaacggccatgttagaaggaatgaaactttctatagtaaaatctcgccgagatttttgtttttcttcaaagtaaaacgttcgtttatatatttttttgagaaagaggaaaaagaaaagttggttcttgatttctagatgtaatggtaatgttgatttttctaaatatttaaatctttttgattgattttgttttatttatttttggtaatgttgaaccatgtgagattgtgatgatcttgctagggctaaaaagacaatgtttaaaccaggtgatattatcatattttctattttccgcttctgaatcattttaaaacatttcacgactactcagaccaaaacatagactcgtgtctcgctctcacgcaaactacaaaacaaaaaaaacactcgattaaaaagtcaaaagtaacacaattggtgttggaacttggaagctcgagattttttatacaagaaaataatttttttttttaaagtaattttgttttattttaaaattagttatttgtaagctagttattttatattttaaaattgttgaagaaaaaatgggggccatgttcactgtcgagaaacgaagcagttgaagaagtaataaaaattgttgtaccacaaattaactaataaataaacctatcggattggtgaaactagcttacgtggtgagatcttacggcgcgaatgtgataatgaatttactaatggtatatgagtcaggcacgtggttggctaatctttggtctccttgtagtttttttttgttttgtttttgtgaggcgtatatacgaattttaaacgatacctaattcgaaacaagtagaaaacgacacgaaaatgacacgttttttgataaaacggcaggtcgattaggatacaaaatgcagcttaggtaacgtgtgaacagagacacatggttcaataagagtggtcacagaagaatttgttttcatataccccgataattgtctaatgtgaatataaaatgtaataattattactggccagataaaagaataacaatgtattgtgatttttttttttttttttttttgtgaaagggtttatattattgtgagtattattttatttgcaaatttaaatgcatgaatcagaagaaaacagtttgatacatgtgaccaaaacataaaataaaaagctgtttgatgcatgtgaatgatacaaatagatttcctagatttgttttccgaaaagtgaaaaaatcattaattgttttagatattttgaaaaaagaagatataatggttaactttggtctatggttacacaaacttgggaaggcatattggatcaatgatttgtatcaatttagaaacattctaaactgtaaatcgtctcctcgaatcatttgtaaattacttttgatattattttataaagaaggccttttaacaaaaaaataataatatgattttataacaaaatccatgttttccaattaggggagattgtaagtttttttttataaatgactaatccaatatcttacaccagaaaaaaaaactttccatatctcaacgggcctaactagttatcttattgggctcattcagttcattaaaatagcccaatattcaactcttgttctatcttaaagtcccatatcgcttatcttacaagtgaaaagagtaacatttatcattagagtcggtttgacaaaaaaaaaaaaatcattagagtcgaagatgagactgtcaccttcactaaagttggaacgatacagagaatattagcatgacccctgtgcaacgttgacaccctttactcgataattggtctaattttttttttgaaaattttctagatcgacgatgtgcaatttgtgcattgtttgcaactccgacgattggaaacctaaatttccggtacaaatttaattaaaccggatggtttggtttattatatgttctatattattctggtttggagaatcatttcttctcttctaaaaccctttgcgtctcttctctagagaatctctcggttgctccaatggctggcttattggttactattaatcactgaatctcacaaattgatttcgcaagctgactcctttgaagccatg

SEQ ID NO: 36503 - DNA, 3000 bp, Unknown
  misc_feature (1)..( 3000): 2750-1469P.txt file - cDNA_ID_3096989; gDNA_ID_2936550; Annot_ID_194025
aacaacttcttacatcagaatttctcaaccaatgctacaagtagcgtgcgatcaaactacaagagctcaattcatcacaaaagattcctcattcctaaagaactagcagtgaacccctccttttccaaccccaacctatactccacacgaaatgttacatatactacaatgcaaactcactgacaagtttttcagctgaagatgaacatttttcacatacattttctctaaacgaagcctaaggaggatcactgatccaaaattttaacaatctaacagaataaacacaatatatgatcaatacagaagtaaaaagattctcactttgctatctcctggtaatcctttccaaatctttcggcagcaaacttaacaaaagttctagcatactcttcatcaagattccccatatccaacttttctccagtaatgaaattagccttgttcaaatacccttctttatgcagaagcctcacaaacgacaccatctctataggaagctccttataaaccctaattacgtcctccttttccttactatgtttctttacctctttctcttcatctcccttaaacaacttgtaaagattatgccttttctcgttttgctctgatatcacaacctctcccttctgttttttctttctcacaggttccgatttcttcagttctatgagtttcctttccaattccaaaagctttctcttcaactcgttgccttcttcttcttcttcttcgatttcgctcgtttctgatttgggtctcaatccaacagcctcttcgaagaaaacagagagtggcttcttataagcttcttccgatgtaaagtttctggagacaatcaaaggcgcgcattgaggtttcaagagagtcttaaacaaagtttgatttttgagaattgatctgagcagaatcgccatggcttcaaaggagtcagcttgcgaaatcaatttgtgagattcagtgattaatagtaaccaataagccagccattggagcaaccgagagattctctagagaagagacgcaaagggttttagaagagaagaaatgattctccaaaccagaataatatagaacatataataaaccaaaccatccggtttaattaaatttgtaccggaaatttaggtttccaatcgtcggagttgcaaacaatgcacaaattgcacatcgtcgatctagaaaattttcaaaaaaaaaattagaccaattatcgagtaaagggtgtcaacgttgcacaggggtcatgctaatattctctgtatcgttccaactttagtgaaggtgacagtctcatcttcgactctaatgatttttttttttttgtcaaaccgactctaatgataaatgttactcttttcacttgtaagataagcgatatgggactttaagatagaacaagagttgaatattgggctattttaatgaactgaatgagcccaataagataactagttaggcccgttgagatatggaaagtttttttttctggtgtaagatattggattagtcatttataaaaaaaaacttacaatctcccctaattggaaaacatggattttgttataaaatcatattattatttttttgttaaaaggccttctttataaaataatatcaaaagtaatttacaaatgattcgaggagacgatttacagtttagaatgtttctaaattgatacaaatcattgatccaatatgccttcccaagtttgtgtaaccatagaccaaagttaaccattatatcttcttttttcaaaatatctaaaacaattaatgattttttcacttttcggaaaacaaatctaggaaatctatttgtatcattcacatgcatcaaacagctttttattttatgttttggtcacatgtatcaaactgttttcttctgattcatgcatttaaatttgcaaataaaataatactcacaataatataaaccctttcacaaaaaaaaaaaaaaaaaaaaatcacaatacattgttattcttttatctggccagtaataattattacattttatattcacattagacaattatcggggtatatgaaaacaaattcttctgtgaccactcttattgaaccatgtgtctctgttcacacgttacctaagctgcattttgtatcctaatcgacctgccgttttatcaaaaaacgtgtcattttcgtgtcgttttctacttgtttcgaattaggtatcgtttaaaattcgtatatacgcctcacaaaaacaaaacaaaaaaaaactacaaggagaccaaagattagccaaccacgtgcctgactcatataccattagtaaattcattatcacattcgcgccgtaagatctcaccacgtaagctagtttcaccaatccgataggtttatttattagttaatttgtggtacaacaatttttattacttcttcaactgcttcgtttctcgacagtgaacatggcccccattttttcttcaacaattttaaaatataaaataactagcttacaaataactaattttaaaataaaacaaaattactttaaaaaaaaaaattattttcttgtataaaaaatctcgagcttccaagttccaacaccaattgtgttacttttgactttttaatcgagtgttttttttgttttgtagtttgcgtgagagcgagacacgagtctatgttttggtctgagtagtcgtgaaatgttttaaaatgattcagaagcggaaaatagaaaatatgataatatcacctggtttaaacattgtctttttagccctagcaagatcatcacaatctcacatggttcaacattaccaaaaataaataaaacaaaatcaatcaaaaagatttaaatatttagaaaaatcaacattaccattacatctagaaatcaagaaccaacttttctttttcctctttctcaaaaaaatatataaacgaacgttttactttgaagaaaaacaaaaatctcggcgagattttactatagaaagtttcattccttctaacatg

SEQ ID NO: 36504 - DNA, 3003 bp, Unknown
  misc_feature (1)..( 3003): 2750-1469P.txt file - cDNA_ID_3096998; gDNA_ID_2936550; Annot_ID_194024
tttggttctttctactcgaaaaccaaagccatggtaataatagagtacacattatcaacattctcgaaaaccatatgtgtctttgttcataattgctctgtttttccaccaggttgaggagctcttgagagaatttgacaatgtatgtaccttgagagtccggatgccaatctcctcagacctaaacaacccgagaaacttcatcacgaagatctcgcgctacaacaaagtggtggacatcccgaacagcatgaccgtactagacgagcttctcccaatctctatcgagatggcgaagagaaacctaagaggcatatggaatttcaccaacccaggggtggtgagccacaacgagatattggagatgtacaagaattacatcgagccaggttttaaatggtccaacttcacagtggaagaacaagcaaaggtcattgttgctgctcgaagcaacaacgaaatggatggatctaaactaagcaaggagttcccagagatgctctccatcaaagagtcactgctcaaatacgtctttgaaccaaacaagagaacctaagccttcaatgaacatcacactcttccacaagtgcttactttaaactgttttgttttgtttttttttctttttgccttttcttccaacagatatatcttttttatatttactcatcgtcttatgatccttgtaggtagtttcactatattgattctactaaaatatgatttacgattattaatatttatatagacgagagtttttcttttcctcaaatactacattttccctcagatttttacttactaagtcagacagcttataaaaaagaagagtcacttactggttgtgaccattaggacttccacctaggcagtttcagaacacttgaacttgatccttaagctatagcctgagaatagaagcaacaaaatattttagaacaaacccaagtacatgatgtgagtttggtctattttaaggttatagttttctacttttcttacgtgaacagctgagggcgggaacgagagagctgagaacgtttaataggggagagaataaggtttcgtagagttgactggggattagcagtgccaccaccaccgtatacaggatgtcctctgccagctcttctgtttccaagatcggatggaatcgcaggtgagtcggtggagatgtcgaatggacctgagtttgaactgttctgtcttgctggccatatctcatctttaggtcctggtgttgcaggagagaaaaacgaccggtctgcaccaaataagtcaacttgatttggagatatttaaccaaaatagactcaggatcatatgaagcactaagctcaagacacagaaatagtgtagttaaattaacctttgcgaatggtctctctgttctccatcatattaactgctgggtttgagaaaaagtcgggttcttggtgtcgcgggtagaagttgtttgctggttggatggctgtacgtttaactgactcatactcacttcttagctggtcatacatctcatcaagcttcctcttctgtctggtaatttaaaaacaattaaggtacattgttattgtagttgagattaatatagggaacagaaccaggaaaacatatcttaagtgactgaccttgatttctcagagaacttctcttggagctcttgcttatccttggtcaagttttctacctcttgctccatcatctgacacctcttgcccatcttctgatatgctgtatggacctgctccattttctcgctaaactttgcttgcataccctcacatttctgacgacactgtgcaacaactctattcatcttgtactgcatctctaagtctctttgggcaatgtaaaacattacacttcggtatgcactcttcatcactagattcagttaagaaaaacaggaggtttttgaaccttaaactgttgttttaccaactcttacaaaggcaaaagagataaagttataccacttgagtttagatttgagatacagcgggacaattttcaattgaaaaaccatagttacaacttgaaaattctaccaagagcacatctatgaaaaggatacgtatttgtggagaaattccagccatcgccatctgataacacatgtaagcaacgaggagatgtaagatgggaatattgaaaactggaaaagaagaaaagctatagtatccttgcgtatttcagcttaaccacttacatttatccattcttcatttggattgatatccacaggtttcattaaactaagatggaaagataaagactaactgtcaaatggagaataaggcgactagagctaaactgaagctaggctaggaaagttttacctcttggagagtacttgatcacaaatgggacatgccccatcattactgagaatcttgctggcatcttcagtaccttttcatggtgttaaggtcatcttattcaagctcacaagtgttgctacgcaaaagaaaagtagaaagtgtaaataggatacataataagtgaccgcaagtggtggaaatggccctgccctccaggtccctccaacacgcgttgcatctcatgtcaacctctaatataagtatctcaagctgctacgcacctgcaaattaacttcatatcaaacaagatgaagaaccatgctctaaatgaaacttccattctccactgaactaactcattgagatcaccaattaactagtattcacaatacaagttttaattaacctatattcattctaactactgaaaattgttaaactgcaaacacgaatgggtacaaagtaagcattaagacctgtcaaacttcagtagttagcagttcatagtcatcggagaggtacaaaactaacagtaactgtgatgatcaactagtttctagtcataaaaacgatttagaaaacggaaaccctagaaattgggcatatgcatagatttcagagatcggcaaaatttcgactgcacagtcccgaaattaagggtttctacatcacagcgatg

SEQ ID NO: 36505 - DNA, 3000 bp, Unknown
  misc_feature (1)..( 3000): 2750-1469P.txt file - cDNA_ID_3097002; gDNA_ID_2936550; Annot_ID_194023
gttttagtttttataaaaccaaaaccaaactgaaaaaccgaatatccatccctattacataataattaagaatttatattatatagagaatgattaaaactatactataaagcaaacaatagtccaacattaaataagtattttaaattttaatttttacccgtgttgcaccagcacggattacaagttggttctataagatgtgttgtttctgtctttttttttttttttttggctcaacatcaactttccactaaccaattcaaaggtacaagtcattcgaccaaaacatattttaaccaaatacaatgaatcagtctattatcaccttgaaacactatgatggattcaacgctacccaaccgaaattcactgtatttttccaaccacaacgagatgaattacaccacgactctaagtgaaatcatcttttaaaccaccaaaattcacccaatgacacgaaaacatttctagcacaaagaaaatcaaatcctatcctgagatccaatccaattccaagctattagtccctcatgatccgagtgtagaacatgtcctaatagcatctacgccaaaagcgcaacttcagaagggttttgactcctctgctttcactatttcggtcctaagcctaaaacggacatactaatccgactgatactcaaccggatcaaccgggctgagacaaaaatttcttgaagtcgaggctttattggagagctttccttcttcttctacaatccaaatggttttcttttctcccccatttctcattaattctccatcaggagtcgttgacggcagcatagctaatacgccttgaatcatgtaaatctgcccgggatcgataggatcttcacaaccaagctcgaaaaccacgatccgcctacctctgtaccttcttaacactgagccaccactaccaaggaggttcatcggaggagaggtacctccgcgaagagactgacgaagaaatccaccagatctgctgccgtcgtcgagagtcatagttccccattgtagatctaccaacgaacctccatctgagagaactatctccgctcgccgtcgacttaaaactctttgattaagccacaaagaaggaggagccgccgccggctaaaaaaaatcgacacaaaggaaaaaaaaaactaaaaagagaagagaggccctctcacggtgccggccgaaaccgaccaccaaagaggcaaaacggcgtttgaagatttgatctggtttgcggcggctaactagagagagagaactagggttttttgtttagtttgtgtttttgttgttgtattttacttaagatgttgtttttgtttaaatgaaccaaaaaaaggaagtcttagcttaacaaaccgacgccgtttagcgatgtgcatttcaacaaactgcgatgtcgttttgacattttattgctcactcaagtcattttgctactgctgattatctctggaaatttgaaatcttcgtttctcgcgccggcattgaaatcagcgagagaggtaacgatcctggaaactcttgtgttttctctcggatttgcatctgcctcttcttcgattttcaatttttgagatccttcgctgctgtttttggtgttatacttcagatcggtaagcttaatcgccgtttgttgttcttcaatcactttctgcgacgcgttctctctctatcgctctgtcaaaatcgcaggtaagcttcttcaatttcttcttagatcttcacattcctgctgcgatttcgttgctatacctaagctctttacaatttctaaggtttgtgtcaatctcgaatcagggagattgataaaccgatttgtctccagtattctgaagaatcgtaagtcggaatctaactgttgagttgagttcatcgctgtgatgtagaaacccttaatttcgggactgtgcagtcgaaattttgccgatctctgaaatctatgcatatgcccaatttctagggtttccgttttctaaatcgtttttatgactagaaactagttgatcatcacagttactgttagttttgtacctctccgatgactatgaactgctaactactgaagtttgacaggtcttaatgcttactttgtacccattcgtgtttgcagtttaacaattttcagtagttagaatgaatataggttaattaaaacttgtattgtgaatactagttaattggtgatctcaatgagttagttcagtggagaatggaagtttcatttagagcatggttcttcatcttgtttgatatgaagttaatttgcaggtgcgtagcagcttgagatacttatattagaggttgacatgagatgcaacgcgtgttggagggacctggagggcagggccatttccaccacttgcggtcacttattatgtatcctatttacactttctacttttcttttgcgtagcaacacttgtgagcttgaataagatgaccttaacaccatgaaaaggtactgaagatgccagcaagattctcagtaatgatggggcatgtcccatttgtgatcaagtactctccaagaggtaaaactttcctagcctagcttcagtttagctctagtcgccttattctccatttgacagttagtctttatctttccatcttagtttaatgaaacctgtggatatcaatccaaatgaagaatggataaatgtaagtggttaagctgaaatacgcaaggatactatagcttttcttcttttccagttttcaatattcccatcttacatctcctcgttgcttacatgtgttatcagatggcgatggctggaatttctccacaaatacgtatccttttcatagatgtgctcttggtagaattttcaagttgtaactatggtttttcaattgaaaattgtcccgctgtatctcaaatctaaactcaagtggtataactttatctcttttgcctttgtaagagttggtaaaacaacagtttaaggttcaaaaacctcctgtttttcttaactgaatctagtgatg

SEQ ID NO: 36506 - DNA, 3003 bp, Unknown
  misc_feature (1)..( 3003): 2750-1469P.txt file - cDNA_ID_3097006; gDNA_ID_2936550; Annot_ID_194022
gtcagcaaatctcgaaaatggagtttgaatttgagaggcgaaggttgacaaaggacgacattagagaactaatatacagagaaatactggagtaccatcctcagttgctcaaggactatatgagcggatctgaggggtctaattttgtatatcctaggtttgaatttcttcctaccttttattattatttaccaaatgaaacatttcttgtttctttctcccgttgaatttatgtccaatcgcgtacctctgcctggctttttattcatgtttttactttttcacttgcagcgccattggacatcttagacagcagttcacttacttagaggaaaatagcagtagaaatgggccggtcatacctctcgagaggaaacacgcatcactaccgcggtatgttttctcattctttatatacaagtcgactgtagggaatatgcttattcttttgttctttcttctgctactgcttagcatttgtgaagcatatggtcgaaggcctcaagcaaactttcatatgttctctactcttctaattctaaaaactttcatatgttctctactcttctaattctaatagatatgattgttttccacaggtctacggttcactcaactgtagtccattccacctcgcaacccaacttgggtgcaacagatagtagacgtgtttctttcgagccttcaaaaaatggagcttcttctgcaggacatccatcaacttccgcgtatcctactaaatccatcggacctccaccaagagttccaccatcaggtctcaatcatatctccaaatattatttcctaaagttagaaacttcaactaactttcaccctatgttttacaggtagaccaggtcgtgttgtggaatcatctgtatcttatgagaatggcaggaacctcaaagaagcttatttcagaagcgcggtttcatctcctcattgctacttccgaccaaacaccatgacaaacccggagaaccgcaacatagaagcttcgtcttttccaccaaagccacaaaatcctgtccaccaattcagtcccactgagccaccagctgctacaactaaccaagcagacgttgagactatgaaccacccaaacccttactttcaaccacagctcccgaagacagatcaattaaacaacaacacacatatggccattgatgctaagctgttgcaggcacaatcacagtttggtccagcaggagctgcagcggttgcagtagcagcacaccggaacataggcacaattagttacagcgcagcatcatagacaacacttcagacagatctttaaccaccacatcttcctccaccaggtgattctctagtttttatgtaagtattattcagtccaggctctgatatgaactacgttgcaatgatataagaaagacttttatttagttgtaactctccagaacaagatcgccttggattagtctgattgcgggtcagtcccggttattgtttcggttatcttgttggctccataatctttgaatttgccataagcgtagttcaccgtagagaagaatatcgtggtgattatatacttcttaaacttcttaatcggtcccattagtctttattgttcttcaacaaaaaaaggaatctctttggttattggaaaatatggtcttgattggttaatatagacaacattatgccgaagaatgtggaagtaacaaaataaaacattggtccttagatttttcttctgtaaaccactctttctcagattatataattagtcaattttattcaatggttacaaaaagaaaaaaaaaaacttgccaatgaaaaaaaggaatgctcttgacctcaagactcatcatggttaacaatgaaattcgccttaacttcgaaattttgacgccgttgaaatgtttataatttacccgccaagtttgtaggcctgagtttagcccattaaaggtaatattaggcgtccattaatcataacgaatatcactttctcaatttaacaagtcatgagaaagtgtacacatttgatctatttaatatttattaaccaaaaaggaagcaaatcaattatttcgttacgtgacggtggcattaagcatcttgcattgaatgatccgttatatataatctcaggttttttttgggttgaaatgatgatattaaattttaggttgacatgtacttatctttgtaatcaactaattaaatatttgaactgacatgtctacgttatatcataaataaaccaggtgttttaattaaataccacgattaaccttctaaaataaggaaaatcatattttattcgtcaatcactataatttggaaaacgatgcaatatatttatttctttctttatacacatacttaattaattatcaaaatttcattctattttaattgatctgaaatgtcctaatttagtagagagctaataaatagactcacatttatgttgaaaaacaaaacaagaaagagaaaaagacatgagtttaatgtcggacgctagactcacgagaaatccgtaatatctaagacgatcaagggtaaattagtcaatttcctcctacggttctccgtaactgtctcagaatataagaggcacattgctgagagaagctccgtagaccgtagattccctcttcttcttcttcctcttcctctctactgttttttcttttcatatttctctctctctctctctctatagttggtgaagtttctatctttatctctcttaagatctctttctctcttgggttatctgactctaaccagaattgtgtcggtacgtgaaattgtttctctctttctgtttctatttctaaaactaattttgtgaaatgttgtacgtgagtgacaaatacatctctatgttgtctgtttatgatcccatgtgacatgtttaagatctgttgctgaattggagatctggatctgacttctttttcatatgatccgcttctgaattttccatttgatgttttttttttgcagatttcaaggatg

SEQ ID NO: 36507 - DNA, 3003 bp, Unknown
  misc_feature (1)..( 3003): 2750-1469P.txt file - cDNA_ID_3097011; gDNA_ID_2936550; Annot_ID_194021
aggattaccaacgaatgtggatgcaacgatcgagtcaggtaatgttacatctgctctgtttgatgtgttctttggggattctccagtttctcctacattgaaatcctcagtggctaaccaattagccatgaccctagtgtaaaagtaaagaccatgttgtaattgtatatcatgaatcttgcaatgtgttaattaatctctctttatgctgtcttcttaaccccttaaagttagctaccatgctcaaattaaatactagaaatcttaaaatagtatcaaagcaaagtaaactataaaaatgggttttgatccctaatttttacatgtagtccaaacagttggaagttaggtaagaattaaaattgaaaagtttaagtcaagatcatagtttctacttactacaatgggaaataaatatgattgtggaggacaagagaagatgaatgaaattatgttgttttggccaagttgatcaaagtgagtccttttcttggtgtgtgccctttaccacatgcaacttcttctctcactggaccacatttacacattatattttggtttattattaggatgcattgtcttttattcatcaacattattatatttgcactaataatatagagttgttggcaaccaaaagttaagaaaacaataatatatagttgtgcacaaattatcattatttatgggtgatcccttttttcttctatcattatatatggttcatggaattttaataagatgtaactcaaataaataaacaaacaaaataaatctgcttggtggagatattttggctcctccagtcaaaactctaaaacatacatacacgaaaagcatgattcatgtgatgaatggtaatattgtgtccactctgttgaattctgactcatgattatatatatatatatatatatcttcgaattattaaacttgcaattcaaaatattatatatatcattttgaaaaaccattaaaactattttaaaaatagatatgctggttatatatattatgcagagcctggtctaaatagatagaaccagtcaaccatcatttatatttatctttggccgataattattttaaaatgcgcacttagtcaaaagagagtaaaattatgattttaaaaccgaaagtagaagaaaatgaaaagcaatgaaatatgcaaaaaggatcaactttagttataagttataacgccttaaaatattgacaataaattgacacatgcaccacctacatcgtcgtatagtgtgaaattatatggagtatgataatttgaaattatgatattttgtactttagataatgaaccaactttggatttgaatgcctcagatacaaatgaataataagatgttggatttgttttaatcaagatcagttataatattatcataatcttcacctttttgtggatttgcccctattgtgataaacttttaatatgagccagacactaaatatgttggtcttttcaataaatacaaaagccaaattgtgtaaattgacatgtgaatattagtttcacacgaattgcaaaattattaatctatttattttattttattttctatcaaatactaagtcatataccaatgaggatggcagtttttttttttcttttgattttgtttttatcatcccatagtatcaagcaaacaacttgacacttggaaggtctttttctcaaggttagttgatttacatggaataaatgttcatcaaagatggtattttatcctaatatattaatcgtgtatcgtctttaccaaaataaattaaaatctaagacaaatatccttcaacaatatttatttacatatgaattagtcaattgtatatagatttttcaatcttaaaaatttaaatcaaggaatataataagcaaaattgagataatgttaataatattcctttcagtggtacgagaaatactatcacgtgggggttaaattgaccacttatcaaaaagaatggttagaatcaaaacaaaattaagataggggtcaaaatcggaatttaagaaaaataaaacggtccaagtccagcaacaggtgtctaaaccattgggtcattttccaaaaaggtcgtccacagaccacagtgggagaaaaccaatatttactttaccctcaaatgttgtctaaaactacgaaactgccactatctgggatttgtcacacccgtacgcaataagtaccacgagaaattgctagaattagaaattatttttattcaaatttagaaaaaatatctcaaattcggtatttttaaaatcctctctcgtcttcttcttcttcgatcgctggatctaggttttgctcttctctgtatcgtcttcttcacagactgggcttgattttgagttcttctagttttcggattcttagcaatctaggttttttttttttttttacttttcgaaaagccgatccagatttttgataattttgaagaagaagatgcaacaaaatcaagtgaagaaggttcgcttcttgctctctatctctctcaatcatgctttgattctaaatgtgggaaacagaggataaagtcttatccttttacaaatttaaagacaaaaaaaataaaatctttcctttttcaattgcaattaggtttggttttgttgcatgagcataaataagatgtgtggataaagtttgtgttttgtctacttttgtgattcactagggcacgaaagagatggagtttttcacagagtatggtgatgcaaacagatataggattctggaagttattggtaaaggaagctatggagttgtgtgtgcagctattgatacacatactggagagaaagttgctattaagaagattaatgatgtctttgaacatatttctgatgcgcttcgtattctccgtgaagtgaagcttcttcggcttttacggcatcctgatattgtggagatcaaaagcattatgctgcctccttctaagagagagtttaaagatatctatgttgtgtttgagctcatg

SEQ ID NO: 36508 - DNA, 3003 bp, Unknown
  misc_feature (1)..( 3003): 2750-1469P.txt file - cDNA_ID_3097015; gDNA_ID_2936550; Annot_ID_194020
acacaccattttccatactggctttgatttcctccatcttagcattctccggcagcctaaacctcctcgtgaacttcccactcgaccgctccacacggtgccacttgtcattcttctcttcattctcattgctcctctctccacttatctgaagtatgttgccatcctcaacctccactttcacctcttccttcctcagtcccggtaaatccgccttgaacacgtgcgcctcaggtgtctccctccaatccactttagcgtttgtgaacgctgccacatccatagcgggtgcgtttgccaatcctgacggcgtcaagaaaccttcgaacggatcgaaaacatccagcgagaacggatcgaaaacgtttgttcttcttcctccgaagatgcttggaattagagacatcgtttcacttcctcttgtgattgctactctttgcgtttgctctgttttgaagctttgctttgctatgaactctttgctccttgttggttcgtacagctacgagccttcgcatatttatagggagagagtatggaaagtaagatagaacattctgcgagtttcttgaaaattattttgatcgatggtatccttgaaaaatcagggatcttcgtttctttcttttaacgacgttaccagacttctcaggtgctttcaagaagtttctggtgttgagggctgagacgacgtgcaatgcatcaggtcggcgagtgaacgccttgccgtttttttgttttttcttgggctataatatcgaggcccattaatgatttcgtctaaatttatttttttggtgaacattgaacaattggcttgagtcccccaaatgaatcaaaacatctataaaactttgtatcaaggacacaattatcatcccataacgcaccagctttttcgataccaacaatatgaatcttaacatttgatattgaagttcgggtttcagaaacaatatcaggaccatggcttttcttctattactgccaaaaaggagagtagacgaaaatgcttatcccacatgaatgatacattactcgcatgagttacagtgcaacaaaatcgttggagtgatctcttgacgtatacagtaggcagacaacctgattacctgaatgtgtatgtgtatataatcgtcatctcaatgacccaaagtattctggtggccagacctagacaagcaaacagatggttactgatgagattattgtcattgtttcataataacttcacagctagaaattttgagaaaagagttacccgtagaagagcttttccttcaatgagactgtaaggtacaggcccaaaatgacgtgaatcagttgaagcatacaagttatctccctgaatccaaacatgacctttcggaacctattgaagaagtaaacacataaccttttattagacaagctttagtgctgcaaaaacagagattggacgcagtgtagagatgtaagatagcaaaaagcataagtttttataattactctgaaattgagtttcattgaaaccaataactagcaatgatccacaatctagaccatcccaaatcatcaatcatacacaattgaaacctagctctagatctagaaatttgcaaattgcatcgttttaccttgaatcagtaactagcaatgctttaccttctagaccatcccaactcgtcaatcatacaccgcttaacccttaaccctaagtttgcaattccatgttgttttaccttaaacggtttaagttaaacccttaatgctataactactctgaaattgaatttcatcgaagcaatgctttgtatcctagaccatccaaaattatcaatcatacacagacactctaaaccctggagaaacttgcaatttccatcttcatttttacagtaaacccttaatgctataacaactccgaaatcagctatactcgaaacagtaactagcaatgcttcatcttctaaaccatcccaaatcatcgatcatacacagataaaccctaaaccctagaaataagtacatcccatcttataagccctaaaagctactctgcaatcgacttaaataaaaaccagttactagcaatgattcatcttctaaaccatcccaaatcgttaatcacacacagataaaaaccctaaaccctagaaatttgcaaattctatcaattgttttaccaaatgcaacaaaagactgaatttttaagagagagattggtcaatgttcataccaaaacgctcactgaagcatcaccgaccaatgggtcagcagaaaaagtgagtctatcgccttctaaacccaagattcgctttgtcaccatcctttttgggtctctaggagatcgaaccaatacaacgtcaccgagtccaatcttaccaaaccggtgtgataaatgttccgccaatattacatcgccggttagattaagcgtcggaagcatgctcggcccgtgaacctaaaacccaaatcaaacaaaatcagattccttggagaatacgaaagagaaatagattcagtttcgttaggttacaaacaattacagacgtgggtcgtggagattatgtatcgatcggtgacatgaagcaaacagagaaacttggcgacgattgatacattctcgaatgcttctttcgctgttccacgccattgcttcagataactcaaaaatgtcattctcatctctctctctctctggtaaaagcgaatctcgtcagaagaagtgaagaaccagaaaaaggccgaaggcgagacgaaggtagcgaactcggtccagtctagagttaaaacgacaagcagttggttattcgaaaccctaaacgacaccaaggtttaaccttttaaagtgttttttccatatcaatgtcaaaactgtaagtagttgagtcgcgaaaattacaaacgacaggttttcttcattaattacaaccaaagccacaactgtataatttgcagagtggagtggttcttcttctaaagttcggacacttaggatttatcgccggagttttgaacatg

SEQ ID NO: 36509 - DNA, 3000 bp, Unknown
  misc_feature (1)..( 3000): 2750-1469P.txt file - cDNA_ID_3097018; gDNA_ID_2936550; Annot_ID_194019
aatccaacatcttattattcatttgtatctgaggcattcaaatccaaagttggttcattatctaaagtacaaaatatcataatttcaaattatcatactccatataatttcacactatacgacgatgtaggtggtgcatgtgtcaatttattgtcaatattttaaggcgttataacttataactaaagttgatcctttttgcatatttcattgcttttcattttcttctactttcggttttaaaatcataattttactctcttttgactaagtgcgcattttaaaataattatcggccaaagataaatataaatgatggttgactggttctatctatttagaccaggctctgcataatatatataaccagcatatctatttttaaaatagttttaatggtttttcaaaatgatatatataatattttgaattgcaagtttaataattcgaagatatatatatatatatatataatcatgagtcagaattcaacagagtggacacaatattaccattcatcacatgaatcatgcttttcgtgtatgtatgttttagagttttgactggaggagccaaaatatctccaccaagcagatttattttgtttgtttatttatttgagttacatcttattaaaattccatgaaccatatataatgatagaagaaaaaagggatcacccataaataatgataatttgtgcacaactatatattattgttttcttaacttttggttgccaacaactctatattattagtgcaaatataataatgttgatgaataaaagacaatgcatcctaataataaaccaaaatataatgtgtaaatgtggtccagtgagagaagaagttgcatgtggtaaagggcacacaccaagaaaaggactcactttgatcaacttggccaaaacaacataatttcattcatcttctcttgtcctccacaatcatatttatttcccattgtagtaagtagaaactatgatcttgacttaaacttttcaattttaattcttacctaacttccaactgtttggactacatgtaaaaattagggatcaaaacccatttttatagtttactttgctttgatactattttaagatttctagtatttaatttgagcatggtagctaactttaaggggttaagaagacagcataaagagagattaattaacacattgcaagattcatgatatacaattacaacatggtctttacttttacactagggtcatggctaattggttagccactgaggatttcaatgtaggagaaactggagaatccccaaagaacacatcaaacagagcagatgtaacattacctgactcgatcgttgcatccacattcgttggtaatcctcccgacgaaacagaaacctaacaaaaagaaccaatattaaaacaagcaacgataaaaggtcatgtgcaacggtacgattagccttaaaaaaatgtgcttacaagcatattagaagtgttgatccaagtcaagagtatgacacttcctttgttgagaggtctgttttggaaaatcccacggaatgtagagagagcagttgtatcctcagaagatggagatttgattctcggtgaaatggcttcatccaatgcatcccagaaggttttaccatcaacatctctcacaagaacaatctgcaacgatttctctgcttgagctgcaacgttgagaggaaaaagattcagaagaaaaagtgagagatcaaatgttgataaacaaagctatcatctttagcatttcgttaaccttggaaaatggaaacaaacagtgatgaatctctttggatctcatcagcagatcgccctgtccaagcgcttaacccgctcaagatagattcattcacataataacccgcagcatagactttgacaccgatgatagcaaactttttctccctaaaccctgaaaaaaattatgcattttcatagataaattcattaatggaaggctaagagcaaatttatacgtatttcatctacacaagatcccacattgatgtataaaaccgttgcaaaaagtttacattttcgaggctaaaaatagtgcagatatagtcaaaactaaccagtgccgagcaaagacaacgggctagaacaacccggtaatgtcactgatctcttaaactttacacttgtagccgtttcttcagcgtagtcctctgcatttccaactacacaagccacagagaccaaaatgaaagtgggctaaaactcaaatgcattataattcttttccaaaacgattcctttgctaactctaacactgtttcttcaatctctacaagaatgaagcacaaagatcttgtctgtttcagtttcaatctacaaagcaaaatcagctaaaatttgcaaaatcaaattctgtttttctgaaacaacaacaagaaaggttcaacctttacctgaagaagcggcggattttacgatcacacgggaaatttcaccacaatgtcggtttttaagcaacgaattgcctttacgagagacgtagttcccagtttgaagcactgaaactcgattcaaggatttgccgggaaaatgatagatggattcagcattatccagattccgacaagaaatgcgtagagagacacacactgcagatggaacagctgcaagaatcccatccatgttcaaaactccggcgataaatcctaagtgtccgaactttagaagaagaaccactccactctgcaaattatacagttgtggctttggttgtaattaatgaagaaaacctgtcgtttgtaattttcgcgactcaactacttacagttttgacattgatatggaaaaaacactttaaaaggttaaaccttggtgtcgtttagggtttcgaataaccaactgcttgtcgttttaactctagactggaccgagttcgctaccttcgtctcgccttcggcctttttctggttcttcacttcttctgacgagattcgcttttaccagagagagagagagatgagaatg

SEQ ID NO: 36510 - DNA, 3003 bp, Unknown
  misc_feature (1)..( 3003): 2750-1469P.txt file - cDNA_ID_3097029; gDNA_ID_2936550; Annot_ID_194016
ttatctcctgcaaataaaatagagtggttcatactttcgttttaattctgacatacacaaaagatgaggcgaattagatatacctgatttagttgcttcagacattcttttgatgtttgatcgtcagaaatgaccttgacctctttaatagcacacattttccctttctcactgtaagttggcgaaaacattatacgatggaaacaagcagtttagagttacaatgtaaagagctagcataatagaaactttttctttctattgcctttatctagattgcaggtgaagttaaccttaaattttgatcaagtaattgcagacatgaaccatcagaattgtccacacggcccacaaacataactcaacagcatatcacaagtaagccctctcaggagtcaggagtcatcacatatacacaaacccatcacatgtaagcatctctggttaaagatagctattgacctagagatatatgttaatggcctctggatccacacgatacaatattgtttccacctatggagaaagctagtatcaaacgccctatctatctggacatcacacattacgtgatctaaagaagtgtgaaggctttgctacaaccaaggttagctatctaactaactcttgtcacctagaaactaagtcaactcactcacttgataagatgttccttatctaaaactatgacattcctttaagcgaatcagagtagaagaatctgattatctcacctgttgaaaccaagatagacttgaccaaaggtgccactcccaagaaatttcccttttttccacgtggaaaaccccgaaggagaggtctcgtagcctcctccaatcctggaaccatgcacagcagaagggcttgtaggagaagtaggtggtcgaggcaaaggatgacactcagaggaggaccttccatcatcattcctccctgtagaagactctaagctcacaactccagacaaacgctgatgccgtggagacgtgggcctagtagtaatagtagctgcctttggagaaactctctcaggactacgtggtgctgctgctacattgaatttcacatcaccacgacccctgctatatgactattgagttataaccacaaaacccacaatcaaagcagcaaaaagacgtaaactttgattgattaagaggttctggatccatacaagtagatgcacagatactaataaaggggaaaaagcgaacctagaagcaacaagttgactctgatcatcagctgatccagatgagctaacgctagaaacagatgtagatccagaagtggatccgcttacatgatcttgatgatggatcgaaacaggagagagcaaaggacgaggaagagggtgacctttcttctcggtagaatcagagtcaaaaccagagaaagcagaagaagctccagcgaattcacgactgcaacgaggtgtaccaccacgagtaggagtgagaggaggatcaacaacaacagcagagctcttgatatctctatctgtggagatgattcctctgtgattatcgtccttgttcttgcaggactttcttccccaccaagtaggcatattaatcacaaaaatggaaggggttttgaattgaaaggtgagatttttaacagaatcaatacaagagaggagatgaaatttagggcatgagaaggaggagagatacgaaagatgaagatttcatcgggagagaagagtggacagctaagctcgaaagggtagttggagaaagagagacacaacaagttgcgacctttttcactttttttttctatcttctcgccgtcggattaaaccacctgctctgccctggtggtaagttacaatatgttttgcttcaagatgggattttttccggtctttttttaaaaaagttttcttacctataattggtatgtgtaagaaatttcgagaaatgtatatatattttcataagtttatagaattattaatttatgttattaatggactatatgtttctataaaacttttaaaacaataatgtcaatttcttataccggtcccaaaatataaccaaatttttttattaatttataaagattattattgtatatatgtttcttttttctaaatcattcaagggggtttattggtttagaaaacgaaagtaaaatcataaactagttttagataattggtttccaaaacatcatcaatttagataattagtctttggttaattagtgtgctaactcttttcttcatcatgttttttctactttgtttatcggatttttctgattctattgtgttatatagcaagatgtgttacatttgtgactggagattaaaattgataaatgagtttaggcttaaagactatctatgttatgaacactcaatggaagtggacttcttaaggtttgtttctgttggttgatgtaattgtttacatttccactgtttgctttactatgttaattttcctcggtgtttcagggtagaagctcggatcaactctacaactacgagtttgtacattcacagcctgagtcataggcaagagtgagtccatatgcaaagtcactcgtactgttcaaaaaattcaatctaaaatgctattgttgatctttttaccagataatctacattgccaaaagacacattgatctatcaagctcatgactagaaaggttttgcggtaatacaaaacacgcaaaattcattatgtcaagctaggttaataagataagatcgttagaagaatgtgtaaattagattgaacaatgaacatgtgggatttgttacgaagattcgatgaagacagtaattgcgtgttcaacttttgtttggtttgctgattgatggatgtgtcaactacttcaatttaacaataccataatctaaatgagcttttctaacaacaaccactcgtccatgtgtctgctgccacgtgtctaatttgccacaaccttaaatctgattaaacaataatgagatagagagacagagagatagagagagagataatg

SEQ ID NO: 36511 - DNA, 3000 bp, Unknown
  misc_feature (1)..( 3000): 2750-1469P.txt file - cDNA_ID_3097034; gDNA_ID_2936550; Annot_ID_194015
acggctggaggaaacgagctacttaaaatgtgctggaatgattgcaagtggtgaaattttgttgtacccaatctctagtgctaacacaagtactgatgcaaggtatcctttcatctactactacaatctcgagaggaacattattacaagagtaacacttcaagtaccaatacttaaacagtttacttatgctagattattttacacattttcaaattttttagagaatgtgacgcttatctaagtgtttactttctcccaaacataactaatcacatttatctatcttcttcttttttttctgtttctctttgttttcttgtgcttctttttaagtttttgtatatttctctgtttagttactagctcaagatacttgatgaagaatgtatttatttgcacacttaaatcaacaagcactcccacacttaaatcatccccattaaaaacaccaaaaaggtttctcctatacaagttcaagatacttgatgaacaatgtatttatttgcacacttcacgaccaaactcctcttcctcccatgacaccaaaaactatggtaattgtagcaacaacagcctgtgaaagtataaagtgttaaaaagtgattaaatcacaagattaatgtattaaacacgattatcttttagtgaaagactcactgcaatggtacaagctacgtatcctggtttctctcgtggatcgatcctagcacatactagaatgaatacgcctacataccatggaattgcaccaaggaggaaaccaatgatgaacctttaccaaaaaaggattgagttttttcagacaaaatgtattgaaacaaagtctaatttgagattgctcgggaaaaacaagaacttacaagaaccaaccgaggccaagaccacaacaaggaagacggttttgtcttgcaggtcttccttgagaaacagggtaacctgcaacatttagttacacatttacttttaactttttgtgtagtactaatgtagaaacagagagagcttcccaacattgaatatagttttaagcttttgcttctggaagagataaactctgatatcatttgttaagaatcttacaactcttgtcaatgagaagtaactttactacagagatcttattttgcgcaattgatccaaactaaagtgaatccagctcagttggtttataaagaaaagaagaggcaactttagtatcaagctcatgcatagtctcagtttcatctttagtaaaccatggagatactatcaaaagggttgacgaaagatgaagcaaaatataaacttttcatttcgaagatcaagattccaggctagctctaacaaaggtctttaaagattcggagagttagttaccagcaacggtttgatgttcttgaatgtattgatgaacggaaatgtcgtgatgaggtgatccgggaggtggagacggctgaggaattccgatgactggatgatgcgacggaggatgaggataggacggtggaggataagtagggacaccttgaaacgtgccgtaagatgaaggagaagctcctctgtttttgtctttttctttgcccattatctctctctctatctctctgtctctctatctcattattgtttaatcagatttaaggttgtggcaaattagacacgtggcagcagacacatggacgagtggttgttgttagaaaagctcatttagattatggtattgttaaattgaagtagttgacacatccatcaatcagcaaaccaaacaaaagttgaacacgcaattactgtcttcatcgaatcttcgtaacaaatcccacatgttcattgttcaatctaatttacacattcttctaacgatcttatcttattaacctagcttgacataatgaattttgcgtgttttgtattaccgcaaaacctttctagtcatgagcttgatagatcaatgtgtcttttggcaatgtagattatctggtaaaaagatcaacaatagcattttagattgaattttttgaacagtacgagtgactttgcatatggactcactcttgcctatgactcaggctgtgaatgtacaaactcgtagttgtagagttgatccgagcttctaccctgaaacaccgaggaaaattaacatagtaaagcaaacagtggaaatgtaaacaattacatcaaccaacagaaacaaaccttaagaagtccacttccattgagtgttcataacatagatagtctttaagcctaaactcatttatcaattttaatctccagtcacaaatgtaacacatcttgctatataacacaatagaatcagaaaaatccgataaacaaagtagaaaaaacatgatgaagaaaagagttagcacactaattaaccaaagactaattatctaaattgatgatgttttggaaaccaattatctaaaactagtttatgattttactttcgttttctaaaccaataaacccccttgaatgatttagaaaaaagaaacatatatacaataataatctttataaattaataaaaaaatttggttatattttgggaccggtataagaaattgacattattgttttaaaagttttatagaaacatatagtccattaataacataaattaataattctataaacttatgaaaatatatatacatttctcgaaatttcttacacataccaattataggtaagaaaacttttttaaaaaaagaccggaaaaaatcccatcttgaagcaaaacatattgtaacttaccaccagggcagagcaggtggtttaatccgacggcgagaagatagaaaaaaaaagtgaaaaaggtcgcaacttgttgtgtctctctttctccaactaccctttcgagcttagctgtccactcttctctcccgatgaaatcttcatctttcgtatctctcctccttctcatgccctaaatttcatctcctctcttgtattgattctgttaaaaatctcacctttcaattcaaaaccccttccatttttgtgattaatatg

SEQ ID NO: 36512 - DNA, 3003 bp, Unknown
  misc_feature (1)..( 3003): 2750-1469P.txt file - cDNA_ID_3097038; gDNA_ID_2936550; Annot_ID_194014
gacgacgtcgtcctcacgactatactggaaatgtttcatactgtcattacggtttgacattagaaaagggctattcttttggttaaagtcatttagcttaaaaacattgtaaccacttcaagttttatttttttcatgttcttttaacgtttttacgcatagattaaaacattacttgaaatgtaaatagatgtatactcgagggataaggaaagataatgaagcgttaatcaacggttttgtaaaatctaactatttatgttgaatggaattgaataaatattccactccaaaattcattaaaaaaaaaagttcacttttcaacatattcatttcaattttaaccctatttttgtggacacgggtagaaaagaagaaaaaatcacttttctaatcatatatctcaatcgttcttagtgtactaatcgtatttgtaccgcggtatttcccaccatattatttgtttaatgttgtagtttttgtagtttatgagttatgaattaataatgttactagatcctactatattatttgggaagtacattttaaatgtaaccttaatttttgtaagtaattacataggtatgccattagaaataaaattttaaagagtaaattaatttatctctttaaggattaaaaagtcaaatactaatttaattaattaaatttaattaaaaaacgaaatacattattaatttccaaaaataataaccaatcaaaatcaacatataagatttgatatctaaattttaattaatttaatttaattagaaaaacgaaatacattattaatttccaaaaaagtaaccaattaaaatcaacaaattatatttgatatctaaattatcatattaattttttattaattattatacttcacttctcatctttatatgattctatttttgcggaaaaataatatcatcattataaaaaaataattagagttttttcccatatgccattatttgaatttttaaaaacaaatataaactgttcaatacataaaaaaatattataacgggtaaaaaatagatttaagaaaattttctactgagtaacgagtcataatttgaaatatttatattcaatttcatacatattatattgaaaatttataatcttatatactacaataattaataacatattagatgtgattcaatttttgatacaagttagaaatcctagaattgcatgtttagatcgatattaatacaaaatggtatactataggtgaaactcttaaattaacaatcaaagtacaagtgtataatcttaaacactaaacaatatagataatatcaacaaaacatatacaactcacagtttactatacatttaaaatcaaataaaataatatcaaatatttttaaatcatctttacaataaaaaaattttagtttaactaaaatatatactgcaggttaatatctagattatagggcttattggatctaaagacggatcatcaaagattttttaaactgaagcaaaatatattgaatattcaaatatctatctgttaccaaattataaacaaataagtcaatttaatattttatatacaaaatcaattaaatcttaatcacataaaaattagcacaaaaaaagtattcatcaattaaaaaattatcaaatctctgtgttatataagttttgatactatattcgaataaagtgtaatataccttttcaatttgtattctttaactaatttaagctaactaatatatttgctaatcttatacctatcaaaactgactatcgtttcttatctctatagtatttttgcaagacttttttggtggatttggataaaagtgcattcgggtcatatgatacattctcctattaaataaatatggtgcactcttatgttattagctaaaatgtttagattctaattcagagtcataccattaataaaattaatattaacaaaataaatagctttttggcaagacggatttggagggacgggtttttgaatcaacattaataaaaaagtaaaatataattaatcgaccgtttcaatacgggttaaatctttaatttattattttttaagaccactaatattaaacatatcaaatcatcctaatttagaaaagattatataaaaccaaaaatgttatgtggtatgtataatgttactatatataaaattaaactatagatataaatgtattagagaatgatacaatttgcaaaacttttctatataaaaaattattcttaaatgttaaaaattactatttaaaaaaaaaaatcatgggacggtaaaaaaattacagaatgagttctattttggaattgggttatatggtggatgtatttgaatcaatatttataaaatttaaaaatattattaatatactgttttaataggggttaaaacttcagttttttaacaattatctcatggattcgtggtataccgttacttaataacaattataaactgtaaaatataaatatttaataaaaataaaatttgcaagttttaatatatattacttttaaaaaataaatcgtcccgcgatataccgcggttaaaatctagtttgatatttatgaagttgtactcaaactcaaaggtcaaaaccaaatgctataatttcatctttgtaatggacctacaaatagaatcataacgaagatcctgactgttgacctaaaccgtggagtccaccagacatatgacttgttgtcggcaacactttggtttttagttaagattaagcccaatagcccaatataagcccattagtgtaggccctattaagtccatctacactcgaaaacttcatcatcatcttcaaggtttaagattggcttcatgaatctccaatcactgttctcagatgattgtttaatcttatctgataaaaatcatttgcttccataattgttactgaatcgtgcagaactgatcaatcacgggtcccaccacattgtttgtttcaagaagctattaacgtcggctgattccaaatg

SEQ ID NO: 36513 - DNA, 3003 bp, Unknown
  misc_feature (1)..( 3003): 2750-1469P.txt file - cDNA_ID_3097088; gDNA_ID_2936551; Annot_ID_194066
ttaattttcctaatattataaacttttattgattttaaatacatcaatcataatattaataataatttaaatgaaaaattatagaaaataaatcgtgattgtcaagttttcacttttgataattttttcttgtaattagtcaattagtgttatattgtggagagttgaatagtctcattttgcaattttagaagatcaagggtatatttccaaaacattgcagttttgaggattcaacttgcaatttacccttttcaaaaatcactttcgacaattaccaaaaaccagttcccccatttcatttcacgctttcttctcttctcatctcagagctccgtgatgaagaaatggttagcaatcgcagcgacggtggcgataattgcaataatcgttagacaaggcacgacacaatacggatggaacaaagaggcggcgttggaaaagctaaaggaatggtcagatcggctggggatttgggcgattccaacgtatgtagcggttcacacaataaccttagctctttgtctccctcacgccgtcttctttgaagctggtgcttctatgctctttggtttccttcctgctcttctctgtgttttctctgctaaagttctcgccgcttctttctccttctggatcggcaggtctgcttctcaattgcactgttatgtgattcaaattgatctgttggatcgttagtttgtgtcgctaatgtacgaatttgatcgaaatgatttggatttagaacaatgattctcacatggcttatcttggcttcgtagaaagtatatgattcattagtaatacactctggtttagtttatgttatcgtgttttgtgaatgcttaaggttttacttggagatggtttagatttttctttagtgcaccattgttgaaaccttttgcagaacgtttattgaaatccattaaattgtaagcatgaatgataggaagggaatgtttgtgtgaagaaatggtgtcattgttggttattcagcggtaagataacaccgttgttcaccaaaaaggcggagaagatgcatgatattttcttgcgagatttagatggatgtcttcagattctataatggtgtttggataagagtggttgttgtcttgtgtatgtgacggagatgtaaagaaccgttagatgcttgtcatttgcttgttaatatatgctagggaatgatttgcaatattcacatttatgctggatttttacatggcttcatagaaactatatgcttcattagtaacactctgatttagtttaagttatcgatttctgagattttacttggagatgtagaataaactcttttgttggttttgattgtcctgctatcgctgaaacctccgtatacagaagttttcacgaaaatccattctactctaagcattataggaagtggatctttgtgtaaagaaatgatgtcattttggctgttcagaggaaaactaacaccgttattcgccaaaaaggcggagaagatgcatgtcttcctattctataatggtgtgtggatgagattggttgttttcttgtgtatgtgatggatatgtatggactaattgttaaatgcatgctgtgattctaattgccaattaatatatgtaggagaatgcaactaggatgttgattaaccttagcaatgtgatatgcagttttatttatttatctatctattgggagcacttgcattctctcatacttttttgaattttcaggtttgtttttaagagttccaccagagctacagggtgggcgcatagcaacaagtacttcaatattctctcaagaggagttgagcgcgatggttggaagtttgttcttcttgcaaggttctcgcccattccttcctatgtcataaactacgctttggcagctactgaagtccggtttgtagctgattttctgttccccacggttattggctgcctcccgatgatcctgcagaacgcatcagtcggtagcctcgctggtatggctgtggcttcagtagctggaaaacagaaaagtcaggtctggggttatgttttcccagtacttgggatactgtcaagtgttctgatttcattgaggatcaaaaagtactcagctggaattacagaggcatcatcagatacctctgctaacaactctagtttagcttcatctgaaactgcgaatcccgcttatggaaccgatggatccaagaaaagtgagtgattatacaaaccatgatggtggtttttgatcgccggtattacactttgtttggtttgcagctatcagattctcaacatcatggcttattttggacgagttaggcagtatcttaatagtaacaaagcattagtttttgtacttcttaagttaaaagcttagaacaaaacaacagtgttattttctataccagacacaaaaactgtgtcgttgtaataacacttaccataacattttctttcagtgtatgtttaaagccgtttatatggttgaagcaatgtgactaaaatttttgtagcattgaaacaagctatatttgcattgctatggtcttgttttgtgactaaaagacttggatgcagaatggatataagttaaatgtctgattttgtaaataacttatgaagagaaaatctttattcggtaagagttgttttctcaatgtagcagttcactcatcattttcaaacttcaactctcagagaacacaaagaggttagacagtgcagatgcttatggttgagaagctttacctaacaatggtacaaggcggttttgttgggatcacatgtgaagttaggcacatggattcgttcttggagttggtacaaggacttctaaaagacaacaatgaggtataataaggacaagttgactatgtctctctcttttatcttaacattctaaattaggatttggtaaactgagagcagttagcttcttgaatctctaaagtataaaaaccctcaccgttttactactatctcatcttaaaactcccaagtaacaaaaatg

SEQ ID NO: 36514 - DNA, 3003 bp, Unknown; identical to SEQ ID NO: 36513
  misc_feature (1)..( 3003): 2750-1469P.txt file - cDNA_ID_3097088; gDNA_ID_2926302; Annot_ID_205736

SEQ ID NO: 36515 - DNA, 3000 bp, Unknown
  misc_feature (1)..( 3000): 2750-1469P.txt file - cDNA_ID_3097096; gDNA_ID_2936551; Annot_ID_194062
ttttctttccttacaagctggtttttagtttgttaaagaaaagacaactttcatatatggtcatgttcgtttgctcatctcactgatgcaactagccgtagatgcaaattgatgttcgtttcagtacaattttgcatataagttgggtggagtatccagatgcgtttctcagactcatccaaaaaatgtctattttataagatgcattcagatgattttagatgatgcatagtaaaaaattgtaaattactaaaatacccttattaaactaaaaaattacatcataaatcaaataatgttaattattttctagttttttcattttatattttaaaacctctaaaaattgtaaaatcacaaataccaaatttaaacaaaaccgacaattataattttggcggaaaaattacggaattacgtttttccgccaaaaccataaaattatattttcccgtcaaactataaaatcataatttagtgggaaaattacggaatttcgtttttccgccttaaaatgtaaaatcatattttctcgccaaaactataaaatcacgaattagcgggaaatttacataattgcgttttcccgccaaaaccataaaatcatattttctcgccaaaactataaaatcacggtttagcgggaaattgcggaattgcgttttttccgccaaaaccgtgaaatcatatttttccgccaaaactataaaatcactgtttagcgggaaaattgaaaatttttgttttcccgccaaaaccgtaaaatcatattttcccgccagaactataaaatcatggtttagcgggaaaattacagaattttgttttcccgccaaaagcgtaaaaatcatatttttcgccaaaacaataaaatcgcaaattagcgagaaatttgcggaattacattttcccgccaaaaccgtataatcatattttccctccaaaactataaaatcatgattctgcgggaaaatggtggacttacgtgttctcgccaaaaacgtaaaatcatataaaatcactattttaacgaaaaagttgcataattgcgttttcccgccaaaaccaaaaaatttgagaatgacattttcttccaaagttataaaattgcattttttcatcaaaactataatattttctttccgaaactaaaaagtatgatttaaatgaagatatgtcatttttagtcattttaatacaacatgcatttagatacagatacaaattgtaataaactaatcaaacgaacaaagattcatttagatgcttcatctagatggactaccggattaggaaacaaagaacactcaaatgcatcatttaggtggatcatctggatgcattatccaggtgtacaaacgaacatggcctataacctgaggactcgatctcttcaatggaaagcgacaatgagccaatcttcttttaagctgcacaatagtgatgagtgttatataaaaaaaggaaaggcatcggtcttgtgaaaatgagtttttaaccgagccagccaccaatgaataagaaaaaaataggaatatgatttgtaaatatcttttttaaaaaattaatttttctcaatgggcattacaatattaggtttatacaggctaatcggtataaaaagagaaaggaaaatttagtcaacacaagcacaaaaatctgaaaaagtctgttaattctgcaacaccggctccacctccaactccggcgatagcaataggccttcgttgctgctcctacacgactcgagcgacatgaccaaagttatcgattctcgccactaacccgaagccaacatcagagccgacctgaaaattctcacaataaacaatagacccgcttaaccagtccccacccaagtaaccgaaaacctaaatcgaactctcacctccatcgccgaaaccagcacaagtttcctctatgaccgccacaacctcaaatccggtcacacgaaaacaatgattagagcggttgactcaaataaaatcctaaccgcctctgcacacctagccacctcagatccgacaaatctggcgctaatcgtctcgactcgtagtgaaccccaccaacccgtctttgacttccgccgccagttgcaacagcccttccgacaagtgagctgacaactttctttagtccctcttttggtgtctttaaatcagtggtacgactagaaggatgcgtaaagtcgtcgggaagttcaccacaactcgcattagaaggcggaacaaccgcacctcattatcgtcagagaaacaagaccgtcaccaaccgatataaccgtttgccccaccattaacgttgaaaatctgaacaaaaaataaaataaaataaaataaaactttttttagaactatctttgaaaaaagaaaaaaataatcaatggaacgattgttcaaaattgaatctctaaattggtaaatactaaatatctttttggaaaatgtcaacaatttgatgcgccaacgtgaatattgaggataaattataatttgtgtagactccatagtatgcatattaatttattttttgtgtatatgatcgatcaaattgtaacatataatttattacttcagtcacaagaacactattccgatcttttcgaagaaataaaattttatttttctgtttcataatttaaattgttttagttaaaaaacacacagataaaaaaatttacttttaaaaaatcaaccaatcataaaaaaaattatatgatataaatatttagaatatattaaaataatatatagtttgcataaaaatttagaaacaaatttatattgtaaaataaaataattaattcaaaacaatttataatataaaacgaaaggagtattatttatatttatagtcaccacaaagcaaaacacttttttattacactgtcataatttttatttttttttacataaaaaaattaaattcgttatactgataagaaaattgatgatatgaatatgagagtgtggcggacgattggcttgacaagatacaatg

SEQ ID NO: 36516 - DNA, 3000 bp, Unknown; identical to SEQ ID NO: 36515
  misc_feature (1)..( 3000): 2750-1469P.txt file - cDNA_ID_3097096; gDNA_ID_2926302; Annot_ID_205732

SEQ ID NO: 36517 - DNA, 3003 bp, Unknown
  misc_feature (1)..( 3003): 2750-1469P.txt file - cDNA_ID_3097100; gDNA_ID_2936551; Annot_ID_194060
ccagtcccgtgaaattaaacataattttgtcattttcttataaatttcaatattataaaatttgaaacttaaaaaaaatacaatatcgaccttgattatatttaagatttttcatgtaatatatcgtctcgtattaatatattttatatatatttataatgtttaaatttcttgtaaaattcaatttataatttttaaaactttataagttttaaaattataaatattttaaagcattttttaaaattataatatttaaattttgataaagttataatatttataatttcttgaaacattttaaagtttcaattctttaaaataaaaaaacccgagtaaatcggataactattttaattttggacgcctgataaatcaagcttcctgctcattcgtaatcagaatcattttggtccttttataatatggatctgaaccattatccaatttttctaagcgatgtgggacattgtacacatattatttcttcataggttgaataatatatgcccgttttaaaaaaattgaattacatcatatgcagaaaaaatataatattttattaactatatatattttatataaattcaaaataaataaagtataagatcaaataaaagtgaaagaagaattatatatttatgtttaaattaggtagaaatattttaggaaattagttaaggtaaataacaaatatggttagtttagagatattgtttatattaaatttggtaattaaatcattaattttcgttttaaattattaggttttaggtaacttttccaaaaattaatgttatctaagatgagaacagaattaaacatgttatccaagatccgaacagagttaaaccgggtaaaacccacccatttgaattaattgttaaattatggctcaaatctttaacattatcttcaaaaaacgtctacaaaaatgtatatatagattattttaaagaagatttttgatcctattgctagttatctaagtttattacctttttagaaatttcacgaaatcttattataaccattttggaagttttaaaaaccatgttgattgataggtgatatatgaacaatctatcatctttatgtttaaagagatagaaagagaaaacttttgagttgagaataaagtaaaagctataaggatttttattgtatttcaggttggggaagatctcaaaaaagattggcaactattcaaattgatcagatgcatggagactaactcatagacgggacatgtaaccaaactgaggcagcggttctaacattgagtattgatagatgagttggaaccatagggaaaagaatgtgggacgttcaaaaatttcatggaagaaaatgtgcatgtacaatactagaactagcgtatatacctctcgagtgtctgtgcatattctcatatccctgaccctcgaaacccggggaagaaaggtgtggattgtacttctccttgcttcataaaaactaccaagccaaattatagagaaatatataatttggtgttagactcgagattgtttactataaagctttttgatacacgatcattgactctacaaaaacaaaaacaaagtagaggagcatcaatcacaatccccatgacaaatacaaacgcgaaagaaggcttttgtattagtgtgagcctttttcatgaccgagagtgcatgcacctgatagacttttgcatcattccaaagttacaacaatatttaacacttccaaaactggacaacatgagacaagtgtgtagatagtagattcatcaggatacgaattgttgtgtaaatgcgtagtcttcaaacaaggtaatgaaacaaacttaggattaaccaaggccaaccaagagagttttaagtataccagtgtcgcacagacgtaaaacctttggggcatcttataataagaagtcatttgaggacacaaaacaacatctagatgttggacgcttaaccgcaacatcaatccacaacgttagataagaccattatctacactatacttttataataagaaaatttcactcaagtctaaccaaaaaaatcatatttttagttctttttagggttttgtgcaaaaaaaactcaaagtcgcccatttttgcaactatatcctccacgtccaaaaatataaaataatcctatgaagtccaaaacaatacgtaatataaccctttttgcaattttacatatattgtaaacgttttcacgatcatatacatttgtttaaaatatataattgaactcctcatctcgaaagctttgatttgatatattatttatcaaaattttaaaattttgacaataacgaaaaaatggttattttgcttattattttggatttcatcggattattttgcatttttggatgtaaaaggtaaagttgcaaaaatggacgactatgagtttttttttgcacaaaccccttctttttattggttttaggtatttcccgctattcgtttaattatttaattatgtagtttctctcaaaattttgttaatggtataactatttgatacaaagataaaataaaaatcaaactcaaatagaattattattattttttgttgctagaaaagacaaaacaaaaactatttgacatgttatgcaatttatacaagttatgaaatgttattttttgtcggtcaaatttttattaatttagcatgttgacccaaaaaaaactctttgacatcctatagcaatgtcaaactaaaataaaattgcataactttcagaagtatattattttggcttaaaacattaaacaggaataaaatttgataaaatatgtctatgggccataaaactattataagagataattgcgttgatttaaacacttgggccgaattagtgaaagcccatacgatgcatatgccaaattggcgccaatatttcccgcctaatcgacgagagaacccaataaacgagtgtattgtgccctgattctgtcgccggaaacaatacacagatagagcgagagaaatg

SEQ ID NO: 36518 - DNA, 3003 bp, Unknown
  misc_feature (1)..( 3003): 2750-1469P.txt file - cDNA_ID_3097143; gDNA_ID_2936551; Annot_ID_194052
gcatctttactaattgagctaatgagacttggttaattatctttctaattttatttttatttttgttttttgcaaaatctttgacccattaacaaaagaaattgatagatactagtatactcaactaatgccataaaaaaaaaatcattgcaatttgtatatatacaaacaagttgtaaattgaccatgcctatatgttttctttgccgtcatttgattgtcttcgagcagataaatatcactgaaaaaaacttactaaaaatactgtaattagaaatttgggtctgagtttctgacatgggcttgtggttatagttggtcccatgaaaagtgccttacattcatttttctttcacctttcacatgacatattctccggatcgagacgagttttttcttttcaggggatatcttaatgatctcccaaaacacataacatggcattatttttctcaatgatttatgtttaaaagttttagagaacattcatagaacaatatttataattttgattcggaaaaggaaaaccaaacactttttggtgttatgtagctaaatacaaaagacaaagaaacttggtgttgctaaatcactaggcagtatttgaaatagatccaacattggtcgtgaaatcatgatctcaattatatgtttatgttgtctcattataacgaatattaaatcgtgtaatgttaattgatttgtcatttgtcaattatactaagattgcgatttcacgatggctagacaatccattatacgcctattttagttattgtaagtattttatggttccaatatgcgaaccgggggttgttaattgtttaacatactcggactaatgaactctataaattcttttttcctatactaattactttagcggtttagcctagtaaatacatacacgaacttttcaaaatgaccataagctaaatgctactagtctatctcattatcgacttagcaggagaaagcaatcttaattttcctctcttcctgtttgtttctcataattagggtttcgttttgcggacactttacctctaaaatggcttatagcatctccaaccctactctattttagagtcaaaatgcaaaattcttctccaaccctactctataattgactcaaaaatagagatttctacagattgactctatatatagaacaactctatcctcaactctatttttgagttcaatttttttatttatactttagtccctcaaatttaaactttttttatttaatgcatataatcattttacaaacaacaattacaacacatagttttataaacttaacaaacaaacaaatactaattttaatagttttataaacttaacaagaagcaaacaagtactaaatttaaaataaacaacataaaaaactaaaacaaatattctaatggtgttaaccgtgttatttataataaatattctaatggtgttaattaaaataaaatttgtaatgttttattatttttatatgatgtaatgatttttaataaataataagtgtttaatttaaataatttcatattttatacgaattttgcaaatctataatatatggggtcaaattttaaattatataattaaaaagtattagtatataaaatagaaatagaatatttctaagaatattcttttttagagtagaaaatagagatatacattggagaaaaactcatctctaaaattgagttactctattttagaacaagatatagagctatacattggagatggtcttaatacatagtcaaaattgattacttatttgatgaaaaaatatggatttcttattttattttctcataccagtgattgttttgttgtattggggctgaaaagtgttctttcagcacatcagagaaaaaagttaagaatagtgtgttaagcagtaaccatactctttaaagccgtagattaattattcaagaaattaaaacaactaattaaacaaaaatcctagcaaaatctatttgaatgaaccatatccaaatccacaaagtcagtcccccaaatgttgaaacacgtaaattaaacacacaacaacaaaaatataattaattaaacataactaatgatttttataatttacacaaaaatcaatcaatatttttttaactattttatattcatttctaactacttttatatttatatgttattagaaaatattaatatatatatattttttatcaaccacacatatattaaaatataactctatgatcggctgcccaatttagaggagaagagtttacaaaaataacatcagacaacaataaacgagaaaaacaggttaaacaatatgctttagaattacataaacggtaaaaataagaaatcgaaccaagcgtcgttagctcaattggtaaagaccctagacgaaccttagaggtcgccgattcgagtgacgtttgggacgaaactaatattacatgctgtggtttcgggtctgagagattacgggattcggtccagaacctcctaatatttataaaaaaaaaaatttttaaaataagaaattaaagctcggaacattcaaactcgtctaataggttggagaaagctggtcaatcatcaggcgaatacgccaccgagactaaactctacacaatcagtttcaaatatctacaatcaatccttcttgtaaagatatttttcgtagcccaaatttatgatgacttttttttatttgtggtgcaccatttatgacaacttaaaacagtttaattttaaattaaaaatttgtattttcttatgacctgtggttatatgttgggccttttaggcatttgcaagttaagtatggtcgtggattgaaaagcccaatgtgtaatcctctagtttactaagaaggtttaatgtttttcaatccagtactgcaaaatctgcaaaacctaaactttcgtcttctcaacaaaatctgcagttccttgctcctttctcagtccaaattctctgatttttgattttttcgattcaatg

SEQ ID NO: 36519 - DNA, 3003 bp, Unknown
  misc_feature (1)..( 3003): 2750-1469P.txt file - cDNA_ID_3097154; gDNA_ID_2936551; Annot_ID_194050
aaattaactgaaccataagaagacaatttcaagacaaaattaaagaagaagaagttatagatagcaattttacccaaaaaaaaaaaaaaaagagttatagattagcaaacaaaatttggttgggcctgactttaatacacaaaagcccaaactcttaaacccaactgttgttctgttcttcaccttcttcccatctagggttattacgtaacttctctgttctctctcactctctctgttcttcatcacaccgagaattcgaaaattccgatgaacaagaaacttctcaaccctcttgaagatccaccaaccgcttcttcaagcgaagacgtcgacgaagagatttcatcaggagaagatgaaaaagaacatatctccaattcttcttcttctgaagaagaaaacgaactcaaagatctctccactcaaaccctaaattctccttccaccgaggctccaactctcgattctggatctgagacaaattccgactcagataagccaatcgtcttaaccagtcagaagaagaaagaaggtactgattcatcagggacgaagcgagctagtgaaggaactagctcaaaggacatcaaaagagctaagaaagtttcaggagatgacgataacaaaaaatttcagagtttatggactaaagaagatgagatctctctgttacaaggtatgattgatttcaaagctgagacaggtacaagtgctcatgatgatatgaatgggttttttgatattgctaagagatacataagctttgatgttagtaagatccaattcggtgacaagattagaggtttaaagaagaagtattttggtgtaaggaagaagaaaggtttagacttggatcatgataagaaatgtttgggattggctaagtctatttggggacttgatggtaaggaagtggtggttcttggaggagattcggagacgtcgaattggtttgagaagtcgtttttggttcgggttgttgcgaggcttggtgtggatgagtgtattgtgaagtggaaatggagtaaggtgtctaaggagactaagaagaggattgaagagaagatgaagatggtggaggctaaggaacttgagttgttgtcgcagaagatagatgttttgaaggaggtggcttctgtgattgctgaaactatctaagaagaaggacttggattgtttaggtttaatggagatgtaatgcctcttttgttatttatcgtaggatatatgtttctcatctatgtttctggttcttattagtcttctttttttgtttcttgtgtgagaattagctaaggaacttaagaactttggactttgtaagccttttggtcgatggttgtaatgaacttaagactttgtaagctatggctccgactggtaaaaggtgttttcaaggttgaattgcagtcgaagttataatttgatgtaaatattatgtggtataaactgcagtttgatattgccctattcttttcgttatcgttgcgtcagcggtccgcggccgaaaattataacttatttgcatgtaatgtatatggaaactaacataatcgttcttgtgaaaagagccgcaacgtctataatgtatatgttagacttttgtccggtgacattttatctttttgacaacgtaagactggccctcgttctgacactgcccatttctctttacggtggtggtcggcttgcgtctagatttcggtggcttctatagcaatggtgggctagctaagatctagagtttcaccgcttatcttcggtgtctcttttatttttggccggattgtttttcggtttagatttatgctttttccctcgatttctttatattcgatgtgattggactcttttgcgtttcaatttttacatttagaattgtaattccttaaccctcttttgtttaaaagctctagcggtttccggtagttttgaaggttccttaggtcgctttctacatcgacgatgaccggcgtcgacatttgattcatctacccacgtgtctcaacattggttaatagcctcacacgtgtctcttagtctctgcattggattttttcagcttatttcctcaaagagtaatagttttctggattgggatttctttactttgggcctaagtttatcagatggacttgatggtatcttttaggcaatattggatgattatattgtttagaaatagttcaatattgtgaagttaatgtgtcaagccctgttggacctcctagcgcaagatatgaggtgagccattcatcccttataacacttcaggcaatctacctagctaaaaaattggcttttggtgaagagaggttgaaaattacttccgccaattttttttttccggccaaataaattcccgccaaaacttgtatttaaaattttttgtaatttttgaaaaaactcttaaaagtccttgtatagttttttcaaagcattttaaaagctttgtaaagttgttaaaaacacttgtaaatcattttaaaatctattaaaatcattataaagtctttcaatacacatgtaaatactttcaaaccccttttaaatctttcaaaaaatccttgtaaatattttttaaaagggaaaaaacctaaaaaaaactcaactaatttttatttgaatatttaatatctaattatttttgattaaaaaaatacacgaaataataaaactgtgcaatttaatacccaaataattaaatgctttttttttgttttttaattaaaaataacaatatttaattttttaaattttaaattacataattttattatttcgtgtatttttcttttaaccaaaataattggatattaaaaattcaaataaaaattagttttttccgttagactgtaattaaaaaaatattcattcctcaaacatgttacttcatgttttaattcattttaaatacatttatattacaaattaaaactttcagaaaaaaatttgaactttggtgtcacagaaaaaaaaacctttcaacttccttccatg

SEQ ID NO: 36520 - DNA, 3000 bp, Unknown
  misc_feature (1)..( 3000): 2750-1469P.txt file - cDNA_ID_3097162; gDNA_ID_2936551; Annot_ID_194048
gaagggagcatatctgaaaatctaacaaatgttgttcgtccgaatcatatctagtaagcaaaaaagtaatacatctatgaatagttgattatgtgactaaaactaaaaccaaaagatcaaagtgactaaaataaataaatgaaacacaaatgttttactgaattatttacacaaattatgaaattataagggagcatatatgcaaatctaatgaatttttgtcgtcgtattcgtatctaatatcttatgaataatttaagtgactaaaactaaacccaaaagatcaaagtgactcaaagaaataaattaaaaaatcatccaagggaacaatgattaaacccctttatcatttagacagtatggaatccactcctcgcaccaccaccgaacgaactcttccattttgtcttttgcttaacctaaaagaaaaaaaattatagttgccaaatcaataatatctaactatgaatatatctaacaaaattaatttctttttttttgcagttagctagccttctaaagacattttggatcacatatacacgttttctcccgaatataaaaggataatttttgattattggttatttatgtcaattcaaatactttctttaaatggttaaaaagagattttaggaaaataaaagttggaataacaaaccaaagtgaatgtgagaatgaaaaggaaattaattgcgtcacggagaagcactaagactataaagcatttggtggtcaatgtgtcaaaaccccacttcaatattaaacatatttaaaagggcaaaataacaacaaaacacatttccataaattcaaataaaatttggaaaacaaatttaaaattgaaaattaaatggcattgtattattgtttagcaagagatccacttgagttaaacacttcccctctctctctttcttctccctctttaatttaaatttttattctatttcgtaaccattcatttatagaagaagagtctatctaattcttaaacatgcatgactatacatatgataaatctaagttgaattggagacacattaatcaatgattaactactttaacgtctaaacctctttttttgtatgtaggcaacattattcatctatatcatttagttctagcaaaacattagggattctaattcacacgaggtagatgtatggtcgtgtacttgtatttaacaaacaaatcataatagtataagattataaagggttggtataattttgtcttcaatgaataggggaatctccttttatctattttattctaaaaaaactattgaacgttacgaattggacatgcattaatacgcattttgcgtctaaagatgtgatatttaatctagtcggattaagacaactaattatagtacacatatcaaaatcctaattgctttagggtttgacttacgcggcttacctttgtgtagagatatttatgattgttgtacctatttattaacttgaaaggaaatatacgagaccgttaggattaggaaaattaatactagtacctagcaaacttctaatttcttggcacctgacttaggcatcatacttttgtgtgtgtttatacgtaatgttaatgtcatgtctataaacctgaaaaaaatacgtatacgataatacgaatacgaaatactttcttgttttcttttccaattaggtcattttcttttcattttaaccacgagtgattccataaattttcgtggccggcggaaaaagttgcatgtccacgaatgaaagtaaaacacatccaaagtaaatttgtagtcagtcggtagctaactaaccacaaatagatttgtagtcattgtgttgctaactagtcacaaattttgctctgacctatctatcattcaatgatatataatgtcatatttaaagttgtgataaatttacggccatccatgattctacaaaaaaaagtattttccaaaaattccaaattttaacgagttattatgtagaaattatttggcccttgaaccatatatatatacatatattcatttggccttcaaagccccataaatcttagaaccagctctttaactacaaaatattgtttcccgatcttccgccaaagtcatagacaagtctggtttccaccacaatcgacccatgatgatgtgcatgtgatagtaaaccaaatattcatgtaatttataaaaactcgatgatctgcaaaatatgcaaccattcttcgagttttgcttatagcattagttatttttatttggtatgatttaaattacacgcttatgttagaaaacatcctgactccgtaaagaactgagaaaatgagaagtaacttgtttctgaaaaaaaagatcagaaattaattatatattaatgtggagagagttacaaatatattcttgtactatattgtaaaaagttacaaatgtgtatgcacacacaatcaccttaccacctactacttgatatcatacaaaactatgtgatatatcaactttaatataatgcgaacacgtgttacgcattgaaataaaagaatcacaccatgtatgtatacaagatttgcaattttgattatatttctctactttgaaatcgtctaaagggaaaagaaaaagctaataacaaattccaaaatgaattcttatataaatgatatgctgacatgcatatgtaaaagtaaataactatgtaagacatatttttctgttaacttattcatatctctaaagtgtaaacactagttcattaaaatattccaaaagatacgtagacgtattattgagttaacaaaataatgagtgtattttttttattctaacttttgctcgactataaaaaggagtcatctcccattaggttttgcctgcctcaaacaaatagagcttatctcatcactcaccaaacaactctcatcaatataaagagaagagagtggtagagttatatattacacacataaacttagatatagtagtgttatattcttgattaagtaataaagatg

SEQ ID NO: 36521 - DNA, 3000 bp, Unknown
  misc_feature (1)..( 3000): 2750-1469P.txt file - cDNA_ID_3097167; gDNA_ID_2936551; Annot_ID_194047
attaggcccaagatgacactagcaatattctggaggcttcttgctcttggaatattagagtaagtctctttcattagaaaaccatcttttctgctttacaattagaaagttcggttcatacaacttttaaaggttttcgtaatatttatcaaacaaaaaaatttggatatagtaaggctttgtatatagaaaacattgttttcgtacatgaagaaatcttataactaattaataataaatacggtgtaaaaatcaaaagttactttttatagttgtgatggcaaattcatgtgttcgggtacgttactttatcatgctaattcgggtacgttacttatggagatggaatacatactcacatatcgtacccaaaaaaaaactaaactcatataaaatatgattttggtttaggtattcgtcagtcataattagagttatagtcagagattgtttaacgtttaaacaattctactattacgataaacatataccaaaattcgtctagagttgaacatacaaaatagatttttttttcttgtttgaaaaattgatttacaagtaaaatatataattatctattatcacatagtatttattttgattaaaaaatttaccgtgaaaatgtagaaacaaatgaatgaaattggtaatatagtattgattattgattgggaatgagatcagcacccacaacaaacatctttaatgtgaatgtttggcctacatgttatcctacgtacacgtttaccttttgatctttggaaaaagcatctacttattattgcacaaacaaaaagatgatgtgaaaaggctatgtaattaaaaaaacaacaataataatttgtatttatttgtgaatgatttcaggcccctcatggaccagaatttgtactacataggattgaaaaacacatcagcatcgtacacttctgcctttaccaatgcacttcccgccgtcaccttcattctcgccctcattttcaggtacttactttcactcaaaaacattttcttctaatgacttacttaatcataatattgctagacattagtaaattattaaccagattatttaagactttctagacatgaattgccatttaatccccgagtaatttatattattttcaaatgtttatacgtagttatttaaaatgattagttggccaaaacattactattagtgaaccaaccaatttagtagttgttctaacacaacttctcatattatttaggcttgagacggtgaactttagaaaggtccacagtgttgcaaaagtggtaggaacggtaataacggttggaggagcaatgatcatgactttgtacaaaggtccggccattgagattgtgaaggccgcacataattctttccacggtggttcgagcagcacacccaccggccaacattgggtccttggaaccatagccattatgggcagtatctctacatgggctgctttcttcattttacaggtaattaatcaatcataaattttttacattttgagaaaaattatattgataaattagaaaaccattttttgcagtcatacacattaaaagtctatccagctgagctatcactagtaacgttgatatgtgggatagggacgatcctaaacgctattgcttcgctaataatggttcgtgacccgagtgcatggaaaatcggcatggattcagggacactcgccgcggtttactctgtaagttaatcatctatactaatcaagttaataaacactaacactaattaatgtgttcactgaaacttattatgttgtatatttttagggagtggtttgttcgggaatagcttattacatacaaagcattgtgattaagcaacgtggaccggtttttacgacgtcgtttagtcctatgtgtatgatcatcactgccttcctcggtgcattggttttggctgagaaaatccatctcggaaggtagtaaaagtcacattaaccaaatcttcataattcaagattaaattaagtgatacattactaacgttttgaatggtataatattgtaaatttcagcataatcggggcggttttcatagtgcttggactatacagtgtggtatggggtaaaagtaaagacgaagtgaatcctttggatgagaaaatcgtagccaagtcccaagagcttccgattactaacgtagtcaaacaaacgaacggtcacgatgtctcgggagcaccgactaacggtgtggttaccagtacctgatccaagtcccaaaagagaagaaagatacttaaacaaagatctcatctccatgcattggaggtggaagttttgattatctttcttgttgtttttgtgttttttcttttacattttctaatcgatctacgcttaacttttagtatctttttaccttatgtaatgattttctgcttctactttcttgtatttgaaatttccaaaacgaatgatgaatgcatcatttggtaaaatttgagcctacttaacaaaaaaaagggtaactcttataactccaagaaactatggtcgaaatttggatgttatacataataaagaggttagtttttgttgtgtataacttgctaaaataagaaacatgtactaattgtgtaacgtatctcttaaaattacgcctacgaaaacaaacaacaaatagtcaaaatacaattaatccaagaatcttagggtctaaatttggatattacacaaaataaaagggttttatatttgttttgtaacttgttaaaacaagaaacatatattaattgggtcacttgtctttgtcgtatcctaatgatggatctcactttctctcaccatggtcaaatttataatctcaaaagtttagggtcaaaatttagatgctaaacaaaatagagggatttgttctataactcgttaaagtaatgacacgtgagaaacatgtggtaattggttcatttatccttctttctttcttctccaatcggatctctcactttctctacatcaccggtaaaaatg

SEQ ID NO: 36522 - DNA, 3000 bp, Unknown
  misc_feature (1)..( 3000): 2750-1469P.txt file - cDNA_ID_3097175; gDNA_ID_2936551; Annot_ID_194045
ctagattcacagcttcttttcgatttatccgaaaagaacaaaacccaatttttaagagatgcattttgcatcccccaattgaatctgttatcactatcaatcaactctcttctttatcatatttgatcacatcattgagtgggtatcaaaaacattcagtgattcggcataagattcctcaagttgtaaccagagtctgggattcccacttagttatcactatagttaaaagtttgacatattacctgcttaatattcatcctaatcttgaaaggctaaaagaacaaaatggttaaatcattcgctttcttctccaccaatcactgagtcagagataatcgttaattcaatcgctttcttctccaccatcatcctcttctgcaaagaaagtcaaggatcatcagtttcaaaatttgacccgttggtcatttagatgtgagatatagattctcaccgctgtttgattcttcttctacttcttcgctttggcttcctctctcagctttttcattactttcctcttcattctcagaatcttccggttcatcactctcgctctcgctttccgctgttactttcggttttggaggaggcgcgaaacttgtggaggatcttctccttgagttccatacaatgttgtttgtatcaataccctcaagctctcttgatatattcttcctcttttttacttctttgatctctgtcagagtaaagccagatagtttgttcatagtatgttcatcacacatttaccagatagaaaacaaacatcagcatgcttattcgggttaacatattcagaagttgaattaagaatcattcagaaaaaaactactgaactctaaagatggaagatataagtttctctccacgcaaaagaaatcaattctgagcgaaacactacctagcgctgaaggatctgaagacagcccttctttggcaagtatctgctcaagttcttctattagcatagcctcacgtttctcttgaggagcctgtttggctttcttgtaaatgtttggaggaacactgccacgaaaaaataataaaacaataaaatgcatggaatatgaacaaatacagaacttcttaaagatataccaagtttggtagaaacctcatcccacaagatttgatgactgatttgagatgctcaacacgctttccatacacatcagttgcagtctccttagtctgctgttgtataacataaaagcagaaacacattagttttaatggaaattgagataaaaatcacaaccaagatgttataccttcaaagatttttcactatcccctgaatcactgtcattctctgaatctatttctgtatgttttgctttctttcttccagatacttgtttaccattttcacttttccgttttcccatcatctctggttttgataatttaacttttcgggccattgtcttctttacagctacctcctcgttgtccacattcccctcagtatctgaatcagaattgtattcactgcttaccatcttagatggtgtgctcttgacctttttcttcacatttttcacaatagactcagtcgaacatttaggagcatcaggaagttgtagtacctaattagccaataaaagtatcaaaaaaacttgaatctcacttatactcaagagattacataaccaacttaaagtactcacttcatccaattctttgttaatgaacttcttaaatagatcaagagactccttctctaatttaagatcttcctctagaagtcgacgaagtgaagccattgtaattgtcctgaaaaataaagcaagccattactaaacagaaaagtttatttctcaagtcatgaaagaggaaacttcagaacttcatttattaacttactctgaattagccttaatatatgaagctctcttccgaagggctctctttatatccctctgcagggtttctttatttcccttgcccttcacatctttagcttcccttttcgatgtgttctcttcaccagcatcgttcattggctcgtgctcttcagattgttctgctacttctttagttggaatctcatcgtcttccctctcagtttcttgagaattctccgaagtatcattattcccagcttcttctaaacactgacatcaaaaaggaaacaacggtgctttcaaaaaggaaacataccagaagaattattatcttgcttcaaccatgaaaacacaaagataccttaaccaaatgctctttaacaaagctcttatacacatccaaatcacatttctccaatccaatatcttcctctaacatcctcctcacactcaccaaggtgaagcagctgtgaaatcaaaactacaaatcattccactattcataaatcttctgacgaaatgctttatacagatacatcactgaaatcaaaaccctaatccaaatcagaaatgtatatcaccaatgcctttaaaacaatcaaacgtacacaatatcacacagagaatttacgatgttagggtttagagaaagaggttgagagacaaagatttctactctgcttcatttctgaggtaggttacgcgtgatcgcaaagccgccagaatcttgaactcgatctccgttgcatcaacgttcttcaaattactcttaccggaattatgattcatctccgccgtctccatcgccgtaaccgccgagtcaccagatatttctcactctgaaagtgtgagtgaaaataaataatattctcgttaatgtaaaacctcagcgagaaaggaaaacgccaagatgtttctaaaagtaaaaccaaaacggtaagcagtctataaaatggtagaattctgaaatacgttagtagagaaggacgtatttggtaataaaacaaaaaattatattttaatgattaatatataaagcttgcttgtcgtttctaaacacgcaaacgacaagtagtttcctttagaatttatcattatccagattttcgagaaggagacggtgaagaagaagaagaagatcaaaaccatg

SEQ ID NO: 36523 - DNA, 3000 bp, Unknown
  misc_feature (1)..( 3000): 2750-1469P.txt file - cDNA_ID_3097178; gDNA_ID_2936551; Annot_ID_194044
atgggttagtacttaatatcatagaagtctgcgtgtttgaattggatttattatttgaccatctaattggtcaacatgtttgaaatattacattattcgagtacctttaatgttgtcctattttagtcataaaatatgcaactctcttcatgaattggttacaataaaataagtttgtatttgcatggcttgttaaaatcatgattttatcaaacgaaacttattagctactcatatttatacatacatggaggctcttggttggtgcactaaattaaggttatgaaatgtactaatgttgagcccttcgatcttatttgtgtgtgattagcttgttgaaacactagatatatgaggacaaaacaaaaaagcaaaaaagtccaaaggaaaaatacaagtgttggacgatgaaaggggagaagaggacacgagatatgaaagcaaaatgtgaatgaggtaatctgacacatatatgaaacccataaatttacgtacgtataaagtaaccgatatacgtttaatggggttagagataagatcctttcttctcattttctggaccaccctatataatatgacttacgtgtattgatgtattgtcattgatgtatgatttgatatgttaacaaatttccaatttatataattcaactttgcatgaacaaacccgtgttctttataaataaaacaaaactaaagctcgtgttggttcactttttgagtggcattgtggcaacatccaaacctaccggtcaacaacatataacgagtggaaaaatcggatacaagttcgtgtgatactagtgtggttcgtttcaaccccaaatggccaaatcaatcaatgtaaacatattaagacatagaagaaaataattaatgagatttcacaatgtagatattttctctattccactttcaaaactcaaaaacaagagatatgaccattctttatctaaaaactaatatggttgggaggttctctttgaaaattttggaggctaaattaaatataataatttgatgatttaattaagcatataaaaatttgaaactatatggttagggtgcatatatatatatatttctttctatttgggcaaccggatgcataaatttctaaaatgttactagatcatagagaaaactatgaaagatgaagcaagagctaaggtaagcaaaattaataaaactatcataagtcagcatggaaattagatcaccatgattgatttgaatgacgatatgcttcaccagcaccatgattgtttattttctagctatttggtgtgatctaatattatgagttacttttccaataaaaaaaagaattagggtaatggaatagtaaaatattacgatatactaacgttttgaagagatctaaagtgcaccctagaaaataaaaatgtaactaggacacaaaagaagtccatgagtgaggctgccaaccaagcaaaaaggacaagttattttggcgaccaccgacctcccttctatagaacgcaacatgccttttcgattcttgaatacgtaagatgatttttttatataaatgtactttctaaaatgaattaaggagtaatgtatcaccatatcaaagtttcgggtgagtttagggtagagccgcagccgctaatcgtaggttccaaagtactccattgttgataatggctttgaatggttatagcggttcaagcggacaaaaccgtctatacaccggattgctttttatttaccatttacaaactatagtcgtaatggtacggatccaaaaaaataaaacaaaaccaatgcaaactaactgcgaactaactgcggattgtctttaaactaagtccgcattggtttgttctccgccccaaaattagtatggactagaccgctgacggattaatccgcactaactacaacatccattcaaagccaatatgtattgattagattggtttgagttaaatgataagatttagaccgaatcttgcttttctagaaaagaaagtgatcataaacccttaaaatcgccgaatctaaaatttgctaaaatagttataagcatccaaacatagtcgaagcaaaatattcttatttgaacaatacttcttgttccttgcctttttttctttgtaatcttgtatctctaaggtcagaagatagaattgatatcaactctatgtaacgtattgaaagtcttagtgaaattgtgaatatgactcatcgagacgtacccttaagaaaaatagggaaacttgtaaaagtcttcatgtgtaattgcttccaatttcagctccatattagtcgtattcatacatgcaaaaaaattaagaaagccaagatcaaaacctaaccgttatcgtcgtaaaaacatcattcattacaaaatcaaaatcgactaaatatgaagtcccaccatttgcattgactatatatttcataatagttgtgctccattattgtgttttggcgactgtaaaaagagtgacattgttgaaatggtaaataaaaaatgacaaacttttaaaactattttgaagaaaagcctattctctaggtctcttactagttgtacttttagcccaaataaaccaaacgaatccaaaatcttctaagttctaactaagatttttatttcggtttacataaaatggacgttttagaattgcaaattccaattccaaaaactaaactaaaccaaacaaaatttttattaaaaacaaaaaaatgttggttgcttaaagtttagcaattaaataacacactttattgtgggcacatgattcacccttaatgccctgtcgctcactctttattagctactaccaattaaatctctctttttcttctcttaccattttcacattttcgagttttacaccaaagcctcttcactttctctctctctctactatagtctcctactacctactactacttcttctctctctctttcattcactacataaaaagcttcgagctcccatcactatataccctccaaagatg

SEQ ID NO: 36524 - DNA, 3003 bp, Unknown
  misc_feature (1)..( 3003): 2750-1469P.txt file - cDNA_ID_3097183; gDNA_ID_2936551; Annot_ID_194043
aattgatgaagatatattagataagggaatgttactaattaagaatattaattaattgaaaataattaatgtcaataacattttttataaataaattccaacttgaggatttatttcataaaatggctgcaaaaatgtatatgtaaatatctagcggttagacggaccggcccgcgggtatgttgaagtgtagtcggcgaatcattatacacttctctctatgtatcaccactgaagaaccttccttcattcttgaaactaataatacggctcacctattggctcctcttttttatagaggaacaaagtcagtgcttgggtttaacaaaccctaaagtcttgtcacgtgtggttaaatgaacctgtgacattctgcatcattttgaggtattgctacacttttaaaagcttaaccaaactcaaatctgcaacttcttaaacctgctacaaacagatgccttttcctttcctttcaagattaaatcatcaaccaacagtctccaccttgattctagcttgaatgacctgatgtgagttatttttaattcttgtttgaacacatttaatctcagctctatgtattgttgaatgttccacgatggttacaagtgggactaacctcttgaacttgtgtatgacggaagaataactttagacacccaccatggtttgaagcaacttgtgtacgcacacacatattacatgttgatgtttgcctttgtttcaagcatttttttagtaaatctgaagaatagttcgggtttgatcaactcttgaatttaaacagaaaacaagaatactaaaaaatacctgaaactgaaacataaaactaaaactgaattattgaaaaaaaaacttgaaactcgaacataatcacaaactcaagtactaaagataaatttaaaggatggtagtgacatggtgttgtgaacgtatggtttatacgttttgattccacatcaaaaccaaaacatattcttacaacctatactccacaaatcaacccaacaccataaaagttgttagttaagtctgcttgtctcaatgttagactagttttgaaacattatatagtcacttaattgttaaaatttacctttttaatttttaccggtaataagaaaaaattattactaaatcgatgtaaaacattttattatgtagaataacgtaatttgatagaatcaaatttcgatggaaaatatcatttttaaatatactttttaatgacaatcatattaagaatttaaaagaaaacaaaaatatctcaaattcccgatatcaaaattatattatcttcttcttttttgtttagaccatttttcaggtccgtctctaactcatggcagtgtatgacaaatgcaatgagtccattacaaaattcagaaaaattcttaaaggaaaaaggcttattttctaaaaaaaatattaaaaggttttaatcgttttttggattttgccaaaaacgcataaatatattgagatggagctgccatttcttcaataacagtgtcaaacatataacgacattcattttctagaactttagttttaaatattcagacaccacttacaaaaaaagaatatattaattaaataagaaaaagtaaacattgaacatccccatttagtcggtacgattaactcggctaaatattaaatgggcttaactagttgggcttattttaacactaaattggcccattaaaacttcccaaaatgatattggttcgagatattcgatgacgtgggcaccaataaataaacacacaggtctgctttcataccttcacgctctctcactgatcattcacaatctctctctttttacaccggcgataattttccgatcccgattataagatggcgaaggaaccagttcgtgttcttgttaccggagctgcaggtaatttcagattttaccgatcttgtttcttctatctctcgttatcgattcgtatcgccagatctttatatagcaccaatttttcataatcagaaaatttaatcgatccttgaaccatattttggattcctatactgtgatctgaagagacaaatgtattcgatcaaaatttcgctttagaaaagtagagttttggtttttcttttacttttgagtgaatcatgctataatgtgagatctaattgtttaattttttttttaaatcattgtttcataatagaatcattgttttatttttaaaaggaattttggttaaatatatttaatatattaattaattagattttaaaatgttaacttatgagtggttactctgtattagttgtgtaaaattctataaattttggtttaatattacataattataattacttatcttccttttttataagtttaatattacataattataattatttagtttcttatttttataagtttaaatttaatatttgttatttttcttttaacaagaaaatagaaaataattactctttatgttcctttttgtttgattttctaggaaaaaaattgttttaaaaagattgattttttttaagtttttaatacaatatttattaggtttttaataaaaaataattgaatattatacttttaaaattatagaaaattataaaatacagaaaataatacacttaaaattaactttaatatatttactttaaaatttatgttttttctaaacaataaaggaacaaaaagtactattttcaaaaatattaattaaataaatattaattatcgatgtggcaggataataaatcggattggataaccggccaaacatgtttcacatctcatgggtcgaatctccggtcccctccggtttaaaaatgatgggctaataacaaaagtcaaagactcaaaaaagttgttagttaagtctgcgtcgaatcacttgcaaacaatcaatagcttcatttcaatcttcggtgaacaatcaatctcgaagaagacgaacataaaattttcaatttctctgtaatcttcgcttcttgcgaaaccaattctctatg

SEQ ID NO: 36525 - DNA, 3000 bp, Unknown
  misc_feature (1)..( 3000): 2750-1469P.txt file - cDNA_ID_3097316; gDNA_ID_2936553; Annot_ID_194132
tattaagatttttcaacttttctagataaaattcacaaactttatctttttttgtttttctatagattcttgtaattttttattttatcaagatttgatatttaataaagttaaattataagcttaacatgtgttaggcatctacatcggtagattctaaataaaaaaaagtttctcatgaataaaatattgtttattttaattgaattcagttaaattaattttaattaaaaaataaaatcaaccattcctgaaaaacgagttggccagaaacgtctctcaaagtttctgaaaacagagacgattctcaattctctctcttctttttcaccactttgtattattttaataataagtatctcttctagatacttttgatggaggtgcccttaaaattgatccaaactaattttggataacaaattcattaaaataataatatatatttctttttttcttcaaaatattttaaaaactaaagttattttttggtaagaatttatatttgatagttatatatacatatgttctagtgataatgaattttttctgatgaatgtccaaagataaaaatcatcgggtttagactattttatgtagtgaagagatcgttgctctttgtgatattgacggtgatggaaagataacggccaaagagttccatttgaagatgacccggattgggaatacttataggagttctgatacatataatgatggttattgagtttgaggaatttaaggctaatattgtttagttacttattaaaaggtaatatacttgttcaccaagtagtgtcttgcttatattcattgtttagaggtttctcaacttgctatcaatgatacattcggcccaaatttttgtgttgtggtggacctggttgcatttgttgactttagtcagcttgggcatttatccatttgtggacatcattgttacattgtagacctatgagattgataatatttatggttaaacattattatatcgtttttcaatttccagatgcgccaaaccatcccaaaaggtagaagtcggatatatgtaacagaatgatttggagttattgagatttggacttaagatcattcgttaggctgaatagagcagtccatagaatccctgaacatctccaattagcgtaatctcaagtgaagaatagagacttggccctttagatgtcatgcttattctgcacaaactcaaataattcgtttgttttcttccaaattgctctagtaaactcaaatatttgtttcctcctccaatttttgttatctctaggattctatgaatatgcgttttattcaaatattattaagaatgtctcatagttaaccttttgagttgaacacttataataattggcacacacatatatatatatatatatatatatatatactgtaaccagtagtttttgttttgcaactttgcaaaaacacaaataatcatcggcgaataagaaatgattaaccgtaggaacagactgagcgatgcgtatgctctcgatgccaccatttgtttcaactttgatgatcagttgacttaaaatctctgcacatagaataaaaatatatgaagacaaatcatcgcttttgtcgaattctccatgaaagcttccaattttcataggaagtgccatttacgaggacatagtatgagatggtgttaatgttcatcataatccaaataaatgttaaaacattaagaatatgaaaaaatgatttgttataaatgtagataatgaaattataaatcttattctagaaaaattttaaatataaaaaatgaaaacttttttgaaaactttcaaaattagataagaaaattgtttatatataatttattatggtacatgaatagagaattagaataacaaaacaaaaagttgaaagaaacacaaaatgaaaaggctatacaagagaatttaaatcagccatgacgagagagtaacccaattagactatggtgatttaaatctaaactttttattttagaaagtttatattaaagaatataaatttgaatgtttgtggtgtgaaaaaattcaacttacctttattggttatgtatatatggattgaaaaatgaataaggagttcaaatatattttctgagcttaatttttttaaatcatattagtgtcattttgcgtagtttaacaaagaatctcgatgaaaatttagcgttgtaaatttatttcgttaagcaacttaacgaagtgtcttatttcaaaaagtcaataaaattagctattaaaaatttaaaacaaaaagtgaattaaaatttgagttttattttacctaaaacagtattaacgtgtttataatagcactttttaactgttggagattttctttttcttttttttgaattagagtgagatagtgatcaagaaaatgaagaaggtgttagtgcacatcatataatccaagtaaatgttaaaacataaagaatatgaaaaactgattggttagaaatatacatttttttttgtaaaccgatattaagtagagaatttagtataaaaaatcttgttctagaaatttattagtataaagaaatgaaagcatgtttaaaaactttcagaattagaaaaaaaatgtttacatatagtttaatatggtacttgaatagagaagcagaaaaacatataaaaaaaattgaaagaaacacaaaactcaattttaataacaaaagcaaaaaacgccacgtcatcgatccgtgtcgtaaatcagcaccaaaatacactttcaacggtcagattttaactatctcatctgtcgtcattttcgatctctctcttacactactacacacactctctctcctccaacctaactattttttattttttatcttctccttccacaaaacttttttaattttatctgaaaaattaaaacaaccgaaacaaaaaaaaaaaactaaaaatcaaaaatctcatcaccttccttgctctgtattttttctctctcactaaatcctccatg

SEQ ID NO: 36526 - DNA, 3000 bp, Unknown
  misc_feature (1)..( 3000): 2750-1469P.txt file - cDNA_ID_3097321; gDNA_ID_2936553; Annot_ID_194131
ttgcttctactcctcctcctcctcctcctactagtgtagctcctagtcttgaacctcccagatctgatttcatagtcaacgagaaccaacctttacctgatccggttttggcttcttctactcctcagactattaaacgtggtcgtggtcgacctccaaaagctaaaccagatgttgttcaacctcaacctctgactaatggaaaactcacctgggaacagagtgaattacctgtctctcgaccagaggagatacagatacagccgccacagttaccgttacagccacagcagccggttaagagaccgccgggtcgtcctagaaaagatggaacttcgccgacggtgaagccagctgcttctgtttccggtggtgtggagactgtgaaacgaagaggtagacctccgagtggaagagctgctgggagggagagaaagcctatagtagtctcagctccagcttcagtgttcccgtatgttgctaatggtggtgttagacgccgagggagaccaaagagagttgacgctggtggtgcttcctctgttgctccaccaccaccaccaccaactaacgtagagagtggaggagaggaggttgcagtcaagaaacgaggaagaggacggcctcctaagattggaggtgttatcaggaagcctatgaagccgatgagaagctttgctcgtactggaaaacccgtaggaagacccagaaaggtaaaatatcattcctttttgtctctgcgattacacagtgattatagagaacttgaatatttctagtcaaatagataagagaataaaagttggaacttttgtcttgtgaataaatgtcactttccattctcaacattgtctctttcgagcgtgtgtgtggagactagagagtatctaactaaataaattctagagtttaatttatattcgtgtctctgcttttggcctatacttaatctggttttgtggtgtactattaatctaagatatctctttgtttggtaatcaagagcaacttggtaggtggctcgctttagcaaccaataattgttcagttgaagtgtgagaattacatatgaacttatcttttgagacagacatcttatcaagttttgtctgttttaagcagaaatttagttaattcagtcaaagttcaagagtttgtgtatttccaagtccactagaatttctttgtctattatattgatgagttagttatctaattacatttatattattgccatttataaacatagaatgcggtgtcagtgggagcttctggacgacaagatggtgactatggagaactgaagaagaagtttgagttgtttgtaagtaatctaatgaacagaaacacaatatggtccgtccttggttttgatacttaattgcttatgcttggttttgatatctcatttatgcagcaagcgagagctaaggatattgtaattgtgttgaaatccgagataggaggaagtggaaatcaagcagtggttcaagccatacaggacctggaagggatagcagagacaacaaacgagccaaagcacatggaagaagtgcagctgccagacgaggaacaccttgaaaccgaaccagaagcagagggtcaaggacagacagaagcagaggcaatgcaagaagctctgttctaaagataaagccttgacataaaaagctagcaagtggtgggtttacttgttgtgtgttacatgaaatttttaatcttataagggtgtttgcaggagaaaaacaaaaagaacaatgtgatgaactgatgatgatgattgtgtctctaaccaaacaacaaggagaggtagggtaatgtctgtaaagtgaattaggatgttaccattgttcatgcttcccatctctctccatcgtccatatctgtgtaggcagctttgttctttgttccctcgtgttttttttagactgttgtgtctcttattctattttgtctccttaggctttttaggagttgttgttgatgtttatcaaaaacgcttatgtaatttttatgaccacttctactttttatgatggtttcttcaagtctcttacgttatgtagttagaaaaccattaaataaaagttgcttatgtcagttgctctgttttaatttgaaatccggttttaattttaagtgtacttattgcagaaattaggtagaaggtatagaacggttttactcttcactcacacaccatttaaccaaatttctaaatttattactcgataaacacttttttaacaagttttcaatacttttctccaaaaaaattttgaatttgaaataaagtagtgtatttttcgattttggttttataaatcaacttttttttttgaaaaagttaaaaagaaatcaccaccacatttgcatgttatactataataccaaaaaattaatattcgtgatttattttaaaaatctgtgaattaaaaagaaaaatgaaatgttgataaataaaaataaaaacaaggagtaaaggtggacccatatcggttgacgcaactgattctgaacctctcggtcgttcgtttctactctttccaagctctagcccatggtggtgaccttcttcttctaaccgcgaaaaccatctctatctctcttatctttcttctccgccaagtttctctttgtaatttctttcttcttcctccagattcttcaagcttcctttaccatctcgcgaatccttctattaagttgaacaaggtacgtacattgcgatttgcgaaccctagtttttctcaaaacgaaatctctacgcgtgagagcctgaatctgtgttttacagtcttcgtttctagattctaggtttgtgacatttgaaatttcgttaaggttttagcgaaatcgagtttctggttgtttagtttaagtctagtctccgttgatgtccgtttttgctagggttttgattccgattaaccgccgttttctcacattttgctttctcttttttttttttttttctgattcgcatctacagatctcatg

SEQ ID NO: 36527 - DNA, 3003 bp, Unknown
  misc_feature (1)..( 3003): 2750-1469P.txt file - cDNA_ID_3097324; gDNA_ID_2936553; Annot_ID_194130
tccttacgttgtcgtcaaaatggcaaaacaggtaaaccatccttaaccatactttgttaaaatggccctacttcttgagatagtatgtcgggtttcttaatcctctcaatatcaaagacactatttgatgatgttagatactttttcaactttatgatggagaatataatttgttacttttagtggatggaactatagcaacgtaataatagtgaccttttaaacatcttggtcattaaagcgtttcggcttcttgtatgatcattgttaaatttactaataagacgccagtttgaaagatcacgagtgttgaagactttagatgtgcattaaacaaaatatacatatggctaggttgattcggtcagttttcgtaaagaatatacatgttgaatttgtgaattttaggtatattgaagcggctctcagaatattttaggaatgtaatagtttagtagttaagaatctagctatttgtaattaatttggttgttcgagtgttttggaagtactttaattaaggtatctgaatattatttatacttgctaattgatctgaagcctcgaggtccggtggctggagaccgtaatctatctttacgcatcgtagaatttatctaacaacaaattcttagtattttatatatttcgagaatcattatttaacgcaaagatagtagttatgataaacgaatgagaaaattgaatgtgcagaaattgaagactcgagttatttacaaaaatgtaaatcctgagtggaatgaagacttgactctctcagtttcagaccccaatcttaccgtcctcttggtaaggaactaccaattctacgatcatatttttcattttttattttcaaatcgccataatgttacgtaaaaaaaaaacatgattacggtgtcaatttgcctagacggtgtatgattatgacacgttcaccaaagacgacaagatgggagatgcagaattcgggattaagccgttcgttaatgcgttgaagatgcacttacatgatctcccatctgggaccatcgtaaccacggtccagcctagccgcgacaactgcctagccgaggagtctcgggttatatggtctgatggtaagctcgttcaagatatagttcttaggctgagacatgtcgaatgtggtgaggttgaggctcaacttcaatggattgatcttcccggaaagggtctatgatttgttttctgtgtattggttatgggactttaaacctgaatttaatttaaaagtccaaattaatgtaagcaaacaaactagaaagaaaaaacgatagtaggaatgtctttgtacaaaaaaaattattatttgtttagtaaatgacgtgtttctagaatcattgggttaagcataaagttgaagaaaattacggatgttataagaagttccaatttttgtttcacacattagcgatcgtggaggtcatcaaaaccaagcccttatattgtataatgggaatcattactttaactcgtttgaaatgttaccacacttcaaccatggaatggaattatgtagtattggtaaatttaattaatcactagctgccaaaaatttcattaagtaacgtagtgtatacgtcaaaatttacttaggtagtgataatatctcgaaccaaggcacatgagcagatctctttcatatatgacacaagtatgagtacatgcatgagcagcacaaaccctatttgttgccttttctaacgtatacgcatcagggacccaaaagttatcaattacctttactctttttatttgtgaattttgtttgttgaattaatataagataaagtacaaaggaaacatatgagaacgctacaaccataaaagaagatagagacctgcagcaacaagataaagagaaggaaccaacctaccacaaccccttcagcacaatcaacaagagaagagaagagaataaggtgttctctcactcccacaaaaataacctaagtagatctcagtttttaaccttttgttaaatgataagttattaatcaattaactttaaagtttattaagtgcattgtatttataagatagctgcagaatttacatcaatgtagattttagaaaacagtttggacttttcgttttatcttataataaccttttatgttagaagattgtgcgttatctaaacaaatatctgaagtatgaaatgactaatgagaaaactatagtataattctaagctcacttctataattctaagtttatgagttaatgagttatataattcttacatcaatttttcacccaaaaccttatatacttcctacatagcttagatgaaaaatgtttttttcttcttctaaaacttcgttgatttcacaaatgaaagttgtatatatacaagtctaaaactttgtttatattcaaagttattcatttaagttcctcaaaaggttagagagattaccatagttacaaatatttcataattattattttttctgtataaaactcacaaaattacaattttaaaattaagttaagtttttcataatttcgttttcaatttcatattttatctactcactattttttttcttgcaatagttattgtttgatactttgatcagttatgcaaaagagttcttgatagttaatttatggtaatttactgtgttcaatatacactgccgaatataacaaggcccaaagggccagtaacaccatttgggcccaaacccaccatcactctctctctctctctctctctctctctctcgaaaagcgctcaacggtctccttgtgaaccacaaaaccatcacttcccggagaaatctgagggaattgagtctcgaggagttcaaatttgtgaaattgatcgacatgaatcaaagaggaagatccaccaatcgtagatcaaggagcttctctagatccagactcgccgttgaaggccattgaaatctcccatcacatttctctatcgtcttcttccttttgagttttccgacgacctctccaaaaatg

SEQ ID NO: 36528 - DNA, 3003 bp, Unknown
  misc_feature (1)..( 3003): 2750-1469P.txt file - cDNA_ID_3097329; gDNA_ID_2936553; Annot_ID_194129
ttttaggagaggatttgcttccctctgcaggattaatatctaccatttctatgtcatgcagtgcttcactgcttcctttagcattttgtctgagattgttcatgatgccttgagtagtgctttgctcaacactaaacacattgggttgcagtcgcaaatattcctcgttttctgttagaccaagtcaaaggttcgagtctctatcaaactgtgaaaaaaaaatcgaaagaaaatttgatcacttaccattcaccggaacaagattcttgccactcatttcagaatcgttctgctttggtaaaccattcacagaaacatgattcttggcactcatctcagaatcgttctggtttggtaaaacaggagtatcctttgtgataacctgttaatggaaactctctagccttaagaaattttcatatattccaatgaatataagaaggtggaacttgatatcctaagaaaaactgccagagaaatactaccttggagatgttcttcagtgttatgttaagataggttgatgaacgtgagggtgcgcagactgcaacctgaaaaacactatatcttagtccatgatttaccaaaagtgactgagaaacaaagtggtaatgtcaaaaccatgcgatttgttttgtctccttaatgaaaaacagcaaacctgcttaagtatcaccactgcgccaactcgtatatctctaccaaactcactctcggagataacttttctgtgcacactggcatcaattgttccagtgggatcctaccagcaatacacagatttgagactcatgacaattggtgcgtgacaaaaacaaaaaagtggaaaccattcacattgttaagagttcttgactgttcatttttttaccttaagagtcaccatgacatcacctagaccattcggagtgcaagttttgacaattgccacgacctacaaatgaccagccacatttcaagtatgtcactacatttcacttattagctgcaaagataagatgtggagcattatgagatcatcagcacgtggcttggcaaaaaaatccagcatttggctttccactaccccaattattctacaacatatacaaataacttgtggccaaatagcaaaaaattgggtgaagacattctttcagaatattccacctttctcctcacaaacacaaagcgaaagccaataccagcagactattatagggtgtagatttccattaatactctaactggatggtcactagatatcttggtgtaatgggaatggactagaggatacagctaaactgagtaggttaatcatacctgatcaactttaccccaactgtcacatcttctcttaatctcgctcactggtgtccctatagcatttccaccattgctcaacaaacctgccaaacaaaaattgaaaatggtaaaccacaacccctagagatttgacaatgtaaaattctaagagaaaaggtctaccttcacttcgaatgtaatcaacagtagagacccaggggtcctcagagaaatccttgtcttcccaatcaggctcttctgctgccttacgtaagaactcttgagttggaattggttctccatgctcattaaacgatttaggatccttattcatctttctacggattgcaacttgaacaactccagcaggtcctggaatcaaggagcgagaataactctcctcaagaaacttatccggcgaggagcagcgccgaagagtgggacggtgattagtgttactattaaaacccgcctttggattctgttgttgcgcatgcggttgcagagacctcgtcggagatttgcgtttacaagggcggagaaaagacgggagttcagaatcgccgagatcaagagcttcccattggtctacttcagcttgggagttcatatctctcatcacacgaatatgacgaaaaaagattcatccgcacatacccagattctgtagcaattgcattagcgataagccgataagtgaacttcaatgtgtgagactaaaattatgaatctcactaccattacacttataatttcattttcatgaaggtacgaaattaccaagattgagaactaaccggcggtgggggcaaatagggacgacgacgacgacgacgacggcggtgaagcgaggaggcgatgagagagagagaggtctcggtgacgtgaaaacggtttgattcttggaagagattctttacgagtcatgggaagagtatttatgtcattagttattgggcctttttatttggtatgatatgggccgcctcactctctactagtttacttcttttcgttactaactttttttttttttcccgctaactctattattttcaaaccaaactaatgtttcccgctaactctattattttcacagttgactaaaagaacggccgaaaaaaaaaactttctctctcgcatctttcagagagaaaaagttttttcttccgattaaaatcggattttcttcgattttcttcgattttaatctggttttttgttgtaaatgttttccagcctagtctggatcgcctaagtgcgagttctctttagccaatttggctattatcttttgttttgtttgatccttttcttttgcagtaactaaatctctttcatgaaacaaacgccgagtgtgggaaacagaagttccagagatcatcaactgctcaatcccttgcatgaaaggataaatccttcaactcctattaaggccgtaatcggctttgtgtgaaggtccctcttctttgtttgtggatcgtgatgtttggaaacttgatggctggtgaagacggattcagaagagcgtgttttgcgactggatctaatctcttcccttttcatcttttctggcgcttcaattttgttggtttatggatctagtgttctacacatcgggagatttctgcaaaagaaattatggtggtgatttagagaaaatagctgataggtgaacatccatgtcagaaaacagaatttgatcggcggtcagctatg

SEQ ID NO: 36529 - DNA, 3000 bp, Unknown
  misc_feature (1)..( 3000): 2750-1469P.txt file - cDNA_ID_3097338; gDNA_ID_2936553; Annot_ID_194127
ggtatgtgcggatgaatcttttttcgtcatattcgtgtgatgagagatatgaactcccaagctgaagtagaccaatgggaagctcttgatctcggcgattctgaactcccgtcttttctccgcccttgtaaacgcaaatctccgacgaggtctctgcaaccgcatgcgcaacaacagaatccaaaggcgggttttaatagtaacactaatcaccgtcccactcttcggcgctgctcctcgccggataagtttcttgaggagagttattctcgctccttgattccaggacctgctggagttgttcaagttgcaatccgtagaaagatgaataaggatcctaaatcgtttaatgagcatggagaaccaattccaactcaagagttcttacgtaaggcagcagaagagcctgattgggaagacaaggatttctctgaggacccctgggtctctactgttgattacattcgaagtgaaggtagaccttttctcttagaattttacattgtcaaatctctaggggttgtggtttaccattttcaatttttgtttggcaggtttgttgagcaatggtggaaatgctatagggacaccagtgagcgagattaagagaagatgtgacagttggggtaaagttgatcaggtatgattaacctactcagtttagctgtatcctctagtccattcccattacaccaagatatctagtgaccatccagttagagtattaatggaaatctacaccctataatagtctgctggtattggctttcgctttgtgtttgtgaggagaaaggtggaatattctgaaagaatgtcttcacccaattttttgctatttggccacaagttatttgtatatgttgtagaataattggggtagtggaaagccaaatgctggatttttttgccaagccacgtgctgatgatctcataatgctccacatcttatctttgcagctaataagtgaaatgtagtgacatacttgaaatgtggctggtcatttgtaggtcgtggcaattgtcaaaacttgcactccgaatggtctaggtgatgtcatggtgactcttaaggtaaaaaaatgaacagtcaagaactcttaacaatgtgaatggtttccacttttttgtttttgtcacgcaccaattgtcatgagtctcaaatctgtgtattgctggtaggatcccactggaacaattgatgccagtgtgcacagaaaagttatctccgagagtgagtttggtagagatatacgagttggcgcagtggtgatacttaagcaggtttgctgtttttcattaaggagacaaaacaaatcgcatggttttgacattaccactttgtttctcagtcacttttggtaaatcatggactaagatatagtgtttttcaggttgcagtctgcgcaccctcacgttcatcaacctatcttaacataacactgaagaacatctccaaggtagtatttctctggcagtttttcttaggatatcaagttccaccttcttatattcattggaatatatgaaaatttcttaaggctagagagtttccattaacaggttatcacaaaggatactcctgttttaccaaaccagaacgattctgagatgagtgccaagaatcatgtttctgtgaatggtttaccaaagcagaacgattctgaaatgagtggcaagaatcttgttccggtgaatggtaagtgatcaaattttctttcgatttttttttcacagtttgatagagactcgaacctttgacttggtctaacagaaaacgaggaatatttgcgactgcaacccaatgtgtttagtgttgagcaaagcactactcaaggcatcatgaacaatctcagacaaaatgctaaaggaagcagtgaagcactgcatgacatagaaatggtagatattaatcctgcagagggaagcaaatcctctcctaaaaagggtgtgacaaagaatcactgtgaagttagaatggagcagactctcttgggaaaacatgattcaatcagccaaacagagcagcaactgtacgaagatgtagctactgagactgatatagctgattgcattagacccgcgaaacagatcagaagaagttctcaatcgcagattgatgagcaagagagtgtaatggggaaccctgatgaagtcacaactcgaactacaatccacaaatctcaatcgatggcgtcaacaatctcgttgccacaatggacggacgagcaacttgaagaactctttgcttttgactgaaatagacagtttggctttcttttgatataggaaggaatccacttttctagatagagagcaatgaaatagaatgtaaagccgtgacagagatgctgaaactactgacagaaattttcaaccaccaagggaatcaaatacccatcacgaccatacgtggaagtatggaagcgactctcctatttgaagttatttgttaggtagaccttaagctaccaaccatttgtttagtttactagtgtgagagacataagctatgcatacaaccattaattaacagcattagtcagaacaatggttactagttattgagatgatgatgacatttcaccttcgggttcccactgttctctcttcaactactgaaccatgtttcttgggacatgattttgggctcggacttttgaggcttttcagaatcgtgactttgcaaccccttaatagctacaacattgccaaaccttgccacctctgtcccttaaacttggatgatgagcttcttagtccacatctcttgagtcttgattcaagcttaataaaagaatttctagtgagttgcaaaattgtaattttaaaactaaagggacaaaaaagaaaatgcttatataaataaaaggtcatattgcaaatagtcaaaacttgaaaagccttctcctttatccactcgttcgcctgccaaaaaccttactaaaacctcacttatagtcgtctctggtgaaatcttgccggagagatctcaataaaatg

SEQ ID NO: 36530 - DNA, 3000 bp, Unknown
  misc_feature (1)..( 3000): 2750-1469P.txt file - cDNA_ID_3097347; gDNA_ID_2936553; Annot_ID_194125
tttagtaatttgttatcttcatatcctaaaccagaccattttgttcccgtggctcattttaattttgcagatgcgacttcgtgaactttaggagaaacgatgcttgcaagaaatgcgagtgcaaacgacctagccaagccaataacgatcaagaagaccatacatggaaacgacccgccttagtgtaaacttatgcttttgtacttgcaagattcactgcttgctatttcctttcaacttgttgtttcttcttctcttgttgagttcccaaatttctaaacagataacaattttgaagcagaaaatggaaacctagtttgtagtcacattcatgattcatcgttaaagctatattttatgtagtcaagtacaaactatgtcatctctaatacaaaacaagccatgattatacaaaagcttcaaggccaaaaaaaggtgcaagttcttcgttaggaacagaccgtagctacattacaaaagcttcccgtgagagctacataagctaaaactattgagatgatgatgtcatcggattcatgagttggtctccatttgaaatttcaccttcatattccttcttccctcttctttatctaccaaaccatgttccttgagacatgattttggtgatggagcagacttttgcggcttctgaggcaaaggaactttttttacttcattgtcttcctcaaagggttcgaggcggtacgtaaccttagactttcctagtctaaactttttgctcctagcaaattgataagccgtcactgcatcgatgctctgcatgaatactactttcgcagagctttcccctgggtttacatcagttcttgaagcatctattttcccaaacacactgaatctcttcaacagttctgctttggacgggagatccccatgtctacacaaaaacttcatccgcaaacattttggattagcaagccgcatatctttcatcaggtgtagattcagcgatttatcagtagaaatagattgttggcctgctttcttctttctcttggagtaacgtgcagatgctttgtctcgacttgccttccttttgacaccaatggatctgacattatcaactgatctcgtctggttttcaacagttgttccagcttccaaatcttgtaattgttctgcaggtgctcctgcatcatcagaactaaattctttgtttgaagtgcctgtactaggtagcgaaacctgtcccacctccacaatatgtgactccaacgtatattcagagcagttttctcgtgttccattaagactattcctacctaacgactgctcattcaaggtcttggcactgatgatagagctatcaagcttgtttcttgggctagcatatttttttctcactgaacaagctagagtgtgacaggctcctggaacaacaaaagaaacaggctttgccaaataagctttgtcgttgctcgaatcaagcaagggtgacagttcatttgtcgatgtcacaggtccatcaaccaaaccaatgatgtcatcatgagtttcaatcataacatcaggaagtgcttctgatacatcaactcttgaggcagcaacggaagtggtgtcttcctctatcatatcttcaatagaaggttctgaattcaataagcagatattctgctcaacttgacagcattctttactcttggacaggtgaccatcatcctcatgaacagctcttctaaccatggtttcacaagctttcatggtactagaattagaactggttcgagggctcctcgtattccatgtgcaaatctgaactactttatcaacatgctgctcagaagaacaacaagggagatccttcggcaatggatctcttagactcaaatctctactgttgtcgatatccgcatccgcagtctcaggaaacatagaacacaggtccatcttctttgagtattcaagacaccaacctgattcttcagatcgatcatttagctctgcacctgtacacatattcatagaattatttgagaatacaaatcatagcaatatctgtcaatccatacttcgccttgttctattgtaaacagagcatatagattcacactcaaattttgaagttcctataaacctaatagagcgaaacagtagcaatcatctctatggagcagttctaaaacaccaaatggggtttctttcctaatcgtactcagcaaaacccaaaaataagaattttcaaacttacttgctctagtctcctcatagacagattcggagcgcttaaaatcgacaatgtaacgccgaaaactaaggatctgagcactggaactattggtctcagctaatctccagaggggcattcgtatcgaaatagccatatctctaacaaaccccagagccgaatccgaagtggcatgaaaccgtgggagagagttttctctatccaagtaaggcgaatcaatacgcggctggcaagaacaccataacccaaacgagatgttccaaaagtaagctcgcagagctcgattcacaaagcggcgaatccaccttgaatctgaaatcaaggttttgaaatcgcgatcaaagcttcgtagaaatggttttggaacgtatcgcggatccattaggccgaagaacgagacgagaactcctaacgattcggatggatcgataatccgacccggaatccatgtattcgaaaagctcacgcttacccaaactagctcccctttcttccacatctttgaatattagggtttaagctttctctctgatatcatctctgtgacaagacaagagagaagaaagtgtagcgttgcctgtaacgtctcctctagaactttttctactttaattgaattacacttcatgctgttttcaactctcagatactaactacctgccatttaatcaacgttttgtcttcagtaaagacatcctgctgttgtcctacttatagagaaaacttctgccgtttcatttactccgccgttgccacaaaatccgctgtagctaagctcggtgagtaaaatg

SEQ ID NO: 36531 - DNA, 3003 bp, Unknown
  misc_feature (1)..( 3003): 2750-1469P.txt file - cDNA_ID_3097350; gDNA_ID_2936553; Annot_ID_194124
attgaagcttcagcattgacagagttattgctcttgaaatagacattgaaatggtacaaagtgatttttgctcgttggttattgctcttgaactagaatgttcttgtacaaatcttttcctttgcaaatgtgttgttggttaaaacataatctgttcttttcaaatacctatcaattacatcttgacgctgcattgtcgaaactagattccgggtccatgcccttcgtactctcggctttttaatgtattccagaagattcatttgtgaagactagttaaaccatgagacttacctcttattgagcagttttcctcatggtatccttagcttgtaaattagcacttctcaggtttattctcaaaaacaatccaaattcagtatgagcattacttcctataccaagtttctgataaatgattgacactttgacagagttataggataggcaaaactcaaactttacttctgggaacaatacttttacgtaaaccaatgtttttactctctcatattaccagaattcttctaacttcaaaggtcaagactcaagtgcaaaatgcatactttaaaacattcatgtagcattgaacgagagattccagactacaccatagatgactcgttatcacatcatttgtcttacatattacattactctatcaattctacttctgaactattgaactgaacaatacaactagtaagcatacagtaattgtataaaaatgtacaaggtaaaagatttagttactgttgttatatcgtttggaagcgaaagctaaacaaagactcaacgataaatcttaacattgaacatttttcctttattcgaagaattcaaagtcctgttataagagattcacttatactccttaacacaattcatccaccaggtcgactggaacacgaaaacactatatgttctaggaagaccatgtagttattccaacataatgtctaggctcttcatttagtctcagagctggacttggttgtagtggaaacagtatttagcttacacaaaatctcactcttcaactcagtcactaacttgtcaaaattcttgaattgtgtatcgtaatcgccttcctcgccggattcatcaatataattcccaactctaatataaaaaaagaaaagagatagaaagcttcagtaccttgagattcaagcaaaagtaaagagataaagagaaaccatgacatactcaatttggagatggccaaattcttttccatcttcagctattgcatcaacaagaagtttatcattcattgccaagcacttaaccagatatctcttcaccggacatttataaacaaacgcatactcctcgtcgaattcgttccacccttcaatcccaaccaaacctaaaaataaaaaaatcgatcaaatccgaaccctaattaaaccctagaaaaacttgtaaaaaataaaaaataaaccctaaaacgaagccaatactaacactgagtggtcgatgaggacagagcgtcgtgggcgaaggcaggacgtccggttgaagtgagaatgaaacccgaaacggctaaagaagcgtgaactacgaaagcgattttgtcgtttttattgcgaaaagcaggcataactgacctgatcacacccatcactgcatgagtagtcgccattgattctgtttgaggagttctcgtcaagttcatatgttatccctttagagtaaagagtaatatcgaagttgtaatcctctcaccataaaggtcgggtatttttttttttcgtcgttttcttttcgggtatttgttatgtaaacaaaaacgaattgataaggagattgtgtatacatgaaaagaaataaaataattggcataattatacccataacacgataaaaggaaatatttttatgataaaaggaaaatgcctttttcaaaaccttctgtacttttgtattgaacttgtgtcattgctgcaacatacggttaaacgacttgttattacttcattattgagatgtggtcgcaatgtagtgacactgataagtctaccgagaaccggaaaccacttaatccgggatcaagttctctcctataatgattagtccgttgtgctctatatagatgaaaaaaagaaaactaaattacttattgttgaagtccgggatcccttgaaagttggacgtttggacgtctttttatcatgatgtatgggattgggaattttctagccctaggatttcggtggaaaccgttaaatcgacccgatcaaacaaatttttttggttatcggcataaaccgaagatattccttctatccgatcgatgaaattaatttgggaaatttgatttcggttcgggtcggttcgataatcggaaccgattggttttgcctaaaccaagaatttgcagccatatctccctgccatgactttatgaaggcctcatcgattgtggtgctaaaattcacaaaacaatctggccagatatctagaccggcaatcctttgaaaccagtatacggaattcaagtgtaaatcttgcatccacattaacatcgtaagatggatataagtttttgtttggatatgtttaatatgtagcattggaatgtgatttgtagagatatgcatttttgacggtcaatcattcacggaaagatatttacaaacagcaatactcctataaaaacgtcgcacaaacaaacaaagaaagacatcagggttgattcttgaaaggaggcatgtcagccaggtgtgtttttattgaaatctcgcgcatgtgacaaaaagacaaatataccctttaaaccattttatttttttaatcattttgttttctttctccaatcattcgtattcctctccttgttgctgctgctctctctcgcatcagccatggcggtttctatgtttatccctccaaaacctcctttcttctaccctctctagaccttcctctctcttgattcctttcttcgtatctctttcagtcgaagccaaaccccttgaatttccccgatttcaaatg

SEQ ID NO: 36532 - DNA, 3003 bp, Unknown
  misc_feature (1)..( 3003): 2750-1469P.txt file - cDNA_ID_3097360; gDNA_ID_2936553; Annot_ID_194122
cgactcattgtttttaaaatctcaagctaatcgatggaaccgtacggaaccgtctcagcacaatcacagccactagcaaccatcgttacaaggatggcctgcagctttggttctccacacgctcgtcctcttagcccgagtgttctgtttttctatgtcaaactctgtttctacttctcttctaaatttcagcatgaagtagcatttattgtataaacgttttttgtttgaatataattttacattctttcaaaaaaaataaaatctcaattattttgtgtgatcttaacaaattactccagtataaaatctatgatttatttctccacaatgttcattaaatcaattttatataaactatttattactcttcaatatcagattggtaccatattccttaaaaaaccactacatatatttattccaatttagttatggtatcaaatattttatgtttggctaccaagagatttgagacataactcaattgcctataaatactcttcacctttaacgtctcatcgcatcatctaatcaaaggttagtcttatggtttttcattagatatttgatgttttttcagtgtccaattattttttttaatacatggacataattcttttcccaaaattttatggttaaaaataattttctttttgagagttctttttttcctcatcatataatgttttttttttataaagtttcatgtttaatgttttctatgtatgcttttccttctgattttgtttttaacaaatataatttataagatcgttaataatttttgtttgatttcttgcaggaaaataaaatatgtaggatcctcctttttctatttgatctcatcttccaaatttttataaacatttgagcaattgatgtcaaagtgaatacaaaaacaggaaatatagtagtcttatataagacaattgtttactatataacaactatatgcaaacaagaattaatctacggatttaaacctaaactaaaaatgatcactaacttgatgaacaagttaaaagcccaaacctatctctggatcagaaagaaagagaagctaatcagagtctcagagagagatttgggcttaaaaagacataacaggcccaataactcaattaagcccaattcggataacacccctgcgcacaagatgatgcgtgaaaagataagtcgacggctcttctccgataagattccggtgagaaacgagcaggtcctgtcttcttatgaactcaatttcttcatttctgattctataaaacatccttaaaaacatgtctaccacattgttgagaacaattcagctaaaccagttctcacttctcggaactagcttgttaagaaggagaaggagtaacaacttctccgtgaggtcttgtggaagccaaacaacgacgacccatgaagctaaacagtcttctccaacaagggttgctccaaaaaaccacaaaagcaaccaacttgatgagattctgagagattacgaagctgtaattgggatagagactcatgttcagctctctacattgacaaaagccttttgtagttgctctaacaattacggttcttatccaaacacaagtatttgtcctgtttgtatgggtttgcctggtgctttgcctgttttgaattccaaagttgttgaatttggtgttagattgggtttagctttgaattgtgatttgtctcttaagtctaaattcgataggaagcagtatttttatccagatcttcctaaaggttatcagatttctcagtttgatattcctattgcatctggtggttatgtggatgtggatattcctcttgagtttggtggtggacataggagatttggtattactagggttcatatggaagaagatgctggcaagttacttcattcagacacaggagattactctcaggttcatatggaatttatgacacgtttcagtttggttttatcagattcttgtaagggttttaggtttcagatgcaagatgtttgtgtttcttatgtgttagttggttactctaatggtgcaggtagatttgaatagagcaggtgttcctttacttgagattgtttctgaacctgatatgagaagtggtatagaagctgctgaatacgcttgtgaaatgcaacggattgcgaggtatttgggagtcagtaatgggaatatgcaagaaggctctcttcgctgcgatgtcaatatctcaatccgtcctattgggcaagctgagtttggcaccaaggtcaacaagtttctttctctctatatttctttgtcatttatgtgaagggatgatccactcattaatctcgttgctgattcgagttacaggtagaaataaagaatttgaacgcgttttcagcaattagcagagcaatagactttgagatatcaagacaagcacttctctataatcaggggaaagcagaccagattgtaacggagactcggctatgggaagaaggcgctcaggttctaagctaaaactctttcatcaggtgcttcctttttccatcagcaactaacttgagtagatgttcagaaaacagtaacaatgaggaaaaaggaagggcttgctgattaccgctactttccagaaccagatcttccagaagttatccttacccaagaatatgttgatagcattcgtgcttctttaccggaactccctgaagcaaagcgcaggagatatgaggcgatgggtctaggcatgcaagatgtgcttttcctcgcgaatgacgtcagtgtaagtcctatttgctcaatgtagatgatattttagatacataatgaacctacttatgttatcttcacaagaagacaatggtgagagctaaagagtaaactttctgatcaatttggtgagaatatagatttttttttgtataacagcaagacgagtaaactgttgtttgaatgaatggcataggttgcagaatatttcgatgcagtcattggtaagggtgctgaagtgaagttggcagcaaattggataatg

SEQ ID NO: 36533 - DNA, 3000 bp, Unknown
  misc_feature (1)..( 3000): 2750-1469P.txt file - cDNA_ID_3097376; gDNA_ID_2936553; Annot_ID_194117
caccggagaagagaagaaatgagagatcagagagaattagtaacaattgaaggactttggagagaaatgaaaaacgtgagttgaagttacacacaccgccgatttatgattcctctaatgatgtatacatatatttttttaatataaatcatccgatgcggtatgtgtatatcccacgtctgctttcctgttccggaataaacttccaatattagaaattcaatcatcggatataaatatatatatttatttttattttgaacaacttggatataaatatataaatatataaatatgtcgttaatatcaaacttaaaataatgttttacattatttatttttatatttaaagctgataagcattataataagaacccttattctcaagttaaaagagagcaattatttgtagtgcattgagtcattgactcattcattctacacaacaaaacatggtaataatgtggttgagaagagctttcaccgtcgtctcgatccctcttcatacaaagtttgaattcttgctttgggtcatgcagtgcctcattattgatttatctttgattaatgttttttttagataagaattaacctatagatcgtagccatcccggatgaatggccttcttttttatagagattgatggtttttctcgtttaaagttttttttggtatgctcatgtccttgttaaaaaggctagatttcatttgttaaaatctagcatttatgcttcgtattggttctcccatacggagaacttcctcttttactgttgttagatttcgtttgttaatatatcaaagtatttttgtttttggataaaccctaagagttcctaagaaagaggttattttcggaactgtaagagttaatagtcatgaggttaaattacaagtacatgtacactgctgagctcccatgttcataccaagttcgagtgtatggagcttacccttggcattatgaatttatgagcaagctgcaaaacttgccacatagaaccagagccagaccaaaaaaatataaggctccatacgaattatggaaaaaacaattcttcttgagattatataagtcattaccatataatatttttaaaattaaaaattaaagtttataaatatattctaataagctgattttatataggttccagattttaaaaagaaaaaacataacaaaaagagaacgttgaacacaagttttagcaaagttgtcgatagagggacacaatgagatatggttcccatacgttactccaaagtatccctttttacttggttggttgtgaaaaacagaatttgagtagagagacaatgagaaagtggtatgtaatgtagattcgagttgcattttttgcaatgaacaggtagagagacgaaggaacacttatttttccactgcgcctactcaaaaaagatatgggaagacttaacaaggggaattctctcggacagatattcggcgagttggacagaggttatgaaaactttatctaaaaaccttctatacaaaacgaagagctacatacttaggtatgcactacagacagaactctatacactcaatttggaatgaacaaaataggaggaggcatcaggcatggggagcaatcatcaccgacggaaatacttgtgaagattatagacaagaatcttagaaaccgtttgagcacaattcaaggtagtggaggattgaagttcaaagatggcatccaagtttggtttaaaactttgaatcaaggcaatagataatagacaattagaagttccttttctttaaaaaaactctcaaaacaattagcatttcatatgtaacaagtttatttttctttttaatataatttaacattaaattcaaaaagaaaaagttttaacatatttttattataaaaatctgaattaatttagtaagaaataaataaaaatacttgttattcgaaaaatctgaattagtttaattagaagtaaataattacaaaaattatctattaggtccatatcaaataatttatatagatattatcttctaacattaaatataactataactattcaaatttgtatctaacaattattactttagtgggtgcaaatatatcaaattccagcagtgttgaaaatttgttagatttctttattcatatataaataataatatgcccaaaagtttctaatattaattaaagctaaattttcgaaagaaaaaaaaatgttatttgactgcaacgataatgaaaaattaaaaattagttggattgattaactcaattataaacaaaaatacgaccgaaatatcttttattaatcaaaaattcaaaactataacttttgtacatacataataaattattacacgatttagtatgaacatataaaatcacaacgataattaaaattagttagatttattaatttaaatatttaaaattacgcgcgaaaggcgaaagcttctatataatatcaaaaaattcaaaactatgtaatttctttctatttttctccaaaaatttaaaactcttcaagtcacaataaattcatttatgataaaatcttcaagaaattatattcatagtcttatcttttttgttttcttcattcatagtcttatctactttactcatttatgcatataaaataagaaaatgcagtccttagtacttaatcttcagtttgaaagtcattaacgtttaatcatagtcaagtttcgtctttaacaggtttgactatttgtttccctaatcttcttcgttttaggctttaataaaagattagtgtcccacttaacagttacgtccgtcgtcttcttcgtccattcatcgaaagcttggttttgaattttcttaagtttttgaaatcgtaacggagattgaaggtaagagacatagcgagaagagattttgcttttgaattggatatggcgttttggaattttgccgtaacgtgtttgttgtggtaaggtttgaggtttggaaatctctcgagagaagtcaaatatg

SEQ ID NO: 36534 - DNA, 3003 bp, Unknown
  misc_feature (1)..( 3003): 2750-1469P.txt file - cDNA_ID_3097382; gDNA_ID_2936553; Annot_ID_194116
tcgtggagcatcggtgagagtaggaagagatacggagaaagaaggtaaagggtattttgaagatcgaaggccttcgtctaatatggatccttacctagttacctccatgattgctgaaaccaccatcctctaagctttagacttttcttcgttttggttctttgtatgttcttcgaatttcggtttgatatggtttaatttcgcatttagacttttctttcaaataagttacgaaatgttatgtgatttctattgtttgatccggttacggttcacttttaagccaaaaaatctaccgttatgactcgaataatttgtaaccatcatcctcggctaagctttttagttacatttgaagtcattcagtgaagggcgtttgcattgtaccatagcatccatattagattatgtttgaataagggcattgaccaggaaaaaaacaattgaacgggcctgactttattagcccatatatcaaatttaccgtccgttattgttcttttacttttctagttacgtgttggtccaaaagaaaggattgagaaacaagaaacttgtatacatatctagaagttagaacccatttcgtttcaagcctaattaacctctaccgttatgacttgaattcgaagccgtgtctatgcaaaagttgaccaaaacattgatttttcttttcttatattcaagattcaagctatgtcatagaagctaccctaaagctacatgcctacattatgcagttttcgtccattgatgattgatctgtaacgtttaattatcaggttataagcatacacacattttttcctcgtctatgatacggtgaaagcattaatataagctataagattatatatctcgtagtcgaatgtataagtatttttttgtttttactgaacgatgtatatattatacttggattaatatgggcttatagagggatctaattaagaattagacgtatcttgtggtcaggtaaagtcagtagatacgttcacgaaattcatgtaaaatatataactaaataaactacttgattggtccacctgcacgcatatactcaactacatatatgtatatatatgttcatgcatgttacgtatagtttattattgtaagccggtattttcttcatcacagaaataaatcaatatagacgccaagaaaaacaaaaccaactagaaaaagtcatttaatatttgaatcttttacgagaaaaatagaattataagtttctcgaaactatctaacagaaattctctccgaccaatgaagaataatcaatctttttgggtatttgctctggtctttcacgagcaaatgaaacttataattaatggtagtatttggtgagaagaaaaggagccaaaccacatgaaagaaaaaaaatgtaaatattaattgtagttgtcgtttcgtttcgtgtaacgcccaaccatgtatcgcagcacgttacagcttccttttgttgctgtatgtgtaaatgatctaacctaataccatactattgcaaagaaataaaactattcctttgtcatatactactaaattctaggaatagttgacacataaccataaacttaaaagaatttgtagatttcttacctccaaacggagtaggacatgtagtacatcttaaaactaacagaaaataaaaacgttacaaatcatgatcttggccccttatagatagtcatgatagttatcgacaaataacgtctaagcatgcatgcatattattgacaaattacacttgagaaagttgtatattttgagatcaaatatttgataatatgcgcatgcacaacttatatggcatctaacaaatggtcccggactatagtaaaggatgatacatattatagggccaatgtcgagaatttcttagatacaaaacaaaactaaaggaggtcttgtttacagagtggccgagacagacacaaaacgaagaagatttattccaaaaactttaatgtaatcaaatgtggttgtgaatttgtgatcatcttctaacatgttacggtcctaccaactctctacccaccctttttctccttttttaattctatattaatattatcaacaacttcaatcttattatactccataacttaattctctatgttccttaataatccattttctagagaacaaatggttaagaaaatgtatatttttttaatgttgtgtatgcatttttatcaggtattgatgatgaatcgtaaatttcaaaataaaataaaataaatactattggttaagaattatagaaaattgtaatttccaaaaaatatatttataatcaatttttaatatgttttttcttatgtgtcaaaaatctaaaaaaatagattaattaggaacatataactagggttctcaattatctaggagtctttatgctaattacagaatttagattaatattagtctgttattttactacttaaaactgatattttaattccatttactgacagtaaaaaaaacagaacagaaaaaaaacaatgaaagatggaaaaaaggagaagaagaggattaggctgttgactgctttcactccttttacagctctcttcttctctctttaataataaagttttcatttttatacctttctctctctctctctctctcttcttcttcttcttcttcttcgtcttcttctctgaatagtcacaatgcgagtcttcttcttccccaactcgtccatggcgattctctctgttttcctctccctccttctcctctctctccctcttccatcaactcaagatctcaacgccgacagaaccgctcttctctctctccgctccgccgtcggaggccgtacatttcgctggaacatcaaacaaacctcgccgtgtaactgggccggtgtcaaatgcgagagtaacagagtcaccgctctccgcttacccggcgttgctctctccggtgacattccagagggtattttcggtaacttaactcagctccgtacacttagccttcgtctcaatg

SEQ ID NO: 36535 - DNA, 3003 bp, Unknown
  misc_feature (1)..( 3003): 2750-1469P.txt file - cDNA_ID_3097390; gDNA_ID_2936553; Annot_ID_194114
ttttgtcttctgtgaatctacaatttttttaaaaggtttttcgtttttgctaataaaataagaaaaacggtggcgatgatgaaaaaaaggccggacttacggctactaccaccgtgaaagtgtggtgggtagtagaatgatgctaaagtatccaaaggttacagctgagcctcctctttctacaacttcacccatttttatccgatcttcactattattttgcctcaacttctttctcaatcaaagttcggtttaacgtttcggttcggttcggttatatcggttttcgttttttttgttaaattttttggaaaagtatgctgaattgatccgatattaggttcggttcgggtaggttcggttttcgggtaattcggtttttaactgggtatgtgcaaaaaaaaccgaaataaccgaacagaaggaaatacataaaaaaaaattgggtttgtgcaaaaaaaaaaattcaactgggccaagctaaaatacataaaaggcccattgtaaaaccatagaaaataaatgcaatcagaaggacagtttaatttttaacccatttcaaagaaaacaattccaaaaaataaaatgtcagaaaagaattttcttttagaataaagacagtgaagagatttatttcaaagcctgggtttaagctgctgagagaacacaaaaaaccctaacaaaaatggaatcgaaagcaatttgcttagggtttcttcctccaagacttcgattttcatctccacgtttactctctcttcctccttctcctcctgtaagtgaaatttaaccatcaaaatttcatttttttccatttcgattcttccaaaaccttatcctaaaatttgtcaatatctcctgattctataggcttcttccacatttgcgacgcgtcacaaacttgattccagacgtaagtatctctatcttaaatcctcctacttcacccagattgtagcataaagactgatcctttttctcattttcattcttgtttaagaaaccctcctttggaacaaaccgcaattgagccgagttcgtgtagcgtgttcttcttctcaatctgactcaagacctgagaagaagcaatcggataagagtaactatgctcgagctgagctgttccgtgggaaatcaggttctgtttctttcaatggtctgactcatcagctggttgaagaaagtaaactggtttcagctccgtttcaagaagagaaaggttctttcttgtgggttttggctcctgttgttttgatttcttcgttgattcttcctcagttctttctaagtggtatcattgaagctaccttcaaaaacgacactgttgctggtaggtcaggttttactactgctttaatgtttaacatcggattatgacttatatgaatcctaggaaggaacaaatggagtagaagctatctatcttagtggtgttacatctgctaactcattatgttttagtgtagtaggctttggctttgaggttttgataggcttagtacatgttttctgatgtgcaatattagaatcctttttttcactattatcaagaacacatgacctgagccttagaaagtacctaaacgagatctcataactctcctaaagctaagagacttagcaaatgatctatctcttgttgtatgatactcattttgatgctctctcttattataatttcttgatgcagaaattgttacttctttttgctttgagacggtgttttatgctggtcttgcgatattcctgtctgtgactgaccgagtgcagaggccgtacttagacttcagctccaagagatggggtctgatcactggactgaggggataccttacgtctgcattcctcacgatgggtttaaaagttgtagttcccgtatttgctgtttacatgacttggccagctcttggaatagatgctttgattgcagtgcttcctttcttggttggctgtgcagttcaaagagttttcgaggctcggcttgaaagacgtggctcatcctgttggcccattgttccaatagtctttgaggtaaacttatattctgattttgaccattttggtcttaagtttgtctgcccatcttcttgtggtccatgatgttgtagtcttgttttgagtaactatggttgtgtatgtcatggcaggtgtataggctgtatcaggtgacaagagcagcgacttttgttcagaggctgatgtttatgatgaaagatgcggcaacgactgctgaaataacagagcgaggagttgcactagttggtttggttgtgactttgcagtttctagctgttatgtgtctctggtcgtttatcacttttcttatgcgcctctttccttctagacctgtaggtgaaaactactagatctcagtgtttagtgattgttagatgtagccaaatcccatcggttttgttttgtttctgtgttcatttcagtagtaatgaattgtattaagtcactttaagaattggttgatcatgtgaaatgagaattggctggaaatgttatagaacgatcctacttaacttcagtatttgatgagatttcttattggagactcttgtgaccccttctctaaagtttcaatgtgtgaaatcacaacataagtaacacaacaatagatgggtctggtctcagcttgtgttttggtcctttgtatgcaacaatagagaagctgaatgcttatccacgtggaagatttgtgcctccgataggtgtctttaacagtgtgacgtgtctgtattgtttcattgatgaatctgttacaccgttgagtgattgattctcaaataaattggtcccaaagctttttatcaatatgtgatggttattaatggatacttaataaaagatgccattatactaatcaacgattattgttgagaaaacaataaaataggatctcaagagaaatagccgcttctataaaaatagtgagagtgactgagatcaatagaaccaatctcagaatcatcttctttctctttcggaacaaaaatg

SEQ ID NO: 36536 - DNA, 3000 bp, Unknown
  misc_feature (1)..( 3000): 2750-1469P.txt file - cDNA_ID_3097401; gDNA_ID_2936553; Annot_ID_194111
ctccaataagaaatctcatcaaatactgaagttaagtaggatcgttctataacatttccagccaattctcatttcacatgatcaaccaattcttaaagtgacttaatacaattcattactactgaaatgaacacagaaacaaaacaaaaccgatgggatttggctacatctaacaatcactaaacactgagatctagtagttttcacctacaggtctagaaggaaagaggcgcataagaaaagtgataaacgaccagagacacataacagctagaaactgcaaagtcacaaccaaaccaactagtgcaactcctcgctctgttatttcagcagtcgttgccgcatctttcatcataaacatcagcctctgaacaaaagtcgctgctcttgtcacctgatacagcctatacacctgccatgacatacacaaccatagttactcaaaacaagactacaacatcatggaccacaagaagatgggcagacaaacttaagaccaaaatggtcaaaatcagaatataagtttacctcaaagactattggaacaatgggccaacaggatgagccacgtctttcaagccgagcctcgaaaactctttgaactgcacagccaaccaagaaaggaagcactgcaatcaaagcatctattccaagagctggccaagtcatgtaaacagcaaatacgggaactacaacttttaaacccatcgtgaggaatgcagacgtaaggtatcccctcagtccagtgatcagaccccatctcttggagctgaagtctaagtacggcctctgcactcggtcagtcacagacaggaatatcgcaagaccagcataaaacaccgtctcaaagcaaaaagaagtaacaatttctgcatcaagaaattataataagagagagcatcaaaatgagtatcatacaacaagagatagatcatttgctaagtctcttagctttaggagagttatgagatctcgtttaggtactttctaaggctcaggtcatgtgttcttgataatagtgaaaaaaaggattctaatattgcacatcagaaaacatgtactaagcctatcaaaacctcaaagccaaagcctactacactaaaacataatgagttagcagatgtaacaccactaagatagatagcttctactccatttgttccttcctaggattcatataagtcataatccgatgttaaacattaaagcagtagtaaaacctgacctaccagcaacagtgtcgtttttgaaggtagcttcaatgataccacttagaaagaactgaggaagaatcaacgaagaaatcaaaacaacaggagccaaaacccacaagaaagaacctttctcttcttgaaacggagctgaaaccagtttactttcttcaaccagctgatgagtcagaccattgaaagaaacagaacctgatttcccacggaacagctcagctcgagcatagttactcttatccgattgcttcttctcaggtcttgagtcagattgagaagaagaacacgctacacgaactcggctcaattgcggtttgttccaaaggagggtttcttaaacaagaatgaaaatgagaaaaaggatcagtctttatgctacaatctgggtgaagtaggaggatttaagatagagatacttacgtctggaatcaagtttgtgacgcgtcgcaaatgtggaagaagcctatagaatcaggagatattgacaaattttaggataaggttttggaagaatcgaaatggaaaaaaatgaaattttgatggttaaatttcacttacaggaggagaaggaggaagagagagtaaacgtggagatgaaaatcgaagtcttggaggaagaaaccctaagcaaattgctttcgattccatttttgttagggttttttgtgttctctcagcagcttaaacccaggctttgaaataaatctcttcactgtctttattctaaaagaaaattcttttctgacattttattttttggaattgttttctttgaaatgggttaaaaattaaactgtccttctgattgcatttattttctatggttttacaatgggccttttatgtattttagcttggcccagttgaatttttttttttgcacaaacccaatttttttttatgtatttccttctgttcggttatttcggttttttttgcacatacccagttaaaaaccgaattacccgaaaaccgaacctacccgaaccgaacctaatatcggatcaattcagcatacttttccaaaaaatttaacaaaaaaaacgaaaaccgatataaccgaaccgaaccgaaacgttaaaccgaactttgattgagaaagaagttgaggcaaaataatagtgaagatcggataaaaatgggtgaagttgtagaaagaggaggctcagctgtaacctttggatactttagcatcattctactacccaccacactttcacggtggtagtagccgtaagtccggcctttttttcatcatcgccaccgtttttcttattttattagcaaaaacgaaaaaccttttaaaaaaattgtagattcacagaagacaaaataactttttttaaacgaaatcactgagaaacgaaaaatcagatagaaacgacgacgacattcttacacaccgattggggtaaaactttttagacgcgaaaggcgagagaaaccctaattgtcttgatgggtcgtattctgggctatatatgtttcccataatggtctaaaatcccgcttaatgggctttgagaaatataaatatgagcccaacttctattgtgtcaaacatgaaaaattacgaaattaatttcccgtaattatcaaaagaaaaaacgtgagtgggtattattggaagagataagagtcataaaccatccacactaaccggtttaatcactatttatcgacatcatcttctcctacattctaggtttcttcttcatttctcctttctctggccaaagttccgactttttgcttctcccagaggctaatcatg

SEQ ID NO: 36537 - DNA, 3000 bp, Unknown
  misc_feature (1)..( 3000): 2750-1469P.txt file - cDNA_ID_3097413; gDNA_ID_2936553; Annot_ID_194109
cattgttctctacaggtttgtcatatgctgatattaattaccactcggctattatataggtttggatattgaattagattgtttcttgggtctttaggagaattgctgaagttaaggagaaagagagaagaagggccttggaagagattttgtatgcgttagtggttcagaagttcatggatgctaatgttacacttgtaccatccataacctcttcatctgcggatccatctggtcgagttgatacttggccaactctagatggggaacttgagagacttcactcgcctgaagtttatgagatgattcagaatcatctttccatcattcttaaaaaccgcactgatgatctgacagcagttgcgcagataagcaaacttggagttggacaggtatatgctgcttcggtgatgtatgggtatttcctgaagaggatcgatcaaaggtttcagcttgagaagacgatgaggattctcccaggtgggtcagatgaaggtgagactagcattgagcaagcaggccgagatgtagagagaaacttctatgaagaagcagaagagacttatcaggctgtttcctcaaaccaagacgttggttcgtttgtaggagggatcaatgccagtggcggttttagcagtgatatgaagcaatcccggttaaagacatacgttatgtcctttgatggagaaacccttcaaaggtacgctacaataagatctagagaatcggttgggataattgagaagcatacagaagcattgtttgggaggccagagattgtgataacgccacaaggcactattgattcctcgaaggacgagcatatcaagatcagcttcaagggattgaagaggcttgtgttggaggctgtgacgtttggttctttcctctgggacgtggagagccatgtagactcaaggtatcacttcgtactgaactgaaatggcctctgtggtttatgaggatgtgccacattctttgagagggtttggggatttgttgtttgtaatatatgcgactgtgaactgaccaactaatatcaatacccattttatggtaatactacattcgcgatcagtttgtgttattcttctcgtttacatcttgaagtgcatcgttgttgtttaacaaaattagtgtctgtaaatgataattctggacatgaaaaattaaggttgttcttgaaatatgatcaaagaaatggacactgatgatatacacatatagtgtgcaaaggctgttcacgatactcttagtttcattcaggtccaataatattagaacgtaaaaatgcaataaaaaaaagctttacttatataatggttttgaggaaccaactccctatactcgtgaagattattactcttccttgaatctcttctccgttgcctccaagcgctccaggtctttgttgtatttgcagatgcggtagatgcacctgtcaatgaataaaagagatatcaataaaactacgcgagaccctgtctgtgagtgactgataatagctgatgatgttacaacttaccagtagagtagaattcctgcagcgcatagaaccacgttcctctgagccttgtagatctgtggtacaatgcaaacgcacaactcgttagcaagcaagctgagacatttcagggaaagagaaggaactaaggggtgaattaaatatccaagtgtttgattttcagtttttcactatgtataattgatcctggcgactcgcaactgcatacccaaaaaggtttgaatacagtgcatgaccagaaaactgagggatgaactaaacatccaagagtggtgatgaagcttcaccaagaatcaattgccaacaattcacaagagcaaagtataaactgaactatgaatgacaatcgtgccgatggtataaagaaagtcacatgttgctatttgacagtagctagaactacgattaaaagatatatgagtacatcaatgaagggtaagacctaaaaaaatgcattgacactaacaagttagacagtgttttgtagctctaatctatgcaacttcctcagacaaagaaagccaattctcagaagttttactaacaaatattgatctttagactaaagatgggagaaaatgacaaggatgaaactcacaaatctaacaatttactattcaaaaaaagattcatacacatagaattcagctatagaagaatcaaagacaaaggtgatcaaggaatggtacttacagatttctcgtagcgatcacgttctgtagcagtgcaaacctcagatgaacaagatagtctatgctcagccttccagtaaatatctgaatgaaatcaaaaccaaataagcaaaagcacacaaaggtaccaaatccacagaatcactcgcggctcaaaaccctaactatacatattccgactacgaaatagatagatagagcgagagagaggagaggaggttaccgaggagctgaaatccggcgaaggcgacgatggaagcagcaggttggagaatcaatgagacaagctgaactacacgtttcttaagaagcatagggtaagggagagtcaacacgagggtgattactacttcgacggccaccacatacgatagaatcagccattgcaacgccattgttgttcgtctttttctggatctctctctctctctatctctattccgtgtgaagtagacgaagaataataatagacgaaccgtgtgcgtggaacacgtgcctatgcttaaccattttttctttatcttactaattaagttattttcttacttaatgggctctcacctccggcccaatatctccatataccggttttattgtgctgattatcggtttatttcgatttaacggttagctttcaagaacaaatacagaaactagtcactctcttcttcttctctgccattgttgactcttgaagtctcaattttttctcttctttatttctccgtatgaacttctccgattttatggtttttatatccttgaaagctagctagcaccatg

SEQ ID NO: 36538 - DNA, 3000 bp, Unknown
  misc_feature (1)..( 3000): 2750-1469P.txt file - cDNA_ID_3097417; gDNA_ID_2936553; Annot_ID_194108
atgagacaattgttaaaaaactgaattttaacccctattaaaacagcatattaataatattttaaaattttttaaatattgattcaaatacatccaccatataacccaattccaaaataaaatccgttctataatttctttacccgtcccgtgataattttaaagtaataattttaaaattttaagaattattttttatatataaaagttttgcaaattgtatcattctctaatacatttatattttatagtttaattttatatatagtaacattatacataccacataacatttttggttttatataatcttttctaaatttggatgatttgatatgtttaatatcagtggtcttaaaaaataataaattaaagatttaacccgtattgaaacggtggattaattatattttacttttttattaatgtttattcaaaaacccgtccctccaaatctgtcttaccaaaaagccatttattttattaatgacatgactatgaattataatctaaacattttagctaataacataggagtgcactatatttatttattacgggaatataccttataacccgaatgcacttttacctaaatccaccaaaaaaaagtcttgtaaaaatattatagagataataaacgatagtcggttttgataggtataagattagcaaatatattagttagcttttattagttaaagaatacaaattaaaaaggtatattacactttattcaaatatagtatcaaaacttatataacacagagatttgataattttttaattgttgaatactttttttatgctaatttttatgtgattaagatttaattgatttcgtatataaaattattaaattgttttacgaacttatttgtttataatttggtaacagatagatattcgaatattcagtatattttgcttcagtttaggaaatctttgatgacccgtttttagatccaataagccctataatctagatattaacctgcagtataccgcatgtacgcttatattttagttaaactaaaaacttttactgtaaagatgatttaaaaatatatgatattattttatttgtttataaatgtatagtaaactgtgagttgtatatgttttgttgatattatctatattgtttagtgtttaagattatacatttatagtttgattgttaatttaagagttttacctgtagtataccatcttgtattaatatcgatctaaacccgtaaattataggattttccaccttgtattaaaaattgaatcacatcatacacataaaaaaatctaatatgttattaattattgtagtatataagattataaattttcaatataatatgtatgaaattgaatataaatatttcaaattatgacctgttactcagtagaaagttttcttaaatctatttttcacccgttataatatttttttatgtattgaacaatttatattcgtttttaaaaattcaaattatggcatatgcgaaaaatctaattctttttttataatgatgattttattttttcgaaaaaatagaatcatataaagatgagaagtgaactataataattaataaaaaattaatatgataatttagatatcaaatctactttgttgattttaattggttattttttcggaaattaataatgtattttgtttttctaattaaattaaattaattgaaatttatatatcaaatcttatatgttaattttgattggttattatttttggaaattaataatgtatttcgttttttaattaaatttaattaattaaattagtatttgactttttaactcttaaagagataaattaatttactctttaaatttttatttctaatggcatacctatgtaattacttacaaaaattaaggttatatttaaaatatacttcccaaataatatagtgggatgggatcctttgttttgtttaaaagtgatctttagaattagcctaagaaaataaaaatgtaagaaaaaacaaatgattggaaactaatcttataaatcattttgttctttatgacaaatcttgttaaactaacattgcttatacatgtgaaggacaagatctagtggaagccaagtgccaaagaaacgatgagtgccatcttctgccttgtgccaaaggtctagcatattgcaacaatggaacttgtgagtgtactcctcctcctaagtcatacaccgtggaaaaatctacaaacataccatgtaccacaaccaatgagtgtagacagaaaaaatgtagagacatatattgtcacataaccaataagtgtatatgttgtctcccaccaactgcaatacttttatgcgtagatcgaagatgtgagtgtatccatgatatataagtggtgtaaacttatatattggatatgaaatttcaaaagacattaattatgaaattgttattgtttttgaataatgaacttagttatactattgaagtacttggtacttaaccaatttttatcaatttggcaaaattgaccaacttttttttattgtaactctaatccaaaaatgggaaaatatcgttttatacttgaacattaaaaaaatagttattcaatacgtggactttgctaacgatggttatcggattcgttaacgccagttaacatcttgggaattttggtctggtcaatatttggttttgtgttaaataccgggtcaacgtttttatcatgttttatttgaccgacctaaaagttcacgtattaaatgatcattttttaaaaattcatgtataaaaaaatatttttctctgccgaaaattagcaaactttaaccaatatttcatcaaaataacataactaaccgaaattcgattaccggtaaaactgaaaaatgatttatcataaaagtattgatccgaattacccaaaccgacccgacccgagtatgaatgggccgaggcccataaaagaggaatatttgagagtcaacaactgaagaagaaagaagcaatg

SEQ ID NO: 36539 - DNA, 3003 bp, Unknown
  misc_feature (1)..( 3003): 2750-1469P.txt file - cDNA_ID_3097417; gDNA_ID_1971786; Annot_ID_57998
tcaatgagacaattgttaaaaaactgaattttaacccctattaaaacagcatattaataatattttaaaattttttaaatattgattcaaatacatccaccatataacccaattccaaaataaaatccgttctataatttctttacccgtcccgtgataattttaaagtaataattttaaaattttaagaattattttttatatataaaagttttgcaaattgtatcattctctaatacatttatattttatagtttaattttatatatagtaacattatacataccacataacatttttggttttatataatcttttctaaatttggatgatttgatatgtttaatatcagtggtcttaaaaaataataaattaaagatttaacccgtattgaaacggtggattaattatattttacttttttattaatgtttattcaaaaacccgtccctccaaatctgtcttaccaaaaagccatttattttattaatgacatgactatgaattataatctaaacattttagctaataacataggagtgcactatatttatttattacgggaatataccttataacccgaatgcacttttacctaaatccaccaaaaaaaagtcttgtaaaaatattatagagataataaacgatagtcggttttgataggtataagattagcaaatatattagttagcttttattagttaaagaatacaaattaaaaaggtatattacactttattcaaatatagtatcaaaacttatataacacagagatttgataattttttaattgttgaatactttttttatgctaatttttatgtgattaagatttaattgatttcgtatataaaattattaaattgttttacgaacttatttgtttataatttggtaacagatagatattcgaatattcagtatattttgcttcagtttaggaaatctttgatgacccgtttttagatccaataagccctataatctagatattaacctgcagtataccgcatgtacgcttatattttagttaaactaaaaacttttactgtaaagatgatttaaaaatatatgatattattttatttgtttataaatgtatagtaaactgtgagttgtatatgttttgttgatattatctatattgtttagtgtttaagattatacatttatagtttgattgttaatttaagagttttacctgtagtataccatcttgtattaatatcgatctaaacccgtaaattataggattttccaccttgtattaaaaattgaatcacatcatacacataaaaaaatctaatatgttattaattattgtagtatataagattataaattttcaatataatatgtatgaaattgaatataaatatttcaaattatgacctgttactcagtagaaagttttcttaaatctatttttcacccgttataatatttttttatgtattgaacaatttatattcgtttttaaaaattcaaattatggcatatgcgaaaaatctaattctttttttataatgatgattttattttttcgaaaaaatagaatcatataaagatgagaagtgaactataataattaataaaaaattaatatgataatttagatatcaaatctactttgttgattttaattggttattttttcggaaattaataatgtattttgtttttctaattaaattaaattaattgaaatttatatatcaaatcttatatgttaattttgattggttattatttttggaaattaataatgtatttcgttttttaattaaatttaattaattaaattagtatttgactttttaactcttaaagagataaattaatttactctttaaatttttatttctaatggcatacctatgtaattacttacaaaaattaaggttatatttaaaatatacttcccaaataatatagtgggatgggatcctttgttttgtttaaaagtgatctttagaattagcctaagaaaataaaaatgtaagaaaaaacaaatgattggaaactaatcttataaatcattttgttctttatgacaaatcttgttaaactaacattgcttatacatgtgaaggacaagatctagtggaagccaagtgccaaagaaacgatgagtgccatcttctgccttgtgccaaaggtctagcatattgcaacaatggaacttgtgagtgtactcctcctcctaagtcatacaccgtggaaaaatctacaaacataccatgtaccacaaccaatgagtgtagacagaaaaaatgtagagacatatattgtcacataaccaataagtgtatatgttgtctcccaccaactgcaatacttttatgcgtagatcgaagatgtgagtgtatccatgatatataagtggtgtaaacttatatattggatatgaaatttcaaaagacattaattatgaaattgttattgtttttgaataatgaacttagttatactattgaagtacttggtacttaaccaatttttatcaatttggcaaaattgaccaacttttttttattgtaactctaatccaaaaatgggaaaatatcgttttatacttgaacattaaaaaaatagttattcaatacgtggactttgctaacgatggttatcggattcgttaacgccagttaacatcttgggaattttggtctggtcaatatttggttttgtgttaaataccgggtcaacgtttttatcatgttttatttgaccgacctaaaagttcacgtattaaatgatcattttttaaaaattcatgtataaaaaaatatttttctctgccgaaaattagcaaactttaaccaatatttcatcaaaataacataactaaccgaaattcgattaccggtaaaactgaaaaatgatttatcataaaagtattgatccgaattacccaaaccgacccgacccgagtatgaatgggccgaggcccataaaagaggaatatttgagagtcaacaactgaagaagaaagaagcaatg

SEQ ID NO: 36540 - DNA, 3003 bp, Unknown; identical to SEQ ID NO: 36539
  misc_feature (1)..( 3003): 2750-1469P.txt file - cDNA_ID_3097417; gDNA_ID_1971786; Annot_ID_175473

SEQ ID NO: 36541 - DNA, 3000 bp, Unknown
  misc_feature (1)..( 3000): 2750-1469P.txt file - cDNA_ID_3097423; gDNA_ID_2936553; Annot_ID_194107
atttatatgggccctagaaatgaaatttgtctgaaaacaaaagaaatatgtttgtagaaaacttaactatttctctaaatagtccataggttcattattgttttatttgtaattattcattttcattgatatctatcgtcgtgtcaacatgatgtatcgtccgtatacgaatactcaattaccaaaacaatgataagaattcaaatgggttttctatcaagtagctttctgttgagtataccaatttgaggtaaagaccaaagtaaccagtgaaaaactaaagagccgtcaaatcaatttagatgaagaaaaagtaacattgaatactactattaaaacaaacaaatcattccacgtgatgactccaccacattcccaaagtttagaaaaattatcaaaccctgtcataaagtaacacttgcctaaaatcgcaggtctttttttctacgaaaacgaaagagagttttgtaaagtaaattcatatgatctgcccccaccaattcatcatttatctctttttttttaccgcttgttaaaactcataatcaatgcatcccttgaccttagaacaaaacctgatgagtcccacacacatgtcacttcgctgtccatgaagttttttgaccggaggtcaaagtaatttaattgacttgatgttaagaaatgatatgtgcagagaatcgaatgtttctttgtgtgtgtggtgagtgtgtgatggatataattattggaattgaaatgtaatttatgtaaacttctagatttcgaaggcataataactctctaaaataattgagaattggataatatccgatgattaagatagcatttacttacaagtaatgttttcgatagaattaatggtcactatccaaattccaaaccatacgctaatggcttccaaaggaaaactaagactttatggagttttacataaagtcttcgttcaaacatcattttcataagtcttttgtaactttcttcctcttaacggcttcctacaatatctcgatttagaactccaatcaacatctaatattttgtctacaactttatgttttttcaccttactatatgatctagacaatcttttgttaggtaaagtgtctagatattctttcacctaattaacacggaaacgtaaacttgtacaaaaacatctattgattatagaagagaaccgagccgtgagagtcgtttctcgtcaagaccgcaccaatcgactcaaacatgagccaaactgtacgtagttcttataaggaacacaaacctccatcgtaaaccaacgttttcgatcggttctagctagactcgccatgcatgcatgtgcgttggtgcccgtaattacgtacaccaatcttgattgatatcaatgcttatatgccgttaatcttcatctcgactctcgaggtagtagtacttgacgagttctaagttcttcttccgttatgagaaatcatatataagttcttctatacatctcgcttgattattataatctttcgccttttaatttctcgtttgattattataattaatgtttataatgaaaagaatcattatttcccaaagcaaacgaatcattttgagatagacttacagttatcacaaaaagaaatctaaacgttttccccaagatttagcctttcgtcagcatgtaattactcgtgacatattctctagctcatatttcttcttcacgcacgagcaaccaattttgttatatatgtataaatcatctttgacaattatatataatacagatttgttacgagtatatgaatttttttgaggtacagaagcaaatcaactagtgaaactaaattaaagagctaaccatcaaataaagtaaattgaattaaacaaacaaatcataccacgtgatgacagccaccacattcctaaagttagaaaattggcaaacctgtaaaaaagcatcacttccccgaaatcgcaggtcatatttctatgaaaacgaaagagagttatctatatagtaaatggctatattcatatttgccccaccacccatgacccatctcagttaataaatagttcttctattcacctctatactataatcattcactttatcttatatatagtctataaaactaaacgtaattcgcatgattttgcctttcgttgcatgaaaaatcctccttgacaatgtacaattcgttagtactactcgatcagtcgccttgactcacgacattttctctagccactgttttatcttcacacacaagtaccaattttaaactgttgtacttaactgtataacatcctttatacgtaacgtaagccaaaaattatgatctaatcagttactacagattaataataagattaataacggccggtctactaattttgaacacttgtgcatgcattatctctcgttgaaatagtaaattaatgcaactaactttacaagattaatcgaggtatattatagtctaaaacaaatatttaaattaatgcaactaactcttgaagattaatcgaggtaacgcatcacactaatcatatttaatcggataatacatatactgttagtaaaataaattaaaaaagatttggtagataaacgacaaaaatgtttttcgtcttgttgttttcgagaagcttctttttccggattaaaaaaacattatgcaattccacgtcatcagcgcattacaaacaatgaaagactacacacgaccttgggtcagcattccaaagacccaaccctgactcgccacgtcgacatatgccagctattaatgaagagggtaattccgtaacttactctaaccacagaacccttgaatttaaagtgtagcagtaaaatctcatttctttgagttatctcgtttgttcggagttagagagagagagaaagatatagagagaacacagagaggcgagagcgacgtagggttggtgtttcgtacggattttctcggtcaatcttagtttctccggcgagagattgcttttcaggtaaaaatg

SEQ ID NO: 36542 - DNA, 3003 bp, Unknown
  misc_feature (1)..( 3003): 2750-1469P.txt file - cDNA_ID_3097423; gDNA_ID_1971786; Annot_ID_175474
attatttatatgggccctagaaatgaaatttgtctgaaaacaaaagaaatatgtttgtagaaaacttaactatttctctaaatagtccataggttcattattgttttatttgtaattattcattttcattgatatctatcgtcgtgtcaacatgatgtatcgtccgtatacgaatactcaattaccaaaacaatgataagaattcaaatgggttttctatcaagtagctttctgttgagtataccaatttgaggtaaagaccaaagtaaccagtgaaaaactaaagagccgtcaaatcaatttagatgaagaaaaagtaacattgaatactactattaaaacaaacaaatcattccacgtgatgactccaccacattcccaaagtttagaaaaattatcaaaccctgtcataaagtaacacttgcctaaaatcgcaggtctttttttctacgaaaacgaaagagagttttgtaaagtaaattcatatgatctgcccccaccaattcatcatttatctctttttttttaccgcttgttaaaactcataatcaatgcatcccttgaccttagaacaaaacctgatgagtcccacacacatgtcacttcgctgtccatgaagttttttgaccggaggtcaaagtaatttaattgacttgatgttaagaaatgatatgtgcagagaatcgaatgtttctttgtgtgtgtggtgagtgtgtgatggatataattattggaattgaaatgtaatttatgtaaacttctagatttcgaaggcataataactctctaaaataattgagaattggataatatccgatgattaagatagcatttacttacaagtaatgttttcgatagaattaatggtcactatccaaattccaaaccatacgctaatggcttccaaaggaaaactaagactttatggagttttacataaagtcttcgttcaaacatcattttcataagtcttttgtaactttcttcctcttaacggcttcctacaatatctcgatttagaactccaatcaacatctaatattttgtctacaactttatgttttttcaccttactatatgatctagacaatcttttgttaggtaaagtgtctagatattctttcacctaattaacacggaaacgtaaacttgtacaaaaacatctattgattatagaagagaaccgagccgtgagagtcgtttctcgtcaagaccgcaccaatcgactcaaacatgagccaaactgtacgtagttcttataaggaacacaaacctccatcgtaaaccaacgttttcgatcggttctagctagactcgccatgcatgcatgtgcgttggtgcccgtaattacgtacaccaatcttgattgatatcaatgcttatatgccgttaatcttcatctcgactctcgaggtagtagtacttgacgagttctaagttcttcttccgttatgagaaatcatatataagttcttctatacatctcgcttgattattataatctttcgccttttaatttctcgtttgattattataattaatgtttataatgaaaagaatcattatttcccaaagcaaacgaatcattttgagatagacttacagttatcacaaaaagaaatctaaacgttttccccaagatttagcctttcgtcagcatgtaattactcgtgacatattctctagctcatatttcttcttcacgcacgagcaaccaattttgttatatatgtataaatcatctttgacaattatatataatacagatttgttacgagtatatgaatttttttgaggtacagaagcaaatcaactagtgaaactaaattaaagagctaaccatcaaataaagtaaattgaattaaacaaacaaatcataccacgtgatgacagccaccacattcctaaagttagaaaattggcaaacctgtaaaaaagcatcacttccccgaaatcgcaggtcatatttctatgaaaacgaaagagagttatctatatagtaaatggctatattcatatttgccccaccacccatgacccatctcagttaataaatagttcttctattcacctctatactataatcattcactttatcttatatatagtctataaaactaaacgtaattcgcatgattttgcctttcgttgcatgaaaaatcctccttgacaatgtacaattcgttagtactactcgatcagtcgccttgactcacgacattttctctagccactgttttatcttcacacacaagtaccaattttaaactgttgtacttaactgtataacatcctttatacgtaacgtaagccaaaaattatgatctaatcagttactacagattaataataagattaataacggccggtctactaattttgaacacttgtgcatgcattatctctcgttgaaatagtaaattaatgcaactaactttacaagattaatcgaggtatattatagtctaaaacaaatatttaaattaatgcaactaactcttgaagattaatcgaggtaacgcatcacactaatcatatttaatcggataatacatatactgttagtaaaataaattaaaaaagatttggtagataaacgacaaaaatgtttttcgtcttgttgttttcgagaagcttctttttccggattaaaaaaacattatgcaattccacgtcatcagcgcattacaaacaatgaaagactacacacgaccttgggtcagcattccaaagacccaaccctgactcgccacgtcgacatatgccagctattaatgaagagggtaattccgtaacttactctaaccacagaacccttgaatttaaagtgtagcagtaaaatctcatttctttgagttatctcgtttgttcggagttagagagagagagaaagatatagagagaacacagagaggcgagagcgacgtagggttggtgtttcgtacggattttctcggtcaatcttagtttctccggcgagagattgcttttcaggtaaaaatg

SEQ ID NO: 36543 - DNA, 3003 bp, Unknown
  misc_feature (1)..( 3003): 2750-1469P.txt file - cDNA_ID_3097476; gDNA_ID_2936554; Annot_ID_194178
gttggtacaatttttatgtttgcttgacagcaaagaaattattaggtcttcttaatagaaaacaaacacattttatattataaacctaggaaaggaagaatgtttattttggaacaaaatcaatcagaatatcatatgactgattaataatattttctgatatcacctcttaaataatagaaccctccataataggtctaggaaaaggtatatattcagtttacatttctaataagtatcatttctttctgtcgacagtaagattatttctacatgtaatagtactataataaaaaacgaaattttaaatagtgatatgaaatttgttcccgtatataaggtgatttcttttgagtaataatatgcgaaatctagtgcaatattcctaaacaaccataccaaaaacactaaaataaaataagcaggatcctaaacaactaaattatactaagaaacagccaatattacatgtctggtactgtccaaaatcttgtattttgacataaaataaagtaatatatatgatctcacagagtcacagcagatggcgtaaaagcatgtgaagattgatgcaaatgatttaagttgtttcccgtgacctgcagacgaaacggaatgtccatggtccatataaaccttttcgtcgttcgtggaaccgtcctccaagaaaacactactcttttagataaatatgtacttgttttatcgtcagagaaatatagatttttctagaaaactttgtttcaacaatttatggaggaattatgatatgaaatagacgttatacccctattttaaaggaaatgggcaaacactatatgaattttctaaaaaaacaattttgcttagtgagtataaaaccgaaattaatatggattaaccttataatactgccatgcatgtctacatttttcctaacattgatacaaaaaaaaatgactgaaatttttcacatatttttatattattttatctgaaaactatgaacttggtaaagtttgacatcataactatgattacgcctcaatttcacaagattggggtttaattattatcagttacatctaatatatcttacattctaaactttctttttgaataattgatgttaattaaaaaacattattctactattgaactcagatatatcatgcgacatttataaggtctcgtatgaaacatctaccaactaataattcatggtagagaaggtttttaaatcttttgacaactaagacctattttaaatttatttaattcccacagaaagaaaattgaggtaagtcttaaaatatgataagtgaataatgttttgaggttgacgaagttttagagtccgatctctcacgttatgttaagaaaacaattttaaacaaagagttctttttattcatcttttaaattgttgaaatttattcatttaagtacttaaagttttaaatggatgatgtggagctaagtagactaaactgttaacgaattagaccactctatttttattaaataaacaactatttattatagattaaatttatttatatgtaaaatttagtctatagttggtacaagcggatttttttgtaattttctcaatcgacattactacattaaaactatataatttatgaatgataaaaaaccggtataatccgtaaacaaatttgtttgctttaaccgcaacaatttaaactcttaaaagaaataagttgtttaaaaacatttttagatacttgctacaaaatagaaaaacaaaagagttttagattccctaggaagacaaagcctgcactactttccactcatgagtctttcccatatccttccatgatctttctctgtgccatagacaaacccatacacatgtattatgcataatgtacataatccactactcaacatacgtgttttcttcatgtgatctgtgtacccacgacggtgaaaactcatatttgtcttctactctaaaatgtgattctgtctttttaaaacagttgaacccaaagttttacatgaactgtctatgccgtttataaaaatagactgtcgatgccgactattatcagatccggaatgtcttttcctataacattttaatatgattatttgtcttttcctataacattttgatatgattattcatccctagccgaaagaaagttagcacttgtttaagttggtaattagtattagaagcttgacatatacttgcatgattagtcttttaatttaatattaccacatatagatgcattatatgtacctaattagcttatattaattactttgctttcgtctcatataaagtaacatttatagtgctgatttaagactaaaactaatcattgagatggacttaacatctttcggatgtcaatttaatgtcattctctacaaggaaaaagattagattttgttgcgtaacaagaccagcgacataatgcaagtttgtgaagctttctaggaacatactttcacacctaaaaaacgaacaaaaaaagctaattaagcagttattttcttaataattcttattatcatgtgttatattcgtcgtcaaaataatcttgtaatagacatgtattaagactttaagaggtataattttccatttttgattcaaaactcaaaattgattagttagaaatagatatatttaaacaaattttgattttactggaacatcaagtttttaatgtacacggtaaaatcggacccaaaactacaacaaaatactattgtacgtccgtggcattagagttgagatcacctaaccgtgccactagcttgggtttcataattgacataattgtgtacattaaaatataagtattatttaatcacattaagaaatatgcacagaaactttttatcataattatatgtatgtacatgcattagtgcatatatacatacacaaatgagtgtataaaagcttgaacccatcgaacaagcttcatcacaaaaacccaaaacctttgatatttgtctaattttacaaagatg

SEQ ID NO: 36544 - DNA, 3000 bp, Unknown
  misc_feature (1)..( 3000): 2750-1469P.txt file - cDNA_ID_3097486; gDNA_ID_2936554; Annot_ID_194174
gtcacatgaacttgttcctcctcctttgatcataattttcttgtaaagtatattgtacgaccattgtagctaggctaagatttgagcagtgaattataagctttgccaatttagcaacagacgttatggttatagctcaagagttaaaagggtaacctaggagaatgcattaaagtcattttggatttgtctgggtcttgattctgagcagtgtgttgagagtttggtattgtatggtgagttctttgggtaattaaaggaaggagtttaccggttccaatattatcagcttgatacactatcaaacctataatgtcacattgatcaaaatggtgttgctgtcttttcaggtttgtccattgcgtttgatctcagcagtcaaactagtggactgaatggccagagacgcagaggccttgtggttagagctggaaaagctgctctgtgtcaaactaagagaagcagatcaagaaaatctctagctaggactcatggtttccgtagaaggatgaggaccactagcggtagagcaaccataaagcgtcgacgtgccaagggacgttggaacctctgtcccaagtccaaccctagcagcggcaaacgggcttgaagtttgtttctctcttcactctatctgtaatcttgtttcatgtgctttttttccaccagaagatacaatgagaaacatggttcgttgagctcttttctgcgttttaactctcttgcatccttgattcgtttataaatcaatgttcttggaattcatcacatgtactactatactacttgcttcattgaatttgttactactcgaagtctcaacttcaaagccataattacttaaagatctcttctggccaccaggataattctggtgtgtaagaattgttcagattccaagtagtgttaatggttgctgaaagttgatgtatatagtttggggttcaatccctgaaggattttactttcatttactagttttatttcaacctaacaattacttttaagtactaaccctaaattatattccccttaaaaagaaaactgcaccaaaaacaaactagttaagaaaaatgaaaccaaaactaaaaaagaaaagttccttcttattggaaattagggagggatcagattgtgtaaaaaagagagcgcccaatagtcgtaacaggctttgggcggaacgctcttctcgcaatataagcgagtttttaccattcatcatatcccctttaacttgcctgaaggatcatgccttttacgtaattagctctttcttttttataggcatgttactaccatcactatctctacctaaacgatgtgggacaaaataaactattctcttgtttgaaataaggtttcttatctcaaattcatatatctttgttttttaaagtgggtctataaaaggcctctgtagctctctttttttaaggtgggccgataaaaggcctctgtatccttttttttttttttttttttttttgtctacaatgtaatagtctaaagttttaaacctatctagatgaatgagctatttatcaaatattcgatccgtgtcactcctctactcatcaaactcttcataggaaggaaagtctccggtcataacataattcacatacgttattatgtttaaaaggtgtatgatgtgatggactagctagtagctagtaaaagccgtgagtaggatcttaggacgagatggcatgagaattccatttctattgcatattgatgttcgtgaaatggttgatatatgtttacattgagcaaaacacaactaaactcagctaaagtccaaacacgcgattttttttttttttatatagtgaattctatccatcatattacatggaaaatatctgtaatttttccaaacttatccaaccaccaaaatgcactttaaaactgatgaaaagtgcaaccagactagtgacacacattccatcgaatgaagagaaaagaaaacccaccaaaaacagattatccaaaagtgatcaaatccaacagattgttggttatcccgacacgccaacaaacttgtccttggggattgcattttaagagaaaacggtttctcataaccgttggaaattatatatagtctatatattcatatgatagtttctaatatataataatattattatttcaaatttacattataaataagagttatctgacacatgatgtgaaagtcacctaaaaagatgtttaaaaaaaagggtaaattgcgcacagtagccgttgactcacttttaattttagattttgacattgtgggctgggcctttcatttcttagccattcagccaaaaactgatcaaaatgcccctgacgaaactgaacccggtttgtacgtacggaccgcgtcgttggaatccaagagaaccggatttgtacgtacactgttcatcgacgagaaatgcattaaatgttttctaggtttcggcgaatttgacacttgagattgaaattaaaaattttaaaaattggttgggctcagaagtttttcatgctaaaaagttttgacaaaactaaaactcatgattacctattataatagagattatattgtaagatatttacataattgagattagaattctgagaaaaaaacgaaaatcgaaattgtgttacggtgaagaatctgaagttttcagttgctgttttacaaagtttgaaggattgaaggagagacaatctgtgttctgggtaagaaattcgtgttaatcctattaattacacttgagaacgtgatatgaaagtaatgatacgtttttaaaaatttctgggttcataaattgttttgttggagattctttttgtatttgtagatataaatgaaagctctatgatctgttttgttaaatttataagtacataaattgttttgttagagattctttttgtcttcgttgatataaatgaaagccttcaaaaatatcttttgtatttaatgttgttctgacctgaggaatttatgttgcaggtatg

SEQ ID NO: 36545 - DNA, 3000 bp, Unknown
  misc_feature (1)..( 3000): 2750-1469P.txt file - cDNA_ID_3097516; gDNA_ID_2936554; Annot_ID_194166
gaaacagattcgtcgcaattctttggtcggaaaacaatatacgtacgatatagtaaacggctggattggtcatttaattaatgtcaaaattacattccacatacaaaaaaatacatttcgctaaacttaatccccaagatagggttattttaggtttagggctaacagatgatttgtttactaacaaaatgaagtaaccaatatatatatacatgggcaggaagttgttgggcgttctcagcgattggggcgatgaaggtttgacaaagatatctggcaaaaatctattaacactgtccgaacaacagctaatagattgcgacatagagaaaaacggtggttgcaatggcggagaatttgaagaagctttcaagtacataataaaaaacggaggcgtttctttagaaacggaatacccttaccaagtgaaaaaggagagttgtcgtgccaacgccagacgcgccccacatacacagattagagggtttcaaatggttccaagccacaacgagcgtgcgttgctcgaggccgtaagaagacagcccgtctcggtgttgattgacgcaagagcggacagtttcggtcattacaaagggggagtgtacgctgggctggactgtgggacagacgtgaatcatgcagtgacgatcgttgggtacggaacgatgagtgggctcaactactgggttcttaagaactcttggggtgagagttggggagaaaatggttacatgaggatccgtagagatgtggagtggcctcaaggaatgtgtggtatagctcaggttgctgcttatccggttttttaactaatttacttaggtggttttttatattgaagtgatcatacattttgtagcctggtttatgattgtttacatgtggtaaaattgcaacttaaacttgaccttaaaaactgtaatatgttcattttattactccatataaacgtatttccctcactttcataataaataaagggatgtgtttttcacttaaatcgtgttccataagaaacattgtttgaattttcaatgcaaattttaaaaccaaatttaaaattatcgctaataaaactaaaattatagtgtaagacgtgttaattacaagtagattttgattttatttttcatcgaaaatgaacctttattaactttaatcgaatatcaaactagtacaaatgatggcaaatccatggggctggattagagacatccaaatagaaaggtgaatctacacatccatattagctaaatggtaagcggcaacattgttgcaacgttttgtgaaaaggaattggaactctttaaatttctgcgaccaataatggatatcttgacatgatatccttatgattaagataccttaggcagtattataagtagattagcaaaaaaacaaaaaaaaattatatatgaatccatcattaagcttgatttgtttttttaacttgtccaaataaaagtttagtttcaatataacaacatctacaacacccggttacatatgatacctcgaggtccacgacgacacactagtacactacatatacataaccaattcgcaccatatgatatttagatacccctttgacaatatcatgtaagggcttttttggaaagcatcactaacaagttaacaattggatttttacaaaaaccataaaaattttactcggtttagtagacaaatatattttggtgttatcttaccatttacaccaaaaaaaagaaaaaaaaactactagcagtattgattaaaaatttaaaacagaaaatatatatatatatatataccaaaaaattgtaaatagtattcttttgacctttgttttggagtgaattggttgatgaagaagaagaagaacctggtccgattctaaacctttttttgaatataaaacggaataaaaatattctgtgtttgagtcgcctaacaacaacacgcaccacccgaaattataaagtaaaagtaataaaatcaaattatataaattggcaaaagtcgaagaagatgatgattgaatgtttatttggcagtgaatggaagagatagagaggagcatgggtctctgtgaagaagataacgtagagagagttattatgtttgattctgaagcgtgacgtcactcagaaaccgtgaatcaaggatctttcttccactcctttctctgattttgactttctctcctctctctatatataagctcaacatcaatatgtctacggcttcttcttggattcaacaacctccttttagatacttaccggatcgtggcggtttctctaagccaagctctcgcagcgcgcggcagttttcctccggcgttgtttcagcttccgcttcttctccttcgccttcatcctcgtgctcctgtggttattcggagattttgaatttcgatttcggtaataggctttgatcttcgaatgatgtttgtcgtgtagatttagggattgattactttgttcatgtttatcgaatgatgcgttgttacatctggaaatgacctgacattgtactgcaaagtttcatagctgaggatttctcgatcaaagacgttgtttaggatggtgaagaatagtatcgcctaatttagattgaggaggagctcaattacagtgtctatatacacagatttgtccctgtttctgcaagagatagaagattttaagatgttagatgattgtgatatgccaagtagaattagtgatagtatggtttgtttggtcaagaatcggctctgtttttcttttgatttagagctcacaatttcggtgtctatttaaacagatttttccctgtttctgcgatcgaaaataagcttgaacatgttaaatgattgtgagaagctaagtagaaatggtgatagtatgatttgtttggttaagaattggctctgttctttatagctttttccgcgggttcatttgtttgatttttctttaagaagggtcaaacagaagctggaaccaacagggacgcagggttcaggcaatg

SEQ ID NO: 36546 - DNA, 3000 bp, Unknown
  misc_feature (1)..( 3000): 2750-1469P.txt file - cDNA_ID_3097520; gDNA_ID_2936554; Annot_ID_194165
tggcgggatcgatggagctggaaaacgactagcagaagaggtgagttttaatatcttcatttgcacctcgtgtataggtaggtcttggttttctagcccttaacttcagtacatgagctgatttctgttcccattctggatgtgagagaggaataggttagacaagttgtccaaaagagcaagagcttaaagaagatttcgtttttagcccactccctcggtggcttattttccagacatgctgttgctgttctttactcagcagcaatggcacaagtaagtgatgttgctgtctctcaatctggcaattcaaatcttctgcgaggtaggattgcggggctagaaccgattaatttcatcactttggcaacacctcatctaggagtgagaggcagaaagcaggttctcttcttctctacttatcataattggaattttggaatcaaagagtttcatatatatctcgcagtacctgtacgtagatgtggtgtatgcgtaattaagaaagtagttagtcgtttttcacatgtaaatttcatctaccttctccttgtgttcagacagatatcataagtttcatcaaaactgtcttgcgttttttgctatttggtcccctaagtgtctagactgatgagtgatgaatattaattgataatccctgtaaattctatctcattctctcctctttttctggaaccccttgtatcagctgccttttctgttgggagttcctattcttgagaaacttgctgcaccaatagctccattctttgttggtcggactggtagtcagttgttcctcactgatggtaaagctgataaaccacctcttcttttgaggatggcatctgatggtgaagatctgaaattcttgtgagtaatgctcttaccaatttaaatcattcgaccccttaatgacttatctgtaatcctaatgcatttcattgtctggcagatcggcgctgggggcatttcgaagtcgcattatatatgcaaacgtatcttatgaccgtatcctgtgcatttctgttgctgtttaactagtacagatgtgcctagctgtgtctgcatttgttttctgaactgtttcctttgacatcaagtagacatggttggttggcgtacatcttccattaggagagaaactgaacttatcaaggtacgtttcatgctatatgaagcaatggaacctttctatttaatattaccccacttgttttcatgttccttctattatgtaagttgatttcgactctgaaacgtgtagcacacactagctagatgatggggtcatcgatattgatagttagcttgctgtgaaatgctaacggtagctaacttatcctgaattttggaattatgagtaatcatagagggaaagtttcatagaggtaaagagtctaagaaatgaaacaattgtctgtagagaatcaccaaaaatactttcggcaattcatttatctcaagtagcttcgtgcaagaagctctctgtggcttgtaaccagtcaaatgaaactttgaaaattatttagctgtcacgagtgagatctgatagatatgtttttcccctgttttaatatagccttcacgccggtctctggatggatacaagcatgttgttgatgttgaatactgtccacctgtttcatcagatggtgcccatttccctccagaagctgctaaagccaaggaggccgcacaaagctctcctagccctcagaacacacttgagtatcatgaaattgtggaaggtgtagaattagcccaaacatttgattgattcttctaaatcggcatgagatttacaatttatacaaatattggtgcagaggaaatgatccgcggtctgcagaggttggggtggaagaaagttgatgtcagcttccactccaccttctggccttacttagctcataacaacattcacgtaaacttccaacatcttcactttggagctttttaattctttgaaacatggactaacagagattttgagtcttgtttcaggtgaaaagtgaaagactttacaaagcaggagctggagttattgcacacgttgcagatagtataaaacagcaagagtcttccacgtttattaccgccagcttataaatcgtgagcatttcgagtgtttgacccgttaatgctgagtgtgctacgacatttgaaccattcctgtgttttgcttttaccatacagtttgggagatcggtgcagatcaagaatgttcgcatctttgcttcttctattttttttcttggcgaaatcagaagaagtacaatccaattcatctgtacatgattttcttgtattagcttgttgatgatacaacacttgaaagatgttattatagattaaggtttcttaaagagaaaagttatatatgttcaacctctactcttcaaaataacagattcagctgaagacatttgtttctagtcaatttgtttttggaatttttcttaattcaaagaaaattgtgcaaaagctttcatgtgcggctcagattaattagtcatttactactaataaaactttcactttggggtctagtagataattctccacccccattgaatctttttagtggaggtctaaacatacataagattctatagattgacatttgggaaaccatcctcatacaaaaaagacctaaacggaatctatgaagaattattaacagaaaagaaaaacagatggcaatgagaaaagatcgggttcaaggaaaacacagccgtacaaaactcaagaacaaaaacaccaaaaataaacaaaaaaacttccaaaaatagatatagaatcacatggttttgttgttttgtctatttgttctctataaaaggagatatttggttggatctatcatagcgtctcctctcaaccaaagcttacaatttgttctcccttaaaaactaaattttacaaataaactctcaaatccaagagaggagaagaccgaagtaaaaacacaagaaaaaaaaggattaaggcataatg

SEQ ID NO: 36547 - DNA, 3003 bp, Unknown
  misc_feature (1)..( 3003): 2750-1469P.txt file - cDNA_ID_3097530; gDNA_ID_2936554; Annot_ID_194162
aaaatggtcgagacatatgaatatatgattgtaggagcaatgagaccatgactctaggtgttaacacaaattgtttgtatcatatctacttatttgctatctcttatatgattatatattacagtcatacatacccttattatcaggtttgagtttaatatttgttttgaatttaaagcttcattgtttgataaattaaatctaaacactatatggacgtaagccccgtcgaaagataacagaagtctaaagcaaaattaaaatttgttttgttctaatttctttcatttcaaaattataaagatattaattctagaaaatccatatagttatctcatatatgacaataaaatatttaatcagtacaactctaccaaataagcaaaatataagcaattataaaaaacttataacaaaaggataaatattttgtattcagtttaagaatttaaaacaaaaatagattacctgtttatggaacttcggtttttgttatggtagaaggtagattacacagaaagagaataagaaagatgatacaaaggattttaggcagaaagaaataattatgaaattgcatggcattgttaacatagactagaactctgttttgaatgcatagattattttttcgaaagagaaaaactttcatatcacatgatttttttatttttttttggatacaatcatacatataatgtttgatggatgaaagacaaagcgaacgccaagtataatttgttcataaaagatcagattttatgatatctggtgtttacgatatcgccaccagaagtatccgtcattttgaagaccaagttgaaacaccataaggggttgagtttgacagcctccctgtatggcttcctcccacttctatataacaccaacaactcttagttatgcttcttcttcttatattagttgagaatgaaattaagattttcttcaatatcaaagttggtgttttagatacaattgagtcttattatgaggttttgggttcttttgaaatcctttgatgtctcttcttccatgcaagttcgaattgtaggatacaaaaaaaaatgtctctcttctcttgtcaacttgaacaaaaccacttggaagatgattttccgtgttctatatgcttaatgacattactgcttcttgatttcctcttgtttttaacccaaattggtctctccccaaagtataatcttctgggtctttttcttgtaaaatttggcatgctccaagatctatattagtagctatctcttttttttttggtttttggtggttgtttgccttgttcactcctccatatatagtaactcttaaactgtcgaaacattaccgtataacatgtttgtttgtagtgattattttaatcgatgttaatatgcatcagttgcaaaaaaatgatattaattttgcatcattgaatataagtgatttattatttgtatcaatttatcaaaataacgttaatatttgcaacatttataataaataattttaagtgtttatattaattataataacttataaaataatactaaattagtttttatgaaacaaatatctttattaattaatattaagcgaacacttaaatttagttgggatagtaactttacactttttggacaccatctaaaaccagaattatgtaactttacatatataaaaaaattatggaggtttttttttccttctgtgggagatatgtggtatgtaaacaaattgaataaacaattatatcagttagtgcaactgatgctaaatctgtaattagcatcggttattattgatttaaattttgtatcactttctaaatgattaaaattcacatatttgtattaatattgtgaaagtgaggcaaatagacctagatttgcattaattttaatgaactgatgtcacacaaactaatacgacatcagttattgcaattgatgttaaattataatttttgtatcgattgtaaataagtaattcaaattagtattttttaaatttttgttgcaagttaattgatacaactaaccttttttgtagtgagattcttgagacataatatccctgcctcttcttcttcttcaattgttggggttgttctcccaatcataaacattctggtggatgtaaacataaagagcaagtgattttaactcttgtatagaaaactaggagtcttgaatgcattggagaaaccactttgcatcggatatgcttaactaatttacctagttccaagaattataaatgtggaattccacgattacaattaaaaattgtctacatttattgtatcatactagaacgtactatttgtaatatgtccatctcactcgttggactttgtttcaacatgtaaccaacccaacaattttatttattgacaaacaaacaaatccttactcaaataactacaaaacttgacgaaacatttatttgacattgacattctctcactttttttccgaaaaccacttcatttttaaattacaaaatcgaacatttattctgtaatcaaaattagaatttaatgttcatatcgtgcgaaccaataacctttctttgaaccaaaaataaaaataaaatccttcttttctcaaaaccccatcacgtaataacacacaaaatacaagggtaatttggtctttctacttttctgtaaaccccccactggtaaatgaaattggaaaggaatggcttgcgatattggcaatgtcaatgtctctctctctcacagtctctttccctctctgcctccaaaatttccctctctgtttttgagcagttaagctgcctcatcaatctcactcaccagaaacccatcaacaatcattaacctttttctcgttttcatcaaaacccattttctcaatttcttcaaaaaaaaaccttttgattctttctcctaatccttttcccagctctcttaatgctttagccacaaaactttttgtatctcaatgtgtgacagttttgtaccttttaagagaaaaaatg

SEQ ID NO: 36548 - DNA, 3003 bp, Unknown
  misc_feature (1)..( 3003): 2750-1469P.txt file - cDNA_ID_3097564; gDNA_ID_2936554; Annot_ID_194153
attaaatgccaatggcattgggttgtaaataaatcccaacttgaagatttatttcataaaagtgttgcaaaaatatatatatagatacaaaataaactaaaccataattactaaccaaactaaaccataactaaacgaagtatatacactctaatacaatctttttattaccatcaccgttcaacaccacctttccgtccgggtaatgcgaacgtgttaacattattacaacaccatgtaaaaatatagtttcatgttcggtaaattgatttataaacaactaaccacaaatgtagtccatccatataatttttgtcgatgtaagcgtgacttatctaatattcatcattatcccgaaaaaataacaatcacccaacattttgttctttattttcgcaagaatcaagagtcaagacttacctcctggtcctcctctcatgaagatgttataagttaaaacatgtcgtacataattttatcgacgatattctataagatatagcgtgtaaaacaaattaccaacatacatgattaattgattatgttagagggttaagtgaggaaaaaagagagaagaaaaaattgttactaaatttctagaaactaaatttcatcaacctaatttcatcttgtctagtgttatttttttccgtctaaagatttcattcattagctgcggtagagatatacaaaacagacaagaacaagatcttttcggagacaacattgatgggtacatagaaacctccaaagactaagacccaaattaaagggcaaacaaacataaggaggaaaagctcctaaaagataagctaatgagagaacatgtaaaaggactccataatagcaacacaactcttcctcacaagccaccgacaagcatttccaaagaatttgtaagtctagtgttgcctaactaattttattttgatttttaacaattagtaataaataaatgaaatcaatagttggtcaaaaattaaaaaacaataattggcatttggcactgttagcatgcaaatacgtttatgagggcaaccccgcaacggtgttggaaagcagcctgctgacaagagtgttcgttagccaaccgtttaatcccttttaattagtaaacacacaaaaacaaattgaatttactaatctctcttttgtataatggaatattcactggttaggtgagttttttgtaaagatgataattatggttctgtttatatgaattaaatatttttatatatcataaaagaaaaattatatacatattttgcattatgtatgtaagcatactttagtatgtcatacttataacataacttcagtgtaaacaaaatccaaactttcagaagatatgaagacaaagaaaactcctggtataataacagcataattattgattgaaataatatgtgagctaagttggtatttgtgtgtatttatttatccattctggagttattataaaataaaaggtttgaaaatgatagattgagttggttgcgccaattttttttgctttcccctatcaaaatgttgtcattctctaatcggcccacacctaaaatgatgatattccacaaaaatgcaagtgaaaagtgaaaaggtatctcataattgtttagttatttaacaatcacgctaccatactcagtcgtggtcagcttatataaactttataagtaacgcatagatctatggattctagatatgccaccaaaaaatcaactgtgtatattcttttgtaattgtaaacgatcaatcggtgacgaacgaacaaaactgtagttaaaagcagtacaaaataaataaataacgaatagagagcgcaacaccaaaacaaataataagaatattgctctttgcatcgtttttgctatcaattttgtgagtggtacaagattatactaatcagtaatcacgtccaatatttgtttgattttacaaccgaatttggtttggttcggtacttcggttaaatgttgtcaaatacactattcatgttgatcattgaccaatagaagagaaaataaatgagagaaagcgtaaatacaagtaaagaggaagaagagtccaaatgtaccaatcagctcgtgactactttcagcttacctttttcttctccaagtcccatcttcgtctccgtcatcttcacggcacatcctccaaaaacgcttagcttctctctctgttacgtttactcaagtcttttttagtctcctccttaactctcaagccttttccaagtttcaagcggctccaacggttcaatttcgcactttccgatttgtggcttcactttccggtaacgtactgatctcaatccttgtagctctaaaacgactctcctagtttcgcttattttttttcttgaaatttctactgtagaatgaattaagcatgtcgacgaggttattttagttgactatcgattagaatttttcgtgagcgttactttctccgtacattatcctcagttctgcatctaaatcttgcacttagttcttcatttcttgagatttgttatcattattctctactctacttagttataacgattatgacatcgtcacagtcttctatatgtggggtttctggtactcaattgcgcaaatccttgtaatgattgatgtcacgggtctgaaaattttgacaccgtcactagatttcataacttttaagcggtgttggtgttgcgttaaatattattattaaaattgaagtttctagtagtaaaaaagttcacagagagatcttttctttttgtctgtatctacctacttacttcagaattcagataataatcctttatacatagagaaagagatcatctactatatgattattatatggtttttatatggataatattcaagattactgaaaaatctgttgttttgttttgtttcagatctgttctagagaacttcaatatatatccatatatggtttcattggtctgtgagccatatcctaagaactaaactagctagctctcttactatg

SEQ ID NO: 36549 - DNA, 3000 bp, Unknown
  misc_feature (1)..( 3000): 2750-1469P.txt file - cDNA_ID_3097583; gDNA_ID_2936554; Annot_ID_194146
gcgtgggaaagatgatagatagaagaaaaagagaaggtcgatcgtattttgttctctttttcttttgaatactttatatataactatattgtttgtttttttaatatacgtttgtatattaatttatttagcataatgtggttgaatagtaagacacttaattgaataacattcatgtgtagcagtgtgagtaagcttctttcacaaggattttaaattgagaaaatttgtggtcgggtagagtttgtcggagattaatggggttaattataagcacttatacgtaattatgtctagatttattttactttttattatactaaggtgatcaatgatcataatttgtttttattctatatatatatatatatatatattctcatatatatgtaaaaataattgaagaaataaatatttcgaagataaggtaccttttttgaagtgagtgaacatactgtaacattcagttagataaaaaagagaaacaatgttagaaaatgggtttcttgattaagagtttagatgtaaaatactaaagttaccaagcaataagtgaataactaatggttcaataacatagtcttcattatcaagacgtaatcaattgggtaaggtcttcctttccgcttacctaatagactcaatacttttagcaatttgattttgcaacttgattatgagatgtggaaagaaagaactcaaaatgcatcaaatgatttttaagccatattgatccaacatatccataaaacgattcacaacaagtttggatcgatcctcctttagctaatcggatatctcatattgcatgcttgctctgaattggtctttcttttgctcttcacgtgtgtatgattttatccatactttatttttgtgcgtgtttttatctgtttcaatgtaaactccaagtctccaaagtccaaatgatgtctctgtaaacgaaaacaaaatgatatagaaaaagtagatttaattaaaaaaatcaataccattcgcatttataaatatgtttctaaattaggtcttagtttgtttgaatattttattaatctattaaatatatagatgtttgaatgtgtgtgtatgtgtgttatgattacttaccataccgtatgataattactacatcttgagctttaagaaacaatcgatgtcgcttgacaaaataggatgtttaatacttatacatttttagagacaaattggttaactggattctattccgaagattaacacaaattcagattaaatagtactaggatttaagtaaagcaccgcaatctaaggatggctctaatagtttgaaattgcacattacttataaacactttttggattaaaatttaaagtgtaaaagaattagtacgctgttttaggtataatagtttaggctaagccatagtccattgaacgatatagtgggtgggtccaaaattgtttaaaactcgtgaagccaagtaatctaaatcatcatgatatctgtcttttaagttcaataaaaatgaatttgtgttcacaatgccattacaagaaaagtttaaggttgcgcttcgaagaagacctcatcattgttactttctttttcaaagtcacctgcggatttaaagcgtcctttttttactctttgttgttttgttgttgttgttgttgttgtcgtcatttataactttttttagtattacaattaacatcatcatataattgacaatcaccatatactgaaaaagtgttgggccttaactttttttagctagacaaagtgggctgaattaatttggtctctttgaatagtcttggttgagttctctttgaggattatagagaatgtgtggattctgctctgtcaaaatcttttcttttggtgtgaaatggacaccttaatagttaatattcaggcagttgagaactaaaccctcctaagatcttttttgccatctatttttatacatctttcatttgagttattgattttgaaatccgggttctagaataagattaagtaaccagtcctgtaagtagtaactactgacatattaaaacaagaagaagaaagaatcacaaaaagttcattgtgttgattaagcaagtgtacacaaaatagaatagtcaaaacccccaattgattgagcttggataatattaaatactagatttaaaataaaattattaatagaaaaattaaatattttgtttatataattaagttacttatggtagaaaagcttttaatatctaaggtttggcaagactaaatgtaagagtgtgagtgatggacagtgggtttacaagcgagaatatataagatttgtataatcttttacttgttgataacatattttgttagaattattatatagaaatcataaaaataatatattggataaaattgaaaattctcacttgaaataaacaataacgtatttttaaaagaggtttggatatttattaagttgaatcaaaactcattagtcaatcttttcataaaatttaataagagtgtatttactatttagtcatgttttcatcacttaatcagaaacgaatgtattttgccacgtgtatccgtattattggttcgatgacatgtaattcgtgtaaaacttcttacaaaaaaagcttcaacatcagcttcaagatcaatcaaaaacgaaaaaaaacaaaaaaaaaactttgaatccgtttgttgcttcttcgcaacgttctctctcaaactcgcagaggtaaagcttcttctgatcctcctcttagccccagttttgatttcgcattccttctgtgatttcgtttctagtagatctgtaatttcatgattatcaaattcacaatgcggatctgagatttcgtggataattctaggtagatctagtttccggagatatatcgtgaattgcttttggttgaatatcaagatacatgtagctagtatgtatagattcgcattttgtttcaagaatttctcaataggctctaaattttgcagtaacagattcgataatg

SEQ ID NO: 36550 - DNA, 3000 bp, Unknown
  misc_feature (1)..( 3000): 2750-1469P.txt file - cDNA_ID_3097588; gDNA_ID_2936554; Annot_ID_194145
ttcgcaacgttctctctcaaactcgcagaggtaaagcttcttctgatcctcctcttagccccagttttgatttcgcattccttctgtgatttcgtttctagtagatctgtaatttcatgattatcaaattcacaatgcggatctgagatttcgtggataattctaggtagatctagtttccggagatatatcgtgaattgcttttggttgaatatcaagatacatgtagctagtatgtatagattcgcattttgtttcaagaatttctcaataggctctaaattttgcagtaacagattcgataatgggaggaggatttagagttttgcatttggtgaggccattcttggcttttcttccagaagtgcaaagtgctgacaggaagattccatttagagagaaagtgatctacactgtcatctccctcttcattttccttgtttgtagtcagcttcctctctatgggatccattctaccaccggtgctgatccgttctattggatgcgtgtcattctcgcatcgaatcgtggaacggtgatggagcttggtattactcctattgtcacatctggattagtgatgcaactcttagcagggtcaaagattattgaggttgacaacaatgttcgtgaggatcgtgctctcttgtaaagtgttcccttttggtaattttcttgatcaagtcgagaatcgttgtctcatgtgttgtttgtgttgtaggaatggtgctcagaagcttctttggattctgagtgctattggtgaggctgttgcatatgttctttcgggaatgtatggtcctgttggtcaacttggtgttggaaatgctattctgatcatcctccagcttttctttgctggaatcatcgttatctgtcttgacgagcttcttcagaagggatatggtcttggctctggaatctctcttttcatagcaaccaatatctggtatgttaaaaagagctcatcttttacatcaaagtgcttgtctttgtaagggaagagagttttagatacagagattcttaaacgttttgagttgattgtggtgatgcagtgaaagcattatctggaaagcatttagccccacgacaatcaacactggtcgtggagctgagtttgaaggcgctgtgattgcgttgttccatatgctgataactaagtccaataaggttgctgcgctcagacaagctttttaccggcagaaccttccaaatgttaccaacttgcttgcaacagtgttgatcttcttgattgttatatacttccaaggcttccgtgttgtgttgcccgtgaggtcaaagagtgctcgtggccaacagggttcatacccgatcaagctgttctacacctccaacatgccaatcattctccagtctgctctcgtctcaaacctctacttcatctctcaggtacttgtgctttcttttgtttcctcattaagggacaacacagctgagaacataaagttgacaatttgcatttcctcttcaacagcttctctacaggaaattcagtggaaatttctttgtgaacctattgggacagtggaaagaatcagagtacagtggacaatctataccagttagtggtcttgcatatttgatcacagctccggcaaggtaattcacaagtaacgtgtgtccccatcaatataacaatacttgatttccagttctctgaatatttgttttccacggttacagttttgccgatatggcagctcatccattccatgctctgttctatatcgtcttcatgctcactgcttgtgccctattctcaaaaacatggattgaagtctccgggtcttctgctagagatgtagctaagcagctaaaggtaataatccctaaaccttttctccattgctaaataatttaaacatttcgacatggaaagtgaatttatttgtaaaatatgattaggaacaacaaatggtgatgccgggacacagagagtccaacttacaaaaggagctgaaccggtacatcccaacagcggctgcatttggaggagtgtgcatcggtgcgctcactgttttggctgatttcatgggagccattgggtcggggactggaatcttacttgcagtcacaatcatatatcagtattttgaaacctttgagaaggaaaaagccagcgagcttggtttctttggattctgattgtttctagtcatataaaggggtaaattttgctaagactagtgagaaatttgaaagcctaattaagaagtagctttcctcttatgtgttcattcaaaggttcaatagacgattaaaagagcattttggtagacactttttgattaaccaacagatttttctctattagttgttactttgtgttagaatttttttcttcaaaaattacaccaaatttctccattggttactagtctgtgttttattttgctaatttggactttaagagctcatgttatctttggattgaggaattgaaattcagcaaatcgtagaatagtagtaattgtgctaatctccaaatagaacccgagatttggcaactgaagcaccatccatccaaagacggtttgtttagaaacaaggtggttgaaggttcaatcaaaaccctttagtagaaatttacatatatatacactagattaagatcaacagtaattaaaaatttcatgattagcagaattcatcaaaaaaaaatttactaatcaatttatgaacataaaaaaaaatcatcaattaaactgacttttttgttttaacacaaacactttagcattttgtttacaagaaacgaaaattgaatgcaaactataaacagagacaaccaagtagtatttattaactgtcccggttcaggtaacccgaattgattttgattttgtacccggtttagaaggagggatacgacaacaaaagcggtgaccaaaatcaaaacgtagggttttaaaaagggtttctcttctcttctccgtcgtcgagcatctgcaaattatacggcggcgataaaaaatg

SEQ ID NO: 36551 - DNA, 2486 bp, Unknown
  misc_feature (1)..( 2486): 2750-1469P.txt file - cDNA_ID_3097593; gDNA_ID_2936554; Annot_ID_194144
gaattcactttccaatagatcactcatttataaattgcttcaaatcaaacacatttaattataaaattgtttaaaaagtttgacctaaaaaaaaagtgtattttagtgacatgatcaaatcaattattttaaacttttcttatccaccaccacatttctagattttggaatgattaaaaaatgcatacatgatgtttttataagatttttacggtgttggttctattttgtttttcttattgccattttttcgattattagtgttttgtatgttaaacttgccgattgttccaattactataatataacaaaaacaagttttagctatcgatttttccaaagttttacaacgaagtttttataagttaacatgaagtaataatagtatatgttttaaaattatacgtttttttgtatgaaattaaatgttacattacactattaaagattccaataattaaaacacatgttacaatgagtaaattttattatcagacaataaacatctctttgctctaagaagaaacctatgctagtgaagcgttgactctggaaagatgcaagtgcaacgtgtcgctgaaacattgaaggcgcgtgtagaaaaatgttaagctaaagggaagttcactttctttaaccaagttttgcgttttgcaaattacaactaaagaatccactaaagctaacccaactaaattcaaacatttttctatgtgatcagtttaccatcaaactatttcatatttttgcaatgtgtagtaaaaactttctttgttacattatatgcttcttttataagcaaaaataccatattacattacatgttcatttcatttttgtttggtatttgcgcttacaatttacaaaatgattttgtttgatactatttacatttacatgtgaaattattgtgttcatcgtaaaacgttcaaaatttctaaaaattgtaagaaattattgtaaatgtaaacaaagtcggtttcctataaaaccacacgtctgaaccaccttaatcatcatcacaacatgaaattacaaaagcagcgactttgtcgattgccgtagtttcattgtagcatagataatcccgtcacgtgatgttatctatttttaactgtttcaatgtagtcagaaaagctatttgtttgatttcagaactgtttgattagtggccattgaaaaattctataatctatagtcaatagtctatacacaattgaaaatggtatagttgattttttaaaatacgccattaaataaaattatatatagaacttctctataatcgataaagtcgaacactccaggcaacaagcggaccgaccacggagtctaacgtaagagtattattagtgatactgtaggttttctttgactaacgataaagaaaaaacaaacatgtttaatttctcgtgtcctctatattcatgagtcatgacgttcatacaatttattcttgttttaaatgacgttcatacatcattttcatggttgtctattagttcactagaaaaacgaagtcttgaacgttgaagcgaagcattgaatatcattttataattttatggactaaactatacatttcaatcatctttgcaaaaaagaaaaaaaaaaatgagttagatcataaggagtcaggacaacagctagcacaaaaatctcaaaatcctatactgtttaacccaaaacaaccgtagaacaaatattattatacacccaaaaaaaaaaacatatttgcaatcacattagtttgtaaacacttctatttcgttccataaccaaaaaaaaaaaaaaaaaaaaaatcaacattcaattttttattttaaaacatgtttgcatatgttcatggtatgacattgggtattaatctatcacagagagctaaagcccatataaataataacagaaggcccatatctattaataaccaactcttaaccggtccattctaactgtttttctcaaatacaaaacacgtggataacacgaggaattaaaattgaagttaaacaccacaccatgtcgcgtacgaagctgccacatcactgttctattaacacgtggcttaatatgatgcaatatagacccaccgatagctggcgctttctagtttaccaaggtgcgacgtaccagataacaccacctctccacttttgaaaattaaaacgctctcttttggtaattatttagggaaacttcgataattaatcgaataatgaaggactaatttgcagttttaaggaaataagtaagcacacacgttagagaagaaagaccgttccagattgccacgtcatcgtctcctctcaacgagtttctgcaaaacctgaaacgtgctgcaccttgcctctctttctctctcttccttcgtttctctctcgatttgaagagagaaaattcgttcgatttcgttttctcttcttcttttggattttcccggaaaattttggaatcggtgagtctctatcgattactggtcaaccatg

SEQ ID NO: 36552 - DNA, 2846 bp, Unknown
  misc_feature (1)..( 2846): 2750-1469P.txt file - cDNA_ID_3097634; gDNA_ID_2936555; Annot_ID_194232
  misc_feature (1)..(760): n is a, c, g, or t
nnnnnnnnnnnnnnnnnnnnnnnnnnnnnnnnnnnnnnnnnnnnnnnnnnnnnnnnnnnnnnnnnnnnnnnnnnnnnnnnnnnnnnnnnnnnnnnnnnnnnnnnnnnnnnnnnnnnnnnnnnnnnnnnnnnnnnnnnnnnnnnnnnnnnnnnnnnnnnnnnnnnnnnnnnnnnnnnnnnnnnnnnnnnnnnnnnnnnnnnnnnnnnnnnnnnnnnnnnnnnnnnnnnnnnnnnnnnnnnnnnnnnnnnnnnnnnnnnnnnnnnnnnnnnnnnnnnnnnnnnnnnnnnnnnnnnnnnnnnnnnnnnnnnnnnnnnnnnnnnnnnnnnnnnnnnnnnnnnnnnnnnnnnnnnnnnnnnnnnnnnnnnnnnnnnnnnnnnnnnnnnnnnnnnnnnnnnnnnnnnnnnnnnnnnnnnnnnnnnnnnnnnnnnnnnnnnnnnnnnnnnnnnnnnnnnnnnnnnnnnnnnnnnnnnnnnnnnnnnnnnnnnnnnnnnnnnnnnnnnnnnnnnnnnnnnnnnnnnnnnnnnnnnnnnnnnnnnnnnnnnnnnnnnnnnnnnnnnnnnnnnnnnnnnnnnnnnnnnnnnnnnnnnnnnnnnnnnnnnnnnnnnnnnnnnnnnnnnnnnnnnnnnnnnnnnnnnnnnnnnnnnnnnnnnnnnnnnnnnnnnnnnnnnnnnnnnnnnnnnnnnnnnnnnnnnnnnnnnnnnnnnnnnnnnnnnnnnnnnnnnnnnnnnnnnnnnnnnnnnnnnnnnnnnnnnnnnnnnnngaattcattacttttaaaacagaaatagtaaggttagaaaatattcaaaaagagtgcatgtcttttaaagttgatgggtcggtcttatagattgcgcatgtcctgtatctctcccaaacattgtggaccggtctatgtatttgtgaaaggaaatatgccaacttttactagtctctctctcgcatgtgtgtgagtgaaatagttttaatatttcaaatttatttccaaaacaattcttacaaggattatcaactgcgcagcttaaaaaatccaattatactcaactagtattatcactctatagttcagaatacttttcttgaaaatatgaaatatatataaactataaattttatgtttttatattatttaatgaagacaatcaatgggattaagaccattaacgtgtgaaacataagacatatatgatttatcgtaaggttgagaatctatgtatgctttttcagggaccaaaaggaatatataacatcccttcagaaaaaaaaagatttacatgatttgggttgttacgtttcaaaaagaaaattaaaactctagtttaaaatctggtagatgtttcagccccttgtttaataaatctgaaacgagattctcaccatcatttttttgggataaattatcactattattttcatatatatgttattttaaattgattattaattatttagtagaatggtataatcatgaattataaacaaatacgtggaataaaataactaaatcgagatgtttaattaaatcaacttaattgtcaaggaaaagatttattttagttttatcattaaatgactaaaccaaaataaactaagcaatataaaaagcctaaagcaaaggaattgacgaaacatgcctaaagtgtatgacatagcgtatttgaatgaaatttgttcacgagaaaaagatcatcttctccaaaccctctcaggcctcttttctctctgttcacatctgtttcctcgtcacacaagacatatacattaacctaattcaactgttccatgtcttttaaagttttcttgatggaattaagctgatgcatgttattttatgttgtaattatcatcatttatggttagttagtcaattggtctatttatattatatgtatatcaacgtaacgaccctatcatatgcatttggatctgcatcaccaagatgatgactttataatatccaagagatttaacaatcttaacaatccttctctctcttaatcttgattgccataagtcaaacttgagattatttaattactatatggagcccaattatcgcatgtaaatgaggttaatataaataggcagatttaaactaacatatatgtcaatggaatttgaataactaagagttgtttagtatttcacagcaatgcaaatatacaggttttaagaacaatatgcaaatgaatttaagggatatataaaaagttcttaaagaaaattccatagccacatatataaagaatttgttaacttaagctatcatatacttctttttagtataaactttatttgaaaaatttgcatgtgagttcataaaggtttcaacgagttcctaaataaaatctagctaagaggcaatattagatgagtatagtgaagaccaagtgagtatatcttttggcagacatatgcaaatcttgtgaatatgattggattgatattattcaacggatcataaagaaagagcttgattggaggattaaacagcatataaacaaatatgatattaaacaaaaaataacatataaaattatagggaaagcctgcacaggtaatattgaccaacaatagcttctttctaactagacaaggccatgtgtgttgtaggacctcccaaatatatattttctaataattatttcatcatttgccaatttattatataaccatttctcatccttctcctcataccaccaaaaaccaaccttcaagaacagagaagaagtgattctctaaacaacaaaaataaaataaaactcttctttctctatttctgttgaaggtacctcatcattgcaacacaaacttaaagctttgtttgtgtctgctttcagacaatg

SEQ ID NO: 36553 - DNA, 3003 bp, Unknown
  misc_feature (1)..( 3003): 2750-1469P.txt file - cDNA_ID_3097639; gDNA_ID_2936555; Annot_ID_194230
tatgaatcgttatctttttttctacgtcttccaaaatcggtttatctttcgccattttggttttaaaataattttggcaatcaatttgaatcatagaggcatgtaacttaaggtaaagactatttccttatcatacatgtatacatgtggtatttacctactcattggttgagttcgaacatgacaaaattacttcaacgtgcttaccttcaatacacacatgcaatagttaccttcaaatacacatgcaatagttacttcaactatgtatagtttctatttatcaaacagaactatatttttgtttttgataaataatacacagtatatatacttctataggtctacaattcaacaacgatttagtcatgatataaaaattttaatcaaaaatcaggaagagtaaacttctcaattcagttcttttattaacggtactaattaatatgttatatcatatagtatgtgaacttcctagactcttttcggattcatttgttttccttgaatatatatgtgccacttgatcaaatgatgggctaatcacatgctttacaatactcatgattgcaaagtctcgcaatctttcggatccaaatgattaatttcatttcgtttaatcatgatttattagatatcaaattatatacatgatttcacactgaaggactgaaaaggaagcgatatttatatttctaatatagaaactttgctatataaaactactccttatcgtcttcttaattatttttttgtggcgtttcatatgactaatctcaatgcttttataatgattagtagcatgagcatgaacatgttcgttatccaagaaagaaaataaacaagagatatatcgtgtgaatatgaattacttttgtgtataattattactgaataatgtcataatatatatatatatatatatatatatatatatatttttaacatcttcattctttattaatttgaaaacgataatacaaaatgtatcaatgaacatacacattaaagctccacaaaccatacaaccaatacttaagtagcacgaaataaacgagaaagtgaaaaacactagaaaatagtatcatatgattgaaaaatactactgatattcaatgaattttcaatttagtcgagtttttccgggttttttaatttttgctttaatgaatgatagtacacaaagtaaaaattaactaatctataatatatagatgatttacatatgatattggttttggtcttagagttttaatctaatactagattttaacccgcggtacaccgcagaactatttattttattaaaagtaactaagaatatattattttataaattatctatatgtaacatattgttttgtatttataaatatataatctaatttctatatattgtacaatcccttgattttatcatggaatacaccgtaagtcgatttttaaaatttaaaatttaaaattatatatgatttttgttaagattgttttttttgtcatatattttaaattatatcattgtattttaattgttagttataggatttcacccgttgtataacgtgtcgtattactataaactcaaacccgtctgaccatctaattccgttcaatgaaattaaacatatttaatggatttcatcctaggtatactgtctcatattactatcaactcaaactcgtcctaccatctaaccccgttcaataaaattaaatattattttattatttttgttttaataatactttaattttaaatatatataattcaaatcaatttcaaactttttattttaaatggttatttaattgttataatttataaagttcatatattttaatattctaaacctgtcataccatctaatcccgttcggtgaaattaaacattattttttttgttttgtttaaataatatttttattaaaagatttataattcaaataaatttaaaatgtgtctttcaaatagttatttgatttttataaatttcacatttaaaatatttctctatatgtaacatatagttttatattttataaatattataaacgttttataaactttaaataattacaatatttaccttttaataaagtataatattaataatcatttaaataatcatgtgtagctaattttaaggaatttgatttaaagttagttgtttggattaaatttgaatgaataatgtgattgatatattaaatcaaaaattaaaaatcaaatcaaataattaaggaaaaaaaaaataatgccaatggcatgccattgtaaataagtgtcaagtagaggatttatttgctaaaatggttgcaaaaatgtatatgtagatattctgaaatttaaatttagttagttttttttctttcaactgaaatatattatataaaaatttacacatttcaatagaaaaaaatatctatgaaaactaaacaaacaaacatattaaaatccccgaaaacaataacccttagaaagaaataatgttgaaaaagacataaaaatacaaaccaatgaaaccattagtttacttaatcccgttagatgagcttctctcttggagttttggaactattatatagaaaagcaaaattcagttacgaatgcggtttatgtataaaagaagtcacaaaatatcatcactgtaatattatagattgtaaacagagaaatacaaatatataattgtccgaccttatgatatacactactaagtactaacctacgcaaataataccaattaatcttcagcttattcggaaaatttcggctaattcatgttagatacggacaacgtcggatttaacccaaatcctcaatgcaaatgcacaattttctggtttgtttcgtttttattttctggttaaaaaaattcagattaggtttgattaaattaaaaataataaaataaagattgagaaatcactgtggtcttggttcagtcttttgagatagagataatttctgagccgagccgaggaagaagaagaagaagagatg

SEQ ID NO: 36554 - DNA, 3003 bp, Unknown
  misc_feature (1)..( 3003): 2750-1469P.txt file - cDNA_ID_3097654; gDNA_ID_2936555; Annot_ID_194224
caaaacatcattttattcattagcgtgaatgcaaaaaaacaagacctgtagcgtgaatgtatcgctcgaacaacggcttctgagaccctgcaaagagtcaaaacttccaagtaatgaatgcatatttcctatagtctgtagataaacacaaacatcaactggaaattccctcatgcccctaatgttagctaccacggagacctcgagattacatttcgattctttaaaatcaactcttgagttacctttaatagtgcccaatactttgataccccttcctgataaaccctaaaaccccatttcagctaaaattatcactacattagaaattctaataaaccccaaaaaacttgacattgtcgttggtctgttgcatatacacctaaatcagctcagagaaggcgataaacctcgaagagcatatgaatgtcagtttttgattcctttttgaaacaagcaaaaattgacgaaatcaataaccctagtttaacaacttttatacattaccttgacgcaatccgatcgcggaatcaaaagttcttcgagcttgtacatgccgcagaacctacgatataaacataaattacaaaatgatttcagctctctcgaggactcaatttcaaaattgaaaggaagaagaagaaaacgatgaagctaaatctagagagggatgaagaaaacaaacccagttgaatcttcgcatgactcttgtgaattcaaagctaaacagagaggaaaaaacggagaggtttttgattttgagagttaaacccttagaccatttccatgataaattccaaacaaacataaatcaaaaatattaaaataataattttttaatcagttttttttagaatattttctgaaatgagaaacttggagaaattttatctctcttccaaatgtcatcttgtcattaatttcttttctttgttataaataaaatcatttatattttataacatcaattaaatactttatatgtttatttttttttttttttttacttttaaaattcataaaattaaattatctatataacaagctctattatatatatgtttaaattatatacgaatattatttaattggtgttagttaagcattaaacataataataacttataaatacaatagtttttttttaattagaaaacaaacatttaaaattttctatttttattttacaacatttttggcaatcgaattcgacttcgtgatagagatatgcaccaacaactaaaagatgacctagttgagcatatatgacaaaagtttggtgcattatcaaatgaagagtaaaaccataatagataatatagttagttttgatttatgttatcatggttttatatgtaatttctgtgtaatttatatattttttctatttaatttatgttatcatggttttatatggaattttatgtttaattgatatattttttattatgattttatatgtaaagtaatgtttaattatgtttaattatgtttaattatggttttaaaaataataaaactatttaataatataattgtaaaaataataattgatatgtttgaaaatattgtagagattttaaatttaatataaaaaacatataataatatgttaatgttaatgagatactcataagagtatttcaccaatggaagcacaattttagtataagtttctctacttaaattaaaatattaataatatattatgaggtactcatggagtatctcaccaatggagatgctcttacgcatatgctgacgagagacgagagaagagacgttcgctaaatcttttgctttctcgccactacgtccagagtctctctctggttcagaagactcgaaatgggttaaacacgtattctctcattctccgtagttaattaatttagtgaaacggtaaaaacaaaatggtaaaaaattggcggtcgttattttgtagcggtaaagaaaatagtgagttagactatttacaagttaactgtttgaattaaaagttgaaagtgatttggaaaaagatgttgtagaatttcttcaacaccgttaattttgtgaataaaatccttgtacacatatagtcttagaaaatttggaaaaaggtttgataaatgtaacttagatgctgcttggattataaaaagtaagctttatggatacggacttgagttcccaagatcatttaggttcaatctgattttgaggtttatataagaagcttcatttaaaccgttgagtgtttgagctatatgaaacttcaaaaaaatgtcattcgtttaaataccatcaagaagaatgtgaatcaacttttctttttggatgaaaactagttttttgatatggtaactatgttttcaacacaacaaaattttatcgtcgaatgtccgaaatgataaagacactcttaaccttcatcggaaaaaatagcaattttttgtggtatatcaatagcggttacaatctaacttgttttgttgttgttattatgattagaactgtcaattgggtggaccgcatgtgggtttttacagtccaaatacacacggacggattatggtctggactccaaactaaaaaacataaaccaagcaatcaaaaagttagaataagatattttttagttaaaacaaaaatcgtaagtgaagaaggtctgaatttcttgaggaagataaacgggcacaaaaccggtgtacatacatggattatggatatgttctagaggaaaggtataattgaatactagtatccgttacagaaactaattgcattaagtttcgtctactgtttaagaccgcacgagatatatatgttagaccgactttgggaaagaggctacttaaattatttacgattaataatgccaacgtaacgcggacagacattttaattcaattattatttgttgcctgcgagattcgaaccatctcttatttcattacttaacccaaaccaaaaaaataaaaagttcatttcgaaagaagaagaagaaaacatcaaatcatg

SEQ ID NO: 36555 - DNA, 3003 bp, Unknown
  misc_feature (1)..( 3003): 2750-1469P.txt file - cDNA_ID_3097681; gDNA_ID_2936555; Annot_ID_194217
cttggcagttattaatcaatattcaatcatatagttgaaaacattctgcaagatattaataaacatatgtttctttcaatgtaaattaaacagtgtactttcaatttttaataaaagtcatactaactggtgtaatttaaacattgtttttttttgttttttcttcaaaatatacttatatgtgattcatattcgataacactatatttatatataaacttaggaccacatttttaaattttgacaaaaaagggaccacatttttaatctcatttagttatgtgtcaagcgaggtaacatatatactgattgtcaattggttcacatagtataaaatcagattattgatccaaaatagagaatgatgcggatttaagattaaattcaattcgaaatagactagacaatataattcaccgaaaaaaccatggaaaatgttaataatttcactattttgaattcaaatgggatatgaaccaatatataaatgatacatacatatcaatatatttactaccagttaattttaaaattataagtacatcatctttataaaaaaaacagtcaaaccatttataatctcatttaagaactccattattgaatgtacaataatgcgatgtagtactccataaaatgccatgaagagcaaagacgagagctgcagttagtaaaacagtgtaagatgtcggactaaaagtttcgtaaaatattttcataatgataacaatgagagaaatgggtcaaatcacgtagcgaacaactactacaacgttcgttgcccgcgtgtaattggttcgaatgtctattgtcattaagaagttaatcatacaattattctataattcgatatagaaaaagtcaataccaaagccactattctagtctcgtacttatcgtcgcaaatcgatatctatggagtagtataaacactagcgagatttaagatacatattataacgcgaatacagtttccagctgccgttttgaaatgtctatacatagacaccatcatcatggcatcatgggatgcttttgaatataattcccaacaataacgtttttttttataaaggaaagtcagtaaaaaataatatgcatgtgtatctatcatcaaatgttgacaccaatcatcaaagatatttcctctctttagtcatttatttttaaatgataaatatgaagaaagttgtgttggtaaatttccattcaattacgtgtattgtttgtctttgtttttaatacgcattgggtccatccataaccaaaaagacaagtcatcttttgaggtgatgtcaagtgacaaacaattgtagctaatctgtgatttgtgggaatatcaattccttaattaaactagttaaattatgactaaggtgcagatatcttggaacttttaaacttttatcatctttttacacctaatagtttagattatcatatgtgagtatatcaataaacacacccacacagtcacacacacacacaaaaaataataatttcttgtggaaatatttctagcaaatcatggagttacgcaattcatcaatatattaaaaaaaatgttatgtcccacaatatatacacaaagtgtatgtgtttgaaccagagtctattctcaataaatgttttgtttcagtttatttcatattaataagattatctattttgaaagttggaaggcgatggtgcatgatcatattaataagattaacagtttttttgataaaatataataaaattagcacttgaatttcatacaatttttagaaaacactcggataatcaaggtattttttatttattttttggacaaaaaatcaaggtattcttatttactattttccacatcaatttacaaatcctcttaaatatttattttgttatgtttttataacttttttgggtctttgaacaaactattttcttcgattaggttcagccgttgataaatttatttaattttcagtcgtgatgatatatattcaaattctggtcagacgaaattttcttttactattgagtctgaaaaattcaacggatgttttattttgaaagatcactataaagctcatattgatgcttttataattataggtatcattacataaattaattcgcataggattactatatccctaaagtcatgacatagttaggactttaggataaaggaaggtttagcttaaacgtcaaggaatattaagtagtgggtaacttttgtttcctctaaacttctttttacataggattaatatgcattacattgttaaattaaatttaaggagaaaatgtaaaaaaattagtttagaggagaaacaaagcaataggtgggcgcacttagaagaagaagaagtgagataatggattagatatgtatccacctatgcacctccatttctccatgatcatgatcatcatcatcattaattcatcaacatcatcatcagctacctttctaatttgtccgtttcacaactgagcaatctctctcttccatgtgacacacttcccttggcttcttccttcccctttgttgttccaatctccgtacgtcaaggtttcttctggtaaagtctctcttcctcttcgtcttttcgttttccataaagactcaactctctccttcgattttcttcttcccctctctactctgcttctctgattgtgatatctcttgtgtgttcttctttctctgttttttcttccattgttgcttttgtctctgtacttcttgaatttcatcatctgggtttcatggttttcactcaaagcttgtggctttgagcttattcagatttcttgtagaccaagcactctgctttataattgccacagtgttctggtcctgaatctttgcttatgccatcaatgaaatgctcatcttcttcctgtttatgagaaaattctgaatctctgttagtttctcaggctgcttttgtgctctgtcttcaaatttcgaacacttgtctgagatatatttgtctgattccaaagatcatg

SEQ ID NO: 36556 - DNA, 3003 bp, Unknown
  misc_feature (1)..( 3003): 2750-1469P.txt file - cDNA_ID_3097687; gDNA_ID_2936555; Annot_ID_194214
tatatgaatatgaaaattggcaattaaaaaacttatacttagaaaagtatatagatataagccaataatacaatcaatcactaatgaaatttcaatcaatcactaatgaactaccatgtattaacgacttggaacgaattttcaaaatgtaaaattttctcttcgcacagcacaaacaagttatctaataaagtactgtatatcattagcccagatatatgaaggcagatcttgggccaaaacttgtatatataaaggtagcataatatcaccagaattaaatccaaacatttcaccaaagtagtataaagacaattggtcatgattagttttaagagattgttgggacttctttttgttgatgtgaagatcccacaactatatcggacactaacaaacctaaccgttcatatggacgtgggaacaagaacatgaattaaataggataagatgaataatataattaaaacttaaaaactgttactaaagggtacttgtatatttcatatatgtatttgtttgtctaagagtttatttcttaattatatttattttcgttttattcataataaatcgaataacggcaaaaatgtttacacgtacaatttataatcttaagagattggggaaacaaatcaccaataaatttgcaacaatgatattatcctataattatagactaatgaaaatttatatatacacaaaaatgtaagggcaaagactaccacgaaagtagccatatttcttggagggaaatgtggtaagttcacgatgcatacttttttgggcgtatttattatttttattaaattcagtaaaacgtaaaagcaaagagaatcattccaacgacaagaatgattagtctactatgtaaatgtaatgatacatcatcgcgttatcggatttaaacatttaaacaattatggcccataattgtgttatatctctagtgagacgtttagaccaaagcatccaaagataggttttatttgaagaataaaaaattgatagggtgggtgggtccaatattgggtccatcattttttttccatacttttgcaggtaacacgaaaatgtaacatgacatgtctctctccggacaaaaacatttctcccacaactgtaataatttaagttaccagttcgtgaatattactgatcattgtagaaatggtggggtaagacctactcgtgaatcgatttagaagttttaaaattaatctttacacagaaaaaaacaaaaaaaacattcagacaaacaacaggaaaaatatctaagcgtaatttgtttaactatttgaagaacagtaatctcaataatgatggattcaaatttgaatatatttggcttgttaagagatgagtaatttttgtattatagagttgtcttatgtatttagtatgttatcagcagctgacttgtgtaagaatattagacttacgtgaccaaactttaatgtattatgttacttgtttttagcaaaaaaaaacattaaatcgtattatgaaaataaatgttctaaagcaattgagcgacatgtgctattcaatgcagcaattacgctcaaagtctcccgaagatctcattcagtgatctattataagaaaatagtgaaaaaaacacatcagatttacataaatgtggttccattaatcacaatgtatcaaatgaaagttttgtttgctcttcatataagtaatggcaaagtcacttcgactctctacttagtatatagaaaataattgaatactacatgtttagtaggacaattgttgaaatacttttatagaatggtagcttaacctgtgtcacaaatgccaatcaaaatgttatacatactactttcaaaacaaaattgtttgacataatccaaaaaaaattcaatcaattatgcaaaccagatttggtaatttataacttcggattacaatcaacatcgatagtatacaatcacgaatcagatgcctgactactatatcaaagttttttactatctcatatgtgaattatggtactaaattcctttaaaaaaaattaatgcctgttattaccatcacttatgatttttctaaatacatagataaaaattatcaaaaacttttgcatgttagcttggatttcaaaacaaaattgctttctttgatataatgtcaaaacaaaaagttcacaaaacaaattataatgacaattcaaattcaacattactattactcatgctataaaacaatttcctaaattttatagtatcccaatatcttacttttgttaaagtatttactaatgttcactttatatggatcaccagtgataatagtaaagttattgtgtgtgactatatatcttttttttttttttgtgactatattattcaacaaattgttttttttttttgataaaaatacaccaacttgacatatcttagacgatctaaacacacatcaactaattaataggcgatctaaatcttacttatattaaatctaattttattatcataaaaaaaaaagatcttacacttattagtccttttttatatattttagacgacaaatgtttactagatgggtaaagattttttttttggtaaaattgggttaagatctttttaacattggttcaccagggatgtgacttttgtttggtcgtaatagtagaaaatttgcatatcacattttttcagatgtgtaggaaacaatgaccattttaatgttgttggataactaaagttttccatcttgaatatctatcagaagaaaaaaagagtaacaaaaaaaagagagtaacaaaatggtactagtgactttttttttttttttttttttgggcacaaaatggtactagtaactaataatggggtaattcatgtcgatcgattttgatttactatttacaaataaaagggagtaatttcatgacactcgaagcgtgaaccttccacctatatatacacccatttcataatctcaaaacatatcactaacccaaaaacaaaacaaaaaatg

SEQ ID NO: 36557 - DNA, 3003 bp, Unknown
  misc_feature (1)..( 3003): 2750-1469P.txt file - cDNA_ID_3097711; gDNA_ID_2936555; Annot_ID_194206
agccggtcaaggaggcttacatatgcctgatttagatatgtataccacaaacaaatacatgaaaaagttaattattaagatacctagacaaattggacattccacttccttgcgaatttcggaatcctgagaagtccatgatcctgagaagttcaccatgacaaatctacaagcacaaaaaatgcaagaattaggtaagttgtagcatataatcattattgtaaagctctactagtaccaaagaatcaaacaaaaaatacaagggcactgtaaattcagaactgaattttactttctactagtgatatatcaaaactagcaagtctgtatctacctggaaattatcttagttttcatttgtttactattgttccgagtattgtagatttaatatggagggaggataatttcaggtccgtacgatcaaagcgaattcttgtagaatttttttttcttgctttgaataaaaacgggagacagagtctcccgcccagttaccaaagaaaaaaagtctcccgcccagttactaaagaaaaaaaatcaagcaaacataataaatgtgaagaatcgagcccaaaatctaaagacttcatccataattgacatatccaaaccaaattcaagcagccaaaatataaaaaacaaaaagtgacacacatttacacaatatgcacattcattatgttcaaactaaaattttaaagtgcacggtaaattacatgtagatctgttaaaacatcgatgtcaatcacaaagaggaacacaaaatatacgataggaaatcacaaaagaaaaaaacaattggcttactcctaaatttctgtctcctcgcttgatggtgagttccgattggtatctgataaaaaaaaaattagaaagaaactaaaatgaaataaaggaatagcttttatttgaaagaattttgtttaactcttaaattattttttccttgttgaaataaagtcaaaagaaagaattaattatatacctttttattattatcccaattaatgttattacgtgtttcgttttgcaccatatatttttttaaaatatgttaaaatagcatatcaaattttttacttaataatatttaagatgtgtttgaatagctaatatatggtataaaaatatacaaaaaaacgaatcattgcatgcatagcctaccctgaaatttggggcctaaatacgttttaagagttttatagaaagttataaaattggaggcctttttacaaaagtaaaataaaattggggacatattttataaacaaaaaacgtcagaaattttggatcaattatgggatcggcacaattaagtgatggacattataagataaaggcttttttaatagcttatgggattgagtacttatactgaattctcaagactgttttaccctcttcttcagaaaagctaaaacaagatccttcaaaccaattaaacaataagacatcatgtctttttttttttttgaacaaagagatcatgtctctcatatacactaacaaaaggaaatccaaaacccagaattcgaaacatacacaaccaatgaagaagaacaacccgtgattgttatcgttcaaagaacgccataaacatttcaatctatcattttttttcttttttccccaaaaccaggccaaaggtttcatgaatttgatttccaaactccaatttgagatttgaaagttgcagtttgaaggccaaatcgacccgcctttgaaattgatttcccctttcaagatcatgtgttacgaaccgcgacgacgatggtaagcttcatcgacactaacaattagattcggtttcgaattatagatgaattaaagattaattgattcgatctgcatctaaaattagaatatttgggttccctaaatgttatcctcttagggtttagattccttgcattaacaatcgtttaattagttccatagagttcatcagaggaggttgatgaaagaattgtattgtgagtcgtcggaagtgaaggaaacgatattgatggagttgaaagtggtgattttgaaggagtgtggagtttaaaaacagaagaagacaaagtgatatttcatcaacaaattgaggagaagattgtcatttcacaaacaaaaaaaattccctttttataagcccaactaaaatgtgtctattttagagtttctggcccaaaatatgcttatatctataaaagcccccaaaaattttaggggccataacaaatgcttcatctggttatgctcatgaccggtcctgtttacatgctatgtaatatatgaactagtgtgcacgttgacggacttccctaagtatcgatacactttttccaagtcatacataatagagaacactggaaaacaagttagctcatacaacaaaccgaagtttgtaagtatttcatgataagtttaccataatttttctccgacgatctaagctctatcttctttttgggatgggcgatcgaacctcggtggctaatactactcgaatccaggtggtggagacttttctctcttgtactaccggacttggtttcaaagagtttttttttttttcaaacatgtactgatataaagtttctcaaaaaccaatattagattaagaaaatttattcatgtagcttacaagagaaaaaaaatatactgcaaaaatatgaaacactaatcaaaacaaaaggtataataattgtagttgaactgaaatatttttaatagtggtaaccaaacgagttctgaaagaaattgaagaccgaaccatatcacattatcacctaattaccgtttggttcggagaaccgaaccgaacccacccgaagacttcaattgcccaatcctagccaaaccgtagccgccatttccgtgaatgttgtgattagcttattattatcttcgttgcccaaaaacttaaaagatccaaacttcgaacaattttggtgtctgctatacagaatccaaatccaccttctccgattaaaaatcccttctctttcgatcatg

SEQ ID NO: 36558 - DNA, 3000 bp, Unknown
  misc_feature (1)..( 3000): 2750-1469P.txt file - cDNA_ID_3097753; gDNA_ID_2936556; Annot_ID_194256
ttctcgacggtttctaaatgtttagctgagtttccaccatctgccatccaaagtatcccaaggtttttcttctgaagacttttaattaccaagtgaggcaagaggatcaaattttcttaaagtgggtttctcaatcttcgacgaaatctctgacgcctgttaattttacgatcttggtttatttggttaaagagagaactatgtttatgtgtaaaatcatcactcatgttttattttctctttttccgtcgtttccccatgtaggggcttagtgtttgggggtttcattcctcgccagcttgtgttccggaagattatatcttgccggctttgtcgtcccgtaattcactcggacttatgtatctgatcatggtttgtgataataataaaactagctttgtgaagaaaaagaaaagccaaaacattatgttgctaagttagtcaaagctactcataaacccacctgtctagctaaacatcacaaactaaaatgaaaagaatttaaataaattaaaaaaagtacataacttaagcaatcttttacttccaaacaaggcatgccaatcattatctgcgttaaatatctagtatgctgcctattcttaacatatttatcatgcaaagttatattattgagcgaaatatgcgtttttgttgtactcaataataaatataatttacatttatatatctattcccattaataacatcttatcatatactacaagatgatttatctataacgaactttcgagaaaagaaaaaaacgtaatattttaaattttgcgctaaaaattaaattttaaaaacattttttaattttcatctaaaaagttcctatgaacattacaagataatttacacataacaagccccacaaaattgaaactataattatctacatttttagaaattctttacgcgtagtattgaggtttgttacacaatccaagtaattaataaaagaaacaaaaaacgtcaacgtatctttatctttaagggtaatttgttaaagaatatcccatgtgtacaaaacaaccaaatatttcaaaatttaactaaaaccggctacagtaagtaatcctccaactaaaaccgccacctgtccaatctaatcacatgccaatagaataatataaagtattctaattttcaaaaagtatccaataagatcaaaggcggtacttgattcaaatattccaccagtaagaatacagagagacagagctataatcctctgtgtcacagtctattataataatataatatacacacagagagaataaaaaaaccagtatttgaaatagaagaagagtagctaccactccactcttttcgtctctctctctttttctctctatatacgtcgccattgttgttgcattcgaagcttttatagaagaagtaatctctctttttctctatttctctgtattactttctcttttttttttcgtgatggagaaaaacacaccggtgaggaaaccacacatgtcgacggcggatctactcacttggccggagaatcaaccgtttgagtctcccgccgccgtatcttctcgctccgccgccagatcgcaccaggtaacttactaattccgttaatttcgcgatctacgaattcgaatttagggaaacaatctcagccgttggataaaatgtttataccaactttgttttttgtaaatttgaaatttaggggaaacaatctgagccgtcagattgatttctttaaactaattactactagtttcactcaatttgttaatttcgcgatctacgaatttgaagggaaacaatcttagccgtcagataaaatatttaaactaatttttttgtgtaattttataatttgattcgttgtgattattaattttttgtaaatttggaatttaggggaaacaatctgagccgtcagattgatttctttaaactaatttcactcaatttgttaattgcgagaattgattcgtttctgatttaaatttgggggaaacaatctcagccgtcggatggaataagcaaagtcgtatttggaggacaagttacagatgaagaagttgagagcttgaacaagaggtgagtgatagagatctcacgattttttttttgtattcgaaatttagaaaatagtagtattaatcaggaagaaaacaaaacggtacgataatttaataaatgcgaaacaacagtaagtacgaagaatctgtcaatttgttaacagatgatgatgatcctgtcgttatttggactgaccctatagaatgttttttttttaggtaggaaagtgtttgattgccataattagtgtccttaattatgaagcatttttggtatatcttcaatttaatttccgtttttgatcttctttgtatcgttcacgcttctctaattttgtttttttttcctcctaatttattctttttttggtaaccaatgatccggtctaattctgattcaaaaacccaaaattttagtatttttaccatttttaataattgttgcttgattggttaggaaagttatataaatattttggaaccatgggttaagttttaaccgcagttagtgctttcgttagtaaagttaacagacgttaacttgaatgtatgattttaccaattttcttaaaacgaaggttttaaaaaacaccaaaattaaatgaggtattttagttacaaatttaatattacgcttattaaacggccaaaaataaattagatggcggttttttccccaattttttgttgttagtgtttttggcaatgaatttgatcgtaggaagccttggttaattgattcaatctccaataaatctttggttatttctggtttagattggttattgtacttggtttaatatgggtgtatttaagctcatctttgtacacatgttacattcaatgaaaacgttactatgacatgttatagatagattcattgttaatttttttggttgagtacacaatttgtaggaagccttgttcaaattacaagatg

SEQ ID NO: 36559 - DNA, 3000 bp, Unknown
  misc_feature (1)..( 3000): 2750-1469P.txt file - cDNA_ID_3097756; gDNA_ID_2936556; Annot_ID_194255
acattcaatgaaaacgttactatgacatgttatagatagattcattgttaatttttttggttgagtacacaatttgtaggaagccttgttcaaattacaagatgaaagagatcacagggagtggaatattctctgtgtatgaagaaaatgatgattctgagttagcaagtgctaattccgccacaaacggcaaatcaagaactttccaggtttgtgtctgtctctttcttgagagaattggatacattttgtagtttgttttgatcacttttatgtgtttggattgtttcagcaaccaccagcagcaattatgagtcacatttcatttggagaagaagagattgttacaccgaaaaagccagcgacggtgccagaagttgcaaagcaacgtgagcttagtggtacattggagtatcaatctgatgctaagcttaacaagcaattctcagatgcgaagtgtaaggaactaagtggtcataacatctttgctccaccacctgagatcaaacttcgtcctactgttcgtgctttggcttataaagacaacttcgacttgggagaatccgataccaaacccgtaaaaacgcctctctaaacttctacttactcatattagtatgtctcagtcacaccaatgcactaattcttgcaggatggggaactaaagacggccaagaagattgcggataggaagtttacagatttgtcgggtaacaacgtgttcaaaagcgatgtttcgtctccctcttccgccacggctgagaggcttctaagcacggcgaagttgaaggagataagtggcaatgacatatttgctgatgcgaaggctcagtctcgtgactactttggcggtgttcgtaaaccaccaggcggagaaagcagcattgcattggtctaaaccccaataataattatatagctcaagattaaaattctctacaaaacttagaaggttctaactatttatcttcattaatagattatgtacttttggatgtttttatttctatattttccggttttgtgtgattgaatggttatgaattgatctgagtttgttaaccggaaagctaatctggtctcttaggaatttgtggagtttgtttgttttttgtgagttcagactttaactatgagtccattgtttgggtctgtctctgtatttgttgggtacttgattgattttgttgattattttggggctaatctgttatttaagaaaaagattgtggaccgtttcgacaaaagctgtcttacacgtttggtgcagtggataggactgagagcagatacataagattgggaagtctgtttcttttttggaaaggaacctttggccatggtctgtcccaaatgagaaatctatgtatataatataatattttgaaaaatgagttgctttaataattctgtctttgcttatatgaaaattactttcttgtattctgtattgaaagcaaaacttttggaagtgtgtgtaaatatttcaaaattgtaaaatattgaattaataaacttgttatcaacatccatacctaatacttaaatatttaatagttcaactaaaaataatattataccattcttcaaatttcttaagaataaatgaattaaattttgagaaatttaaatggcaagaatttaaaatttaattaaattagagagaaaatatatcaaagaataccattgaaactgtttgttaacagagatatttgatatctgcaagttttgttgaagatttgtgtaaatttgaatctttgagattgttagtgttacttatgcagcatataattgttttgatgatatgtgagcattacgatgatatttagaaaaatgataattcaaacttaacttatttgatagataacaacatgagaaatatgagagtggacatgatttttcctaacaaaaactatcagcagatatgatttgaatctttgatagtgttactatatatcaatgatattgatttgttgttacgtgagcattacaatgacgcttaagaaaaatgataatttaaactttactcgtttgatagataaccacatgagaaatatgagtagagataaaaattttagaaaagtctatcaacattgtcgctcacactacttccatataaagaggaagtattgcaaaccaatatatcgaactaacgtgactacgattaggaaaagagatgctcaatccatttcaaatcgataaatttgaattgatgtcaaagaatgtagataatagtcacaatatatctgagtgagatttaatattgttgagttgtggagaaaaatctcaatctaagaatgtataatatggagcgtttgttctatttcaatgaacgtatggttgatattgttctattctataaacatatggttgatactgttttatctatgaacatatggttgacattgttctattctatgaacatatagttgatattggtctactctacgaatgtctcaaaacgttctagtgagagtattttctgtccatgtttgtttgccctaagctttaatttatagagaaatatcattccatatgcatagaaaacttgttatttagatcccttcgaaattcactattaccctaacactgttaacataactttttacgcatgtacccctacgttatcgttttagtcagttgtagagtataggcgaattattgcatgttgtaggactctaagattttattgggatattgtgttcgggagttatgtttttttttttaatatgttttcttctctcctgctaacgaacagtcgtgtgctttcattactatatgaaggagaaagactgcgattgaggcggaagaacataacccttgtcttaaaaatttcttgtgttatctgggttgattgtcaatcgatatcatttccttccgatccgagggttcttcattcgttttgggtaattgatttgagtctcctctctttgattttgtttcttcatttgttttatctcgctgtgtcttactagggttttttactttgtgtagacgatg

SEQ ID NO: 36560 - DNA, 3003 bp, Unknown
  misc_feature (1)..( 3003): 2750-1469P.txt file - cDNA_ID_3097798; gDNA_ID_2936556; Annot_ID_194246
gccaggagtagcaaactcttcacatctaactaccttgatacttgacaccaacaacttcactggtttctttcctgaaactgtttgcaaaggtaggaagcttcaaaatatctcattggattacaatcacctcgaaggtcctatcccgaaaagcttgagagattgcaagagcctgatcagagcaagatttctaggaaacaaattcactggcgatatttttgaagcttttgggatttacccagaccttaacttcattgatttcagccacaacaaattccacggtgagatttctagcaactgggagaagagtccaaagctaggtgccttgatcatgtcaaacaacaacatcacgggtgctatcccaacagagatttggaacatgacacaactagttgagctggatctatctaccaacaacctctttggtgaacttccagaagcaattggaaatctcacgaatttgtcgaggctacgacttaatgggaatcagttatctggaagagttcctgcaggtttaagtttcttaaccaatcttgagtctcttgacttatcctcaaacaatttcagctcagagatcccacaaacctttgactcctttttaaagcttcatgacatgaacctgagcagaaacaaattcgacggaagcattccccgactatcaaagctgactcagttaacgcaacttgatctcagccacaaccagctcgacggagaaatcccatcacaactaagctccctgcaaagcctcgacaagctcgacctctcacacaacaatctctcaggtctcattccaacaactttcgagggcatgatagcgctgacgaacgtcgatatatcaaacaataaactcgaaggtccgcttccagatactccaacgtttcgaaaagcaacagcagatgcattggaggaaaacataggcttatgcagtaatattcctaaacaaagattgaaaccatgccgtgagttgaagaaaccgaagaaaaatggcaaccttgttgtgtggatattagtgccaatcctaggagtactcgtcattctctctatatgtgcaaacacattcacctactgcattcggaaacgaaaactacaaaatggaagaaacacagatcctgaaacaggagagaatatgtccatattcagcgttgatggcaaattcaaataccaagatatcatcgaatcaacaaacgaattcgatccaacacacctcatcggaaccggaggatacagcaaagtctacagagcaaacctccaagatacaatcatagccgttaaacgactacatgacacaatagacgaagagatatcaaagccagttgtgaagcaagagttcctaaacgaggtaaaagcattaacagagatccgtcaccgcaacgttgtgaagctcttcggcttctgctcccaccgccgccacacatttctgatctacgagtacatggaaaaaggaagtttaaacaaactcttagccaacgacgaagaagctaagcgactcacttggaccaaaaggatcaacgtcgtgaaaggtgtggctcacgctttatcgtatatgcaccatgaccgaataacaccgatcgttcaccgtgatattagcagcggaaacatccttctcgataacgattacacagctaagatctccgattttggtacagcaaaacttctaaagacggattcatcaaactggtccgccgttgctggaacctacggctacgttgcaccaggtaaatctaaatccctaaatctgattttgagcttatgaaatttaaatcactaaattcgaaattgaacttgatttttcgcaacagagtttgcttacacgatgaaggtgacggagaaatgcgatgtgtatagcttcggggttttgatactcgaattgataattgggaaacatccgggagatttggtatcgagtttgtcttcgtctccaggagaagctctgtcgctaagaagcatttccgatgaacgtgtattagaaccacggggacaaaatagagagaagctcttgaagatggtggaaatggctttattgtgtttacaagcaaatccagaatctcggccaacgatgttgtcaatctccactacattttcttagaaactgaacttctccatcaatttctatgttatcattgtgtttatctatacagcaacagtaatctctgttggcttttgttctctgttcttgcttgtgtttgcaggaaggggtgtcgactctcgtttcagcttttgttgttgttgtttgggcttctcggcctgcttcagcttttgtatgtattgggctgcgcccttgttggtctttgggccttgtttgtttttatctttgcggcttgcgtgccatgttaggccttttggtcttgtaatgtgtttggttaatggaaatctatgaagttaaaaaaatgaaaaaaaaaaaaaaaaaaaaaaaactgttaaaagcatttttagataatggtcattgtgttactcctcacatatgaacattcaaataaagttttggatactgtctatctgtatatcgccagaattagtaagagatttcttatgcatagtaggagattaaaaaaaaaaatgcatagtaggagatttgtaaagaaagaaataagtttttttttgtataatgagttctaatggacatcacgtttgcaagtgataataaaaaaatcttacactcttgtactctgtaacgtgttaaaataatacaaaatggattataataacgaaatctaaacacttataatcttgcggatgattttgtgacaaccaatgaaaccgttaatgcgagattacgatagttttttatgaaatcatgatttgtgcataaagttaagcaaatgctaaataattcataaagtgtaagaaacacgtggcagaagaattaataattcgtttgggatatttttggtatatacggacaggccacgtcgtgtcctaaacctcttagcctttccctttataagtcaatcttgtgtcggcttcgactcccaacatacacaaaacactaaaagtagaagaaaaatg

SEQ ID NO: 36561 - DNA, 1555 bp, Unknown
  misc_feature (1)..( 1555): 2750-1469P.txt file - cDNA_ID_3097804; gDNA_ID_2936556; Annot_ID_194245
gactctgttttaaacacttacttatctttgttaaggctctgttttaaacacttatttatctttgttaagggtctgttttaaggagcttattgatgtataagactatgttttaaaaatgttatggatgtaactatatttaaattacatttctttgattcaaaatataattatacaaatttataaaaataaaataagaattcagttaaaactaacgcagcggtgacgaaacgaacatagacacttgcggcagcgacagcggcatgaaaacgaacatgcacacaagttgcgtcagcggcagcggtaatggctgcagtagtggcgacgaaacgaacaataatctgcagtagagtttgccgccgccgctaccgtctgcggtggtgaaacgaacagactaatatataaaaacatatactaagcaaaaaacaaacttttggatacaactacattagatttctttacttccgtgaaacatgagccaagcaaattctgggaaaaaaaaaaatattaacagttaggccatgttcgttttcctacaacatacattgtttgtttgtctgtcagtggattcagcgaccagttacagcgacaatcgttaataattgtcgttgtgttgttcgtttgactgtcgctctagacagtcgctatatgtttaaaaaatttaattattttttgtgctaatttatattttaaaataaaattgtaatttatatatatatctgaaaaaatataaattaatatatttatttactttagttttatcaaatttaatttgactacaattaatttacgttatttgaatttaatttattttaatttaatttaataagaattagtttaatttaactagaactcaaacccatcgtgatatcgcaaagaaaaatattataaatttgtttatatgataatttctttaaaacaaatataactcaaaatgatgcatattataaatttttgtagttatagaaaagtatatatataactaaccggaaaaaaataaaagtaaatattttgacagaaaattacaatatatgaagttgcaataaaagacacaagcgagaaaaaataaccgtcaatattttgttacggaaagttgcgattaaaagacacaactgttaagaatataaaagacatttctttaagtttaatttaattgtttttaattgtttttaattgttttttaatttatatttttttatcgctaagttgttcgttttcatgtcgctagattcaacccaaatcttcttgaccaatattatccactcactggtatcatccaaaacacaatgacttccaaaacacaacgaccaatactcattcactcaacagaaaattcaaagaagaacccgtaagcacttttctatgtaacttcacaaaaggtaaacgccaaaataagtaattcgaacccacggcggggttagcccttcattatcaaggagacgactccaagtcaatcactgagtgcacatgaggattattaaatagccagaacttggatagctttatctaacaccaagagagaaagataagagagagggagtgagagtaagtaagaatg

SEQ ID NO: 36562 - DNA, 3003 bp, Unknown
  misc_feature (1)..( 3003): 2750-1469P.txt file - cDNA_ID_3097835; gDNA_ID_2936557; Annot_ID_194297
ggtatggtagtatgctctgtctcagacatgaacagtcctatatcctgcgattctgccgaatatttttgcaggctggttaaagactttggttcttatttcatgtttgatgataccaatgtgtgattttcgtttggaaccagtgatctccatattcattgagcgtttggattaatgtgtcttgaatcatgctcatcacagtgcagaaaagatgttctctctgatcgttttgggtaaaatggtatgtacacggttggtgctaagtctattgtgctcttgttataacgatgagacagagcagttttgctattgcattcttttcccttttggcattttggtaacctgctatacatatcagtcaatctcatgctatttgcatctaatcactgacaatcatgcaggtattattgttctgttctcaatggaatgttttcacatgtaaaatcactctattctccagattgtgtgatcttctatttatgtcctgacactccctggtttattatatgctttctcatattcttgtacccaccattaacttgtttttttgttctttccttgatccctcctttttattgtagccgcagactcatgaaaggaatctgcatccataaaggtaagattatattggcctctcctggagtcaaaaagaaacttttttagattgttatgtaacttatgtgcacacatgagtgatcatcaaagaagaatgataccaaatggttgcttaacctttttcttcacttaaacaaagggtttattccctctgtggaccgtaaagaaaaatagaaaaaactaaacctagtcttctctttttgctcttgggcatagttctctttataaatttgtagatccactttaactacaagtctttttatatatagggtctaaaataagattgaagttacacttttttgttagttgtttatttgtttatgtcttgagtgcttaatcatggcctaagcgtaatgatgttatagataatatacatcattaatcatttcatgtcttttcccgtatttgcctgaactatcagcacaactgttctcagcaccagtccgttaaatatctctcattatcctcatattgtttcccataaacttctctcactctctctatctttctcttgatatgtcagctactggtataaaacggtccaacctcaacactagaccggttcagagagatgcttcggctaagcaaacagctatcaagggaccttatggtaagagtccgggatgcacaacaagctgcggattaaggttaccgaggaaaacagaagtgacagcagcaaaattgatcaagcatcttggatgcaaatttgcaaaaggtttgcgtctggtggtgatgaggaagaagaaaagatctccaccgtcgaaggtttcttctttttctgggaggtctcagccaccaatcatcccaataaacaatgacagtcatcgatcagaggccatagaagactgcatacagttcatcaactcatcatcctccttcaccagatcaaactctacttcttaagtgttatcattcccaaaccttttgtctcggtcgctcgctcgctcgcgtattgtctattttacttattcgtgagagttgcatgtaaataatgtctacataaatctattatgtgacttctgttgttgtagtacgagtaactgtcttccatctttctcaatttctgtctataaatattagattttgatattcgtatttgttcatgattagttacaaggataagccacttctgttttatcaataaacgaatttcctctttctataatacatatttttctgagatgttcctataattaaaatgttcgtgtgtgacttattttatcattttattaattatgtagtaaaaatgctttagtttaaaaagtaaatttaaaatagtttatccaagaaagttcataaataaagcatggccactgatttgtttaccctaacagttagtagcaccttcagtgaacgggagaccacctaaatcaatctatgtgtgagcgtgtgtgatttgtttagctttaacgtttgatagcctaaaacaacttcttccttttgtgtagtctttttacccaattctatcatatcttttaaaatagaaaattatagcaaatttttggtcgtgttcacaatttgtttgagtgggctactaaaagttgaaatctccactaatcgtttagataatactaaatccatttgttaatgttgatccactgaaatctatatatgtaaatgaaaatcaaactgatttttagcctgagacgaaaatttgtcggcaagtgtgcgatcaaatgatcagtaagtattaagtgtgatcagtcgtttagaccaaaagacaaatttgcaagaattaaaaacatcagtacgcctaaaaagcccgtaatgtcttaacaacgtatgggcttaattctaatgtctaaagcccgtaatatcaaagcccaagcccaggtttataatacatccgacacagccaccggcaatcttcccgccagtataatcgccatggattccggcagtctcaagcctaaaaggctaaaaatattttcgtcgcatacatcattccgttctcagctgatttaaaatacaattaatctgctcccagatttgaagaaccctaaaataaaaaagagtaaaattgaaggctggagattgtgaacatggacggttactctctctctcctacctcggtaatctcgctcagatcctcccacgttcttcctcgcctcttacgcctttgcgtgttacctaaaaaggtcatcaccttcatcgtcgccggttttcctcttctcaaattcggtggatctcatttcccactgacgatcgtactctctcgattcgtatttacgcgccgtgtttcaagctatttcgagctcataagtgttaaagtctcttccttactcttcaatcaatcattcgtatcttcgattccgtgaattgaagagggaacttttctgcgattctgcgaattgaggagggaactttgttgccattctggaacaagaaatg

SEQ ID NO: 36563 - DNA, 3003 bp, Unknown
  misc_feature (1)..( 3003): 2750-1469P.txt file - cDNA_ID_3097840; gDNA_ID_2936557; Annot_ID_194296
tttgatcatcctctgtccaagctacaatctttttgtcttcacgtgtagtttcttcttcttcttcgccttctgatgacgatgaacactcgatctcggtttcgccaccaccactagtcaacctctccgatggatccacaacggaaacattcccggtggttgaaagagtttcttcatctaagctaggctcaaaggagaaaccttcagacacaagaaaggctccatctttcttgaatttctgaagtttgggagattttgcagtattgggaatttcaccatagagagttgttaaaatgactctgtctctctcatcttcactagcctgagaagagtcccaatctttcccaacctcttcaactttccttctagcgtttcgtcgaacacttcgttggtgctttaagtcagccttccttgtttcttcctcctcagatctcttttgggaaaatggtgaaaaccaattatccgttttgatatgcaaaagcttaaaacttggatgattccgaagataaaacacagagcatgcgattaacggagaagagtaaaggacgaaataaaaaaggcgtggaagaaaaatgtataggaggaagataattgcagaaacaccagaaacaactgggtgattccttacgtttctataaacgatgttcgtggaaaatctgagaattttccagaacagagttccgacatctttggcatcgattcccatgttttaaacagttcaaattctcagaacactttgagagataataacccaaagcattctgtctatggcggtttgtgttttgtcctagagaatcaaaatgcttgaaagggaaaaacaaatatggtttaattgaagaagcgaaaattgatcaataagagagaggtcaagctttcatttgaaacaataaccagtcaataaaaaatagatttttcaagggtttttttagattttcgttttggttctttttcagttttcagaacacacggtaaggacggagaagacaaaatagaaaactggtaagagagggcgggagttaaattagttgctttcttacacatgtttccaaagattcttgttttcttacacttttaaccacattttttactggttcagaaattgacccttaaagttcatggattttgcatctcatatctctttcttcaaaagattgggctatcttcttaagcccaccaagacccatcaaatgtctgtaaataacatacactattgacacttcctaagttttctagctaatccttttttttagcaagttgttaacagatttgtgtgagactattcatgattttcaaaaccaagatgaacatcaacgcttaaagcttataatagccactctttcttgttaacttgatgactaaagtcaatctttgttgctcaatcttaactgatacacacacaatcaacgttactcatgatatctaatttcactccttactccttcattgagagttggacacaaaatcagtatgacaagaaattgaggatgatctcttaagaaaaactctaaaagtaaatacacatttctcttgttgtgacacaaaaaggaaagagaagacctcatcaaggagagtgagaagatgtactcaagattaaactcataattaagccacacttgaagcaattggaactacgggtgctactcattcttaagcttcctctgacccttcataacacaaacaaataattacttttccatattaacacatcatatttctacctcttcaagaaattaaaaccagacaaaaacgatcaaacacaacattcaaaacatcaaatttcgacaacaagccagttcctttcaagaaaacactaaccttccgtctcatcttcatcgtcatcttcttcctccaccgcatcaacaccgtacctcgcattcaagaactccacagccgcaggagtcagaacaagcttatcagcgttcaaaatatcaaacagattcagtgtcctaggcgtcaacatcctcaaggttccaatgttcctactcgatttcgccacattctcatccacatcaatcatcaagaacatagctttctccttgggatccaatccccacctttgcatcgcagctaagaaatctttagtcttgggcttctcaaacttctccccaaattcctccaccactatcgcaccaccttccgcagatgccgcactcgataacgccgtagatatcgctagcttcttctccttcctattgattttaattgaccaatccttaggtcttggcccaaacaccacacctccaccgggacgtaacggtgttctctgagatccacgcctcgcgtggccagttttcttctgtgagtaaggtttaattccaccaccacgaacttcaccgcgagtcagtgtggaagcagtacctcgccgcttgttattcaggtccgtcacgatggctcggtgcacaacggcacgcgcggtatcctccggcgccgctttgaggtctagatacgtctctccgaccttctctccttcgaatgatagaatcggtagagtcgctagctgggaagagacagaaagcggcttcgagactctgccggagccgagttttgaaacggaaatgtaggttttagggatttggtgagaggaggataaaaagagagaagatgagaagaaagatagcgaatttggtgctgttgcagaagaagccattgttgttccctgacctgacctatcacaacgaagaagaagaagaaagactgagaaagtgttatccactcttcaaatgcctatcttgtgcttggtgagaatttatgcatctgtttggacataaggatataactatcctgttcatgaataactccagctgtcgctagtaagaaagagtcaaactccaaaagtcaaaagcctcttatatagccagcaggttttttgagacataaaactctgtgataaaacgatgatagttgatgatagctgagactttgatacagatatttgagatacgagcgcacgttagctaagaccaccgcgtaagccaccgtctcgtcttgaaacgcaccgtattcatg

SEQ ID NO: 36564 - DNA, 3000 bp, Unknown
  misc_feature (1)..( 3000): 2750-1469P.txt file - cDNA_ID_3097844; gDNA_ID_2936557; Annot_ID_194295
tcccggactcttaccataaggtcccttgatagctgtttgcttagccgaagcatctctctgaaccggtctagtgttgaggttggaccgttttataccagtagctgacatatcaagagaaagatagagagagtgagagaagtttatgggaaacaatatgaggataatgagagatatttaacggactggtgctgagaacagttgtgctgatagttcaggcaaatacgggaaaagacatgaaatgattaatgatgtatattatctataacatcattacgcttaggccatgattaagcactcaagacataaacaaataaacaactaacaaaaaagtgtaacttcaatcttattttagaccctatatataaaaagacttgtagttaaagtggatctacaaatttataaagagaactatgcccaagagcaaaaagagaagactaggtttagttttttctatttttctttacggtccacagagggaataaaccctttgtttaagtgaagaaaaaggttaagcaaccatttggtatcattcttctttgatgatcactcatgtgtgcacataagttacataacaatctaaaaaagtttctttttgactccaggagaggccaatataatcttacctttatggatgcagattcctttcatgagtctgcggctacaataaaaaggagggatcaaggaaagaacaaaaaaacaagttaatggtgggtacaagaatatgagaaagcatataataaaccagggagtgtcaggacataaatagaagatcacacaatctggagaatagagtgattttacatgtgaaaacattccattgagaacagaacaataatacctgcatgattgtcagtgattagatgcaaatagcatgagattgactgatatgtatagcaggttaccaaaatgccaaaagggaaaagaatgcaatagcaaaactgctctgtctcatcgttataacaagagcacaatagacttagcaccaaccgtgtacataccattttacccaaaacgatcagagagaacatcttttctgcactgtgatgagcatgattcaagacacattaatccaaacgctcaatgaatatggagatcactggttccaaacgaaaatcacacattggtatcatcaaacatgaaataagaaccaaagtctttaaccagcctgcaaaaatattcggcagaatcgcaggatataggactgttcatgtctgagacagagcatactaccatacctaatcagagcatggttcaaacaataaatcaacagtaaagtgattcacattagaacattaaccctaagaacccaatagcttgattcaagaaactgaatgaaggaaagaaatgagagatgttttagaaacatgtacaaaggtacagaaggggtaacaccgaatatcagctagaaagaagcaacaaatcaattcacaaacgagacatacatatagacataacatatacttcaccaaattcatattttgtcatcagccatttcctggtgttctaacaccaacaaatctgatgataagtaaagccttagaaacgccgcacacttgtgaaattcaacaactttttgccatcctcaacattcacggcgataatcacggccatagctgtagtttggcctagctccgaaatcactctcagacctctctgcagcagctctctcttcctctaagctcaatccacccatcgtcttctgcaactgcctgtgatcataaggagagtaatcgactggtgccgatggaccattaggcactccgtagctagacaatcgcgagcccataggtggagcttgtggcttgtactcggtaaccagaaaggcatcaacgggtgctgagggcccactaggcggtggaccgtagttagaaaaccgaggaggagctaaaggaggctgcttgtgatcaatcgatgagaaggcatcaacgggagcagatgggccacttgggaggccgtaattggaggcacgatcgtacattgaacgtggtggaggaggcggataataatacccggaatagtagtgatcagtgaatgcgtaaggagacggagacggtgactgtgagaattctctgtagtcacgctgaggagatggagcggtgatcggtgcttgaggaggaggaggaggaggagggctaggggagtaataatggtttccttgaggggcagaatagtaatctagtggttgagattgaggacgtggcggaggatgctgcggtggagggattggtctgtctttgatcgcgagcttcaaacgaatcttcccctgtggtcgacccgatggacgaaccagctcgagcgagttgatcaattccggaatcattgacccgtccgagtcaatcaaacgagctagaggaaacctaaccgatccgacgagggttttcgccagatccgaagaattggaatgaaaaacctcgatgttgaggaccgattcgtggacagatcgggtgagaggaagagtaatccgctcgttccacaccggtttgatggaggaggaatcatcggagcgggtggagagagggtggtcttggtcaagatacagaacaacgtagggtttcaggtcaccgttacgccagttgacattcttcaggtgcttggcagagacgacggtgacaaccaggtcgagtggctccgacgaagtcatgaatacggtgcgtttcaagacgagacggtggcttacgcggtggtcttagctaacgtgcgctcgtatctcaaatatctgtatcaaagtctcagctatcatcaactatcatcgttttatcacagagttttatgtctcaaaaaacctgctggctatataagaggcttttgacttttggagtttgactctttcttactagcgacagctggagttattcatgaacaggatagttatatccttatgtccaaacagatgcataaattctcaccaagcacaagataggcatttgaagagtggataacactttctcagtctttcttcttcttcttcgttgtgataggtcaggtcagggaacaacaatg

SEQ ID NO: 36565 - DNA, 3003 bp, Unknown
  misc_feature (1)..( 3003): 2750-1469P.txt file - cDNA_ID_3097858; gDNA_ID_2936557; Annot_ID_194292
ttttcttttctggcgggatttcgccattctaagctatttggttcccgccaatgcgctagtgccggcctcaatcgttttaagaattggatggatatttttggtcattataaaagttagagggttaatttgtattaataaaaagaagaaaagttcatttcgaattgtagtgaaagtttagggttttatttgtaatatttaaaagacaaaaacacgcgaatccaaaaccgactttgccctagttaaaatctcgtcgtctccttcgtgttcgagatttgatatcgactaatcgaatcagaggataagagaatggctcacagaatactgagagatcatgaagccgatggatgggaacgctccgatttcccaatcatctgcgaatcttgtctcggtgacaacccctacgtgcgaatggtgatttctcgattccttctctcaaacattcttggattttgctattgcttgttttgtttcaatggctcctgaatcttatttccggatctcatctcttaaccagtctcttgctcgttgatgttttctgtatattggagtggttaacttagtaaatatggttttagggtttagcttgttatcaaattcatcgaaaaattgggttttacatccaaattcgtttagttatagttggatttgattacagctgcggattctcttagctttcagctgcaattttgttttctgaaaatctcgatgttttgatttctgattgacgttttatctgttgatatgtagaccaaagcgaattatgataaggaatgcaagatatgtacacgacctttcacggtgtttaggtggcgacctggccgggatgctagatacaagaaaaccgaaatttgtcagacttgctgcaagttgaaaaatgtttgtcaagtctgtcttctggatcttgagtatggtcttccagttcaagtaagagacacagcactcaacattagtactcatgactctatccctaaaagtgatgtcaacagagagtattttgctgaagagcatgacaggaaggtatgatcatgttcacactcacgattttatttcagcatttgttggtttgagaattttgaagacttactctagctttctcatggtggcttatctaagtgattttgctttttctgttatgtaggctagagctggactggattatgaatcttcattcgggaagatgcgacccaatgatactattttaaagcttcaaagaacaacaccgtactataagaggaaccgagcacatgtttgtagtttcttcatcaggggtgagtgtacaagaggtgctgaatgtccataccggcatgagatgcccgaaacaggagagctatcccagcaaaacataaaagaccgttattatgggtaagcttttttcttctgtatgtttgactttgttgacgtttagttccgttctttattggttgtttcgatacctcccctaaggagtgtaaaatttcatatgtttctgccatagtactattttctccttgatcattcataatatactcgatatttgaaagcttctgatatgtgaattcttggactgaactatgctatgttggctctcatgtagtcttgttacatagtgtcgtttccagttttagttctctttgtaatgtattagtacttttgcatttattcttgttgaagagtttgttttaactgtttctcattttcttttacacgttttcagtgttaatgatccagttgctatgaagttgcttggcaaagctggtgagatgggcactttggaatcgccagacgatgaaagcatcaaaaccctttacgtcggtggacttaactcgagaattctcgagcaggacatacgagaccaattctacgctcatggagaaattgaatctatcagaatcttggccgataaagcctgtgcatttgtcacatacacaagccgtgaaggtgcagagaaggctgcgcaagagctctccaacaggctagtcatcaacggtcagaggctaaaactcacatggggaagacccaaacctgatcaagatggtgcaaaccaacagggcggtgtggctcatagtgggttactacctcgagccgttatatctcagcagcacaatcaacccccaccaatgcagcagtactatatgcacccaccaccagctaaccaagacaaaccttattacccatcaatggacccacagagaatgggtgcagtcatttcaacccaagaggctggtggttcaagcactgagaacaacggagcttcatcttcttcttacatgatgcctccacaccagtcatacccaccaccaccatatggatatatgccatcgccttaccagcagcagtatcctcctaaccatcatcatcaacctagtcctatgcagcactatgccccgcctccagcagcttacccgtacccacagcaacctggtcctggatcaagacctgcaccgtctccaaccgcggtctctgctatatcacccgactctgcacctgctgggtctggagcaccttcgggatcctctcaacaagctcctgatgtttctacagctactggttcgtctcagtagagaagaaatatcgcttaaaaaatgtactgcaagtttcccgctattcaggacgaaggttttttgtattctgaatgaatcattttcttctgctttttaaagtacttcggaatgtattgtttcttcaaaacggttgttaacgaaatctatcagttatagaggcaattggttccatgaagagtctgcagttattggccaatttcataaagaactttgagaatattattatcacaaatttcacatttgctcgaatcgtttatttttttttgagaattctactagtaatttggataaatgcaaataatctgggaaatacaattgggccttttgtgagaagaaaaatcgtataaagctgggccggacgccaaactgaaaaatgtgatggaatttttaaaattcaatcgcgtccgactttcccgaagcttctttctaaatcctctctacatatattccccactcatatatg

SEQ ID NO: 36566 - DNA, 3003 bp, Unknown
  misc_feature (1)..( 3003): 2750-1469P.txt file - cDNA_ID_3097863; gDNA_ID_2936557; Annot_ID_194291
atgtgttacaatggttgcatctgttagggtgcatctacgttatatgggccacacaccctcagtggctacattcaagagttcaagaaactctccaaatctctcgtccttgatatgcctgttcaaccggggcctcaaccgccggatctccttgacaagcaactaagcttcctcacaccagtcatgatggacacaactcctagcggagacagtttcggggatgttatttcggatgttcctaaaaacttgtctttgaagagaggaaacggccaggtgaccgttgtattccggtcagcctgccctagaaacgatctactgacagaaggtatcatcacccaaacccaatagaaaaaataatatttgagttttttttttaatttctcgagtaatatttctttgaaacaagttactatagagactatacttgtgcttgcctgtaagcttttctgtccctttttctctaattctgtgatgaaggataataaccttaaccatggagcatagtcgcgttgatgcaaaactgtgagcttttaaaagtgaaaatattgaaatactaactattcttgctgacgtgaatttctcatgggttattattgctcataaatttctaaaattgcatatgcttatgtctacttcttagtgatggatcctttcaaaataagtgacttgtcatactttgatgctaagaagagatactatgttcatgacagggacgtttacactggtggagagactagagcagaaggacaagacttggaccccggtttatgacgacgatgatctatgtctgaggttcaagtggtcgaggcataaaaagctgagctcccggagtcaggccactgtggaatggagaattcccgagtctgcatcaccaggggtttataggatcacccattttggtgctgcaaagaagctttttgggtcagtccatcatttcacaggctcttctagtgctttcgttgtaacataaacaagtagaaaccaaagtagatacatagtaaacttgtattatactaggtttacctgatgcactgtcttgtgcacttgcatgtactacacaaatgtagccagagagtacagaatggtgtcaaagaactgatgttgagaagtctaatggaatccaatataccttttcatgtcaatgttcacatacagtttaagtatccaggtataggcaactacggttgtgttagtgtataaattatcttgcaaagtggagttagtttgttgatgaatggtcatagtttcaagacaactaattttgctgaactttgttatcataaaacataataagtcaagaaaacaactgattctagaggggggatacaaaggaatctcaccaaaaaaaaacaccaacattgtcaataaatcttcaacattttagaatgaagagaaattgtggatataaaaggggtcttagggattagtgtcttcttcttcttcaatcttaggagccaagtagtaacgaatgtaacccatctcagcaaccttatactccacaaccactggcaactccgacgataagctgattgtcactgtgtctgacaatggagttgcctttgtgaaggaattcatgtacctcagggcaaatgagagagacactggctccttcatctctatcacaattgcatcttccggctgcaatacacaaaacaaaagcctcaatttaacatgttactccaatgaaacagccgtagaggatttgtcaacagtatcataggtttatgcaaagagttagacatgttaataccttgtctacagttgtgttctgcctgagcacaatgttagcggttccaatgtcaccggcagtagaaaacttcacgccttctttagtcacagagatcacaactgcaacaataacatcaggtcaatctctatttagactaaaaaaaacaacccagattgagaatagaaacaatgcagcaatgtacctgtgtcaccaatgctactgagatctttgcaaatcctggaaaactcattggaaggcatcctcacgattgagtggtactcagcatcaggtattcccagatgttcactgtctatatccatcaacttcatctcaaaatcagcaatcttgtcttgcgctgtaaatcatccaacacaaaaccaagttaaaagcagctaggtctaaaccaagtttttgaaacttgaaactatatacaacccctaagagaactaaatcattctattccatcaatcattccaccatttcgtacaagcttaacccatagaaaccagaaattagagtaagtcagtcaattagcaaataaacttactggggctctcaaacatgaaggtaacggtgtcgccgccgtcatcagccttgatggtgatgatgtcatcatttccggcgcatttgagcatcttcgacatgttgccgagattcatccccatggagagattcctgtcgcatctgtagtgttcgaagccttcggatcttagcaagagagacaccagagcaacgtgactcgaatccatagcttggagtgagaacccagtgctggagcagtcgaaattcgcatcgttcaccagatctttgattgattctagaaccttcttcaacaacgagccctgaacaagacgtagctccaacatttcgtcgtcttagatattatcagagttcacaatgagaatcgtttgcggctattttggaaagtggattgacactataaggtcaaggagtccgatttataagctttttcttttctggcgggatttcgccattctaagctatttggttcccgccaatgcgctagtgccggcctcaatcgttttaagaattggatggatatttttggtcattataaaagttagagggttaatttgtattaataaaaagaagaaaagttcatttcgaattgtagtgaaagtttagggttttatttgtaatatttaaaagacaaaaacacgcgaatccaaaaccgactttgccctagttaaaatctcgtcgtctccttcgtgttcgagatttgatatcgactaatcgaatcagaggataagagaatg

SEQ ID NO: 36567 - DNA, 3003 bp, Unknown
  misc_feature (1)..( 3003): 2750-1469P.txt file - cDNA_ID_3097868; gDNA_ID_2936557; Annot_ID_194289
agttgacagaaatggataaagatcatgtatgtaaatcccctggtactctctgtctacctttaagttgagaaaaatctgacaacggattgaaattaagatctagtgttttcagtttcgccgtacttaaacctgcaccaccaagaaacacattcataagtgatgttataagtcagcagaggtaagcacttccataaaacaaagcaaaaaaaggcagccactcactatgactagcctcagagtcattgacaccattgaaactgagatccagtacttccaaatctctgaaatctgttaaacctgcatctcaatgtcacacttagtcagtcatctgacatcaattctttagttctctcttttcttttggaacaacaaaactatataaaggtttgttgacatattttaccttgagaagataagaagctgaaactgttgtccttcaagtttaacactctcaagtttgtcatgtttgaaagttctgccacaccagaacaagaagccgtcaaaatccatctccaattgaattatatacaaaaatgtcaaaaagagaaccaaacatatagaagaaatacataaccttgaggaggaaagacaccttccatgtaattagactcaagatgtagactcctaatcgatgtcgcagcatttaaaaacgggacgatactgttgtcgaacatattatgggagaaatctaaggtagtgagcttatctagtgtcccaaagctcttaaaacctgaaaacaaaaatgcaagggaaaaaaaaaaactaaaattctctttcaaacaaactgtcgaacactttatgtgcactatgtaatataccaaattacagaatcaaactcacgcgccctacccttatttcacacaatcatcaagatcttatattgaactttatacacattcttattcgataaatcagctatggctgatcttagagacaaaaccatacggtaaaaggactctgtttctattgttgccgttggaagagattttcgtgaggttgtttgtatttggttaaaaccggtttaaacctgaaccgctatttcttgttgttggtatccagacattaattagtgggaaaattgagaaatgttcggttagagagacgtaccaaggaagtgatcagacaaattagtgaaccaattccacgaaagattaaggctttggagttgaggaaaactatgaagcaaagacagatttaaagaccgagtttgcgactcaaatgcgaccggtacgagtctatccagtgagagaccgatgacgtggccattaatagcatcactacactttactctctcccaacggcaacaatcaccttcatgatgagtccatgacttgagaatactaagtccttcttcttcttcttcttcggcatcaacgagattcttgagatacgacttgagctgcaacaaacccatccgttcagtttccacacagcttacacatcctttcatttggaattgaattatcattgttattgttatgaacaccaaagttatatgcttcttcggtttaacccaccaccttcttctctcgtctgttctcattttttttttctctgttttttttttgctagaaaaactgataatttgatttgatgcccaaagtttaaagagattgcatagtttgccaagaatagaattgtaagatgtgaatataaactgtacgagtccacgaaatactcaacccatattggacttttgtgttcaactccaaaatgagaattgaccgatgagtccatatccatcgaacgtatgcatgcctaattaccatccaccagtagctatcaacatctctaagggacctttgtgttttgttgcgtaaattaagtaggagagtcaaagctatcctattgatatcttttacgttttttttcttctctattttgcatttatgtttacgtgtaattttaaagatttaaatttatactttacactatttttttagtttataaaagtttaaaatgataatacaataaaaaaaatttaaaataaaaaattatatattttcgtcaactatttagtatttactcatataaagtttattaaaagtattactattttatatatgtaggttttgcatttggggacaaatattcaatttcaggtaaggttaaagctcaaaagcctgatccaactataagttttgggccaagacctgatatgggtttggcacctttaataaagtcaaatgagtcgtcatcattcttgggggacgatcaaaataatgaaatgcatcatctctcccaccaatttcattactttgcttcgactctcagactctttctctcattcgcctcactcatcatctctcactttctcgcatcatattcctttcttcttccacctgactcatatctcctgtttctcttagaagaatcccgtactgagatcaggttagattttagtttctcttctgttgttttgttcttgcccgattgcatgtactcagcatcttgctgattcaccatggctatcttcaaatttctgttttattttgcttgtaacatatatgggggaaaagtgatcttttgtggctttttaggtgtttttagtatataagtatatagttactaaactttattcagtttcctaatgaagaagaatcacatgtattagctgaactgaatttccggatttcatttttttttttttatggatctcttttggcctgtgattagtcttctcagttcggtgtgctcagggaattttttggtgaacttctgattgagaatcgggaatgtcaaactgatcttgtcacaaagattattcatttccataaaaatattaatttgttggaccctatagttatatttatttacacttgctttgtcatgtctttggacggagaatctattaggagattagatacaatctattgatagtaactagtaatttacataattttcagttttactttcccaaagattcagtgttgtgtatgtcagtaacagtgtttttatggcatagaaggtaatgcgaagtggttgagagatttcactatgatg

SEQ ID NO: 36568 - DNA, 3000 bp, Unknown
  misc_feature (1)..( 3000): 2750-1469P.txt file - cDNA_ID_3097882; gDNA_ID_2936557; Annot_ID_194285
atcttactggtttagttgggctttttcttgatggcaacaattttactgggagtcttgaagagggtttattgaagtcaaagaatcttactcttttagacatatcagataataggttttcgggcatgcttccactttggattggtaggatatcaaggctttcctacctatacatgagtggtaatcagctaaaaggtcctttcccttttctacgacagagtccttgggttgaggttatggacatctcacacaatagcttctctggttcgataccaaggaatgtgaattttccatctctcagagaactaagactacaaaacaatgagtttacgggtttagttccgggaaatttattcaaggctgcgggattagaagtgcttgatttgcggaacaacaatttttctggaaagatactgaacactattgaccagacatctaagttacgtattcttcttctacggaataacagctttcaaacttatatccctgggaaaatatgtcagctaagtgaagttggtctgttagacttgtctcacaatcaattcagaggccccataccatcatgtttcagtaaaatgtcttttggtgcagagcagaatgaccgtaccatgtcacttgttgcagattttgacttctcatacattacattcttgccacattgtcaatatggatcacatcttaacttggatgatggtgtcaggaatggttatcaaccaaaaccagcaaccgtagtggattttttaacgaaaagcagatatgaggcgtatcaaggtgatattctccgctatatgcatggtctggatttgtcgagcaacgaactatcgggtgaaattccaatcgagattggagatcttcagaatatcaggtccctgaatttgtcaagtaaccgcctcacaggctccataccagatagcatttcaaagctgaagggcttagagagtcttgatctatccaacaataagctagatggaagtatccctcctgcgctagccgatctcaacagtttaggatacttgaatatctcatataacaatttatcaggtgaaatccctttcaaaggccatcttgttacctttgacgagaggagttacataggcaacgctcatctctgtggacttcctacaaataaaaattgcatctcccagagagtccctgagccaccaagtgtgtcaacgcatgccaaagaggaagaaaatgaagaagaaggtaatgtgatagacatggtgtggttttactggacttgtgctgcagtctacatatctacatccttggcattgtttgctttcctctacatagactcacgatggtcccgagaatggttttatcgtgtagatctatgcgttcatcatattctacagttcaagcgttcctcagtctgcaactgattctgtggattagccaaggtatacaccactggaataacacagtcttaaaatgctttcttagttgatccaagttagatgagaaaaagcttttgtatacaaaatatatgtcttcgatgtcaaatatatacatgataccagtttcaatttctaaacattatctcataatatttgggcctcaggagcccattatagcccataaaacgcataacggctgaatagagtcgtactgtacttgaaattgaaaggcatctactagtagactctagagttttctggattctgttttccaatcttttcatcgttttcgtgtgaagtttaaagaagtttgggacccgtaaattctagaagctctggagatttcttgttcaccactataaatacatcatccgagtcaccagctttgctcagaagtagaaatcgaactcgccggaaaatcgtaattagctatctcagcattccaaacatctctttcgctttcgaaatcaaatcgagaatgtcgcttattccaagcttcttcggcaacaacaggcgaagcaacagcatcttcgacccgttctcactcgacgtttgggatccattcaaggaactgcaattcccgtcgtcgctctccggagaaacatcggcgataacgaacgcacgtgtggactggaaagagacggcggaggcgcacgtgttcaaggccgatctgccggggatgaagaaagaggaggttaaagtggagatagaggacgacagtgtgctcaagatcagtggagagagacacgtggagaaagaggagaagcaggacacgtggcatcgtgtggagaggtcgagcgggcaattctcgaggaagtttaagctgccggagaatgtgaagatggatcaagtcaaggcttccatggagaacggagttctgactgtgacggtgcctaaagtggaagaggctaagaagaaggctcaagttaagtctattgatatctctggctaaagccaattagcttatgggtttcatgtttatgcgtaaagactcttctgattatggctcttgatttgaatatggctctgtgttttggtaatgatgtattataactgttaatcctaataattaagcaaggcctttatattctcgtttcaattgctttttctgaagattttagccgtaaattcgattttaactcggatgggaccaactaaacttaagtttaaaggttgaatttttaatttagatatgcaatttgcataatctgatcttagttttggtatgactgatttgtaacaaagtcttataacaaaaagttgaaatttaatgaaattatttcttccgtggtaaacaaaaaaaaaagaatctcaaaattcgaaactaaataaaagggagtttccgttttcacctcttgggcacaaaacccgcaacgtataaggaaaggaaacagagaaatacagaaacaaaatatataaaaaaaacatttgttccattctcgatccttccggcttgctcaaaaggtaaaattcgattttctagggtttcgatttgctgctttttgatctcattgacgatgattagttgtagtttcttcgatcgatgttgacgtgaatgtgtatatgcgtaggttgatcagacgctaggatttgagaagcaatg

SEQ ID NO: 36569 - DNA, 3000 bp, Unknown
  misc_feature (1)..( 3000): 2750-1469P.txt file - cDNA_ID_3097885; gDNA_ID_2936557; Annot_ID_194284
gtggattagccaaggtatacaccactggaataacacagtcttaaaatgctttcttagttgatccaagttagatgagaaaaagcttttgtatacaaaatatatgtcttcgatgtcaaatatatacatgataccagtttcaatttctaaacattatctcataatatttgggcctcaggagcccattatagcccataaaacgcataacggctgaatagagtcgtactgtacttgaaattgaaaggcatctactagtagactctagagttttctggattctgttttccaatcttttcatcgttttcgtgtgaagtttaaagaagtttgggacccgtaaattctagaagctctggagatttcttgttcaccactataaatacatcatccgagtcaccagctttgctcagaagtagaaatcgaactcgccggaaaatcgtaattagctatctcagcattccaaacatctctttcgctttcgaaatcaaatcgagaatgtcgcttattccaagcttcttcggcaacaacaggcgaagcaacagcatcttcgacccgttctcactcgacgtttgggatccattcaaggaactgcaattcccgtcgtcgctctccggagaaacatcggcgataacgaacgcacgtgtggactggaaagagacggcggaggcgcacgtgttcaaggccgatctgccggggatgaagaaagaggaggttaaagtggagatagaggacgacagtgtgctcaagatcagtggagagagacacgtggagaaagaggagaagcaggacacgtggcatcgtgtggagaggtcgagcgggcaattctcgaggaagtttaagctgccggagaatgtgaagatggatcaagtcaaggcttccatggagaacggagttctgactgtgacggtgcctaaagtggaagaggctaagaagaaggctcaagttaagtctattgatatctctggctaaagccaattagcttatgggtttcatgtttatgcgtaaagactcttctgattatggctcttgatttgaatatggctctgtgttttggtaatgatgtattataactgttaatcctaataattaagcaaggcctttatattctcgtttcaattgctttttctgaagattttagccgtaaattcgattttaactcggatgggaccaactaaacttaagtttaaaggttgaatttttaatttagatatgcaatttgcataatctgatcttagttttggtatgactgatttgtaacaaagtcttataacaaaaagttgaaatttaatgaaattatttcttccgtggtaaacaaaaaaaaaagaatctcaaaattcgaaactaaataaaagggagtttccgttttcacctcttgggcacaaaacccgcaacgtataaggaaaggaaacagagaaatacagaaacaaaatatataaaaaaaacatttgttccattctcgatccttccggcttgctcaaaaggtaaaattcgattttctagggtttcgatttgctgctttttgatctcattgacgatgattagttgtagtttcttcgatcgatgttgacgtgaatgtgtatatgcgtaggttgatcagacgctaggatttgagaagcaatggcgaatagaatagatcatgagtacgattacttgttcaagatcgtcctgatcggcgattccggtgttggtaaatccaacattctctctcgattcaccagaaacgagttctgtctcgaatccaaatccaccattggcgtcgaattcgccacccggactttacaggtcatctctcttctctcgctttctctaaatctagacaatttccctccagatcaatttggtgtttaatcttagattgtgtcgtcgcatttgcatcctctgatatttgaacaggcatgtgattgttagatctgaagatcttatgttatgaaaatgaattctcgttaggggtttattttaatgtaattgtagcaaatgaaatggctcgtctttgttcatgcttgtatgtgtaatcttgactaggttgaaggcaaaacagtgaaggctcagatttgggacactgcaggtcaagagcgttatcgagcaatcacaagtgcttactacagaggagctgttggagctcttcttgtctacgacataaccaagagacaaacttttgagaatgtcttgagatggttacgtgagctaagggatcatgctgattccaacattgttatcatgatggctggaaacaaatcagacctgaatcacttgagatctgttgctgatgaagatggtcgctctctcgccgagaaggaaggtttgtcgtttctcgagacatctgctttagaagcgactaacatcgagaaagcgtttcagaccattttgtctgagatttatcatatcataagcaagaaagctttagcggcacaagaagctgcaggtaatcttccgggccaaggaacagcgatcaatatatcagattcatctgcaactaacagaaaaggatgctgttctacctaattacaacaatccaactatagtgattactaatcaatcaatcacacgttttgagttttctcttctgatctcttaccagttcgtttcttcttttttggtttaatttcagcaagtatagtatacctttttctttccgggtctttgtttttccatatcgtattggatttatgttacaagattttgcttagttgtattgaactgtgatcattcacaccattttctgaaaaaagaaagatttttttagtatcttgatttaaaatctcttgaagacataagtgtgaatgatttccttaggattagtttttggtttggccagtttatatgctctttgatcattgtaatagtagcagccaaagtggtctataaattgttggtcaacctcttcttggctttaatgggttgtaatccttttaacttttttcataatttcaaatcttgtttctggtttcaaaaatcaaagcgaaatatactaaaatagggtcactagggaggtggaagagggtgatg

SEQ ID NO: 36570 - DNA, 3003 bp, Unknown
  misc_feature (1)..( 3003): 2750-1469P.txt file - cDNA_ID_3097890; gDNA_ID_2936557; Annot_ID_194283
gaccttccaccattacgactagttgtcacgatgcaatgaatgtaagtaaattggttatttgtttttttcttaactttttaactttatttcaaattccaatttaagttcaaaagttcaaagaacctaaaattaaacgagaagtgttgcagcaaaaaaaaaaaacagaaagtaaatgaccacgtaagtacacatggatgtatcgtaggcctaggtcgaggtgcatgccaattgccaccatgcacactaaactttggatatttctactaaaataataccaactttatcaaatccatatattaattgtaaggtcatgataactcatacgctatattccaaaaacagaaactgaatgattttgtcacctaccaaatgcatgattctagcaccttcagtattggactattgggagtcaattcaattacagtgattttggttggatcggtgggtacacgaacgagagggcccatttaatcctctccatttccattttaatgagatttgatcagtaacactcatcacaaatatcttattttagtttctgatgagcgatgatggtcttattcacacaatgctatttactttttcccaaactcatttttttccttattgctagatcatgagcaaaactattgattcatgattgtagtagcacttaagtgttgcgaaaccaaattaaagatgaaaaaaaaattgtaggtggtacatcaattaatgtttgcttttaatagggtggatgtaattaatgaagtactgattttccatgaagaagacaagccaaatgagagcttgagatcttgaaaacaaccaatagaagagtactgcctatacatgacatgagcatgataaaatgtttttgtttaaagtacggaatttgatgatcaaattttttgttgttgatcaaaacgtagaaacacaaactatatatcgatcgcccccgtgagtagtacgtattattatttcaaaagtaaatgattttgcagacttgcagttattcatttataagcgaaacgttatcttatgcaatgtttacatttgcaacaccaattagcttcttttttttacagttgagacttgagagacacattaaagcttgtcatcgttcactggagagagtagagtgtgtgagagacaaagtgacctaacttcactgcaacagtagtcggtaaatatccaaacataagagctacgatggtaacacgtgtacggtggaggaaaagagagccctcagattccgttataaaggaggtgagacccactcgccggaatggaaacaaaggagaaacgtagaggtaaatggttgggccactgcttcaccaaaaagccttttctatcttctttttatttttgttttgtggcttttaacggttaacaatataactcctcattccaagacaattacgtgtcctctgtacggctttttcatttttcactttctacttcatagtgactttagggaggcctcaatttttaattactcgaggattatttaggtaatcatgaatgtaactacagctttacaggtaattaaacagatgagatttagttgcgtgaaatctagctgatctggtgcttatatcaaatccaattgatggagacagatttggacttaaattcatgattgtatttgtaatcttatatacgttatagttaaatttctttctctccgtacgtactctaactataattattattaaatgctgaacgcaatgcttttgagtgctgagaatctttttggtctgattcaaaaatgatgtattagtactctgaattcaatcttaacttctgcaacgaatcaatgtattaatttataggagatccggataaaattatggatatatgcacgctacttctttcatttttaattaggtaaatggttataactttattttatatatcaattaaatgattttggtatgagattactagtacactttctttgcaaatgttttaaacacgacaagacaaaaatattacaagcatattttggtaaaaaatatcataagctttcatatcaaaatcattagttatgatgttagattttttttttttttttttaacactacaaaaagctctggtcttaatatgttagaaattttagtccaaaccagcctacagaggatttagctaaacaattcccaagcaccttttaagtgttaaccgaaataacgtaatatgatgttaaaggttacataaaaacaaaactaaagaattttcatatgaaaagttaacgtacgtgtcttagtgtaacctaattttagttcacagtatataaattctttaatgagatgatcgcaaaatcgctgtatacaatttcgtacttaattcgttagtcttgaaaagttgacctaatttagatcaaattaaggttaactacaataaaaatttaactaacgtaatgggattctttaaaattaaaaaatcgttgattagatagatattttatctttaagggagacacagagacaatttggacaaaaaaggtcttcctgagaaagaagtggaccacaatcgtggcgcgaaaggaacttcctcctcccctctgttgccttgtcattgggccacgtatatctccacctgatcgtgatgcttacgtggtccatttctagatactatagtgaccagatcaacggtcaagattgattctaatttagacgaaagaccaacacgtcacgtcgctagagtaaaagattttttgaaggcggagggagaaaaatcaaaagttaaaagtaatttgaaaacgaggaagagaaaaaggaattttaaaatgtttaatgaagcggtaggccgcatgggtatataaatgggcacgctttgtaacgtgtaacgatgatatttattcaactgcgtggtataaccaaaaaaaaaagaaacactattcgactctttttttgtttttgtaataaacataaaataaattttggagagagatatttcgtcggaaattaattgacgttcaaaagattcgttaccggaatatttagtagaggcggcgatcgagttatg

SEQ ID NO: 36571 - DNA, 3003 bp, Unknown
  misc_feature (1)..( 3003): 2750-1469P.txt file - cDNA_ID_3097910; gDNA_ID_2936557; Annot_ID_194277
ataaggtgtaaaactttgagcaggagttccaataattaatcctaattacataatagttgcacattacgcaaagccgggctagctaagagtacaatttaaacttaaactatttcattcccttgccttcaccatttccacttagtagttattttggaagcattcactatatagtagacataagcagagagacactatccctctctttgcttccctttctctctctctctccatctctctagatcactatctctccttctggctcaatcaccacaaactcacaatcaaactaaaagtaaaataaaaccagaaaccctccatctgagtcagaagctctcattctctccctctctcttctgcaacacaaagatggacgagaagtggaggctgtcgaaaaaggatgcattagctgcgtcgtgttcatcttcttcaacttcatctaaatccaagttctctagaagcttctccacaagcgcttcctcctcaaaagctcctgcattcgtacggagctcatccaccaaatgctcagtgccttcatcttcgtcgtcttcaatctcaagaagttcatcgaaaaaagagaaagggtcaataacacaaaagtacagtagcttggccaaagaacagaagggaaggttttacatcatgagaaggtgtgtggctatgcttgtatgttggcataaacatgattcctaggtagatatagatctcatgcatttttattctctttttttgaatgattagatcagtttgattctctactctaagttgccacaagtttccatactagtacattgtaagaagagattcttttttgataatatattactattaattttgataagacagagtcatgtatacagaggtataaataatttaaagtgtgtcgtctgatgaagaaaaaaattgaaaacatcgaacgttttttaaaaaagtgaaattatatgccacaatctggagggtcgatgtgtcgagacgtacaattattttgttaggattaaatcgaatagtcactttcattgtctggcaaaaataatgaaaacaaattcaataataactaccaatgataaatttattttggtcaaagatctgaggtttcttttgtttccggtcaacagatctgagtgtttttcacatacttatttactaatttatttgtcgtcatatggcttttgcaatgtttatgctgtttttatagccgtgattagacttggaaacaatatcttaatggggtctagttaatgtcatggatttacaattatgatgatgatgatgatgataataatctggtcaataaagttgcatcatgctagtagattagaaaattcgcctacaccacaaatattggaatcgtaacttctttttccatttcttattatatatggctaactgaatcagtacaacaaaacccatttagaatagaaaaatccaacgaaaacagaataaattctttaaagggttacataaatcttttcattttgagagatatgagttacataaatcatataacttattttttttcactctttgcatctcgtgacagtattagttttcttactttatttatttattttgtctctttgatagaaggaagattccctattgcctaacctaaatatttccatctatgaatccaaaagaaatttatagtaatatactatatgttaaagagagaatttctatatagtgtataagaatgtacgtacttggacactgttccgtgttactgacatgaatgaaattaatcttctatctttatagccgggggaaaaagaattcgagatattgaagaatccaatggaaagttatgaaccactcgatctttgtctctttttgactctgacgataatgtcatgatcataagaattttggattgtaatcagaaaataagtgatcacgttacaaaattattcaaaagcccttttcaattattgcaagaaaataacaatttatcgtacggagaaactcttaataggaaaaaatatacacaaaaaggcgaaaaaaaatgaaagaaagaaactcagacttctcaggtgagaaaccaaacacaaaagtacaagagagaaaaagtgaacagtgtcagaaacattacacagatttgtattacgagcgaaaaaaaaactgagttcgaaaaaaaagaatgtgtggcgttaatagagacgttggattttgttagagtgaatattttgggaaatctaacggtggagactgcggaaccaagtggctaagtatgaaccagcatttttgtggcgactgttcgttttgatcgaggcaaaaactagccttgcggcaagatctttttagacgttaaaacaaggagataaatcacttgagtataaactagtcttttagcgaatggaataacacaaggttaaaggctttagagcccatacgggcccaaaacattatacgactttgtgtaatagatcatataggtaaaacagaaatttgctttgaaccatacataaaatgcaacaaacctgcgaaactgatactatgaaatctgttaaatttcgtaaatcctatagttgtaatttataaataaaaaaacgcatgtgtatgtcaatgaaaaaaatcccggaagaaatcttaaattaaaaaagaaaattaataaagagtttaaaaagcaataataataaataaacaaaatgtgggaaaataaaatcgctatcgcggagatgatggcacgtgtccattttacgatgtgatctgatccaaacctatttatattcttcgctgctgttctgtcttgaccgctcctctcgatctctgatctccctgtcttctgtctacgcttcgtcgccggccgatttctcccagactcgtcttaccgcctccggtcgaaaccctaggtgagggtaacgagcttggattggtttattgtttttgttctgggggaaatttatttggcaaattcacctaaaatgttgtttctgatgaaatcagattcccggaggacgaaattcgttttttcgccggaactaaattaaggagatttgagaggctatg

SEQ ID NO: 36572 - DNA, 3000 bp, Unknown
  misc_feature (1)..( 3000): 2750-1469P.txt file - cDNA_ID_3097920; gDNA_ID_2936557; Annot_ID_194274
ttcagtatagaccgtaagacgtgggtaacccgtaatcgcatatattatatgcacacactacgttttggtgttatacaaggacgacgttgttaacataaatcaaccgtcacatgagtgagagagcacaataaattttatcaataaaactgacatagtgggacaggaatcacaatgaaatttgtagaggaatcacaatggaatactattttatcaataagagtaaagcattttcacaaaatgcaagatatatattttggaatcatgcctacggctaaatatataagatccaattgaaagaagaggggggactcaagtattccgcttaaacactgtgccttgaataaaactacttgtaaatgacaaattacatcttttggttagacgaaactgaacgttttttataagatggaaattatctttcattggtatagtggttgatgttaatataagagacattgtctctaatttgtctagaaacgtctaaattcaaggagcggacttgtctctcaaacaatttaatgaatcagtggtctacaattctaagagtttttaaaatttttgaaaacattaatatatttttgtaagagggccatttgggagtgtttggagagaaaggagcagagagggacgggggtaaagtgtttcttacgataaataatttgaaatcggggccaagagtagacagctttggtctaataatattccacttgtttttttcacttatgttttcaaaaaattatggctttctcgaaattaactcactccattaattacactaaataaacattgtgttgtactttctaccatttttttcaattggtaaactgtcatgttagttcatcctctaaaagtcagtcacaatctaatttctagtgttgacgtcaccatgttaatcacagagatgatcatgttttctagtatgtatatatgagtacacacattgttacttgtgaagaggaatgatagattttggtgtcgaaattgcttgatttatgagggtcaaagtgaccgttgttccaagtttggctggtttatgtggtcggattataacgttaaacgcatttgcgtggttggaagcatttatgtgcatggttattaggacaagttgtttgttttgctcttgcgttagttaaacaatcaaacatttgaatttttgtacttaacaaagggacaacaaaagtttcaaatctagactcctttctttaacgatatttgttcatggaaaaacatgtttttcaataatcgtgaaatcttcaattggctctaataccatttcaattttcaataatcgtgaaatcttcattaaagtgaaatgtgatacatgattaagcttaaatacaaagaaaacttaaccaaagatactaaccaaactaaaccataactaaaattatatatatacactctaataatgttaaaagattatagcatccacaattcaacaaaaatgttttacccccacccactatatcattgaattatggaccgtcgcactcttctccggtcgtggtgaaccggctttcaacagattaatgtgttttcgactataaggtatgcaaaaatttgctccatatgatcaaagtgaccaagcagattttgaatcagtattggtcctcggactagatatgtataccacacaactttaagccaggacttgaagactttctttaagagtttccatccctcgttatgccatattaacccacatagctttcaatttattcttggagagaaaataactagtgtagcggttatgaaaacttaaaacgcgtccatgactacaaataatacaaagaccatttctatattaaatatagaaaaacacttatatttttcccaacctgacagaaaacaaacaaaacaaaaaaggaataattaacatcaaaagttcaaaaccaaactagttcaacataaagttcatacaaacattgttctgcgtatcctacatgactacatccaaaaaaagaagccgaaacactaaatatatatacacacacaccaacgggacaatataagtcacagaggagtcacaatctaatacacacacaccaacgggacaatataagtcaaagaggagtcacaatctaagcgcaactaggttgccgcttgggaggctgctaccaccgagaagaacaagtctagatccggcggctgaaaatatcccttcttcggtggttccctcttcttcccaaagcctagtagcgatctcttccttctcaccggaggtggacaaggcggatatgctggtatccggcaatcatcacgtgtaggcgtcgtgcatcccatctgataatcatcatcaaccgtcaccgtatctccgtcgtcgtagtttttctcctccatttttgtccgctctctcgcactttcctaataaggttcttaattagattgcttctttattacactagttttggaagtgaccgtagcttgttctggaagttgctaggtacttgcggtctagaaacttacacgtggaggaacgtactgccacgtgctaaagcgtagttatattcaggtgggaatagttgccacacataccccactcgagtcaaatgctcgtttataatgtggcttagttaaaacgaagcccattaagctaaacaagggcccgaatttactggagctaaggccattaaccacgttaaagatttgcgaaataaataaccggttggtttttagttgaaagactaaaccggttgaaataatccacggaacaacaacatatgttggagtctggaacgcgttgatgtcttggttcccaagcagctcaaaagtgtgacataaattgttgtcctcaacaaacaccataaaaatcacaaatttcgttctgggctctttatttttttcaatcaccacattttcacttgttaaaattttgttactttgctctatctgaaaccaaagctgccatctttctccttttgggttttgattagatctccgattttgggtttctatatattatgcgagctcacttttgttcgttctgattatctgacaatg

SEQ ID NO: 36573 - DNA, 3003 bp, Unknown
  misc_feature (1)..( 3003): 2750-1469P.txt file - cDNA_ID_3097935; gDNA_ID_2936557; Annot_ID_194271
cgtgaaggaggagcattgggccaattgggcatatggcttcattattatttattcatttgggttaagttgggcctagcctgaaaatagaaataaaatttggtgaattcatatgggccgaaaaagctgagaacaagcccaaagatggtgatggggaaatcatttttgagctggaagaaaggcaaaaaaagtaatagaggtttcgtgagcaacatgattcaacggtagaagaggtaatgtatattggctatgggaaatgctgttgctggatttttgtatacagttaacttacttggtcacgggctcgaagggagctgagctagtcgcgtacgttggttggttggttgagccgtgcacctaaagcagctttgtaccgacgcgacaccacgtggcggacatgcttttgcgtggacattggacctttgtctctctggggtccctccgatgggtcaaactagcaaaagtcaaaccgtcgaatattcgttcacactgtcacatccaaaatcagacaaaatggtaaattacatcaaaactctttttctatataaacaaaaaaatattgtcgacggttggatttacatattttttaataaaaaaaaagaaggaaaaagagtatgccatgttctcccgtcgattatataggaactacttgttcgtttcttcaaaaattattgggaattaataactctgtatataactagatttatttctaaattaatactctttctctttctcaatatttgtagtttaaggtttttgcatacaaattaagaaaacatataaatttcatttaatttattttttttctacaaaaacattattaattataactaattcaaccaataaaaaaatataatataaaatataattggttaaaatctattaaatacatttaatgtttgcatagaaaaatcaaaacaacatttatattgaaaaaataaaaaaccctttaaattacatttaattagaaacagagggagtagtttttatgccactaaattctgtatatcaatcgttactatcggatccaaatatccttcattttgtttggttgacaaatttcttttcataaaatacaacatcaaattgttttaagttatttagtatcgtaataaaatcttaaattttttcacattttacctaaaaaaaataaaaaatcataacaacgtatttctcaatttacaattgctactcaaagatgttctctttcttttatcaccgcatgtccacatctccatcataatcttccattgttttcaaagctaacagaatttgtttaagagtaaaaacacatttaaaaacattaaaaaatgctaagatggagatgcggggtatcgatccccgtacctctcgcatgctaagcgagcgctctaccatctgagctacatcccctacttgcattgttaaataaagttaccgtatatattattttattcgggtttggaaactttttctatctcaactcaagtttccataatttgaatttcatgaatagcaatcaaattcggcgatttgtgagaggataaaatccgaccaaaaaatctcgatcatcaaaatttgacagttaagttagaaaggcaaataaactttacaatggtaaaaaaaaaagcaatacaaggcgaagaaaagctcaacaatgaggcattattgttgtccttagagaaattatagtgaataataagtgtaaagtgtttttaactcgtgagcataattcaaatccatacataaggcagcagcatctgtaagattattgaagttgcgttagtcaattttcttaaaagatatatgtaggactaaccatcgagtcaatgacaatctttgtcggtctcctctctggatttaataatatgttaattcttatcgaagaagacctcaaaacttgtggacgatatacgagtatagaacgggcccagtcccctaatgaattaagttttgtattttattcaaatttcaacgaaccatcacacacatgttgtggttttcatcaaagtgtaataatcaacgatagtatcccatgcatgatacacgaaaaagaaaaataatctgaatgaatgaaccaacgtacgtagggtttagctggaaagatgctcttaatactcacggacattgtctcattccatcatgcaaataatacttctttttcttttcacatatgcaaataatactaattatgtagaaaaaatcatattttgtttattttattttagtagctacaaattcatttaaataattttaaatcttatagaaaaggatatttgaataaagcctatactaatccgaattttcaagacactggtttttgcattaacgttacgagcttaacgttaagtgagccgcaccgagccaagcctaagtcctctagctggagctttaacatggaggactacaatacaatgttaacgtcagatccaacggctgagagcgattgaacacgcttctgtgatgtgaagggcttaatcttttctatgctgacttcatcatcatatcttctttttttgtagtaccaaaaaggctaaaacgaaaacgatttagagaaatgacaacaataataaaaagtggggataatttttgatttctgatagaaagaaagagaaacaaagaaaggcgggaccgatccgccattaatgctaccacccaactacaaggcttttctcacacactctcttctctcaatctcttggctcagaacaaagaagataaaaaaaaaaggtgagtaagaatttgtctttaattatttcttcatgtgttagttgttaggttacttaaatcggcaaaagagatttgatgaacttggtcatatgctttaaagtgtgcatacatttttggggttgttactagttgtcaaatcttttcctttaaaccaatttgatttccttctcatcttttccagcttccattgattaaaagtttctacctttttcttatcttcaagtgtgatatattgtgagaagattgcagaagcgtgtccaacttggttccctctctctctgaaattactcaatcatg

SEQ ID NO: 36574 - DNA, 3003 bp, Unknown
  misc_feature (1)..( 3003): 2750-1469P.txt file - cDNA_ID_3097940; gDNA_ID_2936557; Annot_ID_194270
caccatacatttcctatatatatatattatcttttgtcaacctccctatatatattttatattttcctgtaagttttagtttcgtatatgatagggttagcaaagtttttgtatatgagatatacatatagctttcttgttggactatataatccctctagatatagattttctaatttcggcagattttgagtaaatatccaaaaaaatctcactatcttgacaagattacaaaataatcttttaatttaactatttaagacaacatgtataaaacctatatcttaactaaaaactctatattattgcaactatataatctaaatgtctattatcttaaataaataaaaatgccactaccactttttgatattataggccaagttattgatcagtaaaacgaggccggcacgtaggaactaggaagtcaaaaaataatatttttgtgatggaacgtaaattcaccaattcaggaccttgaaggggcaagaagccaactaaaacaccagccccaaccctagtgcaaattaccattctatataatgaccccatctacgatttattccttctatttccctttacgtaaagtagcgacgttcgtgaattcctaagaagttagactaacaggtttgtgtggttcttaaatttttgggtaaaaattaggaaaaaagtttatattcctacccaaactttcggcaccagagacaaattaggtttgttcagaaaatcagtcgctcatcgacagacttaacaccacaaaatcatcagaatttctttgggacaaaatggaaaatgttcttcacggctccacctaccaaaatttcgatatcaagctcaaaagcatacacaaactataactaattccatagttacgtaatcttaacttcgaattcaacaacacatgcatgcatcgactgaatcttcaacaaatgcaatcaaacacacaaaattgctaccaaaaaaatatgattttttttttatgatttcaattttcatccggcacttagtccaaaactttttttgtgtgtcaacattttttaaaaaaatctttaaacggatatctgatctaagagcatgttcataggtgatacttacaaaatatttttaagaaattttttagtattatttataatgtttgtttaataaatatatataagattttttgcttttatcaaatgtgaccaatcagaagaaaccacgtcagatgatactgatatgacaaatatgatactgatcaaacatattctaattgctttactaatataaaaataatttttggacttgtgatactctaaaaatatcacccatatacatggtctaatatatggatcgtaaaaaactcatatataatattaataagtagtagaagagcgtagaccatgtcctgggtcgtcgtccaaatgaccacaagaagatttcaaaacagaggaaaatatttctcattaaataagttttcctgacgcataagataacattattacaagattcagaaaaagaaaggtgaaaggataatgtttctcctactatataagatgtgtacatctgaaaaaatatgaatatatttgtaacgtttgactgttattacatgattaatacgatataaatattaacattttttttcaaaataaaagtaatatagtaaggaaatgaaaagaggcatgaagcatgcctctttttttggtcggctgccgtttacaattgccaattgcgatagttactcttcttgcgtgtacgacttttgtttttttttacatattcgccaataatttgacgttttctattagtttgtttgatactctgttgtcttgctaaaactcaataaaacattaaattactttcttgaatgaagctggaacaaatctaacataaatagaaaatgatgggcaagttgatgttattcgtaaatttatttagattatattatataaaaagcaatccaattatatatctcatatatacaatttcttatcttactttgtcaatgtcatatacgtaactaaaacttgcggaaatagaaaatgccacgtgtatggtggacataatccgaatctctctctttcttctataaatagtggccattcccattggttgaaatcacaaaagcatcataagaagaagaagaaactacaatagttaatcaatcaaagagaagtaagagaaatggcagattctaactgtggatgtggctcctcctgcaaatgtggtgactcttgcaggtaaacccctagattctctcttctttacatttatatgcatatatgtagactatgtagttcgagcttcatggtacaaaattcaataaactcttcttatgacttcgtttacaattgtgtttgtgaatagacacaaaagattagttttgtttactttagattcaaaacacttcgggcctatcctgtatatatgctgatcagatgcatgtggttgattaatctttaatctcatcatattaattactaattttttgtttgtttgattaatttgtgtgtggtaaagttgcgagaagaactacaacaaggagtgcgacaactgtagctgtggatcaaactgcagctgtgggtcaaactgtaactgttgatgaaattattatggtctaaaatcatatatatggcagaaaaattggggaaaatatgtgttttatgctaagagatgtgtgtgtgttgttggaataaagacgtgaccgttgtgttgcgtatcaactctcttaagctttgacttttcccagctttgtattttcctatgtatggtaatggtgtgattgtgtaatgttttcatatgtaacgtaaaaaaaatatttatgtgacattgacttttgtgactactaagatttgtatatgtctcctccgttttttatttaggatttaagttcaatcagctaaattaatcataaacaatttaagtaaatattcatatgagaagaagtcaaccatattcttatcgggccttatatgttaatgttaaaaggttacgggccagtaaggtcccaaaaaagaagaagagatg

SEQ ID NO: 36575 - DNA, 3003 bp, Unknown; identical to SEQ ID NO: 36574
  misc_feature (1)..( 3003): 2750-1469P.txt file - cDNA_ID_3097940; gDNA_ID_2926298; Annot_ID_205612

SEQ ID NO: 36576 - DNA, 3000 bp, Unknown
  misc_feature (1)..( 3000): 2750-1469P.txt file - cDNA_ID_3097950; gDNA_ID_2936558; Annot_ID_194330
gctgcagccggtaatgatactttcattttaccttaaacaacaaatctaactttccatctccttttaacgtcctatcatggatccaattgctgagacaggtacattttgttacatcgaccccgagtaccagcaaacgggaatgcttggggtgaagtctgacttgtactcatttggtgtggtgcttctgcaaatcatcacagcgatgccagcaatgggtttaagccatagagtagagaaagcaattgagaagaagaaactccgagaagttttggatccaaaaatatcagactggcctgaagaagagacaatggtgctagctcaattggctttgcagtgctgcgagctgcggaaaaaggacagacctgatcttgcttccgttctgttgcctgcactgagcaagctaagagagtttgcaacagaggatcatgaagtacataactctgatagaacatttcatgtgtcacgtgctcacaatttggttcctctttccccaatatcttcctgtcaggttggtttcttagatactgcaataacacatttctaatcttcacctggaaaaggaataaaattaataaagttcattgattcctgagtcctctctttcaatcatgtagacagaggatgatgcttgggaaaatcctattgacagaaagattggaacttcgacgtaaatcaaagtgaagcgacattggctatctctgagatccgcgataaacttgttcagtttaagcatccgatgccatcccatacccaccacaagaaggtgatttacatgatcacaaacaagccaatgcaaaggaagttgttgtcagtctctcatgaattgtactccaccccaaagttgaatgttgaacttccattgtatcggagttcctatcttgtttatcaaacactttatttttggtctcatgaaaagaaacacatttattatagaagatttgtatccttcttgcaaaatcaactcatctagtcacttttgctatagagaatgccatctgtagcacataaaaaacttttctacgaaactacaaaccgaaatttgagagtatagtcttctttgaataaaaaatggtttgacagcattagctgcaaagaagatgcaaacagtcgcacacaaaaaaaaagttcttcttaaaaccagaattaagggaatacctgtcggagctgcaccagcaatgttagctgacagggcactttgtcaatttgggactatacgcgcttaggctgaacacttagactcgagacttaagagacaaaagcagaagttcacaacagatccacattacatcatggaattttttgtttaagtcgttacctggagaaattccagagatgacgatgagagacaaaaagcttcaagagaaactccagagaggtaaaaaactgattacaactagggatcaagtgtgatactaccacgttccggatcactgaataatcacaaacaagaaaagaaaacagctagaaaagccaagaagcattaaaaaaatcttagaaaagaaagtagagattagatggccaactattaacaaatgagccctcaacatacatagcagacacatagtcatttctctttacataatcacataatcatacagtctaaactatttctctttacaaaatgataaaagatagattgaaagccatttcacctctgagtcattttgatatcaacaccaacatacacgctttctggacaagtgaaaaataagcacaacatataacaaaagctagcatgatcataagcaataactcatggagattcgaatatcaaaaggtaaaacctttattattgttattattatatctataaagaaaggttcgcaggttaacatacgctaaaatgtaaaccagaattctaccctagaaacccgaaaaagctttgatttttatgattttcccatataggtgggctctaaagatcactccggttcttcatatgtgagcataccgcttgaaaacctgcttccccgccacaactgcaccagccgcaattccgccaaaagcaccagccacagccgcagatctcactcctcgtgctgccctaaagaccgctccagttcccagaccagcgacaacactggtccaaacatcgtccttatcagttaccgccaccacaccactctcaatccctgcgtagatcaacccaacaatcccaaccctattaccccaagtacgacctgcctgaccagacgaattcaaaatcctgttgattttcagcttcgtcgtgtctccattttcgaaactcttgataccagagaagatcccagctgaagcaccggctacagagccggctagataacccgtccctgtgtagaaagtgagattttctccccatgatcgacgctgcttgagagactcttccgtgaatagaaattccggagaagtcggaagcttgtatagatactgagatttgatcgggacctggtagttctggtaaggatggtaaagacgggtgttttcgtcggattcatgatcggagctacgattgatcgccattagaagaagacgggagacgttttaggaacggtggcgacggagaaagagacgacggagtcagagaacctccagcttatgatgtggtacagaataagaaaggcgaaatgttttagggtatgtaagattttgtgactaattcgaatttgaccccttatgttttattttgaataatttaacccaagttctttcccgactttacgttttttcattttagaccctataatgtttgacgttttacataatatggtacttaaattgtaaatcctaccataacaacctctttgtagattaatctcattacatataaaagaaaaagaaaaagattttgtttggatttgggaagaagctttgaattaaaaaatagaagcaatagtttttgggggacaagcccggccgacgaatcggcggcgagacgttctttgtcaccgattgacatattcaaaaacgacgaagctaggtaaaggaacggagagaagagtcgataatagaagcgtagagatg

SEQ ID NO: 36577 - DNA, 3003 bp, Unknown
  misc_feature (1)..( 3003): 2750-1469P.txt file - cDNA_ID_3097953; gDNA_ID_2936558; Annot_ID_194328
aagtggtcgtacgtaatttactactgttatgtttttgttcgagagcaatagatttttatttgcgttttgatataattttcatactactagttacgggtacgcactatgctttgattcttaaagatatggagttaaaataatgatctgagtcatctgaccaaaatcaaacaaatggagtgttaaaaatagacttgttatacaagttaaaacatttaaattgtagttttatactttaatcgttgtgggaggaaagtgtacagtaatagcatacgactacgtacggtggtacaatcaccatttcgtggaaatgataaaatgaaaaattctaaataaatataaaattaaaatgaaacgtatataatagccactatatatcaatcaaaggaacagtagtttaataaatgaaatttaataactctttgaatcttcatcatcaatatgggtgtcgtccttttgttttgtcacattatgatcacagggcgacatacccatatgaaactgaaatgcatactataaacgtatacaattaaaaaatatatccaactcatgcatgttgaaacaaaaaatgctttaaatggataatagttatgggacgccactatgtaagtactctctcacgtttttatatatggcccgttcgattgcttaacgaccctaaattgtatttctgtggaaaagtcaaacaaatcaaaaaggccaatgctagatgtttaggtgtaataacaattctctctaattacattacaaggttttgtctgaactccgaatcatgtgcatctttatcttatcttataaaattctaaaaaatatatcggctataagaggacagtgttattacctcctatataattacactgttttccatgttaccatgtttaatcaatataacaacctttgttattttctcattttttattatgataattttggaattaatattgattgcataaacagaaaccaactactgtataaactaatgaagggatattatatatttatataaagggtcgaagagaattcgtaaaatagtggaaactggaaagtataggtcaatgttgtgcacgggaaaaggaagtacataataacactagtgatgggcgaaaaactcgataaaggttcatggaatcatggtggtgagatcccatgtgattatccttccaacctaagaataattaaccatatattcactttgacatatgaaaatactaaataaaatccattagctataatttataaaagtatacaaattacaacacaaaaaaagacgtttggatgaggattactgactgatgatatattgagcaatgcttgatttggcaattgttgcagtctttttactgttttcttcattcaatttgtccatacatttgccgcttggatatcacaccatgcaatgtcttgtctccatctaccatcatactttcatatcattccattttgaaaaatatataacttggggaccagagagtgtaatgctagtgcctataaacatgtgaccaataaacgaaacaaccatgtaaaaagattacgaaacggtgcggattggttcaatccacttccccgcgatctcgcttcgtaaaaagaaaaggagtttctgacacgtcatcatcatcatctcccaatgctaataaaaatggctaatataatattagtacatgattctaaaaataaaagctacacttttcttttcaatggtaatttttaagcttataatttttccaaatactacaaaattgcacctaataaatacaaagactaatggaaaataacaataataaagagatgtcggcattaattgaccgattttaaaataaaataaaggtttatttttaacttacacaaaattgagtggaacaagtgtttttatttgtttgtttgaccaatcaaagagtgatccaattaattgaacgggaaaaacaagaccagttcatttacattataataatataattattgatttttccttaaaaatatttgtattcaaactcatagaatcagtccatttaatcacacgatttatcatttatctgcaaattgtagtattattttttcacctacattacaatttggtgtttttcttttgcaaaagcagaggtgactttatttttggtgatttattagtgagagtgtttctacaaaatactaataaagtaaaaaatattacttaaaatagtactagtttaatttgaagttaattagagagatcagagagaagaagacggagaagaagcatcaccgaaagatccttggcactgctgaagatttctcagtcttaagcaataagcaaaaactaaaagagaaaaatcagaaagacaaaccaaatctgtgtctttctcttaaaccctgtgtttgcttactacgtctccggataaaaaagtcaaataatctgagaaactttcttcatttttgttgcgtcttgatctgccattgtcatcatcgaagttctcagctcataatcagcttcttcctgaaatgagtctatgttcctgaaaccatcgggcggattttgtctctctctctttctccacggtaatttcctatccagatttggctgttttccatctcttgagagtcaaagttgttgttacttggtttgaagatcttggactatcttttgctgctggttactgcgttttccttcttttgttttcttcacattttgctcgcaatattcattggatcaatcggaattcgtggcaaatgcgtttgaatttaaagtttcattttttatttttcctttcggagtttcttgctagatttagtcatacagactcgatattactgacttgtatacactttcgaattttctctttcaaaagtagttcataaagatctaatctttatgttaaggaaaaatctaactgtgttttggtttttatcttccttctgtacagaccaacaacatttatgagacattgagcacatttgagaatcttaatgaagaagaagagttcttgataaagattctatatttgttcttgagtttaagttctcgagggaatg

SEQ ID NO: 36578 - DNA, 3003 bp, Unknown
  misc_feature (1)..( 3003): 2750-1469P.txt file - cDNA_ID_3097970; gDNA_ID_2936558; Annot_ID_194321
gctacgattttcagctttctcaggaaaccgatcagaacattcggacccagcattaccagaagtccaaactcgaaatactctagtcttcttgtgactttctgcctgtaaatgcatcccgacttttaaacaaatactataaagccgagagtagctcttcttcttgtcaattccaagtctttcacatacctggtggaaataatatttaatgccttttcaaaaaaattcagccaaatacataaggtaataccaaaaactgtaaggcaaacccatcaaatgaatacctccatcacagccaagcctttagatccttcagcatcaaccatatcataaatttgattatctattggaagctccaaagtttgttctgttttttgaatactccttccgaattttaggagttgctttttcccagagtagttaaaatcttttgctgaaaatctttttaacaaacggaggcatcgttcaacctgcagaaaagacaatccaaatattttatagccaaataaaacagatcagaaatgctaaataaaggcaattggccaccatatgtggtgaaatgtattcgcatgatggaatgtgatgcagattatagttcaccttattgttcaccacagcatcaaactcctctactacatgagaatctgtcaaccggcgacaaacctgatgtaatccaaaatgcacacgtattaatttttcaaagatatatctaccaaaaagaaattggcaaagtgttgaaagtctctttcctcttgctctataagagaaaaaagaaatatatacttacacttctccaagctctatgccttgaatgtgatcccagataaccgaggtcttgcttaatgtccgagacgactagaacctgcactacaacaaatgagtatagagaaagaatgctccagcttgataaaaaaagaaagaaatgatttgcacttactaaccttctcattagtttcttcaagcttatcacaaattgcctgcattgctggtagaaaatctttaatgagcgtatcctcttttgtactttctgattgtaaactatctccggcgggagtagcctcttgctccaataaagagtcctctttgcaaatctcaaatctctgctgggaacccaaaggcttggcgtaacgacttaaatatatcatattggtgctaatgcatgaggtggttttggaatccccttcaccatcaacttcctttgttctcactatcgctggttgtttaacaactaaacctcgagactcaaggtgcttcacaatatagaagaagtttctaccttcgataccaaactctttagcaagcagattttgtgcaactccattggctctgcatcaaacacatacaacataatattatacgagctcgaactcttaagagtagctagaagagaatacagaatttgcacttaccgagcaacagcaagccgctcgagaacgcgacgctgaatagcggaaatagtcgtgttattggactgagcatcgtacaagccaacgaagttacctcggagcttctcattcgcgaagatcctcaaatcgagtcttagtgcctcttccagctgttgaatcgaagcatcagatggttcgtacacagtgtttttcgccttgaactggagctgagggacggcgagaagatttctccagacatgagccttgacggaaggagaaagaggaggaggagagagccttgaccagagagaaacgagtgggatccctgtatttccttgacaacagatttcctccagtgctgtgcatacaatcgaatccatttctcatcatccaaaaggtactcggttaggtttaggtcaacggaaaatcttccgccgataaattagttagtcagccgattaaccggaaattctcgccggagaggtgtcggaataatttatatagatttgggagttaggcgaagatggcgggatcagaagaggaaacgatcgaagagaaagagatattcgagttcttggtgacgggatcgatctcaaggaactgcgaaataattacgaggtaatttaattagggggtgagacaaagtaagtgacgagaatggccatacgtcagcaagttaaaacattgattcctcacgcttctaaactacgggccgtttttacttccaatcgaaacgacatgctgtttatgcgaattaggcacaaacaacacgaatcttttgcgggtcgggtttgttcgatccagatgtctggcttctctaacctccgtatctctctctgcaaaaagcgtgattcagagtaaatacagaaaaatatatcgtttttataaatggcattttttagaacatattagcttcgctcaaatatctctgtctcaaaagacaagtagattccttttttttacagtatccaataatttgtaatcatataaataatcggtgaaaaagaaggattctttgtttgtttcccgagaaaatatcctcgatttccatctcctatctgtcatcggagctttctacttccgaaggtaaggaaactggatcggaactcttttgaattctgtactgtgtatttgcttagggtttctgggtcttattgcattgttaaggattgcgaatcttatctgaatctgtgtctactactattgtgatgttttaaagctatttgtggaacagcttttacttgtccctttatagatctctttccctcttgggttcataagaacaaaatcctcttccctactttgtacgattcatgactattcagctgaatcgtgttgggttcttgtctgaatttgagtgttttaagattggattattactggaaatgtctgtactaatggaatcttatgtgagctttaaggattagagctctaaaatcaagatagggtcaggtcaacgcatagagaataaattgtgttattgtaactacttttctagtcaacgttttctgttaaattgaatccctttcttggctttgtttccatgtttttgacatgattgtattgaaacaggagtaaaggatcaatcaagagtttgatcttgttagaatagccgataatg

SEQ ID NO: 36579 - DNA, 3000 bp, Unknown
  misc_feature (1)..( 3000): 2750-1469P.txt file - cDNA_ID_3097975; gDNA_ID_2936558; Annot_ID_194320
acagcaaaaacattatgttctataaatcagagatacacatttatgaacatacccgcacaagcttgtacgtaacagggtttccaatttgatttgttgaggaaagtgatccgtttcttgtctgaaaaatactgtcttgaaacgtctctccatagtctttcacatttccaaacattgttaccctattttaacctaccaaatgcaacttcaagcatacaaaaaggcataagcaaatatacctatatgcttaataaatttttcagtcatgcaaaaaactcttacacaatacaatcactgatactcaaaaatcctagctttaccctttcatagagagaaaaatattggggatagagtataatcttattaggattattactatatatcttgtgatagagtttaggtcctatatatctctaatccctcaaatataggacctaaactctatcacaagatatatagtaataatcctaataagattatactctatccccaataaaaaacaccactgcatcttcagaataataaaaaagctttcaactttaagctaccatttatcaaatttcaatggaatttgcgtgttgcagttctcacatcaagtttttggtagattccactcagtttaactcgcatcaaacaaacccactacttaattttcaggatagaaatatgaaaagtcacgaggaaagcagttaaccgagcaacaagtacacaagagagttaccagagaaagtagaacgggaacggagaagaaaaaaatcagactttccagtgagctcgtagtttcatcggcgagaaatctcggaggagaggcttcttgactaagctaaaaaccttggatatttgcaaacttttttgttctgctttatttttttttgttttggctcgctttcggctttttttttccctaatacagtgccatacaggtccggattccaaagctttttattcactcgatttcagaatgccaattgggatccgtatagttatgcgggaagctcctagaggttgccacgtcagcgaatagcgaaatatctgccgaaaaagagccaactacgttccgtcccgactctcgtgcaccacaactgcgtgccgtcttacacttcaggattcgaatacgtgtcgtcttagtctagagttcaaaatactgcactcatgtaaaactcgcacaggctatacaacaacaaacaaacatgcaatgataacactggagaccaaaggtaagaaaaacagaagaatccttaaaccgaaatgtgtaaactttacaacaagtttcttgtaaagactcttaatcatttcaatagagatattacatttgtaaaactctcctttctcctttctcctcaatcaattagctctgaatctgaatatgaatctatgataatcaactttgatggtcttggacctcttggttacaatactaaccggatctaaatctcttctggttagctttcccatcagatttcaaagttccactagattcaccttctgatgaagcatccactgatcttgcaaaagaatgagagagatcaccataaaggctagctactcttctgatattgttgttgagctctttgatcaaccccacgtttcgacccaagttatctggttgtttcgattcatggttctgattgatctcgttgatcaataatcggttttggtccaaaatgtcttgaacatccacaaagctcttctggaaactctgcaacaatttcccatccatattgtgtctgtctccaaatcctgacaacacatctccttccattatcggctattctaacaagatcaaactcttgattgatcctttactcctgtttcaatacaatcatgtcaaaaacatggaaacaaagccaagaaagggattcaatttaacagaaaacgttgactagaaaagtagttacaataacacaatttattctctatgcgttgacctgaccctatcttgattttagagctctaatccttaaagctcacataagattccattagtacagacatttccagtaataatccaatcttaaaacactcaaattcagacaagaacccaacacgattcagctgaatagtcatgaatcgtacaaagtagggaagaggattttgttcttatgaacccaagagggaaagagatctataaagggacaagtaaaagctgttccacaaatagctttaaaacatcacaatagtagtagacacagattcagataagattcgcaatccttaacaatgcaataagacccagaaaccctaagcaaatacacagtacagaattcaaaagagttccgatccagtttccttaccttcggaagtagaaagctccgatgacagataggagatggaaatcgaggatattttctcgggaaacaaacaaagaatccttctttttcaccgattatttatatgattacaaattattggatactgtaaaaaaaaggaatctacttgtcttttgagacagagatatttgagcgaagctaatatgttctaaaaaatgccatttataaaaacgatatatttttctgtatttactctgaatcacgctttttgcagagagagatacggaggttagagaagccagacatctggatcgaacaaacccgacccgcaaaagattcgtgttgtttgtgcctaattcgcataaacagcatgtcgtttcgattggaagtaaaaacggcccgtagtttagaagcgtgaggaatcaatgttttaacttgctgacgtatggccattctcgtcacttactttgtctcaccccctaattaaattacctcgtaattatttcgcagttccttgagatcgatcccgtcaccaagaactcgaatatctctttctcttcgatcgtttcctcttctgatcccgccatcttcgcctaactcccaaatctatataaattattccgacacctctccggcgagaatttccggttaatcggctgactaactaatttatcggcggaagattttccgttgacctaaacctaaccgagtaccttttggatgatgagaaatg

SEQ ID NO: 36580 - DNA, 3003 bp, Unknown
  misc_feature (1)..( 3003): 2750-1469P.txt file - cDNA_ID_3097980; gDNA_ID_2936558; Annot_ID_194318
acattattttattggtcttttttggcgatttgtgtatcgttggttattgggacccattagtttcaaaaagcagacgaaacgcattactagagtactaaaacaacaacatatgttccacgtgattctcttaattcgttttgcggataacaaaagcgcgtttgcttttacttaactcattcatagccgtaacttgctttttagttattaatctttggaaatattaattagtcaattgatttctgacgactataaataatgcagaggataaaaacgcatggttaagagatgacgaattcgcacgtcaagccatagctggaatcaatccagtgaacattgagagagtcaagacttttccaccggtcagcaatcttgaccccaagatctacggtccacaacactccgctcttactgacgaccatatcattggtcacctcgacggattctccgtacaacaagtacgtttatctatataattccccttacaatggattaactaaactaatcaaaaaatgattaaattaaatagtcttttctattttttttcaggcgttggaagagaatagattgtatatgttggattaccatgacatattcttaccgttcctagaccggattaatgcgctagacggacgcaaagcctatgctactcgaactatcttcttcttgactcgtctaggcacacttaagccggtagccattgagctaagcctccctccccatggtccaaaacatcggtccaagcgtgtgcttacacctccagtcgatgcaacctctaattggatgtggcagctcgctaaagcccacgttagttctaacgatgctggtgtccatcagcttgtcaatcactggttagtacttatacatgttaatacacatttatgtaacaagtagtgaatatagagttatatattgacatgttttgttatatttgtttgtaaaggttacggacacatgcatgcttggagccatttatattagctgcacacaggcaattgagcgctatgcatcccatattcaagctactggatccacacatgagatacacgttggaaatcaatgctttggctagacaatcgttgatcagtgcagatggtgtgatcgaaggaggcttcactgctggtgcatacggcatggaaatgagtgccgccgcatacaaaagcagctggcggttcgacatggaaggcctccctgccgatctaattcgcaggtatttagctaaacctttttttgttttagttgaagatttttagctgctaaaaatgtattttttttattgtatataatacctaaatttattttaaattgtgtttattttcagaggaatggcaattcctgatgcaacacaaccacatggtcttaaactcctaatcgaagactatccgtacgccaacgacggtcttttactctggtcagcaatccaaacctgggtccgaacctatgttgaacgctactatccaaacccgaaccttatcaaaacagactctgagctccaatcttggtactcagaatcaatcaacgtcggccacgctgacctccgcgacgctgattggtggccggagttatcaaccgtcgacgacctcgtgtcgattctaaccactctaatctggctcgcctctgctcaacacgccgctctaaactttggacaatacccttacggtggctacgtcccaaaccgaccaccgttgatgcggcggttaatccccgacgagtcggatccagagtacgcgagtttcatctcccatccggagaagtattacttctcgtcgatgccaagtttggcgcagacttcgaagtttatggccgtggttgatactttgtcgacgcattcgccggatgaggagtatattggagagagacaacagccgtcgatttggacaggagatgcggagattgttgaagcgttttatggatttgcggcagagatcggacggatagagaaagagattgagaaaaggaacgctgatcctgaccgtagaaataggtgtggggctggtgttttgccttatgagttgttggttccgagttctgagcctggtgttacgtgtagaggtgtacctaatagtgtatctatataattaagaaggaaattatttataagaagtaaatgtagaaaacacataaataatttcttgtaaaccatgatatataatatataaagataattttcgtaaagttatgccaaaatcaaaatgactagaaaggttaatgtaaactatcttcttcggtattgacctaagtctagcctgaaatttgagatggcttcttgggttctgacctaacttgggtctcaaactaccttctgatcacacggataaagtataaaccttgaaattataaggtgctatgagaaaaaaaaaatgagagatagaagagtacctttattctcctgggaactcaaggtagagaccctcagccattcacttgagagtgaagacaaaggtttcttcttggattttaacctaacttggacctgaagccatcatttcattggtagaaatctaggaacttaaagttggcaagagagatccaatccaacgggtaaaacttttgtctttgtttggtagattctgatccaacgatgcagattcaccaacaagagccagcgacttaatcgagtgtggcttattagttgacgtagagagacgacaaagagacgatatagtttataccatgagtacatgtgtgatgtgtggatcagtcgctctcgtgcgaggacattctttaaacagctgtaataataagctcaattacttagattttcatatatagatttgtttgttaaaatgttaaataaactttttatagaattagatgtcgaaacacttaacatgcactttgccacgtttgaacaaaactcaaatcaataacatcgcttaaacaagatttaaccggaattaaccggaccggtagaaactgtgtttgaaatttaaaagcacactctctctatcgccacacccacaccttctctgcaaaaacaaaagatttccacttttcttaaaaatg

SEQ ID NO: 36581 - DNA, 3000 bp, Unknown
  misc_feature (1)..( 3000): 2750-1469P.txt file - cDNA_ID_3097980; gDNA_ID_2926301; Annot_ID_205707
ttattttattggtcttttttggcgatttgtgtatcgttggttattgggacccattagtttcaaaaagcagacgaaacgcattactagagtactaaaacaacaacatatgttccacgtgattctcttaattcgttttgcggataacaaaagcgcgtttgcttttacttaactcattcatagccgtaacttgctttttagttattaatctttggaaatattaattagtcaattgatttctgacgactataaataatgcagaggataaaaacgcatggttaagagatgacgaattcgcacgtcaagccatagctggaatcaatccagtgaacattgagagagtcaagacttttccaccggtcagcaatcttgaccccaagatctacggtccacaacactccgctcttactgacgaccatatcattggtcacctcgacggattctccgtacaacaagtacgtttatctatataattccccttacaatggattaactaaactaatcaaaaaatgattaaattaaatagtcttttctattttttttcaggcgttggaagagaatagattgtatatgttggattaccatgacatattcttaccgttcctagaccggattaatgcgctagacggacgcaaagcctatgctactcgaactatcttcttcttgactcgtctaggcacacttaagccggtagccattgagctaagcctccctccccatggtccaaaacatcggtccaagcgtgtgcttacacctccagtcgatgcaacctctaattggatgtggcagctcgctaaagcccacgttagttctaacgatgctggtgtccatcagcttgtcaatcactggttagtacttatacatgttaatacacatttatgtaacaagtagtgaatatagagttatatattgacatgttttgttatatttgtttgtaaaggttacggacacatgcatgcttggagccatttatattagctgcacacaggcaattgagcgctatgcatcccatattcaagctactggatccacacatgagatacacgttggaaatcaatgctttggctagacaatcgttgatcagtgcagatggtgtgatcgaaggaggcttcactgctggtgcatacggcatggaaatgagtgccgccgcatacaaaagcagctggcggttcgacatggaaggcctccctgccgatctaattcgcaggtatttagctaaacctttttttgttttagttgaagatttttagctgctaaaaatgtattttttttattgtatataatacctaaatttattttaaattgtgtttattttcagaggaatggcaattcctgatgcaacacaaccacatggtcttaaactcctaatcgaagactatccgtacgccaacgacggtcttttactctggtcagcaatccaaacctgggtccgaacctatgttgaacgctactatccaaacccgaaccttatcaaaacagactctgagctccaatcttggtactcagaatcaatcaacgtcggccacgctgacctccgcgacgctgattggtggccggagttatcaaccgtcgacgacctcgtgtcgattctaaccactctaatctggctcgcctctgctcaacacgccgctctaaactttggacaatacccttacggtggctacgtcccaaaccgaccaccgttgatgcggcggttaatccccgacgagtcggatccagagtacgcgagtttcatctcccatccggagaagtattacttctcgtcgatgccaagtttggcgcagacttcgaagtttatggccgtggttgatactttgtcgacgcattcgccggatgaggagtatattggagagagacaacagccgtcgatttggacaggagatgcggagattgttgaagcgttttatggatttgcggcagagatcggacggatagagaaagagattgagaaaaggaacgctgatcctgaccgtagaaataggtgtggggctggtgttttgccttatgagttgttggttccgagttctgagcctggtgttacgtgtagaggtgtacctaatagtgtatctatataattaagaaggaaattatttataagaagtaaatgtagaaaacacataaataatttcttgtaaaccatgatatataatatataaagataattttcgtaaagttatgccaaaatcaaaatgactagaaaggttaatgtaaactatcttcttcggtattgacctaagtctagcctgaaatttgagatggcttcttgggttctgacctaacttgggtctcaaactaccttctgatcacacggataaagtataaaccttgaaattataaggtgctatgagaaaaaaaaaatgagagatagaagagtacctttattctcctgggaactcaaggtagagaccctcagccattcacttgagagtgaagacaaaggtttcttcttggattttaacctaacttggacctgaagccatcatttcattggtagaaatctaggaacttaaagttggcaagagagatccaatccaacgggtaaaacttttgtctttgtttggtagattctgatccaacgatgcagattcaccaacaagagccagcgacttaatcgagtgtggcttattagttgacgtagagagacgacaaagagacgatatagtttataccatgagtacatgtgtgatgtgtggatcagtcgctctcgtgcgaggacattctttaaacagctgtaataataagctcaattacttagattttcatatatagatttgtttgttaaaatgttaaataaactttttatagaattagatgtcgaaacacttaacatgcactttgccacgtttgaacaaaactcaaatcaataacatcgcttaaacaagatttaaccggaattaaccggaccggtagaaactgtgtttgaaatttaaaagcacactctctctatcgccacacccacaccttctctgcaaaaacaaaagatttccacttttcttaaaaatg

SEQ ID NO: 36582 - DNA, 3000 bp, Unknown
  misc_feature (1)..( 3000): 2750-1469P.txt file - cDNA_ID_3097989; gDNA_ID_2936558; Annot_ID_194313
attaacaacataataaattttattttatatatatttccagccacctaaaagaaatacatatgcttctaaaatggagtaaaattaaagaatttagatgcttaacacgtgtactgtttgaaaatcacaaagacaacttaagaactccctagattttgtgttaaatgacaattcacaagagtttaggcaacgtcttaagtctatgaaccacatattaatcactgtttaaagtggtccctaatcctaattcttgtcccaatgtccccacttattcttaattaactacacttttaatcaattctgtgtgcgtgtcagtgttttgtcgctagaaacattcggatttatgtgtaactttacatttagttagtctcgatcttgttaaagatacttgtaagtaattatcaaatggtttaagatagtgatcagaaagaaaaaagaggagaaggtgggagagcaagttggagtaaatgacaaagtttcatggagaccaagaaaatgtttgctatccaatgatgtcacttcattcggtaacatgaaattctattggtaagtgatgatcattttatattttattttacttacacatcttgtacttgtaagcaagttgaccgatccatagaggtgggatgaattttttactatggatattgcgaagatgtattatctattaattgattacaaaaatgaaacactaaaattaatatctggaatcagaatccactagatccgaatatatatatatatatgttcgcagaaaactgaaagtatttcgatgctaaactaaatgagagttttcaaatacataaaattttatgttaacgaaaaatgatctactgtatatcgttcatgagtataatgagacaactacgtttatatataagattatttcacgagacaactccgtttaaacatatcgtcatgtattcaatcaatatatcaatttaaacacacatttttgcttactacaaataataatatcttttcttaaaaatacattttgaatgcgatttcgctactaaacaaccccttttgaaaccataagaaaatgtgcttcttaaccattgactatcaaaatgtaaaatccggaactccttaaaactaagagaatctgaatctcttggatttgttacgttatttgatagtgatacttgtctaataaattttaacaaaaaaaaagatacttgtctactaaatagatactagatatatatcatatacactaattttttttaaaaaatgttttttaaacttttatactcgcatctaaaatatggtaatggcctttaaaagtcaacccgacctatttggaccgacagaagattgccaaaatagcctctgttctcagacacgtgtacatattattcctctgccatttacgtgtgtatgacatggcgatctttggttggatattgtacgtgatttggagtggtgtaggttggcccacaacgttttcttcataaacgaaaaagcgttcagtggtttagtttttttactcttatttataaaatttcactttccatctgtctactgtctacttctcaactcttttttcagtacgtaaaaatgtatactttaatacgtttaaatatacacttagatctcatagtctagataatcgagagtagaaaaagaactcaagaattcgagagttttaaaaaaactcaatagcttttgtttttacgttgggttttcaaacttcatgcaagtttgagtggcgattagctaagcaatggatattagtcaatagtttgtattttttttttgatgtaagttacaagattgaaaaactatttgccctaatatataagggttaaagacttaaggggacatcgacacgagatcttttcgtggattttccttatttttttcgttctttctttctgactcttttcctttggattttctattcattctttgaaaagaacatagcttctatattaattttccaattttaataatttttcccatattctataagactatagtggatacataattggcgagcaataatacattgcatagtcgatcttcctaaacttggatttaaccggcttgtctatactctactatctttgacgtttagtttgtatcattgtatgttatgagttatgacactgaattgacataaatgttatccgtctaggttaaatgcattctccaaaaccaatattacacaatgttacagaataattattctccaactttctcgattacagattaagaagagactaaagccttataaatataagaattttggattagaatcagataacacaatttcatttattcaatcgacaataaattgagttactaattaatatctgaccgaacaaaataaaagtgaaaaaaagaaagagaagagcaaacgaaaaaaggaatgtgaatactagtcccaacaagttcatattatatatgtaattaacaaaattcatgagaaccctctccgtgtccgtgtgtcaccatagtaaccattgaatgtaatgaatttctagggattcaactagtaaaaacagatcaaactttagtctatatatcgttgagttggctccactgtgtatgagccgagatcaaagccgtgacgttctctccgatacatgggttaacaattaattaactaagttttttggggcttaaacttttaatggtaatacaattaatttatgggccatagaagaatgttggtggactcgtttgcttacgtggggatgtgtgcattaatgtgggtttgtgagttgtataaagaagcaactgtgagataacatctgaacacaaacttacaagaacagtttaaaagtttttttcttacttaaaattctctcttttaagtagtcaaagtttggaacttgaacaccataaaattcatcaattttactccaacttgtctaaaaatctaatcttttttgatcactataataaccaatcttgattcatcaataactcgagttgagaaatatatacattgatctctctgttacagtcaattgtcagaaaaaaagaaacatg

SEQ ID NO: 36583 - DNA, 3000 bp, Unknown
  misc_feature (1)..( 3000): 2750-1469P.txt file - cDNA_ID_3097995; gDNA_ID_2936558; Annot_ID_194312
ctttcaaaataatatggatcttctcattcaaaggacgaaaactgccttgatgatgatctctaagaccgtaacttaaaatatgggttggtgttggcccaaaatcaatgttaagttcccaccaagcccatgccatattctccaatagagtatttaactattaatgatataaatattctaacagtaacaacataagacacaattacaagtttagtgatatatagtgttggaatataattataaattcgaaagaagtggattatgtaatgagaggttgaaacgggtcaaatattagcgtagagcatctgtggcgtttcggttcaatgtaaagaaaatatcatttttgtttttattattaaaaccaagacaagagttatatagtactatatcacttcatgatgatgtgagtctatggtcgaaaattttgagaagcaagtaccgtgtcggtgatattcataacagagcgtggatggtgtctaaaggtacatggtcttctacatggcgagagtggggaggagacaattctacacattttacgggactgtccggcgatggcgggaatttggacccgcttgttaccagtacggagactctcttctttcttttcgaaatcgctgttagaatggatctatgcgaatttaggagaggagatagagattaatggttgtccatgggcggtcactttttcgcaggccatatggtgggggtggaaatggcgttacggtaacatctttggcgagaacaagaagtgtcgggatcgggttcgttttattaaggatcgtgcgttggatgtttggaaggcgcatgtgcacaaaatgggagtgacgacgcggacagctagggaggagagattgattgcgtggtctccgccaagggtgggttggtttaagctcaatactgatggtgcttcgcgtggtaacccgagactagctacagcaggtggagtagttcgagacggggatggaaattggtgttatgggttttcgttgaatattggaatttgttcggctccgcttgcggaactatggggagcatattacggtttaaatatcgcttgggagcgcggtgtcacacagttggagatggagattgattcggagatggtagtgggttttcttcggacagggattgatgattcgcatccgctgtccttcctggtgcggttgtgccatggcttactttcaaaggactggtcagtccggatttcgcatgtgtatagagaagctaatcgtctcgcggatgggttagctaactatgctttttttttaccgttaggttttcatttgtttaattctactccggatattgttatgtcgattgttcacgatgatgtagcggggtctgcgtacccccggaacgttcaagtgtaatttttttagttttttcagttttaataaaaatgggggttcgcccccctcttctacaaaaaaaaatatcactttcaaaaggacccattcgctacccaatttttctaaaccccagaacgttttttttttttccaaaacacaacagccacttggtctttgcaacaatgcaagtagtgtagtggcgtagctaggggtaacgagttaccaaaccggtttgacaatctggttcgatcaattggccgatcactcggtttgctctaatcttgcttcatttagtcccatcaacaacacttattaaactaagtcacatctaaactttttatatctttggtatcattttccccgaacacgtttttttgaacgagtcgtagttttgaagcaaccaacgaacgtattgattattatgggcatccgtgaaaggggcagttcggtcaattgatccatcaattttatttttgaccaaactgattaggtgatcttaagatttttccttttttctttctataggaaagtgggaaaaacgcgattcacacgatactgttgctagtgcgtcgtacagattgcgatacgtgtcacaatcttgacggtctgttctatttaaaccacgtgttttaatcaaaaaacttctgtcggatcgtatcggagactttgaatttttatggcacatgaaacttcgtaggggtttgatggtaggatcccacattggtccacttactattcaattcgcaccgccgttaagtttgttaactaacgtgaggaacgtcgcggtgatgtaaaaaaaggccatgaaagttgtttctattacgatgatgccatcactggagttggtaatgtgctcttgtggaagggcaaattttgtaaatacgatcaaatttcgagtcttttacgaatttgtgacatacgccgtttaataacgtttgccgtcggttctgaaatctttattctttttctcttttatcgttacgcgtaaggaaaacgtgcggtaaattctaaccgaaaatatatataaaaaagtagtccaattttgaaatctggccgttgatggtagacaactaaactgtgccaaacaagaaacaagaggtgaacatatttttatgataagacagggcaataaatttgttgtaccaactcataaaacaatagataaattacttgcacaatgatggattattaacattaattttcttactattaatcatggatgaaaattcctttcttcacactagatatagttctttaactagttaaaaatgcatgcgatggaatattactaaatatgatataatctcatggctttatgtaagatttgttttttggtttttttggttgttgttaataaatttattattgagaagtttaattctattttggtcacaatatattgaaatatttttaagaaactaaaaagttcctatttatttttgttttcattaatttatgagaggctattaaagtcacagaaacttattgggtgaatgagtttataaacacatgagctattgagctagtagcctcttgtactcttccattttacgcgcaatccacgcaccaacaaaaagaaaagaaaagaagagataaagaatatctttaaaaagtaagtgtggagaattctttcttctcaataaacaacaacatg

SEQ ID NO: 36584 - DNA, 3003 bp, Unknown
  misc_feature (1)..( 3003): 2750-1469P.txt file - cDNA_ID_3097995; gDNA_ID_2926301; Annot_ID_205715
ttgctttcaaaataatatggatcttctcattcaaaggacgaaaactgccttgatgatgatctctaagaccgtaacttaaaatatgggttggtgttggcccaaaatcaatgttaagttcccaccaagcccatgccatattctccaatagagtatttaactattaatgatataaatattctaacagtaacaacataagacacaattacaagtttagtgatatatagtgttggaatataattataaattcgaaagaagtggattatgtaatgagaggttgaaacgggtcaaatattagcgtagagcatctgtggcgtttcggttcaatgtaaagaaaatatcatttttgtttttattattaaaaccaagacaagagttatatagtactatatcacttcatgatgatgtgagtctatggtcgaaaattttgagaagcaagtaccgtgtcggtgatattcataacagagcgtggatggtgtctaaaggtacatggtcttctacatggcgagagtggggaggagacaattctacacattttacgggactgtccggcgatggcgggaatttggacccgcttgttaccagtacggagactctcttctttcttttcgaaatcgctgttagaatggatctatgcgaatttaggagaggagatagagattaatggttgtccatgggcggtcactttttcgcaggccatatggtgggggtggaaatggcgttacggtaacatctttggcgagaacaagaagtgtcgggatcgggttcgttttattaaggatcgtgcgttggatgtttggaaggcgcatgtgcacaaaatgggagtgacgacgcggacagctagggaggagagattgattgcgtggtctccgccaagggtgggttggtttaagctcaatactgatggtgcttcgcgtggtaacccgagactagctacagcaggtggagtagttcgagacggggatggaaattggtgttatgggttttcgttgaatattggaatttgttcggctccgcttgcggaactatggggagcatattacggtttaaatatcgcttgggagcgcggtgtcacacagttggagatggagattgattcggagatggtagtgggttttcttcggacagggattgatgattcgcatccgctgtccttcctggtgcggttgtgccatggcttactttcaaaggactggtcagtccggatttcgcatgtgtatagagaagctaatcgtctcgcggatgggttagctaactatgctttttttttaccgttaggttttcatttgtttaattctactccggatattgttatgtcgattgttcacgatgatgtagcggggtctgcgtacccccggaacgttcaagtgtaatttttttagttttttcagttttaataaaaatgggggttcgcccccctcttctacaaaaaaaaatatcactttcaaaaggacccattcgctacccaatttttctaaaccccagaacgttttttttttttccaaaacacaacagccacttggtctttgcaacaatgcaagtagtgtagtggcgtagctaggggtaacgagttaccaaaccggtttgacaatctggttcgatcaattggccgatcactcggtttgctctaatcttgcttcatttagtcccatcaacaacacttattaaactaagtcacatctaaactttttatatctttggtatcattttccccgaacacgtttttttgaacgagtcgtagttttgaagcaaccaacgaacgtattgattattatgggcatccgtgaaaggggcagttcggtcaattgatccatcaattttatttttgaccaaactgattaggtgatcttaagatttttccttttttctttctataggaaagtgggaaaaacgcgattcacacgatactgttgctagtgcgtcgtacagattgcgatacgtgtcacaatcttgacggtctgttctatttaaaccacgtgttttaatcaaaaaacttctgtcggatcgtatcggagactttgaatttttatggcacatgaaacttcgtaggggtttgatggtaggatcccacattggtccacttactattcaattcgcaccgccgttaagtttgttaactaacgtgaggaacgtcgcggtgatgtaaaaaaaggccatgaaagttgtttctattacgatgatgccatcactggagttggtaatgtgctcttgtggaagggcaaattttgtaaatacgatcaaatttcgagtcttttacgaatttgtgacatacgccgtttaataacgtttgccgtcggttctgaaatctttattctttttctcttttatcgttacgcgtaaggaaaacgtgcggtaaattctaaccgaaaatatatataaaaaagtagtccaattttgaaatctggccgttgatggtagacaactaaactgtgccaaacaagaaacaagaggtgaacatatttttatgataagacagggcaataaatttgttgtaccaactcataaaacaatagataaattacttgcacaatgatggattattaacattaattttcttactattaatcatggatgaaaattcctttcttcacactagatatagttctttaactagttaaaaatgcatgcgatggaatattactaaatatgatataatctcatggctttatgtaagatttgttttttggtttttttggttgttgttaataaatttattattgagaagtttaattctattttggtcacaatatattgaaatatttttaagaaactaaaaagttcctatttatttttgttttcattaatttatgagaggctattaaagtcacagaaacttattgggtgaatgagtttataaacacatgagctattgagctagtagcctcttgtactcttccattttacgcgcaatccacgcaccaacaaaaagaaaagaaaagaagagataaagaatatctttaaaaagtaagtgtggagaattctttcttctcaataaacaacaacatg

SEQ ID NO: 36585 - DNA, 3000 bp, Unknown
  misc_feature (1)..( 3000): 2750-1469P.txt file - cDNA_ID_3098028; gDNA_ID_2936558; Annot_ID_194342
attagctttaaaccgaagcatatgcaacgcggccagtggattttgttcctcagtaaaaatctgtcagtttccgcctcgaaatgtgagaatttcggccacagtctactaaacaaacgcactggccagtggctatgcctttggtttcattatcttttgcttcatcttcttcaaaagccatggctttgtgctctatctgtcctcgcatccctcttcgattcaggccaaaacccatttccccttttctctcaaaacctcaaatttgtctcgcttacagggtttactcttccctgcaatctactactccctctaccagaggtaatttcttgctttgtattatgcatacactggttttccagaactatgaattacgtttaaatggattaaattatgaagtgtcgctctctttttaggacaaaacccacaagtttcgagaaagatgatcgaatactataatctccttaactttaacctttttggggtagtcttatctgaggaattgtggttcgtatggcagatgaacttggaactgttagcattgggtttctgggtatgggaatcatgggttctccaatggcacagaacctcatcaaagctgggtaaaaaagttttgatttttatgtgtagacaatctaattcacatcaattttgctactttacctctttttgatgtattgatgatacttacgttgatctttctggggcttggttgttaggtgtgatgtgactgtatggaatcgaactaagagcaaatgtgatcctctcgttggattaggagcaaagtaagagttccaatgcttcttataaagaatgatattatttactccgagtgaggttttagagctaacgtagaagaaaaatttaacgattaagaaagtatctccctttgttgcaggtacaagtcttctcctgaagaagtgactgcaacttgtgatctcacatttgcaatgcttgctgatcctgaaagtgcagtgcgtatgtctcacttttgtttgcgtctctttttcttctactttcactccatattaaaacaaaaactgtattttgctttctgtcagattgatgttgcatgtggaaagaatggagccatatttgggattagttcaggaaaagggtacttactccttcatgagacttatgctggatataacgttctattgctgaaatgtttcaagatatctgtatttcttatgtaactacagaagagttcacagtcgttcttttttaatttcttcttcgaatctatatagtaatgtggtcgatactttctggtaaaaatgggacttgccttgctactgcaggtatgttgatgtctcaaccgttgatgtggcctcatcaatactaatcagcaagcaaataaaggataccggagccttgttcttggaggtaaaggctcttagttaatctatatctagaatcactaaaaaaccttgtaacagatctggtggcttaagtcatttctatttttgatattcataggcaccagtttcaggttccaaaaagcctgccgaagatgggcagttaatatttctcactgcaggttcgtaacagcttactcctcattgagcttgtattaataatcgatcatcacttttgcatatcagattattttgtcttcgcgggtgacttgcctgtattttctaacatggttgaatcatgaatgaaatggagatttatgactatctggcacttgacattttaggtgacaagccgctatacgaaaaagctgctcctttcttagacatcatgggaaaggtatctcttttgcctgtgttttgcttttagttcttttttcttctgcaaatgaaccattttcgttactagtttgcattatatgatccagtcaaaattctatttgggtgaagttggtaatggagcagcaatgaaacttgtcgtcaacatgatcatgggaaggtatcatttgaccatctatcgcttcatttcttggcaaattccagattcttcttctgatctctttttctctttacctatgcagtatgatggcatcattcgcggagggaatacttctaagccagaaagttggactcgatccaaatgtacttgtcgaggtaactaaaacaccattgtccagcagaaagtttcttaccaaatgtgctataaaccccgggaaatttttttctgcaggttgtctcacagggagctatcaatgcgccaatgtactcactaaagggtccttcaatgatcaagtcagtgtacccgacggcttttccattaaagcatcagcagaaggtttgtgtaattgtgttactttctttttttagattctcacaaagactctggagtttgatgagactgtaattgacttttatccgtctataggatatgagactcgcacttggactagcggaatccgtatcgcaatctactccgattgcagccgctgcgaacgagctttacaaggttgcaaaatcttatgggttgagcgatgaagatttctctgcagtaattgaagcactaaaagctgcaaaatcccgagaagcttagctaaagatttgttcaatgtgaaaatgtgtttttttttgctgttgtatgaaaaatttcatctttacaacatgtcaattgataattgttaattttatatgagagcaagttaaaagtgtcaaacacaagtcaacctttgatctcctgatgttgacaaaagcaacaaagaaaagtgtttgaccaacgttgactacaataaatacggcgccgtttcggatattccgatgataagttgataacaccgaatcatttgtttcaaaaaattcttcagtgcctgaagtgttaaaattctcgcctgagctcgttgccgtttccacttcaaccatattggttagggttctttctcttccaagataagaaattttgaatgtttgatgtcataactttgaatcaagtaatcgaaattggagaaaaaaaattcattttttaagtttgggttttcatcatagacagacggagaaattaaaaggttttgttttgactcagctgcagtgatcgatg

SEQ ID NO: 36586 - DNA, 3000 bp, Unknown
  misc_feature (1)..( 3000): 2750-1469P.txt file - cDNA_ID_3098053; gDNA_ID_2936558; Annot_ID_194332
tatacaccaaagaagtgactagtgagatatgggagacttggactcatcccttcatgatcccccataagcattttgatgggtattttgagaaaatgaggtaaagctctaacagcatcctccatttcagatcttccaccgcaaattgaaatcgtgccccaaagaggtatacactctagttcataaacactcctgcttcctcttgctacattaggattttcttcaggtaacctaatgactacctcagaagttgccacctccatattcacatcgtgattcagactcgcaataaggacttctgcagtgggaacctgttctatggttgtctcgtttaggataatggccgtagcaagaactcgcccgttatcagtttcaactgtatctggcaaacttatctcagacctagcgtccacaactattaaaccttcgctaataatagtcgcatcagatactaatggctcatcttcttctgattcctggacagttacactaaaatcagaagacaaacttctcacttcagataaagtcttctcttctgaaacacttcccataatacaatccaccactccattactatatctttgtcttttctgattacacaacatgtcagctgcatcagtaacattctccagctcggagatatcgaaagtagatgagattccagagtcacacatcgtattagctaaacccaaagtaagtgcaactgcaggtgaaatctcttccatgagctggtatgcagcttccaaacctcaactggagcaaaacgattcaaaaaacttcattttcttctctaagctatagtctgatgaactctacatccaattcagcttcccaccgagacccaccagccgtttattctcaccaactaatccagaaagcagtgaatgacgaagaagtatgtacctccgctgaacagatctgacggatctatgaagacggatcctttgtgaattcgtgggattttgatcactctaacgatcctctataactcttgatcttcatcgaatcagaaagacaataaactcacacaaaccctaatttagaaacccacaaaaaaaaaatcagcctttttcagatagatcacacaagagagcagagagaagacacaaaggtgaaaactttatccaaaacaaaaacaaaagtcaggtgaaattgaagagaagggacaacaaacagagagaattgatatcaatcagcgaaatgaatcacaaaacacacagaaaaacctaaaaaagtcgaaacctttatctctcttatctttccaaaacgaaacgaaacatgggttctcctggatctaatgaggtttttacccaaaaaataaaattagaaaaattataagcactccacggaatcccaagtttctttatgtgacaacgaccttcattattaacacgttgctccaatcaattataaaactaatttattaatctattcaataatggcaacatagatgacgcgtgtccttccctcttaaaggtcaagtcttctgtttattcttctaatttagttttttgatccaagattgaaagtatgttcatgacatatgttcatgcatctcatgacacatgtagtgttatcataacgtggttaaaaaatagacaacgaaagacttttctcggagaccaaagtttgaaatgggcctacattaaggcccagtcagcgtcacttatatgggctctagcgtccacttgtttacattaaggtaagaaacttcattagctctgtctcagcttttatactttctgatcaactgataaaggcatggattctttgccgcggagtaaaaccactcttgaaccaccacagttggaaactatgatatgtgatgagcaaaccaaagcaacaacagcagttgatccgacggtctcaggggaaacagcctgaagaaccatcctatcatcagaagaaacagaaccagaaacaggtctgcttcttctgtggccatcataaattccgaagaagtgactagtgagacatgtgagcgttggacttattatcccttcatgatcacacataagcattctgataggtagtttgaaaaatgagataaagctctaacagcatcctccatttcaccgcagattgacacagtgccccaaagaggtatacactctagctcatagacactccacctccttcctctttgctacattatcatgatgacttgtagtaataaggacttgtgttgtgggaaccgcatcatcattcaggataatggacgtagcaagaactcgcccatgatcctctattccacttccattgtagcgtccacaactattattaaattccacactcgcttgtacacggctgtttgttatacgaaaatcattattagctatatattatatactccatatggtttctttgaaatatcaaaggtcctcctcatcagcgacatgaatcacacacaaaagacaaagtccttcaaactcaaacccttttgccctttcaaaaccaaacaggttaccccaagatatttaacacgttcgtcgaaacaattataaaactaatttcaacctttggatttcctcatggtcttcttctttcttctaaaagatcaagactgcctataattccaaatttatctagtttacatatatatcaatataagatgccattacacaaatctaaaaataaaaaatcctctttttgtctacaagatatgatatggaatatcctttaaagataagtcgtcaactaaaattaaaaaaatcctctttttgtctgcctctctgttcgttatgactgtttagattgttggagaaaagaaaaaccttctaattttagcaaagtgccaaaaccattataagtttaaattttctcaacaaacaaaacagctctcctctcctcttctcttcttaattccttgttatcattttcattatcattcggtctccttatttcctccttctgagggtaattgaaagaccgtaccacaatgtctttctagtttctccagaagcaaaagtttccagcaatcatctcgagggctgagaaacaatg

SEQ ID NO: 36587 - DNA, 3003 bp, Unknown
  misc_feature (1)..( 3003): 2750-1469P.txt file - cDNA_ID_3098063; gDNA_ID_2936558; Annot_ID_194335
gactcaagagcagttttactccgaggcaaagactccatgcctttatcagttgatcacaaagtaaaaaatcttctctttccctctaaaataatttaacacaatctgagaaagtttcttatttctaattcatgaaatttcttaccctttctctgcagccagatagagaggatgagtatgcacgaatagagaaagctggaggaaaagttatacaatggcaaggcgctcgtgtttctggcgttcttgccatgtccaggtccatcggtaggtcaaacttgcacttatgtcttccatcttgcctagtgacagaaatatgaagagagttttataggtcaaaattatcgataaattaaacattcagtaaccttatttagagatgaggatcattactacctgttacagtctctgcaaaatcatgagatctcctgaaagtgggtttcaatctgcatcgttttcaggtgatcaatatctggagccatttgtaataccagatcccgaagtgacgtttatgccacgagctagagaagacgagtgtctaatattggccagtgatggactttgggacgtaatgagtaaccaagaagcttgcgattttgcgaggaggcggatcttggcttggcacaagaagaatggagcattgcctttagctgagagaggtgtaggagaagaccaagcgtgtcaagctgcggctgaatatctctccaaactcgctattcaaatgggaagcaaagacaatatctcaatcatagtgatcgacttgaaagctcaaagaaagttcaagaccagatcttgaaacagtgtatgctcgagctcttacactattataattttattatttcttatttattgaaaaaatttccacaagtttacataaaaataagaagtgaaatgttggggggaagaagaattaagaccttgatgcatagctgaagtccattcctttttctcatggacttgaatgtgtatgtttgttatgtataagaagaatagagaagaaatgtttttactttggagtcttgtaggtggatatgttgttgtaatattggagatgtggcttaaggaattgtaactgaaatttatgtcacattcaccttaatacttttctgtaatctattatatataaatacttgttgtgaaagagttattattgtcttttctattgttattgttatacaacaggtaatattgattccaaagtgtttaatgagggatgctgtatcaaacatgaaaactaagtgaagggtttggagaaggatggttgtttaaagctatttcccctgctttttttactaagagagtagagtttaacaattaaaagaaacctaaataagagatcataattggtacgttaaggtttcataattcattagaattaacaaaaataatgagttggatagttgaagaatcaacagaaacccaagtgatgaatggatcaaagagagtcacataaaggagatcataactgatgttttagtgtggtgtattgtctcaaacaatgtgctgagccaaagaaaggatcttgagctgtttcctgaggcgcatctcgtgcgggacaggaccaaacactcgggtaccagtcggttggttgtactccattttcctcttggaaccatgtgaattattctgccctttcttttccttaatgccaacaactacaatggcattgtcatcaaacttgacttggcttccatcagcacgtcctttaggcatcgcagcacgcacaaccacaccgtacacgaccatccctttcttcactttaccttttgggatagcgtctttctttacttttttttgaacaattgggttagcttctttcactgaaccaacaatgatatcgccaagtcttgctcctttcttacctctcagggattgaatgcacatcacctctttagcacacgagttatccacgcatttgagaatcgtccccatttgaatgaatgtcctatgttgttgctgtgaattggaaatcatcaggacacacaattcacaggttataccccacgaatgcatatgaagaaagtttcatcaaggacgtatatttgcgaaaagaggcttgacctgagagaggatgcttccattcatcattccattggaggaggaattcatcaaaccagagaaagcattgcaaagacctccaagcaatgaacgtcctactcatattgtcgatgaatcatataacgacatcaccaacaattagtgacattcacaacaagaacaaaaaagttttaatcttgagtctgcatttcatgaaccaaagcaaagtccatgacatatcacaaacccaaaaactcaaagctcatttcgaaacttatactaaatcaatgttgcaaaaaatctaatttttaaagaaccaaactttatcgaatataataatattaagagatgaaaatgtacctttggagagcttggaagctaaagctgtcgccatttctgcaattcaaaagtttcgatctttagtgtcgcagagagtgaatgaatcttgcgattgcacaaagacaccagatttagggtttaacgtcacacactcgctgtcgcagcgatcatttgggcttgtaatgattttactcatggattaaattatatagtaaaaaagtggtgacgttgtcaaaagtaggcgtgccggagtggttatcgggcatgactagaaatcatgtgggctttgcccgcgcaggttcgaatcctgccgcctacgtttttccttttttttcgtatttaccttattttcctacattttaaaaccaggggccataacattttttccacatgtactataacatttgtttatcacaaaatctgaaattcttaattaacaaaaataaacaatggtgatgccctaataacaaacatttctttcttctttttttttgctacgaactttttacttttgttgattgttcatgcatttacaaagacaaaatccaaagtttcttaatgttatgaaaaattcctaaatcaagaagttaaacggctgagaagaggttgatcaagtggaacaattcaccgatg

SEQ ID NO: 36588 - DNA, 3000 bp, Unknown
  misc_feature (1)..( 3000): 2750-1469P.txt file - cDNA_ID_3098069; gDNA_ID_2936558; Annot_ID_194334
cgactgcgaggtgggtaacatcaagaagaatgaaaaaggtcaagtaacaatgaatacgattttcttaaggcataatcggaagaacaattaacaacattaaaaaaaaaaacttaggaaccaagcatttaagaataaatcctagtatgaactgtttctaattaatgaacttagctgataagccccagatttggaaagatgaagaacgtaccttgaattgttgttccgtaaagtttttgcattgccaaatgcttcgagaactggattagactgcaatgtgccattggggatatacacattaagctgtatacagccatatatggaatcatcctcatttttcatgaaaaaaataaacaaacctctaagacttgctgttcaactgtccttccttctacaccagacctccctcccaaaaaggcaaggtacctcatgagcatctttgtcgtctcggttttaccagcaccactttctccacttaccaaaatcgaattgtttttcccttcattaatcattgccctaataacttacaccgtgaccaaatcagtaaattatctcacgaaatagatagaagtacgataaattgatggacgtgaacatgcacaaacctgtatgcagcatccccaattgcaaaaacatgaggacttagttctccaagtgcaattcccttatattgttccatcatatcagtttcataaatatgaggcagcctttggaatggattaactgcaattaggatattccctgtatatgtctacagaagtaacacaaaacttattagtatcatagcttataccaaatgatttcctttgcagcaacaaaaagtaagagatgttagaaaaaaaggataaaatatcttacgtatatttcattaagttcatatcttgtctcaaggtttcgtaagactccaggctcatgcaagtatgaaagttttgtcatgtcatctacacctccagatggagcttcagtatccttgggaaaatatacgtttgtcacaacctgaaatccatacaacatggggatatgtgaggagaaccatggccaacaaggaagtgtgaacatctatacttgacagcaaagaacttatcatgaaaatatatcatgtgcaacaacatataaaatgacaacgtaaatcatgtttttacgtctcatgctgcatcttatcacattaagctgtttccctatcacgtgtaacggtttcaataaaattagctctcacaacatatcaagataactgccgactagaaagcctgaaagcttcattttatgcactccatatttctgagtataaacttgccttaagacattcagtaaataccaaaaacgttctttgaaggtatttttctctatttattatgttacttggtttgatcaaaacactaaaagcacaataacctacatctaccttgaatgcagaaggtaaaaacctgccgatctagggatataacgggactatgacagtatcccattccaagataaaacgtaacattaatcgacatctaaatttatcaacggacttattcctactcttttttagcctaaacccaaaggtcgaggccacgtacaagctcattgattgaagtaaaataataaagatgtaaccttatagaaacttacggttttccccttcttggttttgacatgaacgtttataccatctattcgagtaacttctccatctatccatgccaaatgtggatcttcaacccacacatgtgaacccacaattatgactggagcagcctgcaaccattgcatttcatttaacaacatcaaaaacatacattgcctctaaaagagtttacaggttcaaggggcacataacatctattttacagctttaggcaaaattatataaacgagattttaattcaggcaaagagcaagcttctagaactgagctagacatagtcaaaccaaaacctttcagaagtaaaaacaaccatagatcaagaattagcgtctccatacaggaaacaaaaaggggtaaagcaagcaaacgcaacaacaacattaacgaaacaaacaagcaaggttttcagttttcaaataaacagttgagcaaagagaccgagatatctcttagaaacataaaatggtatagagatatatttgaatttaccatttgaatagcaagaggggaaagaccccagatgaggagattagagcagaatcaatcaacttgtggagagacttgagagtgataaagtcaatgacttttcaccggaaatctcaggaaaggaaagcccttttttcttctccggtgagaatttggtaatctctctctcttatcgcggtggagagtttcaaaaaaaaaggcgtttcgttggagctccgcttggagaagccatttggggggttttattttgtctcttgtctgatacagattactagtgggtcccagtgctagcttcaaaatggacggcatcggtgaattgttccacttgatcaacctcttctcagccgtttaacttcttgatttaggaatttttcataacattaagaaactttggattttgtctttgtaaatgcatgaacaatcaacaaaagtaaaaagttcgtagcaaaaaaaaagaagaaagaaatgtttgttattagggcatcaccattgtttatttttgttaattaagaatttcagattttgtgataaacaaatgttatagtacatgtggaaaaaatgttatggcccctggttttaaaatgtaggaaaataaggtaaatacgaaaaaaaaggaaaaacgtaggcggcaggattcgaacctgcgcgggcaaagcccacatgatttctagtcatgcccgataaccactccggcacgcctacttttgacaacgtcaccacttttttactatataatttaatccatgagtaaaatcattacaagcccaaatgatcgctgcgacagcgagtgtgtgacgttaaaccctaaatctggtgtctttgtgcaatcgcaagattcattcactctctgcgacactaaagatcgaaacttttgaattgcagaaatg

SEQ ID NO: 36589 - DNA, 3003 bp, Unknown
  misc_feature (1)..( 3003): 2750-1469P.txt file - cDNA_ID_3098117; gDNA_ID_2936559; Annot_ID_194370
attgttaatcagttaatcgatcgagttactaagaagtaaaacatcaacatgttgaatgagttcgttgatagaaagaatatacctatagcacgaggtattctactatattatttgagaagtacattttaaatataaccttaatttttgtaattaattacataataatgctattagtataaattaatcaaaaaaatcatttaataacgtcattaaagttaccaaaattatttaacgacaatatttatctcttaattatagggtttattggatctaaagacgggtcatcaaagattttctaaactgaagcaaaatataccgaatattcaaatatctatttgttaccaaattataaacaaactagattttaacccgcggtacaccgcgggaacaatttattttttaaataaatatatataaaagtttgcaaattgtatctatctataaaatattttattttatagtttacaattgttattaagtaacgtcttgccaaacccgtcccgccaactcgtcctgtaaaaaaaactcatttattttactaatgttgatcttatttatgatatgtttatgaattattgtctaaatattttgtaattttgtagtaattaaatgctatcaaatatctatgcggcttgatgattataattatgccgaaaagcaatatcaaaaatgataattttgtagtaattaaatgatattaaatattttggaagttttattttagtaattaattgtgtagttaaggtagaaagattttgggaagattgttaaatgtcaaatatttaattagaagattttctttctaattatcaaaaacaattattaaatgccagtggtaacgactgtaaataaatctcaactccaggatttatttcacaaagtgactgcaaaaatgtatatatagataagttcgtaaaacaatttaattttttatatacgaaatcaactaaatcttaatcacataaaaattagcacaaaaaaaaagtattcaacaattaaaaaattatcaaatctctatgttatataagtttttatactatattcgaagaaagtgtattataccttttcaatttgtattctttaactaatttaagctaactaatatatttgctaatcttatacctatcaaaaccgactatcttttcttatctctataatatttttgcaagacttttatgtggatttgggtaaaagtgcattcaggtcatatggtacattcccttattaaataaatatggtgcacttctatgttattagctaaaatgtttagattataatttagagtcatatcataaataaaattaatattaataaaataaatggttttttggcaaaacggatttggagggacgggtttttgaatcaacattaataaaaaagtaaaatataattaatccaccgtttcaatacgggttaaatctttaatttattattttttaagaccactaatattaaacatatcaaatcatcctaatttagaaaagattatataaaactaaaaatgttatgtggtatgtataatgttactatatataaaattaaactataaaatataaatgtattagagaatgatacaatttgcaaaacttatatatataataaataattcttaaattttaaaaattactactttaaaaaaaaactacgggacgagtaaagaaattacagaacgagttttattttggaattgggttatatgatggatgtattttaatcaatatttataatatttataaaatattattaatatgctgttttaataagggttaaaacttcagttttttaacaattgtctcatggattcgtggtatagcgttacttaataacaattataaactgtaaaatataaatattttataaaaataaaattagcaagttttaatatatattacttttaaaaaataaatcgtcttgcggtataccgcgggttaaaatctagtattgataagaaaatgtcaaacggtgaatgatatcgactgacgtttcacgaatctaatagatacacgattaaatcgaatatacttagtagtgtgaatgatataaaaaaatatactaatgttttactattgatctagcccactaaccaaatcaaattaacaactaaatgtaagtaggataatttatgagaaaacttaaaaccctcgaaaagataatcataattgttaatttattactattaacataagataattataaataaaataggacagatatgaaaagtgtttatacatcacaaatctacctttcacattcttattttttggggcagcaacctcacagattcttatggaacacaaatgaagaaacgctcaaatacagcgttgagtaaaaagtaaaaacaaaacaaaacacaacacatctcctccactgtaataaaaatagtattaaaaaacatagtaaatgatttttaattaatcaaccctcaaaaataacgtagagatcgaaatacactgaatcgttgacaaatcccaaaacatgcactaaatgttttaccgcagatcgaagaagggatcatcagtgtaaaaatttggcgtcgcattcacaaaactatttatcgaaatcccagaaacgaatttggaacatagtgcgttaatcattcaaaaggtattatctttttctccgaatcttatgcaaaaatttccccttttccgtatcagggctagatttggatttgtgggtactgttcaattcacgaatcgccaatgattggtacttgccctttgagtgttaacacttttgattgaatcgagattgttattaaagtttgatccttttgatgccaatgcaggtctttgttattgaaaaatcgattctttgttctggtaattacttttgtcaatcgattctgtttcttcttcttcttatgcaatgtatgtggaatttgaattctggtttttggttaatgtttgttaggtttggatctgagaaagtgtcgatatgagagttcgatctagagggtttaagagacaatgagtggaatgtcctttggacttgagagttatg

SEQ ID NO: 36590 - DNA, 3000 bp, Unknown
  misc_feature (1)..( 3000): 2750-1469P.txt file - cDNA_ID_3098121; gDNA_ID_2936559; Annot_ID_194369
tttataatttggtaacaaatagatatttgaatattcggtatattttgcttcagtttagaaaatctttgatgacccgtctttagatccaataaaccctataattaagagataaatattgtcgttaaataattttggtaactttaatgacgttattaaatgatttttttgattaatttatactaatagcattattatgtaattaattacaaaaattaaggttatatttaaaatgtacttctcaaataatatagtagaatacctcgtgctataggtatattctttctatcaacgaactcattcaacatgttgatgttttacttcttagtaactcgatcgattaactgattaacaatcaagtgaagatggaaatttactctctttattctggctggtgttggtttggaatccagtatccaaagctcttactcgatcaaaataaattacccgaaccaaccctatattgaatgcataattctaccagttgtccaattctttagccaacaaaatacttttcacccacacggccacataactagcttgctgatgaaaaactattttttttgtttctttgggaaatatattttacatctttcttcgatacaaaaaatgttctctatatattttctaactagaaagatgtgcatttggcaacacttctagaaaaggttttttgcgtacgattactgtgtttggttgcttgtaagattgttttaaaattacctcttaaaacatgtctcggtgattcaaaatgttagacgaaaatagttacattttgatagttatgaaaatcattattcaaaccattttctggtgcgtttgtttaatttgttatgtgtgtttcgtcttattccgcaccatttgcatatagcatctgaaaatacaacaaacaaatcatatatttttagtaaaaaaatccaaaaatattaaaagattaaatagttttagtacaatggtatggtatcattcgtatggttggtgtatgaattgataataatatgtggtacacatttatattatagccgttctctgaaataatacatgtgatcatttcgaagattttatagtatatatcagttctctaagagaatgggcccaaatttgttttattgtctaaaatgaagatgacaagtctattaaattcggtcgtaacttgtaagcataatgtggataatcactcttctccaattattaggtaaacgaactgatgctgacgattatttttttcttatatctttgaaaatcatttcattcatatcatataactacagtattattttaaataaaaaaaaatcttagaatttgatatcattcaaaaaagtgttagttctaatcagggttctaactgttaatgccagtaatgtgaacattaattatactcataattgtatgcgataagattttttttaaactatagaatacggtgtaaactataattagttgaccattcatgcaattattgtttttattttattaatagcaaatttagataacttttaataaaacgaaaaactgattcagaaaactgtatcttaaagtcaggtagatagcaaaatagaaatgacttggagactaaaattgtataattacttcattcaaactataacgtccctatttaaaaatctatcttaatttcattagtgcagggattatgggaattaaaaataaattacatatggaagatggaagcgaaagcgaaaaggcttttgacgtttacctcaatagaaaatttcaatactctcgttgcatgaacatgaagtttacgcgctttgaatattaaattatagtctatagattcactattcttgtttttctttacttcgtaaagaacaaaaatttagttttgtatagagttaaaaaagacaaatacaatactagttcttacaattcactgtaatatgaatatgtaacaaattgtccgtcataagattataataatataattttattagaatgtatttttttttaaaaacataaaccgtgttatagtgatatttttgatactcgttacactgatttacgatattatttctttatataatgatatttattacgtaaactgtataatgtatttaatttttggtgaatttattttacaattagttcaaaattttaaatgagttggaaaacaaatatgaaaataagggtttgattagtttttttaattatgattatttaagattagaaaaagtgttttttaacgaatcacatcgagaatgtctttctcattatccagtttcgattttgtcccacacaaaaaagtaaattaaatggtaaggtttttttttgggttcaactattaaataagttattaactgcgaaatacaactatactcataaatacataagtgaaaaaaaaattcacactaccgaacgtatttattattattaaaatgctcataatattactttttggagtttccaatttttacaaaggttttttaattcattcaacattgtgcttcaacaacacatgcgtctctcagaaatctctccgccccagatccatctctctctcaagcaaacactcttaaacccttttgatttctcctcataattattctcgaaagctccattgtttattagttattcctgcaaattattcaattttaccattttgcttctggtttttttagtcgtctctctctctcttcaatctcttgaaaggtacttgctttatgcacaaaagttataatcctgggtttttttgtactacactgtagttattaatgcctgaacaatcttcttgatctgggtacattttgcagattgagtaaaaatcattcctttttttttctgggttatatacactgttcttcgagttctagggttccttaatttcgtttctcctttttggaaagtctctgactttatgtgttttaatgggtctagttttttcatgtggtccatttaattagctagtggaagaagatggatgaattgtgtaaagattatttttggttctaagtatcaaaaaaatttgggggtaaattgagggagatg

SEQ ID NO: 36591 - DNA, 3000 bp, Unknown
  misc_feature (1)..( 3000): 2750-1469P.txt file - cDNA_ID_3098129; gDNA_ID_2936559; Annot_ID_194367
gaaacatggatcaagtgttgaaagaccatgaccgacatatccaagaagctgtgagaagagcacgaatcgataaggctcgagtcaagaaacttcaagctgacgaagcttcgagccaacaagtcgcaaccaatcatccctcatctgtttctagccgttgatccatcagtgaggcaaaagtaaatgatcaaaccgaacctcatttgcctgaaaccttttaacacggcgtattttgagtgaaaaataattgtattttattgattcaaagattatatatcatcatagaatcaaatcttttcacgttttagcttccctgtaatgtgatattattttattataagaaagctgtagaaacagagttatatatcataatttagaaaatgttccaaaagttgaactttttaatttgtgactttttatgaaatttaccaagaaaggtgttacgagatctttacttgtgaaaaataaatgatcttgtcgagtcaaactttgttggctctctttcactatataaatcttgttatcctcttatactttccatatccaagaaaaaaataaacagaattgcagatcaaaacactctgtttcattcctctgttttttgctctgttttgctctcacgccataacgtgttctgcttacagtttcgacttcatttacttcggaaatggaactgatctgatgacattccatggagacgccgagtacgcttcagagcctgatggtatgagcaagtcaggagcaattggattgagccgtgacaatgtcccattctctcatggtcgagccattttcatcaatccagtcccttttaagcctagttctacttcttcctctgtctactctttcaaaacttctttctatttcgtcattagtcctcgcccgaaaaatcctaatcccggtcatggcctcgcctttatcatcgtccccaacgatagaaacgactccgcttctggtttaggctatctcagtcttgtgaaccggtttagcaacggtaatcccaagaaccatctctttgcggttgagtttgatgtttttaaagacaagtctcttggcgacattaacgataaccatatcggaatcaacaataattcggttaattcaacggtatctaagaaggccggttattggtatcaatcaaaaatcgaaggaaaaaaccggtggttgttcaaggaattgaagctaagtggaaacggatacagggcttggattgagtacgagaacgggaaagtgacagtcacgatcggacgttcacaagaaaaaccgaagaggccattgatcgaagcacgagtcgatctttctaaggtttttctcgagaaaatgtatgtcggttttgccggttcaatgggacgtggcgtcgagcgtcacgagatcttggactggagttttgagaacagtgccaaagactaataaaccggtttgcttcagctttgtttatgtcaaagttgttactggttttgcagcttcgttttctgtcgtgaatctcgtgatgctaaggctagtgatagttgaaggctaataaatgcttatgttatggcctaacgtgccatgtatctactttcagatttctagaaagatttacaataaaggatccatttccatagtaagaactattagatatcgtaatcttctatgagacggtaaattgctgaaaaaccagtaaggcatgtgcctatgtaggcttcaacatagatcctttcctgcaacgatctatgtcaagaattaactacaaatattcgtcatttgaaacatattctcacacaatacgtttcattgagtgaaactcggtatacaaacttaatcacaccatgaaaatagactactctccacacacaaaaaaaatgtaccagtaaggaaatttgaacacatacgtatgacatccaaccatatcatgatacttctttatcatcaagtcgggtaagccctatttcgcctgatttggctctcatctcaaaatttctccgacctttttctggacgagtcgtctcgtcttctttccctttttgtaacctcattgcaagtttgcaacaacaaaaacaatccaatgattacttcattgcatggtttaaacaaaaacaatccaataatatatatacatattttatcaataaagtatatttataagttaggttgatttttttaatatattttttttttatttttttattttatattatttactaagacattctattttggtttaaaaactttagaactaaatggtgatgatttaaaagttaaatggagtgatttaaaagtaaacaaatgtttctttagtatcaaactttgttaatttttaggtcataatcaaattgaatgacattaaagaaaaatctaaccatttaatatacatatatacacataatggaaattgttaatttggtgataataagagaagttaaaaatacatgatttggtaactctatatatttgaaaaaaatttaaatgtgtttggtaaatgactaaatggtttaaagagaatgaggataaagaaaaatgtgtttgacaaattgatagttataacaaaataattaaatagtaaaaaagctgagagaaaaaatgtgggattgtcacataagcactaaaaacttttaatatataaaggacacatagtatattgttaattaagaaaaatttggttttggtataacttaatgaaatatgatagatttgatcatgaatgtggactaacttatatctttcctaacctatatattaggacagactaacttatatacatatataagtttattcaatcaatactagttttaatttcctcctatacactcataacgtttttgttttcagcattgtgggcacagaaaaagtagaaccattttgtgcactttcgagaacagcttttgtcatctaatgccataattcaaattctttgtctctcttctctctcaattattttaagtcttctcgatcttttcaacactcacatcttttaaagttcaccactttcacttcccaaattcccaaaaacagaactaaaaaatg

SEQ ID NO: 36592 - DNA, 3000 bp, Unknown
  misc_feature (1)..( 3000): 2750-1469P.txt file - cDNA_ID_3098136; gDNA_ID_2936559; Annot_ID_194365
ttcaaaatacttgtttcttagcataattctcgaaaagcttagatatatttaatctgcatattcatttagtttctttcataataatcgtctaatttttaggcaaggaatatgtgtaacatgtttggattttatgatcactttaaccactcaagtagatctcaaaattaaagaggatatattgaattaaaaaaaatataaaaactgtgatggttcaagttctgattaattatatcctcttattttagttgttatgttaaattattactaattatttattactaattatttattacttattttatgaagtttatgtggcaaactctatgtgctaatgtgtaaagtcgtgagagagagttaacaatcctttcgattcataataattgttttgttctttagttttttttttccatccatcttgaattcagaaatcaatggtttatcactaaaaaatagtctttttcgtgtgcccagttggcgctatcatatttgacctctatatatgtttgaaaagtcatagttgaagttcactggctttcgtcacactatatattacagcactacttccacttccataacaccaaaaacaaaaacatacacacgtaaacaacaaacgcataatgcagatccacaaactctgtatttttgttctgttcatatctttgttaagctctaaaaccatttccgccgtcaaattcaacttcaaccgtttcgacggaacaaatctaatcttcatcgggtacgccgagctaggaccagcaaccgatggcatgagccggtccggagctctctccatgacccgtgacaacattccattctcacatggtcaaggtctctacacagatccaatcccattcaaatcttccaacaacacatcttcttctgtttactctttcaaaacatctttcactttctccatcactcctcgacggtcaaaccctaaccctggtcatggtatcgccttcatcgtggtcccaaccgtagcctacgagtacgaccaagactcaacccgcggcttcctcggtctagttaacctcacaaccaatggcaatcctaataaccatctctttgcggtcgaattcgatgttttccaagacaaacgttttggtgatattaatgataatcatgttggtgttaatattaactctgttaactcaaaggtttctgagaaagctgggtattggattcagacaagaactagagggaagaatcaatggttgtttaaggaagtgaagcttagtagcggagacaactacaaagcttggattgagtataagaacagtaaagtcattgtttggcttgcacctgcgcatttaaagaaaccgaagaggccattgatcgaaacacaagttgatctctcggaggtggttcttgagactatgtataccggcttttccggttcgatgggtcgtggcgtcgagcgtcacgacatttggagctggagttttgagaacaccgccaaaaacaattagttctgattttggtcttgtttggtttgatttatgtttgttaccggtttaacaattatgtattttctcttgatttttattcaaaagtggttaaaaagagagtacgtataaaatgtcaaaatcaaatttaaaattactttgatcgattaaaccattaaaaaaaatcctgagaagaaaacatgcacactgtcccggaccatcaccgtcaatgatcttcttggacatgcatcattgattttgtataaataaagactcgttaaaagccaaagcacaaccacgtggtattgtggtcatcgtcctcatcaaattgaatcagtttgttcatgtcacaagtttcttaacataagtttttaaaagatattactaaaatttaaaactaaaatattgacaaatccacgatatataaggttaaagctatcacagtttctaggtcgtatcattttctacaaaaatcttgcattacatttcagatggtttggtttcaataaaaaaacagagtttttttttttttttcattgataaatttgtgtatgtaatctaatcatagaaaaagaaaaaacacgtggcgtgtccggacgcatgtgattttgtaatttaccacttacgttgtcgacttgtctcaatccattccatggaaatggaaactcccctctggttattaaatgctcccaccaatacattctctttcctttcaccaaaaccaataatacaaacaattttgtttttctcattcaagattttcaaagtacaatcatttctttaggtactttctcttgtaataaggcttcaaatatgttattcaaaaattattttggtcattttaaattcctattatagccttacaaaaatgtgttatattatttggaccacaacataatttaaacattcctcttgaagaaaattggtcacttcaaaaaagaacaaaattcactttgacctcatggtttacttatatttacatatatggcccaaaaccaaaatacgaaaaaggttttagctttacgttcttttgattcctaggtcgtcgtttaaccacgttgcttgcgtggaaagagaagagaagtgaagattatcaaaaagcgaaaaataaaaccctcactgtgaagtaaaaatcgtaggcccaaaatagatttctcttagccgagaatttaatttttatgaatctgattattgcttttctacgaactcagtttttgcgatgtgtggttctcaaaaaaggatcgtttcttcggtgcctcttagtctctcaagtacttcttcttcttcttatcttcttcttcgcttttcttttatatatagagagagtttagtggtcaagaagcttcctcgtgtttgtctctttatgtaatcaaaggttgcatttttattcgaatatattttctggttttggtgttttctgtcaaagggtcttttaaaaatcttaactttcgttctaaatttctttactttatttcgattctaacttagggcttttgggctgggatcatgaaatgaagtattgcagaatccagaggagtttgtttggtaatcaatg

SEQ ID NO: 36593 - DNA, 3003 bp, Unknown
  misc_feature (1)..( 3003): 2750-1469P.txt file - cDNA_ID_3098140; gDNA_ID_2936559; Annot_ID_194364
cagtatctagattgccttctaggtccctaatctgcacatcgcacctcagctttcgctcgttaactgaaggcaagattcttttcttgtaattatccctaaaagccttgtcattgttccaacgagacataaatttctcaacctatcagaaagacaagacacaaagaaaaactatgaacaaatgctcgaatctcagatactctcacacaatagactgacaagacaaacctcggaatcagcgagctcttcaagatctctaacatttccagaagcagccaattctatagctttcttcataacaacacggctctggtaaaatgcagcattctacaaaacaaaacacaccttataaataaacaatctttaagaaccaattgatgaagaaagaaacaaacttgacatataaggagattcggaaaaatctcacccctttatctcgttgcatcctcaagaacttaatcctttcaacagctttatctctttgattaagtacacaagccatttgaacatccaacaactcaatttccatcttaatctcacttaatcgttcacctaacctgtaaatcctccctctaactacttcttgttccttctctacttcatttattttcatactcatcaaagtctccattgaggcaaccagagacaatctcgcagcctacaccaaaaacacacactttctaatcagaacgtttccaaaatgtaataaaataaacaaaaccaaaaaaggcttacccttttggatttcaatctgttagcaatgtgaatccggtcagtgttacaatgataaacctcatgatcagcttcatcaatcttggctttaatctcagggtcatcgtaagcgaattgcttaacgaagtaaaaacagtaagaactctctccacaccactcttcaccggaaaacacagcttcgtcgtcttcctcggtggtcaccgtcgatgattcatcaccgtttaatttcccggttagaattcgacgcacatcgaagccgtcacacagtaatatcgacgcactcatttggtcctgctccaagaaacacccaaagatcagacctttaagaagatcttcccaagaatcttcagggttttagctgaagaaaaaagatccaatttttaaacggaaaaaatgaaaatttacaaatatgaagaagaaaaaaaacagatctttgagaaatcaagaaagagggaagacaagtttttgttgatcccataagaagaaactgaggaaaaagaagattaaagagttcttgttcatgcgttcacatttcaatttatgtttcttgtttcttcttgaagtttttgtttttttttggtatggaaaattatttattaatttatttctaaacatactattattatactcttattgactctagtctttggtttggtaggtcctttaaggtcaacagtcaaattctatgtgttaatctgaactaatcaaaactactaattgccattggtcattggtattttcttgtgttggaagattttttgttctataagcaaaaataatatttagatttattgattaattttgtcaggtataaccgtggcctatacggaccttactatatgacttgttctagtacaattattgcaaattcaaaacaaaacagaaaaaattggtttcctaatcgcaataaattccacctaaagttgtttgtatttatcacatagttacttagttaagttaaccattattcaatcggttactaaaattggtaactttaaataaaattctataaattttatccaattttagtaaccaattttatttattactaattaataaaattctataaatttgatacaactttacaagctaaagaaatagagaattcttcttaattatggcaacgtattaagagaaaagaaaaaaaagagagaatttgatacaatctgaagaaatagaaaagtttaatggaattggcaaagtacaaaaagagagaaaatggtagtgttgttagttcaagtgttgttatcacatttccttaagcgtatgttacatttgcataagcataacccaatgactacggaatatgttacatttatacatttttatattaatttttttttacaacattttacaacaagcttatgagattgaatctgctatacacgtgcatctacaaacaaacatcatccgctagattatgtaaacaaaactgtttgtttttgtttttgttttttggtgaagatattttaataatcgatgatatcgttttcgcattgcaagatatatttgatattttttatttgtttccgatttcgtgtagtagcttcacaaattggatataacctctacgaaatttccacttctcttttgatgaacatacaaaggttttgtttttatttttggcatattttcattttcattattcattctctctctattatataattctaattcacacaatagtgtttttaactgtcttatgtttcttcaccaaacgtatcaaaccaaagcaaagttctttcttcttcttctcttgcaccaatacagacgaaaaaaaactcaggttccaatctctctattccttcaattcctagatttgattttgcttattgaaatactctgtgagacgttttcttgtaactttttttttttttactttcttatgtgatcatatcaaaccttaaagcaatttccaacgattcttttttgttcaaatctcttttggaaatccataaatgtttgttttgtgtggttttggtgaagagttacttagtctaaggttaatctagctgtttagttgtctgattgattaattaactcataaattctgatcagagatgttttagaggacaaaaacattctctgtttctgaaaattaatgcacttaaagtttatctgaatcttaattttgtttaataggaattagtgtctgatgatgctagtggcctaattcgagcttgagctgaggattttgattcagtttttggtgtcatgcttttgtctcaagatcacaaaattctcttcaatggggtacgtaaatatgtaatcatg

SEQ ID NO: 36594 - DNA, 3000 bp, Unknown
  misc_feature (1)..( 3000): 2750-1469P.txt file - cDNA_ID_3098145; gDNA_ID_2936559; Annot_ID_194363
ccaaccgtatatgatatactccacgaatgcgtgcgatagagccatccaagctgatcctacacaaaacaaaaaagtttcaagctaacaagaacagagtaaaatatgtttttaaaccaggattagaagaacagtacttaccggtaaataacttgaaagcagaaggtaaacttcgattaggtctaaccaataaaacgtttgatttgtttaacatatagagtccaggatcaattattaatggcattgcccgcttcttgcttcaccgtgagacacaagaaactttagaactaatgaaacactaaaagaattcagaaaatgagagaaaaaaaacttactatttccagcctaaggaacttgtgtgctcgataaagttaaggttccggtccaatgtcgaaaatgtatgaatcagatctataaacatagaacagtttttgatagtcttaacaaggggaatatcaagaacacaaggaaaagattgaagcatttaccatcttgagtcacgaggggataatccgaagcactaagattgataaaccaatcccaatccggggttcttttaagaagaatcgcacatgcgtgaagcgtattcgccaccattgttggtccggtataagtcacaagattagctttagttatcatatatacatttcctgcttttgaatacataggatcgtttgaaatgcgagaagctaactctgatctctcatcaaccggtgattcaagatccaagtgaacaatgtattggtttcttggatggtacaatgctctaagagttctccaaaggctttcaagatctcctttagatcctgaaacaaggtaagcgaaacgtgggagcttgtcgtcttcacgaggttgttttcctacaacgttcgaatcatttttggggaaacttgataaagttccattaatcggtggtcgaagtgaagacattaaaccaatgttgaaggaagttgcaaggagaacaacgcagacaagagatgtgataacaaatgaaaatacatatttcttctccatgattacatatttacgtaccccattgaagagaattttgtgatcttgagacaaaagcatgacaccaaaaactgaatcaaaatcctcagctcaagctcgaattaggccactagcatcatcagacactaattcctattaaacaaaattaagattcagataaactttaagtgcattaattttcagaaacagagaatgtttttgtcctctaaaacatctctgatcagaatttatgagttaattaatcaatcagacaactaaacagctagattaaccttagactaagtaactcttcaccaaaaccacacaaaacaaacatttatggatttccaaaagagatttgaacaaaaaagaatcgttggaaattgctttaaggtttgatatgatcacataagaaagtaaaaaaaaaaaaagttacaagaaaacgtctcacagagtatttcaataagcaaaatcaaatctaggaattgaaggaatagagagattggaacctgagttttttttcgtctgtattggtgcaagagaagaagaagaaagaactttgctttggtttgatacgtttggtgaagaaacataagacagttaaaaacactattgtgtgaattagaattatataatagagagagaatgaataatgaaaatgaaaatatgccaaaaataaaaacaaaacctttgtatgttcatcaaaagagaagtggaaatttcgtagaggttatatccaatttgtgaagctactacacgaaatcggaaacaaataaaaaatatcaaatatatcttgcaatgcgaaaacgatatcatcgattattaaaatatcttcaccaaaaaacaaaaacaaaaacaaacagttttgtttacataatctagcggatgatgtttgtttgtagatgcacgtgtatagcagattcaatctcataagcttgttgtaaaatgttgtaaaaaaaaattaatataaaaatgtataaatgtaacatattccgtagtcattgggttatgcttatgcaaatgtaacatacgcttaaggaaatgtgataacaacacttgaactaacaacactaccattttctctctttttgtactttgccaattccattaaacttttctatttcttcagattgtatcaaattctctcttttttttcttttctcttaatacgttgccataattaagaagaattctctatttctttagcttgtaaagttgtatcaaatttatagaattttattaattagtaataaataaaattggttactaaaattggataaaatttatagaattttatttaaagttaccaattttagtaaccgattgaataatggttaacttaactaagtaactatgtgataaatacaaacaactttaggtggaatttattgcgattaggaaaccaattttttctgttttgttttgaatttgcaataattgtactagaacaagtcatatagtaaggtccgtataggccacggttatacctgacaaaattaatcaataaatctaaatattatttttgcttatagaacaaaaaatcttccaacacaagaaaataccaatgaccaatggcaattagtagttttgattagttcagattaacacatagaatttgactgttgaccttaaaggacctaccaaaccaaagactagagtcaataagagtataataatagtatgtttagaaataaattaataaataattttccataccaaaaaaaaacaaaaacttcaagaagaaacaagaaacataaattgaaatgtgaacgcatgaacaagaactctttaatcttctttttcctcagtttcttcttatgggatcaacaaaaacttgtcttccctctttcttgatttctcaaagatctgttttttttcttcttcatatttgtaaattttcattttttccgtttaaaaattggatcttttttcttcagctaaaaccctgaagattcttgggaagatcttcttaaaggtctgatctttgggtgtttcttggagcaggaccaaatg

SEQ ID NO: 36595 - DNA, 3000 bp, Unknown
  misc_feature (1)..( 3000): 2750-1469P.txt file - cDNA_ID_3098157; gDNA_ID_2936559; Annot_ID_194360
cagcattaccgtcaagacacaaaactaccaatccatttcctttgcttctgttacatacgatttatgtataactgtcaagaacgtgaatgcatttttcaatacatatcataattgaatcaatattattgatgataaaaggttacatttgttctgttgtattataatacctttattatgtaaatttgaaacttgtttgatctcgagtatgaattagattcgtgacttcgtgtacgaaaacaataagaaaagagagtcaaactaattaatttaggctaaaaaccataatggaacaaacaacacacatgactgaaacaaaacagcacaagtgctctttgaaatcatcaaagtgcatgtacatgagttgtctcttaaaacaaaagttttattcaaacgttgcacgtgtggtgacggtggaactagatccttctttgttgccattaaagccggtaagattcacacaccggttacgcttactacgcaacggaacctggcgactgtaatgtgctctctctacctctacgtgtcattatcaaatgttcatgacagtcgtttcatcaccttctaagttgattaacttactcggaccgtgaagtccataacgttgagccgttgaccattaacccttttttactagctcgttgacctaaacaacaacagaaaagttggaggaaataatgatactataatcttataaatatacaacttatattgaaatatgtgagaaataatgatcatgtattgttcattaattatatattctgatcattgattctaaattctatgccgcacatgacatgcaaaggctatgtaagctatgaagcctatacgtgttgacaaaaatataaaatacgcattagcataaaaacaaaaatcaaataatagaaaacttatgtgaaaaaattaatgaaaaatattttacactactaatcgaattggtttagttaccgaagccgcgttttagccgaaggcgaagccagagatcgaatctcatagatgtgcgactccacggccgtcgtctagctttcttgaacactaatctcataattgtaattatatatatatatatttatatatatatatatcactacaagaaaaaggttgtcttggttgtaaatcctctcataattttttttattaaagtctaatttttaggatttatgactttttttaattttgcagtttaaacttcaagttttagaattgagagtttatatctttacaagtttagagtttaataaatttgttttagggtttataattaatgataattatttaatggtttagtttataaacttttttttttactatattacgaaattttccttcaatgtagagggtagaactcatcatatttcggtctcacatcttcatatggaaactgcaatatgtcaaaacgagatattttcctactccacattataattcaggatacatctttgcttttctttgacaaaactaaattattttttttaacgggcagctttgaaaaaactaactcgatttagctaaattagttttagtagtgtataaaatactatgcattaaacaaaagattcaagtcatgtactatcctccatacgcataaccaatcataggcattgatggacatagtcctagacgtttgggtattcggttctcgttctttaggatatcaactttaggatccatatagaaaccaaataaattttggtccggttttggttttgttaagatctcaactttagcttcagtatagaaatcaaaagaattttgattcggttttggttcgagtaccattcagtttaggcatgttcgaatatagttgaatcaagaaccgatttggaatatcttttttctctgattctaaaatacttgatcgaataaccaaataactaaaaaatctagttgagactctgtttggttccattcgacgttgttgtttttcggttcttgagtatttacccaggatggatccgtaattgggtacaataatttaatatatttacaaggatattgaagccatttaccacactaagcattccaagaatacataagcaaagagagtaaatatggtatcatccaaagaatgaccaaaaagaagactggaacaaccaaccaaaaatgcaagaactgtaagctaataacacacataaaacattgattttcaacaaaactaacattgtttcaatactaaacgagcaaacaaacaataaatgacgaagaaaaaaacatacaaatgtccctgtcttttagaacataacctaagagactctttctatgatattactttacctattaacatacaaaaactggattttgtattattgtatataaatgtactagagtagagagagtcaagaagctccaaatctgacaagtatgatcgcaaactacagttcctagaatcgaaaaaatattgaaaatagagttttgaatatggtactcaaccaaaagatgaaagtgctactaaaacagaaaacttggtaaggagatcaagaaagatccattgcatatcctagaatataacatactaatcatcaatgtatgatgcatgattcgagaatggcatttcacatgtttgaactcataaaccaaaggtttagagaatacgcgatacaaatactacctaatttacactattggagtctcttttacgtttaaaataactgtcgtttgggacaaaaccacattatattatgtgcttgagaggattacgggttttgacccaaaacgtaagtggtaaccttcaggattacggtttttgttaggtcttcgcagcgaacgcgttttgcttaacggttactaattactcgattgaccgttgatccatcagatacaccaaccggacggtcctgaatcgtccacgttttgcggttaatgttaggcctactagattaaagtgaggcccaatacggcccattaattcaaaattcaaattttaaaccccaactttctttctactacgctccgtcttctccatctctgcgaaattcttaccgttgtttctctccttcgtcaatg

SEQ ID NO: 36596 - DNA, 3000 bp, Unknown; identical to SEQ ID NO: 8876
  misc_feature (1)..( 3000): 2750-1469P.txt file - cDNA_ID_3098164; gDNA_ID_2936559; Annot_ID_194357

SEQ ID NO: 36597 - DNA, 3003 bp, Unknown
  misc_feature (1)..( 3003): 2750-1469P.txt file - cDNA_ID_3098208; gDNA_ID_2936560; Annot_ID_194420
cgttctccacaaacatatgactgatttgtttgtaacagagaggtgtataataaatagatcgtcccggtcccgcataatcttacaaacttaccgtttagaattgattatcaccgtccgatatctcacagttgcaacctgatgaaactaaacggtccagatctctcgaacgttgtcagattttcttattttttgtcaaccctaacaagaaaaggaaacaatcgaaagtttcctttttttttttgaagaagcgaatgcttataaatgaagacctccaaacatcactcattctctcttcttccttgagaaatttaaatccattatcattctctcttcttcttcgataccataacaaaataattcttcatctttcattatctcgttttgtctaaacagaacgatcgttttagaccggatgctctcgtcttctcagcaaacaaacaatcatcgtaggattgatctccatcctctgttgtgactcatcttcacttaaatccaaacgatttcaaatccggtcaacgacggacaaccgaaaaaataattgaatttttggccacacttagttgaagtgttaaatatttaccacttgttttttttaaaaccaaaatgtcaaaccgaactgaacatctcgtccttttggtctgtagttttgtagtgatatcataaagttttgacatatattagattaaaaacttggctaaattttattttattttcacaaatattattttaaggattcgaattgcgcattgacacgttcttggtcacttatttgtttcaaagaatttgatgatattatcaaccttaataatattctgtaaatctgttattcttaacttagtcacttcgtaaaagtctactgcattatcatttcataatttagttgttgtggcagatctttcgttcatacgggccaaacgcgctcggtagaacacactaaatggacacatatttaaaagagaataaagatccaatgggctttgaataaaacataaacaatattaaaaaaatgcggtgagcgtggatcgaacacgcgaccttcagatcttcagtctgacgctctcccaactgagctatccccgcttttgctttggtttcattaatcactttattcaaaccctaaattcatgattatcttctaattttatacggacaaatcagtaacactcagcaatttgagttcttgtggttgctaaagtttttagtcttatctttccttccaaagacaaaactaaggaagcttcaatgtctgtagtagcaattaacatgaacacgatcaatcacttgtccaaaacctgtaaaaccccaaatatccaatcaccgatttgcttcgatcgcaaacccttttcatattctctcattcctctgtttccaaaaaccctaaatggcttctcctcttactcttcttccgttagtcgcagatcgagattcatcattcccaagagacgacgattctctgtttccatggagtggcaagactgctcgtaaaaatctctcctttatcctcttctctgcttcgattccactttatttgtagaaattgatatgattctgttttcaatctttgttggtttggagaaaacagagtaaagatggaggtcgatgttccagtatcagtagcgtataatttctacttggatcgtgaatcttttcctaaatggatgccttttatttcatctgtccaggtggatttgattttttgatctatctctcaaagtttcaatctttgaaagcttcttgctttagattttaactcggtttgtgttctgttgttaggtgttaaaggacaagcctgatctatcacgttggtcactcaaatacaatgcttttggtcaagacattaagtattcttggcttgctcgtaatcttcaggcaagaatccatcattctgttttagatcaatgctcctctgtggtacttagactaattgtgtaaaactgttggctttttgttgggttgtttattgtgcagcctactcctaatcagaaaatccattggagatctcttgaaggtcttcctaataagtaagcaagagatcataaaggttcaatcttactctaatgtattatctgtttgagcctaacatttggtacttaaccaatgcagaggcagcgttcgattctttcctaaaggtccttcatcgtgcatcgtagaggtaaagaacactccattttatcacacatcatttgatcacaatcctactagaatagttctctaatgcttttccttttttcttgcaaatttgtttcatcttttagctaaccgtatcatatgaagtccctgccctattaacccctgtggcatcggtgcgtatctttttaccttaaagtctctatgtcaagctgaatgtcacagactgtttttcttattaccttaactttccccaattcaggtactacggccttttatagaaagcttgcttagaggtggacttgaacgatttgcagccttggccaaaactacttaaaaaggttagcttttttattctaaactccacttaaaccatttcattatctgaaaaatcaacactttgcttttgcaggaatatatgtatgcatctttctcttggtatatacgtgatttgaaaactataccagatctcataattagggagatctctattgtaacttttgtatgattaaagtgacaaatatttctttctatcataacagaagttgtgtggtttaggtcaccaagaaaaagagaaactcaataaaccaaccagaaatcttgtttttgatttgagtgaaaccaaaaaagaacaaaacaaaaccaaacaagaaacaaagtcacggcaaagagagcttttctctttccaatgttaacttatttgtctaaacacgacaacacactttgcgtggagtgtcctaacacattcaagagaatgggtgctgaaaagtctctgttcctaacttgtctctttggaaaaacaaggttacatcttaaatctttgaacactcattttgatcaactctaaatctctttctctcaagatcaaaagagatg

SEQ ID NO: 36598 - DNA, 3000 bp, Unknown
  misc_feature (1)..( 3000): 2750-1469P.txt file - cDNA_ID_3098223; gDNA_ID_2936560; Annot_ID_194415
caacggcgcaaaacgctaaacaaagtttccactttaaccttatcttgccatcttcggcaatgtgatctctaatcgctctgtttcttgtcttgttgattcgatcaagaatcgcgttttcttgaagacttagaacgtgactcacgacgcggttgagtagataatcaagaaatacgacgccggttgataccaagacgatggtcaagatcttggtcgttgaagttgacgggacaatgtccccgtaaccgactgtagagaatgtgacgatggagaaatagaaagcgtcgacgaaaagattggtctcggttccggagaattggtctcgaaagaatgagtatgtgcaaaccccgaaggttaagtagaccaagaggaggatcatggctagtacaagaatggtccatttcgattttgatacggtggtgacttgagtttcttccggtgaggactcgttgggatggagaaggttctcattgagaaggttctcttcttccatttagaaaacgctcttctttctcttcttcttcttggtagcttctgaagagattatcaaatttgaaagaaaaggttttttggttttttgacgactgagaattttgatgttcatgatctttacgttgcttctctatctatcttccgggttttgagttttgtttggttaagaaatttatccacagatcagggaagtaaaacatctgattaatgaggcccatcaaaggcccaaacaattatctttaaatatcgaaatccaagtcagagctttgtattggattaaggtccatagggatcatgactacataaaagttgtgcgtaaaacgctacgttttgcgttttaagatgaaacagagttaatggaaatggtatcatcttccgtacacaataagatctcgcggggaattgggaatcgcaagaaggtaagtggcccccatgactactactactacaacggatatactactttaaattactaattatttgttcttatttcaaagtggtaaaaatattctcatgtaattaagtcagtcatgtgtgatgtgttttgttgatgacgcaagcagtgacgctttttttttttgttcgagttgttttcaaaacttggagatttatcgaaaaagtatgttaacatttttttccgattatcactataattaatctcattagttgttttcttttcttactatctatagtacttacaattgcatgtaaacatgccaaattataattagttgacaagtttatttgttcttgtcttataaggagtagttactagttagcacaaaattaacttttaattatgacgttggttttggttagaaacctttgaatataattatcactttattttttaataattggaccctcatgtttttccttattacagaagacaacataaacagaagaataataatcaagttcattatttgcttgaacaaaaataatactaatatacatacattatgacgagtgtgagttaatcaatagccttagcggccaagaaaatggatgtcttaacgctcacaaggtgaaatatgttttactacaatatataaagttgacttttttgcttagttgccaagcaagttagtcaacttccggtaaagtggaaattctcccagtcttcgttaatttgtttgaattatctacggaattgtcttcatctaccatttaatattgtaaacactgtttgttaacaataatcggaggggataaatcaatatgcaagtggttccttgatcatcatgatttttgtttttggtttttggttttagaacaatagcaaattaagtaaaataatgtactttatttctaaaaaccagatagtaactttattttaaatattaaaatgtttatatcttttatttttatgtttgttaaccaacatgcaattgcgaatctgatctggtttattgaaactacaagtgttgatcatcgatctaaattaacgtaagatttcgatttttgtatcattgaatcttccaatctcttacagtggttactaaccacactccacgctctctttacttggaataaacaagttttcatattaactcacgagatttttattttttggtgattccataatatgagatttgtgaaattatcatgttcattgttcggaaaaagtaaaaccaactacacaattctgtctgcctaacatttttcatatacaagtactagtgaacaagagtaaatttataacatgtgaatttagagaatgtcttcctaaaaagaagaagatttatgatattttagtaaacacttcgaaaatggataattattatgttttttgaccatgacaatagtttattcccactctccttgcttctcaagcaattatcgcaaaccccaagaaacaagagttgcatataaaaaggcaaaattctcatatttttctgcagaaacaaatttgactctagaaaagttgaatatattaagaattaaacaaagattagattaacaacaacagctacgctcacgtctgtcttattcccacagagtttcaaaaaccttttcgcttttagcagcttctcgccacatctttcaggtctgttctcttttaacttctttcctttttaatttcagatttctgattggttttagggttttaattagatctctgattttacgggcaagcaaaaagcatgtgacactttcccttaacagactctgtttcatttgtgattatttctgggaactctctagattgaaatttaacataaaggacaaatcttttcagaaatcacaagtgggttttttggatttatattagtaaactctgagattgtcaatataggactggcactggattgaaatgtttccttaaattctttatttttctctgggttttaggaaaaaaagttaaaaaagctttatttttcaaaacctgaagaagaaagctcgtaactttatagttctttttggttatataccgtcgatttcgatctgggtattatcagttttcttaaaagttaaaagctttctgatttttgtcagcgccgaaatatg

SEQ ID NO: 36599 - DNA, 3000 bp, Unknown
  misc_feature (1)..( 3000): 2750-1469P.txt file - cDNA_ID_3098228; gDNA_ID_2936560; Annot_ID_194414
ccacaggactagacctcggcagccatagccagcgagcaggccaagacgaaactggaacggcgagtcaagaaccactcccaaaagtatcactcacccgaatcgcggctctaaacaaacccgagatcccggttcttcttctaggaaccgtagcagcagcaataaacggcgctattttcccgctttttgggattctgatctctagagtcatcgaagcgttcttcaaaccagctcatgagttaaagagagattcaagattttgggcgatcatatttgtagctcttggagtaacttcgttgatcgtctcaccgactcaaatgtatctgtttgcagtagctggaggaaaactgattcgacgaattcggtcaatgtgctttgagaaagcggttcacatggaagttgcctggttcgatgagccacagaattcgagtggtacaatgggagcaaggctctcggctgatgcaactttgattagggctctagttggagatgcattgtctttagccgttcaaaatgttgcatctgctgcgtctggattgattatagcgttcactgcgagttgggaactagctcttataatcttagtgatgcttcctcttattggtatcaatggttttgttcaagtcaagttcatgaaaggattcagcgccgacgcaaaggttcgtacatcaaccggtttggttccattttttttaggctctgcaaaaatcctttgttttttttcttgtgaatcgaggaacttactctggttttggattactatgcagtcaaagtacgaggaggcaagtcaggtagcgaatgatgcggtagggagtataagaacagttgcgtctttctgcgcagaggaaaaagtgatgcagatgtataagaagcaatgcgaaggtccgataaaagatggaataaagcaaggtttcatcagcggattagggtttggattctccttcttcattctgttttgtgtctacgcgacaagcttctacgcaggggctagattggttgaagatggcaagactactttcaataatgtcttccaggtgaataactgtcttaatcactgctcaagtactgttgaaaatctctgtgacctagtaatgaagaagaatggatcttgcaggtgttctttgcgttaacaatggcagcgattggaatttctcagtcaagtactttcgctccagattcgagcaaagcgaaggtcgcagctgcttcaatcttcgcgatcatcgatagaaaatcaaagatagactcgagcgatgagacagggacagtgttggagaacgttaagggagatattgagctgcgtcacttaagcttcacttatccagcaagaccagacattcagatctttcgtgatctttgcttaaccattcgcgcaggaaaggtaaacaaactcttaaaccaagctgtatcttaggaatttttaatcttcgattagactattaaacaaactctttttgtttttctcttagactgttgctctggtaggagaaagcgggtcggggaaatcaacggtgatctcgctgttacaaagattttacgatccagattccggtcatataactttagatggagttgagctcaagaagctgcagttgaaatggttgagacaacaaatgggactagtgggacaagaacctgtcttgttcaacgacacgattcgagccaacattgcttatggcaaaggaagcgaagaggccgctaccgagtctgaaatcatagccgctgcagaacttgccaatgcacacaaattcatctctagcatacaacaggtaatggaaaaaaaaaacagaacaaatttgtaagaactgtgtttttcaaagtttcttacaatgcaagcaatacaatttttagggttatgacacagtggtgggagagagagggatccagttatccggaggacagaaacagcgggtggctatagcacgagccatcgtgaaagagccgaagatattgcttttggacgaagcaacaagcgctcttgatgcggaatcagagcgagtggttcaggatgcgcttgacagagtgatggtaaaccgaaccacgatagtggtggctcaccggttatctaccattaaaaacgctgacgtcattgccgtagttaagaacggtgtgatcgctgagaaagggactcacgagacgttgatcaaaatcgaaggtggggtttatgcttcgcttgttcagcttcacatgactgcttctaattgatgtgatatatagttttggttttatgaaaagctaaaacttcagttttggcttgagtcaaaaactagccaatgtactaaaggttttgtatttatttttttgttgttgtttgtatacaagttaacgaagctgatatatatatcttgtctttcaagaaagtatgcatacctgtttcttgaatatctttgttgacttttgtgcttagtcaacttccggttaaatgaaaatcctctcagactgttaatttgtgtaaattatctacggaattgtcttcatgtaccatttaatattgtctgttctatacttgtttcctttttaaaattttttatgattggggtttgtgttttaatttgatctctgattatacgagtaacccaaagcccaaaagcatttaagcatggggactccttttccctttaattaacattatctgtttcatccgattactattataaatcacaatttacttctttaataactacaacaactcttgtctctccatctgtcagttttaaattctccttctttctcttaactaattatgtttacgtctttacgattaattaaaagtgtataaaaaaaagaatcttattcattgccgagcaactacaaatcaaagtgtaaaactataaaactttgttactaatataaaattgacttacaaatcaaagtgtaaaactatacaactttgtaactaatataaatttgactaatttcatttttgtttaatcttattttattttcactaaatctttatacttaactactaatctaatattacatattagtattttaattaatatg

SEQ ID NO: 36600 - DNA, 3003 bp, Unknown
  misc_feature (1)..( 3003): 2750-1469P.txt file - cDNA_ID_3098247; gDNA_ID_2936560; Annot_ID_194408
tgcacaaggccgactcatataaactgtaggcccatgaaaacgaagcccatatatataaatgggacgatattcaaatttttcttcgatttaggactttggaaaccctaggcgtcctagtcgattgcgagatccaaccttatctctctggtaagtttcttgctcctgatctctctcgctatttcttcatcggaaaatacacgatttcggctgtgttccaatctcttttcctaggtttggttaggttaggtttttagaagaagattcgtcttgaacgatgaagaagcctacgaacaagcaggctaaggcttaacattggtcttttgggacatcattaactctccggttccagatggttgtgaccctcgtgtggtccgtccgagtattaaacggcttttggagaatgaaggctactgtggtcctctcaccgtcactgctgttggcaaactagcgaacgtccctactgacaccctgagagcactctattccagtggaatccatcttatcatctcccccttcggcggttagatatcttctcgaaacagaggattctgccttgtggcattgctctgtatgctgccttgatcctcctgcccacggctttgaaaatttcatcacacatctatcaacgggagattataaagtgatggtaattaatcaagtgtttgtttcacacatctacctgtttttttttttttgcctttgtttgacttgtccatgttcatttaatgttccagctgagtttacctaggaatactgtgcctcgtccgccggttgatctctccagggggagtaagctaccaaaatcatgttttactttgtttgcccaccatgctttaccacaagcttcactttctcttttatagttgcatgtgactgcttatctgatggagagcgatatgatgagtcgcgatcagccctggacagacgagcggcctccacttcctacagatttatcaacaagactcgctaaattgaaagacttggaggctgtgaagtacgagggtgagtcgtttgtctattgggacatcaacttgtgtccgcttcccccatactgtgatgctagtctggtcggtccgcgcagcaaacgcttcctgaagaatgaaggcttctctggtccaagaagaagcaaattatggaaaaacagacatatagattctatagagacacttaaagcgatagggcgatcttatttgatgtattgagagagccacttgaagccttcaccatatcccatttttctaacaatgctgcacataaacacctccaatggtctcacattcgaatcagttagattcactttgcctttaccagttgtgaaattggagaggccaagatggaatcgaagctcgtcctcagatgcagcgtaaggtatgtcgattttgtttcctaagatgaggaatgggacagtggctaaggattcgtctgagagaagtgcatcaagctccttttttgattctgcaaatctctcctggtcataagcatccactaagtagaccagagcatcaacctgtgaaaaccactcaacaagaatcaataccctttagcttcgagagacgacgagtaaagagaaaagagacaaagaggaagaagaaaacttgtgtggatattctaagcaagtattaaaacggcaagcagcgtgtagattctgaagttattgtctgtacaaacggcaagaagtgtgtagattcctgtaataatgaaacggcgccgtcgtgttagcccacgcactattgcaagcttttggaccgagtgagagggcccattgagaggagatatttgcttagcaagtggaatggtctctttcaaatactctcttatcttttatttttttctacaacacacataagtagttcaaaatcgaatggtataatattagtgattagtaaccgaacttcgggatttaaaaattgttctttgtttacttcaacctacaaatttttaaattcagacgaaaagatatttctatttgtagcattttttattaatttttgtcaacgtattttctagtaataatgggaggattttgccgaccatcaatattgtttttttttcttttcttttgatttttgtggatgttaataataatcagccgaaccaaaactccaacgtagtagataagatcagaacagaataagataagcccaaatgtctgcgtccaagtgtactttgagagtgggaaaaagttaaaagaattcttatgtgtgttcgcatttagtcttctttatctcaacgtgtgcaaaaagttttgcatcgccatacaatacataactctctttttttttcatacaaatacaatacatacttaaacattgtgaatgactataataaatttttgtatctcttagaaaatttgaaaataattaattgtttaaatacatataacgtatactatatttagaatgttatactaaacaaaagataggtgacaaaaaaaaatacagcgaatgcgttgacctgtgtgatctcgtaaccatacaaaacttttttttgtatatatccgttgttccagctttcacaatttcttaagtaaaatcagtctttgtgtttctaaatacgttgttcaactaaccactaagataattcgaaatccaagtattttaaaagtaataaacagtcaaaattcaaagtgacaactatagtatttatctgaacagccaaatcaaaccacagcacaaagaaaagtcaaaaacatttggtcaaagcttcaatgttgggaaattgttattacagcttacattattattagtaaaataatgattatatattaccgaagagaattaaaacaaattaaggaacaaaggaacagaataaagggtaaccttgtaaattctaccttttaaagttgaactctttctcttctcattcatttgttctttcttcagagaaaaacaaaaaacagagcattttttttggtcaagagcaagaaaaaacagagcatacttttgcaaaaagcagagcttggagcgctttcttgtcatctaaaattcaaaggcagagacgatg

SEQ ID NO: 36601 - DNA, 3003 bp, Unknown
  misc_feature (1)..( 3003): 2750-1469P.txt file - cDNA_ID_3098254; gDNA_ID_2936560; Annot_ID_194406
aatgcgcatgactaatgttgcaagttgagagcatcgtatgcaacttgcggcttgcctcgattttagcgaaaagcgtacgataagttcatattcatttcacctttttaataaatattaaaatagagcagtgttattttttaatatgttatctgattaactataaatatcattaagtattcaaattagttaaaaattgttagaatcagatctttgtcgtaaattggagatggcataaaaacgaaaccaagagcagaatgtaagttactttaaataaattagttttatttaagaaaagttactttcaatagcggtaggctaataagagattcgtgcgtatgtttatttgcatgaagtaccggacaaaatcagaacatgagaagtgtcgaaatatcacaattgtatataagttattttaaaaataaaaaacaaaaaacgaatattagttccgataaaagagaatatttcgatacagtaaaagtgttttacatataaatcgcactagaggtaattaaatacataataaatgtgagctgtatatatatataattaacattattacttacgtcattttcacagagaaaatagtgaaaagtatttagtagttagatcgggggcacacacaaaaataattgaaataggtgtttttaacttaatggataaaagagagagaaagaaataatctgacccgtccgatggattcccacaaggaggcattgaaagaagcaacggtggtgatgacttgagggaaactggtggctgcagggtaaaccccaccgaacttagtaccgggtcccacatttgaaacgccgtgtaaagcctccgaccaccactcgtaccctttgattcctagacgtggtatcgccgccgcagtgttccctaacaagctcactttctcggccaatgtcaaccgtccgatcaaatctctgactctctccggtataggaactgaaagctggcagaatctcagtgtagctgttgctgcgtcctttgtatcgcaagcaaacgtttcacggctatgaacgcaaacgctgctgctgcttatcaagaagaagagaataacggccaagaacgccattttgtggagaatcatttctttaaaacaaatattatttactcctcttcctagtttcttttgggttttatggaagagagaaaaatggaaatgtgatgaaagacttgtgagagtgaagtttgcgtgttatgtttatatagagaggcaatgataatggtatgataaagataatgagtagagctctcttcgtgaattttctttactctatcaaggaaatatcatttttctttaatatatatgaatatttcgaaaccaaacatatttagatataaagaattggttttatatttaaatttacatttaatttgaggagaagacaagttgagagatttgatgagtgaactaacctgccattttggatatgtaaatggttagaaagtgttggaagacagttgtcactatgtgggtcctggttcttaagagacttttttatgtgcagttaaatagatttgattataattcgactttgttaatcatataattagttacttgaatttcgttttattatgttaggttttcatcgtaagaaagaaaaatgttggtttatatctgaagcaatctgttttgcaattagttttctttttttctaacagaactttttgtttcccacttgacaggtaaacaaattaacttggcttgtacgagatgtcacaccattctaaattccttaacgatctttattttatttttgttcttttttcttacatacatgtggccggtgaagtggaattgcacgaatcatttcttatatagatgtagatatgcgaatatttataatagaggagtaatttttttgtactattgcatcctttgagcagagtaaatggatgtggaacaaattttgcggataatcaattatatacaatgttagaacaagtatagatcgaatcttttctggttgagtattaatgttttagtcaatacatactgtttaatttgtttaattacccttgtaagaatctttttctggttgaatattaatgttttagtcaatatatatagtgtttaatttgattttttagaaaagtttagtctggatttaccgttttcattgcatatggtttgtatgatccttttatacatattttgaataataaaagatgaccacaatttgaaaaacaaaaccgtgaataaaggcagataaaaaccgtgagaataggaaaggataaattaaattttattcgagcgactaagaggtcacgaagaagaaggcaacgtaataagtaattgaaaaaagaaatagtagtataagtatgggcatggtgtgtcggaaacagacagcaacttgtgctcttgttacttcggtgtcccaaatctcacactctattggctcatatcttcggtgttcaactgttcattatgaaattattactactaaagtaataactcattattggttattgcgatccttgggaaacacctaatcagcaataaaacttccaaaactttatttttaccatataattaaaaacaaaacgccacggactgtaacttaattaattagcaccacagaatttgtatgttctaagttttgagtgggaaaacccttgagtaacgcattgatcataagaagaaatgaaagtagtcaatggaatataagggtactgaaaagaagagtcccgaccaatttcatgaacaaattaaagtagtaactttaatcctaacccatctgttttgtgtcccaccaaaaaacatacagtcttgtgtgtctttgtactactagctatgatctctagagccatatcaaagaatcgtaatcccgaatatataatgctaagatgtgactcgtgttggtcttgctaccaccaaatctcacaaccatctaatcaaatccctatcacactcacttgctttataatgaaaccaacatcggaaagatttcaagaacgcaaagtagtgagatcaagagagaaaaaaggggagttacaatg

SEQ ID NO: 36602 - DNA, 175 bp, Unknown; identical to SEQ ID NO: 536
  misc_feature (1)..( 175): 2750-1469P.txt file - cDNA_ID_3098254; gDNA_ID_1591745; Annot_ID_151460

SEQ ID NO: 36603 - DNA, 3000 bp, Unknown
  misc_feature (1)..( 3000): 2750-1469P.txt file - cDNA_ID_3098260; gDNA_ID_2936560; Annot_ID_194405
agtgacttgcctacgaaatccgatatgttgtacacagtgatgagcaaaatgggataccaactttggagaagttgggacttcaaattctcagctataaatcctggaaatatcgataaggtaacagagtagattattagcatacccgaagctggccacttgattttcctcccaaccatccatattgtcagagtcgaatgcaaaggttgatgaaacttgaggtgttgttgcattactggtagcttgtgtagcacgttacaagaaatgaagcaacataggaggatggtagagctgactatgaaataggaatgagcactggttcgcatcccctgcggtgtttgtggcagcgaagctttagtcgcaatcctaaggagggagatgataatacctagcaaaaacagagataacctaataagcttttgacaagttcaatgactcaactcattggcttaactatatatctaagtataagctcaaagttgtgaggatttcaaatcggaattgtgaagaaaccaacactagcctatacaaaacatgtgtcattctgtttaatttacaagactaacgttttacataagaggaaactaggtttacctgaagaggcagtgccggcaaaaattgcttgcatgtactgtctaggaagctttccggctgaaccaatcaaacttcctccaaccactccatcagctaaaccacagagtacgactgatccaaccatcaacatgtaagaaacattctcacccttttcacctttccagacccaatctataaggggagaaatcatcatggcgatgatgaacatggaaaaccccaagttcatcctcactctgtagctcatccttgtgttccaagtcatcatcaaaaccaaaacaagaaccgaacagctcatgtaagccacagtgaaagtcttctctacatgcttgtccgggtacaagtagccaaagtaatcaacggcagtgatcaaagcgttccatggtattaaactaccagcacccaacaagaaatggatcacgtacgcaactctataagcgtctcttgtctcaacttcatcaacaatcactttctcatcaaccattgtaactccccttttttctctcttgatctcactactttgcgttcttgaaatctttccgatgttggtttcattataaagcaagtgagtgtgatagggatttgattagatggttgtgagatttggtggtagcaagaccaacacgagtcacatcttagcattatatattcgggattacgattctttgatatggctctagagatcatagctagtagtacaaagacacacaagactgtatgttttttggtgggacacaaaacagatgggttaggattaaagttactactttaatttgttcatgaaattggtcgggactcttcttttcagtacccttatattccattgactactttcatttcttcttatgatcaatgcgttactcaagggttttcccactcaaaacttagaacatacaaattctgtggtgctaattaattaagttacagtccgtggcgttttgtttttaattatatggtaaaaataaagttttggaagttttattgctgattaggtgtttcccaaggatcgcaataaccaataatgagttattactttagtagtaataatttcataatgaacagttgaacaccgaagatatgagccaatagagtgtgagatttgggacaccgaagtaacaagagcacaagttgctgtctgtttccgacacaccatgcccatacttatactactatttcttttttcaattacttattacgttgccttcttcttcgtgacctcttagtcgctcgaataaaatttaatttatcctttcctattctcacggtttttatctgcctttattcacggttttgtttttcaaattgtggtcatcttttattattcaaaatatgtataaaaggatcatacaaaccatatgcaatgaaaacggtaaatccagactaaacttttctaaaaaatcaaattaaacactatatatattgactaaaacattaatattcaaccagaaaaagattcttacaagggtaattaaacaaattaaacagtatgtattgactaaaacattaatactcaaccagaaaagattcgatctatacttgttctaacattgtatataattgattatccgcaaaatttgttccacatccatttactctgctcaaaggatgcaatagtacaaaaaaattactcctctattataaatattcgcatatctacatctatataagaaatgattcgtgcaattccacttcaccggccacatgtatgtaagaaaaaagaacaaaaataaaataaagatcgttaaggaatttagaatggtgtgacatctcgtacaagccaagttaatttgtttacctgtcaagtgggaaacaaaaagttctgttagaaaaaaagaaaactaattgcaaaacagattgcttcagatataaaccaacatttttctttcttacgatgaaaacctaacataataaaacgaaattcaagtaactaattatatgattaacaaagtcgaattataatcaaatctatttaactgcacataaaaaagtctcttaagaaccaggacccacatagtgacaactgtcttccaacactttctaaccatttacatatccaaaatggcaggttagttcactcatcaaatctctcaacttgtcttctcctcaaattaaatgtaaatttaaatataaaaccaattctttatatctaaatatgtttggtttcgaaatattcatatatattaaagaaaaatgatatttccttgatagagtaaagaaaattcacgaagagagctctactcattatctttatcataccattatcattgcctctctatataaacataacacgcaaacttcactctcacaagtctttcatcacatttccatttttctctcttccataaaacccaaaagaaactaggaagaggagtaaataatatttgttttaaagaaatgattctccacaaaatg

SEQ ID NO: 36604 - DNA, 3003 bp, Unknown
  misc_feature (1)..( 3003): 2750-1469P.txt file - cDNA_ID_3098269; gDNA_ID_2936560; Annot_ID_194403
agtgagcttcccctgaaggataaaagattcacaaaaagcaaatttgcagtgagcttcccctgctgtggtttactgtacaataaatctcacagtcccctttccttacatgcttgaaaatggaaaagaagaagaaccagcaggtcttggtactgacctcatcgacgatgatacgattccacttaatagagtgtaaaggagacattgtttcgtccactccttcatccttcctatattcattctcaactatgggagatgttgtcaaaacaaagtcgtaattcattaacttttgaacattcttgtctctcttcggcccatggtattgaagaaccctggtgcttcccggggatgtcaaccgagaaatctcatctaaccactgagaaagagcaacaggaggaacaagcacaagggtgtgcccaactgcttccctagatttggctctgtcaacttcccgtctggcaagaacgagagagatggcttgtattgttttccccattcccatctcatcagcgagaatgcctcctcttacggctgatagttcctgtattgtagcccaagccaaaaactccttttggtactttagtagcggtataatcaaatctagaggctgctcagcagcttcagcaatgactgcattctgctcatcaaaatcatcatcctctgtcatctgaaccttttctttcatgatctgccattttcttttagtgtttgcaggagcggcaggatttggtatatagtcattagcattgacctcacctgtgtgagcaagacatgatgaaaataaacaggtgtgagcaaatcgagcatcaatgacgcctaatagaaacgatgcggtaccttgaacttcaccgccgactgaatcatcatcatcaggaacttcttcttctttgagattctcgtctatttcaaacaaaccaacgaataattttggtaaggaaacatgagataaattacagtttcccacaagaattgcattctgggaaaacaaaaattggagagaaattatcgatccccaacagatcaattgagcccagaaatagaaaccctaattcacttttccggcaacccgaagattaagaacgaaacccaagaaagatcaacacggagaaatgtcaaaggattgtgaagaagattaccttggctactagacggaagaatcgcattcttgtggtgagagtgtggctccatcgcgacgcccaaatctcaaaaatctcagagtgagttaggttttattgatcttccgctttttttatttctcttcactatcttgttcttatacgagagactgattttgctgtgcaatctttccagaatggcgggaagcaccaaatcacacgtgtcgatttcttcgtgctggggtgaagttttttttttttacgggctaaaaaaccaacacatttttggtttatttcggttttttaaaacatttctgaaataatcgataaccgaaccgaaatctcttttagagaagcaccggtatttccacatcagagaattaacgaataaaaacatatgacaatgtaaacaaattcgtaactgaggatcgagaacagagaatcaatctcgaccttagcgtgtgagtaaagctatcgtaacgtgttgacctccttgggccgtccccgtccacaacgtaacgtgtgcacattcgttctttgagacgactttggtctcagatccaacatggactgatcttaaaccagccatcttgtaagacaataatattcataatcttagatcagcttccacacatcatatatacaatttagttaagcttattaagcacgagaccttacacccacaaaactcaagattctgtatttaccgtaataattatgttcttaacagaaaacatatatctccgttaaagctatagattgttttcacatatataatttgaaatgtatcatgataattacgttgttgatcagaaggagaaaaagaagaagaaagagttaatagctgttagtttcgtgcaagaagctgtagatttcatttttggatttaagctcacgaagaagcaaccaacatgacatgcaatcacacaacactacaacagtagaagacaaggcgcgtgagcatcccgattacgccacgtgtccaattggatagagcccaaaatcttggaacacgtcacatgggttgtccacctatatccatttacaccttgctacgactctgacgtggcagtcctcttccttgtcgtccccacgtggacattcttcgaaacttccattttacaacttgaaaacattttaagtcatatacgcaaatacattaaaactgaataacattttttgtaaataaattttaagattacgcgtaatattttataatgtttcctttattaaattattaaaattaaataagtattatgtctaaaaatattaatttcgaaattctttattaattattaaaattaaataacatgaagtatttctgtctaaaaaaatatgaatttcgaaattccttagctttaataagtcggcaaattttctgtaccaactcgacaaacccatttctcagtgggtcccacgtggggtaacacgtgttacacagataagtcacacgcattacacgtatgtttaaacgacgacgttccaacattcgctgaggaaattatcattttaataatttatttcttatactatttatcgtcgggaaaatatcgtaaaaaaaaaaaaaaaaatcacggaaagcaaaagaaaaatgaaaaaaaaaaaagtcttctttttggctatttatttaaaatagggaaacgaaaatatagcattaaatagatctctctcacacagaagtttcttcttcggcgatctgttcggctgataaacaattttttcttctttgctctttgctaaatattctcaattctaaatctttctgtgggtacaatttcacattctaaacaaaattttaagatcgttaatagttttaaattgtgaataagaaccccaaagagacaaagagacattcccaaaagcaaaacagaaaataagttttctttcgatg

SEQ ID NO: 36605 - DNA, 3000 bp, Unknown
  misc_feature (1)..( 3000): 2750-1469P.txt file - cDNA_ID_3098288; gDNA_ID_2936560; Annot_ID_194399
attaggtagagaatctttgctttaaagggttcttggtcgtgtaacatcttttagtgttttaccacctgaaactgatccaaaactcctctgtatttagcctcttccagagtctgtggcgcttgtagaagacattgttgtggaatacgtcacagatttggtagtgagctttttctttttgtgaatgattcatgttttacattacaagcggagagatattagctaacaagtgatgtttcaatggcagacacataaagctcaagaaattggttcaaagcgaggaagacttctagttgatgatttcttgtatcttatccgcaaggtaaaaattctttttaaaaagtacacaatcgatgattgagatggtttatggttttgtattctatatccgaaactttggcgtctttgatttatgcaggatttgccaaaactgaaccgctgtagagaactgttggcgatgcaggaagagctgaaacaagcacgcaaagcttttgatgtcgacgaaaaggaactcgttgattgatcttgcttttcctcaacgggaggaacaaatgctaggtaagaggaacctcatggatgccggactagggacagcgttttaggttgtaatcagaattcgaagcacagtagcaaaaaaaaagtgtgttgacttaaaaaaggtgaaaaaaaatcttgcacaaggccgactcatattaaatgtaggcccattagaagaaagcccattatctagcatcccgtatatatctacggacgacctttaatttttcttgagtcaggaatttcgaaaccctaaaaatttagaataaccacccgatttttgtttctttcattaaattaattaccgcaataattataaaattagtcatcattataagacttttgtttttctctaaatttttcgtcatctttctgatattttgattcattattttaccatggaaacaataaataagaatggtgatcaattaccaactaaagaaaatcattgtgatcaattagagatagagcaaataaacaacacgagcatgaagaagaaaaagtcatcacgtgggatgcacatgttctccgtcgtcatgttcatgcttcgtcgccgccggggagaaaacccttcaacaccaggttctggcggcgagtcgttaagtccgtacgtaaactccgtttcgaaattacgataatgccatcgtcaacttttactaacacaattgttctccctccggctcctcctcctctgccagcgacagaaatgggaggagacgatggtgataatgataatgaagatgatgatgattccgagggtcgtttatcagagactatggaggttttcacggcggcttcatcttcatcatcatcaggaatctcgggatatggatcagccatgtccttatatgatgatgatattgatgaggaagaagatgaatgttatagtgatgtggaaggaggagacgatatgattgatgagaaagctgaggttctatgcaataatgaagatgcaaaatcaggtttacactgatcgttgcaaagccaaagggatatatagtgatgcattaatgatcttattaattatggttcgtatcatctatcaagtttacgtcatcatcattcaggttttaatttcttggtcatttttggtttttgtattataatttaatttaattccttttaactttttcttcatttttgtttctgtaattagtgagtgtatttgaattcattaatgagaaaataggagaatgaagtatatctactaaattctatttgtgtttgtggggaatgttaaatttggtttgcagattaaagatctcgttaaatattttatgttcaatgttttcaatcggaaattggtcatattaatagcacatttgaccaattcattgaatcgagttcttttcgaaaattgaagactttgataataccaaccgtttatattatgcatggacatatgcgtaagtgaaaaatcatactgagcgatggtaacaattacacagttgattccatttcgtgaaaaactcatagaaacaacggtgacaaatgaagtttccatagccaagaattggatcctcgccatacgattaacctaccgagatgaaccaacggtgatcatctctctaaactccaagaccaatcctcaagatgatgcaaaaatctcgactcttcaactatgcatcaaaaccaaatgcctcatactccaactacttcatatgaaacaaaataccaatctcggcgaatgccttagtgatctatttcgtgatgagaggtttgtttttgtaggaataggtattgctaaaactgtcgctaagctcggtgggctagttagagtagtggttaagaaagttgacgttcgtgatctggtaaaggtaaattttccatttagttatggtgagaggtcaagggttagcttgaagggtatggcttgtgagttgttgggatttggttcgtggaaaccgaagagggagatttgtccgagagacttggctaatgaagttcttgatgtagaggtggttaagttcttgtccgttgatgcttatgtttgtcatgaaatagcgtttaagatgcttaaataccaggcccaatttattgtaatcagattcataaaacattactttactgagcaaacgttgggccgatattgggctaatttatataataaagcctctttattaaagtcaaaagacaggtcagcattagtaatcactatattactaaaatcgcgctataccttttgtagacgttgcgatttcaaattcaaaagttgtggcaatatcgtgattaatactaaagcctaagcccaatatcgtcttttacccgtagcctcctcgaatcccgacgtcacgttgtataaattatatcgcatcactccaaaaccctgattctcctgctccttcgtcttcttcatcttcctctgagaaatcaaaaactcgatcgatcaattcgttgttcgtctacatcgattccttcagaacctagtgatcctctgttttggttgattcgattaagctaaccatg

SEQ ID NO: 36606 - DNA, 3003 bp, Unknown
  misc_feature (1)..( 3003): 2750-1469P.txt file - cDNA_ID_3098317; gDNA_ID_2936561; Annot_ID_194446
gcatattaaattctttacctaatttaattaaaacagaaatataaataatcgtttacactatcttcgaaaaacatttgtttttacaacttagaaatgaagaaaaagaacatgttattcttgaattatctcaagaagttgatcaacagaatatatataagtttttttttttgataatatagttaccacttacatgattatgcatttaacaatgattttatttttggatttatttttttctatttaaaactcatttggacacctctacacaattaagaaactaattacattttaactgcaaactaattacactttaaattacttaccaggaatatgagcaagacgaggctcagtgaagtgaccattgcaaatgacgactgcgtcgaatatatcttcgccggagacaccacttgagctcctaaattgaactctccatttacaactattctccgccgtcggctccacacgaaaaacctccgtctcgaatcggatcatctcttcgatcttgaactctttggcgaagtcttgaagatacctcatgacttctctgtgatccgggtaccgtctcgggtccctggactcatcatcgggacgggtcacgaacgggaagtcactgtaacccatacactctcgtggaagattggtgcggagggattggtagacgctcgagtggacgacggttcgatcagggtcgatgcttagtaagtctggctcaacgtttggagtgcaaacccaaagtcctcctacttgtttctgacgctcaaagatggtgacggtgtgaccttcacgacgaagctctcgagccgcaacaagcccggcggctccggctccgatcacggccacgttacgtgagctgattgaattaggcggtggtgtcatagtatcagtcaaagtatttgtttcctcgaagagtgtgtatgacgatcactataaatataagtaaatggtcttgaaattggaccgtttataaaagttttccaaatttcatacgtatgggggattacaagttcgatagtgtaacttctttctcacacgtgtacaagtatacacgtgtccatgaccgtatacttctcaactttatatcatcaaatcatgtaaatttcatttgtgaaagttattcactactctatttctatatccacttaaaaaataaatcaacactctctaattatttaggtcaattgaagaggaggattagtaaagagaaaacaaaatgtggaaaaccaagaaaagtacaattttttgtaatacttcgagaacaaaaaaatccagaaaccaagacagtagtgttccattttatacatgaaagaaaaaaattctatccccgtacaccgaacgcttatagcttcgagaatagagccatctcataacttaggcaagtacaataaaaattgttttaaaaacattattactacaaattagcaattttagagatgtgctaataagttaaggtagatagataacaataaatatgtgtgggggaatgctgcaattaagagaaaaagatgggggaaaaagctggaaactgggctacaaagccttctacttgtcccaacactatgtttggtcctcttctttctccaacccacacagatctgaccacaatctcccactacatgacacagctgacacaacaacaaactctctttttttttctatcataattaattctctatgatggtcagttgtgactaaatgactaaacaacccaaattcgatcataattaggggtaaaaaggaaaaaagtgaggaatcctaaaactcacacctaaaaatcttttgtcaaattagtaataataataaatttgtttttttcttataaagttaaaatattataaatcacagaaaaagatagctgatgttgcacattaaccactcagagaccattttctctctctgtattttctgagatttgagagagtctcctctctcttctctctctatatcgctcctcatgatccgattttttatataatttataaaaaatttatgtgataattacagatacacgttatttgtgtgtatattgatagagacaataaccattggaatctgaccatggatctcttttcttcttgagatatttttcatttctttctcctgttctcgtctcccagatctgttcgtcaatcttaccattggaaagcttcaagcttcctttttttctctatctgggtaattccttaatttacagtaaaatatttatagattgttattctttttatagttttttttatgtaaagtcgaagtagtactatgttttatgttcgtcatgaagttgatgcttttacttttcctcttatagttcttctgttgaattcaggatttaggaatatgtttatatatctatcatcaaaatgtgaatatatgtgcgattgtttctttttatggaatcatcttctgaataattttacttatttgcatgcttttagagttttatttataagcagaagcctgaagatttttgtgttttggatattatcaatgtacactaggtttaattttcatctaatggcttttagaatcaaaccattacagaggaaacataatattgattcttttttttaagatcaatatggatcatttgatagtttatccaattatgagcattgatgttgttttactttcatgggggttttgatagtgggagggtttagcagaggtttttagtatcaaacctatcataggaacagatcaccgagaattttgtgtccaattatgattatatcattgttctttgtttcaaacatttaagtttcagaatgacctgtttatatgctcttgtagccaatttccttgtgttacatagaatctgtcaggggatgtttttgccttgagtaaactcttattcatgaactgatattagaatgttcatgttgatccttttttatacagtttgtttttttggtattgatcatctcattttgttatttgtatttgcgttgttggcatttgatagggacgggaccgttgtataaaagagttagaccagacgacggcacaatg

SEQ ID NO: 36607 - DNA, 3000 bp, Unknown
  misc_feature (1)..( 3000): 2750-1469P.txt file - cDNA_ID_3098328; gDNA_ID_2936561; Annot_ID_194444
gatataaagttgagaagtatacggtcatggacacgtgtatacttgtacacgtgtgagaaagaagttacactatcgaacttgtaatcccccatacgtatgaaatttggaaaacttttataaacggtccaatttcaagaccatttacttatatttatagtgatcgtcatacacactcttcgaggaaacaaatactttgactgatactatgacaccaccgcctaattcaatcagctcacgtaacgtggccgtgatcggagccggagccgccgggcttgttgcggctcgagagcttcgtcgtgaaggtcacaccgtcaccatctttgagcgtcagaaacaagtaggaggactttgggtttgcactccaaacgttgagccagacttactaagcatcgaccctgatcgaaccgtcgtccactcgagcgtctaccaatccctccgcaccaatcttccacgagagtgtatgggttacagtgacttcccgttcgtgacccgtcccgatgatgagtccagggacccgagacggtacccggatcacagagaagtcatgaggtatcttcaagacttcgccaaagagttcaagatcgaagagatgatccgattcgagacggaggtttttcgtgtggagccgacggcggagaatagttgtaaatggagagttcaatttaggagctcaagtggtgtctccggcgaagatatattcgacgcagtcgtcatttgcaatggtcacttcactgagcctcgtcttgctcatattcctggtaagtaatttaaagtgtaattagtttgcagttaaaatgtaattagtttcttaattgtgtagaggtgtccaaatgagttttaaatagaaaaaaataaatccaaaaataaaatcattgttaaatgcataatcatgtaagtggtaactatattatcaaaaaaaaaaacttatatatattctgttgatcaacttcttgagataattcaagaataacatgttctttttcttcatttctaagttgtaaaaacaaatgtttttcgaagatagtgtaaacgattatttatatttctgttttaattaaattaggtaaagaatttaatatgctttggttgacatattttacatgttattttaactataagaaaaagtcttattccactagctaattcactattaatcagaggtaatcggagttaataactcattttgaaatcccaatgtgtgaatgttaagggcgagaatgttttgtaatttcttttgtttcaggaatagagtcatggccaggaaagcaaatccatagccacaattatcgtgtttcagatccattcaaaggtcaagtaatttacagaagtccacaaattactttgactatatcgtcttttcagttttttaaatgttttgttatagtatagattaggttaagattaacaatgttattgtttgagatgtgtaggtggtgatagtgataggatatcaatccagtggaagtgatattagtagggacatagcaatcctagcaaaagaagtccatattgcagctaaatctgatgcatacgcaaaggaaagttcgatttatagcaatctacattttcatccgacggtaagtaaataatgaaaacataaaaacagagaaaataacaaaaacaccatttaattttaatatatgattacttgatttcttcctccccaaccaccctgatatgttatagattgaccgagtgtatgaggatggttcggttgttttccaagacgggaaactgatatttgcggatgccatagtacattgcaccggctacaagtattgcttcccatttcttgaaacaaagggttatgtgaacgtcgaagataaccgtgttggaccattatacaagcatgtgtttccaccggcgcttgctcctggcctctcctttatcggtttaccttccatggttagtagattttatatatatacgactgattatgatggtattatttctttgattcgaattgatcttgtacgtaatctttgaaatttcataatactcaatagactttgatttctcattggactcattacttggtttgaactttgttcttgatccaggcattgcaattctttatgtttgaaatccaaagcaggtgggtcgcttcagttttatcgggtcgggttaaacttccctcggaggagcaaatgatggaagatgttatagctttctatgcaaagcttaaatctttgggtattcccaagagatttactcattttctaactgatccgcaatggactccaatgttcgaaaagcttaagccacatgaagcagttttgatctcacaaagtgagtatttcaactggattgcggaacaatgtggttgctcgtccatcgaacgttggagagaggaacagtataacatagccatcaaaaaagatgatgacaattttcgtgatgaatgggatgatgatgatcaaattatacaagaagcgtaccgagattttgctaaattcaaaccgagcaaagtttggtctacataaaccaatctttccaaagaaagtgcacttcgaagatccaagagttgatattcccatgttgaaatgaataaaggttgaaaaaacttttttgcagtccaaaaaataaaatgaaaatgtcttcggttggttccaattccaatctaagggtgattggcaaagtttgacttatgtaatatcctttatgtatttggagaatatattagcactactttatttaaaataaatattctttatcaaaaaagaatatatgaacactcaaataagatctcgatttagtcaattacagcataattgttgcaacacgttaatgtttcattttctgttcttttttgttctctttgttgcgtatctccatgtcattaaattgctaacactcgtttttagttgggttttaatttcatttcttaattaagactaaaaaattgattttttttagaccgaaccggttaatccgaaccgaagacgttcctatataaacccaattttgagaacagagcatcatcatcacacaaaaaagatg

SEQ ID NO: 36608 - DNA, 3000 bp, Unknown
  misc_feature (1)..( 3000): 2750-1469P.txt file - cDNA_ID_3098344; gDNA_ID_2936561; Annot_ID_194440
taaagaaaaggtgataaaaataatatatttatggtatacataattattattattttcattctagaaaaatagaaaaagtttagtaacaacactaaacaaggaagaacttattatgagttagaagaaaagaaagatattgtgtaaaaataattagatttatttcttaaaaatgcttaaggtattccttgtagacaaaccatacacacataaaacaaagacgtcctcttttgcttttaatgagcatctgatttttcgaacatcgacttctagaactgaaaatagtgactaaccccgactactctaaaaattgagcaggctcttggcaaaagttcaactatacgacgtgcattatcaatcaataaagcaagcacttatcctcttttaaattttctttagtaactttgttataagtggcttcaataattcttcttttgtctcgtcaaaaagggctgcttttcaatattttccacaacatttctaaatattttgattagatcgtcgaacggtgctactggctcaccattgaactgcccaatagaacatttgagagaacaaataatattatattcaagagatatgctctcaatcctacattataataattgaggagggacgaataatcacttcatcacagaactgagttcaatcttctcatttactatagtttggtctctctcaatgattcttctcgtgtttcataatgtactgcatgcgttccaattctataactaattaggggaggaaattgtattataaacaaatatgggggttcattttacagaataaataatacgagggtggctttgcaaagactgtgaaaaatgttactaacgaacaaggacctctaattatgatccacatcctctttttcgatcatgctattttggttactaacgaacaaggacctttaactatgatccaaacctcgaaaattttccacttccaagctacaattatgctagtttggaaccagataatttgtcttcttcacactgacgctgcaactccctctcacatcatcggctacaaattcctcactttaattgtcgcttaaattgcattttggtctgagaaaacgaaatatgttcgttttaagacataccaaaaaaaagttttgcacaaaagaaaaaaaaaagacataccaaaaaacaaattgttgcataaacaactacaaaaacacattaaaattacaaattaagtagtatatttttaaaaatatatatgaaaatatataaaacatctaatctttagatttaaaaaaaaaaaaaaaaaagaatatatatgtacaacaattcgaccatacctaagcgaaaacctaattggtagattagtctttgtgaagttccaagaggtttgatataaatatataatctacggttgtagtgttttgtccaaaaggcaaaagtgtccataaagcaaatgaagaagataaaatagagacgtcgtttccatttttcaaactactttggtaaagggtttgtttgcaacttgatggatatttttccgatttggcgtccataattttcaaagaacaatgacgtagtcatttcatatttgccgtctcctcatagctttttactaattttataatatatatactcaaacagtaaacttaattttatgtattttatttttgaactaaaaccaaatatacatgatcaaacttaatttaaatcgtaaaagaaagctcactttcaatattttgagatgtaagtatataaaacttactatttataatctgaaaacagaccttttaagtactacttatattatataaataaactgatttcacaaaactattcgaataatattttagtttacttttcaattacttttatatttttgctataaagaatatgttatgggacataaaaattaaaaatgtcttatcttttctcttgatctcttctattaggcatatattacaaaagagagataaccgatgtgtctatacattaaaatgttcatatattagccctttcagaaagaaaaaaaaaatgttcccccagatcaaacaatagttagctaaatcattgattggaaaggtttttaaaaaaaagaagctgtgcaaactttagaaacaatttttgttttctaaatttgggatattactcatagtctgggataaacaaattgttgaatatattttctaatttataaataaatattattcttggtaagaaaattagatatttgtgcatatatatgcaacgatattagtttatatgatgtgaatactgataggaatattttatgatgccaatctacataaatatatttattcctacacatattataacagaaaaagtttcttttttggtataccatgttgaatagtacacatgatcctggacactgttgggtgatagatacattgggctgcactttaaaagaagtaaccagtcttcttcaaaaactaaaaaagatacatataaaggaaagttaattacaatgaatcattaaagcttaattaatgttaattcaatcatttttcattaaaaattgtggaagcacatccacttgatcaaatgatttaaagctctatatcatgttttttttgtaacaaatcccataaaatgtaattgcaaaattttatctgaatatcttcaaatttgataatcagttttagttcaaattctggtagatcagtgatagattctaatttttttatgtaactacaagttttatagtcacttttagagtgatacaaaattcattaagttctttatattctctgataaaaacaactaaacatgactctcaagcctgaaggtatgctacctacttaattgagtttaatattcctacgagattacggaagaattgtccacactgaagtgacacgtcatcgttagagttacctttttcctcgtatataatatacacatcgttataatcgaaacacaccatcacctcaattctctcttcgttaacattacaaatttacaatctcttcatctttcttcattagatcacaaaacttcactataacctaacatg

SEQ ID NO: 36609 - DNA, 3000 bp, Unknown
  misc_feature (1)..( 3000): 2750-1469P.txt file - cDNA_ID_3098358; gDNA_ID_2936561; Annot_ID_194437
gtgagtcagttctctcagttgttatgtgtcaggggaagttatattcacaatctctccaagaatctggcttctctgcagaaggccatgcgaatgctcaaggctcggcaatatgatgtgataagaaggttggaaacagaagagtttacagggcgtcaacaaaggctttcccaagttcaggtatggcttactagtgtcctaatcattcaaaaccagtttaatgatctgcttcgtagtaatgaagttgagcttcaaaggttgtgtctttgtggtttctgctccaaagatttgaaattgagctatcgttatgggaaaagagttatcatgatgttgaaggaagttgagagtctcagttctcaaggattctttgatgtggtttctgaggcaactccgtttgctgatgtggatgagatcccttttcaacccacaattgttggtcaggagataatgcttgaaaaggcatggaaccgtctcatggaagatggatccgggattttgggtctgtacggtatggggggagtaggcaaaacgacactactcacgaagatcaacaataagttttctaaaatagatgacagatttgatgttgtgatatgggttgttgtgtctagaagttcaacagtccgtaagatacaaagagacatagcagaaaaggtaggccttgggggaatggagtggagcgagaaaaacgataaccagatagccgttgacatccacaatgtccttaggagacgaaagtttgttttattgttggatgacatatgggagaaagtgaatttaaaagcggttggagtcccgtatccaagcaaagataacggatgcaaggtagcattcactactcgttctcgagatgtgtgtgggcgcatgggggttgatgatccgatggaagttagctgtctacaacccgaagaatcttgggatttgtttcaaatgaaggttgggaaaaatacactgggaagtcacccagacattcccggacttgctagaaaagtcgctaggaaatgtcgtggcctaccattagcactcaatgttatcggtgaagctatggcatgcaaaagaacagtacatgaatggtgtcatgccattgacgttttaacatcatctgccatagatttttcaggtatggaagatgaaattctccatgttttgaagtatagctatgataatttaaatggggagctgatgaaatcctgcttcctctattgctctctgtttcctgaagactatcttattgataaagaggggttggtagactactggataagtgagggattcataaatgaaaaagaaggcagagagaggaatattaaccaaggttatgagataattggtacccttgtccgtgcatgtttgttgttggaggaagaaaggaacaaatcaaacgtgaaaatgcatgatgtggttcgtgagatggctctatggatatcatccgatcttgggaagcaaaaggagaaatgtattgtgcgagctggtgttgggttacgtgaagtaccaaaagtcaaggattggaacactgtgagaaagatttctttgatgaataatgagattgaagagatatttgacagtcacgagtgtgctgcacttacaactctatttctccaaaagaacgacgtggtaaagatctcggctgaattctttcgatgtatgcctcatctggtggttttagatctatcagagaatcagagtcttaatgaattaccagaagaaatatcagagctggcctctttgagatatttcaacttgtcatatacatgtatacatcaactacccgttggtttatggacattgaaaaagctaatacatctgaatctcgaacacatgagcagtcttgggagtatattagggatatcaaatttgtggaatttgaggacattgggactacgagattccagactgttgctagatatgagtttagtgaaggagctgcagctcttagaacatctagaagttataaccctagatatatcatcaagtttggttgcagagccattgttatgctctcaaaggttggtggaatgtataaaagaggtagattttaagtaccttaaggaagaatcagtgagagtattgactttgccaaccatgggtaatctccgcaagctcgggataaaaagatgtggaatgagggagataaagatagagaggacaacttcatcatcgtctcggaacaaaagtcccacaactccatgcttctcaaacctctccagagtctttatagctaaatgccatggtcttaaggatttgacgtggcttttgtttgctcctaatcttacttttcttgaagttgggttctcaaaggaagtagaggatataattagtgaagagaaagctgaggagcattcagctacgattgttccttttaggaaattggagacactacacctgtttgaattacgcgggctcaagagaatctatgcaaaggctctgcattttccgtgtctgaaagttatccacgtagaaaaatgtgaaaagctgagaaagcttccattggattctaaaagtgggatcgcgggtgaagaacttgtcatatattatggagagagagaatggatagaaagggttgaatgggaggaccaagcaactcaactccgtttcttaccttcatccaggtggcggtggagagaaacataatgaacttcactttcttctacaaacttttgttgtcatggtctaaagacatttgccggtgtgtaaatctcttccttgtctcttcttgtttgcataaccgttctcatcgttcttttggttagtgatcattggatttgtacttatctctttctctaaacgatgagtgtttgtttcggcttcatagaaacattacacagagactcatgagaaaatgaataaaaacttgcaagttcctaaccattgtaataaaataataattaactgtcttatctcgttgacagttttcggataaattagaaaaggcgggacccacgttaattggaagatatcaacggctggatctgcttactcagatcaacttcagcgaaaaaaatg

SEQ ID NO: 36610 - DNA, 3000 bp, Unknown
  misc_feature (1)..( 3000): 2750-1469P.txt file - cDNA_ID_3098363; gDNA_ID_2936561; Annot_ID_194436
tgtctaaatacacagcttttctcttcatcaataaggatctgtatcaataagagaactaagtgtccatgttacttgaacactaccctgtttatcttcctgccctctttatctttttcgtggcttgttgttcatcatgtctgagacttgggctacaagataagagactttagttttaagactaaaagtctaaaaccaaatccttttcatgttgtttcgtctgaacttcggtctttttttctctgtaattgacttagtcggttctcagatctctgagtcatgattgtaccgataaaccaaaattgaaccgattgtttttgtaaaaccaatcgggttctattaaagttcaaactaaactaaaaatttaactatggactgaaaataaataaaaaaattcttagacaaaaaaaagttggacataggccaaacactgtttgtttgacaaattctaagataaatgataaaaagatgagtttttttagggcgagaaagacggtttaaatccaaaaaaaaaattgggaatttatgtgtaccaaatgataaatatcatgaagacaatgaagaggatcaacataaacttatcaatctcagtcagatgcattatctgatgtctagtcacttctctatccaccttctttaatgtcatttagtaattttcacacaagcagaaacgtaccatgttataaatcttatcttctaatgtttacaaattcgtacgtcttacatttagttgttgacaaaaaaaaaagataattgaaatttagttcaatcatttttttcctgtgtgattgcgtttttcctttgacgacatgttgtttgtgattaattattgtgggttcataccaataattatgaaatacctagattattttttaaaatatagctcgatttaaatgtagtgtcattacaattcgacttatttgagtgaaaagagtgactgactgattgcttatcctttttaattattgaaggagataattattattacttttttgacgaaaattataaggttctcaaattttctcgggctatttttttcgtaattttcttttctatgattattattgtttagcaacatatagtagattctatttcaagagggagacagagcacgtggtgtccgccagaaacctatcgatcatgtacatgtggatctagttttcccacatcctccaattatacaagatcttgtcttttccaatttgttgatctaacgtatatgactgtaaattccattagacaaccttaaagagattagttagtaaagaaagatggtttcatatggcttttggattgtgtttgcgtttgttatcgtcgtttctaaaccgtgtttaggtacttagcgagatagatgtaaaaaaatataacaaactgcatagaatataatcgtatcgatcgttttcttcttgttccttatcgattgaatattcgttacgttcaatattttcatgagaacaaatatatgatcttaagtagagttaagaaagaaaataattaattcagattttactagttggtagttaccatccaatgcttcaattcccacatgcaactgatatgtggctacaagaggtttcacgtgttaaaataattgtttatttttgttcaaattggcgtttgttcatttcttttcaccattattggacaccgattcctgtgacacgattgtgattgagacaatgttttatatttaaacatttttttcatgtgcttgaccaaactaacaagtggttaaatgtatattcaattgcaaaactagttttcctaatgaacctagaattattgtttattacattcttagcccaaatgaatcacttatttgctagcttaattaggccaaaacagaagagatttgtagttcattactaaagtttaaactaagttcggtcatgttttttggagtctttctaaacaaattatattaattcaatgttattaaatcagtttaaattaagttggtcagatgacatactaatatcactattacacggaagtcaaaatgttagaaaactaaatatgaattagtttcgtgtaaaaacaggattagtttcgtattagagtcactaatcttttcatcttcaattctaatcagttaaaatggtcataaaaatggccacagtacaattcacacatgttcagtctatcgtttgggattgctgattgatttctttcactctcagatttttaaactattctccaaatcttgaagtgaaaaaagtagtacagaaatcaatcagcataatcataggattgtgttcaatgacctggtttcacagatgaaccattaaccatataaatttatttattaaattttattacatatttgtattcaatgcacaaaatgagaaatcatattaggaactacatctaccatgccaataaggaaatccaccaagtcaattttctaaaatttctgatgactgtatatatctatctacggatatgtataaaactacgtggacaattcaatgtaaaattcatatcattgtcatacccattcaaacaaacgaaagactaattaaccgataagaacaatataattgtattccttactaaattcttttactatattttccaatttttgagaaatttgttacccttcgtttcatgcataatcccattgtacagtataatggtaagaaaaaaaaagtagaaatataagaaaaccttttttctttcttttgaaaaacttaaatgatttttctaataacaccgcacaaatacaaatagaaaattacagatctaatttgtacaccaaaactcttttttactttggaaaaaaaaaaacttttttacttttgacatttatacccaattttctctcttccagcgaagcaggagacagtaaaaggaataataaatccaacaatttctctgagattcaactttaagaaaaaaaacaataatcgatattacaaatatatatataaagacatttgctctttctcgtgtcatcaaatctcaaaaagaaaaaaaaagagaaactcgaaaacgagaaaaatg

SEQ ID NO: 36611 - DNA, 3000 bp, Unknown
  misc_feature (1)..( 3000): 2750-1469P.txt file - cDNA_ID_3098367; gDNA_ID_2936561; Annot_ID_194435
acagctgaaaaggtaaaaagttcagagacaaaatcagaacagagttacctcacaaccaattgcaaaatttggattatttagaaatttttattttgccagtttgtattccacgtgagattttccacatgctaaaaagtttgtataaatcattggttgccatagaaaagtaatcttgattgtataaaatccttttatgaatgcaaagtttggatcttgtctcaaattggataaagccagtggggtatacgaactaagctatatttctctttggtacctaaaactttcttatgtataaatagaatccaattatttctgagttattctcattttgaccccaataaactaaagttttttgcatttctgtacaggtccattgttctacaagggatggtaccatttcttctaccaatataacccaaacgcagccgtatggggtgacattgtttggggtcacgccgtgtctagggacctaatccattgggtccatttgcccatagccatggtcgctgatcaatggtacgactccaacggtgtgtggaccggctcagccacatttctccctgatggctctatagtcatgctctataccggttccaccgacaaagcggtgcaggtatgtaccccgaaattattcctacttgcactcaattttaaattgttggaacaagataataaaattgtagaaacagtattcataagaaagaattaacttagaaaaataaaacacacaataatttcaaatctaattttagtttttgtaatttacaaccaaattactcttttctaaatataaaagctaataaaactctactaaaaatgattgaatccaataaattgtcaaatctaacaagtatttttgttaaagatatattaccaaactagtacgtttaacttttaactataaaaactaattcgatgattagtaggtcgatccaatgatatatatttatgtgtgaaaatgttttcttagaacaagaaacgagatattaagactttttctttggtttgaaactttaggcgtagtagagttaatatagccagatttttggtatgttagatactgaacatgtaaattaggtttaataattgtatcaatgattgtaatttaatgtttttaggtccaaaaccttgcctaccctgaagaccccaacgacccacttctgttgaaatgggtcaagttcccggggaacccggttctagtacctccgcccggtatcctccctaaggacttccgtgacccaacgactgcatggaagacatcagaaggaaaatggcggatcacgattggttccaagctcaacaaaactggaatctcactcgtgtacgacacaatcgactttaaaacatacgagaaacttgacacattgttgcaccgagttcccaacactggaatgtgggagtgtgttgacttttacccggtgtctaagactgcgggcaatgggcttgacacatcggtcaatggaccggatgtgaagcatatcgtgaaggctagcatggacgacacgaggttcgatcattatgctgtaggcacgtatttcgattcaaacggaacatggatccccgatgatcctactatcgatgttgggatgactgccagtttaagatatgattacggaaagttctatgcttcaaagtcgttttacgaccagaacaagggtcgaagagtcttgtggagttggattggtgagtctgatagtgaggcttctgatgtacaaaagggttggtcttctctccaggtatgtgttgtttccttgacgtaacgtgttgtcaaagttagtttttttgtgtgtgatagttgcttgtaatccaagtttctaagatttgtgtgtatacggttatcagggtatcccaagaaccgttgtcctcgacacaaagacaggaaagaacttggttcaatggccagtagaagaaatcaaatctcttagactaagcagcaagcaatttgatctcgaggtcggtcccgggtcagtggtaccggtcgatgtaggttccgcagctcagctagacatcgaagcagaattcgagattaacaaagaatctctagacaaaatcatcggaaacgcttcggtagtggctgaagccgaggaatttagctgcgaaaaaagcggaggctccaccgtccgtggtgctttagggccattcggattctcggtacttgccacagagagcttgtctgagcaaacaccggtttacttctatgtagctaagggaaaagattcagagctcaaaactttcttctgcacagacacctcaaggtatcaatgtcttaaaatcactacacattacaatctatgccataatacattcggttatgtaacacacaacactttcctatgacaggtcatctgttgcaaacgatgtcgttaaaccgatatacggtagcgtcgtaccggttctaaaaggggagaaactgaccatgagaattttggtaaataactgaatcatatattaaccttatatactttgatgtactaattccattaactcattacattatgtttttgttattttcaataggtggatcattcgatagtagaagcattcggacaaggtggaagaacatgtataacatcaagagtctatccaacaactgcaatctatggagcagccaagctcttcttgttcaataatgctcttgatgcgacggttacggcgtcgtttacagtttggcaaatgaacagtgcttttattcatccttactctgacgaagctgtccgtgctctctcccgtacctgattatttttacttccttctcattttttatacatagatttatctgtaataattaatggttttttccgattttatttgatatttgatttagaaaaaaaaggcactgaaacatcattatcacaatttacaattttggagaaataaatttgtttaatagtttttttcatgtaatatattaaaagtcagaaccttcggattagcgcagagggtttgagaaacagagcttcttttttttggctcatcgtcaaaacaaaagtgttggcgatg

SEQ ID NO: 36612 - DNA, 3000 bp, Unknown
  misc_feature (1)..( 3000): 2750-1469P.txt file - cDNA_ID_3098375; gDNA_ID_2936561; Annot_ID_194434
cctactatcgatgttgggatgactgccagtttaagatatgattacggaaagttctatgcttcaaagtcgttttacgaccagaacaagggtcgaagagtcttgtggagttggattggtgagtctgatagtgaggcttctgatgtacaaaagggttggtcttctctccaggtatgtgttgtttccttgacgtaacgtgttgtcaaagttagtttttttgtgtgtgatagttgcttgtaatccaagtttctaagatttgtgtgtatacggttatcagggtatcccaagaaccgttgtcctcgacacaaagacaggaaagaacttggttcaatggccagtagaagaaatcaaatctcttagactaagcagcaagcaatttgatctcgaggtcggtcccgggtcagtggtaccggtcgatgtaggttccgcagctcagctagacatcgaagcagaattcgagattaacaaagaatctctagacaaaatcatcggaaacgcttcggtagtggctgaagccgaggaatttagctgcgaaaaaagcggaggctccaccgtccgtggtgctttagggccattcggattctcggtacttgccacagagagcttgtctgagcaaacaccggtttacttctatgtagctaagggaaaagattcagagctcaaaactttcttctgcacagacacctcaaggtatcaatgtcttaaaatcactacacattacaatctatgccataatacattcggttatgtaacacacaacactttcctatgacaggtcatctgttgcaaacgatgtcgttaaaccgatatacggtagcgtcgtaccggttctaaaaggggagaaactgaccatgagaattttggtaaataactgaatcatatattaaccttatatactttgatgtactaattccattaactcattacattatgtttttgttattttcaataggtggatcattcgatagtagaagcattcggacaaggtggaagaacatgtataacatcaagagtctatccaacaactgcaatctatggagcagccaagctcttcttgttcaataatgctcttgatgcgacggttacggcgtcgtttacagtttggcaaatgaacagtgcttttattcatccttactctgacgaagctgtccgtgctctctcccgtacctgattatttttacttccttctcattttttatacatagatttatctgtaataattaatggttttttccgattttatttgatatttgatttagaaaaaaaaggcactgaaacatcattatcacaatttacaattttggagaaataaatttgtttaatagtttttttcatgtaatatattaaaagtcagaaccttcggattagcgcagagggtttgagaaacagagcttcttttttttggctcatcgtcaaaacaaaagtgttggcgatggaacgaactactgtaatactgttcgtcttcttcttgctctctgtagcaatgtgttctcttcactctttttcttccgtagcaatttcattcagaactcaaaagtacgtaaatacctctctcgttcatcgcttatctcctataggatatcgtaattatcctctaccgtgggcagtgacgtcaattgacgaaatccctcctaatgctgttcgccggaaaatagaccggaattggagaggtgggttcagtctcggcgtagatttaggtttatctcgaaccggaatcgctattagtaaaggctacaccgttaaacctctcacggtaactttcgaaatttctcgacctcgttgcgttttcaaattcagtaatgaagttgatatgaattgggtattactattaggttttgaaatcgagagggcaaaaactcgagaccaggcttttagaaattgctgaagaagaagaggctgatgaatttataattgggttgccgagatcttctgatgggaaagagacgattcaatcgaacaaaattcgttctgttgctggacggctcgctattcaagccgccgagaggtgaagcacactcacactcacacatttatatatcgatgaagtgtgatgaaattggtaaagttctgtgctttgcaggggttggagagtttatgtatttgatgaacatggaacaacgtcagaagcttcagatagaatgattgtaatgttagtttcgtttctgaatctctctctgttcttagtttagcaattctggttttgatgtctataaagtttttttttttatgtacattggtatctatctatcaacaaccttaaatcactgaactttcatgaaaatttcgattacggtgtgtctgaattaatgtttgagcattatggtatttcaggggacttagcaagagtgaaagacagaacagatcagatgcatatgctgctgtggtaaggcgaacagtaaacaatctcgagttcgtgaaatgtaactgctatctttcttattgaatcttatgttacagatattgttggagaggtatttctctacacaaggtttaggaattgagattatacttcccaagagtttagagcttcaagcaaagatcaagaacggtgcacctgtagaccccgacttcaatccggaaaacctcgaagagtattacacattctaaagtagtttgcgttgtgaaattcttgtgattttttttagttggattcatttcacgcagacatcggtatataagcaaagcaataagtttctgttcatgaccttgttactgaattttgttgaaagccaaactaaagatctgatttgttttgtttctactgcttctgtgttctttgtcacaaggaagaacaaagtcaaagtaaattgtgaaagacttggaattggaagagaatagaaaaccaagaacaaaacaggtgaacataagtgacatacgtgtgcacaccttgcccaagcaaagtggataaagttcgaaatccttcacacgtgcaaaattcatctcttcttctacaaagttgaatgtatcatttctcccctgcaaagttttagacttttaacaatg

SEQ ID NO: 36613 - DNA, 3003 bp, Unknown
  misc_feature (1)..( 3003): 2750-1469P.txt file - cDNA_ID_3098380; gDNA_ID_2936561; Annot_ID_194433
tttttttgtttcttttcatttatggattttttttattaataaacacctttactatttgctctggtatggtagaaaaaaaatatgtatcagttataatgaaattttgtggaacacgaataagcaaaattcgtttctgttagttttttgtaagaaaaggtagatgatttttttagtaacacttaaaacgatcacattcacattttttttttataacacagtgcattaattaattaataattggattaagaaaggtttaagagaacgggataacgggaagggacccacgtgaccaaccggcctgcaacaggaaatgatcgatggctcgctcacgccggaccaccacccgccacgtcaccacatcattccgtttctccccccctttgtgggtccctctttacacttaccaccttgctcaagttccgcgctctttttttcttttcttttcttttttcttcttcttcgtaagagcagaacaatatatttggggtaatcaatggcaaaaattttgatttaaaagttgaagttaagactttagataatatatttttttaatgttgttttatgctcaaaatagtttaagatgaatctttctttccagtcaattggaccaaaacggaagctgtctatggttacttttgaagtttccaaaggatgaaaatattcatatatgtaataatgtaaatagagagcaataattactttaaaaaatatctcatagaacaggttttcttcaagaagatacatacactttcatattatttttagtatgtctccacatttcgtttcatcagaatgattatgtgaatacaagtacaaaattgtaaatacaattaaaaattgctcataggtcctagattaccgaatcacatggaaatgatgtacagtatatatatttgatatttcaatattaacgtaaagaatttgaagaagaaaaaaaatgaaaaccaactcctataagaaaaaatgttaattcacattattggtagggatcatacactgtttgtctcttgatgattttatttaactcatacgaagtacagaataacttataactaaattatctacaaattttaatgatatacatatctctagataatatatatgatctctagataatatatatgatagtcttgatagcactaattgttgtgtgcattggtgttcgaacttcgaataatacagtgacatgccaaccttgaatttaagaatcatcatgcatgttgatgttttactgagatatctgaataactctggatgtatagatctttcaacaaagattttcttgcaaattaacctaccatcaaaccagcaatatcgttgggttctaaactagttgagtacttgagttacttttttttttttttttttttgacatctctagtttagcaagacaattttaggacataaaaaagaagtccaaattaaagtaagaaaattaaccttaatgttgatgatcaagtatatccatcaagagctggtgggtggtaatggatgttgccacctctctctctctctctaaatcttacttgcccctttatcctcctctctcttctccccccaagcttttgcaacaaataaagtcccccccccctctctctctaggttcaaaaggactcacaagagagagatagtatgattgatagggaaagagagagagatgaaagaaagtaaaatatataatagattattaggacacgattgtcatcttttgatttgtgtcttgtgtgctctctctttcttctcttcctcgattgatcttctttatataaccctactctctttctcttttcccattctttctatcattctccctttctctctcgggatctgatctctctttccagtaacctattcccgaggagcactgtcaaatcttgtccactctttgatcttatctcgatctctttctctttctagtcttgtgtagtcttcaaacttgtgatgttatctatatagtaatcacgagagagaatcatacaatagctgaaacataaagctttcttagaagctttaaaaaggtctcatctggattatcctgtttaatttctagagtttcttcaggtaaaaccctaattttatgtcaattttctatttattaccaatcgtcacaaataatattggctgttttttcttctttaagtaaaacttgatcatcatctttaatcatccttgatcataatcttcattaatcacctaaggtgattcaccttgatgatcatcatcatcatgtccatcccatttcatactcaatgttgctgatgttacaagcaaagcaaaatatcatctaaacctaaaatatcttattataataaaatagacataagtagatcaagctggggtttttttttgttaagttgattaaaagttttcataagatgttatacaataatctaaaaaagaatctcttaagatggatcatcctctctttaaaaaaaaaaactactcctcttcatcttctgatctttacttgtttggttatagtacttagatggaaatataagcagaatcaaatttaataatcgatctagtctatttgaagctgaaattatgcatctcattaaatcaattaactatataccatcatacggtatataattgggtttcactgattttactttcttgaaaattcagttatttaccatgagtccatgactttaaactagtgagtttaattaattatctcgaacctacataactaaccatgtgaatagtcttcacatatttctttagatgtaagcatgtaacacaactaattcttgtaattaataaatgtctgacgataattcctttcgattttgaattcaacctcttatatattcagcatagtacgtctaatcatatgtctgtcgaaataatcaactaattcacaatcacactatgtaagatatgtaactacctagctatatataaccttcttatgttcataatttcatgactttgttttcgatttgtttggtgattttcttataggcagattattaaccgatcaagaagacaaacatg

SEQ ID NO: 36614 - DNA, 3000 bp, Unknown; identical to SEQ ID NO: 34608
  misc_feature (1)..( 3000): 2750-1469P.txt file - cDNA_ID_3098398; gDNA_ID_2936562; Annot_ID_194491

SEQ ID NO: 36615 - DNA, 3000 bp, Unknown
  misc_feature (1)..( 3000): 2750-1469P.txt file - cDNA_ID_3098403; gDNA_ID_2936562; Annot_ID_194489
aaaaaacattattttaaaccacacgcaacaagtaaaaaaaaatatagaataaaaatgcaaaaataaattccacaactttgtaaattccacaaattacgataacataaattcgacaaattcatgatcaagtaaatcaatcataaacaaaaaaacattaattttaaacacactcaaagatacaagaaaatgctaaaataaactccacatcttcatgatcacataaattaattataaacaaacaaaaaacattatctttaaaacacacgcaacaagtaaacataaaaatacaataaaaatgcaaaaataaattccacaacttcatgatcacgtaaccatattttggtctgtaaccatatcaagcggttaaaaaccttaaccattaaccgtaaaaatatataggtatggttaaccatacggttaaaaccttaactgttaattaaccatatggttaaaaccttacaaatatattgtaagtgtgtataatgcaaaagacaaggatcgaatgttcagataatttttttgttttaatgatagtgcatatgaaaaaatctatgttaaaaaaaaacaactatgttgtaattaagaaaagttgatctacaatatatatttttatcttattaaaaacagtataaacggtcggataatttgttaaattttgcctctgatattactcgtatcgtaatcatcaattaaacataacttatttttttatttttttttggtcatgcctaagtttgctttctctcaaacacattttcaatttagattctttttgagcagcactaattttaactcaatccttgtttcaatattctcttgctaatataattttgagtgtcacagtgaacctgtaaaatatcgtgtgatcaatttttacattgtttttacgtctgcatattattttttggtttgtaaaggtttttttgaattcagatatttcatttacatatcaattagaataaagagtcaagtcattattttttctcgtcattagagagatgaattattcatgttcaatcttttcgtaatatggtaatatcgccatcgcatgtctgcgcttgtctctctacatccttgaccaccataatctgagcttttgaacgcgattatttttataccgtaccgaacgctgcaaccatttgatgagtctctaactgaaatatggagtgtgaatcaaacttactttttaactgaaattgtggtattgattcctacaaaccaaattggttcttaaataaagatatacaactaaaagctagtgactgcaattgttctcgttttttctctcctatcaacgagaatgacattgttaaactcggagacttagtagccattagccaccgtagactgcggcatacactatatagcaatcttcatttgtatcacccatttcttcaactagaacgccgcttgagcaaatcagtcctccatccactacctccacattcacaatctccacttcaaacaaagaaggaagtaatgattgtgataacatggtagataaagctgactccaagactaagtaacacaatgagagatgttttcgcacaaacaatactggatcaaataagtaaatggtaatgctcgtttctgtctacttttcacaacaccaatcttaatccaatttcacagtaacttatatctagtacaaagccaaaatttcgaactcaaattttccacaataatacttgaaacaaagaactcaagtttcttctgggaagacaacaactttgtttagaaattctatgatcgaggaggttacctgtggaacttactatgggaagatggacttaacattctccaaatccagctgctggtaaagagaatgaggcactccaagcttaatctgaaactttatttctccaaatgaaactccaggaatcgaaccttcgacacattcaacgccaccaagtcaagttaaaagtcaacagttttcaaagatttaaatctagatccgtgaaagagtctctcattacgtaaaagaagtttataaaaagaggacgacgtgaccattttaaaatatttttgattttcttctaatttttatattaaattttaaaattaaatagttatagtaaaactgaaattttaaatttttagacacaataaaataaatgttaataaaattaatttcatatcatctaaaacttaatagttaattgagatgataaagagaaaattggaattttattttagttgtgagatcgtaagtatgaaaataataatatttaattgtttagatattaaattacattatttcgtgtatttttcttccaaccaaaaacaattgggtatgaaacgtctaaataaaaattaattgatgttttttataaaaaatttcaccataatatttaccataccatatctatttaatatttatcattaaaccggttatactatatgttccgctaacacttccgcacaaattaaataacaatttatgaaaatttgcatccaatcggttttgaactttagactcgtaattacttcatacaaaactcttttaatttattttcttattgcaatagtaaatattaatactgttcattttttacataacatgaactattatttttgtgttgctatttttaatattttctaattatttcgcaattagtaaaaatcgagaatacttgcatcgttttattatgtcaccagaaatagattttattttaaaacaatttagaggttgcatcaattagataggcaaaaaaaaattgagtgctagagaaatcttttacctttttcgtaaatttagatgcttcttcatcactacaatttctctcctgtcactctcttcttctacgctcttgtctttatatccgatctacctcgttccctctcaaatccctaaatcgtctcctatatcctttcgcaaatggacaaacccaagatctgaaaaagtttttgtcttttctctcccaatcgcctgattcaagcctaaagctcggtttttttcttctgggtatttaggggttaagtgtattgtagaaaagcatg

SEQ ID NO: 36616 - DNA, 3000 bp, Unknown; identical to SEQ ID NO: 36615
  misc_feature (1)..( 3000): 2750-1469P.txt file - cDNA_ID_3098403; gDNA_ID_2684605; Annot_ID_193239

SEQ ID NO: 36617 - DNA, 3003 bp, Unknown
  misc_feature (1)..( 3003): 2750-1469P.txt file - cDNA_ID_3098459; gDNA_ID_2936562; Annot_ID_194475
cagatgcaaattccccaaagcatttagttctatggatcggtcaacagagagaataaccctagatatggtaactttagccttcaatttgaaatcaaagagaataaccatagatcgtaactttagcctacttgaaaccttttaaatcaatatgaaatccaaattcctaaaaaaaaaacaaatcatggaaaaagaaggtatcatgcactgacctcatcatcgttgtagtttaaaacctaaatgtatcttactaatcctttcctattctaagctttttctttaacctggacaacaaataatagaaaacaaaaggcttaattatggatgtttttttttttttttttttgacgattaaaaataaaccagctctatatataatttaataaacttttttgtttgttttataaaaaaaccaccaaatatatttatttatttttaaagaaaaaccaccaaatcatttttttttgataaaaggttaaattttacaccattttcgatttttgacagatattacaaagaatactagaaacggaataaagcaacctacataacttaaaaacaccgattccgagtccgcaaagctcagaaatttgcgtggttgccacagaaccgaagaactggaatcctcatcctagttaccacgagcatatctatttgaggcccgtccacaaaacctcaagatagaaacctacaacttctccgagaactaacgcaaaaacgcattgacaatcatggacttctacaccaactcaagagaaagcgttgccaaacagacctattcgccaaatcttttcaaattgaatagaaccaccaatctttattttaaagaaatgaccatatgatgtaacttttcaaattttacctaggcatgcttttttgagcaggcaatttctcttcagctccagcagttctctccgcaaggaaaggatcacagtttggcatgcataatgaattagggatcgtcttcgccaaagaactcttacaaatttgttctcattgtttagcggagttcttgtgtttgcttggattgtttaggcttagagcatcctcaatggaaggtttttagatagttcttatgcatatgaaagtagaatatgaagagagagaattagaaaaaactcttagctaagaggcttgatgatttatatatgagacacatgtctcttttatattggttcaattttctaatatggttaatgtgctggctttcctcccggatgagcttagagaaaagcttatcgatgagcaagaaactagagagaagtttcagagattacacagttatgtgcatgctctttcgactgaagtcgcaatgaagcggttttatggagctctgactacaaaggaagggatttctggttcgggtgttaatgccacaagtgactggggtagctatgttactgagctaagctctcttcttgaaaaatctcctaagattgaagttaaattggacacatagatgagacttgttctctaatggttattgccaagcaatagcaagattagtagtgtctagtttccataccaaactgttggtaagcgcggttctgtttggtctagtaaaacttgcttgccttgatatgaattatttgtaatttcgactaaatctcacttgttattcaactgatatgttgcttataaagattccttttgggagttggggactacagtaagtcgggacgtagcgtaacctgacatcaccttcgtgtgtttttaacgccaatatcatgcatgacacagaaaacaaagttcgtttcacttgtcatgtaataaaatgccttcgtctgtttttgttcgttcataacttatatctcaaatcatagttccaatcctcataatccacaaacgtcggtttagatcatactaatgttttagtcgttttacaatctaaactgaatactaaaccgactaaattcgataccaatagctctgggcatttgggtattcgggtcgcgtttgggtcatgtctttcgggttggattcggttcggatttacttcagatctgaataattcgggtatttgttgaaaaactcgataaataaccaaaactatttcggattgaatactacttacccaaactttatccaaatatatccaaatatacataaaagtatccgtaaaacccaaaagacctgaattataacaagtttttctttaagataataacatgaaacaagatgtaaaccttattttgagcttgttccataatccaatcaatgtatatatgtcctcatgtgtatatatatgttcgggtataaaaaatactcacggatatcgggttctgttcgggtaatacccgatacccacaattatttgaaaacagaatccgatcaggtaattagttggaaccgaagtagaacggattcagatatttcaggtcagattcggttcggttcttcgagttcagatataatgcccaggcctactaaacccgatgcataaacgacccaatatcttcttcttgttcacttgatttattaagctccaacaattaattgattattcttattcaacaccattaatgtataacataactctcatccaacacctacttaatttgatgatctaatgaagttgatgttgagtaaaaaagaaaacaccaatatttcctctgttttttttcctccttaaattaaaaaaaaaaaaccagaaaaccgaatgatccataaagaaatcgggtcgggtcagatctagcggccgactcctcctatacacagatccagaagcacacacacaaccgtataaagtttaatctctgccggaagcgcgtcgccgatcacgcgcattcatctgcatcttctcctttctctcacctaatcacatttttgtactttaatggcgaaatcgatctaattcgtccgtgaacaactataaccaaactcttcccccaaaaaaccttgcttcaaccatacttcacacaaatccttcaccaccactcttctcgcgtctctgtgtatatatatatttggtagagagtgctcatcgacgacgacaatgctaaaatg

SEQ ID NO: 36618 - DNA, 3003 bp, Unknown
  misc_feature (1)..( 3003): 2750-1469P.txt file - cDNA_ID_3098471; gDNA_ID_2936562; Annot_ID_194472
gattggctgctactactcccatactgatgaagcatgaaaagccgatgttgaatgctccacgccatcgcggtggtgctacttccgatagatataccggagccgcctagagtgttcacatttttttttttaaaaagagtatagtttcatccgtatttatatttattaaatgtgatagatatgctaacacattaaataaaattgtttaaaccaaaaccgttcaaaccgaactagattttgtttaaaaaccgacaaaaacaaacttaaacctgatctaaaattgttttagactttattttttggtgaaaattaaaaactgttttagacttttgtgtaactaaaattttacaaagtaggatacataaatatatatataaagtcgaatctaaaaccgtaattttatcaaacctaacgagttataaattattgtgtattggtttcaggtttaatatatagtgataaacccaaaataaatcagaaagaacaacttaattaaccatataccaacactcaaacgaacaaaaatatgctatgggctctagtgaaattggaactatatatagctacctggttggtgaaaccgacaccaaatcctagcaaaatccgaccggagatgagcatggcgatgttagcagctaagccattgatcagagcaccaaagaggaaagtgaaaccgccaaggatcatggtggttcggcgaccataagccgctgtgagacggctagccactaaggaagctactaagccggcaacataaaggctagatgtgaaggccgtaagaagttggctgtcgtagacgcagtagacattcgtcttagcttccgaagcttttttaagaaccgatggaaagaatttctcaagaaacggcttcatagtcgtcacaccccctttgttaaattataatcaaagataaattaactaatatacttgtttaataaaatgatccttttatgttcttgaatttgtaacctgagattccgatgtcatagccaaaaatgagaccacatgaggcagccacaatgcaactcatgacaactgcggctgtgatcttggcatcaatgtttccggcgctggagacatcaagagccaatcctccaccggccattttgcttatgtcttacgcatgaagtgttttttttttgtttttttttggttgtaaaaccaaatgaacaaagagaatacattaaagataaagaaggtttttaggtgagtcttttagttagttggcgtggtgacttgatggtactagtgtgcagccacttatctatgcatatgtcggttaataacgtcataatctaaaaggacttaagaaactttcaaagcaagaaatgagtttttgatttttgtgtcacataaaaacagtcgctaaacttacttaaaccgattcaaatattagacacacaaataaacatcgaatgttatagtggtgtcaaaatacttaacgtcacaagttatcacgatggtttttcaaactgatgctattttgttcaagtcggtttagtatcgacgtcaaggtcaataagaaccgacgtcatgcgccgcttttttgtagtggctacaccacatattttatttggtgtagtgaactaatttgaattctccaaaacaaaatgtaaatgtaataaactaatttacattcttcatacgcagttagtaataatagatcgagtttggtataacatccttatcgctgacagaaactgatgaaagaatccagatagaagataagaatatgaaaataaatagccacacaaagacaaagtttacataatggtggtttgtcacgtgttctaccattttggtaggaagaattaaagacgtagttttagcctcagtgctttgaattctagtaccgtataaataagtgtgacgacatttaagctgactaagaaactaatttggacattagcatattataaaatttccgagatcatgtagataaatctaaatgtgtaatatttgcatttgtaccatttgcgcatggatccattagaaatataagaaaattgagaatgaaacccatcaattagtttggttcgtataaaacactaattaatatcatatacaataagtccatgactctttgttttgtatatctattaatttctccataatatctttgaggtatgaattccaattcgaacccaccaactcattttcatagaaaggagtctttaacaatagagctattggaacttttcatttgaatccaccacctctttttcactttaacgagtctttaacaatagagttatattggaagttttcataattaatggcttctaaatttaatattaacacattcaaggccacaaacacttgcttgtgtagcttctattgagggctggctctgaatataactcctaattattaattgacttgtaataaggtttagatttttttttcttaagtacgtccaatttctacacctttgtatgtattgaataagcaagcagcttctccaatttctacaccttttgtattgaataagaaaacactttctccaatttctatactatctttgacgtttcaacctaactatactcattacaaatcttcaatacgtattaaagtgtaatgaggtatattgtttaatttgtttgaatggtataaaccatatatatatgtttctctttcgaggatgctactatagatcttgacataattgtaaaacaaaatatatttaggtttcaactagagtgcgattttttaaattcgtgtttgtatgtatatagcaaaatctaaatatagacctacgttaaattttttaaaaaatgttatgatctaaaactaacaaaatgtatagtaatagaacgctatattttaagacttaaatctccaactacctacttatattgactactttttagatttcagtctaccaaaaaatatatatacattcacaagaatatcaatctatctataatacactatataaattatcctaatccctcaccaatctctcaaaacactaaaaccattatcttctccaaggaaagaaaaatg

SEQ ID NO: 36619 - DNA, 3000 bp, Unknown; identical to SEQ ID NO: 7198
  misc_feature (1)..( 3000): 2750-1469P.txt file - cDNA_ID_3098503; gDNA_ID_2936562; Annot_ID_194464

SEQ ID NO: 36620 - DNA, 3000 bp, Unknown; identical to SEQ ID NO: 10477
  misc_feature (1)..( 3000): 2750-1469P.txt file - cDNA_ID_3098512; gDNA_ID_2213653; Annot_ID_132493

SEQ ID NO: 36621 - DNA, 3003 bp, Unknown
  misc_feature (1)..( 3003): 2750-1469P.txt file - cDNA_ID_3098545; gDNA_ID_2936563; Annot_ID_194514
tggtggctgcttgggttccttcaaggcatgattggctgcgaaccagacctttgggtgaacttcttgttaacagtctggggaggcaaaagatgtacagctactgcacctgtatgtttgtactgatttcaagactagctaaacttaaaaaaaaagaaatcgagattgctatgcttacttttctaatctctttgtatcatcttgtgtcagatgatttgcagtttttgcattttggaacatcaagtgaggtattggatcatttaagcggggatgcttcaggaattgttggtcggagacacttatgttccatccctgcaactacggtttctgatattgcagcatcttccgttattttgtctagtgaaattgcacctggtgtctccattggtgaagattcacttatatatgattcaacagtttctggtgctgtacaaattggttctcagtccatagttgttggtattcacatcccgagcgaagatcttggaactccagagagtttcaggttcatgcttcctgataggcattgtctttgggaggtcccactagtgggacataagggaagagtgattgtgtattgtggtctccatgacaatccaaagaactcaattcataaagatggaactttttgcggtaaacccttggagaaggtattgtttgatcttggcattgaggaaagcgacctctggagctcgtatgttgcacaagatagatgtttgtggaatgcaaaactgttcccgattcttacgtatagtgaaatgctgaagttagcgtcgtggttgatgggtttagatgatagtagaaacaaggagaagattaagttgtggagaagctcacaacgtgtaagcttagaagagttgcatggatcaatcaactttcctgagatgtgcaatggttccagcaatcatcaagctgatcttgcgggtggaatcgctaaagcatgtatgaactatggtatgcttgggcgtaatttgtctcagctgtgccatgagattttacagaaagagtcattaggattggaaatatgcaagaattttctggatcaatgtcccaaatttcaggagcagaactccaaaattcttccaaagagtcgagcataccaggtagaagttgatcttcttcgagcatgtggggatgaagcaaaagctatagagttggagcataaagtatggggagcagttgcagaagaaactgcttcagctgtgagatatggttttagaggtaaaaatctagccaccaccgtttggtataacacctttcataaacctggatttaactcttttatttgttcttcagaacatctgttggaatcaagtggcaagtctcattctgagaatcatatttctcatccggatcgagtttttcaaccaagaaggacaaaagttgaactaccagttcgggtagattttgtaggaggttggagtgatacacctccatggagcttagagcgtgcaggttacgtcctgaacatggctataaccttagaaggttcacttccaattggcacaatcattgaaacaacaaatcagatgggaatctcaatccaagacgacgctggaaacgagctacacatcgaagatccaataagcattaagacaccatttgaagtcaatgatccattcaggcttgttaaatctgctctattggtaaccggcattgtccaagaaaattttgttgactccacagggttagcaataaagacatgggccaatgttcctcgtggcagtggtctaggaacctcgagcattctagctgcagctgttgtgaaaggacttctccagatatctaatggagatgaaagcaatgaaaacattgcaagacttgtcttggttctggagcaactcatgggtacaggaggtggctggcaagatcagattggtggattatatccaggaatcaaattcacttcaagttttccaggaatccctatgcgtcttcaagttgttcctttactcgcctcgccacagctaatttcagagttggagcaacgcctccttgttgttttcacgggtcaagtaagtagcaaccactgagaggaagaaaagattttttgttagctacagagtctcattcattttatgccttttttatataaacaggtcaggctagctcatcaagtcctacacaaggtcgttacaaggtatttgcaaagagataatctcctaatttcaagcattaagcgattgacggagctggcgaaatccggtagagaagcgttgatgaactgtgaagttgacgaggtaggcgacataatgtcagaagcttggagactgcatcaagagctggatccgtattgcagcaatgagtttgtggataagctttttgagttttcgcaaccttatagctcaggattcaagctggtaggtgcaggtggtggtggattctcacttatattggctaaggacgcagagaaagccaaggagttaagacagagattggaagaacatgcagagtttgatgtcaaagtttacaactggagcatctgtatttgaaagatacatacagtgtcagtgtgtcatcatcttgattcttgtaaattgatatatttttttgggacctttggaaaaaataaaagcagaagaatctttcagatttgcaattaaaaacgatgtcgtgtggtaaacaaaatcctttgcttgaccaagtcgttctcttcttgcttctggttggtttacttcatagttcaacgaccaccaagctgtgaagtgaccgtattacccctgcctggaatcaaggtcaaaaggccccggaaaatcagtacgttggtagcatttggatttggagataacgccgttaaaagactctgtaacgggtttgctcaacagctctctctagttcgtttatcgaattagataatgccactccaaaaaacgttactttaccttacctatctcgctgacgtcagatcccaccgttagagcttacacttgtaacgccgtttcctgcattttccacaagcaaggtaaaaaaaagctttgtgcagagagagagagaagaagaaaaatg

SEQ ID NO: 36622 - DNA, 115 bp, Unknown
  misc_feature (1)..( 115): 2750-1469P.txt file - cDNA_ID_3098557; gDNA_ID_2936563; Annot_ID_194534
tcaagttatgagcacgtctgggaacatggcacaccatctattttgacaagataatattatacaatacatgtataaaatacgtacacattcatcgttataaactaaacccaccatg

SEQ ID NO: 36623 - DNA, 3003 bp, Unknown
  misc_feature (1)..( 3003): 2750-1469P.txt file - cDNA_ID_3098557; gDNA_ID_1620738; Annot_ID_166312
gcttcaaagagaagaacactaaatggaagatactagaacagcccttaagggagcttctatgggtggttagagaaggagaggcttatgttagaatgtctttagagcctaaacttgggttttgggctaaggctattgtgttgcatagcaatagagattgcacagagcttcacatacataacttgctctcttgtctaccgatcatcgtcgaggctattgagacagcgagtgaggtttcagggtgggatgaagaagagatgagcaagaagaggttggtgcattctaacaagtatatgaagcaatggaatgactctcagatgtttacctggaagtttgggagagagtatttggtgaccgaggatttctgcaaccggttcgagagtgcttggacagaggaccgttggattctgatcaaggagcttcaggagaaaaagcagtccggttcgagcaaacatgaacggaagatggctgatttccttttgaagcatttgggagatggaaatgagagccccaagctatttccttcttctcttctggataacacaaaagattaccaagtgaaaaaaagattagggaatggaagtcagtacaaggagattacctggttaggcgagagctttgcgcttaggcatttctttggggatattgatgctttgcttcctcagattactccattgctatctctttcacacccaaacattgtatattacctctgcggattcacggatgaggagaagaaagagtgtttcttggtcatggaactgatgaggaaaacccttggaatgcacatcaaagaggtatgtggtcctaggaagaagaacactctctccctcccggtcgcggttgatctgatgcttcagatagctttgggtatggaatatcttcactcgaagagaatataccacggagagttgaatccatcaaacattcttgtcaaaccaagaagtaaccaatccggagatgggtatctgcttgggaagatttttgggttcgggttgaattctgtcaagggattctctagtaaaagtgcttctttgacgagtcagaatgagaattttccattcatatggtattctccagaagttctagaggagcaagaacagagtggaactgcaggaagccttaagtatagtgataaatctgacgtgtatagctttgggatggttagctttgagcttctgacaggtaaagtaccatttgaagatagccacctgcaaggagataagatgagtagaaacattagggccggggagagaccgctttttccatttaattcaccaaagttcataacaaacctgacaaaacgatgctggcatgctgatcccaatcagcgtccaactttctcatcgataagcagaattctccggtatatcaaacggtttctagctttgaacccggaatgttacagtagtagccaacaagacccgtccattgcgcctactgtggattactgcgagatcgagacaaagctattgcagaagctttcttgggaatctacagagctaaccaaagtttcacaggttccttttcaaatgtttgcatatagggttgtggaacgggcaaaaacgtgtgaaaaggataatctccgggaaccatcggaatcaggaagtgaatgggcttcgtgtagcgaggatgagggtggggcaggatcagatgagcagttgtcatatgccaaggaaagaagattgtcatgctcctcaaatgatgttggtatgagcaagaagcaggtttcaaatcttctgaaaagagcttctagcctgaaaccaattcaaaaaccaggtgagattatcatcagccaatatatatatatatatataggctccctaacaaatatgaacttggttacttgtactaatttttttgttttgtgtcactagcctttggattctgttcagggacaactccgagaggacgatcaaggcatccgccactaagcccttgtggtgggcaaagcatgagagcaaactctgagagtcagctgatattgataagcccaaggatacgacgatcaaactctggacatgcctctgactctgagctttcctagtctgcagggaaaaagaataggttcataatagcaagttcaaaatgctgtacaagtcaaaagacatactaactcgtatgtggtgacacacactccactacatatctatcgaaaacgataaaattcttctttattcaaagtttcctacagatactactaggctcgtatattgttcaggctagtgactgattgattcagtagctactagctacaatattatcttaaaggaaacaaatcatatgaggcaaaattatgtgcctagactgtagaggctcaacgctgaagtgaagtaaactaggcctgctccactatttctacaatctatcaaacaccatcaaattacactaatcaaattttgggcttcgaatgtggataaaaacatcaaaaataaggaaccttgactaatctgcctgaaaattaccttaacaaaaaaggggaacagcgattccgccggggactagagacatggcgtggttcggagctttggctctgtctctcgtcaatttcaatatctccgccaccgccgactccgtcacatccatcctccgacgcttttattatgtcattgattgtgatatgaccaaaaagtccccactctagttttagatgaatgaagctatgatttcttttttttttttggtgataagtacgttattatgattttaataccaacagatttgtcaaatataacattataagcaagtggagtaaacaaactaagcagctgatttgtacaaaaaatactttacagctataacatttgtcattgtcaccctaatataaaatacaattccaacaactaaaatacatctctaaactttttaaagatgatgatgatgaaaagaattcaagttatgagcacgtctgggaacatggcacaccatctattttgacaagataatattatacaatacatgtataaaatacgtacacattcatcgttataaactaaacccaccatg

SEQ ID NO: 36624 - DNA, 3000 bp, Unknown
  misc_feature (1)..( 3000): 2750-1469P.txt file - cDNA_ID_3098563; gDNA_ID_2936563; Annot_ID_194533
tggaccctttagtccacatggtggtgttcacacgaggtggcctagtgaaattgattctgaaatgggtggtgcttttgctcgtgggtatgttcaacaagctgtgtctgatactgattcacgtcgttgccatcctctagcaggcggtgcgccttttattgcttgtcacagttgctttgagctgctatatgtgcctaagaagaagcttcttggtcaggaaaggcaacaaaagatgcaatgtggtgcttgttctgaggttatcacgttcagagttgttgataagaagcttgttttctcatcttctgccctgggggaaactacgaaccgggtttctgtagaggttgaagatagaagctcaccaatccctgtggtagatgattatccactcaatgatgaagaaccaagaatacaccaggaaacgaaaattgtccatgctgtatcgcctagtgatcactcaaacgatgaagacaggtcaagcatttctagtgagccgcggaaacaggtcgtcaagtctgttcgcagcagagcccaaggcgcgaaggttcctcctcctcctcctccggaaaagtccaatcttcttgagctctttgagtattctaatgtaaaccgagctgcaatcacttacggaatggcgcagttagggtactataagcaagaatcatacacgaaacaagactccctgaaatcagaatcagtagctactgagacagatgtttcttataatgagtactatactaacaccgaggagtctgaagattcaaggatctcaaaagccagcaaagaagggagacgaccaagaaaccgaaagcagagtagtgagcacagtttcgcagaggtcacaaataatatcagttctaacgaccaaaacaacgagcagctagaggtttgggtgaatgggtatctgataccagaagatctggttattagcgctgagaaacaagctgggccagttcaagctggcaaatactggtatgtttggggttacgttttgataaatctacgtcaaaagaattgatcagtcgttcaagaaaccatctttatgttatgattctgaccaggtatgattaccgtgctggattctggggagtgatgggaaacccttgtctcggtataataccagtaagaactttcacatctcttctatattgctttgaattccagtacactgtttcataattctttgtattgattggtacttgatgaggaaatgggaaacaattgttggttgatgcagccatttatagaggagtttagtcgaccaatgccggataactgcggtgcaggaaacacgagtgtgtttgtaaacggaagagagcttcacgagagagacctagagttactatcaagtagaggtcttcctcgaggcaagaaccgttcttacatcattgatatagcaggaagagttcttgatggagactctggtgaagaacttaagagtcttggcagattagctccaacgtaagcacaacacaattccatgtaatcaaatttttacatcaatcatttagttgattctgaaattttatggttgaaaattgaatcagggttgacaaggtgaagcatggatttggcatgagggttccaagatcattagtctcgtgaagcttcgtcagctttgttttgacctctctgatttgtaaattattctttgtgattgatatataacacatctttgcttatattctgacccaaaacttatttgctattctgtttttgggtttagtttcttttttgggggttctcttacaatgttccattctttctcttactttttttttttttgtctaagagataaaccgtatggttttatatcttgtgatctggtttatgtaaattgatcattttttattgtggataacctgttgcctgttgggaaataaaataatatttgtttgattttgtgacaaaagataaatgtatatatttatagatctgtccaggctgtgtgtacttgttaaatcgttttcaagaaagaaaacacactggtatggtagatccaaaatcaacttcaagtaagatgggtccacgtagcaaatatttaaagcccatggaataatttattcacaatgggcctcgtggtcgtggtgtaccctactccatataaaaaaacagagtcgataatctagtctgtctaaaacgactaattcatgtctaaagattagtttatgttttaaatcaccgagaactaattctaccgtctagatagaacgattttttttttttctctagatagaacgtttaaaacaaaattagcatgaaaattaccacggttatcagaagacaaaatatattttttcgtctaattagatgtgtaaagcataaactagatactaatttatatactcacaagtagttttagttacaagtttcaaccattaaatctaagtgcgaggtctctgtctttagttgaaaaaagagagagagaacaagtctctatctttgctcctgataagtgataattaatcaataaatactgtaggaccatccttatcgagtttcgtttgatagacactacaaatacaaactaatcacctaatttccataaatgtagagattactgtaatcctgtctacgttggaaataattaatggtaccatgtcacccgtaatagcaatggcttaatcatgtttaaagagacaacaagtacacgattcgcgctttacagttgtataattgtaactttaaaaacaattatggatgcctaatcattagattattttcttcttctgaatatctctccacaaattaaatgaagccacgaccgacataaacaaagtggaaacaattacagtaattcaaacacatgcaaacaaaaaaactcgagttaattattactaacatgttttagtacttctgagaaaaaaagaaaaaaacaggatccgctgtgtcttttttataatgatgaagttcctcgctttcaacgccaaccaaaaacctccagaaagctaattagggaaacatttgaaaaaactcagtgatctgctcttctctctaattgcaatg

SEQ ID NO: 36625 - DNA, 3003 bp, Unknown
  misc_feature (1)..( 3003): 2750-1469P.txt file - cDNA_ID_3098583; gDNA_ID_2936563; Annot_ID_194526
ctcacactcagtacagtgttgaaatagttaagctgtgtctgacctagttatctccacggacgcagatgatatggattcaggggcacctcaggaggacaagtgcggcgagatgggtgaacctgccttgctttgtgagcaatgcagatttactgtccaaggctttgaaaacttctccacgcatctcaagagtgaagaacatgcacatgaagtaagcatcctagccaaaaacgcagacttgttgtgtccatttgagtcaacaacctcttaccgcgagtttccctttctcacttaattcttccagttatgttttgcctaaatttgaccccatattttgttttgtcaatgagcagtctcaatactaccgtaacgaagatgatgaaaccgatggagacgactacgtacgagactctgaagacgacgaagaagagtagtaagagttgtgtgtgtgttaatgttatcttaagctatctaatcctttttatgttcaacatcttctaaatcctcgtaaactctggttttctttgtgtgttaactgataataatggtgttatcttaagctatgagtagtagtaagagttgtgtgagttaatgttactgatttctccaacgaatttgcttttttggagattttgtcccaatgaactgcaacaacaaaagcaactggtgagaaaatgatgacttgtttgaattgtgttagagttccagatacatatgctagagatgcaactagaaactggtcatatctcagcttaaaataactacaaagagcataacaagctggctaatacttaaaaatgtaaaatcagattcaacagaacccaatggttttgtgtgtgttttcagacctttagatttcgcaaagcccaccagaaacaatggttgcaaatactttcttctttctcagttctagtaaactataagccgaagctgtttttgcttgtattcgtttgcccatattgtgatggtctttaaagattgggccttctttggttcatctaaatttgaagctttttccttttgttaaatttgttgaaacagtcaaagttagattaaaccaggacaaatgaatgaaacgataaattcataactttttactgccagcattatcagaagaatgtcgttaatgttgtctttttttctttcacttccgtctgttttttttgtggtattggttaattcgaaaagattcggaacctattggccggcaaaaaagttatccaaatgaacaaaaagaagaattacacgtgtcaagttcacgagaaacgacataatacgtgaacatgaaaatgacagacaataaaccaatgaaaatatgacacgtatattggtttcctattatttaaccgtatttagctcattgtcgctgtcactaaaaaggctccttgtttttatcttgaagcagttaataatttacgccaaagtcgtcttttgcgtttaagttcgcatgcctagctagtgccaaaggtgatcctatccgataagctttgttttgggtaaatttttatctgataaggttactgtaattatcgtcaattaccgctcttttaagtactatattatcacttaacattttttaaaaaatatgattgcagaaaatgttatatataaactaaatccctattttatcataacgtcaatttcagacaattaatgagatatgtaagcataaaccatattcatattgaacaagaaaacctccggttacaattatatgtgttgtttaaaatggttacaaaatcggaagattgttcgttatgaaaaccttaaaccataattaatacatatgttagaagataattagataagtaatcatttaactagatttatctaaaaagtgattatgttgtttttgtttgagaaaaccaagtaaaggtgagtcttttctcctttgggaaaaacaaaagtagaattcaaaaaagaaagaaatagaattcactaattatatagtaatccattaatattactggttagaaagcgtaattagcggcggtggttatcaaaagtgacttccaccatatgtttcgaaagcttgagtttcacgaagaagatggaggaggggcaactttagactagtggagatgaatcgaatgatgatttattgtagattctttgtggtatctcatctttccttcgtatgaggtgtgattcacaacaaatacaatttaacaaaaactagtttgtctacattcggtatgatataattaaggactttgtctcaaacagattaaagttcttgtttcatgattttagattgtggatgccttgtaccaatcttcttgtagaaatgccttctcctcctagaagagaaattacaccttacgtgtcgtacatgactacatggaacagtcactttgcagataggatatggtgttagacatttagcttgatacaattaattaatgtttaacaacaaggtttaaaggcaacgagagctatatctaataagatgtggtctaagacatatgagacctgatacatggagaatcactcatttataaatttctggtatattaacgacattttgtgtctaaaaaattagctattataatgaatatggtctaaaattgaatttaaattaacaaaactatctataaagtttgaaacgatcttacctaatcaaaacaaataattatctaagcaatctgttttgttttgttcggattatataggtccccaaaacgtcatacaataaaacttgcttaaatattttgtttttttgttacattaaaaaattagtatcttgttgtgtttttgtttggtttgaaaagctgaaaatgtgtgaaggagaagaaggaagctataaaaaagagtttaggtacaaaagtaaaaagttattatgtcggtgggttcattaaaagaaaccaaaaaacataaacaagtaattttgttttggcataacgaagcatcttcttcttcttccttgtatttattatccatttccagagattctcccttgtgagataacaacgaagaacgaaagagagagagagagagagagatatg

SEQ ID NO: 36626 - DNA, 3000 bp, Unknown
  misc_feature (1)..( 3000): 2750-1469P.txt file - cDNA_ID_3098596; gDNA_ID_2936563; Annot_ID_194523
gtttgttatgagaggaagactggtaagtgccaccactaatggaggaagaagtgggttcttcaatgccgtgaacctaaaggcaagtgatttctgcggagaagatcttctcccgtgggcattagatcctcaatcttcttctcactttcccatctcgacaagaacagttcaagctctcactgaagtcgaagcctttgctctcacagctgaggatctcaagtctgtcgcttcacaattcagacgcctccatagcaagcaactccaacatacttttcggttcggtcactcccatcagcttctttggctctgttttcggttttggatcttcttaaccggatcttgattatatatacaggttttactcagtgcaatggagaacatggagcgtgtcttttatacaagcagcgtggaggagatactgtcggaggaagttagccaagtcactacgcgatgaagaagatcgtctccgagaagcgctcgctagtcaagataaagaacacaatgctgcaaccgtgtcgtcgtccttgagccttggaggcgctctttacgcgtcgcgtttcgcatcaaacgcgcttcacaatctgaggcacaatatctccaaccttcctcctcgctacactcttcctttgctacctcaaaaacccaccgagcctgacttcaccgccaatcatacaactgacccttagatctctcttgcatgtgtatagtgtgtggaataaagtgtaaaaacaatggtttgaactttgaaccaataaaatgtaaaaaattgtttatcaactaacagaaattgaaataatggctggctcttatgcgccgcttaactttggctacttcagttcagcatcacacatggaggtatagttagagactcgatctgatgatcaatgcattgaggaaagtgggaaaagcatatttagctttcaagctaatgcatagcaaaactggggttggttatgagagaatggctagtgttagaaggtctgtcaggtttaggactttacttaaacttgttttgactcccgagtttaaagaaacttttttgcgtttatgtcttttcttgaagaaggaaacaatcgaaagtttcctttttattttggaagaacctaataatgaaaacctgagggagaatgctaatctccaacaacatctcactcattctctcttcttccttgagaaatcaaagcaaaccaaccaatgtttccttttggttttgttcggtataatatcaacgtctctttcgtatgtcggttttcagtgtttcctttttttaagtcccgctcctgtataaagcagaccaacatattgagcttgcgtttatatatactacaagtaaccctagagtactttcatctcttttttatcaacaaccacctgagagaatgctaatccccaaattcatctcttcttccgtaagattgatcggagtggaagataatgttaaaccttatcactcttcatgatcgtaagattaacctgttttcggaaaaatctattaatccatttcattgttcatttttatggtcaaccaaattataatctagtttcatgctaaaatttcgtatagagattatcatttctaaagaatgaaagttacataatattcaacatatgaataatatatttacaaaaatttacgagtgaaacgataaatacattacttcggaaaggaaaaaagaattacagaatgtatggacaaattggccatttcgtttggttacttgtggaataggataacgggaggaggcagctttacgtggtccatctagcaccgtctgattgcagtcaggttaagaaagtgtgcggctccgattcgttggaatacccattttacgtgggacccatttaagacaaatggtcccgcatctttgtttcttctttccacttgtgacccctgccattgccaacattactggacgacaaaatcgcctgctctcattttcttcatacataaaaaaaacctttatttattttattatgataaaatttgattttgcttacaaaaacgtgtatgttaagagtccttaatgttcattgtgattaaaaaaaattaatgatcaaagaacgtgtgattgtttgaactaattatagcttgcttttatatggaaacatacaaaaatatctggaccaacaagctcgtgcttcaaacaaaatacacatttttgagccatataatacctaataacgtgatttcttagactcttttaactgggcagttaagttaccatttctgcatttacttttttaaaaaactggttctgacgcagagagcatgaatttgtgatagaagtagaaaggggcacaaatagaataatccaaaaagcagcgaacaacaagcctataaataagacaatcacttaggcccattaacgactttagaggccctaaaaggtaagaaatcaaggtgaaacaaggaaggaaatttcgatcaagacaaaaatacgaaaacacccatgtaaagagaagataattacaggaaactgccatgaacgtccataaaaagccattctagccatctgactattgaatctccgcccttccttccttatcactctctcaaaccttttttttaacacactctctgtgtctctctctcacaccgtttctccagtttcagcttttcttcgaaccactaaacaaactctcttataaactctttctcatcccttattctctttttagaattttcatatatttttcttctgttagctcccgctattcctctcactcggtaattattgaaaaaaatttgaatatctgttttccaagttcgtgttatatatatgtttcagtaaaccattttgttttggataagattttgaacgtttatatcgtatactttagttttagttttatgggttctttatgaggtttgagtcctacaaaattatacatttgaatgcatatttgacaatgagattattgcaattaaccaagttgaatttgttttcagatattatttgtttatttcaataaaagaaaagaaaaaaagctctagaagaaatg

SEQ ID NO: 36627 - DNA, 3003 bp, Unknown
  misc_feature (1)..( 3003): 2750-1469P.txt file - cDNA_ID_3098604; gDNA_ID_2936563; Annot_ID_194522
taacaagatcgtgagatctaaaggtcgtcgtgatgatttagtaataagataaaaaagtcgtagcaacgtttttttggtttaaaatgtaaaaagaagaccgtgatgcattgtttgtaatgtatacatgaataaaataagtacttatttaacaacgtagtgtattagattatctttcgtcatgtatttgcatgtatattttcccccatgtggaatgtttcagtttgtgttatctcaagagcgaaaatgtgccaccaattgtggggaaattattgggcatcattaattaactactagtagtatataaaacgagcttttcacttttcacaaaataattatagttaaaataagcaaattatttcatgacgtaaaaaaagaaagaaaaagaagctaccacaccacttgcatatttcttaagtgtctgttatccaccgaatctaaaatgtcgcttttgcattcccacaatcttattagatatttgtattcccagagtaaaagtataattcaaacatttattattattattataggaattgaaagaaaattaaattttcaaaaagaccgcttacttgtttattatatacacagagaagagaacagtctcactcgccactttcctcgagaaaacgaaaaaaaaagatggtaggaagaagaaaagctttactcttttctctctgtttcttcttcctctctcttccttccttctcttcccttccatccttccaaaccctattccccaattctcattcccttccttgtgcttctcccgtctcattccaacccgactccgactccgagtcactgctagaatccgaatttgaatccggatccgactccgagtcttcttcttccattactctaaacctcgaccacatcgatgctctctcctccaacaaaacacccgacgagctattcagctcccgtctccaacgtgactcccggcgcgtgaaatctatcgccacactcgccgctcaaatccccggaagaaacgtgactcacgcgccacgacccggtggattcagcagctcagtcgtctctggtctctctcaaggaagcggtgaatacttcacgcgcctcggtgtcggcactccggcgagatatgtttacatggtgctcgacaccggcagcgacatcgtctggctacaatgcgctccttgtcggagatgctactctcaatccgacccgatattcgacccgagaaaatccaagacctatgccacaatcccctgttcttcacctcactgccgccgattagactccgccggatgcaacacccgtcgtaagacttgtctctaccaagtctcttacggagatggttctttcaccgtcggcgatttctccaccgaaacgctaactttccggcgaaatcgcgttaaaggcgttgctctcggatgtggccacgacaacgaaggtctcttcgtcggagccgccggtttattaggactcggtaaaggtaaattatcgttccccggtcaaaccggtcaccggtttaatcagaaattctcttactgtttagtcgacagatccgcttcttcgaaaccttcctcggtcgtcttcggaaacgccgccgtatcacgaatcgcgagattcacgccacttttgtcaaacccaaaactcgacactttctactacgtcgggcttctgggaattagcgtcggagggacacgtgtccccggcgtaacggcttctctttttaaacttgaccagatcggtaacggtggagttattatcgattcgggtacgtctgtgacccggttgatccgaccagcttatattgctatgagagacgcgttccgggtcggagctaagacattgaaaagagctccggatttctcactcttcgacacgtgtttcgatctctccaatatgaacgaggttaaagtaccgacggtggttttacatttccgtggagctgacgtatcacttccggcgacgaattacctgatccctgtggataccaacggcaagttctgttttgcgtttgccggtacgatgggcggactatccataattgggaatatccagcaacagggtttccgggttgtatacgacttagcgagttcccgggtcgggtttgctccaggaggatgcgcttaataattagatctgaccggagccggtacggataatgtacttttgttttctcaatttaatgcttagacttgttttttttttttttataaatcggacaagtgaatctttaagcggtggagttgaatacgtgttgataaaatcttcacgtgttgtcggctgtattattagtatcgtctttattttacatctcggaccaaagagagcgtgtatgattttctaaaaaattggcaattttacttttagttatccaacaaatgacaactgcggaaattagttagatcaaagattattcaatataatttccaagtcagacaaatctgattatctgaggatggtagagtacgtctataatagtataaattaagatagattttggtaaattactgtttacgtaatacatagggcagatgaaaaattgtgttggagttgttaatcagacaaaaacgaagattcagcgcgaagatagagacagtgctcctattacatactcctgcatgcactgattacttcatttttttccttgtttattttcaagcactttattggtttaataatctactttatcacctaattacattgaatacgtgttaacttgagcttagagtcttcatatgttacttagttcattcgttatgagtttaaaaccctctcactcaacctgtactatgttttgcatagttggctaaacatgagatatcttagcagaaactgagaacacttgtcaagttcaacatttgcggatatacaagtaacgaaaaacaacacttgaaatttaatgaaaagatgttagaaagtataaaacattaatgaatataacatcttaacgtaacacacctatattttccattactttatataaccctcaataaaatagtttataaatctacacacaaaacctcatcaaaaaccatg

SEQ ID NO: 36628 - DNA, 3003 bp, Unknown
  misc_feature (1)..( 3003): 2750-1469P.txt file - cDNA_ID_3098613; gDNA_ID_2936563; Annot_ID_194520
aagctgatatcggccttgtctagagagcaaacaaattcagttcagtcaagaacatcatcaggtagatagccttttgagagacagaagaaggtggaagtaagtttgtaatcaagaaccggttttgaatggttctttttttcttctaggtatcttttgtttttacctttttttggttatatacctgtaagaatcctccaaactaggattttagaagttttattgacaaaagtagacattatcatttactcgttttacagtggacaaagctgggaattaagtaattaacgataatgttgtatctgttaaagtcgtagactagctcatgaatcagtctttattcattctgatatgtcctatgtgttggatttggtgaagtgtttaatcgacaagtcagataagtgttatggattggtcacggaattgctcaagaacaacaaaacacagctgattcattgcttgtgaacaagaggaaacactatgatgttcgtgcacaccatttttagtgttcaaactaacataaaccgttatcgcctggggaaaacaaaagttttaagaagagaaacaggtggaaaatgtaacaaaaataaaaataggttccaccgagacttgaactcgggttactagattcagagtctagtgtcctaaccgctagaccatggaaccgcttgatgtttagattgcagtaaatacgtttttaatatgtttctctattgtgagtcaaagggtaatgcgatgtttctttctagatttcctaagctaactcagtcctaataaaccgattaaaaagaacatgaacaaagcatgcagatcataaaagtgtcacacaaagagagagatacatgttagattgtttttttttcttctcttaaatgataattaatcgttctaacaaaaacttagctactagtcttccatgatttgttatatattgagacaacaaagaccatacggtataatcaaaagacttgttgaatatagaatataagattagatgattttggtgctagcctccctcttcgctgttctcattcttaatgttcttctatggagatggctcaaggcttcagcatgtaaagcccaaaggcttcctccaggtccaccaagattgcctattttgggtaaccttcttcaattggggcctttacctcatcgggacttggcttctctatgtgataagtacggcccacttgtctacctccggcttggaaatgtagatgctatcacaacgaacgatcccgataccatccgtgagattcttttgcggcaggacgatgttttttcatcgagacccaaaacactcgccgcagtccacctagcgtatggatgtggggacgttgcattagcgccaatgggcccgcattggaaaagaatgaggaggatatgcatggaacacctacttacaaccaaaaggcttgaatcttttacaacccaacgggctgaggaagctcggtatctaatacgagatgtcttcaaacggtccgaaaccggaaagccgataaatcttaaggaagtattgggtgctttctctatgaacaatgtgactaggatgctactagggaaacaattctttgggcctggatctctagttagcccaaaagaagcccaagagtttttgcacataactcacaaattgttttggctgttgggtgtaatttacctaggagattacttgccattttggagatgggtggatccgtccggatgcgagaaagaaatgagggacgtggagaagcgtgttgacgagtttcacactaagatcatcgacgagcacagaagggcaaaactggaagatgaagataaaaacggagacatggattttgttgacgttttgttgtctctacctggtgagaacgggaaggcacacatggaagacgttgaaattaaagctctaattcaggtattataaattcgcgttacgttcataataaatgcatcaaaaaatatttgacaaaataatgtattcgttgtaaatttgaataggacatgatagctgctgcgacagatacgtcagcagtcacaaacgaatgggcaatggctgaagcgatcaagcaaccgcgagtgatgcgtaaaattcaagaagaactcgataatgtcgtaggatcaaatcgaatggtcgacgaatcggatctagtccatttaaactatctacgttgtgtggtacgagagacgttccgaatgcatccagccggaccattcttgatccctcacgaatccgtccgagcaacaacgatcaacggctactacatcccggcaaagacacgtgtcttcatcaatacacatggattgggccgaaacactaagatatgggacgacgtggaagacttcaggccagaacgacactggcccgttgaaggtagcggacgcgttgagataagtcatggaccggattttaagatattgccgtttagtgccggcaagaggaaatgtcccggagctccgttaggtgtgacgatggtgctaatggctttggctcggctcttccattgctttgaatggtcttcaccgggaaatattgatacggtggaagtttatggcatgactatgcctaaggctaaaccattacgggcaatcgctaagccacgattggcagctcatttgtacacataactttggtttaaattgaataataaaagcatctacattggacatattaatggggtgtcttctaccataataaaatattaagaaaattaaaatatgacaatgtctttaaactagagacattcaatgaaaatgtctatgagaagacattatagtgaagtagattttctatttaaagacaacctcatattttaataattatattttagtttttttaataatttcttacgtgggaagacatccaatataattgtgcaatgtggatggcctaagaattcttaaagttcggttcgaccggctaagacaaatttcggttattgatttgttagttttcttttaccggtttagcagaaccctacatacttgggttctgttcttgatctcttgtggtgaaataaaatg

SEQ ID NO: 36629 - DNA, 3003 bp, Unknown
  misc_feature (1)..( 3003): 2750-1469P.txt file - cDNA_ID_3098618; gDNA_ID_2936563; Annot_ID_194519
aaatctcggtggaagagacttgattcaaatcttctttactggtaaaaatatattcttctcaattcctcattttctgttggtggagtttgatttttgtcatttaattgttgttaaagaaaataggggcaagatctgagatctctgggtgttccatgcaaaactgttatactccgccgtatatttgcatctgggtcacacttctaaaccctatcatttgacttaagaatcgatttctgaagatctgggtttcttaaaagtctttcctttttgttgggatccaaacaacaaaagaaaagaaagcagagatgaatattggtcgcctagtgtggaacgaggacgataaagcgattgttgcgtcattactgggcaaacgagctctcgattacttgctttccaactctgtttccaatgctaatctcttgatgactctaggaagcgacgagaatctgcagaacaagctctcggatctcgtcgagagacccaacgcttctaatttctcttggaactacgccattttctggcagatttccaggtcaaaggccggagatttggttctctgttggggcgatggatattgcagagagcctaaagaaggagagaaatcagagatcgttaggattctaagtatgggaagagaagaagaaacgcatcagactatgagaaagagagtattgcaaaagcttcatgatttgtttggtggctcagaagaagagaactgtgctttaggactagatagagttactgacactgagatgtttcttctttcttctatgtatttctcattccctcgaggtgaaggtggtccaggcaagtgttttgcctctgctaaacctgtttggttatccgatgtcgtcaattcgggttctgattattgcgttagatcgtttcttgctaaatctgctggcattcagactgttgttttggttcctactgatcttggtgttgttgagttaggctcaacttcatgtttgcctgaaagtgaagactcaatcttgtctataagatcattgtttaccagtagtttgcctccggttagagctgttgctttacctgttactgtagctgaaaagattgatgataacagaacgaagatattcggcaaggatttgcacaattcagggtttcttcaacatcatcagcatcaccaacaacaacaacaacaaccaccgcaacagcaacagcatagacagtttagagagaaactcacggttagaaaaatggatgatagagctcccaagagattagatgcttatccgaataatgggaacaggtttatgttttcgaacccaggcaccaacaacaacactcttctgagtcctacttgggttcaacctgagaactacacgaggccaatcaacgtgaaggaagttccaagcacggatgagttcaagtttttacctttgcagcaatcatcgcagaggctgcttcctcctgctcaaatgcagatagatttctctgctgcgagttcaagggcttcagagaataattcagatggagaaggaggaggggaatgggcagatgcagtgggtgctgatgaatctggtaacaacagaccaagaaaacgcggaaggagacctgccaacggaagagcggaagctttgaaccatgtagaagcagagaggcagaggcgtgagaagcttaaccagaggttttacgctctgagatccgttgttcccaacatatccaagatggacaaagcgtccttgttgggagacgcggtttcttatataaacgagcttcacgcgaagctaaaggtcatggaagcagagagagagaggttagggtatagctcaaatccacctatcagcttggattcagatataaatgttcaaacctcaggtgaagatgtcacagtgaggataaactgtccgttggagtctcatccggcttccagaatcttccatgcgtttgaagagagtaaagtagaagtgataaactcgaacctggaagtttctcaggacacagtgttgcatacgtttgtagtcaaatctgaagaattaacgaaagagaagctgatatcggccttgtctagagagcaaacaaattcagttcagtcaagaacatcatcaggtagatagccttttgagagacagaagaaggtggaagtaagtttgtaatcaagaaccggttttgaatggttctttttttcttctaggtatcttttgtttttacctttttttggttatatacctgtaagaatcctccaaactaggattttagaagttttattgacaaaagtagacattatcatttactcgttttacagtggacaaagctgggaattaagtaattaacgataatgttgtatctgttaaagtcgtagactagctcatgaatcagtctttattcattctgatatgtcctatgtgttggatttggtgaagtgtttaatcgacaagtcagataagtgttatggattggtcacggaattgctcaagaacaacaaaacacagctgattcattgcttgtgaacaagaggaaacactatgatgttcgtgcacaccatttttagtgttcaaactaacataaaccgttatcgcctggggaaaacaaaagttttaagaagagaaacaggtggaaaatgtaacaaaaataaaaataggttccaccgagacttgaactcgggttactagattcagagtctagtgtcctaaccgctagaccatggaaccgcttgatgtttagattgcagtaaatacgtttttaatatgtttctctattgtgagtcaaagggtaatgcgatgtttctttctagatttcctaagctaactcagtcctaataaaccgattaaaaagaacatgaacaaagcatgcagatcataaaagtgtcacacaaagagagagatacatgttagattgtttttttttcttctcttaaatgataattaatcgttctaacaaaaacttagctactagtcttccatgatttgttatatattgagacaacaaagaccatacggtataatcaaaagacttgttgaatatagaatataagattagatg

SEQ ID NO: 36630 - DNA, 3003 bp, Unknown
  misc_feature (1)..( 3003): 2750-1469P.txt file - cDNA_ID_3098622; gDNA_ID_2936563; Annot_ID_194518
agctaaagttatcattcttaaggaaagaaaaatttaaggtatcacaagaaaattcacgtcttcgtacggtgatttgtaatcccttaagcaaaagggcagttgataaatatcacctgaagtctatggtttccacattttaacccatcacgtcactacatattaacaaggaaccattgaaatttacttcaagtaattaatactaatatcgcaatcaatttttttattgaaaaaattggggaaatagatagcaagaggagttacgaaactcactttcttcttacatcagatgagaccatacacggctttactatcagttttgtctccgggtgctttcgtgtaaacaattttaacacttgttcgtttttaaaacagtaagtaactgaaaatatatatgtatatgtgtgtgacgtatatatgtatatatatatttctttttttattgagcttcgagatttgtttttttgttcatacgatgagctttaagttttggtcggttcttttttccttttcgtgagttgttggtagattaaagtagtcatcttatgatttgtgttttttttggttgttaccaaaaaggtgacgattttgttgacgttaaacacggaattcattgtaacatgaatatatcaactataaacgccaaaatgggattttcttttttttataaggtaacaaaattaaggaaaaactattgttacaacttcaacttgcaagtatgtttctgaagctagagtttacagtcacgtgtgaaaatcaaaccaatttggatcattattgaagataaatgaatacttgatatattgttagtacaaatttaaacaaagcgataggtttagtggcattcagaataagttcaccaagaaccggcactactttatccgggattaaatcaactcttacaatagagttaactggactaataggccgatttgttgtggtaaaacaaaaccaatgaaatatatgataagattgagatttaagaattcaagactgagtccgttgaacagcccattctaattctgattgctagataagggatagatggggggcattattaaggtttgggaaaaaggctgatatcacgtttgacctagcacatatgtggcccaacattacaagaattccatagaaaaccagtattgtaatatcggcccatattatattcttgacgacttggagatattgtaagtcgacgtcgttgtttgacttagatgggaatgggacccaaacgtctcgaataaaggatagtttaaacacgtgaatcacgcggtccccactttttgctgtgtgtttctcaccgccatacatatattatacccactcgtgacttcattttccataattactatatatactaattttttgttttaactttatcgtttgttaaagatttttccaaaataatatagtcattgtatattcattttcgcagagccgtagtttatattttgatgataattttatgacttaaagagtgaaagctataaatatattacaattcaattgtggttgcgagagaataaacaaaaagagaaagagaaaaaaaaaacgttacagaagagaaagtgcagagctgtgcaggcgcatttgaaaatgaaattaaaaagaaaaagagatccaaagaaaattaaatgcatctcacgttcttctcattctggtcatctctcctaaatccacgtgaacttcacgtgcttttcacgccctcctctctatcgacttggcgtttcctttcttctaaaggagttgaattgttttgtcaacatttatcaagttatttagtaatttgtttttttgttttgtttttaaaaaaattatttactcccgttgtagaaccaccatcaataatattaccaaaaataataatcaaggatctaaactaaaataagccttttattttgtataattctgaaagcatttgaaacttaaggaacaactctttagtctttgcaacaaaacaaaacacaacaaaaaccgaatatttaagcctaacttgaatgtgaattgatttggtcaaaattcccggtgcttgaccaccggtcttagttggcatactttgcaattatgtaaacaaaaattttaaaaattgaaagcaaacttctaaatttgggtttggtttcccctttagttatttccatgaacatgagaatctaatctcgagttgtcagatagtatttgtttagatctacaccagttgagatagatctgttgcaaatttttaattaatcaaaacccataattgaaaattatgtcaatcaattattgacaaaaaccatgacataatctaaggggttttcaatcgtcgtgtatcaaagactcgagacaaagactaaatcgaaccagacccggtttaagtttctaaactcaattgtgtagttaagtagctaaccatggttcagatgaaagtctttttgttttgttttttgttttgtttgttggggtttggtcttttaataaaaaagagcacgaagaacatgcgtcggactctctctcttccttgaattcattcaattggccacggcgacaaaacagggagccgatacagcgaaactgatacatctttttttattttctggattcttagggttctttttcggggaatttaggtaatttgtttgtccattttggtggggtttgggagatttaaaatttgtgtttttttttgggtcggattctcaaaaatctgattttgaggagaaaatctcggtggaagagacttgattcaaatcttctttactggtaaaaatatattcttctcaattcctcattttctgttggtggagtttgatttttgtcatttaattgttgttaaagaaaataggggcaagatctgagatctctgggtgttccatgcaaaactgttatactccgccgtatatttgcatctgggtcacacttctaaaccctatcatttgacttaagaatcgatttctgaagatctgggtttcttaaaagtctttcctttttgttgggatccaaacaacaaaagaaaagaaagcagagatg

SEQ ID NO: 36631 - DNA, 3003 bp, Unknown; identical to SEQ ID NO: 26735
  misc_feature (1)..( 3003): 2750-1469P.txt file - cDNA_ID_3098651; gDNA_ID_2936563; Annot_ID_194508

SEQ ID NO: 36632 - DNA, 3000 bp, Unknown; identical to SEQ ID NO: 10477
  misc_feature (1)..( 3000): 2750-1469P.txt file - cDNA_ID_3098656; gDNA_ID_2936563; Annot_ID_194507

SEQ ID NO: 36633 - DNA, 3000 bp, Unknown; identical to SEQ ID NO: 10477
  misc_feature (1)..( 3000): 2750-1469P.txt file - cDNA_ID_3098656; gDNA_ID_2213653; Annot_ID_181661

SEQ ID NO: 36634 - DNA, 3000 bp, Unknown; identical to SEQ ID NO: 10480
  misc_feature (1)..( 3000): 2750-1469P.txt file - cDNA_ID_3098661; gDNA_ID_2936563; Annot_ID_194504

SEQ ID NO: 36635 - DNA, 3000 bp, Unknown; identical to SEQ ID NO: 10480
  misc_feature (1)..( 3000): 2750-1469P.txt file - cDNA_ID_3098661; gDNA_ID_2213653; Annot_ID_181658

SEQ ID NO: 36636 - DNA, 3000 bp, Unknown
  misc_feature (1)..( 3000): 2750-1469P.txt file - cDNA_ID_3098717; gDNA_ID_2936564; Annot_ID_194570
tatgtttatgtcgaaatggtcgattatagatatacatttgtcaagacaatataattatacatttgagaggaaatcgatcacttactagagtttatacaaagaatcgattagtgggggtttttgagtgcaaaattatagttattcgtataaaagtattattgtgctttcttcttgacattgtagggaggtgatcacagacatatcattcaaaaaataacaagaagaaaactcggatttctatagtctttgatattagtcgcgtttatgcataaattttttgattatcacaaaaaaaattacggaaaataatggaaatttatataccatgtatatggtcatggaccggaaaaaaaaaggaggggagaaggaaagtttagaataaaaacagttaattaacggacaaactactttgtacgtttgaagaataatgtcgctgtctacgtatttatatcatgattacatccactacgaaaattctaatctttatacatgaattggtgaatatgttgtatatacatgtttttgatgattctagccgacattaaaggattttttaataaaaaaaatagagaattaagacagctcgttagaagcaataagaaccaatggatcatttccggagcccgcccaactttttcctatccggcttcaacatccacaagaaatatattcaactacaatacaacaaagtgtcacgagatttgtctatttccaatcttttgcttctcaattatttatttcactttgctatataatctataaaactatgaaaacgctttacattatttcataaaattatgtttttcttttctatctcatgcgtcggcatagttagtgttacaaaaagtacaattttaagcaattttaagaagaaaaaagagggtggaaagctatacaaatcatttgtgttactgttttggattagaatcgatcaatcgctgtcgtcacaagatcagtcatttgatctttctaggtttgatcttgaatagaattgaaaattctatatatcgatacatgatttatgagtttgtcaaggcatctttaaataaatattcgacgagtttataatcaatatatgtatatgtaaatggagctgaagaccttgcaccaataatttgttttcagaagacattacgaaataaacaaaataaatttttctttactataataatttttaaatgaatttaaatatgaaatattaatatcatttatataactattcatctagatatatttcaatccgaatattagaatttcagtatttaaccagaaaacaaacaaaaataagaatgatatatttattgttgacactaacaactttaaacatgcgtggcctacaaaatttaagtcggccatgtaaataaacatgatcggtgacgtcatcgtgttctgaacaatagaagtacgacgaagaaagaggatgaacaaagcgacatttaacagtggcgcacacacgcatcaagaatctaaacgcaagagatttcaaatcaatctttcaacattatatttcgtgttctaatcatttcgtacatgtaataatatctattggtttcttaatatcccttatcgttagcatcataatttataggtcgtcaacaatatcatgaactattaaaatattatgttaaacaaaataagaaaataaaattaagaaggcgtgtttttgagaaatgaaaaatggttcttacctaaaagtttttagattaattctctctttataaaaacctttctaatatttaaatattattttgtctatcaaaattgtttaaaattttatgtaagagaccgttaataaagatggtctatatcaaaattaggattaccatataagttaacgtagcaaaatgtcagacaaacaaaaagttgacgtcgcggtatttttgcatggggatcggaaacgagtaaacaagggttactaatgaaccttgtattgactttgcttaattagcttggagactaagaggactttgtaactagcgtcaataagatgctgataaatttggattttataacataggaaacatgagatttcttggaacatatgcgagaggcgagataatagtgccaaatataacgatatatacctaccgtggtaatgtgtctctctcttccaccatttataaatatcataaatctcatatattactcaaaaacaaatcccgtcaaaactaaacacaacttagataaacatttagtaaataacaaactctaattaatttaatgtcaaaaataataattaagatcactcaaatattttttctgaatattaagaggtcatggattaaattccgtaattttttcagacccgaaaccacatgacataatattaatttagtctcaaacactcttattgtatgttgaaagttaacataagataaaatgaataaaatctcaaatctgattacttaaatacatctattaaaaaaaattttaggtatttgaattatgtttgaaaattaaatatgattaagtcatagttcaccatataatctatactagtactatagattgatgtataaaagaacaaaaagtcaagaattttctcgatacacaagaaggtaattaagatgaaaatctgcaaaaccttaaaaagatttgttttattatgttttttgcactgattttcaaaaatgttatcacttgaccattcagaattcatataagcatatcaatccaaacattagtcaaattttcgacatagatgaaaaacattataagtttctatcttttaaaaaaatcaaatggagaaaaagacaagtcgtaaaaacattagaatatttgtaaaaccaagaagtctcttaaaaagcctcatgcccaaaacacacacatagatagaactccataaccaacagaaaataaacacgtgtcgtctccacaaacttcaaactctattgtctctctgttcttcttgtttgctataaaacacactcaaaactcctctaactctctcaaaattctctttctctttctccatttctctcttctcaaagctaaacaatg

SEQ ID NO: 36637 - DNA, 3003 bp, Unknown
  misc_feature (1)..( 3003): 2750-1469P.txt file - cDNA_ID_3098721; gDNA_ID_2936564; Annot_ID_194569
ttgcaccaatgaatggaggatatgcagaagaccatgaagggcttataactttgttcagtgctcctgatcatcctcagtttcaggtatgctctattggatatttgtattggctatcttcacttccacctgttgtagtaagctcttgcggttcaacaaaaatggttactcgctggcaggatttcttatatcttgtagatgttgtaacttgtgtttgagcctcaacacaaacctgagtacctgttgtctcgtatgcaggatacagaggagagacacaacaacaaagcagcctacataatattacaaatccctgaatgtgaggagcttaaatttcaaccgcttgaagcagtatctccgaggccaaaggtagtactacaatttaattacgagagtcctaattttaatatcttttagtttattcttaatatgttctgacatctgcaggctgaggcgtactacgactttagacgcctgattcatccacccagtaatttagtacacaatattacgaattctgttgattcaccatcctcagtgcctgatgacaaagataatttaatatcttctgaaaatgtggaatataagtccatggatctctctgaacagatggaagttgatgaaaaagatgatgttgattccaagtactcagaatctataactgatgaagttgcagcttttggaactccagcatctggtgatagagatatggttgatttttcagataagactgaaaatggttctaaagaagctgaccattccgaaactgcagagattagtaaagatttatctgatacagttggaaaaccggagtcttgcagcagaacaagaggtacatatgaagctatcggaactgatgcaaagctaaaatctaacactcctgaagctattaatctggaaccgcagccaggttgtgatctgtatgtgcctgattctggaaattctacagaatctaggaccgaaaaagctgcagaagaggcttgtgttggcagaataagcatagatgactgtagcaccactggtgatgctgcagtggaattagaaattacatatgatgagaaactggatagagtggtaactgaaatcacagggaacgatgcagctgaatgtatgacagacggtaatagagacatagccaccgatggtgctgagaacttggaaccttcgactagcaaacttaattattcagagcccagtgaagatattgatgattctaccatgaagttcagacataatactagctgcgttgctgattctgatcttgagactgtgaatggtggggttaatgcagactgtagcagttcatcgaaatgtctaaccagcaagccagtggtggctcatgacaagtttacaaatcttacaaaaccttctcatgataaaggttatggagagtctgcagataagccagagagagtaattaaactggttacatattctaagcgtaagtcatctgacaaaaaacacatgattgaatctaatgaagatccccaacagaaggtcaatgattctgtcgattcaaagaacaaaggttctcttgacaagtcacaatcagttccaggagatatggactcatgaaatcttgttccactgtcttctttccggctgaggtaattataatctctcttctgaacacggtgtctaggcaagcctcactatctgtttataacacggtgttaatgactgtttttcaactttggtggttctgtggttagttaattctggttttacgagttctgcaacatttcatttcaaaaacacgcatcttcttgccatgaacaagacttactattacatatgattgatacacagatcccagctcttttatctcacacgtctgagtgatctcttaattgattttgcagatgatgatgaacagctacatggctttggatgtgtccttaaagacaatgtacagtggacagtggtcataatagtctagctggttcaaatccaaccggatccggtttgctaatttaagcttagatcagtagggagatggtgtaaacattattccccttctcttgaattttacttttctcaatcaaagtttatgtagtttagtggtacttttgtaaaaaagaattgaaagtattaagaattacagtgtgtttgtctttcatcattgaaaaataaaatttgtaaacggtaaacaaacaaaaccataactaatccaacggagaggcaaattcgtgggttgggtcaaaacgaaaagggtataatcgactttgccacacgataagtcaataactagattcactcgttgaaaacgcagcgtttttgcatcctaagctaaagaagaatctgcctttgcgcgtcttcaggttttcttcattttttttattttgtcgaatctctctctctctcttcaacccctcttctcaatctagggttagggtttcgattctgctagaggttttttttctcccaacttatacttctaagccctctcgtcataagccttgttgactcttcttcttaatttgaagaacttcgtaggctaagcatgtcgtgattatcccaaatttctggtaaatttgatttctgctacttctactcgtcattttattctgaattcgtctttgcgttcgaattatttcaagcaattagcttcatcttcgtgtgaaatttcaatgttttaggatttgatttggtgtcataaagaacttatttttctcgtgattttgcatcttcttttaagtttttctgggctggtttcatggctcctttatcgtttcacgtgaatttcagtgtcgattcgattgggattttgagaatagttggggacgtttctgtattgcaaaagaatctgtgaatcttttttattcttctgatataattttccaaggagattaatcgttgtatcctactgctgtagcttatttgtttaagtttgatattatttcttcaaaacaatcttcacaaatttctcatgttcgttcttatgttaatttcaggtgtttattcaaactccattgttacaaagattttctttgataagttaaagcaatg

SEQ ID NO: 36638 - DNA, 3000 bp, Unknown
  misc_feature (1)..( 3000): 2750-1469P.txt file - cDNA_ID_3098735; gDNA_ID_2936564; Annot_ID_194566
acaacgccacgctatactcttttgcatgcacctcaatttgaacatcatcaagtctctctctctctttttctgactttgatccacgaacctaaccagcttgcgatctctatttaatcggtcctcgacgcaacttcaacttctactacatccattcacatcaaatcaatacagaaagttttttctatatataaatataaaaggtaaaatgccagggatcacactaggagacacggtgccgaacctagaagtggagacgacacatgacaagttcaaacttcatgactacttcgccaattcttggaccgtcctcttctctcatcccggtatatatgttaatatatagatcttgagttcttgacttctgttgcaattccttttttgttttcttgatttttgttgacggtcacacaggggatttcacacccgtgtgcaccacggagcttggtgcgatggccaaatacgctcatgagttcgataagagaggcgtgaagctccttggtctgtcttgtgacgatgtacagtcacacaaagactggatcaaagatattgaagcctttaatgtataatttaaatctcatgcatgcatataccagactagctagagatcatattttggttttgattaatttgttacatatgtatgatatagcacggaagcaaggtgaattacccgataatcgctgacccgaacaaagagatcattcctcagcttaacatgattgatccaattgagaacggaccgtctcgtgcccttcatattgttggtcctgacagtaaggtaataatttcatatattattgcatgtatgattttattggttaattggatttgtgatatatagataaaattgagcttcttgtatccgtcgaccacgggacgtaacatggacgaagtattgagggctttagactcgttgttgatggcgtccaagcacaataacaagatcgccactccggttaactggaagccagatcaaccggttgtgatttcgcctgctgtgtcggacgaggaagccaaaaagatgttcccacagggtttcaagaccgccgatcttccgtcaaagaaaggctatctgcgtcacacagaggtctcttgaaaagataataacaaaagcctactatataacgtacatgcaagtattgtatgatattaatgtttttacgtacgtgtaaacaaaaataattacgtttgtaacgtatggtgatgatgtggtgcactaggtgtaggccttgtattaataaaaagaagtttgttctatatagagtggtttagtacgacgatttatttactagtcggattggaatagagaaccgaattcttcaatccttgcttttgatcaagaattgaaaccgaatcaaatgtaaaagttgatatatttgaaaaacgtattgagcttatgaaaatgctaatactctcatctgtatggaaaagtgactttaaaaccgaacttaaaagtgacaaaaggggaatatcgcatcaaaccgaatgaaaccgatatgaaaccgcatcaaaccgatatagcgtgaaccaaaatgtggattaatgacatttagaccggaggaacataagtggggactatacggcatcgttttagtgtataagtgaattcgcatattcacgagttccccgtattcaccggttgttatatcgtcgattcatcgtcgtcgacggcgagtacttgtgacctccacacccagattaatcttctataactgattttatcgcttagacgatcacgatctcatcgattaactgtgagtataatcgattcctcctctttattttgtgtgttgtatcgatttacgataattttttggaggaacatctcctttcggatcggttttgttgggaatttatatttctttgccatggttttatcttgatttggtgatttaccttgtgtttgttctggtgtactatttagctaatttagtataagctttcagatgattctaggaaacttttgtgctactgttttcggtttttggtgatagaactatgtagttttaaggaaccatataaaaatttcgtctagaaatgtttctatggttactgatcagtcatcagtggtagcgatatgaaattggaatcctgttttttgttacacggttcgattcagatgctttcgattcaaatcctgtttaagcagctcaggttctttagaattcttgttttttaaatgcttcttgcctgaatgtaagggattttttttgctattgctttggttcctgtgattgtttttcttacctcctctgatgttacatgatcagcatttgtgaatttggattcttggaagctaacacaattcttaggattaagtttcgtatggtctgagactttgagttcttgacgtttggtctgaggaactgttggaactcattgattttgtatcggttctgtagcttcagttcggacttgatcatctcaggaattggaaattgtttttttttgatgttacaatatttcggagtcagataattttcaatttcttattttgtttatcccagtcagaggtcattgtcgaaaaagtacggattgatctggatatagcatgatggtttgagttgtataaactgggttactgagctgttcagattgtgctagattctagttttactttgatgtttggaaattatgtgcgcgtctttgtgttagtgaacattacacactgaaacatgaaaatccatttgctttgttgagactccatctagttacaactgatagctattattggtatatttcttatggtttgagcttgtgatcaattttggtggggtaaatgggatgttaatattgctcttgaggaatatatgtgttgatcatgacaactacgaaattgtgaatagttcattgatttactagattttgtttattaggctcgctgagtgatttcttttacatgctctacaacttcttggagaatgctgtgatcgtctatgcatttctattcgcagctaacttaaactcttttacataattttttactttaaaggacaaatg

SEQ ID NO: 36639 - DNA, 3003 bp, Unknown
  misc_feature (1)..( 3003): 2750-1469P.txt file - cDNA_ID_3098738; gDNA_ID_2936564; Annot_ID_194565
ttcggtttcgccctgaagcaatgaccttaccgtcctcaagaaaaacacatctggtccacacaaaccagaaagaaaacgcattagttatcctatatgacattaattgatacactggtacgaaacacaaattggtatgaagccaaagcaaaaaaatagagaccccacgggaacttcaagagcctccagagcaagtttagcctgcaggcatagggaaatcaactcaaaagcaacaaactaacttttgcagtattatagaaccaatactagttttacctgatgcagagcaaaacccatataattatgagaatcctcacaatggtcctcttccattaacttttatagttggcttggccagagaaagtaaataacaaaacctgatagcaaagattcaaaaatccctagttatatagctaagtagaggatcaggatactctttggcatatccattctaaagagaaatttctcaaagaaaactcttttttttttacttgcaatgttctcagtttatatgtgtctaccaaaactgaaactaaatagtaaaatacacgtaacagaggagtgtcaggaatacaactaatcacattatgctctcagggatgaatcagatcaaaaagaaaacaatgcttgtgaattcaacagaagagctatgaacataagagtcacaaacaccaaaaagaaaggtaatagaattggaactgtgattattctggatgaagcaaagaatcgaagtaagaaagaagagacaaaccaatgatctactcgcttactcagaccgcaacgatcaacaagcttcctcacaatcgtctctgagaataaaaaactaaaaatatcaatcctaaattttgtgaaaaacccaaaccatatgccagccaaaacgtcgtcgtttatggatataaaaagtttaaaagaaaatcatgatttattgaagagtgaagtaaaacataatttagggttttgttcaatttcggtttattcgggtccaattagtttccgtgtgtaaggccaaaccgaaccaaaccaaaaaaatcaattctttttatttacatttggtcagagagttcacaaatttaaaggttagatgccaaaacaacttctgatttttatatagacgtcaatatacacacatcatctaattcttggtggtaactctgtatcaattcaatagtacagatcatcaagtgacaaatatagagggaaagaagaatggtttcatcatatagtttgacactttggtatgtccaaaggatttgcctttttaccgaacaaaagatcaaacatgcaaatattgcatcaccataactatattccaaattaggtgaagaaatcacgccaaatcggcaagaagaataagaaaacaaacacatttgaaagtcatgaacaaggaaccaactctctctttgttttgtggtcgaagtaataaacgctttaaacatttctcatcgagcattatgcagatgaatgcagctacgaaatggggagaagatagtatcttcaagatacaatgccaagaaaacttatcgaaaaccaaaaaaaaagtgatcatttcatgccaatcgatcaagataccttagtagaatcagtcacaaatttccgtataaaaagggtaggacacaatgaaggagaaacaacctcaagaaacagctaaattgggttatgttgctcttacaggttttgacattgtgtaaccaagatcaatcagctttctaatcaacactttctcagcttttgcctacacaacaacacaaacaagaaacaaacaatgagtattatcgaataaagctagtccctttcacatttctataatacaatagctcaagtaaaaagaagaacctcaagcaagggattgtttttagggatgttgcaagccagtattatattgagaccagtcttcaacactagaacacagaaaaatacactgaatcatcaagaaagaaaaggatttgaaattgcaagaattgttataatcagagtctaacctaatctacgcgcaatgccagatccagtgttatcagatgttccaccaagtaccgatgtaacactcactgtattgctctgccatagaaacaaaaaaaaacatcaatttaaacagaaaccctaaaaattgctgctttagttagaatcaaggtttttactgagctcaccggtcgtgttgaagcggctgcgtacaaactcccaaatttggcggaattgcaaccgacccatacgtaaatctgtagttcgattaagtccaattttagttccgacgaagctcaaagacttgagaattaggttaaaaggaccaagctaagtttattggcgggaacctgtttcgcgagacggatgatctggaactggatagtaacatcatcgaaaacttcagtgaagcacgaaacttttacgccgtttccgtctctttctacgtcgtcggattctccgatttggtcggcgatgttcacctgagcaacggatcgaagaacttggtcgtattcagtctccattgtctcccaagtccgagaaaagtcaggtcctctttggctcttcttcttcttatgaaaatcaatttcactttttcatctccggttaaatctgatttggtacggttaaatacggtttagaccggctcaagtttttagatggtataaatctcaattgcgaaattcctctttctccgtcgttgctcttctccggcgatacgagcatctctgatccgagcaatttcacttcctgaattttccgaatctgatccctggttcgtttctcttctctctgtgttaaattcagcatccattgatctttcgtggggtcaaatagtagttatctttcttcttgcgcatgtatacgatttgggttctctatgcttgagatcgaaacagatctgtataatttgttatggatttaatcgcctatttcgtggatttcaaatgttgggttcagattttgatgttgcttttatccaatcataacgttttctgttgtgatttaagagcagttggattaatctgcttcgttcttgatatgtagatg

SEQ ID NO: 36640 - DNA, 3003 bp, Unknown
  misc_feature (1)..( 3003): 2750-1469P.txt file - cDNA_ID_3098749; gDNA_ID_2936564; Annot_ID_194562
taacatcctttcatacatataaagagtaaataaaacatagatattagaatattattgaaaataaacacgagataaggaatatcagtttcaaatttatcatttgcaagttgaggatgatggttaggtaaaatggtcgaatttacaagtcggaccggatctgcaaatgccgaagcgactgtaatgcgggcaaatggcttgaccaggtcttaatggtaagcccttgtcattgagagtacattgaggctcgctcggcgttatattcttcgggtgatggtatttgcagttttgtttcagataacagtttccagttctaagataatagctgcactctggttcgcctggacgttctgggaatttttcttcagacatattttctcttctcctagtattatattgtttgcatgtacttgtatatctcttctacctataatctatatatattaccagaagaaaatctagcattgaatactaaaatgacatgttttgaagaaagatagtatcatctttaatatttattgttttagttataattgtatttaaacaaaattataatatcatgatgctatatttatattttttcatttaattattacttaattaatatttagtggattttattttgctaatattttagataaatacattttaatcatataaatcttcttaacataaactacatgtgacataagtcgttttcttaaaattagattattattattttgacagcaaaaactccacctttttttttgaatatttaaaaaaactccacctttattaagcatgttcctaaaattaaaatataaaagtaatgaatacaaaagttaaatatgaaaatcactaataatgtaatcggaggccggatcgatctggtgacccaatcacaaaacttgtgaaccattattcgatcaatcaatgtaccgtgtgagccaaggctctttatttctaacctaagaattttcagatttaggttttgaggcctattaagattaaatgaacggtattttggtaaatgataactatatctaaattgatcgatccctagacaactctctcaagaagaagtagaagaaatcaaaagtttgatcaaaccctatgatagaaaatgacgacgacaacgcaactggcacttccctatgatttgctattgggctgcattgcacacgtcttctagattgtactatcctaatctttccttagtctccaagagctttcgatctctcgtaacttcaccggagctttacaagacccgctctctcctaggccacgccgagagctgtctctatttgtgcttacggttccctcctgacactaatctaaccctcgttggtacactctctgccaaatacctaaccgaatgaagaagaataattcaagtggcaaaatttacgtcccaatcctaatccaaccatctcccacttctcctcctccacaatcgcattcctcgaatcatatggttaccgttgtaagatgtacaaaattggcggggatgtgccttcttcttctagagtctctgtcttggattggaagtctcacacatagaaccaaactttaagcatgcgggtggaccggagctcctcttcctccactgtaagtctacttgaggggaagatatatgtagcaggaggttgtgaagatcgcaattctgtggactgggtttaagggtttgatccaaagactcacacttggagctctgtgactagccctagcgcggtgatacggaatgaaagtgtagctgaacacaaaagcttgggacttggtggaaaattctacctctttggttatgactcagataagtctgcggtggtttacaatcccaaagaaggtagatggaacccggtaggattatatattaatataagtaatgaagtgtactatagttgttttgttgtgtgatagacaacgtcttgttctataggtttcacggactcttccattggtatgactataagggaaacttttggaagcaagtgaatggtcttgggccaggtaaagatgaagaccaatactaaagcgacgtcatctaaggcacaacggtcatcttcaaaaaagttggaagaaaacgacgaaacaaaaacatagcaaggaggtgatgaaagttgcttgtacggagaaagtagcgattctcgcagccctcgatacgtttgacaacgcaagatgatgacatctgtcctctctctagggttttttcgattaacccattctcttgtctataaatactacaatgttctaccgattccttttagcttcctttgcgttactactctgcttcctctgcttgtgagtttccctttgtaagtgcgattagtgttacattttaggtttttttctctaagttaggattttgttttgctttgttacggtttttgcctttcagtgtgtgattagtgaacaaatgaggagcttttagtcacgtattagggtttgttacggatttttgcttgtgcattttgctttttcagtgatcaatgaggagcttttagttaggttttagcgtttaatacatcctcctttagttttctcattatttggtaaagaagctatcacattggttctcgatctagccacatttctttttgtcattaaaatatcttcttttgctatttcttcgataaaaatgtcgtcttttttagggttctttgttctaagttgttgggatttgtttagctcttgctttggtatgttacgggttttgcttgtgcattgccttttatttttagtgtgattagtgaacggtgaggagcttcttcgttaggttttagagtttaatcctcctttactgtagtttgctcattctttagtatataagctatcacattggttctcgaatttgccacaaacgtctcatcgatctgtttttacttgcctctgaacaataaactctttgttcaaaccgcttcactttggatcccttcttagttaatgttctttccattttctctgttcacatttcattaatgtattttattgaccttggaaattttcagggttaagtaattgcagatg

SEQ ID NO: 36641 - DNA, 3000 bp, Unknown
  misc_feature (1)..( 3000): 2750-1469P.txt file - cDNA_ID_3098756; gDNA_ID_2936564; Annot_ID_194558
tttgcagatccggtccgacttgtaaattcgaccattttacctaaccatcatcctcaacttgcaaatgataaatttgaaactgatattccttatctcgtgtttattttcaataatattctaatatctatgttttatttactctttatatgtatgaaaggatgttattaatctaaggatcaagttaatcaccatggtatcaaattttcatttcatgtaacaaaattggatttttcttttcaagtttacccaacaaacaaggctttgtcgtctccaaattttggactaatggtacatagtgaaagccttaagaatcaacccaaaggagggtcttaccttattttaggagctttgtccataccaggaggtacaaaaaaaaaagatcacaacaacagacaatagatgccaaactagtttacaagtgcaatttatgcaaatgatgagactaaatgctaatctttactttagccgagtgaataatttgaagtgaaatgaacctaccaaaaatttaacaacctctcatatcatgatcttgggagtggacactttagaatcttccttggctgtgtcacctggaagaaagaacataaaaccagttagtgaacacacagctaatctccgaaaggcggcttctaatcatgttcatatctatttcccttcatgttacactctaaatcatatcgattctaaccccatttctctttgaattcaatacgtgcgtcaggttttctttatcaaccccaccaatctagcctagtttgtacttgcacagatgtaaattgatgtatcaaacagtgatacctaaccacacattctcaaaccagtaagccctcttctgttgttaaatctagggaaagtatttgtttgttctacaagtgacatatagacaaacatgactactctagtttgtatagatatgtaataaacaaacatctaagagaacaattctatacagataattgctgatacaagcaaaagagagggctgagagtaatcaccagattgattggttgtggtggtaacttcaccatagatggccttaagcgtcgacaaaggaacaaccgcggcattacccgcagaggcagcttcagcaaagagctgctgtttccactcccacatggtgagtttcattgccttattagacttgaagagtgactccttctgctctgctaaggcctcaacatacttctgctgtttatcagatctcaatcccaaaaccacaaacgatactcctagacacgtgtttatcacagcattgttgttcattgcttccgagagaaacattgcaatcttgttcgccattcctgtgtagtcaaatccatcagtcaaaggaatacatattagcaactatcaaccaaaaccatgcactgtgagcacaacaaactcaggtaaagctgaatatgaacacagagattgttgtatctaagaacattcaaacattagttaaatgatgaaatcaccaaattttgttggaatcgataacaaatggtgtcattttggctacatactctatattatgtggagatggtgatgctgattttacaattagagatcaatcagatcgatcaataagctaaacaacgaatccaggaaacaaataatgaaattgaagcaagaaaaacaaggaatctgggaggctaaatcggaatgagtaacgaagtttaagaacgaagaaaggctcacccgaaatgaaagatgcgttgacggctacggcggcgaggtttgatacgacggcgacgagagagaaatcgcttccgttccaatactaaaggttgttttggggatatgactgtaattctaaaacaatgttaggggtatttaggtatttcaacacttttgccaagtaagtaaagtacgcaacagtgatcattaagatatttgttttaaaagtgttaaagacgatcattcatcatcaacactaacactttttcaaattgtcgtctaaagtctctaaaaccaccatcgaagtcttgacagagagaattcgaatcggacagagaatttcttccgtagtttttcttgtaagcgaaaaaggtaaataaaagctttttcttcttcctctgttacgagtttctctttttggtactttccttaaatgtcaaaaacccttttttaagaaccgagggtttcgaatttcaggttgattttgatgattaaagggaatatcgtaattgatttcatgtttttcaagtttgaaatctgtatcctaggttaaaacctcgttgacttgtgaaaagtctaggtctacggaacataaaatgtctctttcttgttgttggtgtttgagattttgatcggttcatcatgtagatgaacaatgaactatgtacttcttctgatatttggctttatttatgtgaattttttttgatttttcataattctgtttttgtaaatgctcaaaaaccttatccttataactattcttatttttgtttttactgataactactctgtgaagttctctgaaagttttcttctttttggttattactatgagaaaatcttgttttgcaacaccatttactgaaaatttgtgtctgaatatgttcatgttcgtgcacacggcatgattagccaaatgcacaagcttactcatttgcacatcttagagaaattcttccaatcttttctttttggaaactatttgctagcttttgttggtaacataagtgcctttaccttgtaatattaagcttagatagccgaatcgtgtttgcaaaactgtttattgtgcttgtattttaccttgtttatatatatagtttcataaacaggagatactagaatcttactctgcaaagctgttcatttttctgtgtctattcttcatgcctatagtttggtgcaaactgtttattagaggtctgtgtctgaacaatctctttgttatcaataagtttcagaagctgctcaaaccttgtttcttaccactgttttgttgacattttgtcttttctcttttagaagtttagttagctcgtgtgagagaagggtgtaatg

SEQ ID NO: 36642 - DNA, 3000 bp, Unknown
  misc_feature (1)..( 3000): 2750-1469P.txt file - cDNA_ID_3098761; gDNA_ID_2936564; Annot_ID_194557
tgatcggcgagggttcttatggaagagtgttttatggtgttcttaaaagcggtggtgcagctgccatcaagaaacttgactctagtaagcagccagatcaagaatttctttcccaggtagatactataaagtatatcactgcattttttatcttgtacaatatcgccaaaaacagcttaacctagttcttatgtcctatgtgcaaatagtccagcatcaaaccactcccttgggaatgttctgtctacttttgttttgttactgacgtagaagcttttaacagatatcaatggtttcgagattgcgacatgacaatgttactgcacttatgggctattgtgttgatggccctctccgtgttcttgcttatgaatttgctcctaaaggatctcttcatgatactcttcatggtgagtgattaaatgtgaaccgttgcttagatatggattagtcactcaatacttaactatctagaaagtaagatacaggaggaagaaactaatgaaacgtggtgactctttggtgcaggcaaaaaaggtgccaaaggagcacttagaggtcctgttatgacgtggcaacagagagtcaaaatcgccgttggtgcggccagaggacttgagtacttgcatgagaaggtgagccctcaggttatccaccgagacatcaaatccagcaacgtacttctgtttgatgatgatgttgccaaaattggtgattttgatctgtctgatcaagcccctgacatggctgctcgccttcactcaactcgtgtgctaggaacctttggctaccacgctccagagtaacgtctttttcaagattttctttaccttgaaaagatttttttcagtttctttcattcagactaaaccatgggttacatgtcttcattcaaaaatgtttggttctcatgctctaatgttatgagtcactttttcattcacatggatttcgttcctcttatcactttttaattacccttatgtgtctattgcatctttgacgaatctatgcttacacctttttgtgtaatgtatttcagatatgcaatgacaggaacgttgagctcaaagagcgatgtgtacagttttggcgttgttctgctggagctcctaactggtcgtaaaccagtcgatcataccttaccgcgtggacaacaaagtctagtgacatgggtatgtttagtgcgatcttctctgcttctaattctggtttgccgcatcgataagagaggcttttaagaagaccaaatttataataaactcatttagtctgttgaaaattacaaaaattgggtcaaaacctcaaaagaacttggaagaaaaagccctccataattaggcctatagaattgaaacttgggatgttataacaactgaagacgctggaaaaagccagaattttgtacgaatagattaatgtgactctaaatgtttcctagaaatgagataatacggttgctcagtaataaagatgttgtgtgttgtcgtctcaggcaacccctaaactaagtgaagacaaagtgaagcaatgcgttgatgcaagactactcggagagtaccctcccaaagctgttggcaaggtattaatctcaaaattgctttcctctcattgtttcaataatgcgtaaaagatttaacttaagtgtataacttaaaagaccagtttatcttgtgagtgctgacattagaaccaacgtagcgaaacaaaacaagtgataagcgcattcatctacatgattgaaacatttcatgagtctgattttatttgccatatggtgtgatataatgatcagctagctgcagtggctgcactctgtgtgcaatatgaggcaaatttcagaccaaacatgagcattgtggtgaaggcacttcaacctcttttaaaccctcctcgttctgctccgcagactccacataggaacccctactgatcaaatattcaatcccccatatctcatcttctgatcatgatgattcatcaaatgtgtattattcattttggttctgtattgtgtaaatttatgggaccttatctcattaactcttcattctcaagtcccacttttcaagacatgtgtatgtctctcctctatatcaatatattttatgttttcctgtgaattcagaaaactcattactaaattctgatactacattttcattgagatgatgtttttgctacagatcataggaatttgcaatacatgttgctatgcgatgcgacggcgcctagagaaatctagagatctcctctgtttcagtgctttggctgcctgggggaatttgaatgtgattcactgaagctgtattttaagtatttgactcatattagacttgttccaagtaaaatagcaacaaggcaacaatggtcatctagttatttaaaaagtggttgacgatcattaagacattttcaaaattctcatctaaaatggtaaacaaccatgaaagattcgactcccaatagagagtttcaagttctctctttctctttctctcctttcctagttttttcttgtagcaaaaggtaaaccttatgcttcttcttcctctgttgcgagtttcccttttggtactttgcttaaatatcaaacaaccttttcaaaaaggatcttcctttcgagggttagaaaggagttgattgtttctaacttttcatgtttgaaatccgtatccctatgttatatctcgttgacttatgaaaattctaggtttagggaacataatgtctcagttgttcgtgtttgacaatttaattgcttgagtaataaagagagataagatcattgatcttaccattttactctcttctctttgtcttagataggcaaatcttgttttcaaaactgtttgttgtctatattatcttacactttcataagtaggagatagaagcttaaggtgctatcaaaccctttttttataccttttgtcacattttgtcttctgtactattacagttaagttagctcgtgtgagaaaagggtgtaatataatg

SEQ ID NO: 36643 - DNA, 3000 bp, Unknown
  misc_feature (1)..( 3000): 2750-1469P.txt file - cDNA_ID_3098767; gDNA_ID_2936564; Annot_ID_194556
agcagccagatcaagaatttctttcccaggtagatactaaaattaaagtacatcatttcagtttttactaaccttagcttagaccgtatatatggatcatttgtttaaatggtccagcatcaaaaccactcctttggaaaatgttctgttttatgatatagaaaactttaacaggtatcaatggtttcaagactgcaccacgaaaatgttgtagcacttatggcctattgtgttgatggccctctccgtgttcttgcttatgaatttgccacttatggaactcttcatgatgttcttcacggtgagtgtggttaacgtaaaccattgctcggataccggatcactcactcaataaaaactaacatacaagagggaaaaaactatgcaatgtggtgtttctttggtgcaggtcaaacaggtgtcataggagcactacaaggtcctgttatgacgtggcaacgaagagtcaaaatagctcttggtgcagccagaggacttgagtacttgcataagaaggtgaaccctcaggttatccaccgagatatcaaagctagcaacatacttctgtttgatgatgatattgccaaaattggtgattttgatttgtatgatcaagcccctaacatggctggtcgccttcactcatgtcgtatggcactaggagcatctcgttctcactgtccagagtaattccttttaaatatgttctctatcttgaacagtttgtttgattcagattaatctagaggctatatatagacgtcttctttgaacattttgagttatttatttcagacatgcaatgacaggaatattgaccacaaagagcgatgtctacagttttggcgttgttctgttggagctccttacgggtcgtaaaccagtagatcgtaccttaccgcgtggacaacaaaatttagtgacatgggtattgttaagcgtaatcttctttgtttctgataatggtttgcttgcaatgacaagagaagcttttaagatcagtctgtaaaaataagtaaaaaaaacttcaagaaatcttggagtaaattaaaacccttcttaggcatatagaaatgtaacttaggacgttaaagttaacaagaaagtagctggaatttgtgcaaatggataaaacttttatcataaaagtgaaatattgctgctcaatgataaacatgttgtgtgttgtctcaggcaacccctaaactaagcaaagacaaagtgaagcaatgcgttgatgcaagactacttggagagtaccctcccaaagctgttgccaaggtattaatcgcataacattgttttcctcacattgtttcattgcagcaaaaatgatttaacttagaagactagtttatctgctggcattagaatcaaagtagcgatatttgttgtccgcattcatctctctgacaactgaaacatttcatgagcctgatttcatttgctatatgcatatggtctgatacaatgatcagctagctgcggtgtctgcacgctgtgtgcattatgatccagattttagaccagacatgagcattgtggtgaaggcacttcaacctcttttaaactcttctcgttcctctcctcagactccacattggaatccttattgaccaaatattcaatcccccatatctcatctacgactacttcatgatgattatcaaagtgtattattcactttgaagtatatttatgtaattttttgggaccttatctcattaaatcttcattttaagacccacttttcgacatttgtgtatgtctatattttatcattattatgttttatgtattttgtgatgtagtttgcaatacacatcaaaataaataagcaccaaattttgtttgttcaaggtaaagtcatgagttaaaaaaaaaaaaaactcgtttctaaattctgatactacattttaattcagagattataataggaatttgcaatacacatcaagatatataaaaattaacagaatttactcactgttgttagtgagattataataggaatttgcaatacacatcaaactaaataaaaagtaacagaatttactccaaattgaaacagaatttactgtgcgagacaacaaaaaatttattataacagaatctaatccaaattgaaacatcaataaaatgattttttttttttttcaattttttgtttgatactttttaaaaataacatttaagtcctcgtcaatgcacgcatcaaatttgtattatacggtattatctaataatatttcgtattaaatacgtatataattttgattttgaaaagttgagatatatagttttggaacataatgggcccattaattctaattatttcataactaatttaaaaatatgctgaagtaagtcccccgtcaaggacataaaaccataaccgttagatcaaagatttacgtcctgcaaattcatctccaccgtcgttagtttcaccaatttcattatttctcttatttaatattcttttcttaataataaatctctctcttcttccgatatgcagagagcattatatgcacacagtagcaaagctctctccaagtttctgactcacttcacctgcttcatcgattcgccattgaagctcttacgcatttatcatcggcaaaacttcttggagttatcggaaaagtttcttcatcaacggtggttgaagtatctgatccctctcgctatgttaaactagattcgaacgtttgttcccaaagccgagattcgcatttcggcttctcatttcgaggtaatggtttctctggatctgatttgtgatctatcgatttctcctttagtgattttaggatttttgggggtttttgtgtgtgtaaacttaaatctgaagtttccgattgattttgttttggatttcagatttcgtttatggaatctctggatcttatgttgtgtgtgggattatacttccctatattgtaactatcgaaagaaaactgcatctacggtgattgcggagaggagaaaaaaatg
